United States Patent Application Publication US 2008/0034453 A1 - sequence listing, part 9

SEQ ID NO: 74345 - DNA, 277 bp, Zea mays
cgcaaccgcacagagaaaggggaggaggctctctacccagcgcacccgagcacccctccccccccggatcgggacccctgctctgcgcaatccacccatggcggaggaatcaggccgccccttgccaaaatttggcgattgggatgttaatgatccagcttctgcagacggattcactgtcaaattcaacaaagccagaggtgagaagaagggtggggaagggacaagacactgagtcaaccttccaaggaccccagactgaagagggtggaatcta

SEQ ID NO: 74346 - DNA, 269 bp, Zea mays
ggcatcataaaaacatagtacaagattaattcaaaaaccattcgaattcaacagtgcttgacaggacccataacaacatgatataattaaacccaaactacgcgtcgccaaaagagatacaggtgttctgttccaagaaactactaccattgcaacaaaacaaaacaaagcaaaaaggattatcacctagcaagacttcgcattttccttcccgacagaagggagggcatcttacgcctgctggtttgtagacgtaagtgagggcacac

SEQ ID NO: 74347 - DNA, 301 bp, Zea mays
caaactaaaccaattttccgtaaaaaggccaagaccacaaagaagattgtactcaaattggaatgtagtgaatgcaaataccgcaaacaagtctctttgaaacgtaccaagcatttcgaaattggtggtgataagaaacgcaagggtcaaatgattcagttttaaactgtttcacattttagaccaatcattcttttttttgtcattcatatttgctccatctctacccactgtttataaggaaaaattggataattgggcacgtataacaatcaactattacatcaaagatttttttaat

SEQ ID NO: 74348 - DNA, 292 bp, Zea mays
gtcgtcggcctctgcacccagcgcagcatctccccctggatcgtcaccagcaagttcaacatcctcaccgtcctatacgccggcatcgtcggctgcggcgtctcgttcgtgctggtgacatggtgcatcgagaagagaggagccgtgttcgtggccgccttcataccggtggtgcagatcatcgtctctgtcatcgacttctccatcctgcacgagcagctctacctcggaagcgtgctgggatcaatgctagtgataggtggcctttacttctgctgtgggggcagaggca

SEQ ID NO: 74349 - DNA, 260 bp, Zea mays
gttgccgacgtgtggtcgtgtggggtaaccctctacgtgatgctggtcggcgcgtatccattcgaggacccagacgagcctaagaatttcaggaagacgatccagagaatactgggcgtgcagtactcggttccagactacgtccacatatctccggaatgccaggacctaatctccaggatcttcgtcggcaacccgtccaccaggatcaccatgcccgagatacggagccacccttggttcctgaagaacctcccggc

SEQ ID NO: 74350 - DNA, 278 bp, Zea mays
cggctcgagcgggcgtggcctttgagagctccggtaagagacggccgcgttccgtcgtggcaggagctggcggctgatgtagcttcgacttccagtggagttccgtgtatgagcgatgaggttgcgacagcgtggctaaacaacaatagcgtcagatccgctatccatgccgaaccagtcagttcaataccaccctgggaattatgcacggataaactggattttgatcatgacgccggcagcatgatcatctatcacaagaacctcacgagtcaggg

SEQ ID NO: 74351 - DNA, 271 bp, Zea mays
ggagtataataatgagattgcaggaagcgatgatgaagatgatttatcgaagatggatatgggtggacgggcaaagggccgtcttcacaggtgggactttgagactgaagaggagtgggccaagtacaacgaccagaaagaagccatgccataggctgccttccagtttggggtgaagatgcaggatggacagaagacgaggaagcagaacaaggaccagaagctcactaatgacctccacaagatcaacaagatcctggctaggaagaag

SEQ ID NO: 74352 - DNA, 272 bp, Zea mays
gacaaatcatattctgctctcatatatggcacatctgctcttgttgcaatttggatatcatcaattgtggtttctgcacttgattcagtccctttggttcctcaagtgatggaagttgttggtcttggcttcacaatttggttcacatcgagatacctgatatttaaggtgttgctaggtacaggcataggcgtccaagcgccaaaagttcctgggcgctgctgccttggccttgttgcttagggcgcccgccttggcgcattaggcgttga

SEQ ID NO: 74353 - DNA, 269 bp, Zea mays
cctaaccgtcctggttacttagcaccatacaaaggtgaaagatatcacatgcctgaatggcatagaggtatggaaccaagaactcctaaagaaaaattcaatcgtgttcattcgtccatacgtaatgtcatcgagagatcattcggagtactaaaaatgaagtggcaaattttatacaacatgcctccgtactccatgtacaagcaaaaaatgattgttgttgctacgatggtccttcataatttcatacgagagcataggatagaaga

SEQ ID NO: 74354 - DNA, 268 bp, Zea mays
cgagaaggcgcacacgaacaagggcgcgtggaccaaggaggaggacgaccgtctggtggcgtacatcaaggcgcacggcgaggggtgctggcgctcccttcccaaggccgccggacttgtgcgctgcggcaagagctgccgcctccggtggatcaactacctgcggcccgacctcaagcgcggcaacttcacggaggaggaggacgagctcatcatcaagctccacagcctactcggcaacaaatggtccctgatcgctggaaggctg

SEQ ID NO: 74355 - DNA, 308 bp, Zea mays
gattcgcatatacgtgtaggtgagatcgggattcaggtcgagaaacaacaatagtgtacaggcttgacatgagatataggtctttcaacagtacctacagtcggttttaatgtcgagaaggttcagtataagaatgtggcattcactgtgtgggatgtgggtgggcaagaaaaactcaggtcactgtggaagatgtacctgagtaattctgatgaaatgatttagtataattgtagatctatgtggttgattctatggacagagagaggatcagagacgcgaggtaagagttccaggatctgagagga

SEQ ID NO: 74356 - DNA, 266 bp, Zea mays
aatcgataattgatgatgtattgaagaacagagttttgaaccatggagcagtttggaagttttacatgactggaaaaaaaaagggagatgggattgtagcttttatgagcactgctactagtaatgttcacatagcatggctctgtaataatactgttgatcaccacatccacgagatactggcaatccggttgccaacgaggaggcagcctcagacaagcacctgagctgcagctagcctagcaatcggaaccctgaaaggggag

SEQ ID NO: 74357 - DNA, 265 bp, Zea mays
gaacggttgatgatcgcttcaaggatccttcgagtttggagtgtgtaaggtttgtgaatcaaatagctgtagagaactggcaaaggtttacagcagaagaaatgagtacgttacaagggcacctcctcaagtacccagttaaggttgaggctgatggtaagatcagcccactgtcagaccatgccggctacactgatgttgggggcaagattctgggagctccaacttcacttcctgattcactgactatgtagtgttattacat

SEQ ID NO: 74358 - DNA, 267 bp, Zea mays
cgaagactcacgaggccatacaatacttggagaagtcaattgacacactgcagatggagctggcagcgaacgcagcatcaacgagcttcacggggaaagtacaggtggtggcgtaagtaagcagaggagaagggtgttcgtggtgatcggggtcaacaccgccttcagcagcaggaagcgttcatattccgtgagggagacctggatgcctcaaggtgagaagctcaagaaactggaggagaagggatcgtcgtccggttacgatag

SEQ ID NO: 74359 - DNA, 267 bp, Zea mays
ccgtcggccgactccagcgagcgacttcgccccggtcggaagcaccaccagccaccagcgatgtctggcgaggaggaggagaacgccgcggagctcaagatcggcgaagagttcctcaaggccaagtgcctgatgaactgcgaggtggcgatcatcctggagcacaagtacgagcagatccatcagcacgcgtcgtcggagtcggacccgtcgtcgcaggtgtcgcaggtgttcgagaagtcgctgcagtacgtgaagcgcttcagc

SEQ ID NO: 74360 - DNA, 265 bp, Zea mays
gcgtggcctactccgtccagctcctcggcatccgcgtcggcggcaagcccctgccgatcccgccgtcggttctcgcgccggaccacaccggcgcagggcagacgatggtggactccggcacgcagttcaccttcctcctcggggacgcctactccgccgtcaaagccgagttcttgacacaaacgaagccccttctccccgcgctcgaggaccccagcttcgcattccaagaagcgttcgacacctgcttccgcgtgcccagggg

SEQ ID NO: 74361 - DNA, 269 bp, Zea mays
gcagcagcccctggggtcgctgccgctggtgcacgtggacgacgtctgcgacgcgctcgtcttctgcatggagcggcgcccctccgtcgccggccgcttcctctgcgccgccgcgtacccgatgatccacgacgtggtcgcccactacgccagcaagttccctcacctcgacatcttgatagagacgacggaggctgtggcgacggtgcggcctgcccgggacacgttgggcgaagctgggcttcaagtacaagtacggcatggaagag

SEQ ID NO: 74362 - DNA, 265 bp, Zea mays
aaacaacaatactgtacaggcttcacatgggagatgttctttcaacagtccctacagtcggttataatgtcgagaaggttcagtataagaatgtggcatccactgtgtgggatgtgggtgggcaagaaaaactcaggtcactgtggaagatgtacctgagtaattctgatgcactgcttacataatattgcagatctatgtcgttgattctctggacagagaaaggatcagagacgcgaggcaagagttccaggacctgagaggc

SEQ ID NO: 74363 - DNA, 254 bp, Zea mays
agaagccatcctggcatccttttaagatggttgaggttaacggagaatataaggaaattctggatgacgatgacacaaaactgaagttcctgtggatcgagtacggcgatgatgtgtgcaatgcggtgaagaccgcactgatggagattaacgagtataaccctagcgggaggtatgttgtgcaggagctctggaacttaaggaaaggccggaaggagacggtgaaggaggtgctcaagtacctgttcagtcag

SEQ ID NO: 74364 - DNA, 249 bp, Zea mays
gagaaacccgtgggcgagttgacatatgcaagggttaagtgctacatatgtcgtgtggttggagatccccagctgggtattaatcgattcggatcgccgttacttctcggatatgaagactgcatggtttatagaagctgaggtgtttctaaagagtccattttatgctttaatatctagaaaccggattcccaatttctaagaaatcaataagccagccttacctgaattcaaccagttttttgtcca

SEQ ID NO: 74365 - DNA, 244 bp, Zea mays
ggctggcgccgccgggcggggcgtggcagtccaacgacggcacccacaccgcgggcgaccctgtgatgcacgactaccggagggcccggtaccttgccttcttctacagcaactccacctccttcgtggcgtccgtggtcgtcgtcgtgcttctgctgccggagtcgctgcacaagaagtggtagtggctctaggtcatgaacgcgacgatcgtgctggacctgctgggcctcttgatcgccta

SEQ ID NO: 74366 - DNA, 245 bp, Zea mays
cggcggcaaagatcaccgcgagctgcaggcgcacacaccaccgccgacaccgaggagctgctggcagcccaccgcgagctttggagccatgccctgggctacgtcaagtccatggcgctcaaatgcgcattggaccttggcatccccgataccatccaacgctacggcggaggcgccaccgtaggcgaactcgccgccgccagcaacctccccgcatccagcctccccttcctgcgtcgactcat

SEQ ID NO: 74367 - DNA, 244 bp, Zea mays
gttgatgacgtgaaactaagagaagcatttagcagctttggagaggttactgaagcgagggtgatcacagacagggagactgggaggtcaagaggctttggctttgtgaactactccgacagtgatgctgccaaggaagctatttctgcaatggatggcaaggaaattgatgggcggcaggtacgtgttaacatggctaatgagagacctgctgggaaccgtggtggtggtggctatggcggcg

SEQ ID NO: 74368 - DNA, 270 bp, Zea mays
gtacggaagaccggacttcggctcgaggcaggcgcagaccctgtcggactcgagcaagcaggcgtacatgcgcggcaagacggtgctcgagatcaaccccaggcaccccatcatcaaggagctccgcgacaaggtcgcccaggacaacgagagcgaggagctgaagcacacggcgaggctggtgtaccagacggccctgatggagagcgggttcaacctccccgaccccaaggagttcgcgtccagcatctacaagtcggtgcagaaggg

SEQ ID NO: 74369 - DNA, 244 bp, Zea mays
cacactacagagcttggtactgacagatgctgatggccaaggcacattgtgcatgggggcaaagcagctggaggagttcagagagaaccagttgtcggcctcggcatgttccaacaggactcaggtcccagcctgcaacatgaagctcaagtacgctccatatgttgaactgcctggtggtatggcgttgcaaggcgctactttggtggctatcaaaccctcacctgagggaagcaatggaagc

SEQ ID NO: 74370 - DNA, 248 bp, Zea mays
gcaagattggtaacaataacatctttgctaataatactctatttgctggtcacgtaattgttgaagattggactcacactgcaggggctgttgttgtccatcaattttgtcatattgggtcatactcatttcttggcggaggctccgtggttgcacaagatgtgccaaggtacatgatggttgcaggtgatagagcagaactccgtggtctaaatattgaaggtctcatgcgcaatggattctccgac

SEQ ID NO: 74371 - DNA, 250 bp, Zea mays
gcgtggcctactccgtccagctcctcggcatccgcgtcggcggcaagcccctgccgatcccgccgtcggttctcgcgccggaccacaccggcgcagggcagacgatggtggactccggcacgcagttcaccttcctcctcggggacgcctactccgccgtcaaagccgagttcttgaaacaaacgatgtcccttctccccgcgctcgaggaccccagcttcgcattccaagaagcgttcgacacctgctt

SEQ ID NO: 74372 - DNA, 265 bp, Zea mays
gttcaggggcaagcaggcgatcatggccattggcgttgacgaggagcccgacaaggacacgctggagaagatcggggccatcccggcgatcgaggagttcgttttcctcgaactatgatggctagcagcgagttttctctaggattgatatttgttatagtacgtactgaactggggtttgactacttatgtcatggccacagggaggaacctgatccgctctggtctgtctgtctgtctgtctgtttggtgacctctacatttt

SEQ ID NO: 74373 - DNA, 260 bp, Zea mays
gagagagagacggaaagggggagatgagccggagcctggggatcccggtgaagttgctccatgaggcagcgggtcatgtggtgacggtggagctcaagaccggcgaagtgtaccgggggtccatggtcgagtgcgaggataactggaattaccagctcgagaacattaccttcaccgccaaggatgggaaggtttcgcatcttagtaacgtcttcatcagaggaagcagagtgagatttatgattatacctgatatgctc

SEQ ID NO: 74374 - DNA, 251 bp, Zea mays
ctcgagccgtaaaattttatttcatgtctaaacatttagaagtaaattaaatctaatcatgttgcgaaccgctgtcaactcaataaacacaattgtttttcgttctaataaattaggacttttgagttgtcgatcgaaacatactttaccagacttgccatatgattacaatgctttagaacccttcatttcggctgaaataatgcaattgcaccattcaaaacatcatgcagcctatgtaaacaatttaa

SEQ ID NO: 74375 - DNA, 248 bp, Zea mays
aagaacaatggcatcaagtggcgcgggaactctggcctgtcagacggctccgacgccaaggacgtcaagggtggcctcgtcggcggctactacgacgctggcgacaacatcaagttccacttcccgatggccttctccatgacgctgctgagctggtcggtgatcgagtacagcgccaagtactaggccatgggggagtatgaccatgttcgggagcttatcaagtggggcaccgactatctgctgct

SEQ ID NO: 74376 - DNA, 212 bp, Zea mays
ggcgcccatactgaagaaggctatcgcgaaggaaccacgggtagctgcctcccttctcaggctcctgttccatgactgctttgtccagggctgcgatgcgtcggttcttttggatgacgatgaggaagtcgtgagcgagaaaaacgctatccccaacaaggattccattagggggtttgaggtctaaacgagatcaaagctgcactcgagga

SEQ ID NO: 74377 - DNA, 246 bp, Zea mays
agctggccctggccatcgaggccggcaagatcagccctcgtgatgatttcaaggctcgtgcccgtgtcctggctgacgacttcggctgggatgtcactgacgcccgtaagatctggaccttcggtcccgatggcactggtgccaacttgctggttgaccagaccaaggccgtccagtacctcatcgaaatcaaggactccgtcgtctctggtttccagtgggcttcccgcgagggtcccattgctg

SEQ ID NO: 74378 - DNA, 245 bp, Zea mays
gcagcaactgacccctgctcattgttttggtttatttttcatctaaattaagatctattaatttataccaacataatggataaggttactcttgcccgcgttactaaagttcttggtcgcaccggttccactggtcaatgtacccaagttaaagtagaattcattggagaaaataacagatctttgatccgtaacgtcaaaggaccagtccgtgaaggagatgttcatcatttgttggaatgtga

SEQ ID NO: 74379 - DNA, 273 bp, Zea mays
ctagagagaaccggcacagccgccgcagtccgcagatgtcgatcgtcgtggcatcggaggtcgcgaccgctctcgcgagccgcggcgcggtcgtcgccctcgagtccaccatcatctgccacggtatgccgtacccgaagaatctccagatggccatggaggtggaggccatcatcagggacaacggggctatccctgcaaccatagccgtcctggacggagtcctcacgtcggccttaacaacgaacaattgaagagattggctataagtgg

SEQ ID NO: 74380 - DNA, 285 bp, Zea mays
gcggagtgattctcttcgtgctcgtggctggttacctgccgttccacgacccgaatctcatcgagatgtacaggaagatctccagagctgaatacagatgccctcgctccttctccggtgagctgaaggacctgcttttcagaatgctcgatccagatcccagtaccaggatatccatttcaaggatcaagagaagcacttggtacagaaaacctatcgaggcaaacgcggcaaagtcaagcacggcacagcaagagacaccaccgtgcgcgacggtgaagccgc

SEQ ID NO: 74381 - DNA, 268 bp, Zea mays
cctaaccgtcctggttacttagcaccatacaaaggtgaaagatatcacatgcctgaatggcatagaggtatggaaccaagaactcctaaagaaaaattcaatcgtgttcattcgtccatacgtaatgtcatcgagagatcattcggagtactaaaaatgaagtggcaaattttatacaacatgcctccgttctccatgtacaagcaaaaaatgattgttgttgctagatggtccttcataatttcatacgagagcataggatagaaga

SEQ ID NO: 74382 - DNA, 271 bp, Zea mays
ttcgcatccaggatgatactttgactgggaacgcatcgtccgtggacatcgccaccaaggagaacatggagtctctgatatcgatcggccaggagctgctcaacaagccagtggcgagagtgaacatcgacacagggctgtacgagtcctgcgagggtgagggcacaaatgcacagtcgctagcttggcttcgccaagcagctctctgacgagcgcaactacgcaaagcaatctcaactccaactaataaatacctctcggtcacagcatg

SEQ ID NO: 74383 - DNA, 269 bp, Zea mays
ggtgctcggtgaccaccagcgagggcattggcaacaccaaggatggctaccaccctgtgcagcagcgcctctccggcttccacgcctcccagtgcggtttctgcacgcccggcatgtgcatgtccatcttctctgcgcttgtcaaagccgacaaggcggccaaccggccagccccaccggccggcttctccaagctcacttcctcggaggctgagaaggctgtcttggcaacctgtgccgctgcacagggtacaggcccatcgtcgacg

SEQ ID NO: 74384 - DNA, 274 bp, Zea mays
gaggcctagggcatctatctgtgacaaaggctggctacttctctgcacaagttgaggacagcacaaacacacataacagacatgtagtaaagtcatatttgcatgagtgtacatgcctcgagtggcagcacaccggcaaaccatgcccacatgcattggccctgattacagcacaagagagtgtgtttctggaattggaggattttgtgcatgagtactactcagtacagaggttcaaaaatgcatataagagaataattgagccactgccaga

SEQ ID NO: 74385 - DNA, 274 bp, Zea mays
gtgatacttgcgtacaggggtgtggcacttcgatcagatgctgcttgaggaagaggcctaaaaagaagaacggacagatgaatgaaggaaacaagtgtgtaatgttgatcaggcggaggaataataatgggtcaactgacaactctgggtcggtggatttgtagttggtttgggttttttagttgtagaacggtgttgccctcctagagagggatgaacacattatgatgcgatgtgtcagttcggtcggtgctatgctcgttgggatttgatt

SEQ ID NO: 74386 - DNA, 276 bp, Zea mays
  unsure (1)..(276): unsure at all n locations
gagagagagacggaaagggggagatgagccggagcctggggatcccggtgaagttgctccatgaggcagcgggtcatgtggtgacggtggagctcaagaccggcgaagtgtaccgggggtccatggtcgagtgcgaggataactggaattgccagctcgagaacattaccttcaccgccaaggatgggagcgtntcgcaactggagcacgtcttcatcagaggaagcaggtgagatttatgattatacctgatatgctcaagaacgctcccatgtt

SEQ ID NO: 74387 - DNA, 269 bp, Zea mays
cttcaccaccatcccgaggttccgcctctacatgatcctctcctacaagctgcctctcgagatgttgcacatggcgaatctgctgctctgcggactcttctccaagttgtacaaggactccaaccgcaagtacaagtttgtgatgcatctcgttgacgtctacgggcccttcgccttcttcaaaggatgctttgacgacacgaacatggagcgcctgcggtcgcgatggtgatgcgcaccctgaagatgacatgttcaactacgatccc

SEQ ID NO: 74388 - DNA, 268 bp, Zea mays
ctggtggctacacttcctattccaccaatgctgctgcaggtaaccatctcttgtaatggccggccgatcgatcgatcgagagctcaacaattcaagtgtcctgctatagctagctactacgacgtcgtgctacgatcgtatcggttcgtttcctacaaatatagcctagagatagagtgtctctgtctgtgtgatcgatggtattgttatgatcatatagaaagaccagtagcatgcatgcacttgttgcaatgtttgctttcaagaa

SEQ ID NO: 74389 - DNA, 278 bp, Zea mays
ctttcacgaagtaacgccacactaacccttcagacaaaatggccaagatctcccgtggtgcccctggtggcaagctcaagatgaccctgggtttctctgtcggagctgtgatgaactgcgccgacaactcaggtgcccgaaacctctacatcatcgccgtcaagggtatcggtgcccgcctgaactgattgccctccggtggtgtcggtgacatggtcatggccaccgtcaagaagggaaagcctgagctccgaaagaaggtccacaccgccgtcatc

SEQ ID NO: 74390 - DNA, 280 bp, Zea mays
atccgatcctttttcacttccgcaacaagactcagtcccgaagcaaaaatggccaacgtcaaggaagtccagcgcatcatcaacggcaacaacgtcgtggtcttctccaagacgtggtgcccctactgcaaggccgccaaggccgccctcaacgagagcaaggccaactacgaagtcgtcgagcttgacaaccgaaacgacggtgacgacctccaggacgccctcctcgagatctccggccagcgatccgtccccaacatcttcttcgcccagcagcacg

SEQ ID NO: 74391 - DNA, 265 bp, Zea mays
tgtaagtgaacttcaccccagagtgagcatcaccccgccgtgtgcaatgtagatggaagctgctcataggcctcgccaagcacgagtcccacctgtcgctctccggcatagtctcggcgacagtatacacgcccttggagtttgtgaaggcttgatagttgataacctcaccagattttgtgatgcagaggacagcaacctccgcaccttcgagggcgtggtcctccgggccgatggctgcgtcgccgcagacgtcgcagacgac

SEQ ID NO: 74392 - DNA, 277 bp, Zea mays
cactcctccactagtcccctgtccggctgtcccctccttcgtgtcggagcctgcgcctcggcttgtccccaccaacccgcagctcgctcccaccaaacccacacccgaacaatggcgtcggcgtccaaggaggaggtgatcgggaagctcaacatccgcgtggtgcggggcaacaacctggccatcgccgacccgctcacccacaccagcgacccctacgtcgtcctccagtacggcgctcagaaggtgaagactagtgtccagaagaagaacccca

SEQ ID NO: 74393 - DNA, 267 bp, Zea mays
gagagagagacggaaagggggagatgagccggagcctggggatcccggtgaagttgctccatgaggcagcgggtcatgtggtgacggtggagctcaagaccggcgaagtgtaccgggggtccatggtcgagtgcgaggataactggaattgccagctcgagaacattaccttcaccgctaaggatgggaaggtttcgcagctggagcacgtcttcatcagaggaagcagagtgagatttatgattatacctgatatgctcaagaacg

SEQ ID NO: 74394 - DNA, 268 bp, Zea mays
gtgagtctgagcttatccaggagaactaccttggtgtgagaaatgcagcacagaggaagctactggatgagctgggcatcccagcagaagatgccccagttgaccaattcacccctctgggccgaatgctttacaaggcaccatctgatgggaaatggggggagcatgagctcgactacctgctgaacatcgtccgggacgtgaaggtgcagccgaacccagatgaagtcgctgatgtgaagtacgtgaaccgcgaggagctcaagga

SEQ ID NO: 74395 - DNA, 266 bp, Zea mays
ggatgaagaatcacatattactacaatagttgcaggaacatttggctaccttgcaccagagtatatgcaatttggcagagccaccgagaagactgatgtctacagttttggggttttggtactcgaaatactcagtggaaagcggcctactgatgcatccttcattgagaagggactaaacattgttggatggttaaattttctggctagtgagaaccgggagagggaaattgtcgacctgaactgtgaaggagtgcagactgaga

SEQ ID NO: 74396 - DNA, 273 bp, Zea mays
agcacgagcacgctcctcctcgggccgtcggcgtcgctcaacggcaccgccggcgtcagcaccacgcctttcgtcgccagcccttccactgcgcccatgaacaccttctactatctcaacctgaccggcatatccctcggcacgacggcactgtccatcccgcccgatgccttctcgctcaacgcggacggcaccggcgggctcatcatcgactctggcaccaccatcacattactgggcaatacggcgtaccagcaggttcgggcagcggtt

SEQ ID NO: 74397 - DNA, 264 bp, Zea mays
  unsure (1)..(264): unsure at all n locations
cgccgacaagcccaactacgtcaattaccacgagcagctgctccgcctggtgcgcgtcggcggcaccatcgtgtacgacaacacgctctactccgggaccgtggccattccaccgtcagacgcccacgtcggacatcgacaggaggttctcggccgccatcagggacctcaacgtaagnctctccgcggacgagcgcgttgaggtctgtcagctcgccatcgccgacgtgntcaccatttgccgccgcctcgtctgatggagtc

SEQ ID NO: 74398 - DNA, 263 bp, Zea mays
gggcgatcatgaaggcccatgacctggatcagtggtccacattgcacttggtggacacgctggtctaccatctccccaagtgggagagtggacgtcataatttgtgctagagggggtacgcgttcgcgcagcccctaccagttttaaacatttacttttgggaccttggcgggtttattatgttatgtgggacttactcatctagtgcaaaaaaataaaattaaggtctcgttaaataaaatctagtctgggcgactattaaa

SEQ ID NO: 74399 - DNA, 267 bp, Zea mays
agttcttccaaggatggaatgactaggaaagatgatccagatgactatgtagtggtagacccacttctggagaaaggaaaagaaaaattcaacaagatgcaagcaaagcttaagcggagagagcgcgaatgggcaggcagatctctcacctgattggaaagcttaactcaaattatgtcaatgctccttacgtccttacctaccctggacggttggaaacactggaaatgatgcagttttggcatggtcttgggactgcgcgcagat

SEQ ID NO: 74400 - DNA, 159 bp, Zea mays
cgaagaagatgcgccagaaccgccccatcccctactggatccgcatgcgcactgacaataccatcaggtaccacgccaagcgcaggcactggtgccgcatcaaactctgcttctgcacgtcgggatttgccggctgctacgtctgaacgctaaggtcta

SEQ ID NO: 74401 - DNA, 260 bp, Zea mays
cgactggtgttccccctctctggaaccggttctgttggtgccaccatccgtgtctacatcgagcagtacgagagggactcctctaagaccggcagggattcacaggacgcccttgctccgctggttgatgttgcgctcaagctctccaagatgcaagagtacactggacgctctgcccccaccgtcatcacataaattttgaagagtgttttagaatgagttgaggcgcttacacaaatttcatccggcctcttgttcca

SEQ ID NO: 74402 - DNA, 286 bp, Zea mays
gtacaaactgcgagttcttgcacaaaattatcctgatacacctggactggctatcaaagatttttggcaggtcgatgagcgtactattgtttttgttgctgatccaacctttggtaacataataaattttaacattggtccattagttgatttagacgtccctcggagcttttggagtcaggtttcagggaagtatgggaacatgttctactggaaagaaaagggagaggacgcctcaattgaagctgctgtgacgtcaatatctcgttgtctaaggaaccccgcc

SEQ ID NO: 74403 - DNA, 281 bp, Zea mays
cggctcgaggggcgatcatgaaggcccatgacctggatcagtggtccacattgcacttggtggacacgctggtctaccatctccccaagtgggagagtggacgtcataatttgtgctagatggggtacgcgttcgcgcggcccctaccagttttaaacatttacttttgggaccttggcgggtttattatgttatgtgggacttactcatctagtgcaaaaaaataaaattaaggtctcgttaaataaaatctagtctgggcgactattaaaccataaatt

SEQ ID NO: 74404 - DNA, 278 bp, Zea mays
gggagactgggagacagagagaggagagggagggtttcctcaaagagaacccgaacccaaacccaagcagaaaacactagcgtttcctcaccagggcgtccatcccagcagccatggcgatggcgtacaagatgccgacggaggggatgaacgtgaaggaggagtgccagcgctggttcatggagctgaagtggaagaagacgcaccgcttcgtggtgtacaagatcgacgagcggtcgcgcgccgtgctggtggacaaggtgggcggccccggggaa

SEQ ID NO: 74405 - DNA, 278 bp, Zea mays
ctcaatgaagcggatggtcaaggagcacgcgctggtgcgcacgctctcggcgtgcgagaccatgggctcggtaaccgccatctgcaccgataagacgggcactctcacgcttaatcagatgaaggtgacggagttctgggtcggcaccgaccgacccaaggcggcggccacggtcgccgccgccgtcgtcagttttctgctccagggagcagggctcaacaccaccggaagcgtgtacaagccggacaacgtctcgccaccggagatatcgggcagcc

SEQ ID NO: 74406 - DNA, 281 bp, Zea mays
tataagtgctacaaatggagtacggttccaaaagaagaatttgagacgcttcgtgagaacttcactaaggatccatggttctgcagcagacgaccagacagctcttgtgaagacgatgctgacattgagtacgacagcagccgcatctgggttttggacaagcccaacataccaaagcctccaccagagacggagaggctagtcgttatgaggggcgactacagcaaaatggacacatattatgtcatgcccaatgggaagcgtgcaaggtgtgctggtga

SEQ ID NO: 74407 - DNA, 277 bp, Zea mays
gcttcgtcgccgacaaccccggcgtgtggatcatgcattgccacctggacgtgcacctgacctggggtctggcaatggcgtggctcgtcaacgacgggccgctgcccaaccagaagctgccacctccaccgtccgatatccccaggtgttgatacaatcacgagacattagtctgcagtggttttgatccgagcaaagctcaatgcacgcgcacatggcggaaccgactcaaatcgattggcctgtgcaacgcgaattttgtgatgatgtctggttt

SEQ ID NO: 74408 - DNA, 281 bp, Zea mays
tgaaaataagccggtactttatggatattttaaatcctctgctacatggagggttaggattgctttagaattgaaaggtgtagattatgaacaaagatttatcaatttattaaagaaggaacagctttctgaagaatacaagaaagtgaaccctactcaaaaggtaccttcttttataacaaaagaaggtaaattgttaactcaaagtcaagccattattgaatatcttgataaggcttatccaaatgaacctttccttccaaaggatcccactgaagaag

SEQ ID NO: 74409 - DNA, 276 bp, Zea mays
ccaaggactgcgacaccgtccaaaagtgctacatctacctctctggacaagtgaaggagaagctgggcacgattgacccctactttgtcaagctcggtgacgccatggtcacctggatcgaggcctgggatgagctgaacccgtcgacccctgccgccgcaaatggcaaggccaagtaatagtgccatcacttcggcactggagtgaaaaagaaagtatgattgggtcctgcctaggccccatagatatagctcttttttgagaaggaagagagat

SEQ ID NO: 74410 - DNA, 271 bp, Zea mays
acgcaagacacctccagaggacaatggtccccgcattgttggtgaaggccttgtgattgacgaatggaaggaacgaagagagaggtaccttgctcgccagcagatcgaaggtgttgattcggtgtagacacgaggcagccctgtaaactatgcagaatgaacataccgttttatgggcacgcactctatatgtcaaatggatttggagcttgattttgcgaaggttcggatttggagcaatcaagcaacaatgaggcttttgtgtatttgg

SEQ ID NO: 74411 - DNA, 272 bp, Zea mays
ttggggtgttctggatgatgatgatgcgactggacttcgctcgcatactctctccatccttgtgaatgactgtcctggtgtcctatgcattgtaacaggagtctttgctcgcaggggctacaatatacagagccttgctgttggctcagctgagaaggaaggcatttcgcgtattacaacagttgttcctggtactgttgaatccattgagaagttagttcagcagctttacaagcttattgatgtgcacgagttcatgacattacccactc

SEQ ID NO: 74412 - DNA, 274 bp, Zea mays
cggcgaccgaacctctctcccaccacacccaagtcgatcatctgcgaaaatggattcctccaaggcccccgtcaagctcgtcaaggtcacccgtgtcctgggcagaaccggttctcgtggtggtgtcacccaggtgcgcgtcgagttcatggacgacaccactcgctccatcatccggatcgtcaagggccctgtccgtgaggaggacatcctggttctcctcgagtccgagcgcgaggcccgccgcctgagataaagaaggggttgttggggg

SEQ ID NO: 74413 - DNA, 274 bp, Zea mays
cgcacctctcaccaaatatcagctgatcagagtcagtgcaaaaggcatgaatgatggctgcaaatgggtggaaatgtttgaagatgtccgcatggtaatattctgtgtagcactcagtgactatgaccaattgggaccccctgtaagtggcagcagtcggcctcttgtgaacatcatgatgcaaagcaaagagttgtttgaggctacaatcctgcagccatgcttctgcgatactccatttgttctggttctgaacaagtacgaccttttcgag

SEQ ID NO: 74414 - DNA, 172 bp, Zea mays
gcatttattggcggggtgatagcagatcacctgtcaaagtacttcccagattcggcacgggtcatgtgtgcccagtttagtgccttcatgggcatcccgttttcttggatcctcctcacagtcatcccccagtcagttgactacttgtatgccttcgccgtcacgcttttct

SEQ ID NO: 74415 - DNA, 249 bp, Zea mays
ctcatgatgctcggtcttgctattgagcttcgtctgcagtctgaccatattgtagcctcctcgctcattgagctatactgcaaatgtcgtaactatggcaatggacgcacgatcttcagtggtattgctaatccagacgaagtcactgtggaactcaatgcttataggttatgcttctaacgggtatggactcgaggcactaaaacttctagttttaatgcaaagtgggggtctgaagccaagcgagcg

SEQ ID NO: 74416 - DNA, 254 bp, Zea mays
gcaggttgagctttctcgtgcaaaaagattagcccaaggccatcatataaaggttgaagtcagtactacaatgccgatccaagttgatggagagcaaaagagccaggagccgggaaccatagaggtttctcatcatagccaggccttcatgcttaagagagtctccgaagaacggctgggtcatgccgcttcggtaatggccgacatcttgaaaaacgctgagagcagtggcattatctcagccttgcagaaga

SEQ ID NO: 74417 - DNA, 263 bp, Zea mays
ggacggtaagaacctgtgctctggggagagttttgcggactgccttaagatcctcaacgcgagcgagaaggtggccgttgtaggcgtgaactgcacacctcctcagttcatcgagggcatcatatgtgaatttaggaagcaaaccaagaaggcgattgcagtttacccgaacagcggcgaagtttgggacgggagagcgaagaggtggctgccggttgagtgcttgggtcacaaaagcttcgacgctctcgcgaagagatggc

SEQ ID NO: 74418 - DNA, 267 bp, Zea mays
tataattacaaaataactaaacattaacagagacaagtctaacatccatgtccaaaggttccaacgcttacgactttttggctaaagtcctcatcattggtgattcaggtgtcggtaaaacttgtcatctccctccgttctgtgagaataactttactacctcccacttagccactattggtattgatttcaaatgaagacatcgaagttgatgggaagaacgtcaaggttcaatctgggatactgctggccaagagagattcaaga

SEQ ID NO: 74419 - DNA, 264 bp, Zea mays
cagcaactcggagcatctgcacctggggtccgggtcccacgagcagcagcgcggcggtcgcagcgacgtcaaccatccggaggaggaagaagacgacgacgacgacgacgagccggtgtccgactccagcccagaagagtaacgcaccaccgtacgcccagaaagtccaaccccaaagcttaggttccttatgctctaatttaatcgctccccctcgttttcccccctttcgcaatcctccttatgatgaactacatgatgctt

SEQ ID NO: 74420 - DNA, 263 bp, Zea mays
ggccgtgtcgtgtcggtttgctccgcgtacggcgctggccgttgcatcgcagggcccagcggttgcgcaactattctcccttccccgttctgttagcttgtactactactctaccgctagtcctgcatagcattttagctagaacacaactacagccaaaaaaaagtattgttgcttgcttcgacgcttgccaccacttccattccatgccgtccgtccgcttccttcctgtgtaatcctcctccaataatagacgtgccatg

SEQ ID NO: 74421 - DNA, 274 bp, Zea mays
tacgcctgctacaaggttgcacggaggagtacagggacatctggatgggggcggtgcatgtgcacgacgccgccatggcgcatatcctggtgttcgagagcccggcagcgtccgggaggcacatctgcgcccagtccatctcccactggagcgacttcgcggccaaagtcgccgagctgtaccctgagtacaaggtgcccaagttccccaaggatacccagcctgggctggtgcgacagggagccgaggaggggtccaagaagctcgtcgcgtt

SEQ ID NO: 74422 - DNA, 261 bp, Zea mays
gtacatggtatcaaactgtgggatgagtgatgctatcggtcctgtgcatgtgaaagagcgaccaagtgtagagatgcaatcaaggatagatgctgaggtggtgaagctcctaagagaagcttatgggcgggtcaaacgattgcttaaaaagcatgagaagcaattacatgctttggcaaatgcgctgctggagcgtgaaacacttactgcagatgagatcaacaaagtagttcacccttaccaagaagcaccccagttttc

SEQ ID NO: 74423 - DNA, 266 bp, Zea mays
gtacctcacaatggcagacaaaaagctaataccgttggggctcattatcctcatgagcataggattagccaatgctgttagggtggttagatactctaatgccgatggtactggcacaggacagggagaaggtggtggatatgtgaatggcggaggatcaggatctagtacatatagtcaaggaaggtattctggttatggagaatcttctagtgctggtggtaccggtgggggtggagctggaggacaagctggaggcgcatgga

SEQ ID NO: 74424 - DNA, 267 bp, Zea mays
tcgtcattctgctcgagggatcttatgcatcttcgaaggacaaagtagcttcggattgcgctaaaatctttatatgctcacagccctttctctccaaaatggtggcaatccccctggcacccgaaaaagcgcatatgtctccgcggctatgtaaaatttcctcaaaagcctcagcttcatgattaatccattcgatgggaccttcggggttgcctcttgaaaagttttcttcgctcgataatgcgccaacgctggcgaactagcttt

SEQ ID NO: 74425 - DNA, 261 bp, Zea mays
cccatctctctatttcatgtccttcatcctccgtagacttttctctaccacatctcccacaatgagcgagaccgcccagaagaaggttcagcaactgattgatgacaacggtgtcgtcgtcttcagcaagagctactgcccgtactgcaacaacacgaagcggctcctcgacggctacggtgcaaagtatgccacgtacgaactgaaccaggagagcgacggcgacgacctccagcaggcgttgctcaagatcacgggcca

SEQ ID NO: 74426 - DNA, 121 bp, Zea mays
ccgtgaacgagcccatcgtcaacggcctctcctggagcttctacgacgcgtcctgccagtccgtcgagggcatcgtgcgctggcacgtcgccgacgccctccgcagcgacatcggcatcgc

SEQ ID NO: 74427 - DNA, 259 bp, Zea mays
cagcaactcggagcatctgcacctggggtccgggtcccacgagcagcagcgcggcggtcgcagcgacgtcaaccatccggaggaggaagaagacgacgacgacgacgacgagccggtgtccgactccagcccagaagagtaacgcaccaccgtacgcccagaaagtccaaccccaaagcttaggttccttttgctctaatttaatcgctccccctacgttttcccccctttcgcaatcctccttatgatgaactacatg

SEQ ID NO: 74428 - DNA, 183 bp, Zea mays
  unsure (1)..(183): unsure at all n locations
ttagttgggtacagacttatattgaagagctggtggagagcggcgttcctgatgaagaaaggaaagccgcgatgaactctgttaatccaaagtatattctccgnaactatctctgncagtncgctatcgacgcagctgagcaaggcgattacgaggagttcgnngggngcttaagggnaaagc

SEQ ID NO: 74429 - DNA, 263 bp, Zea mays
gtctcaagacctataacagagctgcagttgcgttcaacgcagcgctgaggcagcctctgcgacgagctgagtgcgcagatgaaagacgcgacgcttgtgtacacggacctgttccccatcaagtatggtcttgtcgccaaccacactaaatatggttttgacaagccgctgatgacatgctgtgggtacggagggcctccctacaactacgacttcagcaagggttgccagtctaaggatgtggcggcctgcgatgacggctc

SEQ ID NO: 74430 - DNA, 270 bp, Zea mays
tacgcctgctacaaggttgcacggaggagtacagggacatctggatgggggcggtgcatgtgcaccacgccgccatggcgcatatcctggtgttcgagagcccggcagcgtccgggaggcacatctgcgcccagtccatctcccactggagcgacttcgcggccaaggtcgccgagctgtaccctgagtacaaggtgcccaagttccccaaggatacccagcctgggctggtgcgacagggagccgaggaggggtccaagaagctcgtcg

SEQ ID NO: 74431 - DNA, 169 bp, Zea mays
gctgtatgggttcttcattgctataatatgtggacagaggataactgaacggcattaccatgttcttgcaaagcaagagttaaccaaggagtatattgtagaagatcttgaaggagctgaccatgtgccagaccttgatcctagccatgttatagagttgaagatatta

SEQ ID NO: 74432 - DNA, 147 bp, Zea mays
gcttgtttatctatcctctgaagattgtcatcaagacctgtggcactaccaagctcctgctcaccattccaagaatccttgagcttgctgaagagctgtctatgccacttgcaccaggaaagatgaacgtccctagttctagatcgc

SEQ ID NO: 74433 - DNA, 260 bp, Zea mays
ggcaaagatgatactggaaggaggatggagattatcgaaatacccaaccaccgatattttgttggcgcacaattccatcctgagttcaagtcaagaccttcaaaaccttctcccctatttgtggggctaattgcggctgcatctggacagttggatagggtcctgcaagaccgctgcactggtcatgctgtttcagagaaacttgttctgagcaagggctcctatacacccgcaatacaccaaaatgggcacccaaagaa

SEQ ID NO: 74434 - DNA, 243 bp, Zea mays
caagaatctagcaagaagaatgttgcaagacttattgctgcacaggattcattggtcgaggctgctaaagaggaagccagctccataagtaacatcatagctcaggctacaaaatgaagtctcttcatgcctgccccccttccctccatcttgttattgttgtacaagcaactgtaattcactggactgcgagtccatttgctctgctcatgtttatggatttcaagactccaggttatttag

SEQ ID NO: 74435 - DNA, 252 bp, Zea mays
gactagttcttccagcggggatctgagactggatgttgcagccaattgccagatccccgtgccaatccacaacagataatgcaacagtggaaagcatccgcccaatcgggtaatctttgtctctcatcgttgcttcaaggcggcctccataggccatgtctcccctcccactcatggccccgctgtctatccaggaccctaagctgcttgttcactatcagtttgtcctcaatcttcataccagctgatact

SEQ ID NO: 74436 - DNA, 255 bp, Zea mays
gagcgagccaccgagagagagggcgagagtgagtgagtgagagggagagtgagagtgggggattcaagtttcaaactcactatcgagggggataggaaggtggtcatcggtccatagctagctcgtcgtcgaccatggctgactggggccccgtggtgatcgcgacggtgctgttcgtgctgctcacgccgggcctgctgttccagctgccggcgcacggccgcatcgtcggcttcggcaccatgcacaccagcg

SEQ ID NO: 74437 - DNA, 281 bp, Zea mays
ccttgatgaaagggaggactgtccttgtgatagcccaccggctctcgaccgtcaagagcgccgacaccgtcgccgtcatctccgacggcctaatcgtggagagcggcacgcacgacgaactcctggaccgcgacggcatatacacggccttggtgaagaggcagctgcaggggccgaagtttgaggcaaacatagcatcagcgaggcctccgaaattgaagcggaacccagcagtaatgggcaatagcggccccgattattaggaagaccacagttgattt

SEQ ID NO: 74438 - DNA, 287 bp, Zea mays
ccacggtaccagggaagcttgtcttcgtggccatgatggtgcaagtatgtaaccatatccagccaagcaacaaatacaaagtatgggactccatagagctttagcatcgcaacaggacccatcagaaaggtgagaccagccagaagaccaaccatggccagccaggatgccgtcgatgttatgatgtccttcttttcacaaggttggaacaaatcactgcttgggttgaagtgtgatcctgacttccctggactccttgcgaacaagtataacgggaatgcgagcaa

SEQ ID NO: 74439 - DNA, 277 bp, Zea mays
cttgtttgatcaatacgcctctattgttcgcctgactggtacccttcttggagctgctatcggtatcattttcgttgtcagttctgtgttactaggatctttggctactggtgcagttgttgccatgactgttgttatgatagtcgtagacatcataggaaccatggccattgctggtgtttcgacctatcgcagtttcgcttgtcaacctcgtcatatgcgcgggcattggggtcgagttctgtgctcatattgcgcgtgctttcatgttcccgtc

SEQ ID NO: 74440 - DNA, 279 bp, Zea mays
  unsure (1)..(279): unsure at all n locations
gctcggcaagaaccccggcgtggaggccaagatcctggaggaggtggaggggatcgtcgcggcgcggaagggggctggggaggttgtcgaggaggaggaggagctcgtagatcangcccgaggaggtgaagcggatggagtacctccacgccgcgctctccgaggcgctccgcctctacccgtccgtccccgtcgaccacaaggaggtcgtggaggacgaggtgttcccggacgagacggtgctgaagaagggcaccaacgtgatctacgccatgtact

SEQ ID NO: 74441 - DNA, 271 bp, Zea mays
gtcacttacgtttgtcaccaatactcgtagttacggaccctttggaaaagggcgaggaacaccgttccacatccaaacgcagaacaacggcaggatcgttggcttctttggccgttctggccagtatctctatgcgattggggtctacacgaaccaagatgctagggtcgcaaggatcgggcgacctttgggtggatatgaaggggttcttcatggcatcacagacctcagtgggcagcagcgcagcagaggtggaggtccatcgggagaa

SEQ ID NO: 74442 - DNA, 151 bp, Zea mays
gcaggttgggctttctcgtgcaaaaagattagcccaaggccatcatataaaggttgaagtcagtactacaatgccgatccaagttgatggagagccatggtcccaggagccgggaaccatagaggtttctcatcatagccaggccttcatg

SEQ ID NO: 74443 - DNA, 259 bp, Zea mays
ccgttggattttctgcatcgagtactttcagtgatctgaaggttactggaattcttcctctgaaggaaggcaaccctcccaagttttctcagcgggctcgtttgctcactgctaactaccaagttgtttaacgcttgtaccgcgagtgttggtccacttgaatgctccaatagcagatgttatttccgtggacttatgcaagccatggcacgggagattattttgtgtttggaaatttctttactatgcgcttctcatt

SEQ ID NO: 74444 - DNA, 270 bp, Zea mays
cgaatctgctgctctgcggactcttctccaagttgtacaaggactccaaccgcaagtacaagtttgtgatgcatctcgttgacgtctacgggcccttcgccttcttcaaaggatgtcatgcatatatatggcgatgaagctttgacgacacgaacatggagcgcctgcggtcgacgatggccatgcgcagcctgaagatgacatgttcaactacgatcccaagaccatcgactgggacgattatttttacagaatccacatacctggtgt

SEQ ID NO: 74445 - DNA, 279 bp, Zea mays
ccgacagcaagatggagtatacaagactgggcaagtcaggtctgaagatctcaaaagtacttctggggggaatgtcctatggctcctccgagtggcggaaatgggttctcgacgaagaagactccctcccgctcatcaagcacgccttcgatcctggcataaacacgtgggatgtagctgacacttattccgacggcgcctctgagagaatcgtaggcaaggctctcaaacaatacaacatcccccgcaaccgcgtcgtgatcctgacaaaatgcttct

SEQ ID NO: 74446 - DNA, 268 bp, Zea mays
gcggcggaaaagctggaggttcttgggactccagcgctcaagggtctggtagtggcgtcggttctggttctgcctattctaacaggtatccgtacgggccaagatatgcaggtgcaactgctaatggcaacggtggcggcacggggaacagccagaatggcggtgctggcggcggtaaaggttctggatctgggttcggcgatgccattccctgatttctgtatcgagtgaatctaaagctggagcccatcgccctttcttgttttgg

SEQ ID NO: 74447 - DNA, 257 bp, Zea mays
tatcaagaaggcccgtggcctagatcaatggcccacattgcacttggtggatgcgttggcttaccatctccccaagtgggagagtggacgtcataatttgtggtagatggggtacgcgacgcagttcaggtctcggtttgctgcttcttgatcagttcagatctcggtttgctgcttcttgatccagatcagggtttctgatccatatagtctgtactttgttacaaaaatcataagagaaaaaaagtataacggga

SEQ ID NO: 74448 - DNA, 275 bp, Zea mays
gcctgagaacgacgagaagtcgctgcagaatgcggttgctcaccagccagttagcgttgccattgaagccggaggcgtgagttccagctctacaaatcgggtgtcttcagcggaagctgcaccacgaaccttgaccatggtgtcgtcgcggtcggctacggcgccgagaacgggaaggactactggatcgtccgaatacgtggggcccgaagtggggcgaggctggttacatccgtatggagaggaacgtcaacgccagcactgggaagtgcggg

SEQ ID NO: 74449 - DNA, 275 bp, Zea mays
cggctcgagcaagaatcgccaccgactacttaaagggaagagttgtcgaaacctcctatgctgaatagagcgacaaccaagacagctggagaaagatcaagctctccatcgaagatatccaaggaagagcctgcatgaccaacttccacgctatggatatgaccagagacagactctgccaattcatcagtaaatggacaaccttgatcgacgctaactgcgagccaagaccaatgatggttatgttttgagagtcttcgttactgctttcaccg

SEQ ID NO: 74450 - DNA, 274 bp, Zea mays
aattttaatactcgaaggaaacgcttcatgtgggaaattgacgtatgtgcactgcaaagctggacgagggcgtacactacagttgtcatttgctatttggtgcaatataaaaatatgactcctgctgaagcttatgaacatgtccgcttgcgtcggcctagggtattattagcttctgcacagtggcaagctgtgcaagagttctaccaactaacagtgaagaaaacggggaggtctacttggctggacaatcctttaatcaaaccaccgttgt

SEQ ID NO: 74451 - DNA, 255 bp, Zea mays
cgaggtttaataatggtcggtgatggtataaatgatgcaccagcccttgcagccgcaacagttggaatggttctagcccaacgtgccagtgcaactgcagtggctgttgcagatgttctgctgttgcaggataatatttgtggggtgccattctgcattgctaaggctcgtcaaacaacttcattggtcaaacaaagtgtagctctggccttaacttgtattgtgtgtgctgcgcttccctctgtcatgggattt

SEQ ID NO: 74452 - DNA, 272 bp, Zea mays
ctagcgagcggcacggcggcggcgatcggagaagatggtgcgcaaggcgaaggttgagttcgacgagcagccgccggataacttcgacccgaagaacccgtatgccgacccggtggcgatgctcgagtaccgggaacacctggtgcgagagaagtggatccagatcgagaccgccaagatcatccgggagttattccgctggtgctaccgcatcgagggcatcaaccaccaccagaagtgccgccacctcgtcgaccaatacctagaggcta

SEQ ID NO: 74453 - DNA, 270 bp, Zea mays
cccgactgtaagtcctgtctatcgcagacgtgatggaaaagttgatgtggaatactatgccattaatgtggttgttccacagaagttgctttacaaatctatccaacaactgagatcaattggtggcagtggagtcttggtaacaaagctgacctacatattcgacgaggagacgccaaggtggtgcaatctcctctcggagctggggttgtaacttgggcgcatggtcaacttcgggtctcttctacaagttcccatatgtactgcacc

SEQ ID NO: 74454 - DNA, 265 bp, Zea mays
caataatccatcatcgaagccaaatcataagctaaaaggttgagaagatggtgcttctggcatgtggatggcgctatacgattactgtttgtgactcaagtaatctataaacttatggttggcgcaaatacgttcaactaggacatattgattttgaagatgatttagttccacataaactagaagcattgaaagatagcactatatctcaggaaaacatagaatggaactcaaattttggtggttacactggtgtggagacttg

SEQ ID NO: 74455 - DNA, 266 bp, Zea mays
aaacaagtacatggtagagctgttaagacagggcacacctctgaaactgaagttgccaatgctttgatttcactatatggaaagtgtggcagtattgaagatgccaagatgatcttttctgaaatgtcactgaggaatgaggtttcatggaatactatcataacaagttgttcacagcatggactaggactagaagctttggatttatttgatcagatgaagcaagaaggtctgaaaccaaatgatgtcaccttcataggtgtttt

SEQ ID NO: 74456 - DNA, 264 bp, Zea mays
tatcaagaaggcccgtggcctagatcaatggcccacattgcacttggtggatgcgttggcttaccatctccccaagtgggagagtggacgtcataatttgtggtagatggggtacgcgacgcagttcaggtctcggtttgctgcttcttgatcagttcagatctcggtttgctgcttcttgatacagatcagggtttctgatccatatagtctgtactttgttacaaaaatcataagaaaaaaaaaatatcttgaattcaataa

SEQ ID NO: 74457 - DNA, 134 bp, Zea mays
ccttggagtgtcgatgatgtggcggatgccttgtgccgtgcaactgatttgactgaatccgagaactggctgcggcatgaaaagcattatcgctatgtcagtactcatgatgttgcttactgggcacgcagctt

SEQ ID NO: 74458 - DNA, 135 bp, Zea mays
tgggacgacccctggaatgagttctgcagcaccgtgcacaagatcttcgtgtacacgagggaggaggtccagcgcatgaacccgggcgccctgaactcgaggccggaggacagcggcctcgccaattcgacggag

SEQ ID NO: 74459 - DNA, 216 bp, Zea mays
ggcgcggaactcccctgcgcccacctctatcactccttctgcatcgtcacctggctcgggatgcacaactcctgccccgtctgccgcttccgcatcccccccgccgacgaccccgaccaggccgcaccgtcgcagcaggacccgccgcccacgcggatcaccatccgcttcagcaccaccacacgccgccgacgtcgcatcggcagcgatgcgcca

SEQ ID NO: 74460 - DNA, 285 bp, Zea mays
ggacggccgccccatccccatccccggcgccggcaaccagatcacgcagctcggccatgtcaaggatttggcaagagccttcaacctggtgctcgggaaccccaaggcgagcaagcagatcttcaacatctccggggccaagtatgtcaccttcgacggccttgcgcgggcatgcgcaaaggctggagggttccctgagccggagctcgtccactacaacccaaaggaattcgacttcggcaagaagaaggccttcccattcagagaccagcacttctttgcgtc

SEQ ID NO: 74461 - DNA, 290 bp, Zea mays
aagccatctttgcattgttcctcatccgcctccttgctcgccgcagccgcctccgccgcgcgcctcctccgccgccgcggactccggcagctttatcgccagagtccctgaactctcgctttctttttaatcccctgcatcggatcaccggcgtgccccaccatgtcagacgcagccgtagacaccagctccgaaatcaccaccaaggacttaaaggagaagaaggaagttgtggaagaggctcataatggaagagacgcccctgctaacgggaatgctgagaatgagga

SEQ ID NO: 74462 - DNA, 286 bp, Zea mays
agaagaccagttcccctctcctgatcgtcctgttcctcacagcagcagccattgcggccgagccggagaagcaggcggcccccgcggcacaggagacggccgtgcacatcgtgtacgttgaccgccccgaggacgccgaccctgaggagttccacatccgcaccctcacacacgtcctcggcagcgaacagaaggccagggacgcagtgctctaccactacaagaacgccgccagcggcttctccgcgaactcaccccccagcaggtcaaggatctcaagggtgag

SEQ ID NO: 74463 - DNA, 229 bp, Zea mays
agaacagtgaccttgaggaattgcgtgaactgggttctggaaccattggtactgtgtaccatggaaagtggagaggctcagatgttgctataaagagaatcaacgagcgatgttttgctgggaaggcatctgagcaagagcgtatgaggactgatttctggaatgaggcagacaagcttgcatcattgcaccatccaaacgtagtaagcattgtacggtgttgttctag

SEQ ID NO: 74464 - DNA, 284 bp, Zea mays
gattggtctacaagaatgcgaattgctcttggcgctgcctgtggtttggagtaccttcatgagcactgcaatcccaagatcatccaccgtgatgtcaaggctgcaaatgtcctgcttgatgggaactttgaagcagtggtaggagattttgggctggcgaagatggtagacatagggaggaatacagtaacaacaggggttcgtggaactatgggccacgtagctcctgagtacataaagacaggaaggccatcagtgaagacagatatctttggttatggtgt

SEQ ID NO: 74465 - DNA, 283 bp, Zea mays
cgtttctcctcgccctaaactaaaaaaaggtaaccgtccccgaagcccaaagccaaaaattcccccaccccaaggccgcatccttctgcagcctgctcgaaaccctccttcctcctcctgattcgtcaaccggtctcccgaatcggagcggcaatcggattgttgggtctcgagactgagctgaaacaaagtccgtgagctattcgttgattttccagcgtgaaggcgccgatttttgggccgttggctgtggtggccggttcggcggctctggatccggctg

SEQ ID NO: 74466 - DNA, 281 bp, Zea mays
cttacgtcttcccccagctagctagctatctaccttggtggtggcgattgatatatagattaaacatggcgcctcaaagcctggatctcgggctgagtctcggcctgggcgtggcggcattccagcccagcttctgccacccggccggcagcggcagcggcgacgaatggcgacgacgggggcgcttgcaagaagctgcggctgtccaaggaccaggccgccgtgctcgaggagtgcttcaaaacgcaccacaccctcactccggcgcgtctcctcttcat

SEQ ID NO: 74467 - DNA, 126 bp, Zea mays
tgtagagtttggacagcttgccctgcatgctattgctcatctgcttgagagatacatttaaacaagtcaagagataatttattgatccatgatgactgtatgcacctgggcgcatgtatcatatcg

SEQ ID NO: 74468 - DNA, 248 bp, Zea mays
gccatggtcacctggatcgaggcctgggatgagctgaacccgtcgacacctgccgccgcaaatggcaaggccaagtacatgtgccatcacttcggcactggagtgaaaaagaaagtatgattgggtcctgcctaggccccatagatatagctcttttttgagaaggaagagagattaattcagcagcagcttttataaattcttgattgtcatgaagcaggtggttcttttgtagttgatgaaaggga

SEQ ID NO: 74469 - DNA, 247 bp, Zea mays
ggactttcaattaactaacaactaacataagatcctctgtcatcgttgccatcagttgtcgtttatcaccttctttttatattcccatctgaggacatataatcagcttgataaaatggtcgcagacgctctggtctaccacccctcggtggctcactacctacgctttgtcgcaacaaccctcgtttgagacaaagccctccgcacaattcaatactttgcccgcttctactcctggtatctcttc

SEQ ID NO: 74470 - DNA, 246 bp, Zea mays
gtacattgctccctaggatgaactacttattggagatgggtttgtctaagaaagatctgtgctcaatgatctttagattttccccacttctaggttacagtattgaacttgttatgaaaccaaagcttgagtttctgctaagaaccatgaagaagccacttaaagcagttgtagaatacccaaggtacttcagttattcactcgaggggaagatcaaaccgcggttctgggtattgcagagtagaa

SEQ ID NO: 74471 - DNA, 244 bp, Zea mays
atttcagaagaatcagtaattgaagggaaattagtggaattgattcgtatctgtcgtgttgatgcaaagattgatgcagctaaacaacaaattgttattcaatcggaacaaccatcaatctatcaacagattattgataagacaaagagtattgcttatagatccacacaacttatccatgtcatcgaattgaagattgcacaaaggaacgaagttatcgtgctggctgattaaaaagtacctt

SEQ ID NO: 74472 - DNA, 246 bp, Zea mays
aattacagtcgctcctggtgaggatgtgatgacgaaggtcatatcgttttcccaacaaggaccacgagctatactgtgttctctctgcaaatggtgtgatatccaccgttacactctgtcagcctgattcctctggtggcacgttaacttacgagggacgctttgagttgctgtccctgtctgggtccttcatgccaaccgaaaacggcgggacatcagtcgatcaggtgggatgagcgtgtctct

SEQ ID NO: 74473 - DNA, 244 bp, Zea mays
ctccctctcggcggcggcgcaagtccccttcatctccggcgcggcaaatggcaggtggcagggttgcacatgctaccctcaagggccccagcgtggtgaaggagatcttcattggactgaccctgggtctgatcgctggaggtatgtggaagatgcaccactggaacgagcagaggaaaactagatccttctacgacagccttgacaagggccagatcagcgtcgtcgtcgaggagtagttccc

SEQ ID NO: 74474 - DNA, 252 bp, Zea mays
gagctcctcgccgacccggccaaccacggcgccttcgacttcgccttcgtcgacgccgacaagcgcaactacgtccggtaccacgagcagctgctccgcctggtgcgcgtcgggggtaccgtcgtgtacgacaacacgctgtgggccggtactgtggcgcttccccccgacgcgccgctcagcgatctcgaccgcaggtctccgccgccatcagggaactcaacgtccggctttctcaggatccccgcgtcg

SEQ ID NO: 74475 - DNA, 243 bp, Zea mays
  unsure (1)..(243): unsure at all n locations
aaaaaatgagcgtactgatcccgagagggcagcaataggagagctgctggtcctttcaaggcataacatggagagtagaatttccattgcaaaccacggtgctatacccttcttggtgaatcttctttactctgcagaccccagcatgcaggaaaatgctgtaacagtgatcctgaatttttcgntatgtgacaacaacaagatcaccatcgcaagcgcggacgccatcaagcctctcatcca

SEQ ID NO: 74476 - DNA, 242 bp, Zea mays
gttaagccagagggctatgattctatcccaaaacagattcctgatccgaaggacaaaaagcctgacacatgggatgaagatgaggatggaatatggaagcccagaatggtatcaaatccagcatacaagggaccttggaaacgcaagagaattaaaaatcctaactacaagggtaaatggaagaccccgtggatcgataatccagagtttgaggatgatccagatctttatgtgctgaagcc

SEQ ID NO: 74477 - DNA, 288 bp, Zea mays
agcatttgacatttggatggactttgctgccaaagttggggattctcaatctatttggcacattaatagtctaagaggcaggtctgtcaaacattatacacttgcaacagggtatgcatgtgcaaaggggtctctgcttgatcgagaagcagaaaatgccgctgacaagattaagcttctttataagcatttgcctgatcattagaaaccatttgtgaaagatgaactcgagaaacttattgctggatggcctacggaggtggtaaagaggcagaagaaagataagag

SEQ ID NO: 74478 - DNA, 293 bp, Zea mays
aggtgacttaggtcaagtcgttggtgttcctgtatctcttgacgacgaagcctccctcgatgccgctatctctcgctccaacgttgtcataaaccttcttggacgcttttggaaaacgaagaatttctcaatcaatgaagctaatattgaaaccgcttctataatcgctaaggcagcaaagagagttggcgttgagcgattgattcacgtttcttctgtaagcgctgcaccaggtgctccatcagagttttcaagagcaaaatacttgtcggaactagcagtgtcaagagaat

SEQ ID NO: 74479 - DNA, 282 bp, Zea mays
cccaagacgctcatgacaccagaggagggtatggcacgctggaggagctgctggaggtcatcacgtgggcgcactgggcatccaccacaagccggtaacacacacacaaccaacccctcgtagctgcactgcacctgcattttgacgaacgaacgcgcccgcgctgcatgccttcttcccgcgcgcgcaggtcgggctgctgaacgtggacggctactacaactcgctgctgaccttcatcgacaaggccgtggaggagggcttcatcaaccccagcgcccg

SEQ ID NO: 74480 - DNA, 106 bp, Zea mays
gcgggccgtcgcgggggacacctccggcgactacgagagcatgctcctcgcgctcctggggcaggagtgatgagccgtactggtgcgctggtgcctttctgaccgg

SEQ ID NO: 74481 - DNA, 280 bp, Zea mays
ataatggtgttgcagagttgttggagatcctgggcagtattatcaatgggtttgcccttccgcttaaggaagagcacaaattattccttgttcgtgcattgatccctcttcacaagccaaaatgtgtatctatgtaccatcagcagctatcatattgcatcacacagtttgttgagaaggattgcaaacttgctgacacagttattagaggcttacttaaattttggcctgtgacaaacagctcaaaggaggtgatgttcttgggtgagttagaagaggt

SEQ ID NO: 74482 - DNA, 281 bp, Zea mays
tttttgcaatcagaccaagttgaattagaaaaggagcagattcagcaaatagatgcctcagtgagccctctcatgagcaaagggtcatgctaccaagctccggaagcgctgaagacactgaagccctcccagaaatgggacgtttactcctatggcgtggtgttgcttgaaatgatcactggccggtcgccctaagttctcttggaaaccatgcagatggatcttgttcaatgggtccaattctgcatcgaagacaagaaaccttctgccgatgtgctgga

SEQ ID NO: 74483 - DNA, 284 bp, Zea mays
gtgcagcgagagacggcgaggagcatcgcgagcgtcctcccgtacgagagagggagttcgtggagcccggacatctggtgcaaggaacgggacctgctgaaacgcacgaggaaaggggttttgcacaggataagagtatctatctacatcaacaagaggtcacaggtgatactgaagctgaaaagcaagcaccttggaggcgcgctgtcaaagatcaacatgagcgtggtttacggcgtgtacagcgagcttccgacgtgggctgggaagggctccgtagagga

SEQ ID NO: 74484 - DNA, 281 bp, Zea mays
gtggacgagatgatgaagaagggcacaaagccaaattgggtgacctacaaccatctgatttatggattctgtaaggagggggatttggaggaagcaaagcgtctgtacaaggagatgggaagaaaggggcttgttggggatagcgatttctattttatgcttatttattacctttgtaagggtgatgatttggacactgcccttggactatacaatgaaatagcagctaagaattgggtgccatgcttctcaaccatgaaaatgcttgtgaatggacttgc

SEQ ID NO: 74485 - DNA, 279 bp, Zea mays
ggagatggggtcgcagatcatcaggaggcgtggacacaaggcactgaacggaagaatgtggactacggcggaccgaccaagtgcagcaatacattgctggccaccggctcacctatccattttcttttactggtaggtctagtttgggtactctagttttgatctcaatccacttgtattgaggtggattagggtgtaacttcaactaatttacaccctaatccaccttaacacatgtggattgggcctaataatagagtacccaaacaaagctaattg

SEQ ID NO: 74486 - DNA, 277 bp, Zea mays
ctccctctcggcggcggcgcaagtccccttcatctccggcgcggcaaatggcaggtggcagggttgcacatgctaccctcaagggccccagcgtggtgaaggagatcttcattggactgaccctgggtctgatcgctggaggtatgtggaagatgcaccactggaacgagcagaggaaaactagatccttctacgacatgcttgacaagggccagatcagcgtcgtcgtcgaggagtagttcccacgtgtcacctcagaagtttttttttccagttg

SEQ ID NO: 74487 - DNA, 271 bp, Zea mays
gggagctccaacctttgatgctggtgaagcctttgctatgatggcagcttcttttgttgctcttgtggagtccaccggtgcatttatcgccgtttcacggtatgccagcgcaacaccatgccctccttccgtcatgagccgtggcatcgggtggcagggagttggcattttgctgggtggattgtttggaactgctaatggaacctctgtatctgtcgaaaatgctgggctgctcgctttgacacgcgttggtagtagacgtgttgtgcag

SEQ ID NO: 74488 - DNA, 276 bp, Zea mays
gagctcctcgccgacccggccaaccacggcgccttcgacttcgccttcgtcgacgccgacaagcctaactacgtccggtaccacgagcagctgctccgcctggtgcgcgtcgggggtaccgtcgtgtacgacaacacgctgtgggccggtactgtggcgcttccccccgacgcgctgctgggcgacctcgaccgcaggttctccgccgccatcagggaactcaacgtccggctttctcaggatccccgcgtcgaggtctgccagctcgccatcgcc

SEQ ID NO: 74489 - DNA, 273 bp, Zea mays
ggctacttagaaagccagtggtggcagaggcaggctgttgttgagccccgaccgcatcctcctcttcctgagcctctctgcaatgatgaaggcgagctccagggactgggaggcgttcagccttgggtcacagtgggtgtggtagcggtcgctcaggtcatcgaaggttacagtccgtgatctaccaatgcactcggtcacgttctgcccagtcatttcaaggtggatgcctcctgggtgacttccttcttgatcatgcacgtcgaagaatgc

SEQ ID NO: 74490 - DNA, 270 bp, Zea mays
gttaagccagagggctatgattctatcccaaaacagattcctgatccgaaggacaaaaagcctgacacatgggatgaagatgaggatggaatatggaagcccagaatggtatcaaatccagcatacaagggaccttggaaacgcaagagaattaaaaatcctaactacaagggtaaatggaagaccccatggatcgataatccagagtttgaggatgatccagatctttatgtgctgaagcctttgaagtatattggaattgaagtttgg

SEQ ID NO: 74491 - DNA, 237 bp, Zea mays
gttaagccagaaggctatgattctatcccaaaacagattcctgatccgaagggcaaaaagcctgacacatgggatgaagatgaggatggaatatggaagcccagaatggtatcaaatccagcatacaagggaccttggaaacgcaagagaattaaaaatcctaactacaagggtaaatgatagaccccatggatcgataatccagagtttgaggatgatccagatctttatgtgctg

SEQ ID NO: 74492 - DNA, 266 bp, Zea mays
agcttctagacgccatatgcgagcgcctggtatcgtccttgagcacagagggcacatacattgtccgagaaggcgacccagtgaccgagatgctgttcatcatccgcggcaagctggaaagctccacgacagacggtggccggacaggtttcttcaactcgatcaccctgaagcccggcgacttctgtggcgaggagctcctctgatgggcgctcgtccccaagcccaccgtcaacctgccactgtccacccggacggtgaaggcg

SEQ ID NO: 74493 - DNA, 276 bp, Zea mays
ccttggagtgtcgatgatgtggcggatgccttgtaaagagcaactgatttgactgaatccgagaaacggctgcggcatgaaaagcattatcgctatgtcagtactcatgatgttgcttactgggcacgcagctttgctcaagatctggaaagagcatgcaaagatcattatagcagaaggtgtttggcgattggagacggtctgaattttagagttattgctactttctcctggcttcagaaagctgtcgtcagagcactttgtttcttcttataa

SEQ ID NO: 74494 - DNA, 277 bp, Zea mays
gcgacgaaaacccaccagtcctttcaggatgaccaagtatacgaggaacaaaaaaagttcatcttctcacagtagttccagattcaaaagagtttccagaaaggagatgtcatttgcagtggagaaatacgcatggacaaatgcaacttgtccaagatgcatggaattcccacacagcgctgttcttcttctctgttcgtcacatggcaatggctgccgtccatatatttgtgcgtccagctaccagcactcaaattgtcttgatcagcttgtaatg

SEQ ID NO: 74495 - DNA, 268 bp, Zea mays
cgcggctgcagctcagcagctccagacctcaccagaggcacctaccacaccgcccgccgccgatcccgtcacccgtctcctccccgctgcggagcgtctccagccctgcccggtgcccgcccagatggcaaacgcggcgtcagggatggccgtggacgacgactgcaagcgccggttcctggagctacaaggccgcgaggacgcaccgcttcatcatctacaggatcgacgagaagaagaagatggtggtggtggagcaggtgggcaa

SEQ ID NO: 74496 - DNA, 265 bp, Zea mays
gggctgtggacgatagccggccgagccgtgagcataacctagttgactgggcacggcccctcctcgtccataacaggaagctgttccggataatcgatccaagaatggaagggcagtactccaccaaggctgccaccgaggtggcaagccgtgcataccgctgcctgagccagaaccccaaaggtcgaccatcaatgagccaagttgttgagacctttgaggccgtgcagaacatgcctgaatgccaggacatactcctccagaa

SEQ ID NO: 74497 - DNA, 152 bp, Zea mays
ctcggcggcgtgggccacatgggcgtgaaggtagccaaggccatgggccaccacgtgacggtgatcagctcgtcgtccaagaagcgcgcggaggcaatggaccacctcggcgcggacgcgtacctagtgagctcggacgccgcggccatggc

SEQ ID NO: 74498 - DNA, 265 bp, Zea mays
catggatgcaattgccaaagctgggtctaggtctgacaaagacaatgagcttttaaagatcttatctgacgtttcaccaaggaatgtccagaacctcaacagccttttgaatgctaagaatacagaaattgcgaggttgagagaggaaatcagaatattatctgctcactggacgaacaaaaccaaggaacttgaatcacagtttcaaaagcagcgaagaactgatcaggagctgaagaagagggtcctgaagcttgaattttgc

SEQ ID NO: 74499 - DNA, 270 bp, Zea mays
ggtgatcccttcgcggcgtcccttgccgtgccaccgccgtcctatgtgcagatggcagatttggagaagaagcaacagctcttgacgcaggagcaaattatgtggcagcagtaccagagagacggcatgcaagggcaatacgaacctgaacaggctcgaccgcgcccccaacccggccacggactacgaaatgaacatggcatacaacacgaaccccatgccaatggcttacgcagggaacactgggtattactaccctacttactgagg

SEQ ID NO: 74500 - DNA, 261 bp, Zea mays
gtttgctgtttcctgtttaccagatcatagcggacttcgccttcctccccttcggcggggggcctcgcaagtgcgtgggggaccagttcgcgctcctggagtcgacggtggctctggccctgctgctgcggaagttcgacgtggagctgagagggtcgcccgacgaagtggagatggtgacaggcgccattatccacacgaagaacgggctgtggtgcaggctgaggagaaggacttgacggcccaacattagctttgcag

SEQ ID NO: 74501 - DNA, 276 bp, Zea mays
cgcttggcgaggtaggatgaggatcgtcatgggactagcgtactgcgtccagcacatgcacgagctcagccctcccgtggcgcaccctgacatgcagtcgagctccgtactgctatctgaagacggcgctgcgaagatagcggacatgagcgtttggcacgaatgatttctcaaggcaaaacgacgacaaatggtgacgaacaagcgtcgtccgctggcctgctggcggggaatgtgtacagcttcggtgctctgctgcttgagatcatctccggg

SEQ ID NO: 74502 - DNA, 261 bp, Zea mays
cactgagtgtcatttctcaaggtgatcttcgtcgtgctataacctaccttcagagtgcagctcgcttatttggatcttctatctcttccagtgacctgatcagtgtttcaggggttatccctgaagatgttgtcaagtcactgcttgcagcctgcagatctggtgaatttgacgtggcaaacaaggaagttagcagcattatagcagatgggtatccggtctcacagctgatggcacagtttctagatgtgattgttagcg

SEQ ID NO: 74503 - DNA, 268 bp, Zea mays
gaaggaaccacggcggcatgggccaacgcgtcacgaaactcctccagcttcatcgagttcgtcacgtcgccgaacaaccccgacgccctgctccgcgcgcccgttctgcgcggctccgcggtgatcgccgaccacgcgtactactggcctcatttcacgcacatcgcggcaccggccgacgaggacgtcatgctgttcaccatgtccaagccatctgggcatgccggcagcagactcgggtgcgttgctacttgctagacgcgaatcg

SEQ ID NO: 74504 - DNA, 272 bp, Zea mays
ctcattttagtggaaattctttcactgaatccactcctcctgttagtgctgcgtcacctgatatcttccagctctccaagatttctcctgcacaaagcccttcaatgggctctggcgagcaggcgttagagcctaaacatgagtcggcagcttcacctacgtcctgaaaacttgaggcctgatgcattattctctgggaacacagctgatccatccattttcaataatgccatagccatgctcctgggcaatggcattgatgccgagtacaa

SEQ ID NO: 74505 - DNA, 265 bp, Zea mays
ttcgagaacgtcatgtccatgcaccgaatgcgcgcggcgctgacggggctgctggagaccacgtacgtggacgagtgggtggtcaccgagaaggtgggcgatcatgtgaaggacaagctcgaggtccctctccttacaccggtgaagccaaccgagtgcgtcgagaggatctactctcatgagctcctggtcgcgttctacctgttgctatgcgcgtcgtacgatgtcgtgctcggagccgggcactactacccgtacatcttcc

SEQ ID NO: 74506 - DNA, 239 bp, Zea mays
gtcttcggctacggctccctcatctggaaccccggcttcgacttcgacgacaaaatcctcggcttcatcaagggctacaagcgcacctttaatctcgcttgcattgaccacagaggcacaccggagcatccggcgagacctgcacgcttgaaaccgacgacgaggccatatgctggggaattgcatattgtgtcaagggtggtccagaaaaagagctaaaagcaatacagtacttggag

SEQ ID NO: 74507 - DNA, 263 bp, Zea mays
attatgtatttttgggtgattatgtagacagaggatattactccatcgaaacagtgtctttgatcatggccttgaaggttcgttaccctggaagaatacatatattacgtggaaaccacgagtctcgccaaatccacaagtatatggtttctacgaccagtgtctaaagtattatggaactccaaacgtttggaagtatttcaccgatttgttcgattttttgcctttgagcatagtggtagacaacaaagtcttttgcgttc

SEQ ID NO: 74508 - DNA, 216 bp, Zea mays
atcgaaggagcctgcgaacgagcgagagtctataatggcggacggaggcgagctgcagctgctgggctcatggtacagcccctacgtgatccgcgccaaggtggcgctggggctgaaggggctcagctacgagttctcgaggaggacctctcccgcaagagcgacctgctgctgaagctcaacccggtgcacaggaaggtgcccgtgctggtccac

SEQ ID NO: 74509 - DNA, 257 bp, Zea mays
cggctcgagcggcgtcccaaagaccatcgataatgacatcgcggtgatcgacaagtcgttcggatttgacactgccgtggaggaggcccagagggcatcaacgctgctcatgtcgaggctgagagtgcagagacggcatcggtgtcgtgaagctgatgggtcgcaacagcggatcatttcaagaataagccccgtttcccgataactctcaagtacatcgacccgacttacatgatccgcgcacgtcagttcaaacg

SEQ ID NO: 74510 - DNA, 261 bp, Zea mays
cgaagaaccacacggcgcacaaccagtcgttcaaggcgcacaagaacggcattaagaagcccaagcgccaccgccagacctccaccaaggggatggaccccaagttcctgaggaacctgaggtattctaggaaggcaacaaaaagagtggtgaggctgaagctgaggagtaggaaggaaagcattactttgtttcctctgttcttagctcagttccacctttaggacctggggttttgttaaagatggaacttaagttggt

SEQ ID NO: 74511 - DNA, 252 bp, Zea mays
cggtccgaatagtccgcgcctgtgggccggacggtccgcgcacgcgcagagtagattagggtttcgagttttgtgctatgtttattagctatatccgcggaattagctcggaatccggtcgtgtaaagggtcagccccctcctctataaaaagagaggcctacggccgatttgtaataaaacgatcgaatcaatacaagttctatttcgcaaaaaaaaaaaaaaaaaaaaaaaaaggggggcccgccgattt

SEQ ID NO: 74512 - DNA, 256 bp, Zea mays
aagaagtaccccaagacgaagatcatgtatggagattacttcaaggctgcactgcagtttgtcgtcaaccctggaaaatttggttttagcacggccttgcaggcgtgctgcggcgcaggagggcagggcactacaacttcaacctgaagaagaagtgtggcgagcagggcgcgagcgtgtgctccaacccgtcgtcgtacgtgagctgggacggcatccacatgaccgaagctgcgtacagaaaggtcgccaatgg

SEQ ID NO: 74513 - DNA, 258 bp, Zea mays
cggctcgagctgccttctctgcgatcgaggcagtggcaggctgtggttctggtaatgcttgacgatctctctgtgcaccagcttcccgcccttgctccagtcttttcgaattcgaagcttgtgcaaaagatttgaacgctgctcaggttagcagagaggagtatgactccatggtggacctgtttctaccgtttggaagatccgtccaggcgatcacgcccatgtaaacgagaagccgtgtgaatctgcattccggaa

SEQ ID NO: 74514 - DNA, 254 bp, Zea mays
cggatgagaaggctttctttgatgactacaaagaggcccacctcaagctctccgaactggggtttgctgatgcttaaatagaccctatcctggagtgatacattctgctgcatgtggtcttttgcatctgagtcaatgtgaacaagcagattgtcgtattgtctttctcgtaataaatttgtcaatgttgagcccttaggcttgaattgtgggaccctttgttcgttttcctagactctgatgctgtatgcaac

SEQ ID NO: 74515 - DNA, 293 bp, Zea mays
  unsure (1)..(293): unsure at all n locations
agcttctagacgccatatgcgagcgcctggtatcgtccttgagcacagagggcacatacattgtccgagaaggcgacccagtgaccgagatgctgttcatcatccgcggcaagctggaaagctccacgacagacggtggccggacaggtttcttcaactcgatcaccctgaagcccggcgacttatgtggcgaggagctcctcggatgggcgctcgtccccaagcccaccgtcaacctgccactgtccacccggacggtgaaggcggttctcgaggtcgaangcgttcgctct

SEQ ID NO: 74516 - DNA, 277 bp, Zea mays
  unsure (1)..(277): unsure at all n locations
atcctcccactgccagttcccggtcctggacgtgttgcagaggaagtggaggtcgaggacggaatcactgtggcacgcgtcgaccacggcgtggagcttggcgccgggcaccagcggccggacgatggtctcgttgatctcgtcgtccaggatggggcccttctggaacgagtccaccgggcagatgntggccgcgtacccgtcctgctcgtcgcagtccgcgtcggcgacctgcgcgcccagcccagagaagtggaacaccagggagtcgccgctg

SEQ ID NO: 74517 - DNA, 296 bp, Zea mays
ctgaggctgagaaggatttctatgaagctctatttcgaagatctaaggtaaaatttgatcaatttgttgagcaaggaagggttctgcacaactatgcttctattttggagttacttttgcgcctaaggcaatgctgtgatcatccattccttattatgagtcgtggggatacaaaagagtatgcagacttaaacaagcttgcaaagcgttttctgcgtggtggtaatggtgctgttaatggtgattcttgcatcccctctagagcttatatcgaacaggtgttccaagaattgcaa

SEQ ID NO: 74518 - DNA, 286 bp, Zea mays
gcactccgctgcctcactccgagactccgccgctgcttccatgttccgttgcgcacgagcgaaacatccggagctagcaagggaggaggaggaggaggaggaggcgatggcggggggcggggataaggtggactacgtcttcaaggtggtgctcatcggcgactccgctgtcggcaagtcgcagatccttgcgcgcttggcccgcaacgagtttagcctcgactcgaaggccaccattggggtcgagttccagactcggactctcgtcatcgaacacaagtccgtc

SEQ ID NO: 74519 - DNA, 290 bp, Zea mays
ggacacgccagggaagaaggcgccggtggccaagaagtccgctgctgccgcgaagaaggcccctgccaagaaggccgctccctcgaagaaggcggcgaccccggtgcggaaagcgccgtcccgtaaggccaagaagtaaagcggccaagaaggggggcgcgatgctgtaaatttgatatcggagaggctcgggtacactggtcattcagtacgcgagaccgatagctgaggctagtggcgatggaggactgtgttattactactataaactggtggttgtgtttctgtaa

SEQ ID NO: 74520 - DNA, 283 bp, Zea mays
cgcgaaggaaccacgggtagctgcctcccttctcaggctcctgttccatgactgctttgtccagggctgcgatgcgtcggttcttttggatgacgatgaggaagtcgtgagcgagaaaaacgctatccccaacaaggattccattagggggtttgaggtcatagacgagatcaaagctgcactcgaggaagcatgtccgcagacagtgtcctgtgctgacactgtcgccctggcagccagaggttcgacagtgctgagtggtggaccgtactgggagcttcca

SEQ ID NO: 74521 - DNA, 278 bp, Zea mays
ggagaatcaaattctccgtttccgatacacatcggacatgggtgaacaacacccggccgagcacaaggtggttgtggaactgagttccaaggatcttgtaccgaaacatttgaccgagcagcagcgtctgacttttctcaaacttgtcggaccacgctacaaccccgatacagacattgtgcgcatgtcctgcgagaaattctccgctcgagctcagaacaaacgttatctcggtgacaccatcagaaacttaatcaaagaggccaaagaaggcgact

SEQ ID NO: 74522 - DNA, 285 bp, Zea mays
ccccaccttcttcgttgcctctcttcctccctctcctctcttccttcctctcgatcgatcgtcatagcaatccaagctagcaagcccgtccgtcgtctctcgtccaagaagcatacaactactaatggggaggtcaccgtgctgcgaccaggacgcgggcgtcaagaaaggcccgtggacgccggaggaggacaagctgctggtggactacatcaacggcaacggccacgggagctggcgccgcctgcccaagcacgccggcctcaaccgctgcggcaagagctg

SEQ ID NO: 74523 - DNA, 278 bp, Zea mays
aagaagtaccccaagacgaagatcatgtatggagattacttcaaggctgcactgcagtttgtcgtcaaccctggaaaatttggttttagcacggccttgcaggcgtgctgcggcgcaggagggcagggcaactacaacttcaacctgaagaagaagtgtggcgagcagggcgcgagcgtgtgctccaacccgtcgtcgtacgtgagctgggacggcatccacatgaccgaagctgcgtacagaaaggtcgccaatggctggttgaatggcccgtatgc

SEQ ID NO: 74524 - DNA, 271 bp, Zea mays
gcgaactcggaggaaattgacatgcttcatgaggtcacgaagcaaatcgaagggcatactatctgtgcgcttggggatgctgcggcatggcctgtgcaggggcttatcaggcacttcaggccagagttggagcggaggatccgcgagcgagctgaaagggagctgttggcggcttctgcataatctgccagtcatgttgcccctgtactagtttcctgatttcttcctaccgaaataatacaaactgatggagctcctttctgtgtaagga

SEQ ID NO: 74525 - DNA, 280 bp, Zea mays
gtcctggttcctggtgaaccgaacatatcttacatatgctctcgttattatcgtggtccagagctcatatttggagcgacagagtatacaacttcaatagacatatggtcagctggttgtgttctagctgagttgcttcttggtcagccactgtttccgggagagagtgctgttgatcagttggtagagattatcaaggttcttggtactccaacccgtgaggagatacgatgcatgaatcccaactatactgagttcaggtttcctcagataaaggctc

SEQ ID NO: 74526 - DNA, 276 bp, Zea mays
agaaagtaccccaagacgaagatcatgtatggagattacttcaagggtgcactgcagtttgtcgtcaatcctggaaaatttggttttagcacggccttgcaggcgtgatgcggcgcaggagggcagggtaactacaacttcaacctgaagaagaagtgtggcgcgcagggcgcgagcgtgtgctcgaacccgtcgtcgtacgtgagctgggacggcatccacatgaccgaagctgcgtacagaaaggtcgccaatggctggttgaatggcccgtat

SEQ ID NO: 74527 - DNA, 271 bp, Zea mays
ggcgcagtatgcgctgatcggcgtgtcggaggtgatgatgtacgtcgggcagctcgagttcttcaacggccagatgcccgacgggctcaaaagcttcgggagcgcgctgtgcatgatgtccatgtcgctcggcaactacttcagtgacatcatcgtgagcgcggtgaccaggctcaccacgaccccggggcggtccgggtggatcccggctgacctcaacgaggggcacctcgacaagttctacttcctgctcgccgtgctggccgtcgcg

SEQ ID NO: 74528 - DNA, 252 bp, Zea mays
gggcaagagcatatggtgcggtagacgctgtcgagtggccagaagggttcttcaggcacgacattggttggagagcactgaggcagaagcaagcggcaaaataggtagcagctacccatgaccacgagattttcctagactaccacaactacggtgagcttgtagtgtttgcaagtaataaaaagggaaacggtgtaacgttcactgtttttttggttgtggaacagcaggttgttcaaattttaacacctg

SEQ ID NO: 74529 - DNA, 253 bp, Zea mays
caggaacctacaggtggatggctccggagatgatcaaagaggaacatcatactaggaaagtggacgtgtacagctttggaatcgtcatgtgggagatcttgactgctttggtcccgttcagcgacatgactccagagcaggctgctgttgctgttgccctgaagaatgcaaggccgccactgcctgcttcatgccctgtggcaatgagccacctgatcatgcagtgctgggcgaccaaccctgacaaaagacc

SEQ ID NO: 74530 - DNA, 255 bp, Zea mays
ttcgtcaccatggttcgcgtcagtgctcttaatgatgctttaaatgctctcaccaatgctgaacgcagaggaaagcgccaagccttgatccgacccagttccaaggtaatcgtaaagttcttgaccgtcatgcaacgacatggttacattggtgaatttgagatcgttgatgaccacagatccggatagacagttgttaatctccttggacgcttgaacaagactggctgcatcagtcctcgttttgatgtgagt

SEQ ID NO: 74531 - DNA, 259 bp, Zea mays
tgctgccgttatccgaggcagaagtgattagggaaggaagtgatataacgcttgttggatggggagctcagcttgcggtgctgaaagaagcctgtggagatgctgcaaaggatggggtgtcttgcgagctcatcgatctgaaaacactcgtaccatgggacaaggaaacggtagaggcctcggtgaagaagaccgggaagctaacagttagccacgaggctccagtcaccgggggcttcggcgcggagatcgccgcgtc

SEQ ID NO: 74532 - DNA, 255 bp, Zea mays
atctccgccgccgccccagctcgccttgcgtgactgagagctcgtcggcttccgtccacgcgtgaagcgagagcatggacacccaggtgaagcttgctgttgtggtgaaggtgatgggcaggaccggctccaggggtcaggtgacccaggtcagagtgaagtttttggatgaccagaaccggctcatcatgaggaatgtcaaggggcccgttcgcgagggtgaaatctcaaccttggtggattccgggggggggg

SEQ ID NO: 74533 - DNA, 188 bp, Zea mays
ggagtccacggccgcggcgctggagtggaccatggccaaccttgtcaaaagccccgacctgcagcaaaagcttcggctcgaagccaacgccatggcctgcggcaagcgagtcatcgaggaggaggacctggcgcgcatgccgtacctcagggccgtcgtgctagagagcctccgtcgccacccgcctg

SEQ ID NO: 74534 - DNA, 250 bp, Zea mays
ggagtcctggcgcaatgtaccccaacgagatcatagcggacttcgccttcctccccttcggcggggggcctcgcaagtgcgtgggggaccagttcgcgctcctggagtcgacggtggctctggccctgctgctgcggaagttcgacgtggagctgagagggtcgcccgacgaagtggagatggtgacgggcgccacgatccacatcaagaacgggctgtggtgcaggctgaggagaaggacttgacggcc

SEQ ID NO: 74535 - DNA, 181 bp, Zea mays
gcagctaaagctttgggacaaatcaagcctcctggagtagaggttcactttatagtcgctgcctatgaaaatatgatcagtggcacaggcatgagacctggtgacattgtaactgcttccaatgggaagacaattgaggtaaataacactgacgcagaaggaaggctaacacttgctgatg

SEQ ID NO: 74536 - DNA, 248 bp, Zea mays
tgcttcttgagcttattactgggcggcgaccaattgacacaacccaaacatatatggatgacagcttggttgactgggcaaggccattactgatgagagcgctcgaggatggtgaatatgatgctttggtggatcctcggctcggaaaggacttcaatcctaatgagatggcaagaatgatagactgtgcggctgcgtgcgtacgccattccgcacgtcgtcggccacgaatgagtcaggtcgttcgg

SEQ ID NO: 74537 - DNA, 251 bp, Zea mays
aagagagctccacgcgccgtcaaggccatcaaggagttcgctcaaaagatcacacacaccgatgatgtgagaatcgatgcttctttgaacaagttcatgtggtccagaggcgtcagaaacgtccccaagcgcgttcgtgttttgatcaagagagtcagaaatgacgacgaagacgccaaggataagatgtacaccctcgtatcccacgtcccaacaactagcttcactggtctccacacaaagaaggtaga

SEQ ID NO: 74538 - DNA, 247 bp, Zea mays
gtcccttcctcagacttacacagctctcattgctaacggcaaaggcaaagaacccactcttgaacaattccctcttcccacaccaggcaaaaataaacttcttgtcgaaattgcctttgctcctattaacccagctgatatcctcaatatcactgaagattatcctctccctgtgaggcctcctaacccagttggtttagaaggatctggtactgtagttgctattggagaagacctgaaagtgcct

SEQ ID NO: 74539 - DNA, 266 bp, Zea mays
cccggagaacccaatcatggatgagctccgtaagcgcgccgaggctgacaagaatgacaagtcagtcaaggatcttgtgatgttgctgttcgagacagctctcctgacctccggcttcagcctggatgaccccaacacctttggcacccggatccatcgcatgctaaagctcggtctgagcatcgatgaggacgagtctgctgaggccgaagctgagatgcctccgctggaggatgacgccggcgaaagcaagatggaggaggtcg

SEQ ID NO: 74540 - DNA, 270 bp, Zea mays
cggctcgaggaaagaggtggtggaagccaacaaggaagaccgtctcaggaaggcaatggaggcgcagacaatcatcaccgaagagctgaaacggtttgaggcatggcgggactcgctggagaccgttccaaccatcaagaagctgaggtcatatgccgacaggatccgagcctcagagctcgatgagtgcctacagaagatcggggatgacgttctcaccaagaagatgaggagagccatcgaggagctaagcaccggcatcgtgaacaa

SEQ ID NO: 74541 - DNA, 266 bp, Zea mays
attcaatgcggtttgtctcgtactggcacgttctgggctcacggaaaccctgcatttacacccaaggacggcagcaagaaagctcctcacccagatatcctcacaacagccaaggctctcggtaatggtatccccatcggcgctactatcgtaacagagaacgtgtcatcggccatcaagactggagatcacggtactacctttggtggaaacccgctcgtctgccgtgttgcgcaccacattgttgggcgattggctgcatccga

SEQ ID NO: 74542 - DNA, 272 bp, Zea mays
gaccatcctgcccgactcggagggcgccatcgacggccacctccgcgaggtggggctcaccttccacctgctcaaggacgtgcccgggctcatctccaagaacatcggccgcgcgctggacgacgcgttcaagccgctcggcaactccgactggaactccatcttctgggtggcgcaccccggcgggcccgccattctggaccaggtggggcccaaggtcgggctggacaaggccaggatgcgcgccacccgccacgtcctctccgagtacg

SEQ ID NO: 74543 - DNA, 276 bp, Zea mays
attcaatgcggtttgtctcgtactggcacgttctgggctcacggaaaccctgcatttacacccaaggacggcagcaagaaagctcctcacccagatatcctcacaacagccaaggctctcggtaatggtatccccatcggcgctactatcgtaacagagaacgtgtcatcggccatcaagtctggagatcacggtactacctttggtggggacccgctcgtctgccgtgttgcgcaccacattgtgctgcttgtgtgctgcatccgagctccaaaa

SEQ ID NO: 74544 - DNA, 263 bp, Zea mays
tgggaatgtgtacccagcgctgtacgaggaggcgtggaaggaccctctgaacgagacggtggtgcccgaggggtaccacgagtacctccgccccttgctcaagcagcagctcaagctctccaggctctagtctgatcggctaccccccctggaattctccatggcggctgccttctcagaaaatctcatgcgacctccgaatgaaagtgatgtaagctactaacgattcttgttagagccaggaaagaggctctccagccaat

SEQ ID NO: 74545 - DNA, 265 bp, Zea mays
taggcttccaagcgagcgaaagccttcctccgccagccgatctaccaacatcctctccgccgattggaggcacctgcgaagatgccgcagcggcactcaaagaacaacaacgacctcgccttcttcacgtacgaggagaagcggaagctcgggtacggcacgcagcgggagcgcctggggaaggactccatcaagcccttcgacgcctgctgcctctgcctcaagccgctcatcgacccgctctgctgccccaagggccatacct

SEQ ID NO: 74546 - DNA, 265 bp, Zea mays
ggacaagcacggcgcgtctctgccggccaacttcaagaagatgctttccatccagctccgtgggtccgcagccaagggcaagctcgtgaaggtcaaggcttcgtacaagctctcggacgccgccaagaaggcatcccccaagaccaaggctaagccggcaaaggccgccgctgccaagaccaccgcccccaagccggccaaggccgccgccgccaagtcaaagaaggcagcggctgccaagccaaagaaggccgctgctgctggg

SEQ ID NO: 74547 - DNA, 260 bp, Zea mays
gaataaagctatgcagaagattaccggtataaagagggaagatgcgataaacaaattgttaattggggaggtcttcacgcttcatgattatggctgtagggtgaaagatcatgcaactctaacgaaacttagcatactgatgaatgcagtgatttctggtcaggatcctgagaagctcttttttggtttcttcgacacagatgggaagtgtattgaatccttgctgacagtgaacaagaggacagatgctgagggtaaga

SEQ ID NO: 74548 - DNA, 184 bp, Zea mays
gtcgctcaagcaggccggcgacatgccggcgtacagctccatggcggacacgcagctgcacatgccggcgtcgcccatggtcggcccgaactccgcgttcgggctcgaccactccatggccaaggccatcatgagctcccgcgcctcggcgttcgccaagcgcagcaggggcgtcgtcgaccgc

SEQ ID NO: 74549 - DNA, 260 bp, Zea mays
cggctcgagcgacgaggtacggcgccatggctgcgcaaatgaaggccttcttcgactccaccggctcgctctgagaggcgcagaagctcgctgggaagcccgccgggttcttcgtcagcaccggaacgcagggcggggggcaggagaccacggcttggacggccatcacccagctagctcaccatggaatgcttttcgtcccaattggctacacctttggttcaggcatgttcgacatggatggtatcagaggaggcagc

SEQ ID NO: 74550 - DNA, 149 bp, Zea mays
ccccggaccccaaagactttgatttctcataaggtgccagcggggtcctattagtaacacccgctgatccctggtcggcatcggttatggttgagactaggacggtatctggtcgtcttcgagcgaccaactttcgtacttgattagtg

SEQ ID NO: 74551 - DNA, 154 bp, Zea mays
gcgacaaggctcctgtgcagatccgcactagaaaattcatcagaaacgtccttctgggcagaagacaatgcatcgttgatgtgatccaccctggtcgcgccaacgtcagcagaagcgagctgcaagagaagcttggccagctgttcaaggtcag

SEQ ID NO: 74552 - DNA, 148 bp, Zea mays
agtacactacgtctccggtgtcgctaacatagtggtcttgcttcaagctttgtgctagcaccccaaacaggtgccacgggagaggacccgacttctttggttctttgtagtacttgccaagaaccggttttgctgcctcggtcgcctc

SEQ ID NO: 74553 - DNA, 147 bp, Zea mays
ttgcactctactcgtgtgctggggacctttgggtaccatgccccagaatacgccatgacaggccagatcaaccagaagagcgacgtctacagtttcggcgtgatccttctggagctactcaccgggcggaagccggtcgaccacacc

SEQ ID NO: 74554 - DNA, 146 bp, Zea mays
ctttgtcttgctgcgcaagaagaagggaaacgagaggagggcggcgctggcgaagaggctgctcccgtcgctgaaccgggtgctgatggagaagctggtgcagcccaagaagaccgccggcggcatcctcctcccggaaacatcca

SEQ ID NO: 74555 - DNA, 143 bp, Zea mays
ccttgttcgtgatcaactttgacccgatcaacacgagaattcgagatctggagaggcactttgataaatatggcagggtcgcgaatgtaaggatcaaaaagaacttcgcctttatacagtttgaggcgcaggaggatgctact

SEQ ID NO: 74556 - DNA, 155 bp, Zea mays
tcgagaggcgcgcatccgagggcgtgaggctggagctgcgcatcaccgaccgccgcgggctgctcgcctacgtcacgcgcgtgttcagagagaacagcctctcggtgacgcacgccgagatcaccaacaggggcgacatggccatgaacgtgttc

SEQ ID NO: 74557 - DNA, 149 bp, Zea mays
cgagtacgtgctggaggggagcgcgccggtgctcccggagacgcagcggctgttcaagaagctcgtctcgctgggcatcaagccggtgttcctgacgggccgcaccgaggaccagagggccatcaccgtcaccaacctccgccgccagg

SEQ ID NO: 74558 - DNA, 153 bp, Zea mays
cgagtacgtgctggaggggagcgcgccggtgctcccggagacgcagcggctgttcaagaagctcgtctcgctgggcatcaagccggtgttcctgacgggccgcaccgaggaccagagggccatcaccgtcaccaacctccgccgccaagggta

SEQ ID NO: 74559 - DNA, 141 bp, Zea mays
ggtccccaaaacatggtcatagggtgtgtctagtctgcccttcgttgcagccgggcaattttccttacatatattgcctttaatcaagtatcagatgagtgtcaagtcgctgcggttaattgtttgtatttcttatgcttt

SEQ ID NO: 74560 - DNA, 265 bp, Zea mays
gaagctttatacattctatcctacgcttgggggaatgatgatacagttcaggagagcctcggtatccgcaaggggacaattggagcatggaaacgatacagccatgcattgccttacaattatgatatccagagtgcagtggattaccattcaaggctagccacaaaaggatacagggcgctgatatacatcggcgaccacgatgcggttgtaccccatgttggcacacaagcatggattagatacctcaacttgacaatcgttg

SEQ ID NO: 74561 - DNA, 267 bp, Zea mays
ggtttccaatgggccactaaagaatctgtactttgcgaagaaaacatgcgtggtgtgcgtatcaatattcacgatgttacactgcacgctgatgctatccatcgtggtggtggacaaattattccaactgctcgtcgttgtttctatgcttgtttattgaccgctgctccacgtttgcttgagccagtctacttggtcgaaattcaatgcccagacagtgctaatggtggaatttacggtgtacttaatcgtcgtcgtggacacgtt

SEQ ID NO: 74562 - DNA, 266 bp, Zea mays
cgcgttcgagtcggtgctggccgccgccaaaggcaagaagatcgtcatgttcctcgactacgacggcaccctgtcgccgatcgtcagggaccccgacagcgccgtcatgtccgaggagatgcgggacgcggtgagaggcgtggccgagcacttcccgacggcgatcgtgagcgggaggtgtagagacaaggtgttcaacttcgtgaagctggcggactgtactacgccgggagccacggcatggacatcaagggccccacaacaca

SEQ ID NO: 74563 - DNA, 258 bp, Zea mays
tcggcaaaggcgccggagcgccatgaccgtcttcaacagccagctgcccggcgtcgtgctcgccgcgcagaccctgttcggggccgacccggagatccctgacgacgtcctggccaagagcttccaggtggacgccgacaccatcaagctcctcaagtccaagttccagaaaggatagcgcgcgcggccgacctgctcgctagatttgcaatttccttacagttttgtttcatcagtacataactaatgttgtttcgc

SEQ ID NO: 74564 - DNA, 268 bp, Zea mays
gcttcttccaccgcggcatcgtgcccggcctctgcttcggcgcggtaagctagctagctagccacggactgtgcctggttagtttagttagttggttggtcggatgacccacctctttccggtccacatgttcgtccacagggcctggggattacgctgttcggcatggctcacatgttcgtcctctacggcctggtccaccgccgctttccggtcggccccatcgccgacgtgccctacttccgccgagtggctgcctcgcacaagg

SEQ ID NO: 74565 - DNA, 265 bp, Zea mays
ggagcggtccagaacgctgggttcgaggtcatcccgatcgagccgcgtagagacctcagcgtggaggacttcgcccggaccgtcgactcgtgcgacgtgctcatgggcgcgcacggggccggcctcaccaacttcttcttcctccgtaccaacgcggtgatgctgcaggtggtgccgtgggggcacatggcgcactcgtccatggcgttctacggcgggccagcaaaagagatgaggctgcgagatgtcgagtacagcatcgcgg

SEQ ID NO: 74566 - DNA, 268 bp, Zea mays
gacatggcgtggctctccgtcgtcgccgcggccatgtcgttctcgtacgccttcatcggcctcggcctcggcctcgcaagaaccattgctaacgggacgatcaaaggaagcataacaggtgttcggatgaggacgcctatgcagaaggtttggcgcgtctcgcaggccatcggcgacattgccttcgcgtacccctactccttgatcctcctggaaatacaggacaccctgaagtcaccgccggccgagaacaagacgatgaagaggg

SEQ ID NO: 74567 - DNA, 269 bp, Zea mays
gaagagtactcagcgaattatcaacaataatggccaccgccatagttcccacggacgccgagctgctgcaggcgcaggccgacctgtggcgccacagcctctactacctgacatccatggcgctcaagtgcgcggtggagctccacatcccgaccgccatccacaacctaggcgggtctgccacgctgccggacctcgtggccgcgctgtccctgccagcggccaagctcccgttcctcgggcgcgtgatgcggctgctggtcacgtcg

SEQ ID NO: 74568 - DNA, 263 bp, Zea mays
caagaagctcataacaattgctatggaccgcaagaacagggagaaagaaatggcatcggttcttctcccttcattaagcatggagctgttctcgtctgaagacatcgccaagggatttgtaatgctccttgaatctgcagaagacaccgcgctggacatattggatgcctcagatgagctgggactgttcctagccagggctgtgattgatgacgttctcgcacctctaaacttggatgagattagcagcaagcttccaccaa

SEQ ID NO: 74569 - DNA, 274 bp, Zea mays
ggcacatgggtaaattctccactgccgttaacctctgggccgtgatctggaccacattcgcttctgttatcttcttcttccctacgtcccgacctgtgactggtgagaccatgaactatgcaattgtgttcatggcatttatcatgttgtgtgccatggtgtattggtatgtgcgagggaagaagttctatgctggtccactcaaggagactaccattcagggcgaaaataccggtggtatttgggagtcggttcctgtcgagacggaaaagac

SEQ ID NO: 74570 - DNA, 100 bp, Zea mays
caaccaaggataaaggcttttgttgtcattggagtcaacactgcattcagcagccgcaagcgccgtgattctgtccgggagacatggatgcctcaaggag

SEQ ID NO: 74571 - DNA, 205 bp, Zea mays
gaccgcaaaatcaagctggaagtctcacccggtgctattgaattcttgggaagccgtgggtatgacccgaactatggcgcgaggccggtgaagagagtgattcaacagcacgtggagaacgaactcgcgaagggcatcccagaggtgatttcaaggacgaggacagcatctttgtggtcacccaggtcacggtgccctctaacgg

SEQ ID NO: 74572 - DNA, 195 bp, Zea mays
gacgattgaagtgctaaggtatgcgagcaaattcttttcaaattagtcggatgggagccagcagatgctcatgttttagacataaaaccatgggcaatgcatgctgaagttgcagagaagtacatctgctgctctatcgagtaatcctctctggtgatgccgcacaccggtttcctcctgttggtggttttggaa

SEQ ID NO: 74573 - DNA, 186 bp, Zea mays
ggcagatgtcgaaaccttaagagcaaaggtgaagatggcagaggactcagtgaagcgggtaactggcatgaacacattgttccctgccgtgtctgatatgtcgtccctcagcatgccattcaatggctccccatccgctccgcctctgatgccgccgtacccatccaagatgacctgaacagttac

SEQ ID NO: 74574 - DNA, 132 bp, Zea mays
ggtcaccaaaacatggtcatagggtgtgtctagtctgcccttcgttgcagccgggcaattttccttacatatattgcctttaatcaagtatcagatgagtgtcaagtcgctgcggttaattgtttgtttttc

SEQ ID NO: 74575 - DNA, 268 bp, Zea mays
gggaagcaatggcggccaacggaggcgggtaccgggcggaggacgactacgactacctcttcaaggtggtgctcatcggcgactccggcgtcggcaagtccaacctcctctcccgcttcaccaagaacgagttcagctcgagtccaagtccaccatcggcgtcgagttcgccacccgcaggctccaggtcgacggcaaggtcatcaaggcccagatttgggacaccgccggccaggagaggtaccgtgcaatcacaagtgcctattac

SEQ ID NO: 74576 - DNA, 264 bp, Zea mays
tcttcctttcagaagatatcgttgttatttaaacattaaaacttgtttaaaattttatttcatgtctaaacatttagaagtaaattaaatctaatcatgttgcgaaccgctgtcaactcaataaacacaattgtttttcgttctaataaattaggacttttgagttgtcgatcgaaacatactttaccagacttgccatatgattacaatgctttagaacccttcatttcggctgaaataatgcaattgcaccattcaaaacat

SEQ ID NO: 74577 - DNA, 189 bp, Zea mays
tctcattaacaacgagtggttcaagaaggggtatcagcctcccagatttgaaacagcagatgttaatctggatgacgtgaactccatcttcgatgaatccggggagccagcacagcttgttgttgagaggagagaagaaagaccatcagtgatgaacgctttcgagttaatctctacgtctcagggcct

SEQ ID NO: 74578 - DNA, 256 bp, Zea mays
tccgacatcgtctcttcgtccccacgagcaaccgataatccgccggcgctgagatgttggtttatcaagacctcctatctggcgacgagctcctgtcggattcattcacctacaaggagctcgagaacggcgtcctgtgggaggtcgagggaaagtgggtcacccaaggtcctgttgatgtagacattggtgccaatccatccgccgagggtggtgaggatgaaagcgttgatgacacagccgtgaaggtggttga

SEQ ID NO: 74579 - DNA, 254 bp, Zea mays
cttcaagaactagctttcctgaaggtggaggatgcggtactttttgcccttgcccaacaccatcgtactaatgttgctggagcagctgatccagatattaaatcatctggggatgaaaaattcactgaggcatttgacctaagcaaggaggaggaagaagatgtacagttcaagcaggcttggctcatatatttctggaggagggctaagaccaacaacgtggaagaagatattgccgaggagcgattgcacat

SEQ ID NO: 74580 - DNA, 252 bp, Zea mays
cgcgctgtgcgcacggtgcccggctactggttcacggtggcgctgatcgacgtgttggggcggttcgcgatccaggtgacggggttcctgatgatgacggtgttcatgctggggctggccgtgccgtacgagcactggacgacgccggggcaccacatcggcttcatcgtcatgtacggcctcaccttcttcttcgccaacttcgggctcaacgcgaccacgttcatcgtgcccgctgagatcttcccggcc

SEQ ID NO: 74581 - DNA, 259 bp, Zea mays
tctccatgcttatgaacgtgcggacgagtctacaattccagacctgatccttgtggcgctgtccacataactatcggcgacggtgggaaccgtgaaggcttggcccgcaggtaccgtaacccgaagccagcgtggtcggtcttcagggaagcgagctttgggcacggcgagctaaagattctgaactccacccatgcccactggacctggcacagaaacgacgacgaagagccggtgagaaccgatgacgtgtggataa

SEQ ID NO: 74582 - DNA, 253 bp, Zea mays
cccttgcagggtggacgcggacgcgacggcaggatgtctgcggagcacgtcagacagaccatcacgcagagggcgtccgagaacaagctgtcgaagatcacacagcaggcggaggagttcgcccggctgatcatggaggagctggacccggacaaactcggctacatcgaggtgcgcaacctggagaggtctgctggaggaccccagccagtcggtgagcatcggcaccggcaaggacatgagccagatgctg

SEQ ID NO: 74583 - DNA, 252 bp, Zea mays
cggtaagatgcaagatgtggacattgtcatgtggcctgggggactgtctgcaggcctattgagctgggtggccttggtatttcgagcttaaaagagcttgcttggtcacttagaatgcgttggttatggttggcaaaaactgacccaactcgcccttggacttctattcccatccaagttcctaagaaagtaaaagatttcttctcaatggctatgcaaactgatattggtaatggtgcttctacgtttttc

SEQ ID NO: 74584 - DNA, 251 bp, Zea mays
gattggcaaggagattgaggagaagaaggcagaactggagccaaggttgcggaggcttatgaagcatctcctcctgaggtcaaggctctgttcaaggataagaagccagtcaagatcagcaagaagaactcgactgcagttaccaagttcctcgatgagctggctaagattgacttccctggagccaaggtggtgagcgaggcggtggccaagtccggcgcctcgcccctgtctccggcgatcaccttcat

SEQ ID NO: 74585 - DNA, 237 bp, Zea mays
ctaacacagatgacgagtccgattgaatcgattcgagtgaaccatggggataatcgaggcatttgtctgagagaagaaaaagacgaaacaaaagaagagagaaaagagaaaaagacaaacaaatcaaaaacgagaaaaagacatcaaacaaaacaaaaagaaaaaaaaagaaaacaatcaaaaacacaaaataaagaaaagaaaaaaactcaaatataaatgaaaaatatgtacaac

SEQ ID NO: 74586 - DNA, 242 bp, Zea mays
cattgaaaagagtggttaccaggcactcccctgggttagatatatcacgatggctggcgaatatgagctgagacttatatgagttttctcttttctggctgatggaagacatttatgaagctgcaagatacatatttgctcgagacagcaaccgtatgacatttgaatgttagcctggacgtcttctgccgaccacacaaggttttccccctgggggcttgttcatcttgttaggctcacct

SEQ ID NO: 74587 - DNA, 278 bp, Zea mays
cgaacctacctgactattgaggcacacaggggttcacttacagcattggcggttcaccggcatgccccagttgttgctagtggctcagccaagcagatgattaaagtgtttagtcttgaaggagagcagttgacaataattcgctaccagccatcttttatgggccaaagaataggcactgtgaactgcctttcttttcacccatacaaatcactcctatctgctggtgctggtgataatgctcttgtctctatctacgccgaggaaaattacaagta

SEQ ID NO: 74588 - DNA, 271 bp, Zea mays
cactctcttaggtattaaatttctctcgacattctcaaatcgttgttctcttgcaacgcactaaccttcccaggggtcgttgcggtttacgttccacttccccccgtttgttccacaagtctttatctttctacaccacttctgtacgcacctcaacaataacaaccaaacaaccttaaacaaaacaaaacatggctaacgacgaatacgattttcttttcaaagtcgtccttatcggagactccggtgtcggtaaatctaaccttttgag

SEQ ID NO: 74589 - DNA, 275 bp, Zea mays
tgaagatgcccgagacggcgcggtacacggcgctggtggccaagaacgccaagcaggccgcggccgacatgtccaaggtgctgcagactgagatcgtggacgagcaggagaagctggacgccgccgagggcgccaacagcttcggcctcttctccagggagttcgcgcgccgccacggcctccacctcgtcggcaccgccaccacctggttcctgctcgacatcgccttctacagccagaacctgttccagaaggacatcttcaccagcatcaac

SEQ ID NO: 74590 - DNA, 273 bp, Zea mays
gaaaagcaacaggagttctgaggcttacacatttaaccatgatagtatggctcgccgtgcattaaaaaatacatgccttgcataccttgcgtcattgaatgagccagatttcgttgagcttgcactgcatgagtacaagtctgcgactaacatgacagagcagtttgctgcattagcagcattatcccaaaatccaggccaagttcgtgatgatgccctcttggatttctataacaagtggcagcatgaatacttggttgtaagcaagtggtt

SEQ ID NO: 74591 - DNA, 273 bp, Zea mays
gcacggccaacaccagccagttcttcccgaacacgacggtgttcatggacctcatcacgccggaaaggtttgacaacaagtactacgtcggcctgaccaacaacctgggcctcttcaagtcagacgtggcgctgctgaccaacgcgacgatgaaggccctggtcgactccttcgtgcgcacgaggcgactttcaggaccaagtttgccaggtccatgatcaagatggggcagatcgaggtgctgacggggacgcagggcgagatcaggcgcaa

SEQ ID NO: 74592 - DNA, 271 bp, Zea mays
tcttttgacgaaccaccgaaagaagcttccttcaaatcaaaagcaatgccctctgcctccctgaaagatatcgttcacactctgctcaagggttaccaaacagaaaccccaatcctccagaagatcatcgatgtcttcttaatctatattcttattaccgggatcgttcaattcatttacgttgtcctcgttggaacgtttcccttcaattcttttctgtctggtttcatctcgaccgtaggatgtttcgttttgactgtttctcttcgta

SEQ ID NO: 74593 - DNA, 255 bp, Zea mays
ccaaaaaggcaacatagttttttcaacaaacaattaaacatgacgctgatgtttgaatacatggacattgtacttattcaactacaagcatgcccatcgcttattacaatgctagcaataaagggtacgtcgaaataaacagggtgcccatccagcactgatgactaaaatagtggtggcaaagaaatgagtagcggtggggaaaattctcatacatggtctcaatctacaatttccgtaccttataaaactatt

SEQ ID NO: 74594 - DNA, 267 bp, Zea mays
cagaaatgtatggtaccattgtttcggcgaattgctcattgtattaccagttcccacttccaggttgctgaaagagcgctcttcgtatggaacaatgatcacattatcagcttgattgcacaaaaccgccaagtgatcatgcctcttgttgttccagcgctagagcagaacattcagaatcactggaaccaggcggtcctgaatctgaccgtgaatgtcaagaaaatgttatctgagatggacgacgatctcttctcgtcatgcctg

SEQ ID NO: 74595 - DNA, 265 bp, Zea mays
caaactccaagggcgtgtatactgtcgccgagactatgccggagagcgacaggtgggactcgtgcttggcgaggcctatgagcagcttccatctacattgcacacggcggggtgatgctcactctggggtgaagttcacttacaacaaatcgtctgggaacccgcacaccgtcaagcctttcctctacaagccggccaccgtccctctgtattgtagttaaacaacacatcttgctggaacgcagaagatagaacatacaggaag

SEQ ID NO: 74596 - DNA, 273 bp, Zea mays
cactggtcaaatccttgcgagcctcgtcatgaatccaccaaaggttggggacgaatcatatgcttcctacaaggcagagaaagatggaatccttcagtctttagctcgccgtgcaaaggcactggaagatgcattcaacacgcttgagggattttcatgtaacaaggctgaaggagcaatgtaccttttccctcagatccatctgccacataaggcaattgaggctgctaaagctgccaagaaagcacctgatgcattctatgcgctccgtct

SEQ ID NO: 74597 - DNA, 178 bp, Zea mays
cagcgtctacggcttcaccctcatcctcatggtgctctgctccgtcgcgtccggcctctcgttcgggcatacgcccaagggcgtcatcgccacgctctgcttcttccgcttctggctcggcttcggcatcggcggcgactacccgctgagcgccaccatcatgtccgagtacgccaac

SEQ ID NO: 74598 - DNA, 260 bp, Zea mays
gttttatatataggacactcttggagctcctgggggttgtcgcggatcgccgtggtgggctgccgattgcaacatgtgtttcctcccgtgatgagcttgatgccgtctgtgctgccgtcgcaaacctcccctttgtgtcagcgtcacctctgtatagtgatcaagctgaagcagagcgtgcatctattcttgagaactttcgtcaagaaacaactcagtggaataaaactgctaaagctaccaatattgccgaaagttct

SEQ ID NO: 74599 - DNA, 267 bp, Zea mays
cgaggatggaagccttgaactggagattaaagcattcaatcttcatgctgttttcaaagaagtgatgggtttcattaaaccaattgcatctatcaagaggctatctgtatcggttatgttggcaccagatctgccgttatgtgcaattggtgatgaaaagagactcatgcaaactattctgaacatctctggcaatgctgtaaagtttaccaaggagggacacatcacgcttgtagcttccattgtgaaggctgactctttgagaga

SEQ ID NO: 74600 - DNA, 292 bp, Zea mays
acgaaaagcgatcgccgctgctgttgagggcgttgaaaagcattggggaacagctgtatctggtcctaacaattttattgagactcttcgagaacggatgtttaggccatcactgtctaccattatctctgagaattcaaagtagggtggtcactgttgtaccatcagacacggtgttgacagtctcaaataagatgctggaactaaaaatgagttcagcagttgtagcaatcgaaagcaaacctgggggaattctgacatctagagatatcctgatgcgtgttcatcgcca

SEQ ID NO: 74601 - DNA, 277 bp, Zea mays
ctcgacgcaaatcgtgaaacagtttagaatttccaacgaaagtcctacgagcctgcgagtgctaaactgctaactgctaagactgcaatggcggccggagggagctgcagctgctgagctcatggtacagcccctacgtgatccgcgccaaggtggcgctggggctgaaggggctcatctacgagttcatcgaggaggacctcttcagcaagagcgacctgctgctgaagctcaacccggtgcacaagaaggtgcccgtcctggtccacggcggccg

SEQ ID NO: 74602 - DNA, 285 bp, Zea mays
acggaaccgctgctgcccggcccattttaccaccgatccatggcggaggattcggcggcggcggccacgtggggcggcggcgacaagctcatcctgcgcggccttcagttccacggcttccatggcgtcctgcgggaggagaagacgctggggcagaagatcgtcgtcgacatcgacgcctggatggacctcgccgccgccggcgagtccgactgcatcgctgacaccgtcagctacaccgatatctacagcattgcaaaggatgttgtcgagggcacgccacgc

SEQ ID NO: 74603 - DNA, 287 bp, Zea mays
atcaacaacgcaccggcaagctccagcggatcatcatcaagcagatcgaacgaaccccaagacacaaccggccgtcgactagcgcatctccaacgactgaaacaatggcgcaccacttcctgggcaacaagcaccatggacgagaggcggccaaggtgaccgactggcgcaaggaggagaagcaccacaagcacatggagcagctcggccagctcggcgccgtcgctgcaggagcctacgctatgcacgagaagcagaaggcgaagaaggacacggagcacgcgcac

SEQ ID NO: 74604 - DNA, 275 bp, Zea mays
atttgtcaaccccttcacgccctattgaggataggtgcactgtttttgtgggcggaggaccattctacagcctttcagacactaaaacaggccctaatgttagccccggttcttgcccttccagatttctccactcagtttactattgagactgatgccagctctattggtgtgggtgttgtccttatgcagaaaggtcaccctttggcctttttaagcaaagcattaggccctaaatcctgtggcttgtcagcttatgagaaggagtttatggc

SEQ ID NO: 74605 - DNA, 284 bp, Zea mays
cgccagtcttttgagatggtgcgagttattcgagataagattctgaaccacttgggtgccgatgaggtaccactggttgtggtgggaaacaagagcgacctgaagggtgaccaacgacaagtgacgctcgacgagggccgacaacttgcggaagagttccattgtgcctttaccgaggccagtgtcctccttcacttcaatgttgccaaggcgttcgatttgattattggagagattgaaaagtctcagaaaccatcacagcccgctgggaacaacaagtgtgg

SEQ ID NO: 74606 - DNA, 270 bp, Zea mays
gcaactttgaaaggctcaagtctagtggtgaccatgttgctactcaaattcagaagagcttaaggctaattgttgctggtggtgacggtacagcaagttggctgcttggagtagttagtgacctgaaactatcacatccacctcctgttgctaccgtacctcttgggactggaaacaacctccctttttcatttggatgggggaaaaagaatcccgctactgaccaggcagcagtgaaatcattcctggatcaagtaaaaggagcaagag

SEQ ID NO: 74607 - DNA, 279 bp, Zea mays
ctgaggcatgaggcggtgggcgtgttcctgacacactgcgggtggaactcaaccatggagagcttgtgcgtcggggtgccgatgctgtgctggcccttcttcgcggagcagcagaccaactgccggtacacgtgcatgaagtggggcgtggccatggagatcggccaggacgttcggcaggaggcggttaaggagaagatccgagaggcgatgggcggggagaagggaatggagatgcagcgccgcgcgggagagtggcagcagactggtctccgcgcg

SEQ ID NO: 74608 - DNA, 308 bp, Zea mays
ctgggtcttcacgccgtcaaggatcgcgccgtggttgtcaacagaaaggtcgaggttcgccacgatgatgtcatctgggcggcttaccatattgaccgacagacatgctcgattggaaggggaagccgtccaattcccttgtcaaggtcaagggatatattgaagaccccaggaaaatgctgttgtaagggatattccaatctcattcctagtgttgcatacctgaggatagcgataaactctttaattcgagaatgccatacctacaggccagcggagagggacttggcgatggcgactgtggacgt

SEQ ID NO: 74609 - DNA, 275 bp, Zea mays
ggacacgccagggaagaaggcgccggtggccaagaagtccgctgctgccgcgaagaaggcccctgccaagaaggccgctccctcgaagaaggcggcgaccccggtgcggaaagcgccgtcccgtaaggccaagaagtaaagcggccaagaaggggggcgcgatgctgtaaatttgatatcggagaggctcggcctcactggtcattcagtatccgagaccgatagctgaggctagtggcgatggaggactgtgttattactactataaactggtg

SEQ ID NO: 74610 - DNA, 288 bp, Zea mays
gcacgtgtggcggcggaaggcgagccagaggtcaccctggatcgcggtcaaggacctgatggagtccgacaagaacgtgatgctggcgagacgcgccgaggacgtgctgctctgcctcaagcagcggttccccggcctctcgcagaccacgctcgacgccagcaagatccagtacaacaaggatgttgggcaagcaatactacagagctattcgagggtgctggagagcctagcgtacaacatcgtaacatgtgtagatgacgttctcttcgcagatgaagccgccag

SEQ ID NO: 74611 - DNA, 284 bp, Zea mays
tagggaggccaccccgatctccatgaagccaccggcgccacccccggtcactctggagcccatagaattgtcaacgcatgccgtcggactgaccgagctggagcgatccagcatgaacatgctcgcaatagcgccggaccccaagcggcagagggtggaggaggctgcggatggcaacgggtaaaagcattgcgcctgcaagaagtccagatgcttgaagctctattgcccatgttttgctggaggtggttatcgttccgataagtgtggctgccaaccatgtt

SEQ ID NO: 74612 - DNA, 280 bp, Zea mays
gttttctttggaggggccggaaggaggcaagaggaggtcattgtcttgtagcctggggtcgagtttgccgaccactgcagcttggaggtcttggcatatctagttttctagaattatgttgggcccttcgaatgcgttggcgctggctgcagaagactgatcctactcgtccttggtctgatctccacataaaagttcctggaaaagctagagctttcttcatggaggtggtcattactgaggtgggagatggcacaaatacaaagttttggaaggataa

SEQ ID NO: 74613 - DNA, 279 bp, Zea mays
gttttatatataggacactcttagagctcctgggggttgtctcggatcgcaaatgtgggctgatgattgcaacatgtggttcctcccgtgatgagctagatgccgtctgtgctgccatcgcaaacatcccctttgtgtcagcgtcacctctgtatagtgataaagctgaagaagagcttgcatctattcttgagaactttcgtcaagaaacaactcagtggaatagaaatgctagagctaccaatattgccgaaagttctaagcatgaaagtacaggct

SEQ ID NO: 74614 - DNA, 263 bp, Zea mays
tcggctcgagctcatcctgacaccgaggatatatacgtagtgctgcatggattatgcagaagagctaaggttgaaggttatgctccattgactgaactagtaacaaaagatgtctccgaagaggaaagagaagaaaaccttaccttccatagtgagaagctagcagtggcttatagtgtcctgaagactggtccagggacagaaataatggtttcaaagaatttgcagatttgcagtgactgtcatgaatggatgaagataat

SEQ ID NO: 74615 - DNA, 266 bp, Zea mays
gaatattctgtttggcagtcaaatggatagacaacgtgacaagagagtcattgcagcttgctgtcttaagaaagatcttgagctgctccagtacggagatcagactgttattggtgatagaggcattaatttgagtggaggtcagaaacaaagagttcagcttgctagagcactctaccaagatgctgatatttatttgcttgatgatcccttcagtgctgttgatgctcatactgggagcgaactgtttaaggagtatatattga

SEQ ID NO: 74616 - DNA, 262 bp, Zea mays
cccggcccaggaccacggtgctcggcaacatccccggcaccatggtgtaccggaggatggaccagtacgccgccgcgcagacggtgcccggcgtgctcgtgctgcgcgtcgacgcgcccgtctacttcgccaacgccagctacctgcgagagaggatctcgcggtggatcgacgacgaggaggagcgcaccaagagccagggcgagataggcgtgcggtacgttgtcctcgacatgggtgccatcggtagcatcgacacgag

SEQ ID NO: 74617 - DNA, 260 bp, Zea mays
  unsure (1)..(260): unsure at all n locations
gaccactggattttctgggtgggcccgctcctgggcgctgccatcgcggccttctaccaccagtacatcctccgggcgggcgccatcaaggctctcggctccttcaggagcaacggcgatcgatcgatctagcgtggggagaggcggataggcgggcgcgcgagggaggagaataagttccagncggtggcccggtctcgtcggtcgcttttgttccagcatgcagctgcgtcgcgttcgtgtgcgtgcgtgggggtctc

SEQ ID NO: 74618 - DNA, 261 bp, Zea mays
ccacaactgatcaatttcatcatttgatcggtttttatcacttttccatcgatttttcatcgactttcgatttatatcactttcttcatcatgaccggacgcggcaaaggcggaaaaggcctcggcaaaggcggcgcaaagcgtcatcgtaagattttgcgcgacaacatccagggtatcaccaagcccgctattcagcgtctcgcacgtcgtggtggtgtcaagcgtatttctgctatgatctacgaagagacccgtggc

SEQ ID NO: 74619 - DNA, 262 bp, Zea mays
ggcgaacaccccgatactgctccatgaccataacgagtttctgagcaaagacgagtacctcaagggaatcgggatatacgagtccatcatcagggcactggccactcatgaagatggcggcaaagatgacgaatccagggcagagctgtgagcctgtgactgaggagaaccttgaaccttacctcgcttttgccgcagaccaaatggagcactggaagtcatgtttcggcattatgcagctgcctgtgcttctgctgcggcg

SEQ ID NO: 74620 - DNA, 262 bp, Zea mays
ttcaaagcacttgtgctacaacgggtgagggattgtatgaaggcctggactggctgtccagcaacattgcaaccaagtcctaaattgtcaagcgaggtttggatcatctaggagcttttggatgatgatgatgatgatggtgctggatatttagggttgggttggtatttccgtatgtaagatgtaggcccctgagctcggcagtttttgagctctgcttaagattctcacagttaaattgttttatgtaatttgggccttg

SEQ ID NO: 74621 - DNA, 260 bp, Zea mays
gtggcgtaacacttaacaagtttaaagacctataaataagttcgtggacctaagtggcacctcttgataagtttatggtccgttgatgcatttaactcatattttaatggtgccttggacttaactctaatattgtgttatgttatatcatttggaataaagtccttccattcatttttttgtgtgtccccaaactagagatgaattgattagttacaggaactaagggttccaagaaaaatgttgcatccttttcttta

SEQ ID NO: 74622 - DNA, 258 bp, Zea mays
gaacattcttctagaagttgaacccattaaattacgtgtgagaagcatcttccgtgaagcatgtgacggtgttagacttaatccagaagacgagaagtttatcctggagaaagttcttgagcaccacccggaaaagcaatccaaggtgtctggtgaaatcgactacctaacggtcaacaatcaccagactttccaggacactcggtgctttttcgtggtctccacagatggatcccaggcagatttctcctacctgaa

SEQ ID NO: 74623 - DNA, 260 bp, Zea mays
cagaaacaacggcctgcagctcgtggctcgagcccatcagttggtgatggagggatacaattggtgccacgaccagaacgtcgtcacaatcttcagcgcccccaactactgctaccgctgcggaaaccaggcagccgtcatggagctggacgaaaagatgcaacacacctttttgcagtgtgctgcggctcctcgtcgtggagagccccacgttacccgtcgcactcctgacttcttcctttgagccttctttttcttct

SEQ ID NO: 74624 - DNA, 263 bp, Zea mays
cggctcgagctccgacatcgtcatccgcaccgacgccgatggccgccaggtccgcgtgggcgacgtcgcccgggtcgagctgggcgcgcaggattatggcgtcaacacctatctgtcgaacaagcccaccgtcgtcatcgcaacgatgcagcgccccggctccaacgcgctcgacgcggcgccgaaggtgaaggcggagatggaacaactgtccaagcgcttccccaaggggctggaatatagcgtcatctacaacccgaccg

SEQ ID NO: 74625 - DNA, 271 bp, Zea mays
tccagctcatctcttcgttctgtttgtccagtatcttgcttgtcattcatattaacaatttaaaatggccaacaaattatatacttatccggaaaatttccgtgcttataaggcacttttggctgcccaatacagtggtgttcaacttgatgtctgacgtactttcaagtatggtgtgaccaacaaaaccgaagagtttcaaagcaaattcccattgggaaaattgccattgctggaaaccgcagatggacagcgtttatttgaagtaatg

SEQ ID NO: 74626 - DNA, 271 bp, Zea mays
gccggagcgcacttggtggcccgaacgtgagctgctcatcaacaagaaggatctgcgcttcccgcacttccccgccatcgacgacctcttcagcgacggcatcccgctgccggcgcagaccgggttcgacgccatccgcaccgtcgtcccgcgcatggtcaagctggtggaggacaccaccgaccacgtcctccgcttcgaggtgccggagatgatagagagggaccggttctcgtggttcaaggacgaggagttcgcgaggcgacgatcg

SEQ ID NO: 74627 - DNA, 271 bp, Zea mays
  unsure (1)..(271): unsure at all n locations
cggcaatgttccgtactgggaaggacagagttacggcgtcattcctcctggagagaatccaaaaaaacctggggctcccaatactgttaggctctattcaatcgcttctactaggtatggtgattcttttgatggaaagacagcaagcttatgtgttcgtcgtgctgtttattatgatcctgagttgggtgangaagacccctcaaagagaggtgtctgcagtaacttcctgtgtggctcaaaaccaggggacaaagttcagacacaggcc

SEQ ID NO: 74628 - DNA, 277 bp, Zea mays
ccaggaaggatggaagcccctggctccccctacgcctcctcgccggaatccgcccccaagcgtgccccacgctcccctccgcagcagcagcagtctccctccgaggaaggagatgacaaggagaaaccaacacatttgagatttctagtgtctaatacggcagcagggtgcatcattggtcaagggtggatcaaccattaatgattttcagtcccagtctggggctcgtattcagttatcacgtagcaatgagtttttccctggtaaaatgacagaa

SEQ ID NO: 74629 - DNA, 272 bp, Zea mays
  unsure (1)..(272): unsure at all n locations
gccattcgggcggctgtggtgggacgagacggttcctacagttgtgaccagagcagagcctcataaccaggttatattgcatccgactcaagcaagagtcttgactatccgggagaacgcaaggttacagggcttccccgattactaccgattgtttggaccgatcaaggagaagtatattcatgtcagcaacgcagtgncagtccctgttgcacgggcactgggctactgtctgggtcaagcctacctgggtgaatctgacggagtcagcc

SEQ ID NO: 74630 - DNA, 273 bp, Zea mays
gtcactcgcaggtcccggaacaaataaatataagcccaaagatgatactggcaagcttgccaaagctgctgataatactggcggttatcgagcaacaaatactgcgaaaggaccacaaagtagtgtttcaaattacactcccactgttgatattggtaaacaagctcctgctggaaattctgatgatggatacagaagacttggtgctgctgctggaccacaaagtagtgtttcagaatacacccccactgttgatattggtaacaagctcct

SEQ ID NO: 74631 - DNA, 275 bp, Zea mays
gttggagcgcagttcgttcgtcacaacaagtctacttttgagggacgttttcaaggtgttttttgtactgatgctggcgacaattggggtgtctcagacaagcgcgttggcttctgattctacgaaggccaaggattcagccgtctccatatttgcgttgctggacaggaagtcccagatcgactggagcatcgatttaggctcgacgctagacgaggtcaggggcgacatcgatttccggcacgtcggcttcaagtatccgagtggccagatat

SEQ ID NO: 74632 - DNA, 254 bp, Zea mays
cgcagatcatccaccgcgacctcaagcccgccaacatcctgctggacgacgacctggaggcccgcatcgcggacttcgggctggccaaggcgatgccggactcgcacacgcacgtcacggcgtccaacgtggccggcacgctgggctacatcgcgccggagtactaccagacggtcaagttcacggccaagtgcgaactgtaccacctccggggtcatcctgccgttcctggcaacggggaaggacccgtccga

SEQ ID NO: 74633 - DNA, 271 bp, Zea mays
cgatcttgggttcgtaatggtgttccacatgaaagtcagccaagctttggaaatggtgaaccacttcttccaagacctttgcctgcttcagttgtagattctagaatatcagacaaggacgataatgatgttgcaggtgaagattcagatgaagagccacagaagaatgccaacggtgaatacaatacaagtgatttattgaagcagcatgtaaagcgtgcgaaaaggatacgtgctgggttgcaaaaggatcggcttcgtcgattgaaag

SEQ ID NO: 74634 - DNA, 272 bp, Zea mays
atggcgcactaccacccgtgtccgcggacacttaccaagacctcgaggctggcttctccggccactcctcctcccctctgaagcccgcggcctcgccgaggcggcccggccgcatgttctgcgacccctgcgacgacggcgacgagctccacggccgccaccactacctcgacatctgcttccgcccccgtaaactcctgtccggcaacagagacatcttcatgtacagaggtgacctgccgttctgcagcgaggagtgccgcaggagcaga

SEQ ID NO: 74635 - DNA, 261 bp, Zea mays
gtagactacctgatcaaaatgtctcttttgttgcctgataaattccagcacattttgcgtcttgccaacacaaacattgaaggcaagcgcaaaatcatgtttgctcttacttcaatcaaaggtgtgggcagacgtttttcaaatttaatttgcaaaaaggccgatattgatttggaaaagcgtgctggtgaattaagtgaagaagaaatcgaacgagtgatgactattttgaacaatcctcgccaatacaaatcccagact

SEQ ID NO: 74636 - DNA, 154 bp, Zea mays
ctacgacatccactctgctaggattccctccacagaggagatcgcagaccgcgtcgagaagatgctcgccgtgctcgacaccaacatcctctgggtgaaccctgactgtggtctcaagacacgcaagtacacggaggtcaagcccgccctgaac

SEQ ID NO: 74637 - DNA, 264 bp, Zea mays
gccggagcgcactagcgtggccccgaacgtgagctgctcatcaacaagcaggatctgcgcttcccgcacttccccgccatcgacgacctcttcagcgacggcatcccgctgccggcgcagaccgggttcgacgccatccgcaccgtcgtcccgcgcatggtcaagctggtggaggacaccaccgaccacgtcctccgcttcgaggtgccggagatgatagagagggaccggttctcgtggttcaaggacgaggagttcgcgagg

SEQ ID NO: 74638 - DNA, 260 bp, Zea mays
acgctttgcggcaatccagccgctccgtggccgctgtctccgtctctggcagactcgcttcggctcgcgttgctgctccctctcccttcgctgccggtgccaaacaggtccgctcatacgccgccgaggccaaggcctctcctactgaggtctcctcgatcctcgagcagagaattcgtggtgttcaggaggaagctggtcttgccgagactggacgtgtcctttccgtcggtgacggtattgcccgtgtccacggtttg

SEQ ID NO: 74639 - DNA, 262 bp, Zea mays
cggctcgaggtgcgatataactggcatcctcttggagatggacagaatattaaggcccgatggcacagctatcatccgcgacacagtcgacgtgctcacgaaggtccaggcaataaccaagcggatgcggtgggagagccgcatcatggaccacgaggacggccccttcaacccggagaaggtcctcatggcggtcaagacgtactggaccgccgaagccgaggaggagcactagcacacgagtgacaccgagctcacttga

SEQ ID NO: 74640 - DNA, 262 bp, Zea mays
cggcaatgttccgtactgggaaggacagagttacggcgtcattcctcctggagagaatccaaaaaaacctggatctcccaatactgttaggctctattcaatcgcttctactaggtatggtgattcttttgatggaaagacagcaagcttatgtgttcgtcgtgctgtttattatgatcctgaatctggagaggaagacccctcaaagagaggtgtctgcagtaacttcctgtgtggctcaaaaccaggggacaaagttcag

SEQ ID NO: 74641 - DNA, 257 bp, Zea mays
cggagatttcctgggggcaggggcgcggcaaggtggtggacggcgggcgcgggctggacctgagcctggatggggcctccgggtccgggttccagtccaaggacgagtacctgttcggcaagatcgagatgcagatgaagctggtgcctggcaactcggcgggcaccgtgacgaccttgtacctgtcgtcgcagggcgacgcgcacgacgagatcgacctggagttcctgggcaacgtgtcgggcgagccctacacg

SEQ ID NO: 74642 - DNA, 259 bp, Zea mays
aagccagtatggcacccctcctgcaaacaaagaggcggttgacgctctgcccactgtccaaatagcagaggctgtcagctgttcagtctgccttgatgatcttgagctagggtcccaggcaaagcaaatgccttgtgagcataagttccactctccttgtatactgccatggcttgaactccacagatcctgccctgtgtgccggtttgagctgccatctgaagagacagaagatttggatgagcctagcaatgtggac

SEQ ID NO: 74643 - DNA, 256 bp, Zea mays
tggacttcttgaaccaagtggcgaacagcctcgagaaggacagtgtataccatctagctgagaagaagatcccttccatccatgggttcacaacgggcctgaagctggaacagtttatattcgacgccttcacttactccccatccacagagcttttcgaggtcatgcgggaggaggaattcgcgccggtaaagaacgccaacggcgcgacatacgacacccccgatagcgcgaagtcatgctgctccgcctccac

SEQ ID NO: 74644 - DNA, 258 bp, Zea mays
gttaaatatgctgccatgcttggtctgtcagcagcagcaatgaagtctaagctctttgccgatcaagaagaacgcgaagtgcaaagactaactgctactgtaataaatcatcagttgaagagattggagttgaagctgaagcagtttgcggaagttgagaccttgctcttgaaggaatgtgagcaagtagaaagggttagacacaggttttcagctgaacgcgtcaggatgaggtcagccctattaggtcccaccgga

SEQ ID NO: 74645 - DNA, 255 bp, Zea mays
tggagggcgacccgtacctgaagcagaggctgcgcatccgtgactcgtacaccacggcgctgaacgtttgccaggcctacacgctgaagcgcatcagggaccctggcttccaggtgaagccgcggccccacctgtcgaaggacatcatggacatgggcaagccggcgtcggagctcgtgaagctgaacaccaccagcgagtacgccccggggctggaggacaccctcatcctgaccatgaagggcatcgctgccg

SEQ ID NO: 74646 - DNA, 249 bp, Zea mays
cggctcgagccttcccctccgttgttgtcttgtcaagttgcggttgtctccctcctccggcgctcccttccgcccctcccttcccgccgcctcgccatggactacgtcgacgtcgtctactgccaccgccccgacgcgtccacgcccgtcgaggagacggtgcgcgccatgaactgggtcatcgaccagggctgggccttctactggggcacctccgagtggtccgcgcacagatcaccgaggcctggg

SEQ ID NO: 74647 - DNA, 250 bp, Zea mays
atttgtttggagagaaaccggggccgtgcttaccttgcaaagactggatttggacgaactgctgaagaaaggggagcgtgtgcctgcattgcagccagtgccgaactttgcttacctgacaaagtcttactccaatgttttcaccagtgtccctgtcggcgcggcttctcccaggtaaaaggtgtgagtggaggaggatgtatcaaatgatcacctgatgcagacaacggagaaacggtctccaggatca

SEQ ID NO: 74648 - DNA, 273 bp, Zea mays
aggtcggaattcggctcgagccacgttggtgctgctcatgtggacgatggtggtgctcagcatgcacccggagtggcaggaccgcgcgatggaggaggtgacggctctgttcggcagggacgacaagcccgagtatgacggcctaagccgcctcaaagtcgtgaccatggtgctctacgaggtgctccgactgtaccggccggccacctccgtcgtccgacaaacgtacaaggagatggaggtcggaggcgtcacctaccccgccggcgtgat

SEQ ID NO: 74649 - DNA, 249 bp, Zea mays
atgaaggcctggactggctgtccagcaacattgcaaccaagtcctaaattgtcaagcgaggtttggatcatctaggagcttttggatgatgatgatgatgatggtgctggatatttagggttgggttggtatttccgtatgtaagatgtatgcccctgagctcggcagtttttgagctctgcttaagattctcacagttaaattgttttatgtaatttgggccttgagatgtttctgaaccaaacagct

SEQ ID NO: 74650 - DNA, 248 bp, Zea mays
gcccggccaacaccagccagttcttcccgaacacgacggtgttcatggacctcatcacgccggaaaggtttgacaacaagtactacgtcggcctgaccaacaacctgggcctcttcaagtcagacgtggcgctgctgaccaacgcgacgatgaaggccctggtcgactccttcgtgcgcacgaggcgactttcaggaccaagtttgccaggtccatgatcaagatggggcagatcgaggtgctgacgg

SEQ ID NO: 74651 - DNA, 250 bp, Zea mays
ctacgacatccactctcctaggattccctccacagaggagatcgcagaccgcgtcgagaagatgctcgccgtgctcgacaccaacatcctctgggtgaaccctgactgtggtctcaagacacgcaagtacacggaggtcaagcccgccctgaccaacatggtctcggccaccaagctcatccgcacccagcttgccagcgcgaaatgaggtcgtttgatagctccatggtctgatagcgcggaatgagcc

SEQ ID NO: 74652 - DNA, 268 bp, Zea mays
gccgtcgagtcgtcgcaggaacgatgacccggcggaacggctgtacgatctacgtgggcaacctccccggcgacatccgcgagagggaagtggatgatctcttctacaagtatggacgtatagtggaaattgacttgaaaattccaccaaggcctcctggttttgcttttgttgagtttgaggacgcacgtgatgctgaagatgcaatatatggccgtgatggatacaactttgatggccataggttgcgggtggaattagcccatgg

SEQ ID NO: 74653 - DNA, 267 bp, Zea mays
gaagcactgtaattgcaaaaactcacaatgtttaaagctgtattgtgagtgttttgcagcaggtgattactgtgacggttgcaattgtaaacaatgtggaaacactgttgagaacgaaaagggtaggcaggaggctattaacaacacaaagctaagaaatccaaacgcctttcaacctaagattgaaaatggcccaattccttctagtgtttggaaggatgctggagcactaccttcacatccaaagcataataaaggttgtcactg

SEQ ID NO: 74654 - DNA, 266 bp, Zea mays
tcgcgtcgctcctctgccagaactggtactgtctctccaagacactcgcggagctggaagcgcttgattacgcaaagaggagtggactagacgtggtgtccgtctgcccgtcgctggtgatcgggcccttgctgcagtcgacggtgaacgcaagcagctccgtcatagtcgattgcttgaaaggagtacgtgaggtgaagctgaagctgaggaacttcgtggacgtccgcgacgtcgccgacgctctgctcctggtgtacgagact

SEQ ID NO: 74655 - DNA, 273 bp, Zea mays
tcccgtcgctcctctgccagaactggtactgtctctccaagacactcgcggagtaggaagcgcttgattacgcaaagatgagtggactagacgtggtttccgtctgcccgtcgctggtgatcgggcccttgctgcagtcgacggtgaacgcaagcagctccgtcatagtcgattgcttgaaaggagatcgtgaggtgaagctgaagctgaggaacttcgtggacgtccgcgacgtcgccgacgctctgctcctggtgtacgagactccggagg

SEQ ID NO: 74656 - DNA, 272 bp, Zea mays
gtcctgaggcagccatttcctcttccgatcgtggagaggcttggagtggaaggaggctgctggttttcggcacggcggagatgtctgaggtgtcggtgataaaccaggcggaggtggaggacgcgggcgccgggcagctgatggacctgccgccgggcttccgcttccaccccaccgacgaggagatcagatcgcactacctcacccacaaggccctcgaccaccgcttcgtctccggcgtcatcggcgaggtcgacctcaacaggatcgag

SEQ ID NO: 74657 - DNA, 252 bp, Zea mays
  unsure (1)..(252): unsure at all n locations
ggtgcagaagaagaagggctttgttctgccgaggctaaagacggnnanngctnacctnggcangattatcaactctgacgaggtgcagtctgtggttaagccactcaacaaggaggtgaagcgcagggagaagaggaagaacccgctcaagaacatggctgctgtgctcaagctgaacccctacctcggcactgtccggaagatggccacccttgctgaggctgcccgagtcaagggccggaaggagaagtt

SEQ ID NO: 74658 - DNA, 269 bp, Zea mays
cggctcgaggcagcagcagcataaccagaggggagtacatcaagccgtttcgagagagttttagtgtctgtttgtttacccccatggattatataatctagattatttttggaggattatataatctggattatataatctggattatataatctgagtagtcctgtttgtttacccagattatttcagttgttaataggattcttttgtatgaggaagacaagaatgccctctatatttgtactaggttgaaactcatatatatataa

SEQ ID NO: 74659 - DNA, 264 bp, Zea mays
ggccgggctcccccacgccgcttcccgcctcgtgcctcgtgtccgccagcctcccttccgcgctctctgcgccgcagctgcccccggcgatgcctcgaagcggatgctggtactgtacaccaagccggggtgctgcctctgcgatggactcaaggagaagctccacgccgcgtccatgcttgctggcaggccctactcactcgcgtctctcgagctccaggagagggacatcacgacgaatccggagtgggagcggctctacca

SEQ ID NO: 74660 - DNA, 183 bp, Zea mays
gtcgcagaagaagaagggctttgttctgccgaggcccaagatggccaacgctgacctgggcaggattatcaactctgacgaggtgcagtctgtggttaagccactcaacaaggaggtgaagcgcagggagaagaggaagaacccgctcaagaacatggctgctgtgctcaagctgaaccccta

SEQ ID NO: 74661 - DNA, 259 bp, Zea mays
gccgcatcgacgtccaatggagcacggaggtcgctgctcggcttcgtggaggcgcaggggaacgcttcctaccactgcacgctctccggtccctgcgttccctgccagtattctgagaagaacgatgaaaagtatagctgcagcgaaactggctatcgcctgcccttgaaatgtgtacaggtccaaaatgctacaaaagaaggaaacatgagcaagcagaggaagatattggatgatgcatccacatcaggtggcacaa

SEQ ID NO: 74662 - DNA, 203 bp, Zea mays
gccgccaagatcttcagcagccctgaggtcgccgccgaggagccgtggtatggtattgagcaggagtacaccctcctccagaaggacaccaactggccccttgggtggcccatcggtggcttccccggccctcagggtccttactactgtggaatcggcgccgaaaagtcgttcggccgcgacatactggacgcccactacaa

SEQ ID NO: 74663 - DNA, 262 bp, Zea mays
attcctcacgagcgattgcggcggcggaagtaagaggcgatggggcactccaacgtgtggaactcgcaccccaagaactacgggcccggatcccgcgtctgccgggtctgtgcgaaccctcatggactgatcaggaagtacgggctgatgtgctgcaggcagtgcttccgcagcaacgccaatgacattggcttcatcaagtaccgctgaagtcagctgggcgggctatctgaatgccatctcttggacagtgtagtagagg

SEQ ID NO: 74664 - DNA, 261 bp, Zea mays
gttggccacatcgctcctgagtacctctccgctggccagtcatctgagaaaacagatgtctttggcttaggaatcctgctgctggagctgatcaccggtcagactgcactggcgtttgggaagtcgtcaaatcagaagggaaccatgttagactgggtgatcaagatgcacgaagaaaagtagctggatacacttgtggacaagggcctggagagccaatatgaccgtattgagctgaaggagatggagcaagtggcactg

SEQ ID NO: 74665 - DNA, 260 bp, Zea mays
cgagtgccagcagcaggttcagctctcgtgcccactgtgccgtgggccggtcagcgattgcatcaaggactacagcgcgcggaggttcatgaacaccaaggtccggtcgtgcaccacggagtcgtgcgagttcaggggcgcctaccaggagctgaggaagcatgctagggtggagcatccaacaatcaggccaatggaggtagaccctgagcggcagcgggactggcgccggatggagcagcaacgggaccttggagact

SEQ ID NO: 74666 - DNA, 262 bp, Zea mays
gtttgtgatttcactggtgatgcttttcaaagggaagaacgggaacgatggctgccattggtgccactacctgaactgcgtgccaacatccaagtggaagtgtaacacctagacacctcagttttctgtacactcgggggcaaaaatgtagtatccagatttacaagaccattctctatgtttgtgtgtctgtagatatgaacaagttctttgttgtttactggttttgagtttccttgcctatgtaaactgcttcgttgag

SEQ ID NO: 74667 - DNA, 261 bp, Zea mays
cagaaacaacggcctgcagctcgtggctcgagcccatcagttggtgatggagggatacaattggtgccacgaccagaacgtcgtcacaatcttcagcgcccccaactactgctaccgctgcggaaaccaggcagccgtcatggagctggacgaaaagatgcaacacacctttttgcagtttcctcaggctcctcgtcgtggagagccccacgttacccgtcgcactcctgacttcttcctttgagccttctttttcttctt

SEQ ID NO: 74668 - DNA, 167 bp, Zea mays
gtcgcagaagaagaagggctttgttctgccgaggcccaagatggccaacgctgacctgggcaggattatcaactctgacgaggtgcagtctgtggttaagccactcaacaaggaggtgaagcgcagggagaagaggaagaacccgctcaagaacatggctgctgtgc

SEQ ID NO: 74669 - DNA, 258 bp, Zea mays
acgccgccgggcacgccatcgggacggcgtgggccgtgttcaagatccggcaggccttgaaccccaagagcgtcctcaaacccacggcgctggccacgtccaccatcagggccaacgttgccgagcttcgcgcgatgcacggcagcagcaagtagctcgcgcctgccgtccccgtttcgtaaactctctcttatctcgctctgtcacgaccaacgatgcactcgctgcttccagcagcagcgttggccgttggcctgt

SEQ ID NO: 74670 - DNA, 264 bp, Zea mays
cgcagggttctgtcacagctgaacctcagttcaaccccaatcaacaccaagggctacgagaccctgctgcaacttgtaagtggtcttgtccattcttgattgctgagacgaatgctggctcttatcgcctacgaaccttgcagacccagaacaccgtaagcgacagtttcgacctgtactacgggctcttcatgtacaatatcaatgccacagagcagctcgacaggctggaaatggcatttgagaaggtgagacagatgttgt

SEQ ID NO: 74671 - DNA, 261 bp, Zea mays
ggaagatggacggcggtattggtccattatgcaaaatttgggaattaaaccttcaatggagaattatggctgcatggttgatctcctgtgtcgatctggccttctggatgatgcttactcctttgttattggcatgcctgtctcaccgaattcagtaatctggaggacacttctcgtggcttgtaaaagctcgaacaggattgacatagcagaatcagcaacaaagaggctccttgagttagaacctcacaatccagagaa

SEQ ID NO: 74672 - DNA, 258 bp, Zea mays
agccaatgtctcccgaggaagttataggaaaatttgtgagctttgagctaatgattaaaggctcaaagaaaatcatcgagcaaggcacctcctccacacccgaagcacaaccggtcgcatttaaggcgacggaggagaagaaggaggagtctacatcgagtagacaacccatcgacgcttccaagctcgacaacgaggagatgacgctcatcatcaagagcttccgtcaaatcctcaaacaaaggagggggaaggact

SEQ ID NO: 74673 - DNA, 255 bp, Zea mays
gtccagcatcgcgggctactccacctccgacacagtcaacaagtactgggccgaccccgaggccttcttcaagcagttctccgactccatggtgaagatgggcaacatcaccaaccctgccggcggcgaggtcaggaagacctgcagatttgtcaacacataggatatgataatatatataggatgctcgagactgcaggagaaactcggtggttgtgattgtactttacgcctgcaccttctttcgatggcttg

SEQ ID NO: 74674 - DNA, 264 bp, Zea mays
ggggcctcacaacattggggtggcgatggctacaacacatggattagtcgtgccaaacatcaagaaagtgcagtcgctatcaatattggagatcacgaaggaattggcgcgattgcatgagatggcatcacaaaacaggctaagcgctgcagatattgaaggtggcactataacacttagtaacataggtgccattggtggcaagtttggctctccacttctgaacctacctgaagttgccatcattgcccttgggcggattca

SEQ ID NO: 74675 - DNA, 248 bp, Zea mays
tgactataggctttacatgaagcacaagatagtgaagggctatcaggtcgggaaggttgtgttccgcccctacgaagacattctggggatcgggcactcgatgggcttctcttccatccttgtcccaggatctggtgagccgaacttcgacacctttgttgacaacccgatggaaactaccaagcagaaacgtgagaaggaggtgcatgctctcctggataaactccctccggagaccattatgctga

SEQ ID NO: 74676 - DNA, 250 bp, Zea mays
cctggatcttgtacccatccttgcacatcagtatttttcagagaggcttccagtgtcattacatggtgcccaagcagctgttttgttttgtctaggcctgcaggacaaagacataggcactgtgaaggaagagctcgggatagaaagggaacaggttctatcgaacttcataaagacaatgaagaagcagtatggttaccttcataacattgcagggaaaaaaatcgaaacaaccttacctcgactgaaa

SEQ ID NO: 74677 - DNA, 254 bp, Zea mays
cagaatttgttaagctttccatttttggtacagttttcgaagtgacaacaagatatgttgatctacaacctgttggaatgggtgctttcggcttagtatgttcggctaaagatcaattgacggggatgaatgtcgcaataaaaaagattatgaaacctttctctgctcctgtattagccaaaagaacatatcgtgaactcaaattattaaaagccctgatgcatgaaaatatcatttgcctgagtgacatattt

SEQ ID NO: 74678 - DNA, 254 bp, Zea mays
tggaaacatacaaatcgtatttgcataacgtacgaagtcagtccgaaggcaagtcacgcaaacaacagaagaatcaagaacttggcccgtacaagtttacccatcagcaattagagaaagagggcgttatccgcaggagcaacgtcccggagaatcggcgagcgaacatctacttcatgttccgcagcccacttccaggaactttcgtcatcagtctacactataaggggcgtgcgcgtggccttttggaattg

SEQ ID NO: 74679 - DNA, 261 bp, Zea mays
gaggtggaggccgccaaggacatcgccgaggagaaggccgtcgtgccgttgccaccgtcgcccgccaagccggccgacgacgactccaaggccatcgtcgctcttgtcgtcaaggacgctgctgctgggaaaccttctacagctattattggaggttcaactgaaagagatgcttacctcgccaagatcgtgtccgacaagaggctgagtctgatcaccgcctgggaggagagccagaaggcgagagccgacaacagggct

SEQ ID NO: 74680 - DNA, 252 bp, Zea mays
gaacaatggagatctattcaaacaccactagatttgcacttgcatgcaacacatcatcaaagataattgaacccattcaaagccgatgtgctatcgtcaggttctcaaggctctctgatcaggagatcctcggtcgcctcatgattgttgtggcagctgagaaggtgccttatgcgccagaggggctggaagctatcatatttactgctgatggtgacatgagacaagctttgaacaacttgcaagctacat

SEQ ID NO: 74681 - DNA, 253 bp, Zea mays
gtcagagggaagataggttggtgcttaagaacaagtctcctaggtggcacgaacagctgcagtgttggtgcctgaatttccgtgggcgggtcactgttgcctcggttaaaaacttccagttggtggcttctgaggacaatggaccagagaaccaagagagtgacaaggtgattctccaattcggaaagatcggaaaagacttgttcaccatggactacggttatccaatatcggcatttcaagcttttgcaat

SEQ ID NO: 74682 - DNA, 246 bp, Zea mays
gaacaatggagatctattcaaacaccactagatttgcacttgcatgcaacacatcatcaaagataattgaacccattcaaagccgatgtgctatcgtcaggttctcaaggctctctgatcaggagatcctcggtcgcctcatgattgttgtggcagctgagaaggtgccttatgcgccagaggggctggaagctatcatatttactgctgatggtgacatgagacaagctttgaacaacttgcaag

SEQ ID NO: 74683 - DNA, 241 bp, Zea mays
gaagatggtggtggtggagcaggtgggcaagcccgtgctcggctacgacgacttcgccgccagcctccccgccaacgagtgcaggtacgccatcttcgactacgacttcgtcaccgaggagaactgccagaagagcaagatcttcttcatcgcctggtctcctgacacggcgcgcgtgaggagcaagatgatctacgccagctccaaggagaggttcaagcgggagctggacggcattcag

SEQ ID NO: 74684 - DNA, 249 bp, Zea mays
gtcaactgattcaccggcgggtatctgacatacgtgagtctcaatatgagaagagtgggattggaagcagttacctctttcgcttggatgatgattttgtggtcgatgccactaagcgtggtgggttagcaaggttcataaatcattcttgtgagccaaattgctacacaaaggtgatcactgttgatggacagaagaagattttcatttatgcaaagaggcgtatatatgccggtgaggaaatcacat

SEQ ID NO: 74685 - DNA, 248 bp, Zea mays
gctccctttagtttggctgtacagctacgtgcaaaattggtacctgacagcctctcgagagttgaaacgaatggattccatctcgcgatctccgatctacgctcaattcggagagactctgaatggtgtctccaccattcgagcctatgccgctggagaacggttcatcgccaccaacaactacaaacttgatctcaatcaagccgcttacttcgctaccatcgctgctaatcgatggttggcggttc

SEQ ID NO: 74686 - DNA, 307 bp, Zea mays
cgtaaaaccctagacggctagccggcgcacggaagcgggcagcggagcgaaggtgagcctctcctgcatcggattgtccccgcccccgctaggcgccatgaagctgacggtgaagaccctcaagggaacgcacttcgagatccgggtgcagcccaacgacacgattatggctgtgaagaagaatatagaagagatacaagggaaagacagctatccatggggccaacaactgctgattttcaatggaaaggtcttgaaagatgaaagtacattggaagagaataaagtcaatgaggatgggtttcta

SEQ ID NO: 74687 - DNA, 302 bp, Zea mays
cggctcgagatcttctccctggccagcatgtactcggcaatgctcttgactggctggtcaacttcggttggtgagagcggaaagcttgtggatgttgggtggccatctgtctgggtcaggattgcaacccagtgggcgacggcaggtctgttcatatggtcgcttgttgcacccgtcctcttttccgacagggatttctaagttcaaccacggtaagcctggagcatcaaacgtgtctactgtggtagctaatatatcctatcaagtatgttgcctttaaaacatgctccgagtcggtgttt

SEQ ID NO: 74688 - DNA, 302 bp, Zea mays
cctcaagctgtgctcgaattggctacacacgtgcacgaatctgaagaagccaaattgcttgcattcaatttgagcgcacctttcattatggagtttttctcaacacaacttgaagaagtatatccatatgtcgatattgtattctgcaatgattcagaagctcgtatgtatgctatgatgaaagaatggtccatacatttaacagtcgaacaaatagctggtcgtttggccaataatgatcgacgaaatctagatcgtcctcgcattgtaattgtaactcaagatttaaaccctgttttaat

SEQ ID NO: 74689 - DNA, 302 bp, Zea mays
attcatctcgtctgtcaagatccttgaagataaacctgatctttcacggtggactctgaagtacgaggtgcttgggcgggatgtagaattttcttggcttgcacgtaacatgacacctattaaaaaccagaagatccattggcgatctcttgaaggtcttgctaatagaggtgctgtccggttcttccccaaaagctcatcctcctgtagagtacaactgacggtggcatatgaagttcctgaaattttggccccagttgcatcagcactgaaaccgtttctggaaagcttgcttctcaaag

SEQ ID NO: 74690 - DNA, 304 bp, Zea mays
gattcgttctgtgcatctttctgcagtggattctgcatgattgggatgatgcgaagtgcattaagataatggaacggtgcaaggaagcaatcggtggcaaagaaaggggagggaaagtcattataatcgacaccgtgattggatctaggccaaatgaggaagatatgatacgcagggaggctcaagtcctgtgtgatctaggtatgatgacaacgtcgaacggagctgagcgagaggagcacgagtggagaaggatcttcctagcagctggatttcgtgactacaaaatcacagacacacgagg

SEQ ID NO: 74691 - DNA, 299 bp, Zea mays
gctccccaggtcgccatccttgctcaccgcgccgtcggcggcttcctcacgcactgcgggtggggctcgactctggaggccattgccgccggcatgcccatggccacctggccgctcttcgccgagcagtttatcaatgaaaggctcgtcgtggacctgcttggtgttggggtgtctgtaggcgtgacaaagccaacagaaaacatcctcactgccagcaagctcggagcggatgtcgaggcggaggtgggtatggaacaagtggcgaaggccttggagaggctgatggatcagggtag

SEQ ID NO: 74692 - DNA, 304 bp, Zea mays
cctcaagctgtgctcgaattggctacacacgtgcacgaatctgaagaagccaaattgcttggcattcaatgatgagcgcaccattcattatggagttgttctcaacacaacttgaagaagtatatccatatggcgatattgtattctgcaatgattcagaagctcgtatgtatgctatgatgaaagaattctccatggatttaacagtcgaacaaatagctggtcgtttggccaataatgattgacgaaatctagatcgtcctcgcattgtaattgtaactcaagatttcaaccctgttttaat

SEQ ID NO: 74693 - DNA, 298 bp, Zea mays
cttacggcaagcctgtccatcatggtgttaaccagctaaagtttgctcgaagccttcagtccgttgcagaggagcgagctggacgccactgtggggctctgagagtcctgaattcttactgggttggtgaagattccacatacaaattttttgaggttatcctcattgatccattccataaagctatcagaagaaatcctgacacccagtggatcaccaaaccagtccacaagcacagggagatgcgtgggctgacatctgcaggccgaaagagccgtggccttggaaagggccacaa

SEQ ID NO: 74694 - DNA, 292 bp, Zea mays
caacggatcaacgctgcccgggccttgcgacaccctgcactggtacgattcttcttgagcaacgacgtgacggtgcgcggcctgcggatcgagaacagcccgcagttccatctcaagttcgacgactgcgagagggtgcgcgtggatggcctcttcgtcagctcgccggcgttcagccccaacactgcaggcgtccacgtcgagaacaccacgtccgtccagatcctcaattccaggatctacaacggcgacgactgtgtctccatcggcgccggctgctccgacgtccgca

SEQ ID NO: 74695 - DNA, 293 bp, Zea mays
aaaaaaaaacaggcaaggaaaatggctccgaccgccgccaaggacagtggctccgccgatcgctggcgcgaggtgcaggcgttcgaggacagcaagctgggtgtgaagggcctggtcgactccggcgtcaagtccatcccggccatgttccaccacccgccggagtccctcaaggatgtcatttctccaccagctctgacctcctccgacgatgcgccggccatcccagtggtggacctgtccgtggcgcggcgcgaggatctagtggcccaggtgaagcacgcggccgggac

SEQ ID NO: 74696 - DNA, 291 bp, Zea mays
ccgtcgacgacgcttgcgatcgagcgttccggtcgagagccagaggggggatatattacttagagagagagaggctagtgtctgcgtgtggtggcgcgcggtcggcggcggccatggcggcgtggaaggacggctacttggacatggtgctcatcccgctcgccgtcctacaccccgccgtgtaccacctctggctgtaccgcgccgtccgccgcagcccgctcagctccaccgtcggcatcagcgccgccgcgcgccgcatctgggtcttctccatgatgaaggtaagta

SEQ ID NO: 74697 - DNA, 265 bp, Zea mays
cctcatcactggaaacggagtagggttcaagccagatattctggacatggacgtgatggaaaaggtgctcgaggtgaaaggtgaggacgccgtcaagatggctcgagagctggcagtcaaggagggtcttttggtcgggatatcatcgggagccaacaccgttgctgctctcgagctagccaagaggccggagaacaaggggaagctcatcgtgaccgttcttccgagccttggcgagcggtatctgtcgtccgcgctgttcgat

SEQ ID NO: 74698 - DNA, 268 bp, Zea mays
cgcagggttctgtcacagctgaacctcagttcaaccccaatcaacaccaagggctacgagaccctgctgcaacttgtaagtggtcttgtccattcttgattgctgagacgaatgctggctcttatcgcctacgaaccttgcagacccagaacaccgtaagcgacagtttcgacctgtactacgggcttatcatgtacaatatcaatgccacagagcagctcgacaggctggaaatggcatttgagaaggtgagacagatgttgtctgg

SEQ ID NO: 74699 - DNA, 152 bp, Zea mays
tgcgcatctgcatgatcgaccagatcaagcgcgagatctccgacatgcgcctcgtccgccaccccaacgtcgtgcagctgcacgaggtgatggccagcaagagcaagatatacttcgccatggagtacgtccggggcggcgagctcttcgcc

SEQ ID NO: 74700 - DNA, 266 bp, Zea mays
cggatctgcaaccacaatgccgaaagcgacgaagcaatggaagtacgatgtactaggatgcttctttagagtatattttagagttgataagactgcttcaacgcttaaagacgcgatctacaacttgtatgaaaagatgatcccgccagatctgcggttggcaagaaatgccatgttccgttacatgtggaaatacttcaggaacagtcaaataactctatttcaaaaagattacagggattatgtgcgcgggatgaggctgatgg

SEQ ID NO: 74701 - DNA, 262 bp, Zea mays
ggggcctcacaacattggggtggcgatggctacaacacatggattagtcgtgccaaacatcaagaaagtgcagtcgctatcaatattggagatcacgaaggaattggcgcgattgcatgagatggcatcacaaaacaggctaagcgctgcagatattgaaggtggcactataacacttagtaacataggtgccattggtggcaagtttggctctccacttctgaacctacctgaagttgccatcattgcccttgggcggatt

SEQ ID NO: 74702 - DNA, 262 bp, Zea mays
cacgccccgactgttccaagggcgcagagggaagcacggcgttctgcaaagcgcacgggggcggcaagcgatgctcggctgacgggtgcacgaagagcgtgcatggtgggacccagttctgcgtcgcgcatggaggcgggaagaggtgcgtggtggaaggatgcaggaagagcgcgagaggccggagcgaccgctgcgtcgggaacggcgggggcaagcggtgccactccgctggctgtgggaagagcgcacagggaagcac

SEQ ID NO: 74703 - DNA, 262 bp, Zea mays
cctcggatctgatctgggagatcgtccgtgacaacaactgcttctccgccaagagcaagaagaacggcggtgttcagttctcccgagacccccttaacctgaccaacaagacttcccgcaagcacgctggtttcgtcaacgacaaggctctcggtatctcctctggcgagaagggtgctattgttgtcacctccacgaaggctctgcccaacaagcccgcccagaaccttgtcaagacctcttacagcggatccaagagcaa

SEQ ID NO: 74704 - DNA, 263 bp, Zea mays
ggggcctcacaacattggggtggcgatggctacaacacatggattagtcgtgccaaacatcaagaaagtgcagtcgctatcaatattggagatcacgaaggaattggcgcgattgcatgagatggcatcacaaaacaggctaagcgctgcagatattgaaggtggcacaagaacacttagtaacataggtgccattggtggcaagtttggctctccacttctgaacctacctgaagttgccatcattgcccttgggcggattc

SEQ ID NO: 74705 - DNA, 264 bp, Zea mays
agctgtcacagccgtcccatgccaacaaagcaacggatgccccagcggcaagcagcgatcgctctcctaacgagacagagagccggcaagccaggagctgcaccaaggtaatcatgcaaggggtggcggttggccgggcggtggacttgacgaggctagatgggtacgatgacctccacagcaagttggaggagatgttcgatatcccgggagagctttccgccagcctcaagaaatggaaggtgatctacacagatgacgagg

SEQ ID NO: 74706 - DNA, 264 bp, Zea mays
atttgtttggagagaaaccggggccgtgcttaccttgcaaagactggatttggacgaactgctgaagaaaggggagcgtgtgcctgcattgcagccagtgccgaactttgcttacctgacaaagtcttactccaatgttttcaccagtttccctgtcggcgcggcttctcccaggtaaaaggtgtgagtggaacaggatgtatcaaatgatcacctgatgcagacaacggagaaacggtctccaggatcaagtttagctcttct

SEQ ID NO: 74707 - DNA, 270 bp, Zea mays
atcgcaagcttcgagctgctactggtgaaaccgaccacgtcacagagcaggaactcgatcttcgacctcactctgagcgtctccgcatcttcctcattcgtcctttccagcttctcttcggcgagctcatcgtcttccttatctccgtgtacatgagtgtcctctacggtcttctgtacatgttcttcgaagcattccctatcatttaccagaagggcaagggttactctgctggaaagactggtctcatgttcattcctgtcgctgtcg

SEQ ID NO: 74708 - DNA, 256 bp, Zea mays
gcgcgatccacgctcacatcgtccgcgtccgatcccgtgagaagcgcagggaccgcaagccgccggagcgcttcaggcgcagggaggataggcctgctggtggacaaggaggcccccgccctggtcctggtgctgctgctccagctccagctccagcacctgttgctgctcgcccatatgctttagcttttcgaccgtgttaagtcttctgcccactcagtttcggaattgtcgcctatgggtgtgtgaagctgct

SEQ ID NO: 74709 - DNA, 256 bp, Zea mays
cgcgccgctcacggccctgccggcgtcggtgcgggagtccgggtgccgcgtcgtctacctgtgccgagaccccaaggacgctttcgtctcgctccgccactacctcgacgagatcaagcctaagggtgctgccatgacgccgttcgccgaggcgttcgacctgttctgcgacggcgtgtcaccgttcggaccggtgtgggacaacatggccgagtactggaacgagagcgtggcgcggccggaggaggtgatgttc

SEQ ID NO: 74710 - DNA, 262 bp, Zea mays
ccccgtcaaatttgccattcctgtctcggttccctcttcccggcgcaccagcctacctcgccgacgccaggccgccagcgccggagacatgaaccagcccgtgcagaagaacaccctctacgtcggtgggctggcggaggaggtggacgagaaaatcctgcacgccgcgttcgtgcccttcgatgaggtcaaggacgtcaagacgccgctcgaccagtccacgcagaagcaccgctccttcggtttcgtcaccttcctggag

SEQ ID NO: 74711 - DNA, 259 bp, Zea mays
ccacgaaagacatcgtcaatcaagatgagagccaaatggaggaagaagcgggttcgccgcctcaagcgcaagagaagaaagatgagggccagatccaaataaacacctcgcacctcaacctgacttgactcatctcgcatgatgttacgacttcacacgcacaacgatactctggccgaagatgcgaactctacctttacgcctctgggatgtcccgcaacgttatgagctgggatttgactttgggaactacgtcacg

SEQ ID NO: 74712 - DNA, 253 bp, Zea mays
gcacgatctgagatctaggctgagcatcattccacaagagccaaccatgttcgagggtaccgtgaggagcaacctcgaccctcttggggagtacactgacagtcaaatctgggaggccttggattgctgtcagttgggtgaggaggtgaggaggaaggagcacaagcttgactcacctgtgatagagaacggcgagaactggagcgtgggtcagcgtcactcgtatgcctcggcagggtgatcctgaagcgga

SEQ ID NO: 74713 - DNA, 266 bp, Zea mays
tctccatcttgtttccatttcgcgtaacttttcgcggaattttacatcaactttaaaccaacccactttctatcatcatgactggacgcggcaagggcggcaagggcctcggcaagggcggtgccaagcgtcaccgtaagattcttcgtgacaacatccagggtattaccaagcccgctatccttcatctcgctcgtcgcggtggtgtcaagcgtatttctgccatgatctacgaggagacccgtggtgttctcaagtccttcctc

SEQ ID NO: 74714 - DNA, 259 bp, Zea mays
caataacacgcctgtcttcttcctgcgcgatcctaccaaattccccgtctttatccacacgcaaaagaggattccgcagacgaacttgaaagatgcaactatgttctgggattatctctccacgcatcaagagtctgcgcaccaggtcatgcatttgttaatcgtccgaggatctccgtattcctaccgtcacatgaacggatactcaggccacacattcaaatggatcaagcccgacggcactttcaattatgtccaa

SEQ ID NO: 74715 - DNA, 259 bp, Zea mays
gcgctatctcccttcctcgcaacacaagaattaccgtggttaccggcgcgaacagaggtatcgggctagaggtgtgccggcagctggctggcaatggcgtcaccgtcgtcttgacagcagtggacgaggagctaggcgcgaaagccgtcggcaatctccaagggctagctctctccgatgttctttctcaccagctggatatcactgatgcttccagcatcgctcggttggccaacttcttgaaggcccgattcgggaa

SEQ ID NO: 74716 - DNA, 270 bp, Zea mays
gtcctcccgcggtctcgacgccgccccctaccgtcctaccttatcgcgcaccgctccatggccgccaagtgggcccagaagaccgtcgttatcccggcgcatcggcggggctgccacctcatcacccccaagattctgagggagatcgagggcgacctggccgggttcaagtgcggtctcgcgcatttcttccttcagcacacaagcgcatcgctgaccatcaacgagaactatgactctgatgtgcaggctgacactgagacttttctt

SEQ ID NO: 74717 - DNA, 268 bp, Zea mays
ttgacatccaaaggtgtggagaataccatgctgctcaagaacctgatggagtcgcagaaggttgactacgattacgagtactacaagctggaaatggcagctgatgtgcagctactcactctctctgaggggaaatcaaacatccttccttcagatttggtagtgcctttccggccatccactgttcccacaattaatgcaggtgctgaggaaactgagagctggaggtggtttttgaccacagtaaggtctcttcctcagtccactg

SEQ ID NO: 74718 - DNA, 264 bp, Zea mays
gaagaatgcagctgggctcccatatttgtgaggcaatcaaatttcaagttacctgctgacccatccactccgattatcatgattggtcctgggacagggctggctccttttagaggtttcttgcaggaaaggttagcactgaaacaatctggagcagaactgggcacttcaatccttttctttggatgcaggaaccgtaatatggactacatatatgaagatgagctgcaaactttccttgaggagggggcgctttctgagcta

SEQ ID NO: 74719 - DNA, 266 bp, Zea mays
catgataatgcaaaatatcctcttgatgaaaaaactcagaaagagaaaaagaaaggaagcaagcgtcacaaaatggaggacctcttgtccctgaaattgatgattttgatgaagatgaactaaaagaggctagctctatggttgaagaggagattcaataccttcgagtggccatgggtcatgaaaatgaatcttttgaggacttcgtgaaagcacatgatgcatgccaagacgaccttatgttttttcctaccagcaatagctat

SEQ ID NO: 74720 - DNA, 270 bp, Zea mays
gggagagtacagggacaagatcccggcagaggttgcatccgagatcgaggcagccatcgctgacctccgccaggagatggcttcggatgacatcgagaagatcaaggccaagcttgaggctgccaacaaggctgtctcgaagattggtcagcacatgtcaggtggtggctctggcggctcgcagtcgggatctggacctcagggtggcggtgaccaggcgccggaggcagagtatgaagaggttaaaaagtgaggctgcgggaagttcag

SEQ ID NO: 74721 - DNA, 260 bp, Zea mays
ggcgtacactgaggcaaagggtaggatcaggaagcgcgacaggatctggcagatcgcatttggttctggaattcagtgcaacagcgccgtctggaaggcactccggacggtgaacccggccaaggagaagagcccctggatggatgagattgacaacttcccggtggatgttccaaagatttcagagagatgtggcgcttgaagaaccattcttcttattattaggtggcaagtggagttgggtgattgtcaagggctgg

SEQ ID NO: 74722 - DNA, 268 bp, Zea mays
caacaatatgggttttgttaagttgattaagactaaggcatacttcaagcgctaccaagtcaagttccgccgcaggagagagggcaaaactgactacagacaacgtacaagacttatcacccaagataagaacaagtacaacactccaaagtacagactcgttgtcagaaagaccaacaagaacatcatcgcccaaatcatctacgctaccgttcaaggcgatcgtgttgtgaacgctgcctactcctctgagctcccaaagttcgga

SEQ ID NO: 74723 - DNA, 268 bp, Zea mays
atccgttctccggcgattttgggctctcgggaacagacaggaggatccgcgggaaggattcggctgcgtcctagtgtagtgtcgacatggctgggcgcaaggagaccgcactcgacctggcgaagttcgtcgacaagggcgtccaggtgaagctcaccggcggccgccaagtgacaggaactttaaagggatatgaccagctactcaacctagtgctagatgaagcagttgaatatgaaagagagcaagatgacccattgaagctatc

SEQ ID NO: 74724 - DNA, 269 bp, Zea mays
cggctcgaggccagaagatgaagccgccaaatattgtgccgaaaaccagataacaagcatgatcccaaaattatcaagactggttttgcagcaattcatctgatatactttttcactgctggtcctgatgaggtaaagtgttggcagatcagacgtcagactaaagctcctcaagctgctggtgcaattcacactgattttgaaaggggtttcatatgcgctgaggtaatgaagtttgaagatctgaaagagctgggcagtgaatctgc

SEQ ID NO: 74725 - DNA, 268 bp, Zea mays
ctcccaggtcgagggtctgatgaagctgatggaaggcgagcatgtaggaccatttaacctgggcaaccccggcgagttcaccatgctggagcttgccaaggttgtccaggacaccatcgaccccaacgcacggatcgagttccgtcagaacacccaggacgacccacacaagcgcaagcccgacatcggccgtgccaaggagctccttgggtgggagccgaagatccccctcccgcgaggccttcccctcatggtcaccgacttccgc

SEQ ID NO: 74726 - DNA, 264 bp, Zea mays
cggctcgagacccatccccccaggtgtccacatccgtggttgagccatacaacagtgtcctgtccacccactctctcctcgagcacactgatgttgctgtcctgctcgacaatgaggccatctatgacatctgccgccgctcccttgacattgagcgcccaacctacaccaacctcaacaggcttgtctcccaggtcatctcatccctgacggcttccctgaggttcgatggtgctctgaacgttgatgtgaacgagttccaga

SEQ ID NO: 74727 - DNA, 263 bp, Zea mays
gggactggatgctcgtcggcgatgtgccgtgggagatgttcgtcgaatcatgcaagcgccttcggatcatgaaaggatcagaagccattggcctggcgccaagggccatggagaaatgcaagaacagaagctgaggagaagacggacggacggaagcttgcatctcagcaccaccaggggtggatggatgcaagaagatcaaatctccatggcttttgcagctctgctcgtctctgtatcatactcgtcgtccctgcccttca

SEQ ID NO: 74728 - DNA, 266 bp, Zea mays
aagatgttcacgagacagctgcaggggcactatggaatcttgcattttattctggtaatgctctccgcatagtcgaagaaggcggggttcctgttcttgtaaaaatttgctcatcatcacggtccaagatggcacgtttcatgtctgcactagcactagcatatatgtttgacggaagaatggatgaagttgctttggttggagcatcctcagatagcagttccaagagtgttaatgttgagggagctagaagaatagcatttaag

SEQ ID NO: 74729 - DNA, 263 bp, Zea mays
cctctgagaaatttctttctaatccctgaaaactatcagcatagcaaatcaccattagttcatcgttttggggaattgacacgtaagatttggcatgctaggaacttcaagggccaggttagtccacatgaatttctgcaagcagttatgaaggccagcgacaaaaagtttcagattggtgtacagtcagatccagtggaatttatgacatggctcttaaacacactgcatgcgaaactaaaaagttcaaagaagaaaaacag

SEQ ID NO: 74730 - DNA, 254 bp, Zea mays
caacaagcacaaattccccaatcctctcgtctccgcggcgaagatgtctgggcgcgggaagggcgggacacggcctcggcaagagcggcgcgaagctcaccggaaggtgctgcgcgacaacatccaggggatcacgaagccggcgatccggaggctggcgcggcggggcggcgtgaagcgcatctcggggctcatctacgcggagacccgcggcgtgctcaagatcttcctggagaacgtcatccgcgacgcgt

SEQ ID NO: 74731 - DNA, 261 bp, Zea mays
ctgttcacaaattatatgcaatcgcaagcgagcagaatggcgagctccaggggtagtattcccagtggcctcgtgctgctggcgctgtgcgcgccgccctctcgtcggccacggtgaccgtgaatgagcccatcgccaatggcctctcctggagcttctacgacgtttcctgcccgttggtggagggcatcgtgcgctggcacgtcgccgaggccctccgccgcgacatcggcatcgccgcggggctcatccgcatcttct

SEQ ID NO: 74732 - DNA, 257 bp, Zea mays
caatccttcaagcgcaagtgcctcctcctcgtcgtccggtcgtgagaagggatggcgggccgtggcaaggctatcggcgctggcgccgcgaagaaggcaacgtcgaggagctccaaggccggactccagttccccgtcggcaggattgccaggttcctcaaggcgggcaagtactcggaggcgtcggcgccggcgcccccgtgtacctcgccgccgtcctcgagtacctcgcggctgaggttctcgaacttgccggg

SEQ ID NO: 74733 - DNA, 258 bp, Zea mays
gcaatgtcttgcttgatgcaaatctcaaccctaagatctcggatttcgggctcgccaaactttacgatgacaagaagactcatgtcagcaccaaagttgcgggtacatttggttatcttgcacccgagtacgccatgaggggtcatatgaccgagaaagttgatgtgtttgcatttggagtggtcatattggagactctagctggaaggccaaactttgacaatacgcttgatgaagacaaggtttacattttagaat

SEQ ID NO: 74734 - DNA, 254 bp, Zea mays
tgccgacgcggcggtggatcgggcctggcgctgcttcgccggactggatgccttcgtcaactgctactcctacgagggggaggtgcaagattgcctcagtataagtgaagacgagtacatgaagaccatcaaagtaaatgtgataacaccttggtttctaatgaaggcgatcgcaaagcggttccaggatacaaaatctggtggatctattgtgttcttgactcagattattggtgctgagagaggattgtatc

SEQ ID NO: 74735 - DNA, 254 bp, Zea mays
caaattgcacgactctatttagaggatgatgatgcagtgaatgctgaggcttttataaacaaggcttcatttttggtcaccaacagccatcaggaggttctaaacttacagtacaaggtctgttatgcaaggattttggatctgaaaagaagatttctggaagctgcacttcgatattatgacatttctcaaattgaacaacgcaagattggagacgaagagattgatgaaaatgcactagaacaagctcttag

SEQ ID NO: 74736 - DNA, 251 bp, Zea mays
gtcgtgtacgacaacacgctgtgggccggtactgtggcgcttccccccgacgcgccgctcagcgacctcgaccgcagttctccgccgccatcagggaactcaacgtccggctttctcaggatccccgcgtcgaggtctgccagctcgccatcgccgacggcgtcaccatctgccgccgcgtcgtctgatgtgatgatgatccgacgaccaagatcgtatatcattcgctcgtcgtctctgtcatctttcaa

SEQ ID NO: 74737 - DNA, 252 bp, Zea mays
gtcgctagtgacggcggcgggtgggacggcgagaccgtggtgtatgcgcaccgcacgcgggagctagtgcgacttccgcggggcgtcgcgctgcccgtgacgctaggcccgctccagtatgaggtgttccatgtgtgcccgctccgcgccgtcgtgccgggggtctcgttcgcgcccgtcggctgctggacatgttcaacgccgggggcgccgttgaggagtgcgacgtgatcagcgatgctggcggcaagg

SEQ ID NO: 74738 - DNA, 255 bp, Zea mays
gtcggttcacttctccaggtaaggaaagggttcgtactcatggcgccgccgcagccaaagtcgggcctcttcgttggcatcaacaagggtcatgtcgtcaccaagcgcgagctgcctccccgcccgtgccaccgcaaggggaaatcaacgaagagggtgtctatggtcaggggcctgatcagagaggttgctggggttgctccttatgagaagcgtatcactgagcttctgaaggttggcaaggacaagcgtgcc

SEQ ID NO: 74739 - DNA, 254 bp, Zea mays
gcggcgccggcgtgctcgtgatctcaacccaaggcgtgcctccgctccggtcacccgtcgctccacgcaaccatgtcgaggaggaagaccagggagcccaaggaggagaacgtcacccttggacccactgtccgtgaaggagagtatgtcactggtgtcgctcacatctttgcatccttcaatgacaccttcattcatatcactgatttgtctgggagggaaactctggttcggatcaccggtggcatgaaggt

SEQ ID NO: 74740 - DNA, 253 bp, Zea mays
ctgttgcaacggtaacggagtacatggctaatggctcactccgacaagcattgcaaagacatgaaaagatctttgatcggcgtagacgtctattaattgcaatggatgttgcttttggaatggaatatctccatgggaagaatatagtgcatttcgacttgaacagtgacaatctgcttgtcaacctaaggtatcctcaacgaccaatatgcaaggttggtgatttgggattatcaaaggtcaaatgccagac

SEQ ID NO: 74741 - DNA, 257 bp, Zea mays
gtgagtgacaaacttgaaggcttccgtgcaacaaaagagatctttaaaggtttgagttttcctacaatttcatctgtgggaccaaatgcagcagttattcactataaacctgaagcaagcacatgttcggaaatggatgctgataaaatatatctttgtgactctggggcacagtaccttgatggtacaacagacattacaagaactgtacattttggtaaaccctcagcacatgagaagtcatgctacacagcagt

SEQ ID NO: 74742 - DNA, 253 bp, Zea mays
ggactgtatagaagatgaacgtatcatatgggaatatctcataagttgtgaaagtcgaaatcgagtctaaaaataagctggcagctttcttgaagtttctggttgccatgcagtacaagccttcatatactttcaatctgttcttcctctcccaatcgcctccttcctcaaacaagttctttgccttatcgatggattttgatatcagatcaaaatccatgtagaaaaaaccaatctgcaaagtgtggaacac

SEQ ID NO: 74743 - DNA, 251 bp, Zea mays
gtggtccatctgcattagcagtgaaggaagcagcatggggacttgctcgatatgctgctattgctcaggataatggcttagtgccaattgtggagccagagatccttcttgatggagaccatgggatcgaaagaactcttgaggtggcagagaaagtgtggtctgaggtgttcttctacttggctcagaacaatgttctgtttgagggtatcctgctgaagcccagcatggtcactcctggagccgaccac

SEQ ID NO: 74744 - DNA, 248 bp, Zea mays
cactcagccacctaacctttcaattgtgactgaatacctatcaagaggtagcttatacagacttttacacaggcatgctgcaagggaaaatctggaggagcgccgccgcttgagtatggctttcgacgtggcaaaagggatgaactatcttcataagcgtaatcctccaatagtccaccgggatcttaagtcaccaaacctgttggttgacaaaaagtacactgtgaaagtctgtgactttggtctct

SEQ ID NO: 74745 - DNA, 254 bp, Zea mays
ctcatatacgcaggcatctagctcaagaagctcgaggctgcacctgattgatactttggctggactgtgaccgagaaggagaaaacatatgctatgaagttatcgattgcactgggattcctgaaaatgaggctggcagaagaatttttcgtgctagattttcatctgttactgagaaggacatatcgagcgccatggataatcttgttctgccaaacaaagatgaatcactatctgtggatgctcgccaagaa

SEQ ID NO: 74746 - DNA, 253 bp, Zea mays
cacgggccgcgttcgacgtaatgatgtcaccccagaatggattaggaagaccgatgctttcgtggaacgggcatatggcgaactgctaaaggagctagcctagtcccttgtccgtgtagcaaatgtgacaaccggaaaagaaaaccaaagaaggtcatggtagaacatatttggaagaatggatttacgccggactatactcggtggatcttccatggtgaagcgcatcgcacgagagaggaggtggtgagac

SEQ ID NO: 74747 - DNA, 252 bp, Zea mays
tacatatttaacacatatttttatggaaagcttgaagaagcattgtgtcggcaggatgagttctcaaagttgagaagatggtggaaaggtgtcaatatattaaataaagcatacataatcttgccgatccatgggatggcgcactggagcttggtaatcatttgcattcctgcaaaagagagtatttcaggaccaatcatacttcatctggactccctagcgatgcatcccagtactaagatcttgaacaca

SEQ ID NO: 74748 - DNA, 250 bp, Zea mays
cgtcacgcttacgcccaatctggcaataatgtctttgtaccagtcgagagggaactaatttttgagcttgatatatctgattatgatgatgttcgctactgctgctctggagctgatgtctgcagagactgctggcccttgatgacaattgctatcaaaattttggatacttctcttagagatgattttggtttcagtcacatactatgggtatacagtggacgtcgtggtgtccattgctgggtctgtg

SEQ ID NO: 74749 - DNA, 248 bp, Zea mays
tgggcggcgacccgggcgtgtcggcgttccccgagggggacaacatgctccactgggtgggcaccatcgcgggatccgccgggacggcctacgagggcacctcctaccgcctcgcggcgtccttcaccgccgagtacccgtacaagccgcccaaggtgcggttcgacaccccctgcttccaccccaacgtcgacgtgcacggcaacatctgcctggacatcctccaggacaagtggtcctccgcctac

SEQ ID NO: 74750 - DNA, 248 bp, Zea mays
cgcaatagctcgccccctcgttcgccgcctctcctgctcctaccgcagctctccctcaggtttagtgttcgcaatggcggccttcaacaagcttggtggccttctaaggcacagtgctctggtgagcggtatcactggtggctcttctcctgcagtgttcaatgctgcacggctcatgtctaccaagctatttattggtggtcttgactggggtgttgatgacgtgaaactaagagaagcatttagca

SEQ ID NO: 74751 - DNA, 250 bp, Zea mays
ctgcattggttttaccaagaggcgcccaaaccaggtcaagagaacctgctatgctcaggcatcccagattcggcagattcgccgcaagatggttgagattatgatcaaccaggcttctacatgtgaccttaaagaacttgtttctaagttcattccggaagttattggcaaagagattgagaagtctacctccagcatcttcccacttcaaaacgtcttcatccgcaaggtgaagatactcaaggccccc

SEQ ID NO: 74752 - DNA, 249 bp, Zea mays
ctttgaatatgttgggtctggcaaagcgagttggtgcaaggtttatgttgactagcacaagtgaagtttatggtgatccacttgagcatccacagaaggagtcatactggggacacgttaatcctattggtgttaggagctgttatgatgaggggaagagaacagctgagacttcaactatggactatcatcgtggtgctggtgttgaggtaatacactagtctttgtggtcaaatgtggcatcttgtg

SEQ ID NO: 74753 - DNA, 247 bp, Zea mays
cgtcggtgtgcccccgtgaagggcgtctgccagatgctaagaaaggtgcaccacatctgagggacatcttttatcggatgggcttatcggacaaagatattgtagctctatcagggggacatactctgggaagggctcaccctgagaggtctggattcgatggtgcctggacaaaggagcctcttaagtttgataactcatactttcttgagctgttgaatgaggaatctgagggacttttaaagct

SEQ ID NO: 74754 - DNA, 284 bp, Zea mays
gggaacaaaaaggaagctgatgctctactggccaaggcattacaagagtgtcccacaagtggtattttgtgggctgccgctattgagatggcgccacgcccacagcgcaaaggaaagagtacagatgctattaagcgaagtgatcatgatccacatgtcattgcaactgtggccaaacttttctggcttgacaggaaggtcgataaagctaggagttggttgaacagagctgttactcttgctcctgatgttggtgatttttgggcattgtactacaaatttga

SEQ ID NO: 74755 - DNA, 281 bp, Zea mays
attgcagtcatggaggaagatcatgaagcgttctggtgctttgtgggtttcatgaggaaagccagacacaacttcaggcttgacgaggttgggataaaaagacagctgaaaaccgtctcgcagatcatcaagcgcaaggattcacacctctacaggcacctgcagaaacttcaggcggaagactgcttctttctgtaccgaatggtggtggttctcttcaggagggagctcacttttgagcagactatgtgtctgtgggaggtcatgtgggctgaccaggc

SEQ ID NO: 74756 - DNA, 278 bp, Zea mays
ggtggatccaccatgttccctggcatcgccgaccgcatgagcaaggagatcactgcgctcgcgccaagcagcatgaagatcaaggtcgtcgctccaccagagaggaagtacagtgtctggatcggaggatcaatccttgcatccctgagcacatttcagcagatgtggatctcaagggctgagtatgaggagtctggtccagctattgtccacaggaagtgcttctagacatcacctagccttaattctcctctgggaataccttcgtttgatgacat

SEQ ID NO: 74757 - DNA, 276 bp, Zea mays
ggtgctcataactctatagttactgctagggctggaaaggaccttgtttccagcttggtgtctggattattgacaattggcccccgttttggcggacaattgatgatgcagcccgatacttcaaagatgcatgtgataggggcctcacaccatacgagtttgttgaaggcatgaaaaagaagggaatccgtgtgcctgggattggtcacaggattaagagcagagacaacagggataagcgtgtgcagcttctacagaaatatgctcacacgcatt

SEQ ID NO: 74758 - DNA, 287 bp, Zea mays
agatcggcaccatccatcgacggacgatgcataccgcccttctgatcaacctcccaagggtcctcagcctgtgaaaatgcaaccaatcgcagtccctgctattcctgtggatgagattagggaggtgaccaagggttttggtgatgaagctttgattggtgagggatcctttggcagagtatacttgggtgttctaagaaatggtaggagtgccgcggtcaaaaagttggattctaacaagcagccagaccaagagttcttggcccaggtgtctatggtgtcaaggc

SEQ ID NO: 74759 - DNA, 280 bp, Zea mays
atcgtcctcattattattctcactggtcgatctgctaacacaaacagcagcagctcctcctcactagctagccttctctatttttgctactgcaagtgtccaagtctgcgacgacgtccgagatgtcgacggtgagccgtgcatcccttgaccagaagcttgccctcgccaagcgctgctcccgagaggcgactcttgccggagctaaggcggcagcagtggcgactatcgcctccgcgattcccaccctcgcgagcgtgcggatgctgccgtgggccaa

SEQ ID NO: 74760 - DNA, 272 bp, Zea mays
gaaggtattattagctggaactccagctgaaccacttgtggcattagcatttaagctagaggaaggtcgttttggtcagctgacctatctaagaatctatgacggcgttatacggaagggtgacttcatatacaatgtcaatacagggaagaaaatcaaagttcctcgcttggtaaggatgtactctaatgagatggaggatattcaagaagcatatgctggccaaattgttgctgtttttggtgttgattgtgcatcaggcgatacattta

SEQ ID NO: 74761 - DNA, 270 bp, Zea mays
ctgacttctttatcgcacttgcatacttctcgatccctttggagctgatatactttgttcagaagtcagctttcttcccctaccgatgggtactcatacagtttggtgcgttcatcgttctgtgtggggcaacccaccttataaacatgtggactttcactacgcataccaagtccatagctgtggtgctgacagtggcaaaagtggcgacaccgttgtgtcatgcataacagctctgatgcttgttcatataatccctgatctgctgag

SEQ ID NO: 74762 - DNA, 273 bp, Zea mays
gttggaatttgtatcttacgttcataccacatagagccaaaaggtgatggttcataccatataattaccgacacgggaagctaccctactgcttggcaaaagccaaactgaacgcgacacacaagcgcggtccatcgccagcgtgtatgtacctcctcatcgaaagggcaggctagcattgcctcttttattaaccccaagcccaggccagatcacaaactagacagcgaaatctagttctccatgcggatgatgcagcggatgccctccccc

SEQ ID NO: 74763 - DNA, 282 bp, Zea mays
gctaagattaagtgtagtatctgttcttatcagtttaatatctgatatgtgggccatgtgtccactttgatattaaattaattttttgtggggaagggtccactacagtggcttgccattgggtcccttatgtgtcgctctagcgttgcactattgcttgagcctggcgcaccctatccaaatcaaaaaaataaaattgttaacaaagtgctaagttatctatttgttagattacatctattgtatggttactcttattctgattttgtttgtcttttatct

SEQ ID NO: 74764 - DNA, 275 bp, Zea mays
tttttgtgttgcactgaaacgctaggtattaagctacggctgatcaacaaacaacaagctctagatgtgtcaacataataaattcttaatgctccagtcagtaagcattgactctgaatttcaggatcaaaatttccatttcatcagagcacagatgtaagcggacacgccaccgaattcatcaagtacaactacactggaattagcctcgtgcaaatcacctccggcagggaaggcggcagcgacaaactcagagctcagaagcagcattcgca

SEQ ID NO: 74765 - DNA, 271 bp, Zea mays
ctggaaaggatgacattgatgtgggttctatccggatgacgctgttcaacatctttggtgatgatgccagcccaaagattaagaagttcatgaaggtcatgctcggaaagttccaccagggccagtcaggtgagcaaggcagtggtggtggtggtgtctttggcatggttggtgcccttgctcaggagttcttgaaggctaagcttgaagggaaggaggaagaggctttcaaacctgcattagagcaagaggttcacagtgttgacgaggt

SEQ ID NO: 74766 - DNA, 271 bp, Zea mays
cggctcgaggcgcctaactactgctaccgatgcggaaacatggctgccatcctcgaaattggcgagaacatggatcagaacttcctccaattcgacccagctccgaggcaaattgagccggacatgacgcgcaagacaccagactactttttgtagaaaaaacaggtgtggctaaaaaaaagagaagagacgaggggaagatgcaggaaatggacccgatgttctgttgtgtctgtattgtgatgccttgctaggtgagatctttcgtttc

SEQ ID NO: 74767 - DNA, 267 bp, Zea mays
ggacacccctcgatccatctttgtgtacttccgaggtctgttctatgacaccggcaatgaccccgagggcggatactacgcaagaggtgctcgtgcatcggtctgggagaacttcaagaacaacccgctgtttgacatctcgaccgatcacccaccaacatactacgaagacatgcagcgctcggtgttctgcctctgcccgttgggctgggcaccgtggagtcccaggctagtcgaagccgtggtctttggctgcatcccggtgat

SEQ ID NO: 74768 - DNA, 273 bp, Zea mays
gtcacagtctcacgctactatcgctatctggagctccggccgtcacagacacgagctagagctgcagggaagaaggaggaggagaatatgagggcgtccgtgctagttggcttcatggcggtgtcggcgtgcatagcatgcatcgcgcatggcggcaacttctaccaggacacggagatgacctgggggcaggggcgcggcaaggtggtggacgggggccgcgggctggacctgagcctggacagggcctccgggtccgggttccagtccaag

SEQ ID NO: 74769 - DNA, 272 bp, Zea mays
aagacaccaaacatgctggtcgaccggaactggtctgtgaaggtaggtgactttggcctgtccagatttaaggcaaacaccttcatatcatccaaatcagttgctggaacaccagaatggatggcgcctgagtttctgcgcggcgagccatcgaacgagaagtgcgatgtttacagcttcggcgtcatcttgtgggagctcctgacgatgcagcaaccatggagtggcctaggccctgcgcaggtagtaggagctgtagcgttccagaacag

SEQ ID NO: 74770 - DNA, 270 bp, Zea mays
gccagcttctgcgtatgaatcgcactgcctttctcagccttgttcaatccaatgttgcagatggaacaataataatgaacaaccttatgcagttactaaaacagcagaaagacaacagtgtaatggtgggtgttcttaaggagattgagaacatgctagcgcggggtcgtctggacttgccaattaccctatgttttgcggtaaataaaggagacgatttaatgttacatcaacttctgaagcgtggtttggatccaaatgaatcagata

SEQ ID NO: 74771 - DNA, 262 bp, Zea mays
gagagatccggcccttggcgcggtcgccggagagagcggcatggggctctgggactcgctcctcaactggctccggagcttgtttttcaagcaagaaatggagctctccctcgttgggttgcagaatgctgggaagacgtcgctggtcaatgccgttgctacaggtggctacagtgaggacatgattccaacggtaggcttcaatatgcggaaagtcaccaagggaaatgtcacgattaagctttgggatcttggtgggcag

SEQ ID NO: 74772 - DNA, 267 bp, Zea mays
ggcttccctccctcccgcgcctccgctcgcacgcatccgacggcttcaagcttctcttggtgctgctgctcttctccgccgctctagccgaggtccgctacatcgcctcctcctccatggcgcccacgcttcgtccaggcgaccgagccgtcgccgagaaggttacatacttgttccggaggccatctattggggatatagtgtttttcaaagtaccgactgctgtgcagaattatggtgtcaataaggatgttgtctttattaaga

SEQ ID NO: 74773 - DNA, 225 bp, Zea mays
ggttgcatttgcatctgagttcctgattgttgtatcccagtttcttctgtgagtggaatcgcgaggaagaaggatgtcgtgctgcggaggcaactgcgggtgcggcgccggctgcaagtgcggcagcggctgcggagggtgcaagatgtacccggacatggcagagcaggtgaccaccacccagactgtcatcatgggtgttgcaccatccaagggcgggttcga

SEQ ID NO: 74774 - DNA, 265 bp, Zea mays
gtgacatccaaaggtgtggagaataccatgctgctcaagaacacgatggagtcgcagaaggttgactacgattttgagtactacaagctggaaatggcagctgatgtgcagctactcactctctctgaggggaaatcaaacatccttccttcagatttggtagtgcctttccggccatccagtgttcccacaattaatgcaggtgctgaggaaactgagagctggaggtggtttttgaccacagtaaggtctcttcctcagtcca

SEQ ID NO: 74775 - DNA, 255 bp, Zea mays
  unsure (1)..(255): unsure at all n locations
ttgacttccaaaggtgttgagaataccatgctgctcaagaacctgatggagtcgcagaaggttgactacgattgtgagtactacaagctggaaatggcagctgatgtgcagctactcactctctctgaggggaaatcaaacatccttccttcagatttggtagtgcctttccggcacattatatgntcccacaattaatgcaggtgctgataagactgagagctggaggtggtttttgatcacagtaaggtctct

SEQ ID NO: 74776 - DNA, 264 bp, Zea mays
gggagattcaacagtgagccctcgatgccagatatgagccatgaaaacgccagagtacgcagcgaagttgttccgcagaagctcctccgaaagagggtgagtttccagaattctcttttcggcgtcatctcttcgtcccacgcccaccaggacaccggccgtctgctctcgaaaggcctcgctggaacagagggtccaaattgccgtcacgactccctcatcagggtgacaatcagctgccccgagaagggggggaacgccgca

SEQ ID NO: 74777 - DNA, 261 bp, Zea mays
gcgcagaaccggcagagcatgctggaggacacggggttctcgttcgtcaactgccgggtgacggggtccggcgcgctctacctgggccgcgcctggggcaccttctcccgcgtcgtcttcgcctacacccacatggacgacatcatcgtccccaacgggtggttcaactggggcgaccccaaccgcgagctgacggtgttctacgggcagtacaagtgcacgggcccgggcgcgacctatgccggccgggtggcgtggtcg

SEQ ID NO: 74778 - DNA, 271 bp, Zea mays
gactgcctccacaattttgtcagcaaaaattttgttggcccgcacgtaggcttgaaaaagggaacggtcaaagagctcatctttgtcatgacaaacaggaagcatataatggaaaagtggccataagtgctgtttgcagaatatgtgatagaattgatgctggagttcagctgggagaaaggtaggtacgcatctgtgttccttgaagagcttctgagaaactcgatcttgctcaataggatcaacttgaacattcaaactacccacataa

SEQ ID NO: 74779 - DNA, 254 bp, Zea mays
aggagaactggcgccgcgccttggtgctggcgttgtggttcgcggccatggcggcgctgttcgtgtggaagttcgtccagtaccggcgcatggcggcgttccaggtgatggggtactgcctccccacggccaagggcgtcgcggagacgctcaagctcaacatggcgctcgtgctgctccccgtctgccgcaacacgctcacgtggctccgctcctcctgggcccgcttcttcgtccccttcgacgacaacatc

SEQ ID NO: 74780 - DNA, 258 bp, Zea mays
cagaaggagaacaacttcaagcaggctggcgagagatatcgttccttcgaccctgcaaggcaagaccggttcatccagcgatgggttgacgcactgacagaccctcgcgtgacccatgaacaccgtaccatttggatctcctactggtcccagtgcgacgccgctcttggccagaagctggcttctaggctgaacctgaagccgagcatgtaagatcgacgaggaagaaagcaggcaccggtggccaaggatgcaacg

SEQ ID NO: 74781 - DNA, 259 bp, Zea mays
tgcatttggccaccgaatcaacaaggatctgaaggctgacccccaggacgagtacctcagaacgctgcgggcgatcatccggtgcttcagttgccctgacaggtactttgagaaggtggctaggcaggccatagcggggctaggcacagatgagaactccctgaccagggtcatcaccacccgcgctgaggtggacctcaaactgattaaggaggcgtaccagaagaggaacagcgtgccgctggagcgggccgtcgcg

SEQ ID NO: 74782 - DNA, 255 bp, Zea mays
ttttgatattttcaagggtaaagttagtgtagcagatatgatatccttctcaccttctgaagtagcatcatcaaaatatgatggaactctgaaaagctgggagaattctattactcttgtcaacattattcgaaatgagatccgtgatggccagctgagcttcaggggcaagcgggttctagagcttggatgtggatctggcgtctccgggattttttcatgcttgaagggtgcatccacggttcactttcagga

SEQ ID NO: 74783 - DNA, 255 bp, Zea mays
ggaacttcatgaacatgcgaagacaagctatcaaaatacaagctgcatacagaggtcaccaagtgagaaggcagtaccgcaaggtattatggtccgttggagtagtggaaaaagctatcttgcgatggaggaagaagagaaagggcctgcgtggcattgcaactggaatgccagtagcaatggccacagacgcagaagcagcaagcactgcagaggaggactactaccaggttggtcggcaacaagccgaggaca

SEQ ID NO: 74784 - DNA, 257 bp, Zea mays
cctcaagtggctactccgaaacagatcagggaggtgatgcaagtggacgggcttacaaacgatgaagtgaaaagccatctccagaagtaccggttgcacaacagaagatcctcccccggcgcggcggcggctccggtgagccagtctatcatgctggtggatggcgtctgggctgctcaggacaaaagcagcggctcgcagtccgggtctcggcagggcccgctccagttctccagggcaggtatggccgtcggtgg

SEQ ID NO: 74785 - DNA, 255 bp, Zea mays
gccatcgtccacgtcccagcctccccggactctaggggcagaagctgcagcgtcgagatggtgaaggggcgcacggggcagcgcgtgaggctctacgtccggggcaccgtccttggatacaagcggtccaagtcgaaccagtacgagactacgtcgctggtgcagatcgagggggtgaacaccaaggaggacgtcgcgtggtactgcgggaagcggatggcctacatctacaaggccaagaccaagagcagcggc

SEQ ID NO: 74786 - DNA, 255 bp, Zea mays
gtgcactgaagctggtatggctgcaattcgtgcagagagagattatgtagtccacgaagacttcatgaaggctgtgcggaagctaaatgatgcgaaaaagctggaatcaagtgcgcattacagcgcagattttggcaaagagtaatgtatgatgctggacagatgcataaggcgtgtatcatcagggagctctgtcagatgcgatgcaaaagcgaaagaaaccagctatttatgttcaggctccaggcagctcca

SEQ ID NO: 74787 - DNA, 253 bp, Zea mays
ccgccggcatctccggaggacacatcaacccagctgtgactttcgggctgttcttagccaggaagctgtccctgactagggccctcttctacatcatcatgcaatgcctgggtgccatctgtggagctggagtggtgaagggcttccagcagggactttacatgggcaacggtggtggcgccaatgttgtcgcacctggctacaccaagggtgatggccttggcgctgagattgttggcaccttcatcctagt

SEQ ID NO: 74788 - DNA, 254 bp, Zea mays
ctgttatcgtatcttaaaaaggaatgtgaggaaagaggtgcaacaatcatctatgccacacatatttttgatggtcttgatgattggccaacacacattgtttacattgctcatgggaaactgcaattagcagtgcctttggaaaaggtgaaagaaatgagtcagttatctctcatgaggactgtggagagctggttgaggaaagaaagaaatgaggacaggaggaggagaaaggagcgaaaggagaaaggcct

SEQ ID NO: 74789 - DNA, 254 bp, Zea mays
gcggatgtgtcgcaccactctccctcggaggtgctccgctccttcaaagagctccgccaccttcgcatcgagctcccggcgggcgagctcgatatggacgacggcgtgatgctcaagtggaaggccgactttgggtccacactgggcagctgcgtcatccttggagcatcctcggcctcggcctcggcctcggtctcgccctcctccgctgactcagatagcacgagcaccgctccctctgttgacggtggccg

SEQ ID NO: 74790 - DNA, 254 bp, Zea mays; identical to SEQ ID NO: 74789

SEQ ID NO: 74791 - DNA, 284 bp, Zea mays
ccacggcgtcaatggaggtctgatggactatgcgtttgagttcatcatcaacaatggcggaatcgacaccgaggaggattacccttacaagggcacggacggacggtgtgatgtcaacaggaaaaacgccaaggttgttactatcgacagctatgaagatgtaccagcgaacagtgagaaaagtctgcagaaggcagttgcgaaccagcccatcagtgttgcaattgaggctggtggcagagcatttcagctctacaactcgggtatcttcacaggaacctgtg

SEQ ID NO: 74792 - DNA, 285 bp, Zea mays
gcaacttcacagcgtatcatcgttttccatcgctcctactcctatcatccagaaaatctgagcggtattgatggcgcccaaggcggagaagaagccggcggcgaagaaggtggcggaggaggagccctcggagaaggcggctccggcggagaaggcccccgcggggaagaagcccaaggcggagaagcggctacctgcgggcaagtccgccggcaaggagggcggcgacaagaagggtaggaagaaggcgaagaagagcgtggagacctacaagatctacatctt

SEQ ID NO: 74793 - DNA, 288 bp, Zea mays
gcaacttcacagcgtatcatcgttttccatcgctcctactcctatcatccagaaaatctgagcggtattgatggcgcccaaggcggagaagaagccggcggcgaagaaggtggcggaggaggagccctcggagaaggcggctccggcggagaaggcccccgcggggaagaagcccaaggcggagaagcggctacctgcgggcaagtccgccggcaaggagggcggcgacaagaagggtaggaagaaggcgaagaagagcgtggagacctacaagatctacatcttcaa

SEQ ID NO: 74794 - DNA, 281 bp, Zea mays
cagcctcttcgactaagcctgtgcaatagtcaagagtattgtttttgagtcgcggaagcagagggaagaaaaatcgtagtcatgtttggactttaactatgttttatgttggaaagtacttgaaagacttttcctgtggtaattctaggcgtaggttgctgtgctggttggggtttactggtgaaccagagtttttctatctcccactatgaatttgttacctcaagttacctggatgttcactattttgttggtacatgtcgattttgcctcgtgcatcc

SEQ ID NO: 74795 - DNA, 282 bp, Zea mays
gagcactttccacattccagttccactccgcctccgctgccggtcgccgtctccgagactccgacagtccgaccgcaaggtcttgtgcgggatccacagaaggatgagtgaagaggataagactgctgcttctgctgagcagccgaagagggcccctaagctcaatgaaaggatcctctcttctctgtccaggaggtccgtagctgctcatccatggcatgatcttgagatcggtcctgatgctcctgctgttttcaatgttgttgttgagatcacaaaggg

SEQ ID NO: 74796 - DNA, 283 bp, Zea mays
gtgaacttgccttggcgtttggagaactgttgaggagcttatggaccactgacggaaaaccagttccacctcattatttcaatgaaaaaattgcatgttttgctcctcagtttggtggctttaatcagcatgattcacaggaacttcttgcttttttactggatggtctccatgaagatcttaaccaggttaaatgtaaaccgtatgaagaagcaaaggatgcaagtggccgtcctgacgaagaagtagcagatgagtactggagcaaccatttagctcgaaa

SEQ ID NO: 74797 - DNA, 285 bp, Zea mays
attcagcacaatggttttcggcctgctgacgaagccgctgctcagtctcctcatcccaccaaggactggactgaacacgtcgtctctgctctcaagccagtctatgctggacccactccttactagcatgatggggtctgactttgatgtagggcagatcaactcccctcaatacaacctccagttcattctcaccgcgccagctcgctccgcccatcgcctttggcgcaagtttgacgatcggttcatgcgcccggtgttcggggggcgaggtttcgtcccctt

SEQ ID NO: 74798 - DNA, 285 bp, Zea mays
aacgcagcaagcagacacagggacaggcaggcagcgagtgcaaccgcgagagcgatcagcgatgggctccttcttctcgaccttagtgacgccccctccgcccgccgccgacgacccgaactgcgccgtggtggccgcgcactccaaggccacctacgacgagcagtgggcggcccacaagagcagcagcaagctgatggtgatcgacttctcggcgtcctggtgcgggccctgccgcttcatcgagccggccttcaaggagctggcctcccgcttcaccgatgc

SEQ ID NO: 74799 - DNA, 153 bp, Zea mays
cacctcaccacaagcagcaaaaagctaatctcaggtcccatattagcgagcggttctgtcacagatggtagaaaaaaaaaaaaaaaaaaaaaaaaaaaaaaaaaaaaaaaaaaaaaaaaaaaaaaaaaaaaaaaaaaaaaaaagaaaaggggg

SEQ ID NO: 74800 - DNA, 279 bp, Zea mays
cgatcccagcatccgagagagctccacaggccaggtccccatcgccgcggcgcttgccccacctctcccccgcccggtagtagcctcgccgccgttgccgagatggggttcgtgtccttcgtcgggagggtgctcttcgtcgccgctttcctcctctccgcctaccaggagtttaatgaattcggtcccgatggtggaccagcagctaaggcccttcggcccaaattcaacgtgtttgtcaaaaatgtatctgctcatctgggagtagctgtgccacac

SEQ ID NO: 74801 - DNA, 282 bp, Zea mays
cgctgctggagatcctgtccagccactcctccgacgaggtgtacctcggccagcgcgacaccaaggagtggacgtcggacgccaaggcgcaggaggcgttcaagctgttcggcgcgcggctgaccgagatcgagaaaagcgtggaggccatgaacaaggacccgcgcttcaagaaccgctacagcgcggcccagttcccctacaccctgctcttccccaacacctccgacaagggcgataacaccggcgtcaccgccaagggcatccccaacagcatttcca

SEQ ID NO: 74802 - DNA, 278 bp, Zea mays
  unsure (1)..(278): unsure at all n locations
atccgcgttcatgacgacatgcttctggcagcatcggaggctctggcccagcaggtcacagaagaaaattttgagaaggggctgatttatcctcccttctcaaacatcaggaagatctctgcccacattgcagccagcgttgcagcaaaggcatatgaacttggtttggcaagtaggncgccnccggccaaaggacctggtgaaatatgcagagagttgcatgtacagccccatctaccgcaactaccgttgaattcggatcaactccagttatgtgc

SEQ ID NO: 74803 - DNA, 277 bp, Zea mays
gattgttccaggtattagcagtcgaccggttcctcggagcacgatgaagtttgttgctgcctacctgcttgctgtcctcgctgggaacgccagcccctccgctgacgatttgactgccattctggagtcagttggctgtgaagttgacaatgaaaagatggaactcctgctgtccctcctgagccgtaaggacatcaccgagctcattgccgcgggcagggagaagtttgcttcagtcccatgtggtggcggcggtgtcgctgttgcggcagctgca

SEQ ID NO: 74804 - DNA, 277 bp, Zea mays
ggagcacacaagctttctcatggccatagcggacacggtggacatggggcctttggaggctatggtcacggtggttacggccacgggtatggtggccacggcaagttcaagcatggtcacggccaccacggcaagttcaagcacgggcacggcaagttcaagcatggcaagcacgggcacggcatgttcggcggcggcaagttcaagaagtggaagtgatgtgccctccatggttgatcgtagctgaactcaggcttccaggacatgtgttgccagt

SEQ ID NO: 74805 - DNA, 277 bp, Zea mays
gctacgaaggatgtgggaagacattttttgatgcaggggctcttaggaagcatgctcacgtccatggggagaggcaatatatctgtcactatgagaactgtggcaagaaattcttagatagttctaagttgaagagacattttcttattcatacaggagaaaagaattttgtgtgcccacatgaaggttgtgggaaggctttttcgttggattttaatttaaaggcacacatgaaaacacattctgcagataactatcatgtgtgccagtacccaga

SEQ ID NO: 74806 - DNA, 277 bp, Zea mays
tatctctatagccaacacacacacaaatactctccattccattccatctcaaaggatagaataatgggcggtctctccaccaagcttttcgtggtcctcctcctgctcgtttgttacaccgggacgcaaggcgggccggtgactatggtgtcggcgaggaagtgcgagtcgcagagcttccgcttcaagggaccttgctcgagggacgccaactgcgcaaacgtctgcctgaccgaagtttcaccggcggcgtgtgcaagggcctacgccaccgctg

SEQ ID NO: 74807 - DNA, 274 bp, Zea mays
ctcggggggaggagatagtctcggctctctgctgtgcggcgctggcggaagaggggttttgatcgcttccttcgtctctctgtcgtgaagtggacgacggaccgagtacctacaccaacttaaacttggatatcaatggagggcggtgtgactgtagcggacaaggcagaattcaaggagtgtctgcggctgtcctggacacagccttacatccttcaacttgtcctgtctgctggcattggcggtcttcttttcggatatgatacaggtgtca

SEQ ID NO: 74808 - DNA, 191 bp, Zea mays
attttcggacatccaaaaaacatgcttcctatgtgggatgatggttatctttatatttgtatgttaattagtctctttgctgttaaatttcgtgtaagttggtcctgccgatggagaatcgagcagctccctttttttgttctatcaactatgctgtaattctggctatgtatcggcaaaaacaattctat

SEQ ID NO: 74809 - DNA, 276 bp, Zea mays
aaccagaggtcacggtggttcccagggcgaaagatgacgactgtctcatcctcgcaagcgatgggctgtgggatgtggtgacgaacgaggaggcgtgcaaagctgcgcgccggcaaatccaagtgtggcacaagaacaacggtgccgctggcgcatcgtggtcgttgtgcgacgagggtgatggatccaccaccgaccccgctgcccaagccgcagcggattatctcgcgagggtcgcgctgaagaagggtaccgaggacaacgtcaccgtcatcg

SEQ ID NO: 74810 - DNA, 276 bp, Zea mays
gtgcaagcaaccttcccctacaagttcgttgtgagcaagttcttgcagcctggagcatatgatctggttggttacatagtgtatgagatcgaccagcacccttaccagaatgtattctacaatggcactatcgaggttgttgaggctggaggcttactcagtgttgagtctgtgttcctcatcacccttggatttgcacttcttggtctgtttggattgtgggcatatggccaggttcagcagctctcgaagaaaacaaagaaggcacccaaggtg

SEQ ID NO: 74811 - DNA, 274 bp, Zea mays
gatccccaagggctggaaggtgatgcccctgttccggaacatccaccacagccccgaccacttcccctgcccggagaagttcgacccctcccgattcgaggttgctcccaagcccaacacgttcctgccgttcggcaacgggacccactcgtgcccgggcaacgagctcgccaagctggagatgctcgtgctcttccaccacctcgccaccaagtacaggtggtccacctccaagtccgagagcggcgtgcagttcggccccttcgcgctgccg

SEQ ID NO: 74812 - DNA, 274 bp, Zea mays
gtcctccacattcatcggcaactcgacctccatccaggagatgttccgccgcgtcacgagcagttcactgccatgttcaggaggaaggccttcttgcattggtacacgggtgagggcatggatgagatggagttcactgaggcagagagtaacatgaatgacctggtggccgagtaccagcagtaccaagacgccacagctgaggatgaggaggagtacgaggaggaagaagaggaagatcctgctgcctaagccatcatcccaagtgcttggt

SEQ ID NO: 74813 - DNA, 289 bp, Zea mays
taaagcggacatcaagaaatcctgggatctacaaggaggtgccttgcggtggtaatgccctaggattctatgctgcagtcagaatgaggacttcaaggagagaactgcgctatagtgaagatgaggctaccggcgtaggtatatcagtgcagatcatcaagaacaaattggctccagcgaacctgaagaaggaagccggcatcgacatcacattcggtaaggggatctgccacgagtcggagatcctggagacggcttcctccgtcggagtgatcctgaaagacgggtg

SEQ ID NO: 74814 - DNA, 283 bp, Zea mays
ggcaacctggcgtgggacgtgttctccacggagcacgaggtggaggccatcctcaagggcagcctcaacctcctggcggggctagggggcttcgccgtggaggccgtcgtcggcgcggctgtcaccaaggcggtcgcaaacgtcggcgccggcgtctttgcttgctctctcgccggcttcgtcgtgggcgccatcgccgggctgatcttcgtcggcgtcacggcctcctcattaacctcatcatcggctccccaaggaaggtgcctgacatgagcaactcatg

SEQ ID NO: 74815 - DNA, 285 bp, Zea mays
cgaggaaaaggggatggaaccacctagcaggtctaaaatcgacggttctcctcttgaggttgctggcaacagattagcaattgaagcgttagtccgcaacctctcgagcagttcattagatgatcggaaatctgctgcggctgaaataagatccttggccaagaaaagcacagacaaccgtatacttctagcggaatctagcgctataccggctctggtgaaactcctgtcgtccaaggacccgaaaacccaagagcacgcagtgacagctctcctgaacctctc

SEQ ID NO: 74816 - DNA, 283 bp, Zea mays
ctcggcgtcaccgccccaaatctagcaaacggaaatcccatctcgccgccgccgcgatgtctcgccgctatgacagtcgcacgacgatcttctcgccggaggggcgtctctaccaggtggagtacgcgatggaggcgatcggcaacgccgggtcagccctcgggatcctggcggccgacggcgtagtcctggtcggcgagaagaaggtgacctccaagctcctccagacctcccgctccgccgagaagatgtacaagatcgactcccacctggcgtgcgctgt

SEQ ID NO: 74817 - DNA, 284 bp, Zea mays
ggaccatttggtcagggacaacaaggtgacggcgtgcgcggattctcttaggaacaattgcttccgggggatgacatgccgttactaccacccgcctccacaaatccaggagcaattgctgagatcaattggtatggaagatccaaaggtgaagacgatctgcagagattttacacgtgggaagtgcacaagatcagctaatgagtgccgattcttgcaccattcatctgttgaagatgctgcaattgtttgccaagattttttgcgtggacaatgcatcgcat

SEQ ID NO: 74818 - DNA, 313 bp, Zea mays
  unsure (1)..(313): unsure at all n locations
tcgctcacggtagtagctcggaatcggctcgggccctgctgaaaacgcactcgatggcgtccgcgacgggggtttcctcctcggagatngcggtggaccacgcgacggggccgggcgccgttgacaagccgcggttcgatgctctgacgccgaatgaggccaacggcgggaggccccagttccggaaagtacccgtcccgcagcaccggttcgcgccgctcaagcgatgctggatggaaatctacacacccgtatacgagcatatgaagatcgatatacgcatgaatctcaaggcaaggagggtggagctaaa

SEQ ID NO: 74819 - DNA, 282 bp, Zea mays
gccctgctgaaaacgcactcgatggcgtccgcgacgggggtttcctcctcggagatggcggtggaccacgcgacggggccgggcgccgtggacaagccgcggttcgatgctctgacgccgaatgagatgagcggcgggaggccccagttccggaaagtgcccgtcccgcagcaccggttcgcgccgctcaagcgatgctggatggaaatctacacacccgtatacgagcatatgaagatcgatatacgcatgaatctcaaggcaaggagggtggagctaaag

SEQ ID NO: 74820 - DNA, 282 bp, Zea mays
tgtgatctgccagcccctgacagcactgttggaaaagggcgctctgtacgttttgacagatgatcatgataatgcattctgcactctcaaacaagcgatgtcatcggctccggtgttggctctaccagattttaatgtcatatttcagattgaaactgatgccagcgccaatggtgtaggggctgttctttcacagcaaggtcaccctctgggcattcatgagtaaggcccctggagttaagtctcgtggtctcaccgattcatgaaaaagagtatctagct

SEQ ID NO: 74821 - DNA, 281 bp, Zea mays
gcacaaaggaggtgctactccgtggccgcggtcgtggtgaagggatgcgggcggaaggccgtggagaaggtggccaagcgcatcatgggcaaggaggtgaacaccgcggctgcctccggggagaagacgccgtgggtgccggacccggtcaccggctactaccgcccggcgggtggcgccaaggaggtggacgcggcggagcttcgcgccaggctgctcaccaagaggatcgccaactaaatcaatctagcagcagagcagtgcggctgagattatttagc

SEQ ID NO: 74822 - DNA, 276 bp, Zea mays
ccgtaaagcgttttcagttcaggataagctctggtcaatttatgctgaccggaacactgaaccaataccatttcttaaggcaattgacatttcaccactagctctagtatcagaaaatgaatcaggaaatggcctggctgggtcaagtacaaatgatgctttggaggcagttagggagctgttcagtggtgatgggcaggcaaagaaaggacggaaagggcaaaacgaagtccctcttcctccgggtgtgcatcacaggctgacgacaagccccac

SEQ ID NO: 74823 - DNA, 284 bp, Zea mays
gctgcatctgtcttacgaagtatggagatgatgatgagcttcgtgagcttccttgcacacacttctttcatgttcaatgtgtagataaatggcttaagataaatgcggtgtgcccactctgcaaaacagagattgggggtgtggttcgatctttctttggcttgccatttggccgccgccgtgtcgataggatagcggcaagaggtatagctagctcaagattcagtgtatagaacaatgctgtttttccgcataaagagctctgctctgttgcaatggtttga

SEQ ID NO: 74824 - DNA, 280 bp, Zea mays
cgcaataagggcactgggcatgtatagaagagcaatcgagcaggcagaacaactttcagaattttatgaagtgtgtaaaagtatacatattgggcggggtgagagattcctaaaaatcgaacagccgcctgcatccttcttagcggctatggaggaatatgtgagcaatgctccccttgcttcgacagttcaaagaaatcaggctgtactggccatagaggacagcaaaaaatcagaagttgaagaatcacaaccaacgctgcctcctccccactctcca

SEQ ID NO: 74825 - DNA, 281 bp, Zea mays
  unsure (1)..(281): unsure at all n locations
gagcagaccttcatcatgatcaagcccgacggcgtccagcggggcctgatcggggacatcatcagtcgcttccgagaagaaagggttctacctcaaggggatgaagttcatgaacgtggagaggtccttcgcgcagagcactacgctgacctttccgacaagcctttcttccccgggttggtcacnctacatcatttccggccccgtggtggcgatggtgtgggaggggaaggacgtcgtgttgactggccgcaggatcattggggccaccaggccttgga

SEQ ID NO: 74826 - DNA, 279 bp, Zea mays
aatacatatagctttggtggcaagaaaaagctggtcctctccactgcaacctggcttggggggaagaacgattttcttggctttgcataccttatagttggtgggctctgcattttcctggcatttgcattcaccttgctgtacttcgtaaaaccaaggaaactgggagaccacaactacttatcctggaacagacgctaggatgtttcggaacaccaagtgtccgtactactcgaaatgtagcttgtatgaaatgaaatgctctgaaccagaaatgtc

SEQ ID NO: 74827 - DNA, 278 bp, Zea mays
caaatccgatccgtagccgccgtgcctcgctttcgtcttttcccctctgctcgagtacgagcggctactcccggcggcggcggcgatgagcgcggtgaacatcaccaacgtggcggtgctggataaccccaccgccttcctcaatcccttccagtttgagatctcctacgagtgcctcgtgcccctcgacgacgatctggagtggaagcttatatatgttggatcagctgaagatgaaaactacgatcaacagcttgagagcgtgcttgttggccctg

SEQ ID NO: 74828 - DNA, 260 bp, Zea mays
gaaagattaggcacttatggcttagctgaatatcaaatagaaggagatgggaattgccagttccgagctctggcagaccagatattccgcaatcctgactatcacaaacatgtgaggaaggcggtagtgaagcagctgaaggagttcaggaaacactatgaaggttatgtgccaatggaatataaggtttacttgaagaaaatgaaaaggtctggggaatggggagatcatgtgaccttacaggcagctgcagacaggtt

SEQ ID NO: 74829 - DNA, 271 bp, Zea mays
cagctcgacgcaagacgtgccttccaagctttgaaggggacaattcctcctgatgaaagtagcttcaacacattggttcatggctggtgcaaagcaaggatgctgaaggaggctcgcgaaacaatgaaggagatggagcggcatggtttcagtccttcagtaacgacttacacctgcctgatagaagcgtactgcatggagaaagattttcagacggttgatggtatcttggatgagatgcacacaaatagatgcactccaaatattatca

SEQ ID NO: 74830 - DNA, 260 bp, Zea mays
aaagattatccgtgctccttctggagtgatgcatgggaaaagctctccagtttattacgatgaggaattaggaaaggcattgttcaatggcttgccaaacccttttactgccgcgaggtaccacagcttggtcattgagcaagaaaccttcccacatgatgctttggaggctactgcatggactgaagatggacttatcatggctgctcgccacaagaagtacaaacacatccagggtgtccaattccacccggagagca

SEQ ID NO: 74831 - DNA, 264 bp, Zea mays
  unsure (1)..(264): unsure at all n locations
attactttgggcctactgaggacggaaagccttctcctaaagatagattatgtattgaggtactagagcaagctgaaagaagggacccgcaacttggagaagcatcagtttctcttgcgatagaaggagactctgcgcgtgggaggctactctaccttgaaaaccgagttgctctagcaagaatatagtntcctatggaggcaagggtagcaatggacattgctcaagtcgatggaacactggaattcacccttgtttctagtg

SEQ ID NO: 74832 - DNA, 253 bp, Zea mays
aactgcacccatgctatgtgtatcagatgttaccaggactggagttcaagatcgcagtcctgcccattctgccgtgacaacctgaagaagacctgtcctagtgacctgtggatctatgttgaggaccaagatgtggtcgacatggagacggtgtcgagcgagaacctcagacggctgttcatgtacataagcaagctgcctctgattgtcccagacgtcatcttcagcgtgtatgattcccacatcaaatgac

SEQ ID NO: 74833 - DNA, 89 bp, Zea mays
gtattattactttcgttgaaaccgtgatgctattaagacttaatttttttatggaacatcgaatgtaaggcatacatggttatgagttt

SEQ ID NO: 74834 - DNA, 255 bp, Zea mays
tttttattctgcaggtgttcacgtacctgatcctggcggcgggcgcacggcggcggactgctgtacctcgcctacaacggtgacaaggaggtgacgtggagtgaagcttgcggcgttttcggcagcttctgccgtcagggcgcacctccgtcgccatcaccttcggcaccgtcctctgtttcatcctcctgtccctcatctcctcgtaccgccttttcagcgcctacgaggcgcccccgtcgtcggcgctcggca

SEQ ID NO: 74835 - DNA, 255 bp, Zea mays
cttgtttgaaggcacaaattttggcatatgtcgagtactttggccagtttacagctgacaccgatcaattccctgaagacatagctcagctcattcaaagttcctatccatcaaaagaaaatcgcttggtagatgaagtattggcaacttttgttcttcatcatccggagcatggtcatgcagttgcacatccaattctttcacgcatcatagatgggacgctgtgctatgatagacatggtcccccattcagtt

SEQ ID NO: 74836 - DNA, 234 bp, Zea mays
gcttcgttcagttcagttcatccgtgttcttgtttgcgaggtcgagagagactgagagaggatgtcgtgctgcggaggcaactgcgggtgcggctccggctgcaagtgcggcaacggctgcggagggtgcagcaagatgtacccggacatggccgagcaggtgaccaccaccaccacctaggctctcatcatgggtgtcgcaccatccaaggggcacgccgagggcgggttcga

SEQ ID NO: 74837 - DNA, 261 bp, Zea mays
gcgacgtgtacggcgcgcccttcacggaaagccccgaggtggtgcgcgccgtggccagcctcggcgtcgtcttcgccttctcgctgctcctcaacagcgtgcagccggtgctgtcgggcgttgccgtcggggccggctggcagtggctggtggcgtacatcaacctcggctgctactacatcactggcatccccgtcgggtacatcatcgccttcccgctgcgcggcggggtgcaggggatgtggggcggcatgctcacgg

SEQ ID NO: 74838 - DNA, 232 bp, Zea mays
acaacggcgagggcaagatcggcgacgtcgggctggcggcgatcgtggacaagacgcacgtggcgcacaccatcctgggcacgccggagttcatggcgccggagctgtacacggagacgtacacggagtcggtgggcatctactcgtacggcatgtgcgtgccggagatggtcacgcgggaggtgccctacgccgagtgcggcagcgtcgtgcagatcttccacacaacata

SEQ ID NO: 74839 - DNA, 255 bp, Zea mays
gtggaggtcaatgaaccatttccacgagatacaaaacgagattgttcagcaagtccgcggcctggtggacaactccatggccgagtcaacatccgacctccacaggcttgcgactcgtgatctcgaggccgctgtcgcggcatggcactcgaacttcaaccgcctcatcaagtaccaacgcgactacatccgctctctgtacggctggctgaagctcacgctctgccaggtggacagcagcgtgccccaggaagc

SEQ ID NO: 74840 - DNA, 259 bp, Zea mays
cgttctcctatgcccgggctctgcagaactcggtgctgaagacatggcaagggcgccctgagaacgtggaggcagcgcagaaggccctgctggtgcgcgcaaaggccaactcgctggcccagctcggtcgctacactggtgagggcgagagcgatgatgccaagaaaggcatgttccagaagggctacacctactaatgtgccagcgagatgtttccatgacataataataattgtagcgttttggtgttattattatt

SEQ ID NO: 74841 - DNA, 257 bp, Zea mays
caccccgcagccgccgcgcaggtagccctagcacccgcgacgagcaggatctgcccagttgctcttgcggtagttcccacaactgtcaacatgcagaacgaggagggtaagactgtggacctctatgtccccaggaagtgctcagccacaaacaggatcatcactgccaaggaccatgcctctgtccagatcaacattggccacttggatgcgaatggcctgtatgatggtcacttcacaacgtttgctctctctgg

SEQ ID NO: 74842 - DNA, 259 bp, Zea mays
ccgtcactgagtgggcaggtgagcataaccttgatagctactggcttcaaacggcaggatgaaccagaaggccgcgtgtcgaaggtacctcttgtcaagcaatttactactactagggcccctattcttacagttttttgcttgcattgcaaccaaagggtgggcaacaaggtgagaatggccgacgcccatccccagcagagggcagcagcacggtggagatcccagagttcctgcgacgaagaggaccttctggctt

SEQ ID NO: 74843 - DNA, 261 bp, Zea mays
gatgctagcgttgggcaggtggtggacgttgagaagggttcggagtatgctatcacattcagtgctgcccggacatgtgcacaactggaggcactgaatgtttccgtgctaggtggcgtgtctcagacagtagacttgcagacgttgtacaacatagaaggctgggatgcgtacgcgttggcttttcaggcgacggaagagcaggcacatcttcaattcatgaaccctggcatggaggatgatccaacttgtggtcctatc

SEQ ID NO: 74844 - DNA, 264 bp, Zea mays
ggctgggccatcaatgatcgtggtgtttcattcacatttggtcctgataaagtttctgaatttcttgagaagcatgatttggaccttatctgccgagcacatcaggttgtcgaagatggatacgagtttttcgctagccgtcaactcgtaacaatattttcagcccctatctactgtggagaattcgacaacgctggtgccatgatgagtgtagatgatacattgatgtgctcgttccagatattgaagctgcaaggaagatga

SEQ ID NO: 74845 - DNA, 254 bp, Zea mays
tcatcattaacacctcactcggccagcttggggatgggaaccatgattagtgctccaggttctggatttgggtcggagggatcaggggcttcaggcttgggtgcgccatcagagaagcgtggccaggggcggccacctggctctggaaagatgcaacagttggcttcgcttggaaagtggtttcttggctctgttggaactggttttactcctcatgtgattattattcagccaggagaggacgttgctgccag

SEQ ID NO: 74846 - DNA, 265 bp, Zea mays
gtcctccacattcatcggcaactcgacctccatccaggagatgttccgccgcgtcaggagcagttcactgccatgttcaggaggaaggccttcttgcattggtacacgggtgagggcatggatgagatggagttcactgaggcagagagtaacatgaatgacctggtggccgagtaccagcagtaccaagacgccacagctgaggatgaggaggagtacgaggaggaagaagaggaagatcctgctgcctaagccatcatcccaa

SEQ ID NO: 74847 - DNA, 159 bp, Zea mays
  unsure (1)..(159): unsure at all n locations
tggatgatcagcaatggctcacgtactgggtgctgtactcatttatcactctattcgagctcaccttttctccggtactcgaatggtanaacaacaaactntcagcacgacaggggacattaacacacgtgtttacgggtcaaagggtctatatcgcga

SEQ ID NO: 74848 - DNA, 227 bp, Zea mays
cggcacgcagttgtgggtctcgaggagcaactgcgcgacggcgtcctgctcggcctgcgggatgtcgtcgcgcaggcagccgatgtagatgaactccatcaggggggacgacgagtggtggaggtggcggaggagggagtcctcgtcccactcgaaggaccagggctcctccggcgactcacgacagtgggatcggatcgggagctggttggccacgatgatggtgc

SEQ ID NO: 74849 - DNA, 263 bp, Zea mays
ggtgtggctgtgaggcactcctggtgcaggcccgaagtgcctgacagcttccctagcgttcttaggacccctcagcagaaccgtgttttgcccaagtggggcacggagcgcgagctggtcgaaggtgaggcactctccgccagcattgatgatcctggccctcgctgtctcagtgaacctgagcgcgcagaccttcatcgccggcacctcgctgatcctcttgtcgtcggtcacggtgcccacaatcacggcgatctgatcac

SEQ ID NO: 74850 - DNA, 261 bp, Zea mays
gtttgctataacattccggtgatcgtgtttcttcatcgtcggggtcatatttgttcccattggtgttatcttcaatttgacgtcggcaacgtggtcatggtgaccggcgggaggaacaccgggcatgtaggagtgatcaagaactgggagaagcacaagggcatcttcgaggtcatcgatgtgctgcttggagtttttgcatgctatgtctagttttctcctatttgttgtggaggaaaacataaaatggaattcaaattt

SEQ ID NO: 74851 - DNA, 260 bp, Zea mays
gcgtggactccttcaagaagagctttgacagcctactcgtgagcctgcaggagaagggcaacagcctcaagatggcgagtgtgtaaagctgagaagattgggtacctgcgagtgaacgattttactaaataaaatgctagcttgctggctctcctcttagtttttacgctgtacctttgctctcaattttctgaatcggctttgtatcccaggcttgccagaacgtcattgtgtagccactgttcatggcttgtaattgc

SEQ ID NO: 74852 - DNA, 253 bp, Zea mays
gccgcacaaagggaaggagaccctcgccaacctcgaagctagtccaaactagtgggaggttgagtgcagggatcgatcgaggaagacgagacaagcttcttcttctgctgccgccgccgccagctctagctcaccacgagttactagccaatctgacaccgaccgtccatggcgcggggcaaggtgcaacttcggcgcgtcgagaacccggtgcaccggcaggtgacattctgcaagcgccgcgcggggctgc

SEQ ID NO: 74853 - DNA, 261 bp, Zea mays
gtgtagaggcgcgattggccagcttatatagcatccgaaagacaagtcactcacacgcacattcgcattggctaacagaagctatttggaatgcagtgcactcgactaacaacgtaggtaacccccgtctccttgttttgccgattgcatcgccatcatatgtcagcagcaaggaagttgccagacaaggaaaccttctcgccaggcttgaatggtggaagacctctgtagggacaggttccacagcggaaggcatcaccc

SEQ ID NO: 74854 - DNA, 258 bp, Zea mays
gtttggggaccttcctgaccccaggatgggaaacaggttcgatgaaaacgagatgttccatatgataggagctgcggctgcatgcattcggcattctgcagcaatgaggccacggatggggcaggtggttagagcactagatagtttagccgactctaatctgaacaacggcctccaacccggacgcagcgaggtgttcttagagccacagacggaggagattcgactgttccagctgagggagttcggcagccggga

SEQ ID NO: 74855 - DNA, 260 bp, Zea mays
gcggacagccagttgtaggagttgggaaggtgttcctggaatatgcagatatcgatggtgctgccaaagcaaagacagcgctgcatggaaggaaatttggtgggaacccagtggtcgctgtctgctatgcggaggacaagtttgccaatggggaatatgatggatgaaaatcttattcctcttgtactatagcagtagccggtctttgtctttggctctatgctacctgcttgtttaattgcaacaaagatgaacggtct

SEQ ID NO: 74856 - DNA, 265 bp, Zea mays
tgtgcgcctctacatttcttctctctctactcctccgcctccgcctgatccatccaagacagggatcgccatgtcggactcggaggagcaccacttcgaatcgaaggccgacgctggggcgtccaagacctacccgcagcaggctggcaccgtccgtaagaacggcttcatcgtcatcaagaaccgtcactgcaaggttgtggaggtttctacctccaagactggtaagcatggccacgccaaatgccactttgtcgccatagac

SEQ ID NO: 74857 - DNA, 258 bp, Zea mays
tgaggatgatcgtagaattgcatttggtcagttgaaaagatttgcatggcgagaattgcaacttgcaactgataattttagtgagaaaaatgttctttgataaaggagggtttggaaaggataaataagggcaccttcagaagggactaagaatgctgtaaaacggttaactgattataaaagtccaggtggagaggctgctttcttgcgtgaggttgagctaattagtgttgcagttcaccggaatcttttaagatt

SEQ ID NO: 74858 - DNA, 254 bp, Zea mays
aaacaggagacgcatccagcctccagcagagggctccagagatcgagcaagatgaaggagggcacggcgaactgtgtggacatcctcatcgccatcatcctgcccccactcggcgtcttcctcaagttcggatgcaaggtcgagttctggctctgcctcttgctcaccttcctcgcctatcttccggggatcatctatgcgatctacgccatcaccaaggactagcgcggttccagttgggtgagagctgcagg

SEQ ID NO: 74859 - DNA, 255 bp, Zea mays
ctttgtcctcgacaaactgctgggcgtgagttgtaaggttatcaatgtgaggtctggcgatgagcttcctgaaaagtgcagagaacttgccaggcattttgaaacccagggaactcctgtgatgattggtggtggagtcttggcttacacccttttgggagttgattataacggagatagtagagactgtgcatttcttatccttgatccgcactacactggtactgacgatctcaaaaagattgtaaatggcgg

SEQ ID NO: 74860 - DNA, 255 bp, Zea mays
tgtttctgcagtcaatgcattttatgaactgctgagccagggaagcctaagcgtgatgcatccagaaaccaagaaggctgttgctcctgttgagctatgcccaatactcaaaacactatacaaaattttgatcaagaggttggaaacttgtactggtgcacttagactcattgagtcgctattgggctaattgtttaacttttacctgcagggagcttacgaccaattccatcctccaggcaatacgtgatgaat

SEQ ID NO: 74861 - DNA, 260 bp, Zea mays
  unsure (1)..(260): unsure at all n locations
ctcgagccgatcagcatgctatgtttgttgcctccggtgagcaggttagagctcactggaattgacaaccatggcatgctgataggccnataagtgactcgatcagagagcgagctttccttttcagtgccagagcgaaaatcagtcaagtagaggttgtagtcacctttcatcttataaaagaatacgatattttcacccgtactggccaagggaaggcagtgaatagcaatgactgacaatacttcattgcaaacctt

SEQ ID NO: 74862 - DNA, 255 bp, Zea mays
ttctccttcacccgcaacatccttcaggggaagcccatcacggtttaccgcggcaaggaccacgtggacctggcccgcgacttcacctacatcgacgatattgtcaagggctgcctcgcctccctggaaacggccggcaagagcaccggcaccggcggcaagaagcgcgggccggcgccctacaggatcttcaacctcggcaacacctctcccgttacggtgcccaacctggtgtccatcctggagaagcacctc

SEQ ID NO: 74863 - DNA, 189 bp, Zea mays
agttgattctggtggttacacatcattggatgatgtcacaagcctacctccttccacgagagataaaatggaaactttctttcttggagaaacattgaagtatttgtatttactgtttgatgaaaacaatacccttcccctagataagtatgtgttccatacagaggcacatcctcttccagttatgcg

SEQ ID NO: 74864 - DNA, 282 bp, Zea mays
ctcgagccgcggcatcagccagggcaagctcgtcgaccccatgctcgagtgcctcaaggagacggcccgcaagccgctgcccatcaacatcaactaaaagacgccacgcgccgccatccatgctgccgtccgcatggccggaggaggaggagaggaggaggaggaaaatacatgaaaaataaaacttgtacacgtgtatgtctccagattgtgccgccgtcgttctcgtcgttgacttttcgttgtattggtcgatccatatgtgtgtgcgtgtgtggcgat

SEQ ID NO: 74865 - DNA, 274 bp, Zea mays
gaacttcacacagtttaatagtctccgggcttgtctcagacaaacttttctctctttcattccatatatttaggagctcaagtgacggtgcagttcccacaacaccaggatgagtcaatcctggaaaacgaacacctggtatctgcggggagcatgcgtagattccttcgaaataccagatggcttttcttgcgctagggaagtggtcagttaagaatccacctccattctccctttcaagtattgcggtgtaaccccactcgtccctgattgt

SEQ ID NO: 74866 - DNA, 196 bp, Zea mays
cacagtctaggaggcttcttccgctcgctcaggtaggtgtactgtactgtactgtagtaggttggttctccattcatcattcagctcacaggtccctccgcctccgccgtatcggagggagaggaagcggaaggcttggaaggagaagagaatggcggggcggcgcgcggaggaggagtacgactacctgttcaag

SEQ ID NO: 74867 - DNA, 262 bp, Zea mays
gtagctacgaaagacaggtttaggccaatgccattttgtttgccagtattatttccaacggcccatgctttcgctttgcgaatgatacttcaacttggggtgaagccttcttggtttgaatgcaatagtagtgataaattaactggggacagctttaaggtagcaccaacatttggagatcttcgtagttacatgattgagacaacactccctcctattggtgacgccgttgtggctgaattgctccttaaagtgttggaac

SEQ ID NO: 74868 - DNA, 273 bp, Zea mays
atctgcctcaacgtggacatcaacagtagtagtacagcatttgttggcagcagctgatagatatggactggtccgtctgcgtatcctgtgtgaatcaaagctctgtgatgaactgactcctgaaactgtcgcaacaactttagcccttgctgaacagcaccattgtgctgagctgaagtctgcatgtctagagttcattgctttgcgaggaaatttgggagctgttatggagacggaaggctttgcatacctggaggatacatgcccgtccct

SEQ ID NO: 74869 - DNA, 276 bp, Zea mays
aacaacaaaagtatgacaaaatcagtgcgaagcacatgctgacctcaattgacgccctgtgtaaatcttatccatcagaatttgttacatatttccattattgccgctctttgcaatttgaagataagccagactacagctatttgaagaaaaattttcgggatttattcatccgtgaaggttgccagcctgattatgtattcgattgggactgtatcaggcaagctgcggaccataacaagttgcgagtatgtctgctccttttctggaaattac

SEQ ID NO: 74870 - DNA, 246 bp, Zea mays
ctcctcctccagagctcgtcgccaccggccaccgccaccctcgatcacgccgtccgtcgaggtaaggtcagcatggtgagggtcagtgtgctcaacgatgcgctcaagtccatgtacaacgctgagaagatcggcaagaggcaggtcatgatcaggccgtcgtccaaggtcatcatcaagttcctgacggtcatgcagcgccacggctacattgggagagttcgagtaacgtgatgaccaccgatc

SEQ ID NO: 74871 - DNA, 269 bp, Zea mays
atgccattgacgagtattctattggacagctgaaggagtttgagggcaagaagctcgtctctgccaccaaggaggggctgaagctggacgagagttaggatgagaagaagcgcaaggaggagctcaaggagaagtttgagggactctggcaggtcatcaccgaggtgctgggcgacaaggtgcacaaggtggtggtctccgaccgcgtggtggactcccgctgctggcctggtgaccggcgagtacggttggaccgccaacatggagcg

SEQ ID NO: 74872 - DNA, 265 bp, Zea mays
cgttgatattgcttatggattcaacaatgtgccaaaatcaaagccgaagtgtatgacaataggaggaaggcaactcattaaacagattctcagataaaattcgtgctgaggttgcaagagctggttatatggaggtgctcacatttatcttgtcttcacacgaagagaactttgacatgttaaacaggacagatgacaaaagtaaagcagtcattattgcaaaccctcgcacttctgaattcgaggttgttagaactagcctgat

SEQ ID NO: 74873 - DNA, 263 bp, Zea mays
ctcgagccgttgataatcgcgtccacgaccacctggatgggattggcgtcagtgagcaggtggctgatctccagggtgtgcttcatgatgcggacggccatgaccttcttgccgttgttgcgcccgtgcatcatgagcgagttggtgaggcgctcgacgatggcgcactgcgccttgcggaaccgcttcttggagtagcgccccgcggagtgcggcaggaatgtcgcgtgcttcgccgcagtcacagccaggtagtcgttcac

SEQ ID NO: 74874 - DNA, 246 bp, Zea mays
ctcggcgggattctctaaagaaaatagaaatctggaaattgcctcctgtgctgtcagtacacctgaaacgattctcctatgacggcaggtggaagcagaaactgcaaacgtccgtggatttcccattagaaaatcttgacctgtcacagtatgttattggcccaaaaagcagtttgaagaaatataacttgttttctgtttcaaaccactacggcgggctcgatggaggccactacacggcctatt

SEQ ID NO: 74875 - DNA, 114 bp, Zea mays
gtcaccgcttaacagcaaatcaaaaggtaaaggggttgcataccaacgtgcacgggctttgtagtttgatagcctgtttcacgactcctcaataatcaaatagtgtaatgaaag

SEQ ID NO: 74876 - DNA, 240 bp, Zea mays
gtcaccggcaagaacgcccgtcggggcggagctcggggacaaggacctggtgcggtgggtgcacaccggcatcgagaaggatggcgtggactcggtgctggacccgaggctcgacggcgagtccagcagggacgacatggtcagggcgctccacgtcgcgcttctctgcacgtccagcctgccgatcaaccgcccgtccatgaggatcgtcgtgaagctgctgctcgaggctgcgccgcg

SEQ ID NO: 74877 - DNA, 236 bp, Zea mays
gtggaaggaggcatacgaagcagtcgtcgtcgatggtgtagatgtacttcttcttggagaccatgtagccgaagcagcggcaggcggagtccttgaaggagatgcaggaggccttgggcccgaggatgcggttgatgtcgttgcggttgtagagctcgtagtcgaagccctcgggcaccttaatggtcttggtcgggtcgccgtcctgcacgatgatgacgtggtagggctggaag

SEQ ID NO: 74878 - DNA, 232 bp, Zea mays
  unsure (1)..(232): unsure at all n locations
tcgagaactccatttcgatctcatttganatcaacccatcctncgtttcctccgtctagcagcctctcaccctcatggccaagatcaagatcgggatcaatgggtttggcaggatcggaaggctggtggccagggtggccctgcagagcgacgacgtcgagntcgtcgccgtgaacgaccccttcatncagcaccgattacatgactacatgttcaagtatgacactgtgca

SEQ ID NO: 74879 - DNA, 237 bp, Zea mays
gtgccaccggaggcaacaagaccaagacccctggacctggtgcccagtctgccctcagggcgcttgctcgttccgggatgaaaatcggacgcattgaggacgttaccccggtccccacggacagcactcgcagaaagggcggtaggaggggaaggaggctgtaggcgtctcttctgcgtgccatttgctggctcttgtcgggtggccatcatgaagctagtcctctctgggtggtgt

SEQ ID NO: 74880 - DNA, 140 bp, Zea mays
aagtcctcctcgggttagggttccttagggttttgtggtagggcgatggcggcggctgatgtggagtaccgttgcttcgtcggtgggcttgcctgggccaccatcaacgagtcgatggagaatgccttagcctcctacgg

SEQ ID NO: 74881 - DNA, 89 bp, Zea mays
ctcgagccaaggtgtcctaagatgagctcaacgagaacagacatctcgtgtggaacaacagggtaaaagatcgtttgattctgatttcc

SEQ ID NO: 74882 - DNA, 240 bp, Zea mays
acggcatgctgaggcagacgccgcgggcctgctgcggggcgccgggagtgggggagtacaacttcaacctgacgtccaagtgcggcgagccgggggcgtacgcgtgccaggacccctccaaccactggagctgggacggcgcccacctcacggaggccgactacggccacatcgccaagggctggctctacgggccctacgccgacccgcccatccttcacccctgaatccttctccctc

SEQ ID NO: 74883 - DNA, 216 bp, Zea mays
gcgactggctgatatgactcagaaatacaaggacgcttccgttgacaataaaaatctaacagttgatgttgagactatgagtagaaaggtgaacatagccgaggaagctgtcaggaggctaactgggatcaccctcatgctaccgaccgcgtttgcgaagcacgcgagcagcgcgcctactgtcatcatgaccatctgatgcagcttctgcttctg

SEQ ID NO: 74884 - DNA, 237 bp, Zea mays
ctcgagccgaacttagatgcatacatctttgcgaagttagtgagggtgaaggcccatccgtgcagaccagcagaaaaagcaactgtccccttctctgggtatacttggacatcaccaaggagcttatcttcatatgttgccatgatgacattggcattctcaatgacacgggagaaaatctgatacgcttcctcaccctcaacctgaagctcaaggaagcacctgtccatcttgttc

SEQ ID NO: 74885 - DNA, 225 bp, Zea mays
  unsure (1)..(225): unsure at all n locations
ccttgcggcagtgtctacacccgtgaacatttagccaaggtcgcggaggtagcaagacnncttggaatactagtcatcgctgatgaagtgtatggaaacctggtgtttggggacaccccttacgtcccaatgggtgtctttggccatattgcccctgtgttgagcttaggntcactatcgaagagatggatagtgcctgggtggcgacttggttgggtagctgta

SEQ ID NO: 74886 - DNA, 215 bp, Zea mays
gggaagagagagaaggatactaaaaacagagaaacaaataacgacgacttgctgggcttattactggagtcaaacacaaggcaatcaaatggaaatgcaagcctgggattgacaacagaagatgtgattgaggaatgcaagttattttactttgcaggtatggagacaacatcagtccttcttacttggacacttattgtgctaagcatgcaccc

SEQ ID NO: 74887 - DNA, 260 bp, Zea mays
gtgtgaagaaaaatactgcaatttgttaggcgatgatccaggtacttatagatggatggcaccagagatgtacaagcacaagccatatggccggaaggtcgatgtgtatagctttggacttgtcttgtgggaattggtcactggttcactcccttatcaagatatgactccgcttcaggcagcttctgcggttgttaataagaacttgaggccggctattccattgagctgcacagttcccctcagcttctgatcgagca

SEQ ID NO: 74888 - DNA, 261 bp, Zea mays
caatttcacactgaacaacgacttgcggtatgtggtgtgggacgatccacctcagatggagccccatctcctaagcgttacacattatgatgagctagtagagactggggttccttttgcccggaagtttaaggaggatgaacccctgttggacatgattgatgataaagtgcttcgacgctggcgtcacaggcctgttcctggcgcatggtgcacaggcaaaaggaggtggttcagtgatccttgctcccagtggagcaa

SEQ ID NO: 74889 - DNA, 265 bp, Zea mays
ttgcactaattgtcacaaaaactaatttcaagcatctgtattggacggtgacgcagcagctaacacaccacactatcaatggatgcaacatgaggccgggggatatatttgcaactggcacactcagtggacctgaaccggactccctcggatgtctattggagctaacatggaacgggcaggaggagataccagtgggcaatttgacccgcaagtttctagaagatggagatgaagtcatcttgacaagatgctgcaagggtga

SEQ ID NO: 74890 - DNA, 259 bp, Zea mays
  unsure (1)..(259): unsure at all n locations
tggtggtccacatggagcctgttatacatcttcaacaactaggaggactggtgcagatggatttacgctggaagaaaataaagaggctgacacaactactggtaaagccactcacaggatttcacgtggcattggcattaagggtcactcgttaacaagaaatcttaattctggtgggcgtgtgctcacncttcaaactttacacaacttgaatgaagatgagcttgctgggtttgaggaatcatggcaaagaaatacc

SEQ ID NO: 74891 - DNA, 258 bp, Zea mays
gagatatgagacgacatacttcaagccatttgctggatattatttctcgggcgatggctgcagcagggataaagatggctaccactggctgactggaagagttgatgatgttatcaatgttagtggacaccggattgggacagcggaagttgagtctgctctggtttcacatccaaaatgtgctgaggctgctgttgttggtattgatcatgaggttaaaggccagggaatatatgcttttgtgactttggtggatgg

SEQ ID NO: 74892 - DNA, 264 bp, Zea mays
ctccgatcctcgtcgccgacgcatccacccgaaccctcctccgcgacctcgccgtcgccgcagccttggccatgtcgatcttcgagtataatgggtccgccgtggtggcgatggtggggaagaactgtttcgcgatcgccagcgaccggcggctgggcgtgcagcttcagaccatcgcgccggacttccagcgggtgttcaaggtccacgacaagctttacatcggcctctctgggctcgccactgacgcccagacgctgtacc

SEQ ID NO: 74893 - DNA, 283 bp, Zea mays
accgtcgagctcgagccgaccagaatggccgccgccgatgcatcttcgttgcctccgtccgccatcacctgccgagcggcggtggcgtggggaccgggccagccactggtgatggaggaggtggaggtcgccccgccggggcccatggagatccgtgtcaaggtcgtctccacctccgtctgccgcagcgacgtcactgcctggcaatccaaggcaggcgcaacttgatctgttccccagagtcttcggccacgaggcatccggagtagtagagagtgtcggt

SEQ ID NO: 74894 - DNA, 259 bp, Zea mays
aaaatctgttttctgctgcatgcgcacaaatttagcatgacaaaaatgtgcgttgaaagaaattggagcgccttgcatggaaacaaaaatatgattttaatgctttattcctccataaatataggacctctccaacaatcacgcagttagattatgctacacagtgaaggcgtttatgcactgtggttaggctgtttagaatcagttcctatttttacggagcgcaggcttgcggtttctattttgatgtagatcccaa

SEQ ID NO: 74895 - DNA, 256 bp, Zea mays
gcaggatgccgccgccgcgtgagcaccaccagccccaggacgaagaggacgacgctaccgcggcgttgtcaagctcatcagcgccgagggcttcgaattcgttgttgacagcaaggccgccatggtctccaacaccctccgcaacatgctcacatccccaggcggcttctctgagacgcgccagggcgaggtccgcttcccagagatccccaccaacatcctcgagaagatctgccagtatttctattggtcgctc

SEQ ID NO: 74896 - DNA, 257 bp, Zea mays
aagagaaagggtagagagcttgaaaaagtagctgaagaagctagggtggagctagataggttgagggcagaaagagaggaagagaagaatattctggtcaggggcagagctgctgttgagtctgaaatggaagttctgttgaagttgaggagtgaggtagaggaacagctgcagaacgaactgagcaagaaggtggaggtgtcgttcgagaagagtaggattgagaaactccaaaaggaaattgagggcgataactc

SEQ ID NO: 74897 - DNA, 258 bp, Zea mays
cctcgcgccgcaatagctcgccccctcgttcgccgcctctcctgctcctaccgcagctctccctcaggtttagtgttcgcaatggcggccttcaacaagcttggtggccttctaaggcacagtgctctggtgagcggtatcactggtggctcttctcctgcagtgttcaatgctgcacggctcatgtcgcccaagctatttattggtggtcttgactggggtgttgatgacgtgaaactaagagaagcatttagcagc

SEQ ID NO: 74898 - DNA, 259 bp, Zea mays
cggcgttcgcggagctggtgaacacgtgcgacgcggtggtgggcgtgcacggagcggggctgaccaacatggtgttcctgcccccgggcggggtggtcatccaggtgctgccgctgggcccgctggagttcgtggccagctacttccggggcccggccagggacatggggctcagctacctcgagtaccgcatctcgccggaggagagcacgctgctggaccagtacccgcgggaccaccccgtgctcacggatcacat

SEQ ID NO: 74899 - DNA, 259 bp, Zea mays
catggaggcacgggagaatgccgcagccacccttttcagcctgtctgtggtcgatgaatacaaggtaacaatcggaggaacaggagccatccccgctcttgtagttttgctgagtgagggcagccaacgcgggaagaaggatgcagcagccgccctgttcaacctgtgtatctaccaggggaacaagggccgtgccatacgagctggcctggtgccactcatcatggggctcgtgacgaaccccaccggagctctgttg

SEQ ID NO: 74900 - DNA, 255 bp, Zea mays
ggattctcagacttacgtgcggaacaagaagaaggcgtgcgaacgtgtcggtataaagtcgtacgaggtcaacttgcctgaggacagctccgaggaggaggttatcaagcacatagcgagtttcaacagtgacccgtccgttcatggcatcttggttcagttgcccttaccaaggcatatgaacgatgagaacattctgaatgcggtctgtattgaaaaggatgttgatggctttcatccgctgaacatcggacg

SEQ ID NO: 74901 - DNA, 257 bp, Zea mays
acccgatgcagctaggcttgcgatcgaatatggcgctgctgggatcatcgtgtccaaccacggcgcgcgccagctagattatgttcctgcgactatcagctgcctggaagaggtacgccgaccaaatccttctgtgattcagagcttcagagtcttcaggggggtaaaggcgaaaagcttgcttgtgcttcctggctttccatgttcctgtctgctgaggttttcactataaagtgcgacgtgaattcaggtcgtct

SEQ ID NO: 74902 - DNA, 253 bp, Zea mays
taggggcatccgctgcatcatcaggtcgaacgccttgttgatctcggcgaacgggacgctgtgcgtgatgaacttctccacctccagctcctttttcatgtacagctccaccacatttggcagatcagtgcgtggcttgtagttgccaaagaaggtccccttcagggtcctttcgttcaggaagttcatcgggtgggtcttgatctcagcgtccttatgtggcacacccaccagcatagcaacaccccagcca

SEQ ID NO: 74903 - DNA, 248 bp, Zea mays
gggcatccgctgcatcatcaggtcgaacgccttgttgatctcggcgaacgggacgctgtgcgtgatgaacttctccacctccagctcctttttcatgtacagctccaccacatttggcagatcagtgcgtggcttgtagttgccaaagaaggtccccttcagggtcctttcgttcaggaagttcatcgggtgggtcttgaactcagcgtccttatgtggcacacccaccagcacagcaacaccccagc

SEQ ID NO: 74904 - DNA, 248 bp, Zea mays
cattagccaaacgaatatactcaagatattctaagcaagtttggaatgaaggatgctaaacccatcaagacacccatgggaaccaatgggcatctcgacctcgacacggaaggtaaatctgtcgatcaaaaggtataccggtcgatgataggttctttactctacttatgtgcatctcgaccggatattatgctttccgtatgcatgtgtgcaagattccaagccgaccctaaggaagctcaccttac

SEQ ID NO: 74905 - DNA, 244 bp, Zea mays
gatgggtacgatgacctccgccgcaagttggaggagatgttcgatatcccgggagagctttccgccagcctcaagaaatggaaggtgatctacacagatgacgaggacgatatgatgctggtcggggacgatccatggagtgaattttgcaggatggtaaaaaggatatacatttattcctacgaggaggccaagtctttgactcccaaggcgaactgccggccatcggtggtgacacggcgtc

SEQ ID NO: 74906 - DNA, 246 bp, Zea mays
ctttgttcaggcttatgtcactgccttctccttcggtatgggtaccattccttggatcataatgtctgagatccgtccggttagcatcaagtgtgtggcaggaagcttcgcgacccttgccaactggttgacgtcctttggaataacaatgacagcaaatttgcttctgaactggagcgctgcaggtacatttgcctcctacatgacggtgagtgctttgactctcgtcttcgtcatcctttgggc

SEQ ID NO: 74907 - DNA, 244 bp, Zea mays
cagaaaaactctggtgttattcagaggctactcagcatctcatttcagtggcggacaatggaattcaggcggtggctgtgacaaggagagtaaaccaataaccaacgatcagtacctttcaacctacccaccaaagatgagcatcctggaggacgtgatccacaagatgaaaactccggtcgtttacttgaacataacgagaatggctgactacagaaaggatgcacacccttccatctaccgc

SEQ ID NO: 74908 - DNA, 251 bp, Zea mays
cgcgtacgaggccaccaaggtcgcccacgggctgtgcatcctgaccgagtgggacgagttcaagaccctggactaccagaagatcttcgacaacatgcagaagcccgccttcgtcttcgacggccgcaacatcgtcgaccccgagaagctgagggagatcggcttcatcgtctactccatcggcaagccgctcgacgcctggctcaaggacatgcccgcggtcgcctaatccccccctcacccatggattg

SEQ ID NO: 74909 - DNA, 244 bp, Zea mays
gcgcaagtggtcgggtggccgccggtgagggcgtacaggaagaacaccttccaggcggcggcggccaaaaaggtcgagcagaagcagcagcagggaggcctgtacgtgaaggtgagcatggacggcgcgccgtacctcaggaaggtggacctccggatgtacaaggggtacagggagctcagggaggctctggacgcgctcttcaccaactccttctccgcggcggcggcagagggcggcggcg

SEQ ID NO: 74910 - DNA, 243 bp, Zea mays
ggccatcagagtcggcggccaggccatgtcgaggttctggaagccagggtcggagaagccgagcaccctactcgtcgacgacgaggagggcggagtcgtcttcctgccctcctccagctccgtctcctcctccggctttggttacgcgagtctagagagacagcggcaacggctgccggtgtacaagtaccgcaaagccattctctaactggtggagcggcacgccaccaccattgtcgtcgg

SEQ ID NO: 74911 - DNA, 242 bp, Zea mays
tgccggggtatggcgtcctcaccaacatcatcaacggcggcctcgagtgcggccatggcgccgacgctcgtgttgccagccggatcggcttctacaaacgctactgcgacatgtttggtctacagctacggcgacaacttggactgctacgaccagagccccttcggaaacactatcttaagcaccaccaataatgccacctcatatcacgttgacgcctaagggcatgtacagtggagaga

SEQ ID NO: 74912 - DNA, 239 bp, Zea mays
gatctattctactgagagaaacaggggtacataccttcattgttgtttatcgcagcagccatggcggcggcgtcttgcagcgaagacccgcctcctccttcgcctccctgcgtgttccggcgaggagactggttcccgtcgctggtcggcggtggatcggctcctccagtggcacctgcaggggagggtcggatccggttggggagatcaccggatcagacgccatagatcgcagtctc

SEQ ID NO: 74913 - DNA, 237 bp, Zea mays
aaatggtgcatgatgggcaaaggagggcctgagaacgtcaactgcgtgtaccgcggcgtgaggcagcggacatggggcaagtgggtggcggagatccgcgagcccaaccgtggccggcggctatggctgggctccttccctaccgccgtggaggccgcccatgcatacgacgaggcggcgaaggcgatgtacggccccaaggcacgcgtcaacttctcggagagctctgctgatgcc

SEQ ID NO: 74914 - DNA, 238 bp, Zea mays
ggaggtttgccccaatggcgcgcttctgggtatgatgttgaatcaagtgcctctagtgatgccatcctaaaggccagtgcagctggtgaagcaattgagaaagtttaccagggtcaattggttggtccaaccacatttgaagcaaagttgcagcctcatcttctttggagtcttgatcaggtgaaagagaacatcaacacccagacacatcaacttatagatgctcgatcaaaaccta

SEQ ID NO: 74915 - DNA, 240 bp, Zea mays
cttttgtggaatttgtgatggcagaaagtgctaccgctgccctgaactgcagtggcgtgatactgggatccttgccaataagggtgagcccctcgaagactcccgtgcgtccccgtgcgcctcgccagctgatgcactagaggtgtcctaggtacaggaggtgcggaaggcactgcttatatatcatcatcatatatatataatagagaatagacatatatgaaagaggggaggggaaaa

SEQ ID NO: 74916 - DNA, 259 bp, Zea mays
gagcgccgccggcgggtagcgctactgctagaggagaggaagcggaaagggcggcggcggcgcttgtggtcagtcaaagatccaacctccggactcgcgatggggcggcggatcctcaacgatgctctgcgcacgatggtcaacgcagaccggcgggggaacgcgtcggcgcttctccgacccatctccggcgtcatggtctccttcctcaacatcatgaagtaccgagggtatatcaaaaaatttgaggtcattgatg

SEQ ID NO: 74917 - DNA, 258 bp, Zea mays
cctgctcctaccgcagctctccctcaggtttagtgttcgcaatggcggccttcaacaagcttggtggccttctaaggcacagtgctctggtgagcggtatcactggtggctcttctcctgcagtgttcaatgctgcacggctcatgtctaccaagctatttattggtggtcttgactggggtgttgatgacgtgaaactaagagaagcatttagcagctttggagaggttactgaagcgatggtgatcacagacaggg

SEQ ID NO: 74918 - DNA, 262 bp, Zea mays
tttgtttgcaaggaccccatagctgtgaacgctgacgacttcttcaaggctgcaaaactggaccagcctagggacaccaccaagagcaaggtgggatccaacgttactttgatcaatgtcatgcagctgcctggactcaacacgttgggaatctcgttggctcgcattgactacatgcccttaggacagaatcctccacacacacacccacgtgccacggagatcctcaccgtgcttgaagggacactctacgttggatttg

SEQ ID NO: 74919 - DNA, 260 bp, Zea mays
cgcctctcctcctctcctcccccacccgtccatcgcccctccctccggtctgcgctcccacagcctcacccctgcgcccccgccgattcgcgtcgccctttgttggaaggaacgatggagcagaccttcatcatgatcaagcccgacggcgtccagcggggcctgatcggggacatcatcagtcgcttcgagaagaaagggttctacctcaaggggatgaagttcatgaacgtggagaggtccttcgcgcacagcactac

SEQ ID NO: 74920 - DNA, 260 bp, Zea mays
  unsure (1)..(260): unsure at all n locations
cgcctctcctcctctcctcccccacccgtccatcgcccctccctccggtctgcgctcccacagcctcacccctgcgcccccgccgattcgcgtcgccctttgttggaaggaacgatggagcagaccttcatcatgatcaagnccgacggcgtccagcggggcctgatcggggacatcatcagtcgcttcgagaagaaagggttctacctcaaggggatgaagttcatgaacgtggagaggtccttcgcgcanagcactac

SEQ ID NO: 74921 - DNA, 260 bp, Zea mays
ggcaataatcgaggatgatgcaaagcttcgagcactcaaagaagaacatggagaagaaatctatgcaatggtgacaaaggcgctgcttgaaaccaacgagtacaaatcaaaaggcagctaccctgtgggggagctatggaacttcaaagaaaaccggaaggtgactctgaaggaagctgtccagtttgtcctgagacagtggcgaacaaacaggaggaagcgataagctctcggccacccaatgctcttggctttttttc

SEQ ID NO: 74922 - DNA, 255 bp, Zea mays
ccgccacctacgcaacaccaggcgctccagcagaacagcactcggagctcgcctgcccgacggcccaccatgatcatccccaagaagaaccgcaatgagatctgcaagtacctcttcaaggagggcgtgctgtatgccaagaaggactataacctggcgaacacccacagattgatgtgcccaacctccaggtgatcaagctcatgcagagcttcaagtccaaggagtatgtcagagagaccttctcctggcagt

SEQ ID NO: 74923 - DNA, 257 bp, Zea mays
gacacgttgttgcttctcaagattggccagaagttacaaagtatgctggattggtttgtgctcaggcacaccggcaagagctcattcaggacctttataaaacatggcacgatcctcagagaggcactgtaacaggcggcatgatcagggagctgttaatatccttcaggaaggccactgggcagaagccattgagaataatattctacagggacggtgttagtgaaggccagttctatcaagttctcctttacgag

SEQ ID NO: 74924 - DNA, 255 bp, Zea mays
cacataatcatcttcattcactcactctcttcgatcactgtactgaagataccatggccaagtcgaccgcgatgtttgtagccgccctggccctggtggtggtgatggcgacgacgagcacaggcggtggcagggcggcagcggcgtgcgatcccaagccgctggtggtgtgcgatccggcgttcatggacggagcgaaacccgcggcagcatgctgctccaccctgcgtgcgcaggaggcatgcttgtgcgtgt

SEQ ID NO: 74925 - DNA, 256 bp, Zea mays
catgcccaccgatcctgccggcacgtcggcgaagcgggggcggtataacgtaacggctgtgcagaagctctccgagtcactgacggcggcggcgtgccatgacctgacgtacccctacgccgtgttctactgccacacgaccaacccggcggccacgtacctggtgaagctggcagcccaggatggcgggacgccgacatggaggcgttggtcgtgtgccacctcgacacgtcattgtggagtcccagacacccat

SEQ ID NO: 74926 - DNA, 259 bp, Zea mays
cttgcttgccctgcttcaccaatcttctacaagcacaatcctgttaagaccatcaagacaaatgttattggtaccctgaacatgctgggccttgcaaagagagttggagctaggattttgttgacatcaacatctgaagtttatggtgatccgcttgagcatcctcaaaccgaggcctactggggcaatgttaacccaattggagtcaggagctgttatgatgagggtaagcgtgtagcagagacgctgatgttcgact

SEQ ID NO: 74927 - DNA, 263 bp, Zea mays
cccgtgtaaaatgagcgcagtcgccaagcgtgtatctaagaagaggaagttcgtagcagatggcgttttctatgctgaactcaacaagtttctcgtgaacgagctttctgctgatggctatgccggtgttgaagtccgaaccacaccccaaaagactgacattatcatccgtgctactcatactcaacgtgttctcggaaaagagcggtagacgtatcagagagcttacccaggctgtcagcaagcgttacggcttcaaggat

SEQ ID NO: 74928 - DNA, 256 bp, Zea mays
caagcagaagccggactaggcccatcaccaagacccactgaaccctcgccgtttcgtcgcacccaccaacacgagagatgagctccggcggcgcggacaagcccggcagtggcggcggcgcggtgaagacgccgtcggacttcctcaagtccatcaggggccgccccgtagtcgtaaagctcaactccggcgtcgactacagaggtatattggcttgtctggatggttatatgaacatcgcaatggagcagaccga

SEQ ID NO: 74929 - DNA, 256 bp, Zea mays
gttggtgccaccgcagccgtctactccgctgccatcctggagtacttgactgccgaggttctggagctggctgggaatgctagcaaggatctgaaggtgaagcgtatcacccctcgccatttgcagctagccattcgtggagacgaggagctggacaccctcatcaagggcaccatcgcaggcggaggtgtcatcccgcacattcacaagtccctgatcaacaagtcctccaaggagtgaagactaggggatgtgc

SEQ ID NO: 74930 - DNA, 257 bp, Zea mays
ggatcatgagcgggcctactttgattctgctgactgggctctagggaaggtgttgccaaaccaaaaggaccgctggaggcacttaggcccaagcttcagccaacacgccaacaacagcaacaacgtgcaaggcgccctatttacacttcgtcagaaaacgaggacggagacggggctggtgctgtggatatgaacatcaattgaagtggactagtggagtggaatgcctgctcagattggttgatgagcaagtcgtc

SEQ ID NO: 74931 - DNA, 256 bp, Zea mays
tcgatttcgaggaggtcacggtggatctgttcaagtctcagcacctcacacccgaattcaaaaaaataaacccaatgggacaggtacctgcaattgttgatggaagattcaaactatttgaaagtcatgcgattttgaggtatcttgcatcggttttccctggagttgctgaccactggtatccttctgacttgttcaccagagccaaaattgagtcaatcttggattggcatcactcaaatttgcggcgtggtgc

SEQ ID NO: 74932 - DNA, 253 bp, Zea mays
gggctgtattcgagcttcgtgccgccgatggtgtacgcggtgctggggagctcccgtgacctggcggtgggcccggtgtcgatctcgtcgctgatcatggggtccatgctgcggcaggccgtgagccccaccgcggagccgacgctgttcctgcagctggccttcacctccaccctgttcgcggggctggtgcaggcctccctgggcatcctcaggctcggcttcgtcatcgacttcctgtccaaggcgacgc

SEQ ID NO: 74933 - DNA, 256 bp, Zea mays
ggagcactcatgcacggaaatggagatctggggtctgagttctacgaaacactagctaagatggcaccaaccaaagaagaagaactgaaattaaaaggttataatggcgatatatcaaaacttgatccagcagaacgctttctgaaagatgtacttgatgttccttttgccttcaaaagagtagacgcaatgttgtacagagcaaactttggcgctgaagtgaattatttaaagaaatcttttggaacgctagagg

SEQ ID NO: 74934 - DNA, 252 bp, Zea mays
gcatttatgagcaacttcgaattggctacaaacttgtggcgaaaagggagttgaatgatccagagaatgcacttatcggtgcttttgctggcgccatcactggagctataacaactccccttgatgtcatgaagacaagattgatggttcagggacaagggaaccaatacactggaattgtaagctgtgctcagacaatcctcagagaggaaggccctaaggcattcttgaagggcattgagccgcgagtgc

SEQ ID NO: 74935 - DNA, 252 bp, Zea mays
caaggagaaggtttatccagaaaacaaggtgccttctctagagcacgacaaccaggtgaaaggagagagcttggatttggttaagtacattgacagcaacttcgaaggtccatcgttgctccccgaggatcatgcaaagcagcagttcgctgaggagctgctcggatacactgacgcattcaacaaagcattttactcatgtttagtcgacagggaagatgtgtctgaggaagccgttgctgccttggacaa

SEQ ID NO: 74936 - DNA, 266 bp, Zea mays
aaagctggggttttcgacgagtacctcgagaagagcaaggctaacaaggagctgaacgacaagaagaggcttgccaccagcgctgccaactttgcgcgcgcctacacagtcgagttcggcagctgccagttcccctacaacttcactgggtgccaggacctcgccaagcagaagaaagtccccttcctcagcgacgacctcgagatcgagtgcgaggggaaggagaagttcaagtgcggctccaacgtctctggaagtggtgaagc

SEQ ID NO: 74937 - DNA, 253 bp, Zea mays
cgcaggcggagttttctggcctgttttcttagtggcgaatctggctgcactaattgccagtaggacaatgacggttgctatattccagtgcctaaagcagtctatagcacttggttgttttccccggctcaaaattgtagcatacatctcgaaaatttatggctaagatatacattcccgttgtaaactggtttctattggtttcctgcttgggctttatcattctgttcagatacgtatatatgttggcaat

SEQ ID NO: 74938 - DNA, 257 bp, Zea mays
cgactcttggccaacagaagtgtttgagcttgtcactggagagaaatcgaagacattggaaaggcttgaccctggtgccactgcttcacacacatatgtcctggagaccaaaacacagggcaggttccagggttcaccagctatcattacataccgtgttcccacaaagacagctcttcaggaggcatactcaactcccatcttcccactggatattctcgctgagagacctccagagaagagtttgaatgggctaa

SEQ ID NO: 74939 - DNA, 252 bp, Zea mays
atcgtgaacttctttgttagtttgatgttcttgcgtcttctggagcaacttggtccacagcttctctacacaatattttcgtcagtctgtgtggtagcctcaatatttgtgaggcgccatgtgttggagacgaagggaaagactttacaagagatagaggtttcactcctgcaaccacaataaaggtacatatttgacgtggctggaaccttgggcaggctgtttgctgaacagaaacaagtggccctgcag

SEQ ID NO: 74940 - DNA, 267 bp, Zea mays
atcgaggctgggaaaggagactttgagacgctagaaaagaaggttctagagtggggtgagcccactgttgcatccggcaaacaggaactggcggagattctgttccagtctgccctatagatgatggtgccatgtccactaggtccaggaataagcaagggtgcgccctcctccgaacatgccatcgtcctcctcaccacggggatgttatggttccgtgcgatggactacctacaatacagcatggaactagataattaggatgta

SEQ ID NO: 74941 - DNA, 256 bp, Zea mays
  unsure (1)..(256): unsure at all n locations
gtccgctggttcatttttgaactaaaccgtgacaaataaaaaagaacgcaggagtatctggcaggcctgattgcctgaatacgaagccccatggcggatcagacaggcacttctcttgcagtcctgtttacccttaccacgatgattatctggaggcaaatcaagggaaaacgacaggtgaccaacagngggcacgtgtaacagcagactgtagttgtagtggtttagttctcgaagctgcatggactatatttaa

SEQ ID NO: 74942 - DNA, 249 bp, Zea mays
cggcgagctcggcgccatcgcgccggccgtacgcctgcacgagaagcacacaggccaagaaggacccagagaacgagcacgggcaccgggtcaaggaggaggtggccgccgtcgccgccgtgggctccgccggcttcgctttccacgagcaccacgagaagaaggacgccaagaagcacgcccacaactgatccgtcgcggttgctgttccatctgttcttccagcctcgtcttcgtcactgtgtgccg

SEQ ID NO: 74943 - DNA, 250 bp, Zea mays
cttctctgatttactagggaaatcatcaccactaacacccttggattgatgatatgttgtcgtgaggcgataaatatgatgaggaaccaacctcgaggtggtcacatattcaaccttgatggtgctggttctgatggaaggccaactccaaggctgaattgcagatgaatgaagtgaataatgtgatggtgcacaatctatcgcctggcatggtcacaacagatcttcttatgtctgtgcaactacaaaa

SEQ ID NO: 74944 - DNA, 253 bp, Zea mays
ctttccccgtgcttctccgccgtcgaggccgcgtcccagtgcgaacagaccacgactcagatggccagccgctgggtccggcccgaggtgtacccgctgttcgcggcaacgggcgtggccgtcggcatctgcggatttcagctcttccggaacatcaccggcaacccggaagtcagggtaaacaaggcagggagggcagctggtgtgcttgagaaccatgaggaggggagacgttacccatgcatggcctaag

SEQ ID NO: 74945 - DNA, 256 bp, Zea mays
tgttagtccaaatgtcctgggaactttctgtatagacactggccttccttgtgacttcaatcacagcacatgcaatgggaagaatgaattatgctatggacgagggccaggatatcctgatgaatttgaaagtacccatatcattggcaataggcaatttcaaaaggctgtagatctttttagttcagcttctgaagaaatacaaggcaaaattgactacaggcatacttacctagattttcaaaacttgaagtga

SEQ ID NO: 74946 - DNA, 251 bp, Zea mays
gtttggtggccagcaagttaagcctgatcacagagatgttccttgtgctgttttctccattccaccactatctgtagtgggcctcagcgaagaacaggccttggaggaagctaatggtgatattcttgttttcatctcatcattcaacccaatgaagaacagcatatccaagcgccaggagaagactatcatgaaactggtagttgatgctgaaactgacaaagtacttggtgcatcatgtgtggaccaga

SEQ ID NO: 74947 - DNA, 255 bp, Zea mays
atcgaagggagccacaatagttgatatggctgtaatcgtcacgccagccaatgattatgagctaccagcttctgttttagctgctcttgagcctaaagacacaaaaccttctgcccttcaaaaggccgaggacattgttgggaccatgctggcaaagggatttatcctcggtagagatgcactggacaaagcaaaagctttggacgagaagcaccagctcacgtcaactgccacagctaagtgtcttcctttgac

SEQ ID NO: 74948 - DNA, 256 bp, Zea mays
cggctcgaggaagaaatctggagagttagttaccagtgttgggctgagtgctgagaatgagataatacacacccttgctttcttagctggttccatggtttggtcgcagattacagacttgccgttctctctctattcaacttttgttatagaggctcgacatggttttaacaagcaaactatatggctcttcattagggatatgatcaaaggaattttactatccatgatattggggccaaatcgtggctgctat

SEQ ID NO: 74949 - DNA, 233 bp, Zea mays
cgtcccgtttcccgagatcaacaaggcgttcgaccggatgccctcccccttggccatcaggtcgaacgccttgttgatctcggcgaacgggacgctgtgcgtgatgaacttctccacctccagctcctttttcatgtacagctccaccaaactttggcgatcagtgcgtgggctgtagttgccacagaaggtccccttcagggtcctttcgttcaggaagttcatcgggtggg

SEQ ID NO: 74950 - DNA, 94 bp, Zea mays
gcggatcttgatggcggcgtcggatgttgagtaccgctgcttcgtcggcggcctcgcctgggccagggacgaccactccctccacacaacatat

SEQ ID NO: 74951 - DNA, 253 bp, Zea mays
agatggttgttgctaacacttgctgagtcaggagtgaatcttttagatgaggtcatagagagcatcattgataagacttttgaggaggcagatacaaagcatgatgggaaaattgacaaagaagaatggcgcaatttagtagtgaggcatccctctttattgaagaagatgacactacaatatctcaaggacatcagcactagatttccgagctttgtcttgcattctcaggtcgatgatacctgaatttctg

SEQ ID NO: 74952 - DNA, 257 bp, Zea mays
gtgttggaatggcatcgggctcaatttgtatcacccaagaggtttgtgatgttggaagatgacatgcaacagcagtatataaggtttcatcttatgccaaggatcacaatgtaccggttattgctgatggtggaatttcaaactctgggcatattgtgaaaactctgtcgctgggggcatccactgttatgatgggcagctttttagctggtactcatgaagctcctggtacttatacgtataaggacggcggccga

SEQ ID NO: 74953 - DNA, 251 bp, Zea mays
gccgcctcaccgcctctctcactctgagaccgcagatccgttgtccggtgagtggaagccgcacgaacccatggcctccggcgagcttgcctgcacctacgccgctctcatcctcagcgacgatggcatcgccatcaccgccgagaagatcgccacgatcgtgaaggcagccaacatcaaggtcgagtcctactggccggcgctcttcgccaagctcctggagaagcgcaacgtcgaggacctcatcctct

SEQ ID NO: 74954 - DNA, 252 bp, Zea mays
cagcagaggtggaggtccatcgggagaatgtggagacagcgacgacgagcccaacggtgatttcgccaaattcggcccgtggggcggcgacggaggacagccgcaggacatcggaacactaccctgccgtctagacaggatcaagatcagcagtgggcttatcatcgactcgatcgagttctcgtacgctggccctgacagccagtaccgcaccgcaggcccttggggtggtcatggaggagacaacagctc

SEQ ID NO: 74955 - DNA, 253 bp, Zea mays
aagccaccaaaggtgtctttccgcaccaaggttttccacccgaacatcaacagcaacggcagcatttgccttgacattcttaaggaacagtggagtcctgctttaactatctcaaaggttctcctgtcaatctgctcactgctcacggacccaaaccctgatgatcctcttgtccctgagattgctcacatgtacaagaccgacagggccaagtatgagtccaccgcacgctcctggacacagaagtatgcca

SEQ ID NO: 74956 - DNA, 247 bp, Zea mays
cttcgacacggcacctaagaagctgttggcatctgattcacggctgaggcctgatagatatgccctcgagaagggtgacatgtctaagtccggggcagagaagagcaggctcgaggaacaacagagagctgagaaacgaactcgagaggccaagggcgagcaatttactcctagatggttcaactcgacagatgtggtctcccctacaccgtggggtgacctggaaatttatgaatacaacggcaaa

SEQ ID NO: 74957 - DNA, 248 bp, Zea mays
aacgctcgctcgacactgtcactagctagttgctctactagagggcgggtatagagctgcctgcaatccgccgctgagaagggaggatcggaagcgacgatgaggtcgtttgctcctgtctttctgtcggcggtcgtggcctggctggagctggcgggcaccgcgcagggcggcaacttctaccaggacacagagatgacctggggcgatggccgcggcaaggtagtggacggcgggcgcgggctgga

SEQ ID NO: 74958 - DNA, 249 bp, Zea mays
acctccaactacccgataccatcgacgagcatcttcctgcatctgcaatggctgccgctaccgtgtccgtcccccgcatcaagctgggctcccaggggctagatgtctccgcacagggcctcggctgcatgggcatgtccgccttctacggtccgcccaaacccgagcctgacatgatcaagctcatccaccacgccgtcgccgccggggtcaccctccttgacacctccgacatgtacggcccgcaca

SEQ ID NO: 74959 - DNA, 252 bp, Zea mays
cgatggggctgatgggtatgtctccgtggaggtgtctcctaggttggcaaatgacactcaaggaactgttgaggcggcaaagtggttacacaaagtggtcaaccgccccaatgtctacataaagatccctgctaccgccgaatgtgttccttccatccgggaagttatcgctaatggcattagcgtcaacgtcacgcttattttctctattgcgacatacgaggctgtgattgatgcttaccttgatgggct

SEQ ID NO: 74960 - DNA, 255 bp, Zea mays
ctcgtttttcatccgccttcgcctccaaccgcgtgcgctccacgcctcctccaggaaagcgagagcttctgcataagaacaacaaatcaaaagcgtgatcagctcggtgccaacaaaacctcaacaaccaagtttcatgtctgatctcgacgtccagcttccatctgcctttgatccgtttgctgaggcaaatgctgaggactctggtgctggtcctggaacgaaggattatgtgcatgtgcgcatccagcagcg

SEQ ID NO: 74961 - DNA, 157 bp, Zea mays
cgatgcctccagtcactagctcttgtgaagggtaagcaagtcctgcggaaagagccgatgagcagggacattgccgatgatgacagcttctgcgtgaacgacaagttcaccagcaagctcttcaaggtgaagatcggcaccgtggtggcgcagaagg

SEQ ID NO: 74962 - DNA, 154 bp, Zea mays
tggctgagctggcacctacccatccgataaggcttgggcttgctcttaacttctcagtgttctattatgagattctgaactccccagacaaagcttgcaaccttgcaaagcaggcgtttgatgaagctatctcccagttagacacccttgggga

SEQ ID NO: 74963 - DNA, 265 bp, Zea mays
gcaagctcgatctactactactactagctggtacacatactagccagcctgccagccagcttgccatggcgcccaccgtgatgatggcctcgtcggcaaccgccgtcgccccgttccagggtctcaagtccgccgccagcctccccgtcgcccgccgcagcaccaggagcctcggcaacgtcaccaacggcggaaggatccggtgcatgcaggtgtggccggcctacggcaacaagaagttcgagacgctgtcgtacctgccgcc

SEQ ID NO: 74964 - DNA, 267 bp, Zea mays
ccgcaactaccgccgccactcccacgctcgcagccatgacgcccaagctcgacccgtcgcaggtgtcctaggtgttcgtccgtgtgaccggcggcgaggtcggcgcacgtcttcgctggcccccaagatcggcccgctcggtctttcccccaagaagatctgagaggacatcgccaaggagacggccaaggactggaagggcctccgcgtcaccgtcaagctcaccgtccagaaccggcaggccaaggtctccgtcgtcccctccgc

SEQ ID NO: 74965 - DNA, 264 bp, Zea mays
ttccatggtcaggaaagagctgatggaacacaatgatccacaacggtgctcgcgagagcttgtccacgaagcgcttaggcgcgactgctgtgataacctaaccgtagttgttgtgtgcttctcagcggacccaccccctcaaatcgagatcccaagattcctagtacgaagaagcatctcaatggaagggcttcataggctgaggggtgctcttgacagtaatatctgaagcttaaaagtgtcccttcggctgtaacttctgtc

SEQ ID NO: 74966 - DNA, 262 bp, Zea mays
gagcaggagacactcgtgaagctgtctaatcagtataacatcatgctcaaatgtttttaatattgaatataaattatatatatgtatatatgttttttctaaaataaaaaaatataatcgtgtcgggtcaggccagcactacgggccgaggctacggtccaagcatgtcacgacattcttggctcttgcgaacattaggtcgtatttgagaccacattggcacaatggactccatggtgtttgaggttgctgaattggatgg

SEQ ID NO: 74967 - DNA, 260 bp, Zea mays
cagtcaccgatatccgtggggactggctaattgatattactcagatcatagtaatgtggcgcaatatcaattagccacattactatgatctgagcaatttcccgtcatgtgaggccaagcgtgttcttgagaggctgtataacaagcgagagagggaaagagctgcaaatagaggctgaggttgatacttccacaaacctggtgctctgtaattccaccgcagtctatccagagcccgtatacgagctttggttatcaca

SEQ ID NO: 74968 - DNA, 263 bp, Zea mays
cacctgcgccgcacgcttcgttcgtgtggagcggagaagagaggacatggcggcgagcgtcggcgtgctcctggggatgggcaatcccctcctcgacatctccgccgtcgtcgatgacgccttcctgacaaagtatgacatcaagctgaacaatgctattctcgctgactagaagcacttgcctatgtatgacgagttggctagcaagagcaatgttgaatatattcccaggaggaccacccagaactctatcagggttgccc

SEQ ID NO: 74969 - DNA, 265 bp, Zea mays
cggctcgaggtcgccgcccagttcgcatacatcgtcaccagcagccgctgccgcctcacctggacgggcttctcgtggcaggccttctccggcctgcccagcttcttcaggctctccctcgcatccgccgtcatgctctgcctcgagacctggtacttccagatcctcgtgctcatcgcaggcctcctcaaggaccccgagcttgccttggcctcactctctgtctgcatgacaatttcagggtgggtgttcatgatctccgttg

SEQ ID NO: 74970 - DNA, 264 bp, Zea mays
gcacagcggggaggttaaggtcatctgcgctaccatagccttcggcatggggatcgacaaacctgacgtgcgttttgttatccacaacacattgtccaagtcaatagaaagctactaccaggagtccgggagggcagggcgagatgagcttccggcaattactatcgtcttgtaccagaagaaagacttcagccgtatcgtgtgcatgttgaggaacggtgagaacttcaggagcgagagcttcaggggttgcgatggagcaag

SEQ ID NO: 74971 - DNA, 263 bp, Zea mays
ccttgaggagcttgccgtactccttctggatgttcaggcagatggtcactgcctggtggaggaactccccaatctgctcgaaatccttctccagtagacccctcgaggtcattgctggcgcgccaatgcggacaccacccggagacaatgcactgctgtcaccgaagacagcattcttgttcaatgtgatgtggcaaagatcacatagcttttcgaccttgtttccagtcaagccaagggggcggagatcccagagaacaagg

SEQ ID NO: 74972 - DNA, 263 bp, Zea mays
gtgcaaggcccaccctgcgtgctccggcgtggcggagacggtgatcatcacggacatgaactactacccggtggccccctaccacttcgacctgagcggcactgccttcggggccatggcaaaagacgagcacaacgacgagctaaggcacgcaggaatcatcgacatccagttcaagagggttccctgccagtaccctggtctgacggtgaccttccacatcgagcgtggctccaaccccatatgactggcggtcctggtgg

SEQ ID NO: 74973 - DNA, 282 bp, Zea mays
ggtggctcaggtgctcctgaccctgccctactcgttctcgcaactggggatgctgagcggcatactgttccagctcctgtacgggctgatgggcagctggacggcgtacctcatcagcgttctctacgtggagtaccgggccaggaaggagagggagaaggcggacttcaggaaccatgtcatccagtggttcgaggtgctggacgacctgctcgggaggcactggaggaacgtcggcctggccttcaactgcacgttcctgctcttcggctcggtcatcca

SEQ ID NO: 74974 - DNA, 284 bp, Zea mays
ctctctcccctccctcctcagtcgtcacacacactcagccagtccgctgcctccgcgctcccccaaaacccaccgcctcgccggaatcctagccttcgccaaccagtcgccatgagagagatcctccacatccagggcgggcagtgcggtaaccagatcggggccaagttctgggaggtgatatgcgacgagcacggcatcgaccacaccggcaagtacgccggcgactccgacctccagctcgagcgcatcaacgtctactacaacgaggccagcgcggccgc

SEQ ID NO: 74975 - DNA, 285 bp, Zea mays
ctttcttgtaacccaagacgaactcggtgaactctttctcctcgcgcagaccggagcacaatcaaggattccagtccagtcctgccaatggagtgcgttttgggcttggttggccgcgacttcgcggtggtggcggccgacacctccgccgtgcagagtatcctcgtccacaagactgatgaggacaaagtaatggtcctcgactcgcacaagctgttgggcgcttcaggggagcctggtgaccgggtgcagtttacggagttcatacagaagaacctccacctg

SEQ ID NO: 74976 - DNA, 279 bp, Zea mays
gaagggcgtggcgccgatcccgaggccgacgaggagcagcacgtcgtagttcctgaagtccttcgccggggcgccgtaaggcccgtcgaccagcaacctcggcgggctcttggtcttgtggtccaccgcgcctgctaggtcccctcaagcagcccgtctgggcacgcacggcgtgaagtagttctcgacgaagatgcgcttgagctcctgtgtccagtcgcccctggtctggacgtgtacgctgatcaatcgtctccgggagctgaggtgatggagaaa

SEQ ID NO: 74977 - DNA, 283 bp, Zea mays
ggtgtgtctagtctctagtctagctaggcactactctagctcccaagtggccaagtatactcgccagagtacgtagagtgtagttgagcgtcgtccaaggatggcgtggacctcccgccgcatggtcgcgtccgcgctcgtcttcctgctgatgctgctcgccgcctcagagatggggacgacgagggtggcggaggcgaggcactgcacgtcgcagagccaccggttcgtcggcgcctgcatgagcaagagcaactgcgagaacgtctgcaggacggagggc

SEQ ID NO: 74978 - DNA, 275 bp, Zea mays
gcaggctgcttgtttgagcagatcatcagaagtggcatgaagccagatgttgttacttttaatacgttaatcagtattaatgcgaaagctggtaggctaaaggaagctggcaaatatttgaggaggatgatcagagaaggcattgcaccaaaccatgccacagaaacaatattgattttccttgataaggagattgaaaagacaaggtagcagcacaaattagctggcaaaaaaaaggaacgaaaacagtgtgatatctgttatttgtattaacc

SEQ ID NO: 74979 - DNA, 278 bp, Zea mays
ctcgactcgtggggaagtttcgctctcgcccgcgtcgacttcctagggttcgaggaacgtccgtccgtccgtccggggaaggagcaggagggaggcggagatgatcgaggtggtgctcaacgaccgcctggggaagaaggtgcgggtcaagtgcaacgaggacgacaccatcggcgacccgaagaagctggtggcggcgcagagggggacgcgccccgagaagatccgcatccagaagtggtacaacatctacaaggcacacatcacctcagaggact

SEQ ID NO: 74980 - DNA, 279 bp, Zea mays
cggtcatcttcgccgtttaaggaagcaaatcgtgcaccggacagtgtccggtgtgcaccggactgtccggtgcccccgacgacagaaggcaaggatggccttccggatttgccctcaacggctcctagctgccttggggctataacaggagcccctaggcgcataccggagatacacaagcaacctttgagcattcttgatcatccacactaagtctctgcgcattcgtttgtgtttctcagtgattcgagctctgttctaagtgagaactctgagata

SEQ ID NO: 74981 - DNA, 182 bp, Zea mays
ttagatctgaataagatggtggtgatcttagtggtggtcttagtttatcatgtatcgctagcagtttaatttagcggtttaggtgtggatctgtgaaccccatggcgcctctgtttgattcgtgtttcacctggtatgttctgagattcatgataatgctatgagaactgaaattcccgttt

SEQ ID NO: 74982 - DNA, 232 bp, Zea mays
tttgcatctgagttcctgatcgttgtattccagtttcttctgtgagttttgtgggatcgcgaggaagaactagaaggatgtcgtgctgcggaggcaactgcgggtgcggcgccggctgcaagtgcggcagcggctgcggagggtgcaagatgtacccggacatggctgagcaggtgaccaccactacccagactctcatcatgggtgttgcaccgtccaagggcgggttcga

SEQ ID NO: 74983 - DNA, 232 bp, Zea mays
tttgcatctgagttcctgattgttgtattccagtttcttctgtgagttttgtgggatcgcgaggaagaactagaaggatgtcgtgctgcggaggcaactgcgggtgcggcgccggctgcaagtgcggcagcggctgcggagggtgcaagatgtacccggacatggctgagcaggtgaccaccactacccagactctcatcatgggtgttgcaccgtccaagggcgggttcga

SEQ ID NO: 74984 - DNA, 257 bp, Zea mays
agccagagagcgggacgcagcgagcgttccgccagagatcgagaccgtagctagggtttgaggcgccgggctgcggtggacgagatgtcgacgccggcgaggaagcggctgatgcgggacttcaggcgcctgcagcaggacccgcccgccgggatcagcggcgcgccgcacgacaacaacatcatgctctggaacgccgtcatactcgggccggatgatacgccgtgggacggtggcacgttcaagcttaccttgca

SEQ ID NO: 74985 - DNA, 252 bp, Zea mays
gaacattgtgacaccatcgcaaaagctattggctagccaactgtcttgtgatgtatctcaagggaaaagccttcttgtgactggtccaaatggtagcggaaagagttccatctttagggtgcttcgaggcttgtggcccattgcttctggtagtcttagcaagccatctgaaggaatttttaatgttcctcaacgtccatatacttgtcttggaaccttgagggatcagatcatataccctctctctcacga

SEQ ID NO: 74986 - DNA, 259 bp, Zea mays
atcgcgagcgggccgcccttttttttatgctggttttggtgcgcttatgttaacgacctgcattagctatctttcacactctcagatatgggcattgcaagatggaagtacagtggtcgttggaggaaagacaaatcgagccaaacttgaattttctgaagagatgaaccggctacttgataaagtaccagagctgatcagcgccgatgagaatctattagataccaaatcgacagccacatgaaacatttttttgtgt

SEQ ID NO: 74987 - DNA, 264 bp, Zea mays
gttatttatggcctgaatcttctttttacgcaacagacgacgaggatcctctgaaccacgaagctgcagttgtccttcgtgacaatccaaagatgtttgaggcaaatgtgagaagagccatggctggaggctacgtcggccaacactatttccaaagatgtgcttgacttgatgtggtggtggcttgaaaacgatcaacagaacccctccccctgtatcagcaccagcgcgcccagctttgtgtgcggaaagtacttctggaag

SEQ ID NO: 74988 - DNA, 253 bp, Zea mays
agcgacaagatccaagaactcgctcgcgcgcacggacagggccggaacccagggatcgagactgaacagcagtccgagacgccatgaacgtggaggaggaggtcgggaggctcaaggaggagatccataggctcggccagcagcagcccgatggctcttacaaggtcaagtttggcgttctcttcaacgacgatcggtgtgcaaatatctttgaagcactagttggcaccttgagggccgccaagaagaggaa

SEQ ID NO: 74989 - DNA, 257 bp, Zea mays
attgacatctgatcgcagaaaggaattatcaaagacagtagctaaattagctgaagatggcaaggttgctataaggaacataagcagagatgcaatcaaagcttatgataaactagagaaggaaaagaagctttctgaggacaatgtgaaagatttatcagctgatctacaaaaagtcacagaagcgtacatgaaaaagatcgaatccatccagaagcagaaggaacaggaactgatgaaaatttagacctcaagct

SEQ ID NO: 74990 - DNA, 257 bp, Zea mays
ggcatgtatgcattggctctagcatacagagggactgcaaataacaaagctatccaccagcttctgcattttgcggtgtcggacgtgagcgatgacgtgcggaggactgcagtgttggctctcggcttcgttctctacaacgagcctgaacagacacccagaatcgtgtccctactgtcggaatcatacaatccacatgttcgttacggtgcagctctagctgtcgggatctcctgcgccggaacaggattaagtga

SEQ ID NO: 74991 - DNA, 255 bp, Zea mays
agactgcactgctccaccagtgccgccaggagaagtgatcctttgcagcaactgctacaaaccagggcattttcgtgaggaatgcaccaatgagaaggcctgcaataattgccggcagagcggccaccttgcccgtaactgcaccaatgatcctgtttgcaacctgtgcaatgttgctggccatctggcccgtcagtgccccaagtctgatacattgggtgagaggggtgggcctcctcccttccggggtgttgg

SEQ ID NO: 74992 - DNA, 258 bp, Zea mays
cgaagattggcctgcagctgcacaggagggagaaccatccccttgggattctgaagaacacaatttatgattactttgacaagaacttcactggacagtttgacaagtttgatgacctttgcccccttgtttctgtcaagcagaattttgatgatgtcttggtcccttctgatcatgtaagccggagttacaatgacacatattatgttgatgatcaaacagtcttaaggtgtcataccagtgctcatcaagctgagc

SEQ ID NO: 74993 - DNA, 255 bp, Zea mays
tcgatcttgcatggacattgcttcggatcttccctcgcgaacttctccaccgtattccagcaaagaccttggaccagtactatagcagagatgcttcccactgaatcactgatcgttgatcagtgttccaatattttggcaagtgcagctttgaataaattgaacagattggcctcgtggccattttcctgtatttatctgtagtcaggtccaattcttttctgttggtgagcgcaagttattcatagatgactc

SEQ ID NO: 74994 - DNA, 260 bp, Zea mays
ggcaatgtcaaagctatattctgtgatgaagacgatgttgcaacgtatacaatgaagtctgttgatgatcctcgcgcattgaacaagacactatacataagaccaccagaaaacgtcttgactcaaaacgatgttatctcgaagtgggaaaagctttccggaaacgttctggagaaaatccacattcctgcagatgaattcttggcttcaatgaaaggtactgacctggccaatcaagccggagtgggacactattacca

SEQ ID NO: 74995 - DNA, 248 bp, Zea mays
gattgactatgttgctcatgatgcgctgccttatgctgatactagcggaacagcaaatgatgtctatgaatttgttaaaaagattggaaaattcaaggaaacaaaaaggacagacggggtttctacttcagatctcataatgaggatcttgaaggactataaccagtatgtcatgaggaatttagcacggggctactcgaggaaagatcttggtgtgagctatgtcaagagaaacaattgcaagttaa

SEQ ID NO: 74996 - DNA, 253 bp, Zea mays
gaaaaagagaagaaggagaaggagctgaggagccaaatcatcgttgatgctgaagagtttaagaaagcttttgttgagaagagaaagctcaatgctgagacaagcaagggccaaaaccgtgacagggagaagcttttcctagcaaaccaggaaaagttccatgctggtgcagataagcaatactggaaggcgatatctgaacttatcccacatgagattgctaacatcgagaagagaggggcaaggaaagaca

SEQ ID NO: 74997 - DNA, 253 bp, Zea mays
cgcgacgaaggtaagatgttcctgcggaggatcctgaccggcgggggcggcctggcggccctgagggcggcgcgcgccgtgaaggagacgacggggatcgtgggccttgaggtggtgcctaacgcgcgagaggttctggtagggctctacgagcgcacgctcaaagagatcaaggccgtcctcgaagacgagggctaccgcaaggccgttgaatccttcaccggtcaccgcctccagatctgccaggaggagg

SEQ ID NO: 74998 - DNA, 257 bp, Zea mays
cagacttctgctgcagcgcctccgccgccgccgccgcatctaacgcagttccctccgccgcagcccgaggcaagatggttctccagaacgacattgatctgctcaacccgccggcagaactcgagaagctcaagcacaagaaaaagagactcgtccagtcgcccaactccttcttcatggatgttaagtgccaggggtgcttcagcataaccactgttttcagccactcccagactgttgttgtgtgccctggctgc

SEQ ID NO: 74999 - DNA, 257 bp, Zea mays
caacactgcaaactctgcacattacgtctgtggcattcaatagcctattgttgggagaaatcttcatacctgactgggatatgttccatagcaagcatgaatcagcggaattccacggagcagctagagccctgagtggaggtggtgtttatgtcagtgacaaacctggggtgcatgattttagtgttctaaaaaagcttgttctaccagatggttcgattctaagagcaaggtatgctggtcgtcctacacgcgat

SEQ ID NO: 75000 - DNA, 247 bp, Zea mays
caaaaaaaagaatacctcgcacgttctcgtcagccccgcaagatttggtatgcgttccaccaatgacgcaaccacgatcagttcttgccggctctgcttgatcgtttccgcagcatgcaatcttgcttctagcgctaggtcgaaaacttggtcatcttcctccatctctgcaaccgcaacagacccatcaacgagtaaagtgtcatcaaaacgccacaacaatatagacacaaacaaatttgcatgg

SEQ ID NO: 75001 - DNA, 244 bp, Zea mays
aagatatgatatagttgttgatgcaactgacaaccttcctactaggtatatgatcagcgattgctgtgttttgctgaacaagccacttgtatctggtgcggcattaggcttagaagggcagttgactgtttatcatcataatggaagcccatgctatcggtgcctctttccaactccaccacctgtggcagcctgccagagatgctcagacagtggtgtccttggggttgttccgggagtgatt

SEQ ID NO: 75002 - DNA, 249 bp, Zea mays
acaagctgtgggcggcgctgcgtgactcgacggagctgttccccaagatcttccccgagcagtacaagagcatcgagaccgtcgagggcgacggcaagtcggccggcaccgtccgcctcctcaagtacaccgaggcggtgccgatgctgacgttcgccaaggagaagcttgagacggcggacgacgagaacaatgtggtgtcgtacagcgtggtggacggcgagctggcggacttctacaagaacttca

SEQ ID NO: 75003 - DNA, 248 bp, Zea mays
gggatcgccgtcttcctgatgccatctgggatgcttgggacgctgctgtccttggccgacgtggcgcctttgttctccaacaccggctggggccaggacgccaacttggcgttccttgggaagcacatgggggcgtcgttcgagaggcgtcgttccgcgaacacaattataaggagggaggacgtgcggtcgggcgacttcttggcgctctccaagatccggggccggtggggcgggttccagacgct

SEQ ID NO: 75004 - DNA, 244 bp, Zea mays
gcagtgaacaagtcgtcggccgggacgaagaagtcccggaagccgtacgtggtgagcaggccgcgggagacgtggaccgccgacgagcacggccgcttcctccacgcgctgctgctgttcggccgcgactggaagatggtccatgcgttcgtcgccaccaagacgggcacgcagatacgcagccacgcccagaagcactttctcagagcggacaagaagctgggcctcgccgtgccgccgccgg

SEQ ID NO: 75005 - DNA, 243 bp, Zea mays
acgagcgacgattccgcgagctcgcaaagggcgccggcttctccgggttcaaggccacctacatctacgccaacgcctgggccatcgagttcatcaagtgaaccaccgtcgccgcgatgagatggcatggctgccacatgctttgcttgcttggtcctcgtatcgtacgtcgccgtcgtcgtcttcttctggttattgcgctgctacctcgctgctctcgcgtatgcatgtacttttgcttaa

SEQ ID NO: 75006 - DNA, 243 bp, Zea mays
tgaagcgcaaggcgtgcgccgaggtcggcatctgctccatcgacgtcgacctcccggaggacatctccgagaccgcgctcgtcgccgaggttcatcgcctcaacgctgaccccgccgtgcacgggatccttgtccagcttccacttcctaagcatatcaacgaagagaagatactgagcgagatttccatcgagaaagatgtggatggcttccatcctctcaacattggcaagcttgcaatga

SEQ ID NO: 75007 - DNA, 241 bp, Zea mays
cagctccgccgcttgcccgcttttgctctctccctcccggctctcggcttcttctacacgctaccgtaaacgcccccctcccggatcccgctagttcgccccagcatggccgcctcgtcgaccgccacctccgtccacgacttcatcgtcaaggatgcgagcggcaaagacgttgacctcagcacctacaaggggaaggttcttctcattgttaacgtcgcatcccagtgtggcttaacca

SEQ ID NO: 75008 - DNA, 245 bp, Zea mays
tatggacaagagaagagagagagatagccatcgtcacccatagcggtttattaagccataccttgcgcatgtacagcaaagagtgccatccaacagtaacacaagaagtgagcaagtactttgcaaactgcgagctccggtctttggtactggttgacaggagtatgcttggttcagatggccccagttacaactactaccctggcaaaatgaaaatcccagccggacttgatctgcccagcgat

SEQ ID NO: 75009 - DNA, 248 bp, Zea mays
cctacgcccagggtccgtaatcacgccgatcatcccaccgaccatcaccctaccacctctgctgcctctccgcgaggccgacgcgctcccgttctccaccgggcgcttcgccgacatcctcgccatgttcgcgccgacgacatccgacgccatgggcgaagagatacggtcgacgctcgacacctgcgagaacacgcgcccgctccctggcgagaaggccgcctgcgccacctccctcgagtctctcg

SEQ ID NO: 75010 - DNA, 237 bp, Zea mays
ttcatccttcagtaggtcttcattatttgttcccacatcaatggtaataggtaagcaagcggatggccgtacacctccaagagcagtatacagtgcaagcttccccacaggaattcccatgccctggcaaccaagatctcccaggcctaaaatgcgctcaccatcagtgaccataataacctgaatactcttctctgtccagttcctcagtacctccaagatccttcccttctcctt

SEQ ID NO: 75011 - DNA, 243 bp, Zea mays
gcagtgaacaagtcgtcggccgggacgaagaagtcccggaagccgtacgtggtgagcaggccgcgggagacgtggaccgccgacgagcacggccgcttcctccacgcgctgctgctgttcggccgcgactggaagatggtccatgcgttcgtcgccaccaagacgggcacgcagatacgcagccacgcccagaagcactttctcagagcggacaagaagctgggcctcgccgtgccgccgccg

SEQ ID NO: 75012 - DNA, 245 bp, Zea mays
atcgacgaacaactgagaagagctgcgcctgcgcctgcgcctgcgggaaagggagaacatggtggggaagaagaggggtgttatctccccgctggaccatctcgctgggctgctggaggtgcgcgtggtgaggggagtggacctcgccatccgcgacctccgatccagcgacccctacgtcgtccttcgcatcggcaaggcgcagaaagtgaagacgcgagtggtcaagaagagcatcaatccgg

SEQ ID NO: 75013 - DNA, 241 bp, Zea mays
ctgcatgtttatcaaaaggtggtgaggtcatcggagccggccggccggcggcccctcactccttcagcttatggatggtctccatgtccacggcctcgccgagggtgcctttctcgacatggtcccaccagcccatgaggaagttgtccaccaccagcctgaaccagggggagatcttcaccccgtcctcgccagcgtcagccttccggatgagctccttgagctcgtcgcggttcacgta

SEQ ID NO: 75014 - DNA, 260 bp, Zea mays
cccaagcttccctttcgttcctcctcgccccagcgacgcggcctcccgtagaccgagcaaggcaacccaccactgagaggcacgcagaggagcaggaagccggagaccaagatgtcgtcggtgttcagcggcgatgagacggcccccttcttcggtttcctcggcgccgccgccgccctcgtatcaactacgaagggcgcaggtacgggaccgcgaagagcggcgtcggcgtggcgtcgatgggtgtgatgcggccggag

SEQ ID NO: 75015 - DNA, 261 bp, Zea mays
ggaggaatatgttgttcctgttgcatgggtgaccttcatattctttggatgtaggttgacgtcttctcgtttggcattgtgatgtgggagctacttacaggtgaagagccttacgccgagctgcactatggggccattataggtggaatcgtgaataacacgctgcgacctccggtgcccgagtcctgtgatccccagtggaggtcactgatggagcggtgctggtcagccgaaccgtcagagaggccgagcttcaccgag

SEQ ID NO: 75016 - DNA, 271 bp, Zea mays
gaaaatccgagatccataacaatatcagctgtccttgtgtaaaaatccccagttagggtgtcgatctcaacttctgcaaatgcagctccatacgtgaaataattgaatggagttcccttgccaatcgtccagtcaaacccaatattaggtgtagcataaaacccatgagcagagagatccacacgttccatgtagcatgcttgagccaactctgcaaacgagttgtgggttactttgctagcaatgggttccattcgaaccttgatttgtt

SEQ ID NO: 75017 - DNA, 268 bp, Zea mays
atcgcctactggcgcaactccctcgtcgtccgcgtgctcaccatgctccgggtcgcgcccaagggcgtctccgaggtgcacgagatgctgtacgagaccgcgcacacctcacccgcggcggcgagaccggcatcttcacgcccatgcacatggtgctcctccgcaagcccgccgccgccgcctccaccgaggaggccaactagtgtaagactacacaccgccaccaatcagttactactcgcccaccgcaagggggagaaaatgggga

SEQ ID NO: 75018 - DNA, 266 bp, Zea mays
gaacaagagtattgatcatcctcctccagtgacccagcctgtgatgtcttctcgtggtcattctcaagctggctgaagttccccttctccttgatcagctggatgtggtggtgcttgcagtacagcttcccctcgtgcgcaatgtagttagaagggctgatggtgcaccctccatggcagcacttgaagcagctcttgtggtacatagtgttattaacagtgacctggatgcttaaccggtgagttgcaatcagcatactgatatt

SEQ ID NO: 75019 - DNA, 270 bp, Zea mays
cccagcaatccctagcagaagccttccatcctcactcgctcgatggcccgcacgaagcagacggcgaggaagtccaccggcggcaaggcgccgaggaagcagctggcgactaaggcggcccgcaagtctgcccctgcgaccggcggagtgaagaagccccaccgcttccgccccggcaccgtcgcgctccgggagatccgcaagtaccagaagagcacggagctgctgatccgcaagctgccgttccagcgcctggtgcgggagatcgcg

SEQ ID NO: 75020 - DNA, 270 bp, Zea mays
gaatagtgttagcaaacatgaataccttggtgagtacactggggaactaatctcacacaaagaagcagataagcgtggaaagatatatgatcgtgagaactcatcgttccttttcaacctgaacaatgagtatgttcttgacgcatacagaatgggtgacaagctgaaatttgccaaccatgcccctgacccgaattgctatgccaaggttatcatggtaactggtgatcatagagtgggcatattcgccaaagaaagaatcctcgctgg

SEQ ID NO: 75021 - DNA, 262 bp, Zea mays
cgagaagcggctgcccgcgtccaagtcctccggcaaggagggcggcgagaagaaggggaagaagaaggccaagaagagcgtggagacctacaagatctacatcttcaaggtgctgaagcaggtgcaccccgacatcggcatatcctccaaggccatgtccatcatgaactccttcatcaacgacatctttgagaagctggccggcgaggccgccaagctggcgcggtacaacaagaagcccaccatcacgtcccgcgagatc

SEQ ID NO: 75022 - DNA, 266 bp, Zea mays
ggatttcaagactaaaaagatatttgttggtgggcttccgtcaacactaacagaagacgaattcaagagtttctttgcaagatatgggactgtggtggaccaccagattatgtttgatcatgaaaccaaacgttcccgaggctttggatttatagtttttgcttctgagcaagttgtagatgatttgttagcaaatggaaatatggttgaccttgctggttcaaaggtggagatcaagaaagcagaaccaaagaaatcctccaatg

SEQ ID NO: 75023 - DNA, 267 bp, Zea mays
gtcggcaactaccgccagcgcatcgagcgctggatggagatgcagaaggagaagaggatctacgagcttggctccttgccccccttcctgctcgtcttcgccggcgagatagaggccgtcgaccaccggtggaaccagcacggcttgggcggcgacaacgtgttcggtagctgccgccctctccataacgggcctgtcagcctcatgcactggtccgggaagggcaagccatgggaccgtctcgacgccggcaagccttgcccactg

SEQ ID NO: 75024 - DNA, 258 bp, Zea mays
gctctataagccagttaaggttgatgactgcttctggagcatagaggatgggagaaccctgtccatattgcttacaaagcatgaccaaatggaatggtggaagtctgttataaagggtgatcctgaagttgatacccaaaaggtggaacctgagaacagtaaactctctgatttggatcctgagactagacaaaccgtggaaaagatgatgtttgaccagcgccagaagcagatgggccttccaacaagtgatgaaat

SEQ ID NO: 75025 - DNA, 264 bp, Zea mays
ggcaaccgttgtcgttgtctctgttcctccgcttcctgctctcttggcttgctgcttgccctcggagcagtgccttccgccgccgccgccgccgcctgttgtgagaaggagaggccggggctgggaggagatgagcgtgaccaagttcatcaagtgcgtcacggtgggggacggcgcggtgggcaagacctgcatgctcatctgctacaccagcaacaagttccccacggattacatccccacggtgttcgacaacttcagcgc

SEQ ID NO: 75026 - DNA, 264 bp, Zea mays
cgcagtttcaaacggagcccgcggctactgcaagctactccgtctccgtagctccaggagaggtaggtttttatttggcgacgacatgagcacgggcgtgcgaccggggcggcggttcacggtggggcgtgacgaggacgccacgcacccggacaccatccgcgccgccatctccgagttcatcgccaccgccatcttcgtcttcgccgccgagggatccgtcctctcgctcggcaagatgtaccacgacatgagcacggcggg

SEQ ID NO: 75027 - DNA, 288 bp, Zea mays
ggggaacgtgctgaagataaccatctgttagggtacttcaagattactggaattccggcagcccctaagggagcagttgatatcagtgtatgcatggatatcgatgctgccaatgtcctcagggtgttcgcaggggtcgtcaagcctcaaggcccagccattccaccgttcatcgaggtgaggatgccaacgctggacgatgtacatggttggtgtgggcaagctctagcaaagatgtatgggaggattctcgaccttgctgttcttccgaagaagctgcagccatga

SEQ ID NO: 75028 - DNA, 281 bp, Zea mays
ctacgccgttcacttcaagtgcaacaagaagctgctgagggagtacccaaacctattcaactacaccaaggacatataccagatccccggcatcagcagcaccgtcaacatggaacacatcaggaagcactactacagaagccatccgtccataaacccatacgggattatccccgctggacacaacatcgactacaatgccccacatgacagggagaggttcggcgcctgactgcgcctgggaccttgttgcttcctttctctctctcttttttctgcag

SEQ ID NO: 75029 - DNA, 181 bp, Zea mays
gggcaatgttgaggccactggtgaggacttctctaaaccacgggtcttgagcacacggcgagccaacagaaggccagtgcagtaggcagctgcatagttggtcagaccaacttcaagaccatatcgtggcaactcatgcgagtaagcagaagcaagaaccatatcaccttctagatcgcga

SEQ ID NO: 75030 - DNA, 272 bp, Zea mays
acaagatggaagcaccctggtagcaggaacagcactaattggcctaagctcagggttcatctttgctgcagcagtgtcagtgacctccgagctctttggaccaaatagcgttggggtgaatcacaacatccttatcaccaatatcccgcttggctcactcctctatgggcagattgctgccaaagtatacgatgcaaatggccaaaagatgacagtagtggataaccgcactggcattgttgacaccatgattgtgtgcataggggtgaagt

SEQ ID NO: 75031 - DNA, 280 bp, Zea mays
ctgttcactgttctactgggacgaccccaaatccccaaatcgaaaggagccgtccggctcagggtttctcgacggctccttgccctctccgccatggacgcacagcgagccctccttaacgagctcatgggcacagctcgcaacctaacggaggaggagaagaaggggcacaaagagctgaagtgggacgatccggacgtgtgcggcccatacatggttcggttcagtcctcacgaccttttcgtcaacaccaagagcaatatcgggccgtgctcgagga

SEQ ID NO: 75032 - DNA, 277 bp, Zea mays
ggcttcgtcgtgggcgccatcgccgggctgatcttcgtcggcgtcagcggcctcctcattaacctcatcatcggctccccaaggaaaatgcctgacatgaacaagctcatgttccacaccgccgtcatgcacaatggaatggcccttgcgtatgcggtatctcattaattacttaatatcatcgcagtgactaccaatgcaactgcttcagctcctaatgttgcaacgcgcgtgtggaaataagaagggaataataataattattattattgtaata

SEQ ID NO: 75033 - DNA, 277 bp, Zea mays
  unsure (1)..(277): unsure at all n locations
gagaagaagcttgtggagtcgatggatctttaacgatcctttggagcagagcaccaacgaacgcgtcacctgcgccagttgtatcaacttgttgtactttgaaggaaggcacagcgccatggaaatccctggcatagtacttgcacccttgatctccaagagtcactaggagcagcttcatggtagnaccgtcacagcttcatgacaacatcgtcctccaccgagtcgatgcctgtcaagaactcgagctcgacttcgctgaccttgacaatgtctg

SEQ ID NO: 75034 - DNA, 231 bp, Zea mays
tgacgcgactcgtgagcgatctgagttcctgattgttgtatcccagtttcttctgtgagtggaatcgcgaggaagaaggatgtcgtgctgcggaggcaactgcgggtgcggcgccggctgcaagtgcggcagcggctgcggagggtgcaagatgtacccggacatggcagagcaggtgaccaccacccagactgtcatcatgggtgttgcaccatccaagggcgggttcga

SEQ ID NO: 75035 - DNA, 270 bp, Zea mays
cagttctgaggtgtgagcaatggctcccggccagtttgcagcagcaggagtcctcaccggccttctcgctctcgcaacacttgcaagctgcaacactgatggcgacatactgtacaagcagaggctagcatgggaggatccaaacaacgtgctgcagagctgggatccaaccctcgccaatccctgcacgtggtttcatgttacctgcaacctgaacaactccgtcgtccgtgtggatttgggaaaggcaggcatctccggccccctgct

SEQ ID NO: 75036 - DNA, 248 bp, Zea mays
cttcatcgtgttcatcatcctcatcatcgtcacggccttcgtcacggtggcgctcacctacttccagctcgccgtcgaagaccaccagtggtggtggagatctgtcctgtgcggaggctcgacaggcatattcatattcttctactgcatctactactaccacgcgcggtcggacatgtcggggttcatgcagacgtccttcttcttcggctacatgacctgcgtgtgctacggcttcttcctcatgc

SEQ ID NO: 75037 - DNA, 247 bp, Zea mays
ggaggcccaaagagtttctgggttcttgatcttggccattgaagcaccgataaacttcgccaactccaactacctgaatgaaaggattaaaagatggatagaggaagaatcttttgaacaggataaacatactgaactccatttcataatcttggatctgtcagctgttcctgcaattgacacaagtggcatagcgttcctcattgacataaagaaatcaatagagaaacgtggtctggagcttgtg

SEQ ID NO: 75038 - DNA, 252 bp, Zea mays
ggcagccatctgagccacctcttagctgggaaccaagaagacggattgcactgggatctgcaagaggactttcttacttgcatgatcactgcgatcccaaaatcatccatcgggatgtcaaagctgcaaatattcttttggatgaggacttcgaggcagttgtgggtgatttcgggcttgctaagcttatggactacaaggatacccatgtcacaacagctgttcgtggaacaattgggcacattgctcccg

SEQ ID NO: 75039 - DNA, 246 bp, Zea mays
atggcgacaaggagggccttcttcagctcccaagtgacaaagccctgctgagcgaccctgtcttccgccctcttgtggagaaatatgctgcagatgagaaggcattctttgatgactacaaagaggcccacctcaagctctccgaactggggtatgctgatgcttaaatggtccatatcctggagcgggacacaaactgctgcctgtatggactcgtgcgattcagggtgaaccatcagattgtct

SEQ ID NO: 75040 - DNA, 239 bp, Zea mays
gccgcaggaagacaaaatccccgcggtgatcgcccgcttcaaggctttccatgaggcgttcatggctgagtaccgtgactgaactgttacagtggctgagtaccatcgtgtagaccgaaacaaaataaagctccactctctctctctctgtctctgtgcgtgtgtgtgaactgatctctgaatggaagaacaatgtactctgttggcgcctttaatggcaattgaggaaaattttgatc

SEQ ID NO: 75041 - DNA, 247 bp, Zea mays
ctgagaagaagaagaagaaaaagatattcctgctttggctgatatagttggcgacgaggacaaggctaaagaaattgttgaagcagcaaaggcttcaatgggccaggatctgtcaccagttgatttgatcaatgtccagcaatttgcccaaagggttatgaatctctctgagtatcacaaaaacctttatgagtatcttgtgactaagatgaatgatattgcacccaacctgacatcgttgattggt

SEQ ID NO: 75042 - DNA, 244 bp, Zea mays
aaaatagctgattttgatttgtcaaaccaagctccggatatggcagctcgacttcattcgaccagagttcttggaacatttggctatcatgcacctgagtatgcaatgactggacaacttagctctaagagtgacgtttacagttttggagttgttcttctggagctcctgactggaagaaagcctgtggatcatacattaccaagaggacagcaaagtcttgtgacatgggcaactccacggc

SEQ ID NO: 75043 - DNA, 244 bp, Zea mays
atttttccctgtgaagaacaaagcagaaatattctaaattggtattattgattaagttaagaccactgactagttctcctttcatttctaagtaagccttagcttgttcacatatcttcacaaatgcttcctgaacttccatagtagcatgaccatacatcttatcaagtatagttacacaaacttcaggaagaccttgtatgcgagctatgtgagcgagcttattcacattccaaggactagt

SEQ ID NO: 75044 - DNA, 242 bp, Zea mays
ctgcgctcgagaaggactacgaggaggtcggtgctgagtttgacgagggtgaggacggcgacgagaggtgacgagtactagacgctctactggcgcggcgtcgtcgggcttgtgtgccactgctatcctgtgatctgccctgagtggctcctatcgtgttatgtttctgtcggttcttatctatctgtcgttgtgtggtttacaacttacgttgtaagactttattcccccgctttgctact

SEQ ID NO: 75045 - DNA, 238 bp, Zea mays
gtaaactgctcgtgcaatgatgactctgatatgggtggagctatgttcagcagcaaagctgaaacaattgtagacgagtacaatcgtctcctggcaagccaacttgaaactcagagagagtattatgagggcctgttgtctgaggctaaaagaaacaaggagcaccagatttctgaagctgctgataaagctgtaagtgataagcttgaagagatgcaacttaagctcgagaatctta

SEQ ID NO: 75046 - DNA, 238 bp, Zea mays
cagcactctgtccttatggaaggttcgctggtggagaccaactcgatcctcgaagctggctctgtattgcccccaggaaggcggattccgaccggcgagctctgggcaggaagcccggccaggttcgttcggaagctgaccaatgaggagatcatggagattccgaagctggcaactgccatcaacgatctgatgcagagccatttctcggagttcctgccttactctaacgcttatc

SEQ ID NO: 75047 - DNA, 243 bp, Zea mays
tcctcttcctcgagttctcctcaaccaaattcaaagtcacagcggcgaaactctcggcgatgtctggccgcggcaagggcgggaagggtctgggcaagggcggcgccaagcgccaccgcaaggtgctgcgtgacaacatccagggcatcaccaagccggcgatccgcaggttggcgaggaggggcggcgtcaagcgcatctccgggctcatctacgaggagacccgcggcgtgctcaagatct

SEQ ID NO: 75048 - DNA, 237 bp, Zea mays
ggctcgcagcacgccctttccccacctcgatctcgccctaggttttcgccacaccgctctcgtactccgcgaagatgccgaacaacaagggtaagggaggcaagatccggaagcgtggaaagaacgaggctgacgacgacaagcgcgagctcgtcttcaaggaagacgggcaggagtatgcgcaggtgacccggatgctcggcaacgggcggtgcgaggccacctgcgtggacggca

SEQ ID NO: 75049 - DNA, 241 bp, Zea mays
aaatagtactggagcccttcccatctcacttttctttggccttttgtccttgtggttctgtgtctccgtgccaattacccttttaggtggtttctttggcacaagggctgagccaatagaattccctgttcgaaccaatcagataccaagagaaatccctacgaagaagtactcattgctcttcatacttggtgctggaactctaccttttggaacactcttcatcgagctcttcttcatt

SEQ ID NO: 75050 - DNA, 258 bp, Zea mays
cggcggcggaagtaagaggcgatggggcactccaacgtgtggaactcgcaccccaagaactacgggcccggatcccgcgtctgccgggtctgtgcgaaccctcatggactgatcaggaagtacgggctgatgtgctgcaggcagtgcttccgcagcaacgccaaggacattggcttcatcaagtaccgctgaagtcagctgggcgggctatctgaatgccatctcttggacagtgtagtagaggcgatgccacaattt

SEQ ID NO: 75051 - DNA, 253 bp, Zea mays
gtttctggcaagcattattgcaggatctgctttagagcagctaaaaagctatattcatcagtcagcaaatgaaataccaaggacgattggtgaagcaattccaatgaaggcaaccttttttataacatatacaatggttgatggttgggctggggtagctggtgagatattgagattgaagccactagtgatcttccacctgaaaaactttttcttggtcaagactgagaaagacagggaagaggcaatggac

SEQ ID NO: 75052 - DNA, 250 bp, Zea mays
ccgacgtccgccctggtgactggtactgctcctgcggcgcgcacaacttcgccagccgctccagctgcttcaagtgctccgcctacaaggaggaggccgctgtgaacagtggcgctggcggctttgatggcgacatgtcacgctcacggggctacggcttcggcagcggtgctgctgctgctgctggtgctggcgctgcccgtactaccaaccgccccggttggaagtccggagactggatctgcaccag

SEQ ID NO: 75053 - DNA, 251 bp, Zea mays
atccaccacgcaccccaccaacccatacccataccagaggctctctgattttacttctcagcggtagatcggctgagcgagcgagcgagcgaggcacacgggtagaaaagcaagatgtcggacggcacggcgacctgcatcgacatcatcctcgccatcatcctgccgccgctcggggtcttcttcacgtttcgctgcggggttgagttctggatctgccttatcctcaccttcttcggctacctccccgg

SEQ ID NO: 75054 - DNA, 255 bp, Zea mays
caagtttcctaagctctagtccatccatcataacttgctgtatctcaaagcaagggaagctgacatgcgaacagtgagcgagagaacgaattctagagttgcctggttcagcatcctgtcattgggagtctgcgttgccgtctctgtgctgcagctgtggcaccttcaagggttcttccggaagaccaagctcatttaaattcacgttttatcagtgtgtacttcccgtgttaaataccttaggaggacaattgt

SEQ ID NO: 75055 - DNA, 247 bp, Zea mays
agtcacctgcgccgccgcttcgttcgtgtggaggggagaagagaggaaatggcggcgaccgagggcgtgctcctggggatgggcaaccccctcctcgacatctccgccgtcgtcgatgacgccttcctgacaaagtatgacatcaagctgaacaatgctattctcgctgaggagaagcacttggctatgtatcacgagttggctagcaagagcaatgttgaatatattgccggaggagccacccaga

SEQ ID NO: 75056 - DNA, 143 bp, Zea mays
cttcgacctgccgcacgtcatctccgaggcgccgccgttccccggcgtgcgccacgtgggcggggacatgttcgcgtccgtgcccgccggcgacgccatcctcatgaagtggatcctccacgactggagcgacgcgcactgcg

SEQ ID NO: 75057 - DNA, 144 bp, Zea mays
cggacgaggaaatgggcttcagcctcttcgacgactagagctgctgttttcgtcaaactgctgcaagttttggctttttttatcatctacaagtactgtttcctatattttttagcagacaaattatcgtgtgtaatcgacaat

SEQ ID NO: 75058 - DNA, 247 bp, Zea mays
ggaagttcattacttaaacattatgatgggcctgctaaaggattcaagcaaaaatatcaggatatgtgccttccacatttttaaggtatttgttgccaatccaaacaagcctcgtgagattattcaggttttggttgagaatcacagagaagtgttgaagctactccacaatctccccacaagcaaaggtgaagatgaacagcttgatgaggagagagatttaattatcaaagaaatcgagaagctt

SEQ ID NO: 75059 - DNA, 243 bp, Zea mays
cgggttgagaacccctgaacacattccaatcgaaccaattaatttatttattatttctaccctattagtagatgtagcgtagttctagttatatctttccgcatatcaatcttcaccgcctattcgactctatgtcgtctagatctatcttaggtggcctgccgaccctaattcgaccgtaggatattactcctcccggagggcaagatctaattatctgttccagatactctaccttgattg

SEQ ID NO: 75060 - DNA, 243 bp, Zea mays
ggtaacattgtgctcagtggtggttcgactatgttcccgggtatcgctgatcgtatgagcaaggagatcacttcccttgcaccaagcagcatgaagatcaaggtcgttgcaccgcctgagaggaagtacagtgtctggataggagggtcgatcctagcctcgctcagcactttccaacagatgtggatatcgaaggaggagtacgacgagtctggcccggcaattgttcaccggaagtgcttc

SEQ ID NO: 75061 - DNA, 272 bp, Zea mays
atatccccaaaccctagctcccgatctcgatggcgaaccctcgcgtcttcttcgacatgaccgtcggcggcgccccggcgggccggatcgtgatggagctgtacgccaacgaggtgcccaagaccgcgagaacttccgcgcgctgtgcacgggcgagaagggcgtgggcaagtccgggaagccgttccactacaagggctccaccttccaccgcgtcatccccgagttcatgtgccagggcggcgacttcacccgcggcaacggcaccggcg

SEQ ID NO: 75062 - DNA, 275 bp, Zea mays
gcggcggataggaagacaacctcgctgaagcagttgcagggccacatctggaggactgggttcgagtgccaagaaatcaagggggtggtgttcgacgacgtgccgccggctctcgagaggtggcacgccgcggcattaagacgtacatttattcaagtggcagcagggaagcccagaggctcatcttcgggaacactacctacggcgaccttagaaggcacctgtgcggattttttgacgcaacaattgggaccaagagagacgctcgcagctac

SEQ ID NO: 75063 - DNA, 272 bp, Zea mays
ggggggcggccgcgtcgccaccgccacccaccccatggcgggcatggctgcgtcgccggacgaggtgcagctgctgcagctcctgatcgagattcttggcgccaagaacgccatcgaggttggcgtctcaccgggtactcgctgctcgcgaccgccctcgccctcgccgacgacggcaagattgtggccatcgacgttagccgcgagagctacgaccagattgggtcgctggtgatcgagaaggccggcgtggcgcacaagatcgacttccg

SEQ ID NO: 75064 - DNA, 259 bp, Zea mays
tactcgccagacacatttttcaccatccatgcagacaaaggggatgacacttcactaagtggcagttctcttgctcctccgttcccctccccaatcacagtgaggaatgcacttgctagattgccggccttctaaattcaccgaagaaggcttctctggttgcattagcttcttacgcttcagatcctgctgaagctgatcgtctgatgttcttggcctctgctgctggcaaggatgagtatgcccaatgggttgtggc

SEQ ID NO: 75065 - DNA, 117 bp, Zea mays
tggcgctaaaatatacccttccccagaccccgcacagtgcgggaggcctacggcactgggtacgccctatgtagtcagttggaagccactgctaattggttgtaatgcttaattttc

SEQ ID NO: 75066 - DNA, 260 bp, Zea mays
aagatcccggtcgtgatccgaggccccggcggtgtcggtcgccagctcggtgccgagcactcgcagcggctagagtcgtacttccagtcgattcctggccttcagatggttgcctgctcactccttacaacgcaaagggcctgatgaaggcggccataaggagcgagaaccccgtggtgctgtttgagcacgtcctcttgtacaacctgaaggagaaaatccccgacgaggagtacatctgctgcctggaggaggcggag

SEQ ID NO: 75067 - DNA, 273 bp, Zea mays
ggcaaaaacacctaaatgccgcaacggcaaacgatgagtcaatcttgtccaataccaatggtgttcctggatttccgccaaagaaggcaacctactcatgcattcagatgaacggaaaggaagtttccgctttgctgtccgatgtgtgccacagtccattgagaaggcactccaagaagctggtttgcccgcctccagtatagactggttgttgttacatcaagctaatcagcggattattgatgcggctgccagccgattagatatcccgtc

SEQ ID NO: 75068 - DNA, 254 bp, Zea mays
gcaacatcctgcaggggaaacccatcacggtgtaccgcggcaaggaccgcgtcgacctggcccgcgacttcacctacatcgacgacattgtcaagggctgcctcggctccctggaacggccggcaagagcaccggcaccggcggcaagaagcgcgggccggcgccctacaggatcttcaacctcggcaacaccgcgcccgtcacggtgcctaacctggtgtccatcctggagaagcacctccgcgtcaaggcca

SEQ ID NO: 75069 - DNA, 256 bp, Zea mays
cacacacataatactctccattccattccattccatctcaaaggatagaataatgggcggtctctccaccaagcttttcgtggtcctcctcctgctcgtttgttacaccgggacgaaggcgggccggtgactatggtgtcggcgaggaagtgcgagtcgcagagcttccgcttcaagggatcttgctcgagggacgccaactgcgcaaacgtctgcctgaccgaaggtttcaccggcggcgtgtgcaagggcctac

SEQ ID NO: 75070 - DNA, 257 bp, Zea mays
tgtagagggcattggcgtgttcctatatactctgggatgctaagcaatattatcggccttatattggtaaaaaacttgattacttgtcgcgctgaagatgaagtgcccattcgtaacttactatcagtaaaattccaagggtggctgatgatcttcctctctatgacattctaaatgagttccagaaaggtcacagccacatggctgtggtaattaaacgaacaaaggaagcaggagtatccactgaaaagcaaaag

SEQ ID NO: 75071 - DNA, 256 bp, Zea mays
gttggagtggaggcagctggccatggcgtagacaccgacaagcatgcggcgactttgacaaagggccaagtcggagttctccatggatccatgagctatttgctgcaggatgatgcggacaagttatcgaaccccactccatcagtgctgggctcgattaccctggcgttggacccgaacacagtttcttgaaggacattggacgtgccgaatacgatagtgtgactgaccaggaggcactggatgctttcaagcg

SEQ ID NO: 75072 - DNA, 247 bp, Zea mays
tgccgcgccgccaccccctacaggtaaggaagaggatggcaggatgtcgcaccgtaagttcgagtacccgaggcacggctcactcggcttccttcccaggaagcgctcctcccgtcacgcggcaaggtgaagtcattccctagggatgacccaagaagccttgccatctcactgccttccttggctacaaggctggcatgactcacattgtccgtgaggttgagaagccaggatcgaaactcataag

SEQ ID NO: 75073 - DNA, 259 bp, Zea mays
ggaattaaggttagttccattgagatcgagaggatctgcaacagagtacatgacgccatccttgaaacagcagctatcggggttccacctgtagggggtggccccgaacaactaaccaagccgtcgtgttgaaggaccagagctctcaaatagaggacttgaaccagctgaaacttacatgcaacatggctctgaagaaactgaaccctctcttcaaggtttcctccgtcgtcatcgtcccgtccctccctaggaccgc

SEQ ID NO: 75074 - DNA, 264 bp, Zea mays
ctccaggtggttatacagtccacagtaaaggatccttcgtatcttgatggtagagttgatgaattcttcaagatgtttgaaagcaaaatctatgaactctccgacaaggacttcaagagaatgtgaaatcactaattgattctaaactggagaagtttaaaaacttatgggaggaatcagatttctactggggagagattcaggcaggaactctgaagtttgatagggtcgagtctgaggtcactatgctaagagagctcaaga

SEQ ID NO: 75075 - DNA, 256 bp, Zea mays
cggctcgaggaaccatccgaagcgggcgagaggtcgcggtgaaggtcctctccgccgagtccaggcagggcatcagggagttcctgacggagatcgacgtcatcagcaacgtcaagaccccaacctcgtcgaactcatcggctgctgcgtcgagggaagcaaccggattctggtgtatgagtacctcaagaacagcagccttgaccgtgcgctgctggcttctaacagtgagcctgccgacttcacctggagcgtc

SEQ ID NO: 75076 - DNA, 268 bp, Zea mays
caagagcacgcagtagtgcagcagcactgaagcactacttcctgcactcactgtgctagctgctcaaaccgtagtagtaacagtccatcaccatcaccatcaccaccaatggctcccaaggttgcgctcttccttgccctagcctcctgttcgctgccaccgcgcatggctgcgaaccctactgttccggcccagtcgtcccaacaccaccagtcgtgccgactccgtcgtcgcatagccacgggcgctgcccgatcgacgcgctcaa

SEQ ID NO: 75077 - DNA, 272 bp, Zea mays
ccgcatcggcggcgacgcgccagacacaaactacctctttatgggcgattacgtcggtgctcaagctgactgtggctcagtcgacggtgttattgatgctaaacggactgttcaagctgatgatggcttcctcactgttgctctcggatctcaaagattctttcgggcgttatcacgtgacagattagtctatttggtatctaccgtggctactactctgtggagactgtgtcgttgttagtggctctaaaagtacgttatagagacagaat

SEQ ID NO: 75078 - DNA, 275 bp, Zea mays
aggccaggactgctctctgaggtcagcgctgtgctcaccagcctcaagtgcaacgtggtcagcgccgagatctggacccacaacacccgagccgcggccgtgatgcgggtcactgacgaggacactgggctggcggtcacggagccgagaggctggagaggatcagggagaagctgtcgtacctgttccgtggaggcaatctctctcgaggtgccacagtgtcgtcgaggactgccaccacgcacaccgagagaaggctgcaccagatgatgctc

SEQ ID NO: 75079 - DNA, 277 bp, Zea mays
ccaactcactagtactcagccgccgcaatcagggacaggtagctcgagcgcgcgctccacctgctccgacgcgatgcgggccaagtggaagaagaagaggatgcggaggctcaagaggaagcgccggaaaatgaggcagagatcaagtaggcgcatcttgtgaccgaggatggcgagcttctcctgcaccatggctgagacgcgttgggatgattgtctccctttgtagacgtgctttgctgtagacgtaggcgatgtaaaccgtcctttttgatta

SEQ ID NO: 75080 - DNA, 277 bp, Zea mays
ctcgaagttgaaaggcttgatcagctaaaagctagtaggatgaaggatattgcattcaagaaacagactgaacttgaagatatatatgcccgggctcatgttgcagtagattctagtgctgcaagagataggataatgtctatattgagtccagtagtttcgagccttcagaactactggctgatatggagaaccagatacttaaagcaaatgaggagtccttaagcagaaaggacatattggagagggttgataggtggatgtcagcatgtgaaga

SEQ ID NO: 75081 - DNA, 269 bp, Zea mays
gaactaccctccccctcccgagtacacattttgtggcctagaggaagagccatccccggaatccgttgtttgttctggagggagtgtcatcatctcaccattgggaacagtgttggcgggtcccaactacgaaagtgaggccttctcactgctgacctggaccttggagagattgttcgagccaagtttgattttgacgtggtgggccactactcgcgacctgaggtgctgagtttagtggtgaagagcgatccaaagcccgccgtctc

SEQ ID NO: 75082 - DNA, 272 bp, Zea mays
tgccgcgccgccaccccctacaggtaaggaagaggagggcaggatgtcgcaccgtaagttcgagcacccgaggcacggctccctcggcgtccttcccatgaagcgctcctcccgtcagcgcggcaaggtgaagtcattcctagggatgaccccaagaagccttgccatctcactgccttccttggctacaaggctggcatggcgcacattgtccgtgaggttgagaagccaggatccaaactccataagaaggaaacttgtgaggctgttac

SEQ ID NO: 75083 - DNA, 269 bp, Zea mays
gtccccgcgcacaggaaagtgttcgtcctcatggcgccgccgcagccgaagtcgggcctcttcgtgggcatcaacaagggccatgtcgtcaccaagcgcgagcagcctctgcgcccgtcccaccgcaaggggaaagcacgaagagggtgtccatggtcaggggcctgatcagagaggctgctggctttgctccttatgagaagcgtatcaccgagcttctgaaggttggcaaggacaagcgcgctctgaagcttgccaagagaaagctt

SEQ ID NO: 75084 - DNA, 265 bp, Zea mays
aagagagagagtttctcaaatttggctgatgtttggactaaggaaatagaagcaaactcaacaaacaaagactgcataaaaatgcttgttggaaacaaagttgacaaggatgatgaaagaatggtcacagaagaaaaggtcttgcttttgctgaagaatctggttgtctgtttcttgagagcagtgcaaaaacacgagaaaatgttgagaaatgttttgaagaacttgcattgaaggtatgcttggagaaagatattaggcacca

SEQ ID NO: 75085 - DNA, 242 bp, Zea mays
aataagcgaggccgagctggctgccatacataggtattgtgtggtgtgtgtgtgagagagagagaaacagagttcttcagtttgctatctctctctgcatgtttggcgtcagtctttgtgctcatgtacgtgtgtctacatgcatttggttgatccgattgcgtctgctgtaaccatatattaattggtccacgatgatatgatttgatactatatatatatactaaaaccggacttattat

SEQ ID NO: 75086 - DNA, 272 bp, Zea mays
gcagctggttcaaatggagacaaataaaagatcatcagattctctagaatctcttccaaaagttatgtcaaatgtgcatgattacttcatctatgttgcttctaaggtggaaaatcttcatcaacatgttgaatcaatgaaactgaatatctcaatgaacaacgccgcaccggcaatgggggtgatccatttctggaggcaaacagacgagaagcagctaaacaagaagcagctgccagaagggtccatccaacactgcatctgcctacccc

SEQ ID NO: 75087 - DNA, 264 bp, Zea mays
ctttctcatgtttgagtttcgacggtgtaaagtagaaatgcctagtgattggctctttgtggatactcttcctatcgcaaaacaattggtcgattctaatgggtcaaaactcagttctgtgtcattgaagttcctagggaacgctacaaaatcccactcacagggagcgcgcatcgtgccatgcaggatgtgacaaccctctcttacgtgcttcagaaattgacctttgagctgaaactaactgttcctcagctgctcgagaag

SEQ ID NO: 75088 - DNA, 270 bp, Zea mays
ctctaattcgtgacaagaacattactacacctgactttgttttctactcagataggctgattcgtctggtggttgagcatggtcttgggcatttgccatttacagagaagcaggtggttacaccaacaggatctcttacatgggagttgacttctgcaagaagctctgtggagtgtctattattcgaagtggagaaagcatggaaaatgcactgcgtgcttgttgtaaggggataaaaataggcaaaattctatttcatcgcattggaga

SEQ ID NO: 75089 - DNA, 280 bp, Zea mays
tctatttctggtgcacgacggggacaaatcacccagggtggtggtggtggctcttgtggctttttcaagtggtgtgacgagctacagcctagggttggtgcaccactgcaagcttcagcgcaataccaagcggattccatgccaagcatccaaaaccccagccagaggagctcgtcttcctgcttcaagtgcgggcaggagaaccactgggctcgagactgtccgaatcaaccgtcggatccttatcctgacaagggtgggagaccagtagctccagcgg

SEQ ID NO: 75090 - DNA, 280 bp, Zea mays
aattctagatcgcgggcggccgctcgcgatctagaactagctcaagatcacgcagatgagcgacctgacatccccactgtcatccttatgctacgcaacgacagctcgagccttcctaatccgaggccgcctacgctgatgcttcgaggccgtgagatcgaatccagcaagtcaagcgagaaggaccggagccactccattggcactgtgacaatgacacagttgcatggaagatgaagtataacacgaaaaatatactgaatttgtgatatatttggtt

SEQ ID NO: 75091 - DNA, 272 bp, Zea mays
gggtgggatgatcgtctcgctcatctgcctcgggtcggggctcaccgtcgcggggcatcacccggacaccaaggtcgcgtgggccgtcgccctgtgcatcgcgtccaccctgtcctacatcgccttcttctccatcggcctcgggcccatcacgggcgtgtacacctcggaaatattcccgctgcaggtgcgcgcgctgggcttcgcggtgggtgtggcgagcaaccgcgtcaccagcgccgtcatctccatgaccttcctgtccctctcca

SEQ ID NO: 75092 - DNA, 274 bp, Zea mays
cagagagttgcgcccggaccccggaccgcgccggctcgcaaactccccacaaccctcgtcgccgccggctgctccacccccgccaccgccatgggtaaattccgcaagcttggccgcaattactcccaacgcctctgcatgctcaggacgatggtgtcgcagctggtgaagcacgagcgcatcgagaccaccgttgccaaggcgaaggaggttcggcggaaggcggatcagatggtgcagctagggaaggagggtactcagcatgcagcaagac

SEQ ID NO: 75093 - DNA, 276 bp, Zea mays
gtaatagtttagttttaggatgattattataactgttgcacgtcacaggacgaacttaggaaggcaaagaagaaaatgggggagcaaaatatacaaaaggctgtgaagtccgcaatggatgctgcagaagctgctctttcaggaaataaaccgttttgtgttactcatgtggatgtgggtcttgataccacggctgtccgtgaggcggttatcaaagtcatggaccagaagggtttgcctataatgttattcagcaccgatgaggcatcaaacaaa

SEQ ID NO: 75094 - DNA, 272 bp, Zea mays
ggcggagagaagatgatctacgacgtgaactcccccctcttccgttccttcctcagccagaagggcggcgccgacaagaggaaaatggaggagcataaaccaaaggagcagaggcccaaggctaacgagaacaagcctgtgatgaacgaatgaatatctccagaagctttgttcaatgtgcaaccaagtccgatgtccgtctgctctggtcagcttaaaaccaacgcttccaataatcctattggtgtcttagtttccccttatagtgttat

SEQ ID NO: 75095 - DNA, 255 bp, Zea mays
gaattattcagtttcactccacatcgtgatgttttatttttacttttgtcgtgctataacggatagcgctcctcgttggcgccactggcgggtggttctgcctctggtctggtgtgtttgtgtgtggtcacacttgccagccagcagaggcgcctgcttgtacctagattactgtttccattgtcgtcatcatcggctaacattgtcataatgtcagtttgggtaatgttagattaagtaattattgtgttctgt

SEQ ID NO: 75096 - DNA, 272 bp, Zea mays
gtttgcgtactctgcaatctgaaacctgtggcaatgcgtggtataaaatcacatgcaatggttttggctgcatcgaatgaggaccacacgaaggttgagttggtggagccacccgaatctgctgccgtgggcgagcgtgttacctttgctgggtactcgggggagcctgaggcttccctcagtggcaagagcaagacgtgggagaagctggccgccgagctgcacagtaacggtgagctcgtggcgtgctacaaagatgtgcccttcacaac

SEQ ID NO: 75097 - DNA, 269 bp, Zea mays
gtggccaaagatagtatgatggatgggaattacagccttcctgacaacgttgcgattgtcactttgcagaatcttgatgatggtaccacactactccgcttggcccatcttttccaagctggcgaggacccgagatattcagaggtagcagaggttgatctgaaaaaggtctttggaaagataactatcaaggaactgaccgagactaacctctccgcaaatcaaaagaagtcagagatgaagcagctcaactggagagttattgagga

SEQ ID NO: 75098 - DNA, 272 bp, Zea mays
cataccattccgaattcgtacgctttgctgatgaggcaaaatcaaacagagtcatggcgagcctcaaggcatctggattacttcatgccgcagggatagcaacttccctgacaaacacgagccaacaatgggatttcccgaatggatgggccccactgcagcatcttatagctgaggggctgctgtattctggatcagaggccaaaaaactagctgaggacattgctacgaggtgggtgagaacgaactacgccgcttacaaagcaacgggt

SEQ ID NO: 75099 - DNA, 90 bp, Zea mays
ctcttggttctaaagatctctgtgcttttggggggtgtttttgcattgccccagattccaataaactcaccaaattcgggtcgtgcgtac

SEQ ID NO: 75100 - DNA, 269 bp, Zea mays
atacggcataccacactagagccgccgccgctgccgtttcgcgcaccgtaccctagccctcgtcagcggcggctccgagctcctccagccatgacgttcaagcggaggaatggcggacgcaacaagcacgggcgcggccacgtcaagtacatccgctgctccaactgcgccaagtgctgcccaaaggataaggctatcaagcggttcttggtgaggaacattgttgagcaggctgccgtgagagatgtgcaggaggcctgtgtacatga

SEQ ID NO: 75101 - DNA, 268 bp, Zea mays
cctaagcgtcgtgtaccacccgcggcggccggagatgagcccgctccaggccatcagagctgcctgcggcgaagaccactacatgtgccgcttccaggaatttggtgttgctgaagctgaatttgctctatatgacatcaagtgggtgtttaagaagacatttggcatgcgcaagccagctcctcttattctgcccaaggacaagagcttctttgactctcttgattcagatggaacttgtccaccatggctatcagaggaagatatt

SEQ ID NO: 75102 - DNA, 230 bp, Zea mays
gttcagttcagttcatccgtgttcttgtttgcgaggtcgagagagactgagagaggatgtcgtgctgcggaggcaactgcgggtgcggctgccggctgcaagtgcggcaacggctgcggagggtgcagcaagatgtacccggacatggccgagcaggtgaccaccaccaccacccaggctctcatcatgggtgtcgcaccatccaaggggcacgccgagggcgggttcga

SEQ ID NO: 75103 - DNA, 269 bp, Zea mays
agccgttctatctccagtagagaagtcattcggacatgtgggccacatctccaccgccgctcccactccagctccggcgaccgccgcatcctcgcttcatcgcccgccgccgtaacaagcggctggcggacgtctgcctcttcacgacgctcatccgattcgatctcgtctacaacacgctgttcaggtgcaccaggcggaagctggccgagtaccctagcctccatgcctacacgcgcgacatctaccagatgcccaaggtcgccgag

SEQ ID NO: 75104 - DNA, 269 bp, Zea mays
gttgatctcgactcacttgccaatatgactgatggttattcaggaagcgacctgaagaatctgtgtgtgaccgcagcgcattaccccattcgagaaatcctagagaaggaaaagaaggagaagagtttggctaaaacagaaggtaggccagagcccgcattgtatggaagcgagcacatccgtcctcttagcatagacgacttcaaatccgcccatgagcaggtttgcgcgagcgtttcatccgactcggcaaacatgaacgagcttct

SEQ ID NO: 75105 - DNA, 271 bp, Zea mays
cgaatcgccgacactccaacccggaagaggcaacgaggtgactccgcgcctcggtcatgggtgacagccaatactccttctcgcttaccactttcagcccgtcgggaaagcttgtgcagatagagcacgcgctcacggctgtcggatccgggcagacctccctagggatcaaagctgccaacggtgtagtgattgccactgagaagaaactgccttctattttggtggatgaaacatctgtgcaaaagattcaggcactaacaccaaatat

SEQ ID NO: 75106 - DNA, 213 bp, Zea mays
caccgacatgccccctctggaggatgacgctggcgagagaagatggaggaggtcgactaagctgggtttattcttatggaggaaagagagagaacatcgggtctgttctgtgggtcttaccacatatgctattatgcaatctgttgtcggtatgctagtgctactattgtctctgctgtcttctagttaattttgttgttgttttgcgtggtc

SEQ ID NO: 75107 - DNA, 267 bp, Zea mays
cttgatattgcttctgttcttggaatgggctttcctaaatacaagggtggtcttgtcttctgggctgacactgttggagcaccttacatacattctaagctaagcaagtgggctgaaatttatggccccttcttcaaaccatcatcatatttggaacagcgagctaagagtggtgtaccattgagcgcaccaggagcttcgcagcaaggttcggcgaggtcacgcatgtgaggtgctgtccagcattgagcagaataatgcagaata

SEQ ID NO: 75108 - DNA, 263 bp, Zea mays
cggctcgaggcggcacggcggcggcgatcggagaagatggtgcgcaaggcgaaggttgagatcgacgagcagccgccggataacttcgacccgaagaacccgtatgccgacccggtggcgatgctcgagtaccgggaacacctggtgcgagagaagtggatccatatcgagaccgccaagatcatccgggagcgcctccgctggtgctaccgcatcgagggcatcaaccaccaccagaagtgccgccacctcgtcgaccaata

SEQ ID NO: 75109 - DNA, 268 bp, Zea mays
ctgcaccagagctgccgcgagtgcatcatccactgcgacatcaaaccggagaacatcctcctcgacgcgtccttcgcgcccaagatcgcggacttcgggatggcggcgttcgtcggccgagacttcagccgggtcctgaccacgttccgagggacagcagggtacctcgccccggagtggctgagcggggtccccatcacgcccaaggtggacgtctacagcttcggcatggtggtcctggagatcgtgtccgggcagaggaacacgc

SEQ ID NO: 75110 - DNA, 260 bp, Zea mays
gcctgccctgtcctgccttgttaagcaacacagcgagacatcacgagagctagagagagatggcggccacggtttcctccttcacggtggtgaacatggagaagctggagacagaggagagggccacggccatggaggtcatccgcgacggctgcgagaactggggcttcttcgagctgctgaaccacggcatctcgcacgagctgatggacgaggtggagcggtgatccaaggcgcactacgccaccttccgggaggcc

SEQ ID NO: 75111 - DNA, 210 bp, Zea mays
ctctaattcgtgacaagaacattactacacctgactttattttctactcagataggctgattcgtctggtggttgagcatggtcttgggcatttgccatttacagagaagcaggtggttacaccaacaggatctctttacatgggagttgacttctgcaagaagctctgtggagtgaatattattcgaagtggagaaagcatggaaaatg

SEQ ID NO: 75112 - DNA, 276 bp, Zea mays
ggcttcgcttgtgtcaactgtatttttagggctcctgcgccgaaacgaacacttaggcttttggtgttctggcgcgggaaggtccgatctttccggtcggaggaagaaatttcaggggaagaagcctgaagaagaatggccagctccagttctcaacacacggtctgtgggttagtgacatttagggatgtggctgttgacttctctcaggaggagtgggcctgcctggatgctactcagaaggtcctctacagggacacgatgttgagacctaca

SEQ ID NO: 75113 - DNA, 276 bp, Zea mays
atgaatatgatgttcctgaagttattgcctgcccataactggtggtaacaccaagtatttggaatggatcaagaacagcacccgggacaagtgatctcttttttttttttggagctcgacataatgcgatgatcgaagtgcccatggctccttagctcttccagtggcttgcacacaactacacaagtatgtttcctctcttgacctggacatctcagttacgttgctgtaccggatccatatctaccatcttcaggtaaacaagtatttggtgtc

SEQ ID NO: 75114 - DNA, 279 bp, Zea mays
cttgcatcaattgaggggagttggtttggatcctgggcaccggagaggatgatatgggataccattatttataaaccaatacgggcaatgcttggaggacgtgtaagatttgttctttgtggtggtgcacctttatcaggtgacacacaaagattcatgaatatatgtctaggtgtcccagtgggtcaaggcttatgtttgactgaaacctgtgctggagcagctttcactgaatgggatgacacaagtgtgggtcgtgttggtccaccattccttgct

SEQ ID NO: 75115 - DNA, 280 bp, Zea mays
ctttcagggaacataagatataatctagatcctcttgagcaatgatacccaaacgtgaacgaaggtcatgtaagccaattgtggtgatatctacagagtcaataattattttccccccagttggctcaacaagacgaaacaatgcaccgattaaagtcgtctttccacttcctgtccggccgactataccaatcttatctccgccttcaaaagtgcatgtgattccatgcagtacaaggggagcatcttccctgtatctgatcttcagattctaagctcc

SEQ ID NO: 75116 - DNA, 274 bp, Zea mays
ctgcacttgtgacctggaacatctgctggggaacaagaggtgtgattgattttatcggtcgctattctgatgtagaccttagaactgcaaaagatggagagtatgttaaggttactggggttgttacttgtggaaatttgccccttgagtcctcattccaacgggtgccacgatgtgtgtacacttcaacttgcttgtacgagtacaggggttgggactcgaaagccgcaaacgccacacaccgacggtttacttggggtctcagtcaatggaa

SEQ ID NO: 75117 - DNA, 276 bp, Zea mays
ccgccatatgctcctcctcagaagatgaaaacccacctcgttcccccagggacccctaggtcgatcttcgtgtatttccgcggtttattctatgacactgcaaatgatcctgagggtggttactatgcaaggggcgcccgtgcatcagtctgggagaacttcaagaacaacccgctcttcgacatctcaacggaccacccacccacgtactacgaggacatgcagcgtgccgtcttctgcctgtgcccgctgggctgggccccgtgagcccccgtc

SEQ ID NO: 75118 - DNA, 268 bp, Zea mays
atggaaccacagactaaaatgatatattggtggcaacccctggaagactaatggatcacattaacatgacaaatggtttcagtctgaagcatcttcagtacctggtcattgatgaaacagatagaatgctaagagaggcttatcaatcctggttgccaacagtgatccaacttacacactcaattagccaaggggtgtggagcgtggatttaaaggtaaatgctatccaagattggggaagatagttttatctgctacatgactcaag

SEQ ID NO: 75119 - DNA, 272 bp, Zea mays
ggtttataggtgaacttgaaatctgcaggggacacatagcttcactattcatactggtgctgggaagatcattcctgaaatacaaagtgatgggcaggtaaaggtcgatatgggagagcccatcctttctggagcagacatccccacaaaactggtagctaccaagaacaaagctgttatccaagctgagttggcagttgagggcttaacatggcatgtcacatgtgttagcatgggcaacccccactgtgtcacatttgggcaaacgagtt

SEQ ID NO: 75120 - DNA, 265 bp, Zea mays
  unsure (1)..(265): unsure at all n locations
atagattgatggtgagaacattcaaggtttcatgtgggatgaggagaaagttaatgatgaactagaaaagtacatgagcagtgcttttcaacacttgaaggccatatgcaagtctctggattgcgaccttaggatgggggccttcaccttaggagttaacagagttgctcgtgccaccctaatgagaggcaacgangcatgagaccattgaccacgcattacagattcgacaggcgcattcaataattcgtgtccacaacgttgg

SEQ ID NO: 75121 - DNA, 265 bp, Zea mays
gctagagcttgtaaccgagcgggggcattaaggtggctagaatgctttgcgatggtttctgggcctgggctcgatgtgacactggccggcttgcccatcccaagttggtagtgtctggtgggggctctagcgaaagcttgggtctctgcagacctggagcggcaggaatggcgtaaggctggcttcacagagcagcgatcactgcccactttcaacggtgggaggataacaagccgctgcactttgagcccaactcagcccagaa

SEQ ID NO: 75122 - DNA, 258 bp, Zea mays
ggggcgctcatttgctgggaaaataaaatgccacttttgaggacagcgctgtatggtaaaggtattgagatatactgtgcccccactgctgactccaggcctgtttggcaagcctccatgacacacattgctttggaggggggatgctttgttttgtcagcaaaccaattctgccgcagaaaggactatcctcccccaccggggtatgagtttgcgggtttaggtgaagaccaatccgcggacactggtgtttcccct

SEQ ID NO: 75123 - DNA, 267 bp, Zea mays
tagagggcatagtactgttcctatatactctgggatgccaagcaatattatcggccttatattggtaaaaaacttgattacttgccgcgctgaagatgaagtgcccattcgtaatcttactatcagaaaaattccaagggtggctgatgatcttcctctctatgacattctaaatgagttctactaaaggtcacagccacatggctgtggtaattaaacgaacaaaggaagcaggagtatccactgaaaagcaaaaggcacaactgc

SEQ ID NO: 75124 - DNA, 260 bp, Zea mays
cacacacacatcgcttctccacacgacctcgcagtcacggaagacccgcgcacacacgccacttgtgcaccatggcgccccaggtggcgtacaagtcgccattgccgctggccaccggcctgaagcttggcgttggcggaggagtcggaggcatgggcttgggtccacactaccgaggcgtgaggaagcggccgtggggacgctacgccgcggagatccgcgacccagccaagaagagtcgcgtgtggctgggacgtacg

SEQ ID NO: 75125 - DNA, 275 bp, Zea mays
ttgctggtgcttttgctggtgttacagcaacgattatgtgcatacctatggatacaatcaggacaaagatggtagctcctggtggtgaagctttaggcggggtcattggtgttgcccgccacatgatccaaactgaaggattcttctcgctgtataagggattggtgccttctcttatcagcatggcaccctctggcgctgtattctatggagtgtatgacatactgaagatggcttatctgcattctcctgaaggaaagaaaagggtatcgatg

SEQ ID NO: 75126 - DNA, 276 bp, Zea mays
aggccgtgcgtttctgttctctcatgccatgaacgtattgtgggggcgaaggaggatagacacctcatgacagggctacacacagttgctgatatctactgtaatgactgccgtgaggtgttatgctggaagtatgtgagagcatacgaagagacgcagaaatacaaggaagtaaaattcatattcgagaagtcaaagattgtgaaggaaaactggtagtgcccccaagttgccagtcaccaaatgatctggtgaagatgaaatggccatttagtg

SEQ ID NO: 75127 - DNA, 280 bp, Zea mays
ctcttgcgagagacaccgtatatcaggcggcggttgatgaagacgacgtcaagaagatgtatattgcttcctccgcatacgcctcatggtccaagcggtggatccgtgccgtatggtacccgctgttcttgccgatggccgtggccttgggcatctggctcgtaccagcttgtgcgcaacatcacgggcatcattctcgtccgggtgaccaacgacaagagggcggccggcgtcctggacaaccacgacgagggcgagaggtacgctatgcacggcctca

SEQ ID NO: 75128 - DNA, 280 bp, Zea mays
cagcttgataggcgacacgtcattgttgggatcttctacttcattggctttgcattgttctgcctggaggctttgctaagcgtgtgggtcattcagcgcgtctacctgtacttccgagggagcgggaaagaagcggagatgaggcgtgaagcagcacgcggtgcagcgagggcagcgttttgatgaaaaccgtatatagatgatatatataggcacgacttacatactgttcataatagtttgaagtgctttaggtcaagaggcatgtgtgtacagtagg

SEQ ID NO: 75129 - DNA, 228 bp, Zea mays
cggctcgaggtggaaaccatagctattgggggcgaagggcttatgagcgtcatttcaaggaatggcgtcatcagcatgggatgcgatgccttggcattcccaatactaagaatttcaatgaaattacatccatcgaggaggcgaaatcgctctgggagaaaattcaagcacgacaaggggtgaataagttgcggccagacctagaggaagagtatgaagatcaggagg

SEQ ID NO: 75130 - DNA, 276 bp, Zea mays
cgtgccgctgccgaggtttccggtgcctcaccccatctacagcagaccggcgatggtacctccgccgccaagcaccaccaagctagctcaactgcatctggagctccaagcgcacccgtccaaggagagcatcgacgcagccatcggagatgttttagtgaagccatggctgccgcttccactggggctcaagccgccgtcgctcgacagcgtcatgtcggagctgcacaagcaaggcgtaccaaaaatcccaccggcggctgccaccaccaccgg

SEQ ID NO: 75131 - DNA, 179 bp, Zea mays
aagcggaaggcttggaaggagaagagaatggcggggcggcgcgcggaggaggagtacgactacctgttcaaggtggtgctgatcggggactcgggcgtcggcaagtccaacctcctctcccgcttcacccgcaacgagttctgcctcgagtccaagtccaccatcggcgtctggttcgc

SEQ ID NO: 75132 - DNA, 256 bp, Zea mays
cagagaatccccaagcaaacaaacagggtagagggagaggagaggagaggagaggagaggttgggtctgggacaccatggctccgatgaagctgtacggggcggtgatgtcgtggaacgtgacgaggtgcgcaacggcgctggaggaggctggctccgactacgagatcgtgcccatcaacttcgccatcgccgagcacaggagcccctagcacctcgtccgtaacccgtttggtcagtttccagctctgcaggat

SEQ ID NO: 75133 - DNA, 272 bp, Zea mays
cgatcctggccctatttcttttattttgattttgaataaatttacatagggttccaattatggttagtccaaatgttcgtccaagaatcatcaaaaagcgcacaaagaagttcacgcgccatcaatctgatcgctatgatcgtgttaagttgaactggcgtaaaccgaaaggtattgataatcgcgttcgtcgtcgctttaagggcgaacgtttcatgccaaacattggttatggatcagctgccagcaccaaatttatgctgccaaatggt

SEQ ID NO: 75134 - DNA, 173 bp, Zea mays
gcgcaaggtgctcaacgccgacgacatggtcacgctctctggcgcgcacaccatcgggcgctcccactgctcctcgttcacggagcgtctctacaacttcagcgggcagctggggcggacggacccgtccctcgaccctgcctacgctgagcacctcaagatgcgctgcccat

SEQ ID NO: 75135 - DNA, 279 bp, Zea mays
gttcagttcagttcatccgtgttcttgtttgcgaggtcgagagagactgagagaggatgtcgtgctgcggaggcaactgcgggtgcggctccggctgcaagtgcggcaacggctgcggagggtaagccccgtccagtccgcgttgcgctcggacggagtcagatctgacggatgaacatgtgtgtgtatatatgtggtttccggccctgatctgcatgccttcctccatggctggatggctctgcttctcgcactcctgcttcgattcacatccatcca

SEQ ID NO: 75136 - DNA, 276 bp, Zea mays
gtacaatgaaagcatgatcaatgcactcaagtacaacttggaacaggtttgtgctcaccagagcaaggatttcaaggaaggctgcggcgatagcgaggtagatgacacggcgtcctgtcgcgatagtggtgctatcaattttcaactgactccgaaggaaacagacaaccgaaggatttgacggcttgcagggtctgcaaatcaagtgaggcatccatgctcttgctgccttgtcggcatctttgtctatgcaaggagtgcgagagcaagctgagc

SEQ ID NO: 75137 - DNA, 271 bp, Zea mays
atcttttcactgtcaaatccaacctctcattctgaatgtactgctgaagaagcatatcactggactcagggtcgtgcaatatttgccagtggcagtccatttgaccctgtggagtacgatgggaaggtttttgtacctggacagtcgaacaacgcctacatttcccctggattcggcctcggtcttgttatctctggagccatccgtgtccacgaggacatgcttcttgccgcctcggaaccactagctgctcaggccacacaggagaact

SEQ ID NO: 75138 - DNA, 269 bp, Zea mays
attttccgcacaagtggcttgaaggtttgtgctggatgcagaagtccaattggccgcggtcggtttctcagttgtatggactctgtttggcatcccgagtgcatcaggtgttatgcttgtgatagaccaatatcagagtatgagtttgctgttcatgaaaaccatgcctaccacaggccctgctacaaggagcgtttccatcctaaatgtgatgtttgcagtagctttccaaaggacagtcaatacataacattagatgatggccggag

SEQ ID NO: 75139 - DNA, 265 bp, Zea mays
aagattttcgccctttggcatattttttcggcattgaatgtcagcacaccacgcatgggctcatcctgtctcagaacaaatatattcatgatcttctcactcggaccaacatgctgacatccaagccggttgctacgccaatgctaccagctgataaattgcaaatccagggtggcgcaccactctctgctgaagacgcaaccagatatcggagtgccattgaggccctgcagtatcttcttctcactcggccagatattgcttt

SEQ ID NO: 75140 - DNA, 270 bp, Zea mays
acataatgctaataagtgacataaataaccatttgctgaaaaagtattactggcaacacatgtcctggaagcctgagttcagctacgatcaaccatggagggcacatcacttccacttcttgaacttgccgccgccgaacatgccgtgcccgtgcttgccatgcttgaacttgccgtgcccgtgctttgaacttgccgtggtggccgtgaccatgcttgaacttgccgtggccaccatacccgtggccgtaaccaccgtgaccatagcct

SEQ ID NO: 75141 - DNA, 269 bp, Zea mays
ggatcaccatccctgagataagtaaccatccatggttcttgaagaacctgccagctgacctaatggatgacagcacgatgagcaagcagtacgaggagcctgagcaaccgatgcagagcatggatgagatcatgcagatcctggccgaggcgaccattccagcagctggtacccgtggactcaatcaactcctgaacgacgacggccttgacctcgacgatgacatggacgacctggactcagataccgatcttgacctggaaagcagt

SEQ ID NO: 75142 - DNA, 266 bp, Zea mays
ctctaaacttgcctctcagcattctcatcaacaatgctggagtgatgacaaggagctgcacacgttcctgcgacggcctggaactgcatttcgcgacaaatcacattggtgtgtcctcttataccagtacacactacagctagcctttgctaagcgtattgttcgaattctaactactttctttgtgcgacatctcttgtttacattattctgtagaagagtatcccttgctcgtcttatgacctatgagaatgattcctgataat

SEQ ID NO: 75143 - DNA, 266 bp, Zea mays
agcgcgcgagagaaacgcgtatacccaggcggcggttgaggaagaggaggagaagaagaagaagatggcttcctccgcatacgcctcatggtccaagcggtccccccgtcccgaggtgtacccgctgttcgtgccgatggccgtggccttgggcatctgctcgtaccagcttgtgcgcaacatcacgggcaaccccgaggtgcgggtgaccaaggagaagagggcggccggcgtcctggacaaccacgacgagggcgagaggtacg

SEQ ID NO: 75144 - DNA, 267 bp, Zea mays
cacggacttgttttctgctgggagtgacacaagctccagctcagtggaatgggcaatcctggcgctgcttcgaagcccgggttcaatggctaaagcatgcgacgagcttgcaacagtcatcggcccaagacaagacatcgaggaatctgatattgggcggctgccctacctccaagccgtggtgaaagagaccttcaggctgcatcctgctgccccgctgttgctaccgcggcgtgcccaggccgacgtgaagatgatgggctacgt

SEQ ID NO: 75145 - DNA, 265 bp, Zea mays
cgcaacgactggttcgagaagcagacggcaggcacgctcgacatcctgtgccctccttggatggattggttccatggcggcctgcagttccagattgagcaccatctgttcccccgcctgcctcggtgccaccttcggaaggttgcgccggcggtgcgtgacctttgcaagaagcatgggctgacctattccgcagcctccttctgggacgcaaatgtgcttacatggaagacactcagggctgccgcattgcaggccaggagcg

SEQ ID NO: 75146 - DNA, 267 bp, Zea mays
cggctcgagaaaaaacaagattaaagggtgcgtagaaggaggaagtggtaagaaagccaatgaaaatgaaaatgtcacaagtaagaaaatgattcgtgggaggtttaagtgtccaaactgtggtgaatttggccacaggaaagcaagctataaatgtcctttcaatggaacaaagaaaagaaaaaggagaccaaggaaaaatgtgactaaaggttggtttccaaaagatttcgaagcttcgtcgcagctcatcctgcaagagaacga

SEQ ID NO: 75147 - DNA, 264 bp, Zea mays
gtacaatgaaagcatgatgaatgcactcaagtacaacttggaacaggtttgtgctcaccagagcaaggatttcaaggaaggctgcggcgatagcgaggtagatgacacggcgccctgtcgcgatggtggtgctatcaattttcaactgactccgaagggaagagacaaccgaaggatttgacggcttgcagggtctgcaaatcaagtgaggcatccatgctcttgctgccttgtcggcatctttgtctatgcaaggagtgcgag

SEQ ID NO: 75148 - DNA, 266 bp, Zea mays
cctgaatcagctagatggttttgactcgcgtggagatgttaaagttattctagcaacaaaccgcattgaaagtcttgatcctgctttgcttcggccaggccgtatagaccggaagattgaattccctctcccagatattaaaactagaagacgcatcttccagattcacacatcaaaaatgacattagctgacgatgtgaacttggaagagtttgttatgaccaaagatgagttctcgggcgctgatattaaggccatctgcacgg

SEQ ID NO: 75149 - DNA, 263 bp, Zea mays
agaatttgctccatctattccagagaagaacgttacttgcctgacccgtctggaccacaacagggctcttggccagatttctgagagacttaatgtccaagttagtgatgtgaagaatgttatcatctggggtaaccactcgtcctctcagtaccctgatgttaaccatgccacagtgaagacttccactggggagaagcctgttcgtgagcttgtctctgatgacgagtggcttaatggtgaattcatcacaactgtccaac

SEQ ID NO: 75150 - DNA, 263 bp, Zea mays
cagaatattgttcacttctacaatgcatttgaggctgattcatacgtgtacattgtgatggagctatgtgagggaggtgaactattagatcggattttggcaaaaaagaatagccgctatagtgagaaacatgctgcagtggtagtccgccaaatgctcaaagtagctgctgaatgccatcactcgtgggttagttcaccgagatatgaagcctgagaacttccttttcaaatcgaacaaggaggattcaccactaaaggcga

SEQ ID NO: 75151 - DNA, 262 bp, Zea mays
cccgggggctcttccactccgacgccgcgctgctcaccgacccggccaccagggcgtacgtccagcgccaggccacggggctcttcaccgccgagttcttccgcgacttcgccgactccatggtcaagatgtccaccatcgacgtgctcaccggccagcagcagggcgagatcagaaagaaatgcaacctcgtcaactgacaaataatacgtacattaattgctgctggttttgacgatgcctttcacttacgttcatccac

SEQ ID NO: 75152 - DNA, 258 bp, Zea mays
ccacgatatggtcttgaagttggtctgaccaactatgcagctgcctactgcactggccttctgttggctcgccgtgtgctcaagatccgtggtttggatcaggagtacgagggcaatgttgaggccactggtgaggacttctctgttgagccagctgatgagaggaggcctttccgtgctctctttcatgttggccttatcaggactacaacagggaaccgtgtctttggtgccctcaagggagcattggatggaggc

SEQ ID NO: 75153 - DNA, 261 bp, Zea mays
ccgattcgctaggcgcaatatatggtgccacactgccagctttgatgctggatgtcagcacagaaaccaatttcgttttccttgttcgctggcgtacgttcaggaaagaaggacgaggatcagcaagaggctgaagaagctgcaagaccttgtgcccaacatggacaaggtaagctgagcttaagatctgcaatgagccatagccattaagatctcgttgttgttcgttgccatagccattttcatcagcgtgtttattgg

SEQ ID NO: 75154 - DNA, 257 bp, Zea mays
gagcgccgcaacggggtacatcgactacgagaagctcgaggagaaggcacttgacttccgccccaagctcatcatctgcggtggcagtgcgtacccgagggactgggattacgccaagctcagggccgtcgccgacaaggtcggggccctgctgctctgcgacatggcgcacatcagcggatccgtcgccgcgcaggaagctgcaaatccttttgaatattgtgatgtggttaccacaaccacgcacaagtccctca

SEQ ID NO: 75155 - DNA, 255 bp, Zea mays
gccgtggacaatgctttggaaggataacaattgaagcaatggcattcaagttgccagtattgggcacggctgctggacggaccacggagatcgtcctggacggctcgactggccttctgcatcctgctgggaaggagggcgtggcgcctcttgcaaagaacatcgtcagactcgcaagccacgccgagcagagggtctccatgggggaaaagggctatggcagggtgaaggaaatgttcatggagcaccacatgg

SEQ ID NO: 75156 - DNA, 254 bp, Zea mays
ccagtgggtaggattcgtcaggacttgtccctggatgataaccgagggttggacatatttgtgtgtcgtgatcagatacgtaaaggtgccgcactcaatgccgttcagattgctgaaatgctgctgaagtgaatgcgacttaaccctcttgtccctccctccctccctgtccctaattgctctgatcaaatgctggactgtactctgattagtttgtcctcaattttggtcgcctgttctgtattctgcggtgc

SEQ ID NO: 75157 - DNA, 256 bp, Zea mays
  unsure (1)..(256): unsure at all n locations
cgcccgggagctctacacccgctacgagcctgtggcagagcggcgtgccgccgaggcctgggtggccctgaaccgtctccctctggtcccctcggtcaccagggccgtcctccccactgccgcacagctctctgccaggtacaattcggcggtgcctgatggtgccaagcgcgggaaccnccggccacctatctcccgctggtgcccactgagcggctcgcccgcgtgttcaggtacaccgtggctgacgttgctg

SEQ ID NO: 75158 - DNA, 254 bp, Zea mays
ccccaactctgcaggctgctcgtcgccctccctccacgccggacgcgccccgatccagatccaggggcgtaacatggcatcaaaacgtatcctcaaggaattaaaggacctgcaaaaggaccctccaacgtcatgcagtgctggtcctctggtgaggatatgttccactggcaggcaaccatcatgggtcctcctgatagtccatatgctggaggtgttttcttagtgaacattcatttccccccggattacct

SEQ ID NO: 75159 - DNA, 258 bp, Zea mays
cggctcgaggcgcagagaatccccaagcaaacaaacagggtagagggagaggagaggagaggagaggagaggttgggtctgggacaccatggctccgatgaagctgtacggggcggtgatgtcgtggaacgtgacgaggtgcgaacggcgctggaggaggctggctccgactacgagatcgtgcccatcaacttcgccaccgccgagcacaagagccccgagcacctcgtccgcaacccgtttggtcaggttccagct

SEQ ID NO: 75160 - DNA, 256 bp, Zea mays
cacggacttgttttctgctgggagtgacacaagctccagctcagtggaatgggcaatggtggagctgcttcgaagcccgggttcaatggctaaagcatgcgacgagcttgcaacagtcatcggcccaagaaaagacatcgagaatctgatattgggcggctgccctacctccaagccgtggtgaaagagaccttcaggctgcatcctgctgccccgctgttgctaccgcggcgtgcccaggccgacgtgaagatga

SEQ ID NO: 75161 - DNA, 258 bp, Zea mays
gcacagtccattatggccgtctcccttttgcgtgagaaagaaagagagcgagaagagcagtcgccatgtctggcatcatccacaagatcgaggagaagctccacatggggggcgaccacaagaacaaggaggaggagcaccacagaaggccgaggagcaccacaagaaggatgagggggacgaccacaagaaggacggcggggagcacaaggaaggcatcgtggagaagatcaacgacaagatcaccggcgagcacgg

SEQ ID NO: 75162 - DNA, 254 bp, Zea mays
cgtgaagcaagatgttgagaacagatctgctgatcaaagtgtggagacagggaagaatgattgtcgccatgccgagtgcaaggcagctgagattgatgattggttgcttcagtttgcagatttgttccggaaccaggttgggatgatgcagatgcacatttagacctgcatgagttgggcatggagctgtgctccgaggctctcgaggacactgtgacaagcatggaggctcaggtcctttttgagttggctgc

SEQ ID NO: 75163 - DNA, 257 bp, Zea mays
tccgtgctcatgaccttcatggtccgccacctcgccggcgatcccgcgaccctcgccgccatggttcaagagcacgacgagattgccaagaacaaggcccacggcgaggcgctgacctgggaggacctgcaccgcatgaggttccatggcgcgtggccctggagacgctgcgaatgatccctcccatcttcggcagcttccggcgggcgctggaggacatcgagttcgacggctactgcatccccaaggggtggcag

SEQ ID NO: 75164 - DNA, 256 bp, Zea mays
  unsure (1)..(256): unsure at all n locations
cgagggtgtggtcactcgttggggtgtcacccggcttccccgnaagacccacaggggtctccgcaaagttgcttctatcggtgcatggcatccggctagggtctcctatacggttgcccgtgctggtcaaaatgggtaccaccacgcactgagatgaacaagaaggtttacaagatcggcaaggctggacaagagacccacgatgcctccacagagtttgacaggactgagaaggacatcactcgcatgggcggct

SEQ ID NO: 75165 - DNA, 258 bp, Zea mays
gctgaatcagctagatggtgttgactcgcgtggagatgttaaagttattctagcaacaaaccgcattgaaagtcttgatcctgctttgcttcggctaggccgtatagaccggcacattgaattccctctcccagatattacaacagaagacgcatcttccagattcacacatcaagaatgacatcagctgacgatgtgaacttagaagagtcggatatgaccaaagatgagttctcgggcgctgatattaaggccatc

SEQ ID NO: 75166 - DNA, 253 bp, Zea mays
cgtgataccaaccttattcttcgggaattcgagaaatgtggagtaatattgagacatcactctggtccaagagatggaaattggatccacatattgtaccaggtaattatacatttatctactgttgtgcttccgtattctgttgtactatttactttaattttctctaactatgtttcacaaagtagtcatattagcttaggctgctctgtagctaaccagcgagattagttgccagtgaactgaaacaact

SEQ ID NO: 75167 - DNA, 253 bp, Zea mays
ctgcagcccccaactacccccagcctcggaaggaaccttccagaaccgcaagactctaaaggccgtcgccttcccattcttcctcgccgcgggggtcgcctgagatcacataaacaatggtgaaggctgttgctgtgcttgtagcagcgatggtgtcaagggcaccatctttttcacccaagagggagatggccctaccgctgtcaccggaagtgtctctggcctcaagcctggcctccatgggttccatgta

SEQ ID NO: 75168 - DNA, 253 bp, Zea mays
atcacacacccaactcctgaccttactggatacattactgagggacagatatacattgataggcagctccataacagacagatttatccacctattaatgtcctgccatctctttcacgattgatgaagagtgctattgtgagggcatgacacgtcgagaccattcggatgtatctaatccgctttatgccaactatgctattggaaaggatgttcaggccatgaaggctgtcgttggagaggaggcactctc

SEQ ID NO: 75169 - DNA, 253 bp, Zea mays
atctgaacttatcccacatgagattgcgaacatcgagaagagaggggcaaggaaagacaaggagaagaagcctgggatcgtggtgatccagggaccgaagcctgggaagccaacggacatggcacggatgcggcagatatgctgaagctgaagcacactcccccaccacacatgaagccacctccgccacctgccgcagctaccggaaaggatggagcaccagctgccgccgggaaggatggagctaagccag

SEQ ID NO: 75170 - DNA, 255 bp, Zea mays
cgcggacacagccccgatccgaatcgtcgtccttgcgagcctcgacgatcccgcactcacctcgccgcgcttcaagatgcagatctttgtgaacaccctcaccggcaagactatcaccctcgaggtggagtcttctgacacattgacaatgtcaaggctaagatccacgacaaggagggcatccctcctgaccagcagcggctcatcttcgccggcaagcagcttgaggacggacgcacactcgctgactacaac

SEQ ID NO: 75171 - DNA, 256 bp, Zea mays
ccaggatcatttcaagaagaaaccacgtttcccgataactctcaagtacatcgacccgacctacatgatccgcgccgtcagttcaaacgcttccgacaacgtctactgcactctgctagcccacagcgcgctccatggcgcatggcggggtacaccggcttcaccgtcgctccggtccatgccagacacgcctacatcccgttctatgtaagtcgagagggtcttgcgcttgtgcagttgagcttcctggacatcc

SEQ ID NO: 75172 - DNA, 248 bp, Zea mays
actcactatggagttgacattggtaggaagaagaaaacccctgctgcaaagaaggataatgctgagggacaagaggttgaggcagcagctgaggaaacgaaaaagagcaaccatgtcacgaggaagcttgagaagcgaaggagggacgtacccttgacccacacattgaggagcaatttggcagtggacggttgctggcatgcatttcttcccgccctggacagtgtggccgagctgatggggacatc

SEQ ID NO: 75173 - DNA, 248 bp, Zea mays
atccgttctaacgactggaagatcaatggcatcgtgaacggcatcgaccaccaggagtggaaccccaaggtggacgtgcacctgcggtcggacggctataccaactactccctcgagacactcgacgctggaaagcgcagtgcaatgcggccctgcagcgggagctgggcctggtagtgcgcgacgacgtgccgctgctcggcttcatcgggcgtctggatggacagaatggcgtggacatcatcggg

SEQ ID NO: 75174 - DNA, 249 bp, Zea mays
caaatattaagaggtctcaaaataagcagacgccagaagagctaaaacacgtcaaaaacaggtctatgtctcccttcgggtcctccgacgtgggcctgtctcctccttttcatcctctttctcatccttgtcaccacgcttccagcaccgtccgtctccgcggccttgggcttctttccctcagctgcaggtttcacaggtgccactggtttcttgccaccaaacaggagcttgaagagaacggtaacg

SEQ ID NO: 75175 - DNA, 231 bp, Zea mays
caccgctcttgaagagcattttggatcatgtggagatatcacccggatttcaattccaaaggattatgacactggtgtaagcaaaggaatggcgtacatggatttcaaggacccagattccttgaataaagcatacagttgaatggaaccgaccttggtggctacagcttgtatgtcgatgaagccaagccgagacctgataacagcggtggcttcagtggtgacaggggt

SEQ ID NO: 75176 - DNA, 248 bp, Zea mays
atcaacctcgacctcaagaaaggcggcaacgggcgctacctcaagacggcggcctacgggcactttgggagggacgaccccgacttcacctgggaggtggtgaagcccctcaaggcggagaagccgtcttctgcagaggcgcctcctctgttttggaagaagcttttggtctgatctggtctggtctggtgtgcctccgctctatcatgcttttttatggctcctacttgtgattcttgctctgcccc

SEQ ID NO: 75177 - DNA, 249 bp, Zea mays
ggatcaccatccctgagataagtatccatccatggttcttgaagaacctgccagctgacctaatggatgacagcacgatgagcaagcagtacgacgagcctgagcaaccgatgcagagcatggatgatatcatgcaatcctggccgatgcgaccattccagcagttggtcaccgtggactcaatcaactcctgaacgacaacggccttgacctcgacgatgacatggacgacctggactcagataccga

SEQ ID NO: 75178 - DNA, 245 bp, Zea mays
cctccaagcaactagctggattcaataagcattgttactgttccatcagataacagttgctaccggacgagaccagacacagcagcacctaactacagcaagacacgcgaacatacgagggaagcctgcaagggaggccacgcagcctaggacgaggtgaacttggtgacggccttggtgccctcggagacggcgtgcttggcgagctccccggggaggacgaggcgcacggaggtctggatctc

SEQ ID NO: 75179 - DNA, 239 bp, Zea mays
caagttggtctgaccaactatgcagctgcctactgcactggccttctgttggctcgccgtgtgctcaagacccgtggtttagataaggaatatgagggcaatgttgaggccactggtgaggatttctctgttagccagctgatgagaggaggcctttccgtgctctcttggatgttggctttattaggactacgactgggaaccgtgtctttggtgccctcaagggatctttggatggt

SEQ ID NO: 75180 - DNA, 225 bp, Zea mays
agcgcgcgagagaaacgcgtatacccaggcggcggttgaggaagaggaggagaagaagaagaagatggcttcctccgcatacgcctcatggtccaagcggtggatccgtcccgaggtgtacccgctgttcgtgccgatggccgtggccttgggcatctgctcgtaccagcttgtgcgcaacatcacgggcaaccccgaggtgcgggtgaccaaggagaagagggc

SEQ ID NO: 75181 - DNA, 221 bp, Zea mays
cgtgaagcaagatgttgagaacagatctgctgatcaaagtgtggagacagggaagaatgattgtggccatgccgagtgcaaggaagctgagattgatgattggttgcttcagtttgcagatttgttccggaaccaggttgggattgatgcagatgcacatttagacctgcatgagttgggcatggagctgtgctccgaggctctcgaggtcactgtgacaa

SEQ ID NO: 75182 - DNA, 220 bp, Zea mays
atcacacacccaactcctgaccttactggatacattactgagggacagatatacattgataggcagctccagtgatgacagatttatccacctattaatgtcctgccatctctttcacgattgatgaagagtgctattggtgagggcatgacacgtcgagaccattcggatgtatctaatctgctttatgccaactatgctattggaaaggatgttcagg

SEQ ID NO: 75183 - DNA, 218 bp, Zea mays
cgatcctggccctatttcttttattttgattttgaataaatttacatagggttttaatcatggttagtccaaatgttcgtccaagaatcatcaaaaagcgcacaaagaagttcactcgccatcaatctgatcgctatgatcgtgttaagttgaactggcgtaaaccgaaaggtattgataatcgcgttcgtcgtcgctttaagggcgaacgtttcatg

SEQ ID NO: 75184 - DNA, 219 bp, Zea mays
ctctgattttacttctcagcggtagatcggctgagcgagcgagcgagcgaggcacacggagctagctaaacagagcacacggatagaaaagcaagatgtcggacggcacggcgacctgcatcgacatcatcctcgccattatcctgccgccgctcggggtcttcttcaagttcggcttgggggttgagttctggatctgccttatcctcaccttcttcg

SEQ ID NO: 75185 - DNA, 231 bp, Zea mays
accgagctttgagcctgaccgcagtatgcccacggcctgccgtcctctcggcaagttcgacctcaacggcattgcgccactccaaggggcacaccccagatcgaggtgaccttcgaggtggacgccaacggtatcctgaacgtgaaggcggaggacaagggcacgggcaagtcggagaagatcacgatcacgaacgagaaggggcggctgagccaggaggagatcgaccgc

SEQ ID NO: 75186 - DNA, 211 bp, Zea mays
ctttgagggtgagcgcagtatgaccaaggactgccgtcttctcggcaagttcgacctcaacggcattgcgccactccaaggggcacaccccagatcgaggtgaccttcgaggtggacgccaacggtatcctgaacgtgaaggcggaggacaagggcacgggcaagtcggagaagatcacgatcacgaacgagaaggggcggctgagccagg

SEQ ID NO: 75187 - DNA, 218 bp, Zea mays
gcacccactcacccgttgcctccaaactcatttctcccgagcgccgccgcgagcctctgttccagcttcgttcatggcttccctcaccggatccgctctctcctttgcgaggcccgtcaaggcaatcagcattaagtctgtctctttctctggtctaaggaaggatactgtagcctcccgcttgcagccagtgccacaaagattcgctgtctgctgtc

SEQ ID NO: 75188 - DNA, 221 bp, Zea mays
cgcccggcagctctacacccgctacgagcctgtgcgagaccggcgtgccgccgaagcctgggtggccctgaaccgtctccctctggtgccctcggtcaccagggccgtcctccccactgccgcacagctctctgccaggtacaattcggcggtgcgtgatggtgccaagcgcgggaacgcctgggccacctatctcccgctggtgcccactgagcggctcg

SEQ ID NO: 75189 - DNA, 226 bp, Zea mays
ctggtcatcaactatgatctccccacccagccagagaattacctgcctcgcattggtcgtagtggtcgtttcggtaggaagggtgttgccatcaactttgtgacccgcgacgacgagcggatgctgttcgacatccagaagttctacaacgtgttgattgaggagctgcctgccaacgtcgctgaccttctgtgatcattttgaagaaaaacagaactaaaagaac

SEQ ID NO: 75190 - DNA, 291 bp, Zea mays
ccagtctgcagccagtagtggtcggaactcagcaccttcatcagctccatcatctcgtccaagttctccgaatccacgaccccgagctccagtgcgaccacttaatatccctgatttcccaaatgaagctccaccaaatctaaggacaaaattacctgaaagaccactatctgctggcagatcacggcctggaatggctttaggcataagatcaaccccaaatactgaaccttcagccgcctcagctcctatgaagaaggtctctgtgtctgctgttagtcgaagtaaatt

SEQ ID NO: 75191 - DNA, 283 bp, Zea mays
ctcaactcttcttttcccctctccctcccctcgccgtcgctgtcgtcgccgtccgtgctagccatggatctaggcgctcccgcccgacggcgcctaccgatccgcctcttgctggtgttgctcaccgtcctcgtggtcctcacagcgcgctccagtgccgaagtcatcaccctcaccgaagagaccttctccgacaagataaaggagaaggacacggtgtggtttgtgcagttctgcgtcccctggtgtaaacactgcaagaaccttggaacactatgggagg

SEQ ID NO: 75192 - DNA, 278 bp, Zea mays
ccggtgtccattgctgatctgggcggcacggagatcgacctgcgcttcgcaaaccccaaggaaggccggctgttcgtcatcgtggccccagttcgccggttcgcagatgacctggacgacgcgaccatcgagaagatcggcagcccggagaaggtgatcaccgccttcggtccggaggtcatcggagagaacgtggaagggaaggtcctgtcctcggagacggcggcgcattcgggaagaacttactaccagttcgagctggagccgccccatgtgtt

SEQ ID NO: 75193 - DNA, 280 bp, Zea mays
gtggagtgccggggcctggaccacgcggacgcgctggggctcatcgccatcggcaaccggctgcgttgcatcagcaactggctggtggtggccctgcagaaactgcggcacccgcacgccgataacgggcacccgctggtgaggctgtacggcccgcgcgtcaagttcgaccggggcccctcgctggcgttcaacgtgttcgactggaagggcgagcgggtgtcgccgctgctggtgcagaagctcgccgaccgccacaacatctccctcacctgcggtt

SEQ ID NO: 75194 - DNA, 276 bp, Zea mays
tgcttggcgtctgcagtggtggtggacgccggcgacgcgccggagcccacggttcgtaacctcctggaccaggagtccctcaagtgggtcttcgtcggcgggaagggcggcgtcggcaagactacctgcagctccatcctctccgtcctcctcgccggggtccgcccgtccgtgctcgtcatctccaccgaccccgcgcacaacctcagcgacgcctttcagcagcgcttcaccaagttccccactctcgtccgcgtagtcaccaacctctacgcc

SEQ ID NO: 75195 - DNA, 276 bp, Zea mays
agcagccatcctctggaggtgacaccgggagtgtcgttccagctcaggctgcacgcgctgttccactggtcttcgtttggtttcttgatgcctctggggataatcctggtgagaatgtcgagcaagtgccgcggcggcagatgcgtcagagccctcttctactgccatgccatctcgcagactgtggccgtcctcctcgccaccggcggcgctgttctgtcgctgatgaacttcgagaactccttcagcaacagccaccagagagtggggctggcg

SEQ ID NO: 75196 - DNA, 279 bp, Zea mays
gccattattgagtgccgatccatctatcatctcccgcgatcttgaaccaaatgactgtttcatcatattcgcatcagatggattgtgggagcacctcagcaatcaagaagccgttgagattgttcacagccatcaacgtgctggaagcgcaagaagactcattaaagccgctctacaagaagcagcgcggaagcgtgagatgcgttactcggatcttacaaagatcgataagaaagttcgcaggcatttccatgatgacattactgtcatcgtcttatt

SEQ ID NO: 75197 - DNA, 275 bp, Zea mays
aagaaggcaaatgagggggcgctctcgattgatgacatggcaggaggaacattcactatctccaatggtggtgtctatggaagcctcctcagcacacctatcatcaaccccccacagtcgtcaattctggggatgcattccattgtgcaacgccctgtggttgtgaatggtgacattctcgcaaggccaatgatgttccttgcgctgacatatgaccacaggctgatcgatggcagagaggctgtattcttcctccgtcgcatcaaggatgtcgt

SEQ ID NO: 75198 - DNA, 278 bp, Zea mays
gtctccaactcactagtactcagccgccgcaatcagggacaggtagctcgagcgcgcgctccacctgctccgacgcgatgcgggccaagtggaagaagaagaggatgcggaggctcaagaggaagcgccggaaaatgaggcagagatctaagtaggcgcatcttgtgaccgaggatggcgagcttctcctgcaccatggctgagacgcgttgggatgattgtctccctttgtagacgtgctttgctgtagacgtaggcgatgtaaaccgtcctttttg

SEQ ID NO: 75199 - DNA, 273 bp, Zea mays
tgtcaatacagattgtttttacatgcatggtgtatccagcattgatccttgcatacatgggacaagctgcttatctgtgtaagcatcatatcatggaaagtgactacaggatcagattctatgtgtctatgccagcagttgtgggaagccaagccgtcatcactggtacattctcaatgatcaagcagtgcgcttctctgggctgctttcctcgggtgaagataatccatacatctgccaaagcacacgggcaaatatacatccctgagatca

SEQ ID NO: 75200 - DNA, 270 bp, Zea mays
caagattcaaaatatggtgtgatgattatttctatattaagcaccgtaatgagcggcgtgggctaggtggaatattttttgatgaccttaatgattacgatcaagaaatgcttctcaactttgctacagaatgtgcggactctgtacttcctgcgtacataccgatcatagaacggaggaagaacactccgttcaacgaggagcacagggcatggcagcaattgcggagaggtcgttatgtggagttcaaccttgtctacgaccgtggta

SEQ ID NO: 75201 - DNA, 272 bp, Zea mays
ctgaagtctggtggcaatgcttatgtgattggagatgcagcaagaccaggacagaagtggcacatctactacgccactgagtacccagagcaaccaatggtcaaccttgagatgtgcatgactggtctggacacgaagaaagcttcagtcttcttcaagactaatgctgatggcaacacaacatgtgccaaggaaatgacgaagctctctggtatctctgaaattatccctgagatggagatctgtgattttgacttcgaaccctgcggcta

SEQ ID NO: 75202 - DNA, 172 bp, Zea mays
caactagcacagcagttcaaacaagtctcatcaatgagtgcatatggcatggtcatctgctgctgttgatgctgaagttgttgctggtttagttgctgttgctgttgctgttgaaggtgctgctgctgattaatctgctgtagttggctgctgcctagttctagatcgcact

SEQ ID NO: 75203 - DNA, 282 bp, Zea mays
gatccccaagggctggaaggtgatgcccctgttccggaacatccaccacagccccgaccacttcccctgcccggagaagttcgacccctcccgattcgaggttgctcccaagcccaacacgttcctgccgttcggcaacgggacccactcgtgcccgggcaacgagctcgccaagctggagatgctcgtgctcttccaccacctcgccaccaagtacaggtggtccacctccaagtccgagagcggcgtgcagttcggccccttcgcgctgccgctcaacgg

SEQ ID NO: 75204 - DNA, 280 bp, Zea mays
ctacctcacatcatggtaatgacaacttggacaaccatagtacaaaaggaaatgcagttctgtcacagcaacatcgcattcataagtaatgacacccatctagtacctaacatcaccacgagcacctcaaacgactcagtgctgactagcagtgatacaagggacatcatatctttaccaagcacttgggatgatggcttaggcagcaggatcttcctcttcttcctcctcgtactcctcatcctcagctgtggcgtcttggtactgctggtactcggcc

SEQ ID NO: 75205 - DNA, 282 bp, Zea mays
gaggccaaccgagagcaggataataaaacaccgatcctgaataaaacgaaatcgtataccaagaaatttacatcctcttcggtaaatatgaattcaccagatggtgcccagagttctggattattactacaagatgagaaggacgatgaggtcgagtgccaactggaacattactataaagatttcagtgatttagatccaaagaggcactatgctattcgtatattcaatactgatgacacttttacgactctctcatgtactccagcgactaccgtcgaa

SEQ ID NO: 75206 - DNA, 257 bp, Zea mays
gccgggatagagcttacgctgctggggttatgggcgagcccgttcgtgctccgggcgcgcatcggctcagcctcaaaggcctcacctacgcttactccgaggagaacctcgacgacaagagcgagtttctcctcagctccaaccccgtgctcaagaaggtgcccgtgctcatccaccacggcaagcccgtgagcgagtcccagatcatcgtgcagtacgtcgacgaggctttccccgccgccgcacctaatttcctt

SEQ ID NO: 75207 - DNA, 279 bp, Zea mays
gtttttgcaggtgcaaggatcaggtgaacccaccgaagaagggctacaagtttacgaaccaacctctgaaggaccttggcgtcaagttcacgccagtgcatgggtacctgtacgaagcagtgaagtccctgcaagacaaggggttcatcccgaagacctctggcgccaaggtgcctgaacgacgcagctgcatgcctcaaacgacatcacagccaccgcccgaaatcgtttcgaaactttgaggtggatctgcacacgtgctcaaactggccatgtttt

SEQ ID NO: 75208 - DNA, 272 bp, Zea mays
tgaagaacctggaatcaggacgaacactacaattcttcttggcaatattgcaagctacatgaatgatgggactaggaagagagtactgatcaatgcattcacagttcgtgcactacgtgataccttccctccggccagagcagctggaatcatggcactgagtgtcactggttcatactacgaaatgacagagattgcaactcgcatcctgcctaacattgttgtcctcacatttgacccagataggtttttatggcgctagaccaggcgta

SEQ ID NO: 75209 - DNA, 286 bp, Zea mays
cggctcgaggaaccatccgaagcgggcgagaggtcgcggtgaaggtcctctccgccgagtccaggcagggcatcagggagttcctgacggagatcgacgtcatcagcaacgtcaagcaccccaacctcgtcgaactcatcggctgctgcgtcgagggaagcaaccggattctcggtgtatgagtacctcaagaacagcagccttgaccgtgcgctgctggcttctaacagtgagcctgccgacttcacctggagcgtcaggtctgctatatgcctcggagtcgctc

SEQ ID NO: 75210 - DNA, 283 bp, Zea mays
attggttgagcttttagtggaacaaggagcggcggttaatatgcaaaatttcgttggagagacggcactctttattgcttcttctttgggattaaatttgatttgcctcttcttgcttgagaatggaggtgacacaagaatatctaccttagaaggatcatcacctcttcacgctgcatcagcatgtggtcatctttctgtcattaaatcccttgtttcacatggtgcctttgtgaattctacggacgaagaaggagatacgcctcttcattatgctgttaga

SEQ ID NO: 75211 - DNA, 272 bp, Zea mays
ggtatgcagatgttgttgaggaagtctctgttggagagggcaaggttgtgaagatcactggaatcaaggacatgggtaggaccgcaactgtacttgtcaggggatctaaccaattggttattgatgaagctgaacgcagtctccatgatgcactctgtgtcataaggtgcttggtcagcaagagatttttgattgctggtggtggtgctccagaaatagagatgtcaatgcagctggctgcttgggcaaaggagcttcgagggatggagagt

SEQ ID NO: 75212 - DNA, 275 bp, Zea mays
gtcatatctagctagtagctccctgaaaagttcactagagaagcatttgagggaggagccatgtctgaggagaagcaccaccaccacctgttccaccaccgcaaggcagaggaggaggaaggcgcctccggcgaggtcgactacgagaagaaggagaagcaccacaagcacatggagcagctcggccagctcggcgccatcgccgccggcgcgtacgctctgcacgagaagcacaaggccaagaaggacccggagaacgagcacggagcacgggt

SEQ ID NO: 75213 - DNA, 266 bp, Zea mays
ggttgaggagcgtctggtgtgtgtagatgagttgattaacgctgatgaagttttctgcacggggactgctgttgtggtgtcacctgtggggagtgttacatatatggggaaaagggtggaatatgacaaccaaggagtcggtgtcgtgtctcagcaactatacaagtgccttacaagcctccagatgggcaatgtggaggactggatgggttggaccatgcaacttaatcagtagcggatcacagatattgccttggcagatccca

SEQ ID NO: 75214 - DNA, 268 bp, Zea mays
gtttcagaagcccgcgggatcttcaggcaccctgccgccgtgccaaagatcaaggaagctaacctctccctgctaacctatggaacattgaacaacgtgccggaggcggtgtacatgcagcacctcatgggagtgaacggggtcatcgtcgacctggtgccggagatcaccgaggcagtctctgagctcatcgccctgcccctgcccgagcccgacctggaagtgggcagcttgagcaaccaggcggcagctagaggagccacaactc

SEQ ID NO: 75215 - DNA, 164 bp, Zea mays
acccacaacaatgttctaagtactcagccagtggtatttactggttgacctactgtagtttgcgtcggaatagatatgtttttttactcttcgtggggcagttttgtactggtggattcataaggactctgattatggtgcgttcggaacttataataataagc

SEQ ID NO: 75216 - DNA, 270 bp, Zea mays
gccgaactgtggagcaatttggtacccaaggatttatgaagttcttcccaaaacttggatacgaactgaggtccacgatccgacactatggtctttggaataccatgcaaactgagaatacggctgatatataatgctgcataagtggctactgtatatttggcccttacgggtaagaagttggcaatctttgtgagtcgatcaacgataacccaaatagaatcataccctttgaccgtcctgggcagtcccacaataaagtccatactg

SEQ ID NO: 75217 - DNA, 290 bp, Zea mays
cggtattcggctcgaggccttggatcgattgttcacaagaagaatgcatcagtcttgtgtcttaccactgtcaagaacgaggataagcttgagttcagcaagattttggaggctattaaggcaaacttcaacgacaagttcgatgaggtcaggaagaagtggggaggtggcatcatgggatccaagtcgcaggccaagaccaaggcccgggaaaagctgctcgccaaggaggctgcgcacggcatgacctagattgtctactgctgtgtctgccctgtagtttaacgggg

SEQ ID NO: 75218 - DNA, 271 bp, Zea mays
atgggcgaccaaggacaaggtgcagcaagccaactactacggctcgctcacccaggcctccaccatcagagtcggcagctataacggggaggagatctatgcgccgttcaagagcctccttcccatggtgaacccagacgacattgtgttcggaggctgggacattagcaacatgaacctggcatcgtccatgaccagggccaaggtgctggatattgacctgcagaagcagctcaggccctacatcgagtccatggtgccacttcccggt

SEQ ID NO: 75219 - DNA, 267 bp, Zea mays
  unsure (1)..(267): unsure at all n locations
attaatgctaggtagatttgatcgccagatagcaattgacaaacgagatataaanggccgtgatcaaatattccgcatatatcttaaaaagcttaagttggacaacataccatcattttattctcaaaggctagctgccttgacacctgggttcgcaggagctgacattgccaatgtttgtaatgaagctgctttaattgctgcgagaagtgaggaaactcagattaccatgcagcattttgagtccgcaattgataggattatcgg

SEQ ID NO: 75220 - DNA, 268 bp, Zea mays
gcatcatcgagtgccaaaaagtaaaaacgaagaagctccaaagacgttcctaagggaatgcatagcttataccgcctaagtaaaaggcgaagaagctccaaagacgttcctaagggaatgtagagcttataccgcctaagtaaaaggcgaagaagctccaaagacgttcctaagggaatgcagagcttataccgcctaagtaaaaggcgaagaagctccaaagacgttcctaagggaatgcagagcttacagcgaaaagtcaacgccg

SEQ ID NO: 75221 - DNA, 264 bp, Zea mays
gcccgggggtcctactccgccaggaccaagttcctcgacgacgaccgcaagtgctacctggagatcaactacaccttcgacatccgccgggagtggccgtcgacgagctgaccatccttccctccctccatcggtggcctgagcacaccagtcgtttcgttctgtgttcttccttttccgtgttgcctcgtcctgtcctgtccctaggtttttgtttgttcaccgtgttgctgcgtgcgtctatgtgcccttctccatgcgcca

SEQ ID NO: 75222 - DNA, 265 bp, Zea mays
ctttatgactaggaaattgcggttcaccatgccgttccccttgctcgcattcccgttatacttgttcgcaaggagtccagggaagtcaggatcacacttcaacccaagcagtgatttgttccaacctaatgaaaagaaggacatcataacatcaacggcatcctggctggccatggttggtgttctggctggtctcacctttctgatgggtcctgttacgatgctaaagctctacggagtcccatactttgtatttgttgcttgg

SEQ ID NO: 75223 - DNA, 263 bp, Zea mays
gttggagccagagaaagcggatgagttcaaaaagggtgtcgagggtgcaaccaagtttctccttagcaagctgaaggacctccaattttttgttggtgagtccatgaaggatgatgcgtctgtggtattcgcctattacaaggatggtgccactaatccgacattcctctatttctctcatggtcttaaggagatcaagtgctaggcgtgcggcgaaattagttacccatgttgggtactatctatgtactattattatatcc

SEQ ID NO: 75224 - DNA, 263 bp, Zea mays
gaaatttggccatgtcacatttttctggaacggcaaccgctcgggatactttgatgaaactaaggaagagtatgtagaagttcctagtgacagtggtattacattcaatgttgcacccaagatgaaggcgcttcaaattgctgagaaagctagggacgctctcctaagtggaaagtttgaccaggtacgtgtcaacctgccaaatggtgacatggttggtcacactggggatattgaggccaccgttgttgcttgcaaggcag

SEQ ID NO: 75225 - DNA, 173 bp, Zea mays
gcggtcttggaaggttgcagagaatgcatggggtcacggccgcaaccccaatggcattctcggccttctatgtagggagcacttccctagactggttgagtacagtggagtgactagacccagcttacacctgcaaccactacatcgtcgcactcgatgcagtagaccaggac

SEQ ID NO: 75226 - DNA, 255 bp, Zea mays
ggcgacggaggcgagatggggttggccgaatccgtgccggagacctccatacacgaattcaccgtcaaggattgcaacggcaacgcagtgagcctggaaacctacaaggggaaggtcctccttgttgttaacgtcgcctccaaatgtgggttcacggagaccaattaaccgcagctgacggagctttatcagaagtacagggacaaagacttcgagatattggcattcccttgcaatcagttcttgcgacaggag

SEQ ID NO: 75227 - DNA, 267 bp, Zea mays
tgaggacaatagggcaggtgaagccacccaaaaaggattttacaagtatgagggcaagaggaaagcgactcctgatcctgaaattatgaaatatattgaaaaatctaggagcatggcaggagttacaccagatcctgagctgatgaagctaagtgagaaagacatagtcgagatggtgtttttcccggtgataaatgaagcctgccgagtccttgatgagggtatcgccgtcaaggcttctgacctagacatcgcttcgatcttcgg

SEQ ID NO: 75228 - DNA, 259 bp, Zea mays
cggacgagttgcagttggatctcagatcggtgatcacataaacaatggtgaaggctgttgctgtgcttggtagcagcgatggtgtcaagggcaccatcttcttcacccaagagggagatggccctaccactgtcaccggaagtgtctctggcctcaagcctggcctccatgggttccatgtgcatgcacttggtgacaccaccaatggctgcatgtcaactggaccacactacaatcctgcgagcaaggaacatggagc

SEQ ID NO: 75229 - DNA, 256 bp, Zea mays
tgagaagagtctgcagaaggcagttgcaaaccagcctgtcagtgtcgcaattgaggctgctggcacagcatttcagctctacagctcgggtatcttcactggaagctgtggaacagcgctggaccatggtgtcacggccgtcggctacggcacagagaacggcaaggactactggatcgtgtagaactcatggggcagcagctggggcgagtccgggtacgtgaggatggagcgcaacatcaaggcgtccagcggc

SEQ ID NO: 75230 - DNA, 253 bp, Zea mays
caaaaggcccgatcccccctccccgccggttgccgcgctcgtgccacggtgcgctagccccgtcgacgccggcggacagcgtgcactatgggttgctcctcctccgtgccagctagaaatactggagggctgaacactatcagcaacgatagctctccagccaccagttcaaaggacttgcgtgctaagttggtattgctgggagactcaggtgttgggaaaagttgcattgttcttcgttttgttcgtggtc

SEQ ID NO: 75231 - DNA, 254 bp, Zea mays
tgagaagttcaccaccatcagcaacaaacatacgcactgactgagcatctttgtcaagacttccacttgcaaagccttgataggcactgtcaaagaacggaagcagtgattttgatctcatcagctgcctaatctgttcccactgttcgatggtaggatctactccagtagggttgtgagcacaggcatgcagcagtacaattgaacctgaaggagcagaaccgaggtcttccaggagtccttcgaagtgaagg

SEQ ID NO: 75232 - DNA, 256 bp, Zea mays
ccgaagaggatggcgagcggcaagccgatgacatagaaggccaccaggttggtccacgccgccaggtgctgccacccacagcccctggcgacgccgcagagcaccccctgcgtggagtccagcacgacggagccgatgagcagcggtgtcatggaggcgaaggcgctgaccacgacctcgctggtggtgaagaggcgcacccagaggtcatggccgaggcccaggagcagcaggaacgccacccccagcatcaggg

SEQ ID NO: 75233 - DNA, 261 bp, Zea mays
aaacaagttaagcccaatagttttggtctgagtacctatgatatattggcatcagatgacaaggatttgaaccagtatgtttccgttaagaagctagctccttacagagaggatgaatggaaggttacacatcataagaagcagagcaaggatttgatccttggaggccagaagaaggaagggaagaaggacaaatctggcaagaaatctaggtctgacgaagaccctagttcttcaaaaacagagaacgacaggatgaca

SEQ ID NO: 75234 - DNA, 258 bp, Zea mays
cggcaacggcttccgctgcgtccgcatggtcaacaacatctacctcaacttcgacgccttccacggcgacaaggcccacggcggcgtccatgacggtaccgagatcgtgctctggaagtggtgcgagggcgacaaccagcgctggaagatcctcccttggtgaacgaacgaaagaaactactagctggtaccctaataataattctgctggctgcggcgatcccaaaataaaagaggccgggtgcgatgcatctcgga

SEQ ID NO: 75235 - DNA, 252 bp, Zea mays
ggaaaacctggaggcgaactgcccttcctgaagccagtggtggagcaaccagcaatcaagacggtcttggaggcctaccttccccagattgcactcattgtgttcctcgcattgctacctactcttcttatgtttctctcgaaacaagaggggatcccttcgcagggccatgcagtcagggcggcatcgggaaaatatttctatttcatcgttttcaacgtcttcctttgctatacgcttggaagcacattg

SEQ ID NO: 75236 - DNA, 253 bp, Zea mays
ccacgacaaagggggccaagcccaagtgttgtgtgaccttctcggcgtactacaacgactcagtgatcccctgcagcacctgcgcttgtgggtgccctgcaaacaggcgagggccaacgtgcagcaccaccgcacaatccatgctgctgccaccggaggcgctgcttgtgccaatacaaaaccggtcacagaaggcgttggcgtgggctgagctgaagcattacaatgtgccccggccgatgccttgcggtga

SEQ ID NO: 75237 - DNA, 248 bp, Zea mays
ggatgatccatacatttacgccttcgacagcttgaagtacattggcattgagctgtggcaggtcggtgttggatagtcggatcttctctctcttgttcagaaggacataacagttatgcctctttttttgtttttctatgtacaggttaaatcgggcactctgtttgacaacatcatcatcactgatgaccctgccttggccaagacttttgcagaggagacctggggcaagcacaaggaggcagaaa

SEQ ID NO: 75238 - DNA, 253 bp, Zea mays
  unsure (1)..(253): unsure at all n locations
gagaagctgaggcctagcgccgcacccgccgccgcatcagccatcagccatggcgatggccgctcgcctcgtctcgcgctcccgtcagctacattcggttcaagcagcttttgcgaatggaggtgccactcaagttcgctcctttgccaaggatgcagctccagctgaccgtcctcctgttggtggggnatgatctcggaagggcatattctttgaggtaaagaagaagtttgagacagctctcggcgtcctt

SEQ ID NO: 75239 - DNA, 246 bp, Zea mays
gcaagagcgacagagagagagaccgacgcgccggcagatcccaagctcaccggagagggggaagagggcgaccgaaggcggtgatgggtatcatcatggacttcgcggagaatctgatcctccgtctgatggaggacccggacaagcgcgaccaggttcggcgggagcatgtctacaagatgaaggagcggtgcgagcgcactaaggcggcgtggagcctccctctgcgcccctacggcttctgga

SEQ ID NO: 75240 - DNA, 253 bp, Zea mays
gtaacaatctggtggttcaaaagcgaagacagctgaggctattacggttgcaaaattggatattagagtgggacttatcagaaaagcagagaagcatccagatgctgattccctttacgtggaggagattgatgttggagaggacacaccaagaacagtggtcagtggcctcgtcaagttcatacctctcgaagaaatgcagaaccggaaagtttgcgtactctgcaatctgaaacctgtggcaatgcgtggt

SEQ ID NO: 75241 - DNA, 250 bp, Zea mays
tacccttagtgatgagcttaaaaagctcaaggaatttgcaaaggatttgccacctgagctcaaaggactggctatagtcaactgcgcaagattcgtatgttaaacaattcgtttgcgaggtcagaggcctctgaggagcagaaaccacctagcggggatgatgatgtataccatttcataaactacgttccagtggatggtgtcctgtacgagctcgatgggctaaaggaaggaccaataagcctaggga

SEQ ID NO: 75242 - DNA, 248 bp, Zea mays
cttagtgaaccacctgcatgcgtgctcacatagcctgtggtggcgcgcgatgctcagcctgtgtagcagggatagtgtcaagggcaccatcttcttcacccaagagggagatggccctaccactgtcaccggaagtgtctctggcctcaagcctggcctccatgggttccatgtgcatgcacttggtgacaccaccaatggctgcatgtcaactggtacacactacaatcctgcgagtcaaggacatg

SEQ ID NO: 75243 - DNA, 245 bp, Zea mays
atagcctgtattggaaatccgaagacgatgtagctggcataacaccactgaagaagagtggtcctcatagcttcttggtctcgcagtagcttctccatctcctgcatccggctttcctgtgcttcaggactgtactcgaaatcacggatctgaaaacccttctcgcgagcacggaccttaaagttgtcaacaaccttagcaaatagtgtcacagtgtagagagcatattcgttgtcttcatagag

SEQ ID NO: 75244 - DNA, 241 bp, Zea mays
ctcgagccgccgccaccgacggcgccattcgtctcctccccggcagctctggtgctgttggccgaccgtgggagtgctgtgactatgtcaccaaggacccgattatcagcaggccgccccggtggcgctgcaacgacgtggtggacaagtgctccgccgactgccaagagtgcgaggagtcgctggccggcgacggcttcgtctgcgatgactggatcttcagcctgctcgagcccccggt

SEQ ID NO: 75245 - DNA, 244 bp, Zea mays
gaccctttggacctctgacctcacggaggatggtgctgatgatggcaaagaagccccgaaaggtgatgctggagacggacagtaatcttgggagagcgcatattgttcgagcccattgtttgagatgctctatgctgtcgaagctgaagctgtgccgtgctattattgtagctgatctcctgttccctcacttcttcttttatattagtaggctggtagtgttcgacttagttccccattgctt

SEQ ID NO: 75246 - DNA, 254 bp, Zea mays
atctttatacaatatgttaaaaagttaaaaaaaaaaaaaaagggagacgtacaggtcgggctcatggaacccatatctaaggacagatgatctacagaccctgatgctgcggaaaagaggagcatcaacaccagtaagttaaggtcaccaccacatttacaaaaagtagtctggggtattccgagttgtgtctggctcaatttgacgaggtgccgggtcgaattgaaggaagttctggtccatgttttccccga

SEQ ID NO: 75247 - DNA, 255 bp, Zea mays
agcaggttatggatatgatggtggcgcaggagcaggatatggctatggtagagggtatggctatggaggcaatgctggctttgggtctagttttggtggtggttatggtggatccatgtatggaggtgctgcctatggtgcatatggtgcctatggtggtggcgcctatggaggaggtgcctacggaggcggtgcctatggaggtggtgctgcctatggtggcgccccaggtggttatggcactggcggatacgg

SEQ ID NO: 75248 - DNA, 255 bp, Zea mays
agaggttatcaagcacatagcgagtttcaacagtgacccgtccgttcatggcatcttggttcagttgcccttaccaaggcatatgaacgatgagaacattctgaatgcggtcagtattgaaaaggatgttgatggctttcatccgctgaacatcggacggcttgcaatgcaaggccgagatcttgtcattgtaccttgcaccccgaaaggatgcatggagttgctacaccgacacggagttgaaattaaagggaa

SEQ ID NO: 75249 - DNA, 260 bp, Zea mays
ggagccctggacagcagcagtgaactcgaggccgctccgccacctcgccactcgcctcttctcgctctcgccaccgggccagggaacggaccatccgatcggctccgtcatggctggagctgctgctctcaatgagggtatcctttcttccgtgtccgagaaaaatgttgctgctcacccatgcattgatttggagataggaccagaggctcctgaagtgttcaattgtgtggttgagattcctagaggcagcaaggtta

SEQ ID NO: 75250 - DNA, 254 bp, Zea mays
aaagccccacagctcgagcgctccgttgctagcctgcgcccccgaaaccacgagcgtaaaccctcctagtccggcggtgatggcatgcgtcggtggcagcggcggtggaggtggggacgacgcggagatgggcggttggacggggctgctccactcctccacgaagctcctcgagcaggcggcgccaaccccgcacttccctccccttcacaggaatctggaccagctcgaggcgctctccaccaagctcaagg

SEQ ID NO: 75251 - DNA, 252 bp, Zea mays
aggacatcagttgattatcaacctgtctacagtgatgctgaggccagattttttagtgactaccggtttgatgtatcgaaactggagccagtagttgccaagccacattcgcctgacaaccgtgccctagcaagagaatgcaaagatgtcaagatcgaccgagtctatattggttcctgcactggtggcaagactgaggacttccttgctgccgcaaaggtgttcttagcctcgggaaagaaggttaaagtt

SEQ ID NO: 75252 - DNA, 258 bp, Zea mays
  unsure (1)..(258): unsure at all n locations
acgcaattgtattcgtctggaacttcaagcagcaacatacaagataaangnngtctacagagcggnctggggcagcctgaatgtgagcattacatgaagacaggaacctgtaaatatggagcagcctgcaaatatcatcatcctcaatacttcagtggaccaaagtctaactgtatactgagtactctgggtcttcccctgcgtcctggttctcagcgatgtgcttactacgcacaccatggcttttgcaagtttggg

SEQ ID NO: 75253 - DNA, 252 bp, Zea mays
accattttcagatacccctacattgtatggtctaattcttcgagaccacctgcttgttctattgaggaagaaggatttcatccgtagttgcacagcgtctacactgaatgctttaaaccatttctcacatgctgagtttgctaaacgtggatcaagaaaacatgacaggattgaggaaattgaattatgtccagaagaactggaaatgtttgtagacttgcatccattcacaaacacatctccatatactgt

SEQ ID NO: 75254 - DNA, 174 bp, Zea mays
cctccacgggctcccaggagtaccgcgccctgacggtgccggagcttacccagcagatgtgggactccaagcacatgatgtgcgccgaggagcccgcgccacggccggtacctgacggcgtccgccatgttccgcggcaagatgagcaccaaggacgtgcacgagcagatgctg

SEQ ID NO: 75255 - DNA, 257 bp, Zea mays
gcgcaattgtattcttctgggacttcaagcagcaacatacaagaatatgtgtttccagagcggcctgggcagcctgaatgtgaacattacatgaagacaggaacctgtaaatatggagcagcctgcaaatatcatcatcctcaatacttcagtggaccaaagtctaactgtatactgtatactctgggtcttcccctgcgtcctggttctcagcgatgtgcttactacgcacaccatggcttttgcaagtttgggcc

SEQ ID NO: 75256 - DNA, 259 bp, Zea mays
tgccgtctcccttttgcgtgacaaagaaagagagcgagaagcagtcgccatgtctggcatcatccacaagatcgaggagaagctccacatggggggcgaccacaagaataaggaggatgagcaccacaagaaggccgaggagcaccacaagaaggaggagggggagcaccacaagaaggactacggggagcacaaggaaggcatcgtggagaagatcaaggacaagatcaccggcgagcacggcgacaagtccggcgac

SEQ ID NO: 75257 - DNA, 260 bp, Zea mays
gccttacctcctccgccggaccgctgctgtccgcctccaaccctccagttcgacgcaggcggcgacggcggcgcgccgagatgaaggtctccgtgaagacgctcaagggatctagcttccagatcgaagtggagcccaccgacaaggtactcatcggttgcgctcccgatctgtcgctctgtttctagttgctgatgtattggcggggctgcttcgctagatttggctgctttttaggtttgtttggggtctaggatttg

SEQ ID NO: 75258 - DNA, 270 bp, Zea mays
gttgccaataatactcaggcctacgtgacgcaagacgacaacctgatcggcacgctgacggtgagggagacgatctcgtactcggcgcgactccggctccccgacaagatgccgagggaggagaagcaggctctggtggagggcaccatcgtggagatggggctgcaggactgcgccgacaccgtcgtcggcaactggcacctgagggggatcagcggcggcgagaagcggagggtcagcatcgccctggaaatactcatgcggcccagg

SEQ ID NO: 75259 - DNA, 279 bp, Zea mays
ccaaagcccgtgcaatgctgtgtgacatatatcaccatgcgatctctgatgagttttcagtggctcgtgacttgcttttaatgagtcatttgcaagatggtgttcagctcatggacatatcatcacagatttcattcaatagagtcatggcccagttagggctgtgtgctttcagggctggtttgatatgtgaagcccatggttgcttgactgagctctactttacagggagggtgaaagaattgcttgcacaaggtgtgcaacaaagcagataccatg

SEQ ID NO: 75260 - DNA, 264 bp, Zea mays
gtacgtacacaggtacgtgtgtgtgatcatgtatgcttccagaagggtatcctagcttaatcagtcacgtcgtcaagtcgtcaatatggcaggttcgcgtcagggctttgtagtttgatagcctgtttcacgactcctcaataatcaagtagtgtaatgaaagtttggcggttcaaaaaaaaaaaaaaaaaaaaaaaaaaagaaataataacaagcatacaacaaaaacaaataaagactcggttcaaaaaatcaggggggggc

SEQ ID NO: 75261 - DNA, 272 bp, Zea mays
cgcatccacgcgcgccgccgccgcctcgcagctcgacgctcaccgcgcagcatggcggaacagactgagaaggctttcctcaagcagccaaaggttttcctcagctcaaagaaatccggcaaaggtaagaagcctggcaagggcggcaaccgattctggaagagcattggccttggcttcaagactcccagggaagcaattgaagggacctacattgacaagaaatgcccattcactggaactgtttctatcagaggcagaattattgctgg

SEQ ID NO: 75262 - DNA, 268 bp, Zea mays
acggcgtgcagattgccatgtctggatgttatgcaggacctatgtttaatacacttgctggtttgggtatatcaatgctgcttggagcttggtcaacggcacccaattcggatgttcttccgcaagaccactctcttatttacacaatgagctttcttgttgctggattgatctgggctcttgttatgctgcctagaggtgacatgcggcctaacaagatacttggagttggcctcatttctctttactcagtttttctttttattag

SEQ ID NO: 75263 - DNA, 274 bp, Zea mays
gcaaggagggtttatgctttcagggatactgtctcttcaaaactcagtgaggaaggcaagcttaagaaacttggtgatcttatgaacgagagccattacagctgcagcgtgctatacgaatgcagttgccctgagctggaggagcttgtgaaggtctgcagagacaacggagcactgggagcacgtctgacaggagctgggtggggtggctgcgcggttgctctggtcaaggagcccatcgtccctcagttcattctgaaactaaaggaaatgt

SEQ ID NO: 75264 - DNA, 281 bp, Zea mays
gtgctggtatcaatgctagctttgctgttcaccaggatgttgatggaagggcaacagatgtagctctagggtggtcagtagctttaggttctcctttcacatttgctactactctagagcaggagtaccggagtgacatttttggcgagcgaggtattttgcttggtgctgtccatggcatggtggaggctcttttcaggagatacacagaacaaggaatggacgaggactcagcatataagaatactgtagagagcatcactggaattatatcgaaaact

SEQ ID NO: 75265 - DNA, 270 bp, Zea mays
gaactatcaaagctaggtttgatggaaataactagaaaaagggtccgaccaagcgttactttcatgatcagtgagccatgtacatgctgccatggtactggtcgtgtggaagctcttgacacatcgttttcaaagatcgaacgtgaaatatgtcgacgtcttgctgcctctcgacgaaaatcagacgctgagaaaccaaaatcatggccaagatttgtgcttagagtggatcatgagatgtgcacgtatttgacgtccggaaagaagaca

SEQ ID NO: 75266 - DNA, 273 bp, Zea mays
ctgttcaagttagcgccgctaatccgctccctattcaccatccaatccaatcggcttcccccaggcacccatggcgacggcggtggaggttcccgtggaggcgccggtgaggacagtgaaggtcaccaatgtctctcttagtgcaactgtgcaagacattaaggagttcttttccttttcaggagatattgatcatgtggagatgcagagtggtgatgagtggtcccaagttgcatatgtcactttcaaagatgcacaaggcgcagaaacagc

SEQ ID NO: 75267 - DNA, 278 bp, Zea mays
gaaaaggagaaggctgaggaggaggctgctgctggtgcagatggtctttctgagttcctgttagaagatttttgacgtcctgtacaagattgctgatgttccgttcttggcaccctacaaaaccaagatcattgatgttatcgagaagggagagaagcagcccaacatcactattggcattctggtctccgttgtcgtcgtgttcgttaccgttctcttcaagatcctgtttggaggcaagaagccggtggcacctgtgaaacctgcagctgaggcga

SEQ ID NO: 75268 - DNA, 269 bp, Zea mays
gctgctcaggcctcgaggaaatcctcaccccgtgtgaccaatgaagaagtccagaaggctgctgctgctctcaagggctctgaccaccgccgtgcgaccaacgttagtgctagattggatgcccagcagaagaagcttaacctccccatccttcccaccactacaatcggttcgttcccacaaaccgttgagctcaggagggtccgccgtgagtacaaggcaaaaaagatctctgaggaggaatacgtcactgccatcaaggaggaaat

SEQ ID NO: 75269 - DNA, 266 bp, Zea mays
gcggcttgtagattaggtgaatcctcgttcacacagtttgacccacttgggttctggcagccacatgagcatgtcgggcagttcacaattgtgtcattataaaatgatgagagagatacacagcaggacggagtcttctgagcaagaaattgggaatatgtgcaggtcacattccatgtcattagagcttgggttaccctgcgcccatccgcagtgaaaaactttgttggcctgccaacaatagcacgcccacatgtgtacccagg

SEQ ID NO: 75270 - DNA, 276 bp, Zea mays
ccagattcgcttaaggctgaaaggcggatggaagctctcatatagtcggtgaagacaaagaacgttgcacaataaggtatcagaccagggctgtgaacagcgatgccattcgaaatggcacccatagcatgctctcgcacaccgaagcgaatgtttctctcttcaggagtatccctctggatttctccaaacttcttaagcagtgtcatgtttgacgttgcgagatccgaactacctccaagaaatccaggtattactttggcaagtgcattcaag

SEQ ID NO: 75271 - DNA, 271 bp, Zea mays
catctccatcctcaccgtcatgggcgtctccaagtccacctccaagtgcgccggcgtcggcatccagggcatcgcctggtccttcggcggcatgatcttcgccctcgtctactgcaccgccggcatctccggcgggcacatcaacccggcggtgaccttcgggctgttcctggcgaggaagttgtccctcaccagggcggtgttttacatcatcatgcagtgcctgggcgccatctgcggcgcgggcgtcgtcaaggggttccagcagggg

SEQ ID NO: 75272 - DNA, 260 bp, Zea mays
gccttccctcctccgccggaccgctgctgtccgcctccaaccctccagttcgacgcaggcggcgacggcggcgcgccgagatgaaggtctccgtgaagacgctcaagggatctagcttccagatcgaagtggagcccaccgacaaggtactcatcggttgcgctcccgatctgtcgctatgtttctagttgctgatgtattggcggggctgcttcgctagatttggctgctttttaggtttgtttggggtctaggatttg

SEQ ID NO: 75273 - DNA, 290 bp, Zea mays
tcgagatcctgctccacctccccttgttatctgaggataagaacgtgccatatgtgtttgttccatcgaagcaagctcttggccgtgcttgtggtgtgacaagaccggttattgcttgctcagtgaccagtaatgagggtagccagctgaaactacagatacagggtctcaaggactccattgagaagcttctcatctgatctgccgaagacctttcagtgtgatgggcctcatcgacacttttttcataggcttggactggtgatggtgtcttgtttactttgcgcttt

SEQ ID NO: 75274 - DNA, 314 bp, Zea mays
tatctctgatactagaatcggctcgaagccgctcacgttgccgatgccgaggccgcgttccccgatgcctgggacgccgagtacctctgtcatggaccttgtgtacgagtacacgctgctcgtcgatggcttcggtttggagccgaccaaggagttcacgctggtgacaaaggtgaagtacggagaatactacgtcgacgcagcatggccgctagcgatgcgatagaaaccttgtcgtcccagaagctgaaccaaatcgcgtgaccagtaataataatgcttaatggagtggtaaaaagacgacgtgctacagt

SEQ ID NO: 75275 - DNA, 265 bp, Zea mays
ctcgagcgtgctcgagtgcaagcgacggcgacgacgcccccgcgtacgtggtgatgcttccgctgctggaggggcaatttcgggcagcgctgcaggggaacgaccgcgacgagctgcagatctgcatcgagagcggggacaaggcggtgcagacggaccaggccgcgcacatggtgtacgtacacgccgcccacaaccccgtcgacaccgtcaccgccgccatacaggacgtggagaagcacctgcagacgttccacacaagata

SEQ ID NO: 75276 - DNA, 287 bp, Zea mays
ttaacaacaatgaggggtagattgaaggatggtggggttgttctaggtggactgaaggaatatctcaagacaattaggcgctgtagaagggtggtatttattggtttcaggaacaagttacaatgctgccttagctgcaagaccttttgtggaagaactgactggtattcctgtgactatgtaggttgcaagtgacttgctggacagacaaggtcccatctacagagaagacactgcagtttttgttagtcaatctggggagacagcagataccctccttgctctag

SEQ ID NO: 75277 - DNA, 279 bp, Zea mays
gcgccttcctcagcgactcctactggggccgatacgttacgtgcgccgtcttccagatcatctacgtgacgggcctggtggtcctgtcgctcgcgtcatggctcttgctggtgaagccgtccggctgcggcggcgtcaaggcgcactgcgacgggccgtcggcgcccggcgtcgcgctgttctaacggtccacctacatgatcgcgttcggcaacggagggtaccagccttccatcgcgacgttcgggtcggaccagttcgacgagacggacgccgagg

SEQ ID NO: 75278 - DNA, 269 bp, Zea mays
tcaaggagggtttatgcttgcagctatagtgtcacttcaaaactcgattccggaaggcaagcttaagaaacttggtgatcttatgaacgagagccattacagctgcagcgtgctatacgaatgcagttgccctgagctggaggagcttgtgaaagtctgcagatacaacgtagcactgggattccgtctgacaggagctgcgtggggtggctgcgcgtgttgctctggtcaaggagcccatcgtcgctcagttcattctggaactaaag

SEQ ID NO: 75279 - DNA, 287 bp, Zea mays
cacctcgcctgcgatcttcgtagcctccgtcgcgtcgagcatcgatcatgtcggcctactgcggaaagtacaaggatgagctcatcaagaatgctgcctacattggcacccccggcaagggtatccttgctgctgatgagtccactggcaccattggcaagcgcctttccagcatcaatgtcgagaacgttgaggagaaccgccgtgccctccgtgagctcctattctgctgccctggtgctctccagtacatcagcggtgtgatcctcttcgaggagaccctgtac

SEQ ID NO: 75280 - DNA, 288 bp, Zea mays
gggggcgccttctccggcaaggacccgaccaaggtggaccgcagcggggcctacgtcgcgaggcaggctgccaagagcatcgtcgccgccggcctcgcccgccgcgccattgtccaggtctcctacgccatcggcgtgcccgagcccctttcggtgttcgtggacacgtacggcaccggcgctatccccgacaaggagatcctgaagatcgtgaaggagaacttcgacttcaggcccggcatgatcatcatcaacctcgacctcaagaaaggcggcaacgggcgctac

SEQ ID NO: 75281 - DNA, 278 bp, Zea mays
gagctcgtagagtgctcgactgacggagggaacagcggctgcaacggcgggctcatggacgccgctttcgatttcatcataaagaacgggggcatcgataccgaagatgactacccttacagagccgtggacgggaagtgcgacatgaacaggaaaaatgccagggttgtgagcatcgatgtccttgaagatgtgcctgagaacgacgagaagtcgctgcagaaggcggttgctcaccagccagttagcgttgccattgaggccggtggccgggagtt

SEQ ID NO: 75282 - DNA, 271 bp, Zea mays
gagagccaagacacgggcaattctgctggactacgatggcacgctgatgccacaggcgattaacaagagcccgtccactgaatctgtgcggatcctgaacagcttgtgccgagacaaggacaatgtggtgtacctatgcagcgggtatgaccggcgcacccttcatgagtggttcccttgtgagaaccttggcatagccgcggagcatggctacttcctgaggtgtaagagggacgcggaatggaagactgtgtcgctgccacagactgca

SEQ ID NO: 75283 - DNA, 274 bp, Zea mays
cgcgactgcttctccatccttccacgaactagacgaggtaagagcgctgaagcctgaagctgtggaggaaaacgaaggatctccccgtgcttgtgtatgccaggtcgcctgctctccgtccgcatcccgtccctcgcgaaactcggcgctcccagcaggtgtgcaaaatccatggcttcagacactggcaagaagctcatccagatcgatgtgagctcggacacagtatgcccttggtgctttgtcggcaaaaagaacctcgagaaagcgatgg

SEQ ID NO: 75284 - DNA, 273 bp, Zea mays
agatgctgtccctccgggacacggtcaggatcgctcttgatgtcgccgacgctctggctttcatgaacagctacggcattgcgtaccgtgatctcaatgctcggaagatcctgctggataggcaagggaatgcttgcctcggggatatgggcattgttaccccttgtagtaatgttggtgaggtcactgagtatgagacgtctgggtaccgatggctggctccagagatcatcgctggagatcctgaaaccgtctccgagacctggatgagca

SEQ ID NO: 75285 - DNA, 284 bp, Zea mays
cggcgaaccaccgggaccggatcctgaggctggtgaagggcctgtcgcccaaggtgctcacgctggtggagcaggagtccaacaccaacacggcccccttcgcgcagcggttcgcagagacgctggactactacacggccatcttcgagtccatcgacctggcgctgccgagggacgacagggagcgactcaacatcgagcagcactgcctggcccgggagatcgtgaacctggtggcctgcgagggcgaggagcgggtggagcggcacgaggtgttcggcaag

SEQ ID NO: 75286 - DNA, 275 bp, Zea mays
cgggttggttcaggcgagatggtcgttcgtaaacaaggatgagaacttgctgaccaggcttcagaacataaatctttgcttccacttcgaggtggagcagcaggtgaacggggcgtttactcaacttcttcgggttcaatggcaccgcgggagtctggagaatcaaggcgcttgaggagtctggaggatggatggagaggacgacggtggaggacatggacatagctgttcgagcgcacctcaaagggtggaagtttctctttctaaacgatgtc

SEQ ID NO: 75287 - DNA, 279 bp, Zea mays
cgctggcccaaggtccgtggtgtggccatgaaccccgtggagcatccccacggaggaggtaaccaccaacatatcggtcacgcctctactgtccgccgcgatgctccccctggccagaaggtcggtctcattgcggctaggaggactggaaggctcagaggccaggctgctgccacagcctccaaggctgacaaggccacctagagtattgttgttcttgttttatctatccctctgctgtgatttattagatggttaaaaaggacgtgttccgctatg

SEQ ID NO: 75288 - DNA, 173 bp, Zea mays
ggagaggtaacgccacggccgccgtggcgttcttcgcgttcctcctcctcctcttgctcccgctcctcgtggccgccgctctccttggggccaggaagcgtaccccttctcgcgccgcgagccgagcacctcgtccacctcctccgccttggaggcctagttctagatcgcga

SEQ ID NO: 75289 - DNA, 271 bp, Zea mays
gcaacgtaaagtagcttaccgctgcaggacactgcaggagagttattgctgtagagggcaatgttataagtcatgttcctggtgagggtgaatcttgctttgattggaaccgaagaaagagtggtcatccatacaacaacaaagaacatggttgctcatctttgtttgtcgaacctctgaactggatgactccagtagaagacggcgctttggagggaaacgtatcatgcatccactgtggagctcggttgggatacttcaactggtcagg

SEQ ID NO: 75290 - DNA, 270 bp, Zea mays
ggcggactaagttcaggatggccatgaataaagctgataatgcttctagtacggtggcagttgactctcttctcaattatgagactgtgaaatacttcaacaatgaacaatttgaagttgagaagtacgacaaatatttaaggaattatgaggatgctgcattgaagatccaaagtagtcttgcctacctgaactttggccaaaatgttatctttagctcggctttatctacagcaatggttttgagctcatatggaataatgagtggtg

SEQ ID NO: 75291 - DNA, 283 bp, Zea mays
gtcttcgtggtgatatttctgttgctgaatgttaatggctggcacacatacttttggattgctttccttccccttattcttctgttagccattggcactaagctggagcatgtcatagctcagctagcccatgatgtagctgagaagcacacagcggtcgagggcgatgtgatcgtaaaaccatcagatgaacacttctggttcggcaagcctagggttatcctttacctgatccacttcatcctctttcagaatgcgtttgagattgcgtttttcttctgga

SEQ ID NO: 75292 - DNA, 269 bp, Zea mays
gcagaatgggatgcatgcgttccggtgatagactgcagctggaagcagatcgcagagcctgtgatgaagacctataccgagactacggaatggtcgactattgaggacaaggagactgccatcgtgtggtgctacgaggacgccgatccagatttcggatcctgccaggccaaggagctccacgaccatctggagagcgtgcttgcaaacgagccggtctcagtgaaagctggacccaacctcgtcgaggtgaagccacagggcgtaag

SEQ ID NO: 75293 - DNA, 266 bp, Zea mays
cgatttccccttaacacaacacagaggaagcaggcggcggcgatcgggcgatggcatggcgggcgagcctgtctcggagcctaaaggagatccgcgtcctcttctgtcagtcctccccggccagcgccgccgcccgtgagttcgtgaagaagaactatggtgacatcaaggctcgcaacccctccctccccttccttgtccgcgagtgctccggtgtccagccccagctctgggcgcgctacgatatggggtggagagatgcgtga

SEQ ID NO: 75294 - DNA, 269 bp, Zea mays
tcgctgggtactacaaaagtccagaactcacaaacgaagccatcgttgatgggtggtttcatacaggtgacattggagagatgaccccagacgggatcttgaaggtgattgacagaaaaaagaacatatttaagctgtcacaaggggagtatgttgcggttgagtacctggagaaagtttatggcttccctccactcgttgaagatatctgggtatacggggacagtttcagatcaagtttagttgcagtgtcaatccacaccaagaaa

SEQ ID NO: 75295 - DNA, 268 bp, Zea mays
atttgtgtaatcatcaacaatactctccaaaaactgtgcagctacattggcaaagcctccagaatcatccacaagaaactggataccctggatatggtcacattcttcaacaaagaaccttagcctctcattcatttcctccatttgggaccattctgaaaccacctcctttgcagttccatagttatcaaacctttcaaagtctgtccatgatccagacaactcatataagctctgagggtgatactgacttttgaataatcagtcc

SEQ ID NO: 75296 - DNA, 272 bp, Zea mays
gattatatagaatcagttcgtcgattgcctaaggccaggattcaagatttatttcagagaaaaaatatgtatgcagtcacggtgggtgttggcctgatgatttttcagcaactgggaggaattaatgccttaggtttctatacaagctatattttttcctctgcaggtatccaagctagataaattttgtcctcttaaaaaacgaggtatctacagctctttctaaaaacttcaggattttctggaaaacgtggaccaccttgattggcgtt

SEQ ID NO: 75297 - DNA, 265 bp, Zea mays
gagagctgcagattcagtttcggtatgcatttctaaaggtttaggcgcccccgttggatcagttattgttggctcgaaggccttcatcgacaaggccaaaattctccggaagaccctaggtggtggaatgaggcaggttggagttctctgtgctgctgctcatgttgccgttcgtgacaatgtgggaaagcttgcagatgaccacagaaaggctaaagctttggcagacggactgaataaaatcgacagttcagagtggattcag

SEQ ID NO: 75298 - DNA, 262 bp, Zea mays
tgatcaatgagccgaagaggccttcagacaagcccctgcgtctccccctacaggatgtgtacaagattggtggtattggaactgttcctgttgggcgtgttgagactggtatcatcaagcctggtatggttgttacctttggtcctagtggccttactactgaggtgaagtctgttgaaatgcaccatgaggctctccaggaggcccttcctggtgacaatgttggcttcaatgttaagaatgttgctgtgaaggatctgaa

SEQ ID NO: 75299 - DNA, 262 bp, Zea mays
gtttcatatgcccgcattcattgagattaatattggattaagtcatgcttctatctaggatggggttgttcttggggcagacacaagggcaactgagggccccatagttgctgataagaactgtgagaaaatccactttatggcaccgaatatatactgctgtggagcaggaactgctgcggacacggaggccgttacagatatggtgagctcccagctacagcttcaccgttatgcaacgggcgcgaatcaagagttgtaa

SEQ ID NO: 75300 - DNA, 260 bp, Zea mays
gcgtgaagcattggatcccaaagaactccaaaatgcgataaggccttgaatggactagtatcaggattgggagaccatcctgagaagctccatcaagcatgccttgttcacgcgtttcttaagaggcccttttcctgcactgttgatggttgcccctttagctatagcaggaaggatcatttgaacagacatttacttactcatgaagggaaactatttgtgtgccctgtcgaaggatgtggcgtaagttcaatatcaag

SEQ ID NO: 75301 - DNA, 261 bp, Zea mays
atcatgctcgcgcacaaccccggcggcaaggagcggtacgagcgcgagttccgcgagctcgcaaagggcgccggcttctccgggttcaaggccacctacatctacgccaacgcctgggccatcgagttcatcaagtgaaccaccgtcgccgcgatgagatggcatggctgccacatgctttgcttgcttggtcctcgtatcgtacgtcgccgtcgtcgtcttcttctggttattgcgctgctcctcgctgctctcgcgtat

SEQ ID NO: 75302 - DNA, 262 bp, Zea mays
cagcaactctagactcagctagatgatgagaggaggcaacgtgaggagctggagaagaggatggcggagatgttcgcgtacatgcagagccttggcgccgcacagggtcatgctccaccacctccgttgttccctgcagctgactctgctgagttcactactcctggtcaatcggcggcgtcgaacaaccctcacgcttcgtccagccccttcgccgaaccagtccagatgcccacctcattgatgacctgttttgtgatga

SEQ ID NO: 75303 - DNA, 268 bp, Zea mays
gtaaattttcccagttaggcaaaatggatccttgaagccgcgtacaacccttatctcattcttcctatgcaaactcctctcaagagctaggttacccctctcaagcttctgatcatgcctctcctcagtattcctattatttccaccttgaccactgtacacgagcacatctgtgtcatcatcctcattctcataacctcctgcagagacaatacatatggctacagaatcctcatcttttccaaatttgtagtcatgtaatcaatgc

SEQ ID NO: 75304 - DNA, 258 bp, Zea mays
tcccgagaatggcggtggcgtcttcttctccggctttggacaccggcaggcgagcaagtttgacagcgacccggccttggacgccgttgttcagcacggcatagatcacttcagcgaggccatagcccatttggacagtctcgactatggccctgttgtagttggagaagtcgtcgccgatgcagtcgcagattatcctcccgatgtcctcgtcgtcctcagcggcttctccggcttgcggctgccatcatggaggta

SEQ ID NO: 75305 - DNA, 255 bp, Zea mays
cacccagcttccctttcgttcctcctcgccccagcgacgcggcctcccgtagaccgagcaaggcaacccaccactgagaggcacgcagaggagcaggaagccggagaccaagatgtcgtcggtgttcagcggcgatgagacggcccccttcttcggtttcctcggcgccgccgccgccctcgtcttctcatgcatgggcgcacgtacgggaccgcgaagagcggcgtcggcgtggctcgatgggtgtgatgcggc

SEQ ID NO: 75306 - DNA, 256 bp, Zea mays
ggcattgtgagcaacactctacggccgccagtgcccgactcctgcgaccccgagtggaggtcactgatggagcaatgctggtcaacagaaccatctgagcggccaaacttcacagaggttgcgaataggctgcgctccatggcggcatcccagaaggtacaacaacactaagggaccatcggcacgcagaagttgtaccagggcagcagtcagtcaaacttgcaggttacatccatggccgccaattcacgccatc

SEQ ID NO: 75307 - DNA, 258 bp, Zea mays
  unsure (1)..(258): unsure at all n locations
agacaagtcatatctagctagtagctccctgaaaagttcactagagaagcatttgagggaggagccatgtctgaggagaagcaccaccaccacctgttccaccaccgctacgactcggaggaggaaggcgcctccggcgaggtcgactacgagaagaaggagaagcaccacaagcacatggagcagctcggccagctcggcgctatcgcgnncggcgcgtacgctctgcacgggaagcaaaggccaagaaggacccgg

SEQ ID NO: 75308 - DNA, 258 bp, Zea mays
gtgagacaggtggtcccctgagtgctgacccagagctcaagatgaccacgctgacgaaggatgacgagttcttgataattggcagcgacgggatctgggacgtcttctcgaaccagaactcggtggacttcgcccggaagcgcctccaggagcacaacgatgtgaagttgtgctgcagggaaatcgtcgaggaggcgatcaggcggggggctactgataacttgactgcagtgctggtctcgttccacctggaggccc

SEQ ID NO: 75309 - DNA, 268 bp, Zea mays
aaggtcatccggaagaacctggtgaagaagtgcattgagcttttctttgagattgctgagaacaaggaggactacaacaagttctatgagtccttctcgaagaacctgaagcttggcatccatgaggactctacgaacaggaacaagattgcggagtgctgaggtaccactccaccaagagcggagatgagctgacaagcctcaaggactatgtgacgaggatgaaggagggccagaatgacatctagtacatcactggcgagagcag

SEQ ID NO: 75310 - DNA, 252 bp, Zea mays
cgcaaacgccaaacggccggcacacaactacacaagccgctggcaaagatggcctcctccttggtcctcatcgcagcggccctgcttgcgctggcctcgtcgtggcagcaggccatcgcctacgatcctagccccctccaggacttctgtgtcgcagacaagaactcggctgttcgcgtcaacgggttcccttgcaaggacccgatggcggtcaccccggacgacttcttcaacgcgggcgatgatcatcga

SEQ ID NO: 75311 - DNA, 268 bp, Zea mays
caaaggctgccatgcacgggttgcctgttattgcaacaaaaaatggggctcctgttgaaattgatcaggttcatgaatcacattgtaccatttgatgagttaatagagtattgacttacatatgtaatagattggatcctttctggtggatgttgatacaggttctggaaaatggtctccttgttgatccccattatcagcatgcaattgcagatgccctctataagatgctttctgaaaagcagttttggtcaagatgtcgagaaaa

SEQ ID NO: 75312 - DNA, 269 bp, Zea mays
gctctgatgccgagtgagatgagcggcgggaggaccacgcgacggggctgggcaccgtggagaagccgcggtttgatgctctgatgccgagtgagatgagcggcgggaggacccagttccggaaagtgaccgttccgcagcaccggttcgcgccgctcaagcgatgctggatggaaatctacacacccgtttactagcgtatgaagatcggcatacgcatgaatctcaaggcgaggagggtggagctaaagacaaggcaagacacacca

SEQ ID NO: 75313 - DNA, 265 bp, Zea mays
caaccccaacaatgatgtatcgccattgctatgataatgttagtccaatgatgtctcaggtgagcataatcatataaggtcccgtttgtttccttttatttcgagaaattgagatcttactaatggaataagctatttttttagaatgtgatattccaccacttttcaaagttatcatataaggctatctcaaattcatggggcgagagatgaaaattgattatacagatttacatgctatttttccgatgtacaatttataaca

SEQ ID NO: 75314 - DNA, 253 bp, Zea mays
cagcaatcatggcttgtttctttacattcgcagatgccgcctaagagctttcgccctgccaggcttcagagctaatgctgctgaatccttccttggatgtctgagggccgccccacaaattactgagtcgctgtctcttgctatgcttgtgagatcatcatctcgagtttcccaactgtgtctagcgcagctccagtttattgcctgtgtgatgcacaaggagcatccaattcgtcttggcgatgggtctgta

SEQ ID NO: 75315 - DNA, 242 bp, Zea mays
cctgctttcttgtgccatgatgattgatggtgcagaacattcaacgtttcatgtgggatgaggagaaagttaatgatgaactacaaaagtacatgagcagtgcttttcaacacttgaaggccatgtgcaagtctctggattgcgagcttaggatgtgggccttcaccttcaggagttaacagagttgctcgtgcgacactcttgagaggctgtgaggcatgagaccatttaccacgcattac

SEQ ID NO: 75316 - DNA, 256 bp, Zea mays
gttccgcgagggcgtcaagtacggcgcgggcatcggccccggtgtctacgacatccactcccccaggatcccgtcggctgaggagatcgccgaccgcatcgacaagatgctggcggtgctggacaccaacatcctctgggtgaaccccgactgcggcctcaagactcgcaagtacacggaggtcaagctcgccctgaccaacatggtctccgccgctaagctcatccgcacccagctcgccagcgccaagtgagca

SEQ ID NO: 75317 - DNA, 259 bp, Zea mays
gcggacatggctcatgctctgcacccgaactatgccgaaaagcatgaagagtgccacagaccagaactacagaagggacttgtcatcaagcacaatgctaaccaacgttatgcctccagtgctgttacagctttcctcttcaaagaaatagcaaggattcataatcttcccattcaggaatttgttgtgaggaatgatatgggatgtggctccactattggacccatacttgcttctggtgttggcatacggatgtaga

SEQ ID NO: 75318 - DNA, 253 bp, Zea mays
cattcccaacccgcaaatccatccacgatcatcacaactttggggtttcccatcttacaacaacactttcccatcaaccactactcctcttcatcaagatgactggacgcggaaagggcggcaagggcctcggcaagggcggtgccaagcgtcatcgcaagattcttcgcgacaacatccagggtatcaccaagcccgctatccgccgtctggcgcgtcgtggcggtgtcaaacgtatctctgctatgatcta

SEQ ID NO: 75319 - DNA, 284 bp, Zea mays
tacagagcaagctcgtgcaatgactgaaatgaatggaatgccttgttcttccaggcctatgcgtattggtcctgcagcaagtaggaaaaatacaggaggtgttgttcaagagagagtaccaaattctcaaggagctcagtctgagaatgatcctaacaataccactatatttgttggtgggctttccccaatgtcactgaagataccctaaaacaagttttttctccttacggtaagtcgtccatgttaagatccctgttgggaagagatgtggttttgttcag

SEQ ID NO: 75320 - DNA, 286 bp, Zea mays
cgatttccccttaacacaacacagaggaagcaggcggcggcgatcgggcgatggcatggcgggcgagcctgtctcggagcctaaaggagatccgcgtcctcttctgtcagtcctccccggccagcgccgccgcccgtgagttcgtgaagaagaactatggtgacatcaaggctcgcaacccctccctccccttccttgtccgcgagtgctccggtgtccagccccagctctgggcgcgtacgatatgggtgtggagagatgcgtgaacttggatggcctgacggaa

SEQ ID NO: 75321 - DNA, 288 bp, Zea mays
ccgacgcccggttctgcaagccgctggacacggcgctgatccgggagctcgccgccgagcacgaggtgctgatcaccgccgaggagggatccatcggcgggttcggctcccacgtcgcccactacctcagcctgaccggcctcctggacgggcccctcaaactgagatccatgttcctgccggaccggtacatcgaccatggcgcaccgcaggaccagatcgatgaggcagggctgacgcgcggcacatcgccgccaccgtgctgtccctgctggggaggccattgga

SEQ ID NO: 75322 - DNA, 296 bp, Zea mays
atggctccgcgtgagcaccaccagccccaggaggaggaggaggaggacaccgcaggcgtcgtcaagctcatcagcgccgagggcttcgaattcgtcgtcgacaagaaggccgccatggtctccaacaccctacgcaacatgctcacatcgccaggcggtttctccgagacgcgccagggcgaggttcgcttcccggagatccccaccaatatcctcgagaagatctgccagtacttctattggtcgtccattattccagtggcaaggaaacagcagagtttctgatcgaacccgag

SEQ ID NO: 75323 - DNA, 282 bp, Zea mays
gcccacggcggcgtccatgacggtaccgagatcgtgctctggaagtggtgcgagggcgacaaccagcgctggaagatcctcccttggtgaacgaacgaaagaaactactagctggtaccctaataataattctgctggctgcggcgatcccaaaataaaagaggccgggtgcgatgcatctcggacttctcgaatggtgtttgcgtcagacagccagccactgtggggctagtgtccaacatttgtcagcctgcttgcgcgaggaaggggggtcactgactc

SEQ ID NO: 75324 - DNA, 286 bp, Zea mays
ctggcatgaccgattcttcgagcggcagcgcctcaagcgagcctactttcaaggggaacccaggacgtgccctcaaagaccgaagcagccctgcgctgaccgtgaaagctacctacaatggcgacaccgtccggttcaagtttctgccagcaaggggctggtaccacttgctggaagagatagcaaagaggttcaagctgacggctggagcattccagctcaaatacaaggacgatgaggacgagtgggtgatcctggcaaacgacgccgacctccaggagtgcat

SEQ ID NO: 75325 - DNA, 286 bp, Zea mays
ctcgagccaaaattgcaaataagattaaggcaaatgaaaggttttctgcatacatagtggtacctatgtggcctgagggtaatccaactggggctgcaacacaacgaattctttactggcagaataaaaccatgcaaatgatgtacgagacaatatacaggaccttgaaagaagaaggcctggatgatatgtatgagcctcaggattatttaaacttcttctgtcttggcaaccgtgagttgctgacagcactagcacttcaaacgcttcgaatacagcaaataat

SEQ ID NO: 75326 - DNA, 282 bp, Zea mays
gccttggcaagtggatgattctagattggtggagttgttcagcgagcatggtaaagtagttgatgccagagttgtctatgaccgagaaactgggcgttcacggggatttggttttgttactatggcatcgcaggacgaattggatgatgctattgctgcccttgatggacagagtttggatggccgtgccttgcgggtgaatgttgcagaggagcggccacggcgaggtttctatgaggttgtatcgggtggactgcacgcttgttccatgggttgggagca

SEQ ID NO: 75327 - DNA, 293 bp, Zea mays
gaatgcagttacccttaaaagaacatatcagggtgagcagattgaggttgtggttcacatgcccagccttgtcactggagatgagcctgatcatgaccgtgatggtgaggatgaggacacggcgggagatgacaatgacgaagatgaaggccagaagcctgaacagtcaagcattcctctcacagtcactatatccaagggtgacggtcctgttcttgaattcacctgcactgcctatcctgacgagtgaccttgatgagaacctgcagagggaattccacaggtacctggat

SEQ ID NO: 75328 - DNA, 284 bp, Zea mays
ggagcacggaggcgaaggaggaggagcagcagcagcaggcggcgccgaggagcggcatcccactcagtgcttgcaaccatggctaggggattgaagaagcacttgaagaggctcaatgcgcccaagcattggatgctcgacaagcttggcggagcttttgctcccaagccatcttctggacctcacaagtccagggagtgccttcctctgatcctcatcatcaggaacaggctcagtatgctctgaactaccgtgaggtcatttctatcctgatgcacgccatg

SEQ ID NO: 75329 - DNA, 287 bp, Zea mays
ccaccaccaccaccaccgcacacccgccggcgccaatgacagcaagaagcccaccccgcccgccgccctgcgcgacctcttccgcttcgccgacggcctcgactgcgcgctcatgctcatcggcaccctcggcgcgctcgtccacggctgctcgctccccgtcttcctccgcttcttcgccgccgcctgtgcagttcagttcagttcagttgtcctgtgggtcggaccgttcaccgcttcatccacgggatcaggcacagtgatcagtgccgtgctagctgtgtgga

SEQ ID NO: 75330 - DNA, 280 bp, Zea mays
gcaagatattcaagaaatatattgaaattgagctttatctgggcaactttgaccgttgtaggactctttatgagaaatatattgaatggtccccagcaaactgttatgcctggaggaagtatgccgaattggagaagaaccttagtgagactgatcgtgctcgatcaatatatgaacttgctattgcacaaccagcccttgatacaccagaggttctgtggaaggagtactgcagtttgaaattgatgaaaatgaatttgagaggacaaggcaactatat

SEQ ID NO: 75331 - DNA, 281 bp, Zea mays
gaaattccttctgcctcaaatggagacaacgacgagtggtcagaagtacagagattgcagacaaggataacaacattcagaaatactgagatagataaatggcagaggaaaatacaggtgacaacgggtgctgctgcacttaaaggaaagctacatgcatttaatcagaacattatcgaccaagttgctggttacatgagagatccaagccggatgattaacaggatgtacttgaccaactctgctgaaagtgtatttggaaaggatgtgggagaacctgg

SEQ ID NO: 75332 - DNA, 299 bp, Zea mays
gaaatgccttctgcctcaaaaggagacaacgacgagtggtcagaagtacagagattgcagacaaggataacaacattcagaaatactgagatagataaatggcagaggaaaatacaggtgacaacgggtgctgctgcacttaaaggaaagccacatgcatctaatcagaacattagtgaccaagttgctggttacatgagagatccaagccggatgattaacaggatgtacttgaccaactctgctgttagtgtatttggaaaggatgtgggagaacctggaacagctgaggaggtttg

SEQ ID NO: 75333 - DNA, 278 bp, Zea mays
attagcttcatgtattgctgctgaattagcaaaaggcgcaacgatgctgcatgctgtccaggctgcgaagaaatttgtggaatctgctctttatcacagcaaagatcttgtgattggaaatggacctcagggcccttttgaccaccacttcgagctcaagtctccatcatacaagatgggatcactgcaaagttcaatccagatgacctcttcctgtacgcagtgacagactctgggatgaacaagaagtggggtcgttcgataaaagatgccgtgaa

SEQ ID NO: 75334 - DNA, 272 bp, Zea mays
gacgaggacaaggccacgctcggcgacgtcctggcggtacgagtcacgaacacgacgtgccatcgttttcgtttcgtgccgctgctgctatatatctgacagtgcgtgttggtggtgcaacagagcagagatcttttgactatttgttctttgtcgtacgtgcagaacgcgacggcgaggttggtggcggacaagccggtggagagcgccgatgcgttgggggtggctggcgccacaaccgcaacaggaacgacgggacggcgaggcccgga

SEQ ID NO: 75335 - DNA, 272 bp, Zea mays
ccggagtatgacacttgtttgggagacctgtacagtgttgcttggatggaagacagtgatttccacaatctgcgaactgaatccctcaagcatcagtacaagttagtcaaggataggacagcggttcatgacacgttcagctatggttcccatgtgatgcaatatggcgcattggagctgaatgtcagcgtttgttaacgtacattggcacagacccttataacgatggcaacattttatagaagataactcactgccatcgttctcaaaag

SEQ ID NO: 75336 - DNA, 270 bp, Zea mays
acagcgatacaaggaatatcatatctgtaccaagcactgcggagaatgacttaggtctcttcctcttcttcctcctcctcctcgtactcctcatcctcggcagtggcgtcctggtactgctgatactcggccaccaggtcgttcatgttactctctgcctcggtgaactccatctcatcataccctcgcctgtgtaccagtgcaagaaagccttcctcctgaacatggccgtgaactgctcgctgacgcggcggaacatctcttggatgg

SEQ ID NO: 75337 - DNA, 271 bp, Zea mays
ggccatatgtggaggtggcgttctaccataagccttcacggacactactggtgaccgatgctgtcatctttgttcctcaacagccaccggagtgtataagcaaagaatctctgttggcatctgcgaagaatggactggcagtgaagctattgagcaaagggaaggaggttcccgataaaccagttgttgacaataagctaaaccgtcagaaagggtgggagagaatggtacttcaaatactatttcttggtccgtcaaatctacttgagcc

SEQ ID NO: 75338 - DNA, 268 bp, Zea mays
gcgagatcgtcgtgatccctcaaggtctccgatttgctgtcgacttgccggatggcccctcgcgtggctatgtctctgagatcttcggcgcccattttcagctccctgatcttggcccaattggtgccaatggcttggcttcgccgagggatttcctttccccgacagcatggtttgagcaggagcaccaccctggatacacaatagtgcacaagtatggtggcgagctgttcagcgccacgcaggatttctctccattcaacgtggt

SEQ ID NO: 75339 - DNA, 267 bp, Zea mays
gtacaaggttgacttggtgtatgcagggcacgttcatgcttatgagagatcataccgcatttctaatgtcaactacaacataacgtcgggaaatcggtatccagtgccggacaaatctgctcccgtttacataacggtcggtgatagaggcaaccaggaaggacttgcttcaaggtttataacccccagccggattactcagcgttcagggaggccagctatggtcactcagttttacagctgaaaaacaggacccatgctatctac

SEQ ID NO: 75340 - DNA, 266 bp, Zea mays
ggtacatgagcctgatcaccgtgctcaccggcgacctggaggacgcccagattgccgtggactcactaggcatatgcatgaacataaacggatgggaggccatgatcttcatcggcctcaatgccgctatcagtgtccgagtctccaacgagcttggctccggccgtccgagggcgcgtggaacgccgtcatggtcgtcgtcggcgaggcgctggtgatcgggattctgtgcatggcactcatcctcatcttcagagacagcttct

SEQ ID NO: 75341 - DNA, 262 bp, Zea mays
ggctggtggagaactggtggtagttcctgtagacaaaacaggatttgttcctgaggatgctactatagttggaaacacttgtctgtatggagctacaggtggtcaggtatttgtgagaggcaaggcaggagaaagatttgctgttagaaactctctatgtcaggcagtggttaagggcaccggagatcattgctgtgagtacatgactggtggctgcgtagtcgtacttggcaaagctgggaggaatgttgcagctggaatg

SEQ ID NO: 75342 - DNA, 251 bp, Zea mays
  unsure (1)..(251): unsure at all n locations
aaacacttcccagccctccacgcaccccgctgccacggctcgaacatatancctagagccgccggcccggtcgcgctagcgacacaaatctcaaatcacccggagagaactcgctcgcgaaggctgaactcatggctcgcgtcttcgttgggaacctggatccgcgtgtcacatcgcgggagattgaggacgagttccgcacgtttgggcgttagaagagtgtatgggttgctaggaaaccaccagggttt

SEQ ID NO: 75343 - DNA, 258 bp, Zea mays
ggctggtggagaactggtggtagttcctgtagacaaaacaggatttgttcctgaggatgctatatagttggaaacacttgtctgtatggagctacatgtggtcaggtatttgtgagaggcaaggcaggagaaagatttgctgttagaaactctctatgtcaggcagtggtgagggcactggagatcattgctgtgagtacatgactggtggctgcgtagtcgtacttggcaaagctgggaggaatgttgcagctggaa

SEQ ID NO: 75344 - DNA, 260 bp, Zea mays
ctttgacgtcaaatttcctttgtgctcggtggatctaagggaatggtgtgcagccaacacacgcaggccagatttactcgagatgatacctgactcctttttcaatcttgtggagaagtgtttggccgtcaaccccaggtgcaggctctcatcagaggacgcgctcatgcacgagttctttgctccatgacgcgataacttcaggaagctcaggatgctgaggaggtcagctggttctgatgcagcatgttcatcgtctc

SEQ ID NO: 75345 - DNA, 257 bp, Zea mays
agagaaacgcgtatacccaggcggcggttgaggaagaggaggagaagaagaagaagatggcttcctccgcatacgcctcatggtccaagcggtggatccgtcccgaggtgtacccgctgttcgtgccgatggccgtggccttgggcatctgctcgtaccagcttgtgcgcaacatcacgggcaaccccgaggtgcgggtgaccaaggagaagagggcggccggcgtcctggacaaccacgacgagggcgagaggtac

SEQ ID NO: 75346 - DNA, 229 bp, Zea mays
cgctctccctattctggacggccgactcgcttctgtgagctaccggccttagatccagccatgagggagattctccacatccagggcggccagtgcggcaaccagatcggttcaaaattctgggaggtcgtctgcgacgagcatggtatcgatcccaccggacgctatgtcggcacctccgacctccagctcgagcgcgtcaatgtctactacaacgaggcctcatgtc

SEQ ID NO: 75347 - DNA, 286 bp, Zea mays
gagctaacgcggagtcagtcgaaacggcttggggcaaatgggcagctgagatcagggaccctaacaagggcgtccgcgtctggctcggaacctacaacaccgccgaggaggcagctagggcatacgacgccgaagctcgcaagatccgcggcaagaaagcgaaggtgaatttccccgatgacgacgcgccaggcactggtcacaggccagcgaacgcagcgcctaggctagtagctccacccccaccccccaaggcctgcgccgatgagatctttaacaacctgaa

SEQ ID NO: 75348 - DNA, 264 bp, Zea mays
gttctagatcgcgagcggcgcccttttttttttttttaaaagtactactacatcatacccatcatagcatgttcgaatacaacaaccaaacctaagctccagcttgaaagaaagccaggtctcagagacggtacaatatgcagcagggtccaagatcaccttactcgtcatggacctcctcctcgtcctcgaactcctcctcatcggcagtggcatcctggtactgctggtactcagacaccagatcgttcatgtggctctcag

SEQ ID NO: 75349 - DNA, 259 bp, Zea mays
ctgccgcctcaccgcctctctcactctgagaccgcagatccgttgtccggtgagtggaagccgcacgaacccatggcctccggcgagcttgcctgcacctacgccgctctcatcctcagcgacgatggcatcgccatcaccgccgagaagatcgccacgatcgtgaaggcagccaacatcaaggtcgagtcctactggccggcgctcttcgccaagctcctggagaagcgcaacgtcgaggacctcatcctctccgttg

SEQ ID NO: 75350 - DNA, 256 bp, Zea mays
tgggaacaaggtatcatttgctagctttttcatttctgccaggggtttaatatatactctctccgcttctttttagttgtcgctggatagttcaattttgcactatcaagcgataactaaaacgaaacggagggagtagcgtctacaccaaacttcgcatgtgcactgtaacttttttcccctactatcatggatccatatcaatcagtatgtctctgcatcagacaagcttctgcttcgtttgcacccacttaac

SEQ ID NO: 75351 - DNA, 260 bp, Zea mays
cgctgacctttccgacaagcctttcttccccgggttggtggagtacatcatttccggccccgtggtggcgatggtgtgggaggggaaggacgtcgtgttgactggccgcaggatcattggggccaccaggccttgggaggcagcccccggtaccattcgtggggactacgccgtggaagttggcaggaatgtcatccatggaagcgactccgtggagaacgggaagaaggagatcgctctctggttccctgaaggtgtgg

SEQ ID NO: 75352 - DNA, 259 bp, Zea mays
ccggagccggccatcccgtcgcacactctccccctctatatatgccgtcggtgtgggggagcctactacaggacgacccaagcaagcaagcaagcagcgagtacatacatactaggcagccaggcagccatggcgcccaccgtgatgatggcctcgtcggccaccgccgtcgctccgttccaggggctcaagtccaccgccagcctccccatcgcccgccgctcctccagaagcctcggcaacgtcagcaacggcggaa

SEQ ID NO: 75353 - DNA, 257 bp, Zea mays
caagtgatccttatcaagtccaggtttgcagaaaatgtggcttgttaggctactacaatcacaaactgaagacttcatactgttcaatgtgtcaagaatggggaaaacatggccaagatgaggctgccatacgcttgcaagcttctattccaggaattgcatgcaatgaatgtagtaccacgcttgaagttaaccgaagtatgacagatgctgggactgtacaatgagagagatgctggattcgaaatgtgtttaga

SEQ ID NO: 75354 - DNA, 251 bp, Zea mays
aacttgcctctggtggcaagctctgtcccgcgctgattgtcataagagagcacctcccttctggtaaagcatgcttaagagtcaacattgatgcaaccagagtgggaaatgtggctcgctttatcaaccattcatgtgatggaggcaacctgcacccagtgctggtgaggagctctggtttgttgctcccaaggctctgcttctttgctgccagggatatcgtggagggagaagagctcaccttcagttac

SEQ ID NO: 75355 - DNA, 255 bp, Zea mays
ggttgacaagggtttggttccattgcctggatccaacaatgaatcatggtgccaaggtcttgatggtttggcttcaaggtgtgctgagtactataagcagggggcgcgcttcgcaaagtggaggactgttgttagcatcccttgtggtccatctgcattagcagtcaaggaagcagcatggggacttgctcgatatgctgctattgctcaggataatggtttagtgccaattgtggagccagagattcttcttga

SEQ ID NO: 75356 - DNA, 237 bp, Zea mays
gggcctcatcacctccgccgtgagggaagctgactgaaaagagcgatgtatacgcatttggagtggtgcttcttgagctactaatgggacggaagcctgtcgagaagatgagtcaaactcagtgccaatcaattgtgacatgggccatgccgcagctgactgacagaacgaaacttcccaacatagttgacccagtgatcagggacacgatggacccaaagcatctgtaccaagtgg

SEQ ID NO: 75357 - DNA, 251 bp, Zea mays
aagcctatgcttcctaagggtccagtaaggaggttagctgttgatgccacgcttagagcagctgcaccataccaaaaactgcgcagagagaaagaacgtgacaaaacaagaaaggtttttgttgaaaagactgacatgagagccaaaagaatggctcgaaaagcaggtgctctagtcatatttgttgtggacgctagtggtagcatggctctgaatcgtatgcagaatgctaaaggtgcggcgttgaagtt

SEQ ID NO: 75358 - DNA, 253 bp, Zea mays
  unsure (1)..(253): unsure at all n locations
aaagcctatgcttcctaagggtccagtaaggaggttagctgttgatnccacgcttagagcagctnccaccataccaaaaactgcgcagagngaaagaacgtgacaaaacaagaaaggtttttgttgaaaagactgacatgagagccaaaagaatggctcgaaaagcaggtgctctagtcatatttgttgtggancctagtggtagcatggctctgaatcgtatgcagaatgctaaaggtgcggcgttgaagtt

SEQ ID NO: 75359 - DNA, 254 bp, Zea mays
gtcagaacactggcaacttccttacggaccgtccttcaaccaaggtccacgctgctcctggcggtggctcttccctgggctacctgttcggtggcaactgatgcccgtgctggtgcgctcaccaaagttatcctcccctgcctgctgcgtgctatgtctgaatcgtgaacaaccgttgttgtcatttcatgtgtgtaccccgtgcaatgctttgtgcgcatggttgatttctctgtggcaaacttcccgtcctg

SEQ ID NO: 75360 - DNA, 252 bp, Zea mays
acgtcattgagatctcgcagttgagggcgagccccagcttcacggcgcactcgaccaccttctcattcagaaccggcagcgtccccgggtggcccatgcaggtggggcagatagtgctgttgggctgggaaccatagctgtaagggcaggagcagaacgccttcgtgacggtcgagagctggacatgggtctcaatcccgatgatggcttcgaagccttgtgttttctgctcagccgcctccttggtcgcca

SEQ ID NO: 75361 - DNA, 260 bp, Zea mays
acctattcgagagaacaggagcaattgtcacatttggtgtgaatgcactctacgggaggtataatgttcgacgttccatctgggcaggcaaatggaattccactaatgcatatgattttgtaaaatacacaatctcaaagggatacccagttggctcttgggaatttggcaatgagctgagtgggcatggaatcggagcaaaagttgatgctaaactttatggaaaagatgtaattgaattcaaatccatccttcggcaa

SEQ ID NO: 75362 - DNA, 250 bp, Zea mays
tcgagcaaagatggaaaggagaagaccgggtttagtgggagaatggggaaccgaattgctgctccaaggctgctgaagctcaacccactggattctcatctagcaggagcaaacagcaggttcagggagggaagattctcatgggtgacggagaacgggaagcaggagcggcatctagtggccacggtggggaagtacagcgtggtgtggaacttcttgcaggtgaagaacagccaccacgagtgctacc

SEQ ID NO: 75363 - DNA, 248 bp, Zea mays
gcaagcactacctctggccgctcctcgactacctcctcccgctgacgccgtcctcgctcggtggcgtccctttccagcgaacgctctaccactccttcctctcggccaacagggcgttcgccgaccgcctcaccgaggtgctgtcccccgacgaggacctcgtctggatccagcattaccacttcctcgcgctcccgagcttcctccgcaagcgcttcccgcgcgccaaggtcggattcttcctccac

SEQ ID NO: 75364 - DNA, 251 bp, Zea mays
gaagaaacagctgagtgcgatgttggacgaggaccccgctttgatggagaagagggatgccctggtcaagaggctagagctgtacaaatctgcaaggaatgagatcgactctgtcgcatggaaatgattggtttgtgacagccactggtggatcgtagaatgtacaaccgcagcagcacacgtatggattgcagtagaatgatcaattctttttttacatttgaatttaccctggaggccttgcacgtgat

SEQ ID NO: 75365 - DNA, 279 bp, Zea mays
tgacatgccgcgtttctgataaggcggatgtgtatacttatggagttgtacttcttgaactcatttcagacaaaaaggcactggatccttctttctctccttacgggaatggattcaacatagttgcctgggcttgcatgcttttacaaaagggtcgagctcgtgaattctttatagaagggctgtggaatgtggccccacatgacgaccttgttgagattctacacctgggcatcaagtgtacggttgattctctttcttctaggcccacaatgaagc

SEQ ID NO: 75366 - DNA, 282 bp, Zea mays
gcggcgcgaacgtcaccgggaaggtgctgcgcgacaacatccaggggatcacgaagccggcgatccggaggctgccgaggaggggtggcgtgaagcgcatctccgggctgatctacgaggagacccgcggcgtgctcaagatctttctcgggaatgtcatccggtacgctgtgacctacacggagcacgcccgtcgcaaaaccgtcaccgctatggacgtcgtgtacgccctcaaacgccagggccgcactctctatggcttcggcggcatagttaggtgtg

SEQ ID NO: 75367 - DNA, 289 bp, Zea mays
gtcagaacactggcaacttccttacggaccgtccttcaaccaaggtccacgctgctcctggcggtggctcttccctgggctacctgttcggtggcaactgatgcccgtgctggtgcgctcaccaaagttatcctcccctgcctgctgcgtgctatgtctgaatcgtgaacaaccgttgttgtcatttcatgtgtgtaccccgtgcaatgctttgtgcgcatggttgatttctctgtggcaaacttcccgtcctgcatggggttgtaagctgtctctaaatttcacggca

SEQ ID NO: 75368 - DNA, 289 bp, Zea mays
ctcacgccgccgccaccgccgccgtcgccgccaccacatccgtaacgcccagccgccggagaagaggagggagccagcaccagccaccatgggtcgcgtccgcaccaagaccgtgaagaagacctccaggcaggtgatcgagaagtactactcccgcatgaccctcgagttccacaccaacaaggaggtgctggaagaggtctcgatcctcccctcgaagcgcctgcgcaacaaggttgccggcttcaccacccacctgatgcgccgcatccagcggggccccgtccgt

SEQ ID NO: 75369 - DNA, 282 bp, Zea mays
ctaagacctgcccgtacttccaccagctggaggccaactgcatcagcaggaagcacctccgcagcggcggcgccgcgctgacgctcctcctgctcttgcgtaccaactatcagtgaactcgagccggcacgagatagaagggaagaacatcaacgacgacaagaggaacaacgggggatcaggtggaggcacacaggtgctgccgaccagcaatggcgagacagcaccgacgacgacgcccgccgctttcgacaccgacaccggcatgaagaagccagaaga

SEQ ID NO: 75370 - DNA, 272 bp, Zea mays
caccggttgctatccgccgccatcgcttcaagcagcgaaccctagccgccctcagcgacggattgcagatctcccagccatgacgttcaagcggaggaacggcggacgcaacaagcacgggcgcggccacgtcaagtacatacgctgctccaactgcgccaagtgctgtccaaaggataaggctatcaagcggttcttggtgaggaacattgttgagcaggctgctgtgagggacgtgcaggaggcttgtgtgcatgatggatatgttcttc

SEQ ID NO: 75371 - DNA, 264 bp, Zea mays
gccgtctacttcgccaactccatgtacctggtggagcgggtcatgcgctacctccgcgacgaggaggagcgcgcgctcaagtccaaccacccctccatccgatgcgtcgtcctcgacataggcgccgtcgcggcgatcgacacgagcggtctagacgcgctgtccgatctcaagaaagtcctggacaaaagaaacatcgagctggtgcttgccaacccggtggggtcggtggcgaagaggatgttcaactcggcggtgggcgaa

SEQ ID NO: 75372 - DNA, 263 bp, Zea mays
tgtggaaactatggatcgccacttcggcaatgtgtgcgagctcgatatcatgttccatctggagaaagtgcacttcatgttggaagagatggtgatgaatggttgcattgtggagacaagtaaacagaatatcttggcaccaatacaacttatggagaaaacttcctaaaatagtgatatccatttgtgtagttttacatccacttcttagcacatttgcctgtctgcccctttccataaaatttccctctgtatgtgagaga

SEQ ID NO: 75373 - DNA, 221 bp, Zea mays
ctaccttgttgacatcacagaggtccctgatttcaacaccatgtatgagctgtacgacccttcgacagtgatgttcttcttccggaacaagcacatcatgattgatctcgggactggaaacaacaacaagatcaactgggccctgaaggacaagcaagagttcatcgacattgtggagaccgtatacaggggcgcccggaaaggccgtggtctggtgattg

SEQ ID NO: 75374 - DNA, 256 bp, Zea mays
tgtacgccagatccgtttcttgtggagctcgccatagtgctattataacagatgaaggtgaggtattctgctggggatggaacaagtatggccagcttggccttggcgactcaatggacaggaacgtgccttgcagtgtacgtgtggacgcttaccacccgctaaacgtatcatgtggctggtggcacccttggtgctcgcggagtcgcctgcttgaaacctgacaaagaaattaccttagattgacaattttgtt

SEQ ID NO: 75375 - DNA, 259 bp, Zea mays
cgacgacggaaacagtagtgctgccagtagagctctcagaactcgggaaaaaaatgtcagaggccgccgtgcgtgtgatcggcctatggcgagcccgttcgtgatccgcgtcctgatcgccctgaagctgaagggcgtcgagttcgagttcgtggaggaggtggtgggcaggaagagcgagctgctgctgaggtcgaacccggtgcacaagaagatccccgtcctgctccaccacggcaagcccatctccgagtctctg

SEQ ID NO: 75376 - DNA, 259 bp, Zea mays
gggtgccatcggtagcatcgacacgagcgggacgagcatgctggacgagctcaacaagtccttggacaggaggggaatgcagatcgtgctggcgaacccgggcagcgagatcatgaagaagctggacagctccaaggtgctggagcagatcggccacgagtgggtgttcccgacggtgggcgaggcggtggcgtcgtgcgactacgtgctgcactcgcacaagccgggaatggccaaggacagcgcagccgcccacgag

SEQ ID NO: 75377 - DNA, 255 bp, Zea mays
aacagattggaagcggtgacaggtctgagcgaatcagaacatacaacttcccacagggccgtgtcaccgaccatcgcgttggagtcacacaccactccatagcagatgtcatggagggggagagcctggacatgttcgttgatgcgctcctgcttcaagaagagatggacgccattgcttcatttggcgcatagctagattaaaccttgcaacattgattcacgtcatggacaaaatagagatcagcgaaaaaca

SEQ ID NO: 75378 - DNA, 256 bp, Zea mays
gcctgatgccaatgtcattatcaaaaggcttcgagaatctgaaggattggaatttgggaacagtgtttactggattagctttggcaatgagtacgctgaaaagaaattccctgcttccagaccgtttggtatcaagtacaagtttcacttagaggatgctgttgattgcccagaatgggttgttccattccatctcttcaaattattggcagaggagtatgatctcgagctggttctgatgaagaacttccatgaa

SEQ ID NO: 75379 - DNA, 258 bp, Zea mays
cttgcaatcacaacgaacagaagctctcgatctcaccgacaccgaggaagaagagatcaatggcgtccgagcagggagtcgtgatcgcgtgccacagcaaggctgagttcgacgcccacatgaccaaggcccaggaagccggcaagctggtggtcatcgacttcactgccgcctggtgcggtccatgccgcgccatcgccccactgttcgtcgaacacgccaagaagttcactcaggtcgtcttcctgaaggtggacg

SEQ ID NO: 75380 - DNA, 96 bp, Zea mays
agatcatttcatatagctatgttctattaactcatctcagatgcaagtccactttcaatatatctctgtataaagcggtaaggaaaaagttttaat

SEQ ID NO: 75381 - DNA, 257 bp, Zea mays
ctggagatgaggtggagcggggtgggcatcgacgagtggtggaggaacgagcagttctgggtgatcgggggcatctccgcgcacctcttcgccgtgttccagggcctgctcaaggtgctggccggcatcgacaccaacttcaccgtcacctccaaggcctcggacgaggacggcgacttcgcggaaaagtacatgttcaagtggacgacgctcctgatcccgcccaccaccatcctgatcatcaacctggtcggcgt

SEQ ID NO: 75382 - DNA, 255 bp, Zea mays
ttcgttgtttgtggcgctacgtatgttcctatctatcgtggccaaaaggatgtttcgtgtccatactgtggatcccgatttgttccttccatcgaaggacagctttgtaccatatgcgagcttgctgcggttggggcagatgcatcaagcctcctctgctctcctacacagtcgagataagcgatggtagttagaggtcccctatattctttctagcgtctcaagttccaagatttcatcatatatatgttacca

SEQ ID NO: 75383 - DNA, 249 bp, Zea mays
ctcgagccggtcgtctgtgagtgcatgcgaggcctccggttgatccggctctctcacggtgcagttcgtccgggagggggagataagcgaggtggagtggtgtggtcctaagccaagccaactagatcgagtcgtcaagaaggttggagaggagagagagatggggaagcaggcggcggtggtgctggccgtgaacggcaagcggtacgaggccgccggcgtggacccgtcgatgacgctgctagagta

SEQ ID NO: 75384 - DNA, 252 bp, Zea mays
cccagatttgggacaccgccggccaggagaggtaccgtgcaatcacaagtgcctattaccgaggagccgtaggggcactgctggtctacgatgtcacccgtcgcgccacgttcgacaacgtgggccgttggctgagggagctcagagaccacaccgaccagagcatcgtggtgatgctggtcggcaacaagtccgatctccggcacctggtggccgtctcgaccgacgacgccaaggagttcgccgaggccg

SEQ ID NO: 75385 - DNA, 256 bp, Zea mays
gaaaaacctgagttgtttgtattgaagcctcaacgtgaaggcggagggaacaacatctacggtcttgatttgagggaaacgcttgtcagactacagaaggaaggaggggatgcgcttgcagcctacatactgatgcaaagaatcttcccaaaagcttctcctgcttatctcgttcgtggtggtgtttgccacgagggtcttgcaatttctgagcttggaatatatggagcttatctgcgtaacaaagataaagtgg

SEQ ID NO: 75386 - DNA, 253 bp, Zea mays
ctcgagccgtgcacccccaaagtcatcgaacttctttgttgaatttgggatggacagtggatatcacaaaaaaatctacatccagttcatccaaagtgcagattgaggaaagcagtgaagcaagacagaaattctcgaatgcaaaatcaatttcatcctctcagttttttggtgatcaggccagtttcgaaaaggacactcaagtctctctccaaaagttttctggttcctctgccatatcaagtgctgatct

SEQ ID NO: 75387 - DNA, 267 bp, Zea mays
  unsure (1)..(267): unsure at all n locations
aactcggctcgagcagcagcactgccctttggcactatctgtatcattgtgctcatctggaccttggtcacatttacataacatgtataagaaggtattacaggcaaaaacagcaaaagtttattccaagcatcttgcagtaccacaaaataccccagggagattcctccacttccgtggtaccggagaactattccacagatggctatggccgggtttttgccattcagtagtatatacatcnatctgtactacatctttgctagt

SEQ ID NO: 75388 - DNA, 248 bp, Zea mays
ccctattcaattcttttttcttaggaatacctatggtcagcatgctcctttatgtctggagccgagagaatccaaatgctcagataaatatatacggcctcgtccaattgaagtacttttatcttccatgggctatgctcttattggatgtgatatttgggtcatcattaatgcctggacttctgggtatcatggttggacatctctactacttctttgcagtgttgcaccctcttgccaccgggaag

SEQ ID NO: 75389 - DNA, 248 bp, Zea mays
gcccgggcaacttcaacgcgcacaggcacgtccgcaagtacaatctcgtcaacccgcagcagcgcaacaccgtcgccgtccctggcggtggctgggccgtcatccgcttcacagcggacaacccgggcgtctggatcatgcactgccacctggacgcgcatctgcccttcggcttggccatggccttcgaggttgaagacgggcccacgcccgacgccgtgctcccgcagcccccgcaagactacccg

SEQ ID NO: 75390 - DNA, 233 bp, Zea mays
gagctgtctgcagatagcaaaggcctttggagcttccgaggtcatcgcggtggacgttctcgacgagaagctccggaacgccacaacgctcggcgcgacgcacactgtgaacgcggcgaaagatgacgccgttgagaggataaaggagatcactggcggtaggggtgtcgacgtggctgtcgcggcgctcggtaaggcgctcacgttttcccagtgcgccaggagcatgcgcg

SEQ ID NO: 75391 - DNA, 272 bp, Zea mays
ctggtctacgctgttgagttctctcacaggagtggaagagaccttgtcaacatggcaaagaagaggaccaatgtgatccccattattgaggatgccaggcatccggcaaggtaccggatgttggtaggcatggttgatgttatcttctctgatgttgcacagccagaccaggctaggatcttagcacttaatgcttcatacttcttgaagaatggtggccactttgtcatttcaatcaaggctaactgcatcgactccacactgcctgctga

SEQ ID NO: 75392 - DNA, 276 bp, Zea mays
tgccggtttgagcatgaggactgtgccccatcttgcagatgccatacacgctgcagttactcaactgaaatgaggatagtatcgcagctttcgtgaataaaacctgaatcacccacaacaatgttctaagtactcagccagtggtatttactggttgacctactgtagtttgcgtcggaatagatatgtttttttactcttcgtggggcagttttgtactggtggattcataaggactctgattatggtgcgttcggaacttataataataagcac

SEQ ID NO: 75393 - DNA, 268 bp, Zea mays
cacttgcagcatgtgacaccttcagatctggtgctgttgagcagctgagaactcatgcaaggaggcttcagatacctatatttgagaagggttatgagaaagatccggcagttgtagcgagggaggctattcaggaagcaacccggaacaaatcagatgttgttctggttgacactgctggacgtatacaggacaatgagccactcatgagggcactctccaagctaatcaatctcaatagcccagacctggttttatttgttggaga

SEQ ID NO: 75394 - DNA, 272 bp, Zea mays
ggagaaaccaggcatttcttcttccattttaaagagcaaagggcaacttgcagcaggacacatacacacaccagcacattcgtcccgtccacagcctacgcatcaccgcatactggtaacaaggtactgctaaacatcagatcacaccggacagtcagtctatgccttcttgggggacttagcggccttcttgggcgactttgcctccttgctcccgccactggacgccttctccgccgtcttcttgggcagcagaacagggttgatattgg

SEQ ID NO: 75395 - DNA, 274 bp, Zea mays
gcgatgggctccttcttctcgaccttagtgacgcccctccgcccgccgccgacgacccgaactgcgccgtggtggccgcgcactccaaggccacctacgacgagcagtgggcggcccacaagagcagcagcaagctgatggtgatcgacttctcggcgtcctggtgcgggccctgccgcttcatcgagccggccttcaaggagctggcctcccgcttcaccgatgccatcttcatcaaggtcgacgtcgacgagctcgcggaggtcgcaaggac

SEQ ID NO: 75396 - DNA, 268 bp, Zea mays
gacatgcgcaaggccaagcgcgaggaaagtttccaaaagaagcgctgcgatgggtttcccgcctccgccgccggtgtgccgccgatgggccactccaccgcgctccagcagaagggtatgggtgacgtggtggcactcgatctgctgggttcggatctgattttcttggtgacgggatggcatgccggcgatggtgcaggccgtccactccaacgacccctccgtgcagcttgaggccaccacacagttcaggaagctactttctata

SEQ ID NO: 75397 - DNA, 271 bp, Zea mays
gatggccacatttcttcaccgatgatgggtgcactttctgattctccgatgcctggtagaaagcgtggttccccaggagatgtggctgataagttggtggagagaaggcagaagaggatgatcaagaatagggagtcagctgctcgttcaagggctaggaagcaggcatacactaatgaactggaaaacaaggtttctcgattagaagaggagaataagaagctaaccacgttaaaggagttggaaaatatacttttctctgagcctcttc

SEQ ID NO: 75398 - DNA, 277 bp, Zea mays
ggaaaatctgaaatgctatcaccatttaaaacattggctcctggaagttcaggtgattaacaaacctccttcatctacatctgacattggcatgtatggtagagtccagcaactcttgtgatggcaggagtcgttcttaaacagcaactgctccttcgttcagcgcttctcatttctgattgtattgaccgagagcatccacctttccttctggtatcaactgaatgagttgccgacaccgacccatctgcgcataatggcaggttaggtgttgctg

SEQ ID NO: 75399 - DNA, 283 bp, Zea mays
cagcagcagcactgccctttggcactatctgtgtcattgtgctcatctggaccttggtcacatttcctttgcttgtattgggaggtattgctggcaaaaacagcaaaagtgaattccaagctccttgccgtaccacaaaataccccagggagattcctccacttccgtggtaccggagaactattccacagatggctatggccgggtttttgcctttcagtgctgtatacatcgagctgtactacatctttgctagtgtttggggccacaggatttacacaat

SEQ ID NO: 75400 - DNA, 261 bp, Zea mays
gctagaaaaagtacttgggcctcctagagttgatgacagagaagctgcagatcgtgtagcaagcccaggagtctcagttggccttgtctggacttcggttggtggggaagttcagtttgtggaggctacagccatggtgggtaagggtgacttgcatttgactgggcagcttggtgatgttattaaggagtcagcgcactagctttgacatgggtgagagcaagagctgctgacctcaatttgtcacctacttctgatatc

SEQ ID NO: 75401 - DNA, 268 bp, Zea mays
ctcggccacgacctctgggtgcacctcttcaccaccagcgaggctgtggtcagcgccttcgcctccatgacgccgatgctcatcggctccgtcgtgctggactccacgcagggggtactctgcggcgtcgccaggggctgcaggtggcagcacctggcggcgtggaccaacctggtggccttctatgtcatcggcttgccgctcgccatccttttcggattcacgctcgccttccaaaccaaggggttgtggatggggcagatatgca

SEQ ID NO: 75402 - DNA, 269 bp, Zea mays
cattagggaaggtataccatatatgttcatgcctcaagagagaagccagaacatgtcagtcccatatttgttggtcgagagatacacagtgaaaaggtaacttggggtacaatttctatggttgatgctgagagaaggttgctggcaaatgctctacaagacatggacaatcagcattttattttgctatctgatagttgtgtacctttgcacaattttgactatgtatatgactacctgatgggtgcaaatctcagttttattgactg

SEQ ID NO: 75403 - DNA, 269 bp, Zea mays
ccgacttcgacgcccacatggccaaggccaaggaggccggcaagctggtgatcatacgacttcacggcctcctggtgcggcccctgccgcttcatcgcgccactgttcgtcgagcacgccaagaagttcacccaggctgtgttcctgaaggtggacgtagacgagctgaaggaagttgccgcggcctacgatgtcgaggcgatgccgaccttccacttcgtcaagaacggggtgacggtggagaccgtcgtcggtgccaggaaggagaa

SEQ ID NO: 75404 - DNA, 272 bp, Zea mays
acctattcgagagaacaggagcaattgtcacatttggtgtgaatgcactctacgggaggtataatgttcgacgttccatctgggcaggcaaatggaattccactaatgcatatgattttgtaaaatacacaatctcaaagggatacccagttggctcttgggaatttggcaatgagctgagtgggcatggaatcggagcaaaagttgatgctaaactttatggaaaagatgtaattgaatttaaatccatccttcggcaattgtataaggca

SEQ ID NO: 75405 - DNA, 268 bp, Zea mays
atgtgacctttcatctatcaatcaagtaaaatcgtttgcaacaaagttcacttcgatggataaaccactccatgtcttggtaaacaatgctggcttattagagcacaagcatgagactacagcagaagggttggagctcaattttgctgtcaatgtagctgcaacatacactttaacagagctagttatgccgtcattggagaaagcggcaccagatgctcgtgtcatcacagttgcatcaggaggcatgtacaccgagccactgaac

SEQ ID NO: 75406 - DNA, 268 bp, Zea mays
gcaagcactacctctggccgctcctccactacctcctcccgctgacgccgtcctcgctcggtggcctccctttccagcggacgctctaccactccttcctctcggccaacagggcgttcgccgaccgcctcaccgaggtgctgtcccccgacgaggacctcgtctggatccacgattaccacctcctcgcgctcccgaccttcctccgcaagcgcttcccgcgcgccaaggtcggattcttcctccactcacctttcccctcgtcgga

SEQ ID NO: 75407 - DNA, 268 bp, Zea mays
ggcctccaacatctggttcaatctgaaggccgcgccatccatgtcggacgccgcgatggggaagctaagcctcggcgcgaaggcgctgtcggagggcggcttcgagaagctgtacaagcagacgttctcgtccagccccgacgagcacttgaagaagacgttcgcatgctacctctccaggtcacggggcccgtcgccggcacgctgtacctgaccaacctgaacgtcgccttctgcagcgaccgcccgctctccttcgccgcgccgt

SEQ ID NO: 75408 - DNA, 257 bp, Zea mays
gcagaagaagcgaagtcgtcgccggagcaggaggaagagcgagcagcaagatgtcgtggcaggcgtacgtcgatgaccacctgctgtgcgacatcgaaggccagcacctcagcgccgccgccatcgtcggccacgacggcagcgtctgggcacagtccgagaacttccccgagttaaagcctgaggaggttgctgggatgataaaggactttgatgaacctggaactcttgcaccaactggtctttttgttggacgt

SEQ ID NO: 75409 - DNA, 252 bp, Zea mays
ggaaaatacgtagttcacgcccgcgtcatgagcaacatcttgttagatgggccagttggcagcttcatgacattgaatccctatccaagatggtggacccacctatacgtggacaatgttctgagaaagcattgtcacattttgctgacataatcagccgctgtatccagcggcagccagagttcaggccaccaatgtctgatattgtacaagacctaactagacttgtaaatgctactggtgaggaatcag

SEQ ID NO: 75410 - DNA, 257 bp, Zea mays
agaccgagaacgaggaggtcaagcgcaacgtggaggccgacacggctggagaactacgcgtataacatgcgcaacacggtgcgggacaagaagatcgcgtcgaagctgcccgccgatgacaagaagaagatcgaggacacgatcgaggacgccatcaagtggctcgacggcaaccagctcgaggaggccgaggagttcgaggacaagatgaaggagctggagagcatctgcaaccccatcatctcacagatgtacca

SEQ ID NO: 75411 - DNA, 251 bp, Zea mays
agaagaaaaaaaaacacccacacccacacccgcgtccgcgtgctctctctgccccatccgcgcgcccctcctcctcctccaccgcccgtcccgccgccgcccggccgtctggtggcgatggcgtaccgggcggacgacgactacgactacctcatcaaggtggtgctcatcggcgactccggcgtcggcaagtccaacctgctctcgcgcttcacgcgcaacgagttcagcctcgagtccaagtccaccat

SEQ ID NO: 75412 - DNA, 258 bp, Zea mays
ctccagcgcctccaccctcctcgccgcctcactccctctgaggtcgcagatccgtccggttagacgaagccgcccgcacccatggcctccggtgagctcgcctgcacctacgccgccctcatcctcagcgacgacggcatcgccatcaccgccgagaagatcgccaccatcgtgaaggcggccaacatcaaggtcgagtcctactggccggcgctcttcgctaagctcctggagaagcgcatgttgaggatctaatcc

SEQ ID NO: 75413 - DNA, 256 bp, Zea mays
agaagaagcgtagtcgtcgccggaaggaaaggcgcggagcaagatgtcgtggcaggcgtacgtcgacgagcacctgatgtgcgagatcgaaggacagcatctcagcgccgccgccatcgtcggtcacgacggcagcgtttgggcgcagtccgagagcttccccgagttaaagcctgaggaggttgctggtatcataaaggactttgatgaacctggtactcttgcaccaactggtcttttcgttggaggtacaaat

SEQ ID NO: 75414 - DNA, 250 bp, Zea mays
cgtcgccctcaaattcgttccgtccaggcaaggaagaaatcgagcagccaaggagaggagaagatggctcgtacgaagcagaccgcccgcaagtccaccggaggcaaggccccgcgcaagcagctcgccaccaaggcggcgaggaagtcggcgccgacgaccggcggcgtgaagaagccccacaggtacaggcccgggacggtggcgctgcgcgagatccgcaagtaccagaagagcacggagctgctga

SEQ ID NO: 75415 - DNA, 255 bp, Zea mays
tgcacattgaaattttcgcaccgtcagtcttcaatcaaccaccgtctcgaagtcaacacctttcacaaccacacacaaatcaaacaaaatggagaacgaaaagggagagattgttgatctctacgttccccgcaaatgcagcgctaccaaccgcatcatcaaggccaatgaccacgcctctgtgcaaatctccatcggcaacgttgacgagaacggccgctacaccggcgagaacggcgtctatgcgctcagcgg

SEQ ID NO: 75416 - DNA, 244 bp, Zea mays
agaacagtgatgctgccacagatgacgaaagggccaagcttgaggtcgttggggagtaccatctcggggagtttgtgaacagattccgccatggttcactcgtgatccgccttccagactcagagatagggaagattcctacggtcatctttggcacaataaacggggtcattggcattatcgcctccctcccgcatgaccattacaccttcctggagaagttccagtccactctctgtcagta

SEQ ID NO: 75417 - DNA, 251 bp, Zea mays
ggggagaatgcgttgctaaatgagaagctgttgcctctgacgagatggttgttctgtctgccgaatcccatcgcactcaacactgctctggctcagcttggggtggcaaggcctgttttcaggttgccgtatgttcctcttcctcttgagaagaggattgagtttgtccggatagttgaagctattggacggggaaactttgtgggacagcaagaggcacgtgttctcgacgatgatgattttgttttgat

SEQ ID NO: 75418 - DNA, 254 bp, Zea mays
agctctaacgggagcatctgccttgatatcctcaaggagcagtggagccctgcactgaccatatcaaaggtcctcctctccatcagctcgcttctgactgaccccaacccagacgaccccctcgtccccgagatcgcccacatgtacaagaaccagaggccgcgctacgaggaaaccgcacgggcctggacccagaagtacgcgatgggctagctgattctgtctcgccgaacaatactgtcactggcaagaag

SEQ ID NO: 75419 - DNA, 246 bp, Zea mays
cgagaggaagcacatgacggctgtcatcctgctgctccacctcaactgctttgctcagtacgcgctctgtggcctcaaccttggctaccggaggccccggcgtccggtggtcggtgtcgccctcaccgtagcggtcgccatctgcgcgccggccgtcgctgggatgtacaacaacctcagtcctctcgggagagactacgaggcgccggcgccggcggaggggatgataatacgtgaggaagagtc

SEQ ID NO: 75420 - DNA, 251 bp, Zea mays
attccaggtggatgtgagcttggaaggaagcctgatcctttgcaggcaggttgatcagccaggtatgattgggtcggtaggaagtgtcttgggtgaggagaacattaatgtcagtttcatgagtctcggaaggattgctcctcgcaagcatgctgtcatggcaatcggtgttgatgaggaaccaagcaaggtcacactgagaaagattggggagattccagcaatcgaagagtttgttttcctcaagcttt

SEQ ID NO: 75421 - DNA, 251 bp, Zea mays
gtccagggtgcaagggtgagaaggtcgttcaggagaagaaggttcttgaggttcatgttgagaagggaatgcaacacagccagaagatcaccttccctggtgaagctgatgaagcgcctgataccgtcactggagacattgtattcgtcctccagcagaaggaccactccaagttcaaaagaaagggtgaagatctcttttatgagcacaccctgtctctgaccgaagctctatgtgggttccaatttgtt

SEQ ID NO: 75422 - DNA, 252 bp, Zea mays
cttcttcctgaaatatttgcctcgagaataagggccaaggctgtcgcattatctctaggcatgcactgggtatctaactttttcattggcctgtacttcctgagtgtcgtcagcaagtttgggatcagcaacgtgtatctgggcatttgcatcagtatgtgcccttgcagttctgtacatagctgggaatgtggtcgagaccaaggggagatcacttgaagagattgaaagggagttaagtgtagcagaatg

SEQ ID NO: 75423 - DNA, 243 bp, Zea mays
gtttcaacgaagttgagactatacctgagaacatttgctttgcagccagccttgtgaagttgaatgtcagcaggaactttgccgacttaagagccctgccaaaatcaataggggaacttgagatgctagaggagctggacatcagtagcaaccagatacgagtgcttccagactcttttgggcatctctcaaagctacgtgtgtttcatgctgatgaaactccactggaagtaccgcccaaag

SEQ ID NO: 75424 - DNA, 96 bp, Zea mays; identical to SEQ ID NO: 75380

SEQ ID NO: 75425 - DNA, 261 bp, Zea mays
tggagctcagatggagtggtgttggcattgaagattggtggagaaatgagcagttttgggttattggtggcacctctgcccatctcttcgcggtgttccagggtctgctgaaagtgttggctgggattgataccaacttcacagttacctcaaaggcatctgatgaggatggcgactttgctgagctatatgtgttcaagtggaccagtttgctcatccctccgaccactgttcttgtcattaactggtcggaatggtggc

SEQ ID NO: 75426 - DNA, 251 bp, Zea mays
ggagcattcgagaagccgaagaaaattcgaagacgaggaccagctacactgcggacggacttcgggcatggagggccagttccaggttggcaaggaggaggtcatccaagcatggtacatggacgacagtgaagaggaccagaggcttcctcatcatcgtgagcccaaagaattcattcctcacgacaaactttccgaactaggaatattaagctggcgcctaaatgctgatgattgggaaatgatgagaa

SEQ ID NO: 75427 - DNA, 255 bp, Zea mays
gtaaaaccttgttggcgaaggcaattgccaacgagtgccaggctaacttcatcagtgtcaagggtcctgaattgcttaccatgtggtttggtgagagtgaagccaacgtccgcgaaatttttgataaggctcgccaatctgctccttgtgtcctcttctttgatgagcttgactcaattgcgactcagagaggaagtagtgtgggtgatgctggaggcgcggctgatagagtgcttaatcagctactgaccgaga

SEQ ID NO: 75428 - DNA, 248 bp, Zea mays
gagagatcagcgacttaacaacaataatggccaccgccatagttcccacggacgccgagctgctgcaggcgcaggccgacctgtggcgccacagcctctactacctgacatccatggcgctcaagtgcgcggtggagctccacatcccgaccgccatccacaacctaggcgggtctgccacgctgccggacctcgtggccgcgctgtccctgccagcggccaagctcccgttcctcgggcgcgtgatg

SEQ ID NO: 75429 - DNA, 250 bp, Zea mays
cgcacaattgtcaccgtcgctatggcccgtatcaaggtgcacgagctccgggggaagagcaagacggacctgcaggcgcactcaaggagctgaagtctgagctctccctcctccgcgtagccaaggtcaccggcggcgcacccaacaagctctccaagatcaaggtggtgcgcacctcgatcgcgcgcgtgctcacagtgatctcgcagaagcagaagtcggcgttgcgggaggcgtacaagaagaagaa

SEQ ID NO: 75430 - DNA, 127 bp, Zea mays
tgcacccgtactgttcacgctgacttggcatttgcttttgtgtcacacttgtacttttaccttcttttaagccgaaggtacatttgtaatttgatatcatttctatttttcaataataataatatag

SEQ ID NO: 75431 - DNA, 252 bp, Zea mays
agaagaccgacgactcactcacaaccaattagctcaagatcgagctatagagagaaaagctaagatcgaaacatataccaatgggcaacagccttaggtgctgcctggcctgcgtcctcccctgcggcgcgctggacctgatcaggatcgtccacctcaacggccgcatcgaggagtacggccggccggtggccgccggcgagatcctggccgccaacccgaaccacgtcctcagcagccgtgctcccaggg

SEQ ID NO: 75432 - DNA, 247 bp, Zea mays
gtaagatccggctcagaggatgtctgcttcagaactcttgaatcacccttttttgaagaagttcgaggataaggacttaaacctggggattcttgtggagaacctggaacctccaatgaatatacccgaatagcctgtcgtttttagtgatgaagcctttgttgtgccttcagggtttggcctcgaagcctcttggcatctgctcctcaactgcagcctccctacctgaatatgctataacatcatt

SEQ ID NO: 75433 - DNA, 245 bp, Zea mays
aagacaggtgcgatataactggcatcctcttggagatggacagaatattaaggcccgagggcacagctatcatccgcgacacagtcgacgtgctcacgaaggtccaggcaataaccaagcggatgcggtgggagagccgcatcatggaccacgaggacggccccttcaacccggagaaggtcctcatggcggtcaagacgtactggaccgccgaagccgaggaggagcactagacacgagtgaca

SEQ ID NO: 75434 - DNA, 148 bp, Zea mays
ggcgcgatcctgggcctgcagcctcgccaggtggccgtctggttccagaaccgccgcgccccgtggaagaccaagcagctcgagcgcgacttcgaccgcctcaaggcctccttcgacgctctccgagcggaccacgacgccctcctcc

SEQ ID NO: 75435 - DNA, 210 bp, Zea mays
gttcatccgtgttcttgtttgcgaggtcgagagagagaggatgtcgtgctgcggaggcaactgtgggtgcggctccggctgcaagtgcggcaacggctgcggagggtgcagcaagatgtacccggacatggctgagcaggtgaccaccaccacccaggctctcatcatgggtgtcggcccatccaaggggcacgccgagggcgggttcga

SEQ ID NO: 75436 - DNA, 250 bp, Zea mays
cccacctcccggtccggcagcagagagcgggggtgcagagagatcgagatccggaggccgcgagtgggagcgccaccaccagcgtctgcggcaatggcgggcacggtgacggtcccggggtcgtcgaccccctccacgccgctgctcaaggacgagctcgacatcgtgatcccgacgatccgcaacctcgacttcctggagatgtggcggcccttcttccagccctaccacctcatcatcgtgcacgacg

SEQ ID NO: 75437 - DNA, 268 bp, Zea mays
tcggtattcggctcgaggctgaagcttgtggaagaacaaaaagtatgtaccttggctcctgtgatatgatgctttaggtttcaaacaatgtgtcctatggtagtcttactgtatggaaactacagagggagaaacatgctgcgttaaagaagattctgatgttggaacaacaattggatgcaaaacaaaagcttgaattagaaatacagcagttgaagggcaaactaaaagtgatggagcatatgccaggtgatgaagattcagcgtc

SEQ ID NO: 75438 - DNA, 246 bp, Zea mays
gtttggcaaggaatacgtcctgggctactggccgtccttcctcttctcctacctcgcggacagcgcgtcgatgatcgaatggggcggggaggtggtgaactcggagcccgacggcacgcacacatcgacccagatgggcagcgggcacttcgcggaggaagggttcagcaaggcgagctacctcaagaacgttcaggtggtggacagcagcaaccagctcagcgcccccaaggcgtaggcaccttc

SEQ ID NO: 75439 - DNA, 250 bp, Zea mays
gttgactacaagaagaaagttagccagatggtcaagttctctcttcatatcagtattcagaagagtttggtaaccctctcttccaccccagaacacatagttttcaccacctaggtagtgagtgacctccaaagctttcttaacttgtgcagccgcataagcatatactttaacctctgggctcgtagcagcaccatgcatgtaacgtggatgcataaagagctgtgcggtaccaacaatggctttatat

SEQ ID NO: 75440 - DNA, 251 bp, Zea mays
ctcggatgaagacggcgacttcgcggagccgtacatgttcaagtcgacgacacttctgatcccgcccaccaccatcctgatcatcaacctggtcggcgttgttgccggcatctcctacgccatcaacagcgggtaccagtcgtggggtccgctcttcggcaagctcttcttcgccttctggttgatcgtccacctgtacccgttcctcaagggtctcatgggtcggcagaaccgcacccgaccatcgtggt

SEQ ID NO: 75441 - DNA, 250 bp, Zea mays
gcgatcgctcgaggaggacgttgccgcgcatgtcaccggcgacttccgaaagcttttagtgcctcttgctagtgcgtaccgctatgatggcccagaggtgaacacatctttggctcattctgcagccaaaatacttcatgagaagatccataagaaggcttacagtgatgaggagatcattagaattctcaccacacggagcaaagctcagctacttgcaacattcaatagctacaggatcagttcactc

SEQ ID NO: 75442 - DNA, 273 bp, Zea mays
ccagcggtgccgacttcggctccgaccagacctcctcgccatggttcaataggggcgcgggcggcacccctctcaaaccgtacgtacgtatatgcgtccaaaccaaaaacctgcgcgcatcaccgtcaccgtcacctcctcctttactttaccagtccaccaagcatgcaccatcagtccatcacacttttctcttgttcatctgtaatcccccgtgccattccattatttattgatttgtttcgtgtataataagatccccaccgttgcgga

SEQ ID NO: 75443 - DNA, 266 bp, Zea mays
tggaaatcaaaactgaaagcacagttccaagccgaatgaatattcttcattcatgggcgatttctcaactgccaccggcatagctacatttacaatgatgttgttaggaagagtgatcctcagaaagtttgggtggggagttgcagctacgatcacgcctgcagtgttactcctcacagtagttgggttcttctcactgatttgtttggtgagccattgactcctcttatgaccaagtttgggatgacgcctttgcttgcggcagt

SEQ ID NO: 75444 - DNA, 266 bp, Zea mays
  unsure (1)..(266): unsure at all n locations
tgattggctggcttgagataaagtggggcgggtcacatggctggactatntggcgcaatgagcagttctttatgatcggctcaacaagtgcatatccaatggcagtgctgcacatggcagcgaacctactcacaaagaagggcatacacttcagggtcacttccaagcaaacagccgcggacgacaatgacaagttcgccgcctttatgattttcgatgggtgccaatgctcatcccaacaatggcagttctgatctgcaatgttg

SEQ ID NO: 75445 - DNA, 271 bp, Zea mays
  unsure (1)..(271): unsure at all n locations
gtgaaccttatgatttggcactgcaccatcccggcaagcaagggacagattgggaaggtggatacttccctctcacccttcatttcagtgaggattaccctagcaagcctcccaagtgcaagttccctcagggttttttccacccaaatggttggagaccagctattactgttaagcagattctcgtcgggatcgtgngattgtagatcagccaaatcctgctgatcctgctgaaacggatggctatcacctttttatccaggatcctaca

SEQ ID NO: 75446 - DNA, 267 bp, Zea mays
gctgggtgagggtctcatacctacttacagcatgcgcatgacatgctattggtgaaaaatccaaagacagttccatatcgagctactacgtatggagtgttggttgagagcacgtccttgtggaagatgcatgatctgcacagcaatgaagcaaatgctgaagatggtgtgaggcttattcccagtggaacacaaattgttctttctgtgaagtcacaacaacatgcgatgcaatgtgatgcgctggcagatgaaataagattgata

SEQ ID NO: 75447 - DNA, 264 bp, Zea mays
cggctcgagagcatcacagctgctcctaaaacccatatgcagccaccaaagcgggagcggagatgcttgtaatggcatatgggagatcctatggactgccagttatcactactcggggaaacaatgtctatggcccaaatcagttccctgagaagcttatcccaaagttcattctcttggccatgagaggggagccctccctatccatggtgatggagtcaatgttcgtagctacctctattgtgaggatgttgcggaggcatt

SEQ ID NO: 75448 - DNA, 207 bp, Zea mays
gttcatccgtgttcttgtttgcgagtcggagagagaggatgtcgtgctgcggaggcaactgtgggtgcggctccggctgcaagtgcggcaacggctgcggagggtgcagcaagatgtacccggacatggctgagcaggtgaccacctccacccaggctctcatcatgggtgtcgcaccatccaaggggcacgccgaggcgggttcga

SEQ ID NO: 75449 - DNA, 267 bp, Zea mays
gcgcagtgcccgtgactcccacgttcggtgctagctcctctcccaattgggttcgccgtgttcatggtgcacctggccaccatccccatcaccggcaccggcatcaacccggcgaggagcctgggagccgcggtcatctacaacaaggacaaggcctgggacgaccaatggatcttctgggtgggcccactgattggcgcgccatcgccgccgcctaccaccagtacgtgctgagggccagcgccaccaagctcgggtcctaccgga

SEQ ID NO: 75450 - DNA, 263 bp, Zea mays
cggatgaccccttgcagttccacttaccaaggacgactgatggaggagtacagcatcgcacccaggtgtggaagctcagctcctgtgatatgtgtgagctggcccgaaacagtgtgctcatgagcggcttctctcacaaggtgaagagccactggctgggacacaactataccaaggagggccctgagggtaacgcatccgccgcaccaatgtgccggacatccgagtaggctaccgctacgagaccctgtgccaggagctgg

SEQ ID NO: 75451 - DNA, 261 bp, Zea mays
cttgccgccgtcgagtcgtcgatgacgatgacccggcggaacggctgtacgatctacgtgggcaacctccccggcgacatccgcgagagggaagtggatgatctcttctacaagggaaggcaatgtggattgcgaatgtatggacgtatagtggaaattgacttgaaaattccaccaaggcctcctggttttgctttgttgagtttgaggacgcacgtgatgctgaagatgcaatatatggccgtgatggatacaactttg

SEQ ID NO: 75452 - DNA, 262 bp, Zea mays
attaaggcactatgctcctgcgtgccataatccttgttgggacaaaacttgatctgcgtgatgataagcagttttttgttgatcaccctggtgctgttccaatttccactgcccagggcgaagagctgaggaagctaattggtgctgccgcctacatcgaatgcagttcaaaaacccagcagaacataaaagcatgtttgacgcagcaattaaggtggttctccagccaccaaagcaaaagaagaggaagaagaaggtgcag

SEQ ID NO: 75453 - DNA, 145 bp, Zea mays
ggcttcggcttcgtcaccttctccacggaggaggcgaccctgcacgccgtcgagggcatgaacggcacggagctggacggccgcaacatcaccgtcaacgaagcccagtcccgcgctggccgtggaggcagcggcggcggctaca

SEQ ID NO: 75454 - DNA, 274 bp, Zea mays
cgctgattataaagatgaatttgtcacaaagcatggtgtaaaattgggtcttatgtcttgctttgtcaaggctgctgtttctgcacttcaaaaccagccaattgtcaatgctgtcattgatggtgatgacatcatatacagagactacgtagacatcagtgttgctgttggcacttccaagggccttgtggttaaccttatccgagatgctgataccatgaactttgctgacattgagaaagggataaacaaccttgcaaagaaagcaactgag

SEQ ID NO: 75455 - DNA, 273 bp, Zea mays
caaattgctagtggctgatgatttgcaatccttcggcgagcaactgaggaagaactatgaggagacaaaagagctactccttcaggttgctggtcacaaggacgtccttgaaggtgatccttatctgaagcagcgtctgcggctgcgtgagtcctacatcaccactctgaacgtgtgccaggcctacaccctgaagcggatacgcgacccgagcttccaggtgagcccgcagccgcccctgtccaaggagttcaccgacgagagtcagccggc

SEQ ID NO: 75456 - DNA, 275 bp, Zea mays
cttgcaatcacaacgaacagaagctctcgatctcaccgacaccgaggaagaagagatcaatggcgtccgagcagggagtcgtgatcgcgtgccacagcaaggctgagttcgacgcccacatgaccaaggcccaggaagccggcaagctggtggtcatcgacttcactgccgcctggtgcggtccatgccgcgccatcgccccactgttcgtcgaacacgccaagaagttcactcaggtcgtcttcctgaaggtggacgtggacgaatgaaggtga

SEQ ID NO: 75457 - DNA, 284 bp, Zea mays
ccactacaggtaaggcagaggagggcaggatgtcgcaccgtaagttcgagcacccgaggcacggctccctcggcttccttcccaggaagcgctcctcccgccaccgcggcaaggtgaactcatttcccagggatgaccccaagaagccttgccatctcactgccttccttggctacaacgctggcatgactcacattgtccgtgaggttgagaagccaggatccaaactccataagacggcaacttgtgaggctgttaccatcattgaacaccctcctcttgtc

SEQ ID NO: 75458 - DNA, 281 bp, Zea mays
tggaaactgaacgatgggcacactgcgggtgatcaggtggcagcgatgtgaggacggtcagcatggccatggagatgctgatgaagcctaggttggtcatcctagatgagcccaccattggtttggatagaaactctttcaggcatgaactaactgtactggagaaggttcgacactgtactatgttgctcagttcgtcggagctgtcactcaggacatacctatgatgattgtttctgaactccatgaagagacttatgagatgtatccagaagaaagca

SEQ ID NO: 75459 - DNA, 274 bp, Zea mays
ggctgcgatccgccgccatcgcttcaagcagcgaaccctagccgccctcagcgacggattgcagatctcccagccatgacgttcaagcggaggaacggcggacgcaacaagcacgggcgcggccacgtcaagtacatacgctgctccaactgcgccaagtgctgtccaaaggataaggctattcacggttcttggtgaggaacattgttgagcaggctgctgtgagggacgtgcaggaggcttgtgtgcatgatggatatgttcttcccaaatt

SEQ ID NO: 75460 - DNA, 272 bp, Zea mays
ctgagagcggtggcgctggagggtctccggcgccatccgccggggcaccagatgccgccacgcagggtgagggaggacgtggaggtgggtgactacgcggtgcccaagggctcagcgatcaacttcatgctgtacgacctgggcatggacgacgccacgtgggaccgcccagcagtgttcatgccgagaggttcctgcccggcggggaagccgaggcgctggacatcaccggcaccaaggagatgaagatgataccgtttggggcgggcaga

SEQ ID NO: 75461 - DNA, 268 bp, Zea mays
  unsure (1)..(268): unsure at all n locations
ccgagggnntgatgggtttcatcatggacttcgcggagaatctgatcctccgtctgatggaggacccggacaagcgcgaccaggttcggcgggcgcatgtctacaagatgaaggagcggtgcgagcgcactaaggcggcgtggagcctccctctgcgcccctacggcttctggaccttcgacgcttcaactcgcagctctcctgggatccccagatcagccaggccgccggccgtcgggacccctacgacgacctcatcgcccgccac

SEQ ID NO: 75462 - DNA, 278 bp, Zea mays
agcggatacgcgacccgagcttccaggtgagcccgcagccgcccctgtccaaggagttccccgacgagagtcagccggcggagtggtgcagctgaaccagcagagcgagtacgctccaggcctggaggacaccctcatcctgaccatgaagggcatcgccgccggcatgcagaacaccggctaggcaagatcttcggtgtgcaaataacctgtctcccatgagacggtggacgatatgtgtaggcctgtgagcagttagtacaccggcgccagtgtgt

SEQ ID NO: 75463 - DNA, 272 bp, Zea mays
tgctaacacccaagggaaaatcgttctggaggctttagtgctgacggctggcgtggtggtttctctgactgcgtatgctttctgggcgtcaaagaagggcaaggaattcgggtacctggggcctatcctgtcttccgcgcttactatcctcgtcctaactagctttcttcaggttttcttccactgggacccgtgtcggtgggcttgttcggtgggctaggggctctggtcttctcaggcttcatcctgtacgacaccgagaacctgatcaa

SEQ ID NO: 75464 - DNA, 270 bp, Zea mays
cattccttccccaactctgcaggctgctcgtcgccctccctccacgccggacgcgccccgatccagatccaggggcgtaacatggcatcaaaacgtatcctcaaggaattcaaggacctgcaaaaggaccctccaacgtcatgcagtgctggtcctgctggtgaggatatgttccactggcaggcaaccatcatgggtcctcctgatagtccatatgctggaggtgttttcttagtgaacattcatttcccctcggactaccctttcaag

SEQ ID NO: 75465 - DNA, 267 bp, Zea mays
gagactacccggcgacgatgcgggctcgggttggagagaggctgcccaagttcaccgcagacgaggctgcccttgtcaagggggccctggacttcatgggcataaaccactacaccactttctacacgaggcataacgccaccaacatcatcggacggctgctgaacgacactttggcggacaccggaaccatcagcctgcgtgagtcctcgtcgtgtgtgtttgcaagttcatttcaactgaaaaaacgaaaccttgaaggctgct

SEQ ID NO: 75466 - DNA, 268 bp, Zea mays
cagcaggcggcggcgatggcatggcgggcgagcctgtctcggcgcctaaaggagatccgcgtcctcttctgtcagtcctccccggccagcgccgctgcccgtgagttcgtgaagaagaactatggtgacatcaaggcccgcaacccctccctccccttccttgtccgcgagtgctccggtgacccgccccagctctgggcgcgctacgatatgggtgtggagagatgcgtgaacttggatggcctgacggaagcacagattgataaaa

SEQ ID NO: 75467 - DNA, 274 bp, Zea mays
gccatgcacgccggcgctcgtaggctcctccccttcctccgcctcattgagcttcgccacgtcgcagctcgccggcctctccctctccgccggcgttgcaactccaaccgccgtcgccctcctccccaagaggcagcagctccagcccactgtcgcgcggcgtgtgtgcccgttcacggaccagagacgaaccgggcgaacaaggtgtcgtcttccaaccacaagacgaagaagcagcagttcgtgaacctgcagtacaagaagctgtggtggg

SEQ ID NO: 75468 - DNA, 276 bp, Zea mays
cttgcctgttcttaattattgccaggacaggagaaacaatcaaagatgaggcctcagctgatactcgtcggcactctggctgttctcgccatcctcgcagctctcggcgaaggctcgtcgtcgtggccgtgctgcaacaactgcggtgcttgcaacaagaagcagccgccggagtgccagtgcaatgacgtgtcggtcaacgggtgccatccggagtgcatgaactgcgtcaaggtcggtgcaggaattcgtcccggcatgggccatggccccgtc

SEQ ID NO: 75469 - DNA, 271 bp, Zea mays
gttagccagccctaaacccttctgtcccgatggcgtcgtcgtcgtcgccgccgccgccgaagctgccgattcccggccgccgcaacatactcatcactagcgcacttccgtacgtcaataatgtcccgcacctagggcacatcatcggctgtgtgctcagcgcagacgtgttcgcgcggtactgccggctccggggttacaacgctatctacatatgcgggacggacgagcatggcaccgccaccgagacgaaggccatggaggagaagtg

SEQ ID NO: 75470 - DNA, 273 bp, Zea mays
ggaaggtgttgggtggttcaactaataacaaatcaggcttcaagtcatcgagaggatggtgacaatggcaagcctgatatcaggttggttggtgagcagcacgccagtggtcgacggggggttgttccatcataatcatattacagcggctgcaactgacaggcccaatgcatcttctcttccatgttggatcaacactcttgtaatgtattatttactgtgcggatctgagaggatgtgaatgatttcatttgcgtcctcaagttcaaaaga

SEQ ID NO: 75471 - DNA, 271 bp, Zea mays
  unsure (1)..(271): unsure at all n locations
gctcaatgtccaaaatggtgttctgaagtcactctctttcctctttgagtatattggtgagatgggtaaagattacatatatgctgtcactcccttacttgaagatgctttaatggatagagatctggttcaccggcagactgctgcatctgctgttaagcacatggctctaggtgttgcttgctcgggttgtgaggatgctcttgttcatctgcttaactatgtttggcncaacatatttgagacatctccccacgttataaatgctgtc

SEQ ID NO: 75472 - DNA, 266 bp, Zea mays
attaaggcactatgctcctggcgtgcccataatccttgttgggacaaaacttgatctgcgtgatgataagcagttttttgttgatcaccctggtgctgttccaatttccactgcccagggcgatcagctgaggaagctaattggtgctgccgcctacatcgaatgcagttcaaaaaccagcagaacataaaagcagtgtttgacgcagcaattaaggtggttctccagccaccaaagcaaaagaagaggaagaagaaggtgcagaa

SEQ ID NO: 75473 - DNA, 266 bp, Zea mays
gtcatgaatccaccaaaggttggagacgaatcatatgcttcctacaaggcagagaaagatggaatccttgagtctttagctcgtcgtgcaaaggcgttggaggatgcattcaacaagcttgagggattttcatgtaacaaggccgaaggagcaatgtatcttttccctcagattcttctgccacagaaggcaatcgaggctgctaaagctgctaagaaagcgcctgacgctttctacgctctccgtctccttgaatcgactggaat

SEQ ID NO: 75474 - DNA, 394 bp, Zea mays
  unsure (1)..(394): unsure at all n locations
cggtcggcagccgggtcgagnacgcgtccggcgcaacaatcccgacgcgaatcgcccagaacgcgaggcggaatttcccattctcttggacccccccccccccccctctgttcttcctccttcccccgctcctcgtccacacgctccgctccgattccgcccgcgtccgcggacccagatccggcgcccgcgcccatggcgacgcgcaggcgaatgttcctcaaggtcatcatcctcggcgacagcggggtcggcaagacctcgctgatgaaccagtacgtcaacaacaggttcagcaaccagtacaaggccaccatcggcgcggatttcctcaccaaggaggtccagatcgacgaccgcctcttcacactgcagatatgggatacggcaggac

SEQ ID NO: 75475 - DNA, 423 bp, Zea mays
ggagatcggaattgtcaaaggggacaatgacgacgacgcactcgtacaccggcgaccagaggctgctggacgcgtcccaccgcgacctccggcgggcccgcgcggcggcgctgaacatcgtgccgacgagcacgggcgccgccaaggccgtggcgctggtgctgccgcagctgaaggggaagctgaacggcatcgcgctgcgggtgccgaccccgaacgtgtccgtggtggacctggtgatcaacaccgtgaagactggcatcacggccgacgacgtgaacgccgcgttccgcaaggccgccgccggcccgctgcagggcatcctggatgtctgcgacgtgccgctcgtgtccgtcgacttcaggtgctccgacgtgttctgcaacatcgacgcgtcgctcaacatggtcatgggcgacgaca

SEQ ID NO: 75476 - DNA, 395 bp, Zea mays
catcaccccggagatcttcggcaagatgggcatcatcccgccggagaccgcgctgccgtggttcaagacgggcgtcatcccgcccgcgggcacctacaactactgggccgactcctacacgctcttcgtcttcaacatggcgctcatgggcttcgccgagcaccgccgcctctaggactggtacaacccgggctccatgggcaagcagtacttcctcggcctcgagaagttcctcgccggctccggcgacgcgtcctaccccggtgggcccctcttcaactcgctcggatttcggcaagacctagaaggacatgaatgagctcaagctcaacgagatcaagaacggcatgctcgccatgctctgcatcctcggttacttcatccaaaggctcgtc

SEQ ID NO: 75477 - DNA, 438 bp, Zea mays
  unsure (1)..(438): unsure at all n locations
ctcaacagccgcagccaaaccctctccagcagccgtcgtcgccaccgctgcagcgcggaggcgacccccatcgccgccaagatgcagatcttcgtgaagaccctgacggggaaaaccatcacgttggaggtggagtcctcggacaccatcgacaacgtgaaggccaagatacaggacaaggagggcatcccgccggaccagcagcggctcatcttcgccggcaagcagctcgaggacggccgcaccctcgccgactacaacatccagaaggagtccaccctccacctggtgctccgcctccgaggtggcgccaagaagcgcaagaagaagacgtacaccaagcccaagaagatcaagcacaagcacaagaaggtgaagctcgcagtgctgcagttctacaaggtggacgacgccaccggcaaggtgacncgcctccgc

SEQ ID NO: 75478 - DNA, 466 bp, Zea mays
ggtcggtatccgggtcgagccccgcgtccgctgggataatggtgtttggtggttttcttgcaccaatcctggaacttaaacttggtgtagggggcacgtcttatgaagacttcatccgcagcgttcatctgccgatgcagttgagccaggtagatcccattgtggcatctttctcaggcggagcagttggagttatctctgccctaatggttgttgagataaacaatgtcaagcagcaggagcttaagcggtgcaaatactgtttaggaactggatacctggcatgtgcccgctgttcaagtacgggcgctcttgtgctcacagagcctgtttcaacattcagtgatggcgatcagcctttatccgcaccaaagacagagagatgctcgaattgctcagggtcgggaaatgtgatgtgtccaacatgcctctgcactgggattgaaatggaaggcgagcatgaccc

SEQ ID NO: 75479 - DNA, 419 bp, Zea mays
caaaacaccacacctcttcctcctcttcctcctcctagcacagctagcgcctgctccccttcgtctgtgatcatgtcttgcagcagcggcaagtgcaactgcggctccagctgctcctgcggcagctcatgcaactgcatgtcccctgacgtggagaccgccgccgccagcagcatcaagaccatggtcctcgctgcgccgaccaccaaggccagcgccggcggcttcgaggcggccaccgagggcggcggctgcgactgcaacacctgcaactgcggcaccagctgcggctgctcctgctgcagctgcaactgagccggcccgcccggcccggcgatggcgcacgagagtcgagaggacgacgacgacgaggcgtataaatataatagcagcgtctaaataggatctgtcaactgcac

SEQ ID NO: 75480 - DNA, 433 bp, Zea mays
  unsure (1)..(433): unsure at all n locations
cccaagcgtccggcgggcgttcacgcacgggcccgacgccaccgacgcctggctgtggaagctggccaaggcgcacgtgctgacccacgacacggggtaccaccagctggtgagccactggctgcgcacgcactgctgcgtggagccctacatcatcgccgccaaccggcagctgagccggctgcacccggtgtaccgcctgctgcacccgcacttccgctacaccatggagatcaacgcgctggccagggaggcgctcatcaacgccgacggcatcatcgaggagtccttctggccgggcaagtacgccgtcgagctcagctccgtggcgtacggcgcgacgtggcagttcgacacggaagcgctgcccaacgacctcatcaagcgcgggctgggcgtgcgccgngaagacggggagctggagctcaacatc

SEQ ID NO: 75481 - DNA, 398 bp, Zea mays
tactgcatacacaacacagagcatcagaaggagctgcgatctgatcgacatggctgccgccaccatggctatcacctcccgcgcgctcatcggcaagccggcggctggcacgagggacgtcttcggcgagggccgcatcaccatgcgcaagaccgccgccaagcccaagccggcggcgtccggcagcccctggtacggtgccgaccgcgtcctgtacctgggcccgctgtccggctcgcccccgagctacctgaccggcgagttccccggcgactacgggtgggacaccgcggggctgtctgcggacccggagaccttcgccaagaaccgcgagctggaggtgattcactgccgctgggccatgctcggcgccctccggtgcgtgttcccggggctgc

SEQ ID NO: 75482 - DNA, 407 bp, Zea mays
aatagccatggcgctcgcctccgccacgtcccgcgccctcctctgtcgccccgccggcaccgcgcggcaccacctcgccgtttcctcatcctcccccgcctcctcgatccgcttcccccgcggtgccgacggaggcgccagcaaagcggccgtctctctccgcgcccccacgcctcgagcggtggcaacagcaacatctggtagcattgctccatcagtttcattgactgaaaacgccttgaaacatctgaaccatgtgagagctgaacggaatgaagttttgtgcttgagaattggagtcatacagggtggatgctcacgcatgtcttacaccatggcatttgagaatcgagagaatgcaagccctgatgattctgttgtagagtatgatggttttgcaatactct

SEQ ID NO: 75483 - DNA, 403 bp, Zea mays
gtcaaatacctcgtcatgggtaagccttgcctcgggcagactaaggccagaataagataacacgaaatgggtgtggagcggtggcgagagtagcgtgtaccctccgtggcaagaggctggacggtggtgtatctgtgctctcggtttgcgtgaacctgatctggtcttaagaaccccggtggcgggttgacatatgcaagggttaagtgctacatatgtcgtgtgattggagatcctcagctgagtataatcgattcggatcgccgtaccttcgcggttatgaagacttggtcactgccctgcaacctaaagtcaggatgtgaacactatggataaaaatgatgttgtattgatgagatgttgaaattagactagatgcaaatagagtctattaatacttaat

SEQ ID NO: 75484 - DNA, 392 bp, Zea mays
  unsure (1)..(392): unsure at all n locations
gcgtattagtgcgcgccgacctcaacgtgccgctcgacgagaaccagaacatcaccgacgacacccgcatccgggccgccatccccaccatccagtacatcctcagcaagggcgccaaggtcatcctctcaagccacttgggtcgccctaagggttttacacccaagtttagcttagctccccttgtaggacggttgtctgagcttcttggcattcaggtgcaaaaagccgacgatgttattggccctgaagttgagaggctggtggcggccttgcccaacggtggggttctgctgcttgagaacgtaagattctacaaggaanaggagaagaatgacccagagtttgcacagaagcttgcctccctagcagatctttatgttaacgatgca

SEQ ID NO: 75485 - DNA, 440 bp, Zea mays
  unsure (1)..(440): unsure at all n locations
gcagagccgccagacactccgtagtctgtaccccaagcaccggcgcggcggcggcggctaccatggcagtcgggaagaacaagaggatctccaagggaaagaagggtggtaagaaaaagaccgtcgatcccttctctaagaaggactggtatgacatcaaggccccatcggtcttcagtgtgcgcaacattgggaagactctcgtgtccaggacacagggtaccaggattgcctctgatggtctgaagcacagagtctttgaggtttgtctagctgatcttcagggtgacgaggatcaggcttacaggaaaatcaggctccgtgctgaagatgtgcaaggcangaatgtgctcacaaacttctggggcatgaattttacaccgataagctcagatctctagtaaagaagtggcagacattgattgaagcccatgttgatg

SEQ ID NO: 75486 - DNA, 431 bp, Zea mays
ccggggccaccacgcgtccgcgcaccgcgacgcgatggccgcgctccgcctcgcctccttcaccctccgccccgccgccgccgccgccgccttttccggcgcgactccatcggctccccggtccgcctctttctccagcgtggcgcgggggctcccctccctccgcctggccccgccccgccgccgccgcggggacctcgccaggccccgcgccgcggccgaggccgcggcggagagctacgcgtccgcgctgtcggaggtggccgtcgagaacggcaccctcgagcagacggtctccgacctcgagaagctggagaagatcttctccgacgaggccgtcgccgagttcttcgacaaccccaccgtcccgcgccaggagaaggccgagctcatcggcgagatcgccaagtcgtccgagcttcagccgcacg

SEQ ID NO: 75487 - DNA, 415 bp, Zea mays
ccggggccaccacgcgtccgcgcacgcatacacagcacagagtgaggtaagcatccgaaaaaagctgtgatctgatcgacatggccgccgccaccatggctctcacctcccgcgcgctcgtcggcaagccggcgaccagcaccagggacgtcttcggcgacgggcgcatcaccatgcacgagactgctggcatgcccaatccagcggtgtccggcagcccctgatacggggcgcattgccttctgtacctgggcccgctgtccggccagccccgagtctacgtgatcgggcagttcgccggtgactacggctgggacaccgcggggctgtccgccgacccggacactttcgccaagagcgcgatctggacgtgattcactgccgctggagcatgctgagcgcgctcggctgcgtg

SEQ ID NO: 75488 - DNA, 408 bp, Zea mays
  unsure (1)..(408): unsure at all n locations
ggaactgttgcactccgtgagatccgcaagtaccagaagagcactgagctgctgatcaggaagctgcccttccagaggctcgttagggaaattgcacaggacttcaagactgatttgcgtttccagagccatgcggtgcttgctctccaggaggctgctgaggcataccttgttggcctgtttgaggacaccaacctgtgcgccatccatgctaagcgtgtgaccatcatgcccaaggacattcagctggcaaggaggatccgcggcgagagggcctaatcgccacctcaaacatcgtgacaaaaaaatgaagtcctggggttattgttaatctggtgccattgtaaggacatatgagtanggtttgttttgtggatcgcaagtttctcctctgctactgttgctgct

SEQ ID NO: 75489 - DNA, 377 bp, Zea mays
ggcaatcactccccctccggttcgggttcgggttcgtgaggttctccggggttcggtttcgtgggtgggcggatcgagatggcggcgtcggatgttgagtaccgctgcttcgtcggcggcctcgcctgggccacggacgaccactccctccacaacgccttcagcacctacggcgaggtcctcgagtccaagatcatcctcgatcgggagacgcagaggtcccgcggcttcggcttcgtcaccttctccacggaggaggcgatgcggaacgccatcgagggcatgaacggcaaggagctggacggccgcaacatcaccgtcaacgaggcccagtctcgcggcggccgtggaggcggcggcggcggctacggtggtgg

SEQ ID NO: 75490 - DNA, 363 bp, Zea mays
  unsure (1)..(363): unsure at all n locations
ggagtaggggcttgcgatctccgctgcgggcgcggaagatggctgacccagagttggaagctatcaggcagagacggatgcgagaactacaacacggtgcggcaaatcagcaaaatgcgggccaacaaaaggctcaggaagacgcgaaacaggaagctgaggaacgccggcagatgatgcttgctcagatattatcttctgaagcaagagaaaggctttcccgcatagctttggtcaaacctgacaaagcaagaggggtggaggatgttttgctgagagctgctcaaactggtggaatatctgagaaggtgtctgaagaaagactcatctcncttctagagcanattaacagccacacaagca

SEQ ID NO: 75491 - DNA, 463 bp, Zea mays
cggtccggctattcgggtcgagccccgcgtccgcccaagagtccgagttgatctcagaacagagagttttttgacttgggaaagcctggagtcagtgcgtagaaacaaagttggcttgaaaggtcctatggctacacctattggaaagggtcatcgatctttgaatcttacattaaggaaagaacttgggctctatgccaatgtcaggccttgcaacagcctcccaggctacaagaccagatacgatgatgttaaccttgtgacaattcgtgaaaatactgaaggagaatatagtggtcttgagcatcacgttgtgagaggtgttgtagaaagtttgaaaattattacccgccaagcaagtttgagagtggcagaatatgccttttcattatgccaacgccaatggccgggaaagggtctctgcgattcacaaaggcaatattatgaggaagacagatggtcc

SEQ ID NO: 75492 - DNA, 432 bp, Zea mays
ggtcggctgatccgggtcgagccccgcgtccgcataacaacgcagagcatcagaagcagctgcgatctgatcgacatggctgccgccaccatggctatcacctcccgcgcgctcgtcggcaagccggcggctggcacgagggacgtcttcggcgagggccgcatcaccatgcgcaagaccgccgccaagcccaagccggcggcgtccggcagcccatggtacggtgccgaccgcgtcctgtacctgggcccgctgtccggctcgcccccgagctacctgaccggcgagttccccggcgactacgggtgggacaccgcggggctgtcggcggacccggagaccttcgccaagaatcgcgagctggaggtgatccactgccgctgggccatgctcggcgcgctcgggtgcgtgttcccggagctgctcgcccgc

SEQ ID NO: 75493 - DNA, 433 bp, Zea mays
  unsure (1)..(433): unsure at all n locations
gacactctcacgagccacagcccacaggctagctctctagcggtctagccagtccacgcagcgcagggatggcgtcgttcgccgtggcaacggccccgtcgctagcggccccggcagccaagaggaggcccgccgccggcgtcacgtacgtggagggcatgaacgcctacagcggcctcaaggggctcaacaaggtgaccatgctcggggtgcgcaagaccgccgactactccttcgccaaggtcgtggcgtcgctcagccccgcgggcaggaagcggcgcggcggggcgttcggcgcccagatgaacgccgccgccgagatcttcaggatcgccgccaccatgagcggcctcgtgctcgtcggcgtcgccgtcggcttcgtgctgctccgggtggaggccgccgtcgangaggccgagtagggcgctcgcgc

SEQ ID NO: 75494 - DNA, 399 bp, Zea mays
cgtcgtcaaggtgggcagccaggtgaagaagttgaaggaaggcgacgaggtgtacggcatggtcagcgagaatccgctgcaggggcccaagcagtccggctcgctggcggaatacaccgccgtcgaggagaagctgctggcgctcaagcccaagggcctcgacttcgcgcaggccgccagcctgccgctagccgtcgagaccgccaacgagggcctggagagggcaggaatatccgccggcaagtccgtcctcatcctcggtggcgccggcggtgtcggctcccttgcgatccagctagcgaagcatgtctacggcgcgtccaaggtagctgcgacgggccagcacaagaagatcgagctgctcaagagcctaggtgccgatgtcgccatcgactacac

SEQ ID NO: 75495 - DNA, 413 bp, Zea mays
cggaagaatgggcggacgcgtgggccgcgcccgagttcgtcgaggccgcggcggagtccggcgaggccgcccacggctgcagctgcggtggcaactgcaagtgcgacccctgcaactgctgatcacatcgatcgacgaccatggatatgattattatctatctagcttgtggtggtggttgaacaataataagcgaggccgagctggctgccatacataggtattgtgtggtgtgtgtgagagagagagaaacagagttcttcagtttgctatctctctctgcatgtttggcgtcagtctttgtgctcatgtacgtacgtgtgtctacctgcatgttggttgatccgattgcatctgctgtaaccatatattaattggtccacgatgatatgatttgatactatatatatact

SEQ ID NO: 75496 - DNA, 392 bp, Zea mays
cccaagagtccgcccacgcgtccgcaagaagaggctggccaccagtggcgccaactttgcgcgcgcctacaccgtggagttcggcagctgccagttcccctacaacttcactgggtgccaggacctcgccaagcagaagaaagtccccttcatcagcgacgacctcgagattgagtgcgaggggaaggagaagttcaagtgcggctccaacgttttctggaagtggtgaagcagctagcagcagcgtctgatgggaatggaggagatcatcacctgtcttgtcgaccctagatatgtccaaactgcagggaaattaaatcttcatgtgtaattgtgctcattctgtttcaatcatctcaacatccgatcatgaacctcttgcattattaact

SEQ ID NO: 75497 - DNA, 440 bp, Zea mays
cccaagcgtccggagacaggagaaggcaaggatgctgctcctgagctcccccttcgtgtccgtgtcgccgccgccgccgccgctcagctcccatggcgctcgcccggcgctgcggatcgaggcggccaggcagctgacggggcgggtggtgacgaccaaggcggacaagacggtcggggtggaggtggtgcgcctggctccacaccccaagtacaagcgccgggagcgcatcaagaagaagtaccaggcgcacgaccccgacaaccagttcaaggtcggcgacgtcgtcgagctccaaccctcccgtcccatctccaagaccaagcacttcctcgccatcccgctcccgccccgcgacactcgccgcaagtctcagctccttacgccgctccagtccgacgacgaccaggagccgtcctcgccagagtgattgattgtga

SEQ ID NO: 75498 - DNA, 384 bp, Zea mays
ccacagcgtccgagggtgggctgtcaacaacgtacaattaattgatcagtgcaagagggagggctatgtacaaaggttaaaagatgaacaaggggaaggttgtaccatccatggatttgtaaatgtgaataaagtagctggcaactttcactttgcccccgggaaaagcttggaccagtcattcaacttcctgcaagacctattgaacctccaaccagaaacttacaatataagccacaagataaataagctgtcctttggggaagagttcccaggtgtagtcaatcctcttgatggagttgagtggatacaggataactccaatggattaacggggatgtaccagtattttgtaaatgttgttccaacagtctacacagatat

SEQ ID NO: 75499 - DNA, 436 bp, Zea mays
ccgagggcacctacaactactgggccgactcctacacgctcttcgtcttcaacatggcgctcatgggcttcgccgagcaccgccgcctccaggactggtacaacccgggctccatgggcaagcagtacttcctcggcctcgagaagttcctcgccggctccggcgacccgtcctaccccggcgggcccctcttcaacccgctcggcttcggcaagaccgagaaggagatgaatgagctcaagctcaaggagatcaagaacggcaggctcgccatgctcgccatcctcggttacttcatccaggggctcgtcaccggcgtcggcccgttccagaacctgctcgaccacctcgccgaccccgtcaacaacaacgtgctcaccagcctcaagttccactagaacgtggtgcatcaggcatactgctgctgccgccgccg

SEQ ID NO: 75500 - DNA, 416 bp, Zea mays
gtccgaacaacaacaacgcaagtacaagtttgtgatgcatctggttgacgtctacggcccattcgccttcttcaaaggatgcttcgatgacataaacctggagcggctaatgctggcaatggcgatgaagacccctgaggatcaaatgttcaatttcgaccctaagaccatcgactgggacgattacttcaccagaatccacatccctggtattctcaagtatgtgtgcaagtgaaaccttctttcttcagtctatttgcagcatgcacatgcttcttcttcgccttcttactatcgaaagttaatggctcatattctttatgaaagaaatttataccactctgtttggttgtacctggttcaatggatcgaccgggtgttaccacgtaacacaaataattcgatctccgcgaaaa

SEQ ID NO: 75501 - DNA, 402 bp, Zea mays
cccaagaatccgcccacgcgtccgaagagttgcaacggatagactcggagctattgaggagcattcagagcttggccaaggtttccatgttgcagagaaggatatgggtatcaggggatttggaagcttgtttggtgagcaacagtctggagatgttgcaaatgttggcatcgatttattctttgatatgctttttgatagcttgtcaaaggttgaccagttttgcctagtcccagtaccatacaaagatgttcagctggatataaacatttctccacgtctctcttctgaatacataagttatctggaaaatcctgttgagttgctcaatgaagcggcaaaagctgcagagaaagatctatggaccttgatacagtttacagaagacctccgtcgacgata

SEQ ID NO: 75502 - DNA, 390 bp, Zea mays
gacgcgtgggggaaaacgccaatctatattgttggtacggattgcacagccaagcgcaacatcgccaagctgcttgcgaattccataatataccgctacctcagcagtgaggaactgcttgaggatgttcttggtggcaaggacgccctcagagccttcaaggaatctgatgagaacggttatcttgaagtcgagacggaagggttaaagcagctcacgtccatgggtagccttgtactgtgctgtggagatggcgccgttatgaactcaaccaatctagggctgctgaggcatggtgtctccatttggattgatgttcctcttgaaatggcagcaaatgacatgttgaagagcactggaacacaagctactacagatccagactctttt

SEQ ID NO: 75503 - DNA, 387 bp, Zea mays
tttatatttttttgaatatgaacggtcattttttttcaggcataaatataaatccgttctcttgccatggtatttagcacgcacaagcaacgcttgaataagtcttgcaaattcaacacaggttctacgaaagtggctttggctaaggaacgactgcaatgtcgagaaacgacactaagttctttcagcgcttcccaccaccgccgcccaacttggggcccttggaacccttctggaccgcaccctttgtctgcgtcttctgggacttgctcacctccgccttcttcgctttcttctcatccttggtcttcttgatgcgctccttgatctcacgaagagcagcttctctagcagcatcgcggacctctggcttctcagctctcttct

SEQ ID NO: 75504 - DNA, 393 bp, Zea mays
cggtccggtgagtcgggtcggcgcccgcgtccggcaaggagcagtgcctggcgctcggcaccaggttgcgctccaagtacaagatcacctaccagttctaccgcgtcttccccaacggcgaggtgcagtacctccaccccaaggacggcgtctacccggagaaggtcaaccccggcagggagggcgtcggccagaacttccgcagcatcggcaagaacgtcaaccccatcgacgtcaagttcaccggcaaggccaccttcgactaatcacacttcacgtacgccgcacgccccagccgggatccaaattaaagaacttcttcttctattaattacagtatattgtaatttggctgctggtacggtggtggcatgatttgagatgtgcatgatg

SEQ ID NO: 75505 - DNA, 409 bp, Zea mays
  unsure (1)..(409): unsure at all n locations
cggaagcgtgggagttcgtgcacgtacgcacgcaccgggacaccagcaacccccaacagcgccactgtccagtgcgcgcgtcaagcttgcttagctagccgccatggcctccctcgccgccgtctccgtgaagcccgtggccatcaagggtctcgccggcagctccatctccggaaggaagctcgccgtcgccaggccgtcggcccgctccatccgcaggccccgcgcagccgccgtggtggccaagtacggcgacaagagcgtctactttgacctcgacgacatcggcaacaccaccggacagtgggacctctacggctctgacgcgccctcgccctacaacccgctacagagcaagttcttcgagacgttcgcggctccgttcaccangagaggtctgctgctcaag

SEQ ID NO: 75506 - DNA, 421 bp, Zea mays
  unsure (1)..(421): unsure at all n locations
gcacattcctcaagggagacttgggggagttcggctacgttgctccagagtgcgcgagcaatccggtcggcacgacgaaaggcgacgcgtacgcgtttggggtggtactgttcgagctcgttagcgggcaggaggctgctgctgctgcggtgggcaccgtcgacgtgacgggcgaagggttcaagggcacattggtggactgggtttatcagctcaaggcctctggccggatcggtgatgctgtcgacaaacttttgcgcgggaagggccacgaggcagagatcgaggagttcttgaaggtagcctttgcgtgcacccagcctcgcgtgagggagaggcactccatgtaccgggtctaccacgccctgaagagcatcngagaaggccgcgacgccacggagcagttcgacgagttcccgct

SEQ ID NO: 75507 - DNA, 394 bp, Zea mays
cccaagcatccggccttccgcaaccttcccggtgtggatgttgccaacgtcgagcgcctcaacctactagaccttgcccccggtggccaccttgggcgctttgtgatctggacccagagcgcgttcaataagctcgaggaggtgtatgggagctatgacgccccgtcgcagaagaagaagggcttcgtgctgccgaggcctaagatgtccaacgctgacctgggcaggatcatcaactctgacgaggtgcagtctgtggtgaagccactcaacaaggaggtgaagcgcatggagaagaggaagaacccactcaagaacatggctgctgtgctcaaactcaacccctacctgggcactgcccggaagatggccacccttgctgaggctgctcgtg

SEQ ID NO: 75508 - DNA, 376 bp, Zea mays
  unsure (1)..(376): unsure at all n locations
agatatcagtatctacttggacatcagtgatgaagttaagtttgcatggaaaatccagcgggacatggcagagcgtgggcacagccttgaaagcatcaaggccagtatcgaggccaggaaaccagattttgatgcctttattgatccgcagaagcagtatgctgatgctgtgattgaagttctgccgacccagttgattcccgacgacaacgaaggaaaggtgctgcgtgttaagctcatcatgaaagaaggggtgaagaacttcaacccggtttatctctttgacgaaggatcgaccatcagctgggtgccttgtggaagaaagctcacatgctcttaccctggcatcaaattttcctatggcncggacacttac

SEQ ID NO: 75509 - DNA, 414 bp, Zea mays
atctagatccctaactgcaccggccgccacaccaccccgaccggaccctccacaacaatggccaccgtcctgggcagcccccgcgcgccggccttcttcttttcgtcgtcctccctccgcgccgcgccggcgcctaccgccgtggcgctgcctgcggccaaggtgggcatcatgggccgtatcgccagcagcaggcgcaggctgcgcgcgcaggccacctacaacgtgaagctgatcacgccggagggggaggtggagctgcaggtgcccgacgacgtgtacatcctggaccaggccgaggaggacggcatcgacctgccctactcctgccgcgcggggtcctgctcctcctgcgccggcaaggtcgtctccggctccgtggaccagtccgaccagagctacctcgacgacggg

SEQ ID NO: 75510 - DNA, 410 bp, Zea mays
gctcagccttctgcttctgcgcatcctccaaggatcgtgatggccatggccacgcaagcctccgcggccacgcgccacctggtggccgccgccgcttccgcctgggcgccgtcggcgaagccgcggcagctaagctcacagctcgcgctgccgccgtcgtcctcccgcgcgccggccccgctccgcgcgaccgccggggaggcggtgaccgaggaggcgcccaaggggttcgtggccccgcagctggaccccagcacgccgtccccgatcttcggcggcagcacgggcgggctgctccgcaaggcgcaggtggaggagttctacgtcatcacgtgggtgtcccccaaggagcaggtgttcgagatgcccaccggcggcgccgccattatgcgggaggggccaaacctcct

SEQ ID NO: 75511 - DNA, 427 bp, Zea mays
caagttctagatcgcggccggctcgcgatctagaactcacacggaacactcagtgcctgcacgcacgagcgaattaccaggcgtttgcgatgggcggagaggccacgaatgccggcggcgggggtatccgcgcgcggatggagcactacctttacagtggcgagaagaagcacgtcgtcgccggcatcgccatcttcgctgccgtcttcggcgtcccatggtacttcatgacgcgaggggcaaagcatcaatctcaccaagattacatggaaaaggctaacaaggcgagatcagagaggctttcttctggacagtcatctgcactaaaagaatgaatgttgtattgcctattctggtccctgaccttcagagcttgtcatagatcatacactgtattgatttgcactcaacggatttgatctgttgt

SEQ ID NO: 75512 - DNA, 451 bp, Zea mays
cggtccggtctccgggtcgcccacgcgtccgcacaaggtcgaggatgtcttgcaactgcggatcaagctgcggctgcggctcaagctgcaagtgcggcaagaagtaccctgacctggaggagacgagcaccgccgcgcaggccaccgtcgtcctcggcgtggccccggagaagaaggccgcgcccgagttcgtcgaggccgcggcggagtccggcgaggccgcccacggctgcagctgcggtggcaactgcaagtgcgacccctgcaactgctgatcacatcgatcgacgaccatggatatgattattatctatctagcttgtggtggtggttgaacaataataagcgaggccgagctggctgccatacataggtattgtgtggtgtgtgtgagagagagagaaacagagttcttcagtttgctatctctctctgcatgtttggcgtcagt

SEQ ID NO: 75513 - DNA, 225 bp, Zea mays
ccgggtcgcaccacgcgtccgcacaagcgtccgctcactatacgctcctggctccacgccgaggagaacaagcgccgcaccctgcagcgcaacgacgtcgccgcggccatcgcgcgcaccgacgtcttcgatttcctcgtcgacatcgtgccccgcgaggaggccaaggaggagcccggcagcgccctcggcttcgcggcgcccgggaccggcgtcgtcggggct

SEQ ID NO: 75514 - DNA, 439 bp, Zea mays
  unsure (1)..(439): unsure at all n locations
gggtcgacnacgcgtccgcggaagagtgggttgacactgaggaatcttacccttaccaaggtgtcaatggaatctgcaagtttaagaatgagaatgttggagtcaaggttttggactcggttaacatcaccctgggtgctgaggatgaactgaaggatgctgttggtctggttcgcccagttagtgttgccttcgaggtgatcactggtttcaggctgtacaagagcggagtttacactagcgaccattgtggaactacaccgatggatgtgaaccacgctgttctggctgttggctacggtgtcgaagatggtgtaccctactggctcatcaagaactcatggggcgctgactggggtgatgagggttacttcaagatggaaatgggcaagaacatgtgcggtgttgctacgtgtgcatcctaccctattgtcgcatg

SEQ ID NO: 75515 - DNA, 440 bp, Zea mays
gcatagaacttcttcgcaagcgagacaattctgagtacaagtatacgattgcgatgatgggatatggtccagaagacaaaaatgctgtattggagttgacctacaactatggggtgaaggaatatgataagggaaatgcttatgcacagattgctattagtactgatgatgtctacaaaactgcggaagcaattagagtaaatggtggacaaattactcgtgaacctggcccattacctggcatcaccaccaagataactgcatgcacagatccagatggctggaaaacagtgtttgtcgataacatagattttctgaaggagttggaagaatgagctttgctagagatctcaacttggtacatcaagctccatacggttgcaccccgtgagttccatgcatgacctgcaaaatctttgtaaagccacagcctcaaactg

SEQ ID NO: 75516 - DNA, 391 bp, Zea mays
  unsure (1)..(391): unsure at all n locations
cccaagcatccgcgaggccgtgtggttcaaggccggctcccagatcttcagcgagggtggactggactacctcgggaacccgagcctcatccacgcgcagagcatcctcgccatctgggcctgccaggtcgtgctcatgggcgccgtcgagggctaccgcatcgccggcggcccgctcggcgaggtcgtcgacccgctctatcccggcggcagcttcgacccgctcggcctcgccgacgaccccgaggccttcgctgagctcaaggtgaaggagctcaagaacggccgcctcgccatgttctccatgttcggattcttcgtccaggccatcgtcaccgggaagggcccgctcgagaacctcgcntgacacattgccgaccccgtcaacaac

SEQ ID NO: 75517 - DNA, 406 bp, Zea mays
  unsure (1)..(406): unsure at all n locations
ctctacacttgcgattcgctcgctcgatcctagcttcccttccaagaagcgcagcgcccatggccatggccacgcaagcctccgccgccacgcgccacctgctggccgccgcctgggcgccggtggcgaagccgcggcagctgagctcgcagctcgcgctgccgtcgtcgtcctcccgcgggccggccccgctccgcgcgtccaccgaggaggcggtggaggcgcccaaggggttcgtggccccgcagctggaccccagcacgccgtccccgatcttcggcggcagcacgggcgggctgctccgcaaggcgcaggtggangagttctacgtcatcacgtggacgtcccccaaggagcacgtgttcgagatgtcnaccggcggcgccgccatcatgccggaagggcc

SEQ ID NO: 75518 - DNA, 449 bp, Zea mays
ggtcggggagccgggtcgagccccgcgtccgcccaagagtccgcggacgcgtgggcgaagcatggcgtccgtcaccgcccgcgccccggtcgcggcccttcgcccgtcgtcggccttccttggccactctagccgcctcggccgcaccgcgtcgcccacgaggcgcagcctcaaggcggaggccaagggcgagtggctccccggccttccctccccctcctacctcgacggcagcctggcgggtgacaatggcttcgacccgttgggcctggcggaggaccccgagaacctgcggtggttcgtgcaggcggagctggtgaacggccggtgggccatgcttggcgtggccgggatgctcatcccggaggtgctgaccaaagccgggctgatcaacgcgccgcagtggtacgaccccggcaagtcggagtacttcgcgtcgtcgtcaacgc

SEQ ID NO: 75519 - DNA, 288 bp, Zea mays
cataaacaagaccgacagggccaagtatgagtccaccgcacgctcctggacacagaagtatgccatgggctagaagcaaggctaaaagctggccaaactggtgaatgtgccggaccccaaatcgttatcacctaaataaccagtcaagtcgcaagtatgaatggacttttgaggaccattgtgccctgttgaactcatgtattaccttgtgaagtccgttgtgtctggtttctacctgaccgtttcgttatctgatgctgtttctttaatatctgatgctgcttcatt

SEQ ID NO: 75520 - DNA, 434 bp, Zea mays
gaagatagcgcttatagcttgtcagccatggccaccgccgccgcgtctagcctcctcaagtcctccttcgcgggctcccggctcccggccgccacgcggaccacaccggcgtccctcgtggtggccaccggcccgcgcggcgccggcgcggggcccatctgcgcgtccatgtccatgtcctcctccaacccgccctacgacctgacgtccttccggttcagccccatcaaggagtccatcgtgtcccgcgagatgacccgtcgctacatgacggacatgatcacctacgccgacaccgacgtcgtcatcgtgggcgccggctccgcggggctgtcctgcgcgtacgagctctccaaggaccccgccgtgagcatcgccatcgtggagcagtcggtgtcgccgggccgcggcgcgtggctgggcgggcagctgtt

SEQ ID NO: 75521 - DNA, 436 bp, Zea mays
gagaactacaatatcttttcagcagatatggaagaatacgtgaagtggagttgaagcgtgactatgcattcagtgaattcagtgacccccgtgatgctgatgatgcgcagtacaacctagatggcaaggaagtcgatgggagccgtattagtgttgaatttgctaaaagagttcctcgtggttctggtggttcacgtgagtacatgggaataggacctccaccaagaacaggtcgttgttttaactgtggaatggatggtcactgggcaagggactgcatagctggtgactggaagaacatatgctaccgctgtggtgaatcgggccatatatatagaaattgccagatcagtccagagaatctcatgcgtgataaaagctagtcacagtctccatcgccacgtggtggaccttggcgcagccggaactacatcac

SEQ ID NO: 75522 - DNA, 443 bp, Zea mays
atcattcagattgcgcgggggtctggtcgtcctgtcagggatgtcatcgacatgctggaagagtataagaggcttgctaaaatctggggcaagatgaagggtctcaagatcccaaagaaaggggagatgagtgcactgtcccgcaacatgaatgttcagcacatgagcaaggtccttcctccgcagatgcttaaacagattggtggcatgggcggtctgcagtctctgatgaaacagatgggatcgaaggagatgagcggaatgtttggaggcatgggtggcgagcggtaattttacgtcctgtttttggtggatcgtcgctgtgaacttgtgatgctaaattgagagggtttagtgctgcggtctgatcatcgtcagaggtttacatgaagatcagcctgcgccatgttatggaacaggcttactgtagctccccatgcctg

SEQ ID NO: 75523 - DNA, 427 bp, Zea mays
cccaagcatccgggaggaggtgagtcaccggaagcggagacgtgagcagtcgaccaaccccgtcgatccggctgcggcccggcgtgctagatcgctaccgatcatggtggtggaggagatcgccgagggggtgaagaacctcaccgttaccggagacgcggcggcttcaggcggagaggggcagaggaggggcggcggcggcagcagcaaccgcatccaggtgtccaacaccaagaaacccctcttcttctacgtcaacctcgccaagaggtatatgcaacagcacgaagatgtagagctatccgctcttggaatggccatagcaacagttgtgaccgtggcagaaattctgaagaacaatggatttgctgttgaaaagaaaattaggacctctactgttgaaataaacgacgaatcaagagggcgt

SEQ ID NO: 75524 - DNA, 444 bp, Zea mays
gtccgcccaagcatccgggggaaggcctccaccggtgcgctccggcttcgctctacgttgaccttcggcgaggtctgcccggcgcggcgggcgttccgcggcctcgtcgtcagggccgctaccgtcgtcgcccccaagtatacaacacttaagcccttggctgatagagtgcttgtaaagattaacttttccgagaagaagacaactggtggaatcttgctccctacgactgctcagtccagacctcaaggtggcgaggtagttgctgttggagaaggaaggataattggggataagaaagttgatgtcagcattcaggttggagctcaagttgtgtattctaagtacgctggaaccgaggtcgcgttgaacgatcacagccatctggttctcaaagaggatgacgttataggtatcttagaaactgatgacgtgaaagacatg

SEQ ID NO: 75525 - DNA, 353 bp, Zea mays
cggacgcgtgggcggacgcgtgggccggctgctacgcttgccatccacctccaccttcgtctcgctgtcctagatgtttgctgtatgaatcgcatagtagatcatgttctctattcctgccttcagtttcttttctcagttgtggtttatcgcggcggggttgatgttgagatttgagatcctcacctgaggaatggaaaaatgctcacctgaggaatggaaaaatggtaagggcttgttcggttattcctatcccatgtggattggatgggattggaaaaaattatgaaagattttaacttgtttgagattgaaatccatccaatcccacctataaatgaaagtcaaaattt

SEQ ID NO: 75526 - DNA, 328 bp, Zea mays
cccaagcgtccgcaaggagagtacgtggaggagcagccatggcttcatcggtggccgccgctgcgagcacattcctgggcacccgcctggcggacccggcgccacagaacgggcgcatcgtggcccggttcgggttcgggttgggcggcaaggcgaagcctgctccgaagaacgtggcgaatacatcgacctcctctgaccggccgctgtggttccccggcgccgtggcgcccgactacctgtacggctcgctggtcagcgactacaggttcgacccgttcggtcgcgggaagcccctggagtacctgcagttcaagttggacgcgct

SEQ ID NO: 75527 - DNA, 442 bp, Zea mays
aacggaagcgtgggcggacgcgtgggcaaacaaagccaccaccatcccaacccaaacacatcggccgaccacgggcgccgccatgtctaccgctgacgcggcgagcccggccctggctccggacggggacgcgccggcgggcgaaggcctggccctggcccagttcgccgcgggctgcttctggagcgtggagctggtgtaccagcgcctcccaggcgtggcgcgcacggaggtggggtactcgcagggccaccgccacgcccccacctaccgcgacgtctgcggcaacggcacgggccacgccgaggtggtccgcgtgcactacgaccccaatgcctgcccctacgacgtcctcctcgacgtcttctgggccaggcataaccccaccacgctcaccagacatggcaaccgagtcgggacgcaagtccggtcgggtatctac

SEQ ID NO: 75528 - DNA, 452 bp, Zea mays
cgcagctcgagacgcgcaaccccacgccggctcctacggaggcgcttacgctcctcaacggcaagtggatcctcgcgtacacatcattttcccaactattcccactattggggtttggtaatctgcctcagctggtgaaggtggaggaaatatcacaaaccattgattctgagaacttcacagtgcaaaactgtatcaagttttcaggacctttggctacaacctcagttgccactaatgcaaaatttgaaattagaagccccaagcgtgtgcagatcaaatttgatgaagggattgttggtacaccacagttgaccgactccattgtgctaccagagaagtttgagttatttggacagaacatcgacctgagtccactgaaaggcatattttcttccatcgaaaatgcagcatcctcggtttgcaaagacatatctgagcagcctccgctc

SEQ ID NO: 75529 - DNA, 428 bp, Zea mays
cccaagcgtccgcccacgcgtccgatcgatctacacacatacatagtttcttctactacacgacgacaaacatggggaagcctgcgaagatcggagagtggggtggatacgccggcgatcgtcgggatctgagggctactccggaccggctgatcgaggtgaaggtcacggcggacaacagcagctgcatccgctccatctccttcatctacatcggagccgatggcaaaccgtacgaggaggggccatggggtttcggccatgctggcacggagtacaagattgatctgtgcaggttcgacgagagcttgacggagatctccgggaccacgggcccagcctacaacattgacaatctggtcaagtcgctcaaattcctcaccaacaaacgcgcctacggaccgtacggcacgggacacggcaccccg

SEQ ID NO: 75530 - DNA, 398 bp, Zea mays
tgatcctctggtccgtggccatggcgtcgtccatgctctccgctaccaccgtgccactccagcaggggggcggcctgtccgagttctccgggctcaggagctccgcgtcgctgcccatgcgccggaatgccacctccgacgacttcatgtccgccgtctccttcaggacccacgcggtcggcacgagcggcgggccgcggcgggcgccgacggaggcgaagctgaaggtggccatcaatgggttcggccgcatcgggcgcaacttcctgcggtgctggcacgggcgcggcgacgcctcgcccctcgacgtcatcgccatcaacgacaccggaagcgtcaagcaagcgtctcacctgctcaagtacgactcgacgctcggcatcttcgatgccgacgtc

SEQ ID NO: 75531 - DNA, 323 bp, Zea mays
cgcgtccgcccaagcgtccgcagacgcgtgggcagacgcgtgggggcttgcggtagatacctaggcacccagagacgaggaatggcgtaccaggcgacgaaatgcttctgggagtttataataagcatagatccggagattctcaaatatgtcaaccttttgaactgcctgctgaatccatgatcaagcacgacacaacctgacgaactgaaacatcttagtaaccagacgaaggaaattcagaacagtagtgctatgaagagtttgtgcacttcagttttaggacagtcagtacttcaagttctccaccatttcattaaaac

SEQ ID NO: 75532 - DNA, 441 bp, Zea mays
cccaagcgtccgcccacgcgtccgcacgtgggtgggggaaatgctgcgtctcgggatgctcaggcattcgcgtaaacgatgcggagaagctcgtgacgatcggaggccatgtgctgcgcgaaggtgagtggctgtcgctgaatgggtcgactggtgaggtgatccttgggaagcagccgctttccccaccagcccttagtggtgatctgggaactttcatggcctgggtggatgatgttagaaagctcaaggtcctggctaacgccgatacccctgatgatgcattgactgcgcgaaacaatggggcacaaggaattggattatgccggacagagcacatgttctttgcttcagacgagaggattaaggctgtcaggcagatgattatggctcccacgcttgagctgaggcagcatgcgctcgaccgtctcttgccgtatc

SEQ ID NO: 75533 - DNA, 427 bp, Zea mays
  unsure (1)..(427): unsure at all n locations
cccacacgtccgcatccgctcgccgccccgatggaccgcggtagcgtttgttttcgtcgctgcccgttcagcctaaccatccccgcccgtacagcgccccggcgaccggcgccgcttctcgtcgtccgcgctaagcgcgccggcagccagccccctgctgccgccgcctcgcgtcagcccgcgaatcccagcgcggtcccgaagcgggacgtggaagaagaggatgaggaggtcgaggaggagatgccctggatccaggacaaggcgctggacctcgtggagttcactggcaccgtcacacaggccatcccagggccccgtgttggctctagccctgttccatggcttctcgcggttcccctcgcctacgtcngggtctcctttgtgctcgcggtcgtccgcaccgtgcgcaagttcacctcgccgc

SEQ ID NO: 75534 - DNA, 389 bp, Zea mays
cgtgaactcagaccaggttccaccttcccgtgtggctgggagtcggcgccgccttcaagttcgccatcgacaatgacgtcaggaacttccaggtcctcaaagagatgtacaacgagtggccattcttcagggtcaccctggacctgctggagatggttttcgccaatggagaccccggcattgccggcttgtatgacgagctgcttgtggcggaagaactcaagccctttgggaagcagctcacggacaaatacgtggagacacagcagcttctcctccagatcgctgggcacaatgatattcttgaatgcgatccattcctgaagcaagggctggtgctgcgcaacccctacatcagcaccctgaacgtgttcaggcctacacgctga

SEQ ID NO: 75535 - DNA, 423 bp, Zea mays
cccacgcgtccgcggacgcgtgggatcgccagtcgaagcagcactcggcgacttgagctccttgacaccagctgcttcaagaaccctgctggaccagaccgtcgggttcaccatcagctacgagagggaggacgagtacgacacgcgggagctgtcggagttccccgacatacggctgtggttcgtgaggctcgacgccgcgtacccttggttcccggtcgtgctcgactggagagccggcgagcttgccagatacgccgcgatgctcgtccctcaccagatgagcatgcggatgggcgtcgtcttcaacccggaggcgctggagctgttcgtgatgaagaaggtgttcgccgtcgacgcttggctgaagcagcagagccatcccaaaccgaggctgaagacggcggacatgggcaagatgct

SEQ ID NO: 75536 - DNA, 337 bp, Zea mays
cccaagcgtcaggacctggtgatcaacaccgtgaagactggcatcacagccgacgacgtgaacgcggcgttccgcaatgccgccgccggccagatgcatggcatcatggatgtctgcgacatgccgcacgtgtccgtcgacttcaggtgctccgacgtgtcctgcatcatcgacgcatcactcagcatggtcatgggcgacgacatggtcaaagtcgtcgcctgttacgacaacgactggtggtacagccaacacgtggttgatctggcgcatctgatggcggcacaagtggcccggcacgacagcagactgcatcagcgaacctcctggaagactt

SEQ ID NO: 75537 - DNA, 450 bp, Zea mays
acccgacctccccctcccgctccgggcagcagcagcagcagtcatgcggatagccgtggtggctcccgtcgcggcggcctacccatgttcctcctccctcgctgcgccggcgagtgcgacgagccgcgcgcacgttgcggcggccgggatgtcctacagggcgtcctctttcgtcggaggcgggctcgcggcggtggttgcgtcggtagccgcgcggccgaggagggcgggctctgggagaggcgacgctctcgggtgcaagtgcctcttcgggctcggggtgccggagctcgccgtcatcgccggcgtcgccgcgctcgtgttcgggcccaagcagctccccgagatcggccgcagcctcggcaagaccgtcaagagcttccaggaggccgctaaggagttcgaaagtggactgaagaaagagcctggggaacgtggcgatcagccccc

SEQ ID NO: 75538 - DNA, 410 bp, Zea mays
gttgatataataggtgctacagcatttggagtttcaggaactcctgctgactgtgcttctttaggcatctctggaaaactatttgatggtttggttcctgatctggtacttagtggaatcaacattggaaataattgtgggtaccatgtcatttattctggaacagttgctggtgctagggaggcattcttatatgggattcctgcaatagctatgtcatatgattgggttgcgggtcggagcagtgttaatgacctcaaggtgtctgcagaggtctgcatgcctctgataaatgctatcgtgactgagatcaagaatgggacttaccctcaaggatcattcttgaatgtagatgtacctacagatgctgcgcagcacaagggctacaaaattacaaaacaaggaacata

SEQ ID NO: 75539 - DNA, 395 bp, Zea mays
cggacgcgtgggcggacgcgtgggatttgggggaaccatttgacgactcaggttcctgatttcttgaatgccaaaattgatggaagaccagtgaaagaagtcattaaggataccaagtggttagaggaagagttcaccctcacagttcaaaagcgtggaggtgtgctcatccaaaaatggggcagatcatcagctgcatcgaccgctgtttcgatagtggatgctattagatccctcgtaactcctaccccagaaggtgactggttttctacaggggtttatacgactggaaatccttatggcatagcagaggatatcgtgttcagcatgccatgcagattcaagggtgatggtgattacgaactggctagtgatgtgttgatggacgattttct

SEQ ID NO: 75540 - DNA, 447 bp, Zea mays
gtttccaatgtgaggcgcttcatggggatatctctcaatctgaaagagagaggacactggcaggatttcgggatgggcggtttaatatattgattgctactgatgtcgcttctcgtggattggatatcccaaatgtagatctggtgatacatttcgaattgccaaattcgtcagagatattcgttcacagatctggccgaactggccgtgctgggaagaagggcactgcaattgtgatgtacaactatgaacaaagtagagctgtgcgggtcattgaacgtgacgtaggatgcaagtttacggagcttccaaaaattaatgttgagggatccgacttgctgggtggtggatttgactccttcgggggtggaggtggtgggtatggtggctcaaactatgggcgctcacgaaggggctttggtggacgtggcggtggtggtggttttg

SEQ ID NO: 75541 - DNA, 449 bp, Zea mays
cgctggagcacggcatgcacccgccggtctctcccaagcccgagtggcgcaagctcatggacgagatggcggtcgtggccacggaggagtaccgctccgtcgtcgtcaaggagccgcgcttcgtcgagtacttcagatcggctacaccggagaccgagtacgggaggatgaacatcggcagccggccagccaagaggaggcccggcggcggcatcacgaccctgcgcgccatcccctggatcttctcgtggactcagaccaggttccaccttcccgtgtggctgggagttggcgccgcctttaagttcgccatcgacaaggacgtcaggaacttccaggtcctcaaagagatgtacaacgagtggccattcttcagggtcaccctggacctgctggagatggttttcgccaagggagaccccggcattgccggcttgtatgacgagctg

SEQ ID NO: 75542 - DNA, 417 bp, Zea mays
gcggaagctgatgaacctcctcctcctcggcgccatctcgttgcccaccgtcggcatggtcgtcccctacggcgccttcttcgtccctgccggctccgggaacgccggcggcgggacctacgcgaaggacaagctgggcaacgacatcacggtggaggcgtggctcaacacgcacggtcccaacgaccgcacgctcgcgcaggggctcaagggtgaccccacgtacctggtggtggagcaggacaagacgctggccacctacgggatcaacgccgtgtgcactcacctcggctgcgtcgtgccgtggaacggcgccgagaacaagttcatctgcccatgccacggatcccagtacaacaaccacggcaatgtggtccgtggaccggcgcctctgtcgcctggcctggttcacgccga

SEQ ID NO: 75543 - DNA, 398 bp, Zea mays
tccgggccgaccacgcgtccacccaagcgtccgcggacgcgtgggcgctgaagcggataagggaccccaacttcaaggtgacgccccagccgccgctgtccaaggagttcgccgacgagaacaagcccgccggactggtcaagctgaacccggcgagctagtacacgcccggtctggaagacacgctcatcctcaccatgaaaggcatcgccgccggcatgcagaacactggctaggcggcttctcttcactcagctgcagagtgcaccgcaataatcagcttccggatggtggagttttgtcaattttggatggaaatgccgaactggcaacgtccgttttccctatgcataagtaatttcctgcctctttatattcacgcttgttgtcaagtccac

SEQ ID NO: 75544 - DNA, 448 bp, Zea mays
caagacctttgggaagcagctcagggacaaatacgtggagacacagcagcttctcctccagatcgctgggcacaaggatattcttgaaggcgatccattcctgaagcaggggctggtgctgcgcaacccctacatcaccaccctgaacgtgttccaggcctacacgctgaagcggataagggaccccaacttcaaggtgacgccccagccgccgctgtccaaggagttcgccgacgagaacaagcccgccggactggtcaagctgaacccggcgagcgagtacccgcccggcctggaagacacgctcatcctcaccatgaagggcatcgccgccggcatgcagaacactggctaggcggcttctcttcactcacctgcagagtgcaccgcaataatcagcttccggatggtggcgttttgtcagttttggatgggaatgccgaactgg

SEQ ID NO: 75545 - DNA, 451 bp, Zea mays
cggacgcgtgggatcgtaccggtgcgtggccgcaggcatcctcaactggcaagcggacgtggagaggtgcatagagtgggaagcccacagccgccgcgccaccgggctgacgctcgccttcctcagtacggcggcgaatgagctcggctgccctctcccgtgctgacgaggccgctcccggatctgatctgacatcggcggccacttgacggccagtgctggcagcttgctgcggggccggcgagtaggacgctaatctctcgaccaacgacgactcgccggtttgttcacgtgatatgtgatcaaactgatattagatggtgtttccagagtatatatctactgggggcttgctcccatgatgcgattttattcgaatctgacgtcagatgctttacgagcatatttaactgcttgagctgtacgtagcttgtattacgtgtaactttgt

SEQ ID NO: 75546 - DNA, 337 bp, Zea mays
caatgattgagatccccagggcagctctggtggctgatgagatagcggagcaggctgaattcttctccttcggaacgaacgacctgacgcagatgacctttgggtacagcagggatgatgtgggaaagttcattcccgtctatcttgctcagggcattctccaacatgaccccttcgaggtcctggaccagaggggagtgggcgagctggtgaagcttgctacagagaggggccgcaaagctaggcctaacttgaaggtgggcatttgtggagaacacggtggagagccttcctctgtggccttcttcgcgaaggctgggctggattatgtttcttg

SEQ ID NO: 75547 - DNA, 451 bp, Zea mays
  unsure (1)..(451): unsure at all n locations
ccggcctgatactttcattctgttagatgttccagatgaactccttgttgaaagggtggttggaaggcggcttgatcctgtaacagggaaaatatatcatttgaagtattctccgccagagaatgaagaaatcgcttcaaggcttacacaaagatttgacgatacagaagaaaaggttaagttgaggctggagacttattaccaaaatatcgagtccttgctatcaacatatgagaacattattgtcaaagtgcaaggagatgccacagtggatgctgtctttgctaagatcgacgagctgctgggttctatcctggagaagaaaaatgaaatggtttccagcacatgagcaaggtaaaaatgattgggtgcagtgcagatccgacaagttcatgtaatgcaagtcacctctcatgataggaacttctccagnggaatatatctgaagcac

SEQ ID NO: 75548 - DNA, 425 bp, Zea mays
gtcatgcagcagcggcaagtgcaactgcggctccagctgctcctgcggcagctcatgcaactgcatgtcccctgacgtggagaccgccgccgccagcagcatcaagaccatggtcgtcgctgcgccgaccaccaaggccagcgccggcggcttcgaggcggccaccgagggcggcggctgcgactgcaacacctgcaactgcggcaccagctgcggctgctcctgctgcagctgcaactgagccggaccgcccggcccggtgatggcacacgagagtctataggacgacgtacactaggcgtataaatataatagcagcgtctaaataagatcctgtcaactgcatccgccattatcgatccatggtcgatcctggggttcatgttcatctgtgtagcctgctctgcgtcatgtccgtctcgtcc

SEQ ID NO: 75549 - DNA, 438 bp, Zea mays
gcggaagaactcaagccctttgggaagcagctcagggacaaatacgtggagacacagcagcttctcctccagatcgctgggcacaaggatattcttgaaggcgatccattcctgaagcaggggctggtgctgcgcaacccctacatcaccaccctgaacgtgttccaggcctacacgctgaagcggataagggaccccaacttcaaggtgacgccccagccgccgctgtccaaggagttcgccgacgagaacaagcccgccggactggtcaagctgaacccggcgagcgagtacccgcccggtctggaagacacgctcatcctcaccatgaagggcatcgccgccggcatgcagaacactggctaggcggcttctcttcactcacctgcagagtgcaccgcaataatcagcttccggatggtggcgttttgtcagttt

SEQ ID NO: 75550 - DNA, 436 bp, Zea mays
cccaagcgtccggcggcaggcagctcctcctgcgactgcgagcgcccgtccatggcgtccatctccccttccctccatcacccttgcaattctagaactggcttccttggaaagacacacgggactcgtcctcgtcttttctctgctggaagagttggatttgtcagaacactagtggagtgcaaggaatctagaattggaaagcagcccattgaagtcccaccgaatgttactctcacattagaagagcagtttgtcaaagctaagggcccactaggggaattatctctcagcttcccaggtgatgtgaagattgtgaaagaagaatccggtaacctgagagtttataagactgcagaggacaagcgggcgaaccagatgcacggtcttttcagaacattgacagacaacatcatcgttggtgtgtcgaaaggat

SEQ ID NO: 75551 - DNA, 450 bp, Zea mays
ctctttggggactaatcaaactcaagaactaagtttcatgtctgatctcgacgtccagcttccatctgcttttgatccgtttgcagaggcaaatgctgaggattccagtgctggtgctggatcaaaggactatgtgcacgtgcgtattcagcagcgcaacggaaggaagagtctgacaactgttcagggcttgaagaaagagtacagctacaacaagatcctcaaggatctcaaaaaagagttctgctgcaatggtactgtagtccaggatccagagctaggccaggtcattcaactgcaaggtgatcagcgtaaaaatgttgctactttcctagtccaggccggaatcgtgaaaaaagatagcatcaagattcacggattttagactgcaaattttaagtgcttgtgtgtgcctatcataagataccatatgataccaggtattgaagc

SEQ ID NO: 75552 - DNA, 452 bp, Zea mays
cccaagcgtccgcccacgcgtccgcccacgcgtccgcggacgcgtgggctgagggacagatatacattgataggcagctccataacagacagatttatccacctattaatgtcctgccatctctttcacgattgatgaagagtgctattggtgagggcatgacacgtcgagaccattcggatgtatctaatcagctttatgccaactatgctattggaaaggatgttcaggccatgaatgctgtcgttggtgaggaggcactctcgtctgaggatctgctttacttagagttccttgacaagtttgagaggaagtttgtgacacaaggagcatatgacacacggaacatcttccagtcactcgatcttgcatggacattgcttcggatcttccctcgcgaacttctccaccgtattccagcagagacgttggacagtactattgcagagatg

SEQ ID NO: 75553 - DNA, 439 bp, Zea mays
ggcatgggcacgcgggaggtgtacgaggagaagctccgcagcggtgcgcacctccaccgcgatcccaccatcaacccaggcctcggctcgccccggtgcccgcgatgcctctccctcctcaaccccaccgcgggaaagagggactgggccatcacctccgtcctgcacgacgccactgccgtggctggttccggtgccggcgctttgctcagtgctgtgcacgggtttaatacagggatcccttttgtccagaagcatgtcaaggggccgaagtggctgcagttgctcgttggggtgccaccactgctgatattctcaggtgccagtgctgtatttggtgcatatgcacttccaaggtttgttcagctcacagtgacgtcttactacgcggcatcaactggctcgcaatatgctgtttcacaaatcacacggcagatcg

SEQ ID NO: 75554 - DNA, 411 bp, Zea mays
cccactcgtccgcccacgcgtccgcatgcatctaccaacgactcagcgagcgacagcagcagacacgcatctagctaagagcagcatcagagcagcggcgatggcggcctccatgatctcctcgtcagctctggcggtggcgcctcaaggcctgccgcccctcggccgccgcgcctcctccttcgccgtcgtctgctccaagaagaagatcaagaccgacaagccctacgggattgggggtggcctgaccgtcgacgtcgacgccaacgggagaaacggcaagggcaagggcgtgtaccagttcgtcgacaactacggcgcgaacgttgacggatacagcccaatctacaacgaggatgactggtctcccaccggcgacgtctacgtcggtggaaccactgggcttctgat

SEQ ID NO: 75555 - DNA, 458 bp, Zea mays
gcatcataaagtttgatctgcatgctgaaccggaaagtggtgtgaaagaacttgaagtgggaggaaatgtacaaggcatatatgacctgggacctggtagatttggttcagaggcgatttttgttcccaagcatccaggtgtgtctggagaagaagatgacggctatttgatattctttgtacacgacgagaacacagggaaatctgaagtaaatgttatcgatgcaaagacaatgtctgctgatccagttgcggtggttgagcttcctaatagggttccttacggattccatgccttctttgtaactgaggaccaactggctcgacaggcggaggagcagtgaagatacggcacctgcagattctgcacacgcgggtacaggttggaaattattgcagaggacatgtatatgtatatgacaagtttattacacatgtattcgaaccacacattacac

SEQ ID NO: 75556 - DNA, 427 bp, Zea mays
cccacgcgtccgcccacgcgtccgctatagcaaccggtccaacactttcacgctcaggcgctcagctctagcaatggctgcctccaccatggcgatctcctccacggcgatggccggtacccccatcaaggtgggctccttcggcgagggccgcatcaccatgcgcaagaccgtgggcaagcccaaggtggcggcgtccggcagcccctggtacggccccgaccgcgtcaagtacctcggccccttctccggcgagcccccgagctacctcaccggcgagttccccggcgactacggctgggacaccgccgggctgtccgccgaccccgagaccttcgccaagaaccgcgagctggaggtgattcactcccgctgggccatgctcggcgcgctcggctgcgtcttccccgagctgctctcccgcaac

SEQ ID NO: 75557 - DNA, 340 bp, Zea mays
agagaaaattttgatcaaatcaatagaatgaaggatcccttacctgatttgaatttcatcctcctttaaataggatatgctctaagtcttcccatactttcctataatgactgcaaggagtttctccattttgcgaattcctagtttatttgaagtatattactatcatatacattatctaaatcgatccactttagataagatataaaaaatcgatagaaacaaactaagaaagagtaaataatataacaggacattctgtttcataattctgaaatagaattcttttttttagtattactcctcattaggatgtatagagtaatcatcctattttaat

SEQ ID NO: 75558 - DNA, 392 bp, Zea mays
gagaaaagtacaaattttcgtcagtgctgcagttgcaacctgggatgcacaattttatgtcaaagttgatgatcacattaatcatgacttagctgggttaattgatatgctctaaggccgtctatgtaaccaaggattgtacataggttgtatcaaatcagggatggtcataactgaagatggccaacattgggatgcaactgaatggtggaaatttggagattcaaaaacgtattttcgacacgcttcaggttctttgtttatcctctcaaaaactttagctccctagatcaacataagtaatgcgtcactgcagagttatgcacaccattatatagcagtacgttaatggatgatgggactgaatgcagcttacgtggatgatgaccggt

SEQ ID NO: 75559 - DNA, 390 bp, Zea mays
cgtcagggcggagacgcccgacccaatccgtgcgtgtgttggtcgagatggctacaacagcttacgctcccatggcgagccaggtgatgaagagcagcccggtgcactcgaggccgaggggcctgtcaggcgctgcgctcacgcggccccggccccggttcagcgtcgtcaaggccgccatccagcccgagaaggcaacgtaccaggtggtgcagcccatcaacggcgacccgttcatcggcagcctggagacgcccgtcacctccagcccgctcatcgcgtggtacctctccaacctgccggcctaccgcaccgccgtgagcccgctgctgcggggcgtcgaggtcggcctcgcccacggctaactcctcgtcggggccttcgcgctca

SEQ ID NO: 75560 - DNA, 363 bp, Zea mays
cacatgcgtccgtttttttcacattgttgtttacaggtgaattaacaccgctgtgtaccggcaaccggatttacttaacagaagccaaatttgtatcgctgccaattccagaaacagaatttgcagacttttaatcaccagactgggaacaaacaatggaccgactgactcaagatgaaatcagaacaagatatagaagtaggtcgtgattgtcgacgatgttgtgtccgacgaaggtctcgataatattattcacagcagtcatgcgcactttttccatttctcctcttcaatcttagccttaatgtaagagtacatagcaccacgagctatggcaatggacgtgccaattccagtttgtgt

SEQ ID NO: 75561 - DNA, 388 bp, Zea mays
acctgctgcacccgcacttccgctacaccatggagatcaacgcgctggccagggaggcgctcatcaacgccgacggcatcatcgaggagtccttctggccgggcaagtacgccgtcgagcttagctccgtggcgtacggcgcgacgtggcagttcgacacggaggcgctgcccaacgacctcgtcaagcgcgggctggccgtgcgcggggaggacggggagctggagctcaccatcaaggactacccctacgcccacgacgggctcctggtctgggactccatcaagcagtgggcgtccgagtacgtcaacgtctactacaagtccgacgaggccgtggccgccgaccccgagctgagggcgttctgggacgaggtgcgcaacgtggg

SEQ ID NO: 75562 - DNA, 422 bp, Zea mays
agcaaggaaaggggtcctcctgtgcaaagacagcctttgaaacacagggactatgaagttgatcttgattctcgtcttggcaagactcaggtggtgaccccgattgcaccattgaatcagcaggctggatactactgttctgtatgtgaatgtgttgtcaaagattcagccaactatttggatcatataaatggcaagaagcatcagagagcactgggcatgtctatgcgtgttgaaagggcatcacttgaacagctatgcaggcgcttattgatcttcacgtggaggacaatgcaaccgcgacgatacacaaggtataagaagttcaatcaacattttccctccatgagtgaatgcagatcgatcaaattgagaagatgactacttcaattgaagatgatcggaagataagtgtttgtgat

SEQ ID NO: 75563 - DNA, 424 bp, Zea mays
catggggcttgccgttcttgagccggtgctggaccagaacatgtactacctcggcacgaagctgacctcggcgaccttcgcctcggcgctcgtcaacatcctcccagccatcacgttcctgatggcgctggtcctgaggatggagaggctgaggctgcggagcctccgcagccaggccaaggtcgccggcacggtctgcaccgtcgtgggcgccgtgctgatgatcctgtaccacggccccgtggtgccgttcccgtggtccgcgggccaccaccaggcctcagccgccgccgccgccgcggcagcggagagccagagcagcgcatcctggctcaacggcatcgtcatgatcatcggcagctgcctgtgctggtccggcttcttcgtcctccagtcgaacacgctgcagagctagcccgggggg

SEQ ID NO: 75564 - DNA, 412 bp, Zea mays
aagagatctcgatccgcacacctcacgcctctcttcctctcgccccaaggacaacgaaaacatcaaacaagagaaccaaaggaaacagagcaagagcatcgctctcgaagcaaaacgcgcaccacgccgtcgccggccggccacttcgcacgtacgtaggacgcgcacgcaccggtgcatatatggggctcctgaaccagctgtgggacgacacggtggccgggccgcgcccggactccggcctcggcaagctccgcaagtacgcctccttctccccctcgtcgtcgtcgtcggcggcggtggcggcggcggcggcggcgggctccgcgccgcctccgggcgccgtgacgcggagcttgaccatgctgcggcggccggcggcgctgtccgtcgtcacgtcgccccgcaacga

SEQ ID NO: 75565 - DNA, 432 bp, Zea mays
tatcggtggacgactcacgcgtccgacgagctcaaggtgaaggagctcaagaacggccgcctcgccatgttttccatgttcggcttcttcgtccaggccatcgtcaccggcaagggcccgctcgagaacctcgctgaccacatcgctgacccagtcaacaacaacgcatgggcctacgccaccaacttcgtccccggcaactaagctcaacggctatgctatgcaacttcattgtctttcggatcggagagggtgtacgtacgtggattgattgatgctgcgagatgcatgtgtgtcttttgtttcacgttgcattgcataggcaagtcgagatgatgagttggcgttgtacactaagatgaaccatgtttgtgcaatagtggtggtttttgtttcctgctaaaaaaaaaaaaaaaaggcggccgctctaaa

SEQ ID NO: 75566 - DNA, 419 bp, Zea mays
tcgacccgacccgtccgcccacgcgatccgcagttacctccatccaccagaccagaccagaccaatggccctgcgcctaccaatctcatcgtcccacgggctggcctccacgccggcgccaatctccacgacgacgtgccggccggccgtcttggcgacggccgcggcccagaagaggagcctgctgctggcgacggcctccgagacgaggggagtcgcgccggtgaggtccagcgggatcgagacgagcacggtgggtctgggatgtgaggccgtcaccgggcaggtcacggaggtcaacaaggacaccttctggcccatcgtcgaggccgccggcgacaatgtcgtcgtcctcgacatgtacaccgaatggtgcgggccttgcaaagtgatggctccgaaattccaagagatgtctg

SEQ ID NO: 75567 - DNA, 415 bp, Zea mays
acaacctcgcattctgaatgcactgctgaacaagcatatacctggagtcagggccgttcaatctttgccagtggcagtccatttgcccccgtggagtacgaaggaaagacttttgtgcctgggcagtcgaacaatgcctacattttccctggactcggcctcggtcttgtgatctctggagccgtccgtgtccacgaggacatgcttctcgccgcctcgaaagcgctagctgatcaggccacacaggacaacttcgagaagggctccatcttcccacccttcaccagcatcagaaagatctctgcgcacatcgctgcagccgtggctgcaaaagcctacgagctcggtctggcgacccgtctgcctccccccagcgacctggtgaaatatgcagagaactgcatgtacactcccg

SEQ ID NO: 75568 - DNA, 417 bp, Zea mays
atcgacttcatcgagggattaccccgttctggacatgctaattgcatcttggtggttgtggataagttctccaaatatgggcacttcttgattttatcccatccattcactgctgctcgcgttgctcgggtgtttttggatcacatctataaattgcatggattacctaccaatattatttcagatcgtgatcgtatttttacgagtacgttctggcagaacttattccggctcaccgacaccaagctttgtatgtcatcagcttatcacccgtaatcggatggccaaaccgagagactcaatcagtgtcttgaaacctttttgcgctgtttcgtgcacacttgtccttccaagtggtcacaatggatttctgttgctgaatactggtataatactagttttcattctgccctcggt

SEQ ID NO: 75569 - DNA, 386 bp, Zea mays
agcggccgtctcctccacctcaaccgccgcctcctacttctccccgcagccgcagctgccgatctccaccgccgaccctgccgccagcaaaagtaggttgatgcggcagccacggcggagcagcagcttcgtgatggtggaggcgtcctctgccagcggcagcgacggcggggtggccaggacgaagagcctcacggaggacgacctggaggagctcaagggctgcctcgacctcggcttcggattcgcgtacagcgagatacccgagctctgcgggacgctgcccgcgctcgaactctgctactccatgacccggaggttcctcgacgagcagaaggcgccggggcaggatgaggagttggagcctgcgtcgccgccgctcccca

SEQ ID NO: 75570 - DNA, 397 bp, Zea mays
agccgtgaaggggttggaggtcagaaaggtgctggaggctcccgaggaggtcaagtgcgtgcccatgaagaatgtgctcgagcccggtgacatccccacgcttgctgagctcgggctcactgcgccaccagccatgtcacaggactcaaaacctgctgttggctctactctcattggtggtgagacagaagctctggagaggttgaagaagtttgctgcagaatgctctatgcagccaaacaaagtagacaaaagcaatacccaagatagcatatatggtgctaatttctcttgcaaaatttctccatggcttgctacaggttgcctctctccacggttcatgtatgaggagttgaagaagcatgctactaaagcaattccttttgggtcaacaccc

SEQ ID NO: 75571 - DNA, 397 bp, Zea mays
atcttctcgtgaactcagaccaggttccaccttcccgtgtggctgggagtcggcgccgccttcaagttcgccatcgacaaggacgtcaggaacttccaggtcctcaaagagatgtacaacgagtggccattcttcagggtcaccctggacctgctggagatggttttcgccaagggagaccccggcattgccggcttgtatgacgagctgcttgtggcggaagaactcaagccctttgggaagcagctcagggacaaatacgtggagacacagcagcttctcctccagatcgctgggcacaaggatattcttgaaggcgatccattcctgaagcaggggctggtgctgcgcaacccctacatcaccaccctgaacgtgttccaggcctacacgctga

SEQ ID NO: 75572 - DNA, 407 bp, Zea mays
accaaccaaacacgcacgacacgacaccaagtcgaggagctcgagggcaccaatcatggccggcgtgaactccagcgtcgtcgggctcaagcccgccgcggcagtgccgcaggccgccgccgcctcatcgccggcgaagcgggtgcagctggccgcgcccgagggccgccgcgccgctctgctcggcctggcggccgtcttcgccgtcacggccaccaccgggtcggccaaggccacgatcttcgatgagtacctcgagaagagcaaggccaacaaggagctgaacgacaagaagaggctggccaccagtggcgccaactttgcgcgcgcctacaccgtggagttcggcagctgccagttcccctacaacttcactgggtgccaggacctcgccaagcagaagaaag

SEQ ID NO: 75573 - DNA, 416 bp, Zea mays
gtcgacgacccgtccgccatatccgctcccctacctctccagcatctcccgtctccgtcgtctcgtctctgctcctcacctcgccgccagccatgggcaagatcaagatcggaatcaacggtttcggaaggatcggcaggctcgtggccagggtcgccctgcagagcgaggatgtcgagcttgtcgccgtcaacgaccccttcatcaccacggattacatgacctacatgttcaagtacgacaccgtgcacggccaatggaagcacagcgacatcaccctcaaggactccaagacgcttctcttcggcgagaagccggtcaccgtctttggcatcaggaaccccgaggagatcccgtggggtgaggctggtgctgaatatgtcgtggagtccaccggtgtcttcactgaccaggac

SEQ ID NO: 75574 - DNA, 399 bp, Zea mays
accacgcgtccggtgagatggcacaagccatggcgtccatgaccggcctctcgcagggcgttctgcccagcaggcgcgccgccaacagggccaggacggccgccgtcgtcagggcgtccgccgaggcgcaggcgcaggcgggccgccgcgccgtgctcgggctggtggccactggcatcgtcggcggcgccttgtcgcaggcggtgcacgccgagaccgtcaagaccatcaagatcggagccccgccgccgccctccggtggactccccgggactctgaactctgaccaggcgagggacttcgacctccccttgaaggagcggttctacctgcagccgctgccgccggcggaggcggtggcgagggtgaagacgtcggcgcaggacatcatcaacctca

SEQ ID NO: 75575 - DNA, 414 bp, Zea mays
acgggagcccgtggtacggccccgaccgcgtgctgtacctgggcccactgtccggcgagccgccgagctacctgacgggcgagttcccgggcgactacggctgggacaccgcggggctgtcggcggacccggagacgttcgccaagaaccgggagctggaggtgatccactcccgctgggccatgctgggcgcgctcggctgcgtcttcccggagctgctcgcccgcaacggcgtcaagttcggcgaggccgtgtggttcaaggccggctcccagatcttcagcgagggtggactggactacctcgggaacccgagcctcatccacgcgcagagcatcctcgccatctgggcctgccaggtcgtgctcatgggcgccgtcgagggctaccgcatcgccggcggcccgctcggcg

SEQ ID NO: 75576 - DNA, 392 bp, Zea mays
agagagagaggagtgggagacccgcgagaggctgccgtgtagggaccgtagactcagcgactgcgaaggagggataaggggatggccgggatcggaccgatcaggcaggattgggagccggtcgttgtgcggaagaaggcacccaccgccgccgccaagaaggatgagaaggccgtcaacgccgcgcgccgcgccggtgcggagatcgataccatgaagaagtacaacgctggtacgaacaaggcggcatccagcggtacatccctcaacaccaagcgcctcgacgacgacaccgaaaacctcgcccatgagcgagttccaagtgatctgaagaagaatctcatgcaagcatggctcgataagaagctgacacaacttgctcagatgataaa

SEQ ID NO: 75577 - DNA, 399 bp, Zea mays
atagcttctcccgaaatgcagatgtctgcagaaagcacatcagctcaccaaggatggaggaaggttgtggatgcactttgtgatgtcgtttcagcctcaccaaccaaggcctcagctgctatcgttctccaggccgagaaggacttgcagccttggattgctagagacgacgaacaaggccagaagatgtggagagtcaaccaacgtatagtgaagcttatagcggagctcatgaggaaccatgacagccctgaagccttggtgatactcgctagtgcctctgaccttctacttcgtgctactgatggaatgcttgttgacggtgaagcttgtactttgccacagcttgagcttctcgaagtaaccgctcgagcagtccatcttattattgaatgggga

SEQ ID NO: 75578 - DNA, 389 bp, Zea mays
accacgaatccgcacccatccgatcccacccggcagcactcggcagcggcgccgcgcaatggccacccacgcagctctcgccgcctcccgcatccccgccggcgcccggctgcacagcagggcggcggcgtcgtccaggcacggcgtgcagaggctggacttcgccgacttctccgggctcaggccggggtcgtgctccgtgagcgctgccgcgcgggaggcgtccttctccgacgtccttggcgcgcagctcgtcgccaaggccaccggggagaacgccgtgagggcgcccgccgaggcgaagctgaaggtggcgatcaacggcttcggccgcatcggccggaacttcctccggtgctggcacggccgcgaggactcgccgatcgacg

SEQ ID NO: 75579 - DNA, 416 bp, Zea mays
accacgcgtccgcccacgcgtccgctgcgatcaaaccgcacgcaagcgaaccacagcgtgctcgccatctcactgactgtgacgacggcaacaagccagtgagcagctcgccatggcagcagtgtccaccgcgccggcgctcgaaggccgcatcgcgctcgtcaccggcggctcccggggcatcggccgcgaggtgtcgtcccacctcgccgcgctcggcgcgcgtgtcgtggtcaactacgccaccaacccggccaaggccgaggagctcgtcgcggagctcgcctcgcgcggcctccgcgccgtggccgtgcgcgcggacgtctccgatccggacgccgtgcgcgcgctcttcgaccgcgccgaggaggccttcgggtccccgccccacgtagtggtcgcctgcgccggcatca

SEQ ID NO: 75580 - DNA, 415 bp, Zea mays
cacgcatactgcatacacaacacagagcatcagaaggagctgcgatctgatcgacatggctgccgccaccatggctatcacctcccgcgcgctcatcggcaagccggcggctggcacgagggacgtcttcggcgagggccgcatcaccatgcgcaagaccgccgccaagcccaagccggcggcgtccggcagcccctggtacggtgccgaccgcgtcctgtacctgggcccgctgtccggctcgcccccgagctacctgaccggcgagttccccggcgactacgggtgggacaccgcggggctgtcggcggacccggagaccttcgccaagaaccgcgagctggaggtgatccactgccgctgggccatgctcggcgcgctcgggtgcgtgttcccggagctgctcgcccgcaac

SEQ ID NO: 75581 - DNA, 395 bp, Zea mays
aggacgcgtggggtagcaccagagagaggccgagggagagaggcagaggggcgaaggaaggctaggtaggctagacatggccgccaaagctcacgtgctggtgctgccgatgccatgccagggccatgtgacgccgctgatggagctctcccacctcctggtcgaccaaggcttcgaggtcaccttcgtcaacaccgacgtggaccgcgcggccgtggtagccgcgctggaggcctccggcggcggcggcggcgtggcggcgctgggcggcggcatccacctggcgtccatcccggacgggctggccgacgacgaggaccgcaaggacatcagcaagctcgtcgacgcctacacgcgccacatgcctggctacctggagcgcctcctcgcccaca

SEQ ID NO: 75582 - DNA, 395 bp, Zea mays
agaagacaaaactcctgggggccttatcctcactgaaacaactaaagagaagccgtccataggaacggttgtagctgttggcccgggtcctctggacgaggaaggcaagagacagccactgtcagtgtcggcgggcagcacagtgctgtactccaagtatgcagggagtgagttcaagggcgcggatggcacggcctacattgtgttgagagcgtcggatgtgatggctgtcctgtcttgagcatttcgtttccggctcgttaatgtagtttgcagccaatagttgtcatgtggtatgaaacgatcgctttgtggtggtcatcacaccatgctggtgatcatcacaacatatgctgatactgttccggacaatcggctagaatttgttgtgtggc

SEQ ID NO: 75583 - DNA, 399 bp, Zea mays
aactcccgctgggccatgctcggcgcgctcggctgcgtcttccccgagctgctctcccgcaacggcgtcaagttcggcgaggccgtctggttcaaggccggctcccagatcttcagcgagggcgggctggactacctcggcaaccccagcctgatccacgcgcagagcatcctcgccatctgggcctgccaggtcgtgctcatgggtgccgtcgagggctaccgcattgccggcgggccgctcggcgaggtcgtcgacccgctgtaccctggcggcagcttcgaccccctcggcctggccgacgaccccgaggccttcgccgagctcaaggtgaaggagctcaagaacggccgcctcgccatgttttccatgttcggcttcttcgtccaggccatcgtc

SEQ ID NO: 75584 - DNA, 403 bp, Zea mays
aggacggcgagcacggcatcgagcgcacgttcgaggtggcgcagaaggtgtgggccgaaaccttctacgccatggcggagaacaacgtcatgttcgagggcatcctgctgaagccgtccatggtgacgcccggcgcggaggccaaggacagggccaccccggagcaggtggccgcgtacaccctcaagctcctccaccgccggatccccccctccgtgcccgggatcatgttcctctccggcgggcagtcggaggtggaggcgacgcagaacctcaacgccatgaaccaggggcccaacccgtggcacgtgtccttctcctacgcgcgggcgctgcagaacacctgcctcaagacctggggcggccagccggacaaggtcaaggcggcgcaggacgcgctgct

SEQ ID NO: 75585 - DNA, 434 bp, Zea mays
ttctagggtcgaccgacccgtcgaagccaaaaggcatcaccgccgcgacgacgatggcagcctcgctccaagccgcggccaccctgatgcagccggccaagatcggcggccgggcgccctttgtctcgctgccgtcccgcccgtcgtcgcaactcgcctgcagggcgttcggcgtcgacgccggcgccgccaggatcacgtgctccctgcaggacgtcgccagcaggtgcgtcgacgccgcgaagctcgccggcttcgcgctcgccacctcggcgctcctcgtctcgggcgcgagcgcggagggcacgcccaagaggctgacctacgacgagatccagagcaaaacgtacatggaggtgaagggcacgggcacggcgaaccagtgcccgaccatcgacggcggcgtggagtcgttcccgttcaaggccggcaag

SEQ ID NO: 75586 - DNA, 408 bp, Zea mays
cacggacacgctgatcgcggacctggacaactacgacatcgtgttccacatcggggacatgccctacgccaacggctacatctcgcagtgggaccagttcacggcgcaggtggcgcccatcaccgcccgcaagccctacatggtgggcagcggcaaccacgagcgggactggcccgacacggcggcgttctgggacgtgatggactcgggcggcgagtgcggcgtccccgccgagacctactactactaccccgccgagaaccgggtcaacttctggtacaaggtggactacggcatgttccgcttctgcgtgggcgactcggagcacgactggcgcgtcggcacgccgcagtacgacttcatcgagcactgcctctccacggtggaccgcaagcaccagccgtgggt

SEQ ID NO: 75587 - DNA, 376 bp, Zea mays
ctaattaatacaccccgagcaactttattatatgtattattacaaggcacatacatacagctgcaataacgtatacatgaacaccctttgtctcgctcctgtttatctatgcaactgctggcatgcatgcaaaagacgcctcgggagataagacccctgttattctgctagtacgtatgcatgcatgtgcacgatcgatgggcgcgatggtcatatcatccgttggttcagtagtaaggctggatcttccagcgctggttgtcgccctcgcaccacttccagagcacgacgttggtgccgtcacggacgccgccgtgccacttgtcgccgtggagggcatcgaagttgaggtagatgttgttgaccatgcggacgc

SEQ ID NO: 75588 - DNA, 412 bp, Zea mays
accacgcgtccggcaacccaaccaagcccgcacgacacgacaccaagtcgaggagctcgagagggcaccaataatggccggcgtgaactccagcgtcgtcgggctcaagcccgccgcggcagtgccgcaggccgccgccgcctcatcgccggcgaagcgggtgcagctggccgcgcccgagggccgccgcgccgctctgctcggcctggcggccgtcttcgccgtcacggccaccaccgggtcggccaaggccacgatcttcgatgagtacctcgagaagagcaaggccaacaaggagctgaacgacaagaagaggctggccaccagtggagccaactttgcgcgcgcctacaccgtggagttcggcagctgccagttcccctacaacttcactgggtgccaggacctcgcc

SEQ ID NO: 75589 - DNA, 393 bp, Zea mays
accggctactacttcctatggaacgtacgcccggacctcgtcaagagtggcgactccgccgggctgccgccagagttctcagctgcgacagagggacgaagcatgctgtctacgtggtgcccgcaggcagctgtgctggagcatgatgccgtgggggtgttcctgacgcactccgggtggaactccacgctggagagtatttgcggcggcgttcccatgctgtgctggcccttcttcgccgagcagcagaccaactgccgatacaagtgcaccgagtggggcatcggaaaagagatcggtgacgatgtacagcggggcgaggtagagtcgctcatacgggaggccatggagggggagaaagggcaagagatgctccggcgcgtgactgaactc

SEQ ID NO: 75590 - DNA, 391 bp, Zea mays
accacgcgtccactggaacgggaaggacggcgagttcaagctgcaggtgcaccgcagcgtggctctggtgaacaagtcgtccgcgttcctcactgacgacaacctcgtgccggagtcgtggtgggtggagcggaacaaggggatggtcatcggagaaaccgggctgtggcagctcgaaccgcctggcgaggagcccgtaccgccgttcgtgaccgggaaggtcatcgatgacgacgaccatgtcgctgccaccaccaccactactactaccacggctagtaaggagacgaagacaccggtcaaggataagaatcggttcgggactcagcttttctcggcatgctttagaggggtcaatcagtctgtcgataactgaatggttgaatgtttg

SEQ ID NO: 75591 - DNA, 409 bp, Zea mays
aatagtctctgactatcattaaataaagggtagagcaattcttttttctagagattctagagaaagtgagacaaagtgaagcgaaagagttttctttgtataagaattaggtctatatcatatctaaatagaagggaaatcaaaaagaagggaagtggggattacattggatgaatccttaaggaagacatatcacaaaagaaataaaggctaaagtaagcgctccttgcctttggtttgagcaaaacagattcttgtttcaccgaggaaaagagagaagttctggataaattgacaatgtcaacttgaattgactaattcagttccgcctattccacattaatgggagtacatttatgtttctgctttacgaatatgatattttttggacatttctaataatagcaag

SEQ ID NO: 75592 - DNA, 414 bp, Zea mays
aaggagatccagacggaggacatcgacctgcccctcacccgcacccgccccgtcaagaaggtggccctcgtggtcctgaccggcgagcgcggcctctgcgggagcttcaacaacaacgtgctcaagaaggcggaaacccgcatcgatgagctcaagcagctgggcctccagtacaccgtcgtcagcgtggggaagaagggcaacgcctacttccagcgccgcccctacatcccgttggagcgcgatctagaggtgagcagcgtgcccaccgtcaaggactcgcaggccatctgcgacctcgtctactcgctcttcgtctccgaggaggtggacaaggtggagctgctctactccaagttcgtgtcgctggtgcgctccgaccccatcatccagacgctgctccccatgtcgccc

SEQ ID NO: 75593 - DNA, 410 bp, Zea mays
accacgcgtccgcctggacctgctggagatggttttcgccaagggagaccccggcattgccggcttgtatgacgagctgcttgtggcggaagaactcaagccctttgggaagcagctcagggacaaatacgtggagacacagcagcttctcctccagatcgctgggcacaaggatattcttgaaggcgatccattcctgaagcaggggctggtgctgcgcaacccctacatcaccaccctgaacgtgttccaggcctacacgctgaagcggataagggaccccaacttcaaggtgacgccccagccgccgctgtccaaggagttcgccgacgagaacaagcccgccggactggtcaagctgaacccggcgagcgagtaccgcccggcctggaagacacgctcatcctcac

SEQ ID NO: 75594 - DNA, 409 bp, Zea mays
aggacggtccgccgccgagcggcacggcgatgtcggtggggaccaagctcaagaagctcagctacaactcggtggtggagatcgtgctgcagaacccggcggccgtcccgacggagaaccacccgatccacctccacggcttcaacttcttcgtgctggcgcaggggatgggtaccttcgccccgggaagcgtggcctacaacctggtggacccggtggcccgcaacaccatcgccgtgcctggcggtggctgggctgtcatacgcttcgtcgccaacaatccaggcatgtggttctttcactgccacctggacccgcacgtgcctatgggcctgggcatggtgttccaggtggacagcgggacgacgcccggctccacgctccctacgccgccgggggattgggtggg

SEQ ID NO: 75595 - DNA, 401 bp, Zea mays
  unsure (1)..(401): unsure at all n locations
accacgcgtccgcaaccggtccagcactttcacgctcagctccagcaatggctgcctccaccatggcgatctcctccacggcgatggccggcacccccatcaaggtgggctccttcggcgagggccgcatcaccatgcgcaagaccgtgggcaagcccaaggtggcggcgtccggcagcccctggtacggccccgaccgcgtcaagtacctcggccccttctccggcgagcccccgagctacctcaccggcgagttccccggcgactacggctgggacaccgccgggctgtccgccgaccccgagaccttcgccaagaaccgcgagctggaggtgatccactcncgctgggccatgctcggcgcgttcggctgcgtcttccccgagctgctctcccgcaac

SEQ ID NO: 75596 - DNA, 405 bp, Zea mays
acgtggccatcaagggtctcgccggcagctccatctccggaaggaagctcgccgtcgccaggccgtcggcccgctccatccgcaggccccgcgcagccgccgtggtggccaagtacggcgacaagagcgtctactttgacctcgacgacatcggcaacaccaccggacagtgggacctctacggctctgacgcgccctcgccctacaacccgctacagagcaagttcttcgagacgttcgcggctccgttcaccaagagaggtctgctgctcaagttcctgctgctgggcggcggctcacttctggcctacgtcagcgcgtcggcgtcaccggacctcctgccgatcaagaagggacctcaggagccgccgcagccgggcccgcgcggcaagatctaagctcagc

SEQ ID NO: 75597 - DNA, 409 bp, Zea mays
cccacgcgtccgactgggcccactgtccggcgagccgccgagctacctgacgggcgagttcccgggcgactacggctgggacaccgcggggctgtcggcggacccggagacgttcgccaagaaccgggagctggaggtgatccactcccgctgggccatgctgggcgcgctcggctgcgtcttcccggagctgctcgcccgcaacggcgtcaagttcggcgaggccgtgtggttcaaggccggctcccagatcttcagcgagggtggactggactacctcgggaacccgagcctcatccacgcgcagagcatcctcgccatctgggcctgccaggtcgtgctcatgggcgccgtcgagggctaccgcatcgccggcggcccgctcggcgaggtcgtcgacccgctctat

SEQ ID NO: 75598 - DNA, 417 bp, Zea mays
caacttcaaggtgacgccccagccgccgctgtccaaggagttcgccgacgagaacaagcccgccggactggtcaagctgaacccggcgagcgagtacccgcccggcctggaagacacgctcatcctcaccatgaagggcatcgccgccggcatgcagaatactggctaggcggcttctcttcactcacctgcagagtgcaccgcaataatcagcttccggatggtggcgttttgtcagttttggatggaaatgccgaactggcagcgtctgttttccctatgcatatgtaatttcctgcctctttatattcactcttgttgtcaagtccaagtggaaaatcttggcatattatacatattgtaataataagcatcgtacaatctgcatgctgttttgtaataattaattaatatccc

SEQ ID NO: 75599 - DNA, 388 bp, Zea mays
agagaagcgctttagccgtagccgtagcgataagagtgagctagctggtgcacaccggcatggcggccacggcgtactccgtggcgctcctcggcggcgcgcgccttcccgccgctccgcgctccgccctcctccctcggcgcagcgtctgccagcttcgcttccaagatgcaccgaggctctccctgctccgtgcgaaggccgcttccgaggacacatcggcctccggcgacgagttgatcgaggacctcaaagcgaagtgggacgccgttgaggacaagcccaccgtcctcttgtacggcggcggcgccgtcgtcgccctttggctgacgtccgtggtcgtgggcgccatcaacgccgtgccgctgctccccaagatcctggagct

SEQ ID NO: 75600 - DNA, 162 bp, Zea mays
attgtttctggaaaattgaatatccctgccgagaaaatacttggcctggcaaaattcttccttggtattgggctcccaggtagcgcaaaggattgctttaatcagattgagtctttgtcattcttggagaacaatagggtcttcgttccgttgatactatca

SEQ ID NO: 75601 - DNA, 383 bp, Zea mays
gccggtgccggtccatctcctccgagagctccaccgaggcatccgctgcggctgacatcgccgacgaagaagtggaggccgagaacaaggtggacccgcaggcggaggtgtgctacctggaccctgacgtggaccctgagtcgatccgggagtgggagctggacttctgctcgcggcccatcctggacgcgcggggcaagaaggtgtgggagctcgtggtgtgcgacgccacgctgtcgctccagttcacgcgctacttccccaacaacgccatcaacagcgtgacgctccgcgacgctctggcctccgtgtccgaagcgctgggcgtgcccatgcccgaccgagtccgcttcttccggtcccagatgcagaccatcatcaac

SEQ ID NO: 75602 - DNA, 381 bp, Zea mays
accacgcgtccggcgccggaatgccacctccgacgacttcatgtccgccgtctccttcaggacccacgcggtcggcacgagcggcgggccgcggcgggcgccgacggaggcgaagctgaaggtggccatcaatgggttcggccgcatcgggcgcaacttcctgcggtgctggcacgggcgcggcgacgcctcgcccctcgacgtcatcgccatcaacgacaccggaggcgtcaagcaggcgtcccacctgctcaagtacgactccacgctcggcatcttccatgccgacgtcaaacccgtcggcgacaacgccatctccgtcgacggcaaggtcatcaacgtcgtgtccgaccgcaaccccagcaacctgcccgtggggcg

SEQ ID NO: 75603 - DNA, 350 bp, Zea mays
atagagcagcgagccatcgacacgatcgcgagcgcaagcacgtacgttgtcggaagctcaagttagaagaagcaccagtgcctgatcgatggcggcccaggctcgcctctccggccggcagctgctgggccgccccgtgcagtcggccgtctctaggtcgtcggcgaggaaggcgcccttcgtcgtcagggccagctccagccctccagccaagcaaggtgccgacaggcagctgtggttcgcgtccaagcagtccctctcctacctcgatggcacgctgcccggcgactatggcttcgacccgctgggcctctcggacccggagggcaccgggggcttcatcgagccca

SEQ ID NO: 75604 - DNA, 430 bp, Zea mays
ttccgggacgacccacgcgcccgatagttctagaacgcgagcggccgaattaagttcgtgcacgtacgcacgcaccgggacaccagcaacccccaacagcgccactgtccagtgcgcgcgtcaagcttgcttagctagccgccatggcctccctcgccgccgtctccgtgaagcccgtggccatcaagggtctcgccggcagctccatctccggaaggaagctcgccgtcgccaggccgtcggcccgctccatccgcaggccccgcgcagccgccgtggtggccaagtacggcgacaagagcgtctactttgacctcgacgacatcggcaacaccaccggacagtgggacctctacggctctgacgcgccctcgccctacaacccgctacagagcaagttcttcgagacgttcgcgggtccgtttaacaa

SEQ ID NO: 75605 - DNA, 428 bp, Zea mays
gcgcttcccgcacttccccgccatcgacgacctcttcagcgacggtatcccgctgtcggcgcagaccgggttcgacgccatccgcaccgtcgtctcgcgcatggtcaagctggtggaggacaccaccgacgacgtcctccgcttcgaggtgccggagatgatagagatggaccggttctcgtggttcaaggacgaagagttcgcgaggcagacgatggcggggctcaacccgctgtgcatccagctgctgactgagttccccatcaagagcaagctggacccggatgtgtacggggcatcggagtccgccatcaccaatgagatcctggagaagcacatgaacggtgcgctgaccgtggaacatgcgctggcggcgaatcagctgttcatcctggactacacgacgtgttcctgccctacgtgcacaa

SEQ ID NO: 75606 - DNA, 424 bp, Zea mays
cggacgcgtgggcagctaacgacctgcagccaaccatctaccagcgactcagcgagcgagagcagcacacactgcacgcagctagctaggagcagcagcagcggcggcgatggcggcctccatgatctcctcgtcagctctggcggtggcgcctcagggcctgccgcccctcggccgccgcgcctcctccttcgccgtcgtctgctccaagaagaagatcaagaccgacaagccctacgggattgggggtggcctgaccgtcgacgtcgacgccaacgggagaaagggcaagggcaagggcgtgtaccagttcgtcgacaagtacggcgcgaacgtcgacggatacagcccaatctacaacgaggatgactggtctcccaccggcgacgtctacgtcggtggaaccactgggcttctgatctgg

SEQ ID NO: 75607 - DNA, 422 bp, Zea mays
agcttgtgcgcgcgcaatggcactcgtgtccgcctcctcgtcctccaccaccgccgtcgcggcgctccccaggaatgggcagcagcgggcgtcgtcgtcgttgttctcctcctcctcctcttcctccttcctcgtcggcaagacgctgctgaggcaggccgaggcagcccggccgtcgttcgccgtgcgcgccgcggcggattccgacaggccgatctggttccccggcagcacccctccgccgtggctcgacggcagccttcccggcgacttcggctttgatccctggggcctcggatctgacccggagagcctgcggtggaacgtgcaggcggagctggtgcactgccggtgggcgatgctcggcgcggcgggtatcttcatcccggagttcctgaccaagatcggcgtcctcaacacgc

SEQ ID NO: 75608 - DNA, 412 bp, Zea mays
  unsure (1)..(412): unsure at all n locations
accacgcgtccggttccggctcgacaatttggggccccagaaggggtcccgccggcggcccaagcgtaagggacgcggtattgctgcaggccagggcgcgagctgcgggttcggtatgcgcgggcagaaatcgcgctcggggcccggcgtccggcgcgggttcgagggagggcagatgccgctctaccgccgtctccccaagctacggggcattgccggcgggatgcacattggcctgccgaagtatgtgccattcaatttaaaagacatagtgcgcggcggattcaaagatggtgacgaaatatcactggaaagcctgaaatcacggggtctgatcaatccatcaggcagggaaaggaagctgccgctgaagatcttangagatggggatgtatcagttaagttgaatatc

SEQ ID NO: 75609 - DNA, 386 bp, Zea mays
accacgcgtccgtgcggatagagcagcagaggcagcgacacgatcgcgagcgcacgcacgtaagcacgttgtcggaagctcaagttagaagaagcaccagtgcctgatcgatggcggcccaggctctcctctccggccggcagctgctgggccgccccgtgcagtcggccgtctctaggtcgtcggcgaggaaggcgcccttcgtcgtcagggccagctccagccctccagccaagcaaggtgccgacaggcagctgtggttcgcgtccaagcagtccctctcctacctcgatggcacgctgcccggcgactatggcttcgacccgctgggcctctcggacccggagggcaccgggggcttcatcgagcccaagtggctggcctac

SEQ ID NO: 75610 - DNA, 373 bp, Zea mays
acggccggaccggagtcaggcagccgaagcaagaaaagcaagcggctttggaagttggaatccatggcgtccacctcgtgcttcctccaccagtccaccgcccgcgtggccgcgccgtcgccgcgcctcgccgccccgccgcgcagcgcgcaactgttcgtctgcaaggcccagaagcagcaggccgccgcggcggagagcgacgtgtcgcgccgcgccgcgctcgcgctcctcgccggcgtcgcggccgtcggcgccaaggcgagccgcgccgccgccgcctacggggaagcatccaacgtgttcggcaggacgaagaagaagacggacttcatctcctacgtcggcgacggcttcaagctgctgattccgt

SEQ ID NO: 75611 - DNA, 425 bp, Zea mays
  unsure (1)..(425): unsure at all n locations
cgctcctcctcaccgccacactgctcccgtcgtcgtcgcagggcgccaggaggcacacgccacggcggcccgccgcagccgcaggggaggccaagtctgtgggtttcctggagaagtacccggccctggtcactggcttcttcttcttcatgtggtacttcctcaacgtcatattcaacatcctcaacaagaagatctacaactacttcccctatccatactttgtgtccttgatccatctagtagtgggtgtcgtatactgcctcatcagctggagtgtcggtctccccaagcgagcgcctatcaatggcacgctcctgaagcttctctttccagtcgccctgtgccatggtattggtcacatcactagcaatgtgtccttcgctgctgttgcagtctcatttgcncacactatcaaagctctg

SEQ ID NO: 75612 - DNA, 414 bp, Zea mays
agaataatcaggaaaagggagagggcttttatagatagtgaaggaactaatgatgacttgctaggcttattggttgagtcaaacatgagggaatcaaatgggaatgcaaaactcggaatgactaccgaagatataatcgaggaatgcaagttattttactttgcaggtatggagacaacatcagtcctgcttacatggacgttaattctgctaagcatgcaccctgaatggcaagagcaggcaagagaagaagttttaaaccactttgggatgggtacaccagactttgataacttgaaccgcctgaagattgtaaccatgattttatatgaggtccttaggttgtacccaccagtagttttcctatccagaagaacctacaaggaaatggagctcggtggcatcaaatatcct

SEQ ID NO: 75613 - DNA, 405 bp, Zea mays
accacgcgtccgcccggagtggcaggaccagttcctgcgctacaaggagctgaagcggtgcgtcaaggcccgctccggcggctgcccgccgttgcccgcggaggaggccgagttcgtggccgagatcgacgcggagaccgagaagatcaacgccttcttcctcgaccaggaggaggagttcatcatccgccaccgggagctgcagaaccacatcgagcgcgcgctgggccgcggcaggcccaggccggcgccggcgctgcacgaggccgaggtcgccgccatccgcagggagatcgtcaacttccacggcgtcatggtgctgctcctcaactacagcagcatcaactacataggcctggccaagatcctcaagaagtacgacaagcgcaccggcgcgatgctgcg

SEQ ID NO: 75614 - DNA, 411 bp, Zea mays
aaaggctgtcaggcagatgattatggctcccacgcttgagctgaggcagcaggcgctcgaccgtctcttgccgtatcagaggtctgacttcgaaggcattttccgtgctatggatggactcccggtgaccatccgactcctggaccctcccctccacgagttccttccagaagggaacatcgaggacattgtaagtgaattatgtgctgagacgggagccaaccaggaggatgccctcgcgcgaattgaaaagctttcagaagtaaacccgatgcttggcttccgtgggtgcaggcttggtatatcgtaccctgaattgacagagatgcaagcccgggccatttttgaagctgctatagcaatgaccaaccagggtgttcaagtgttcccagagataatggttcctcttgt

SEQ ID NO: 75615 - DNA, 419 bp, Zea mays
agtgtttgttgatgagttcagctgcataggatgcaagaactgtgcgaacgtgtgttctaaggtcttcgaaatcgaggaagatttcgggcgggcaagagtttatgaccaatcaggcagcacagaactgattcaagaagctattgatagttgcccagttgactgcattcactggacttcagctgcgcaactgtcgctccttgaggatgaaatgcgcagagtggagagagtaaatgttggattaatgcttgctgggatgggaggctcaattgatgtgtttcggatggcaagttcacgctgggagaaaagacaagccaaagtcctggagaaggtcagaaggcggatgagccaagatgattccagaaagggtggctcatggagtgacatctggggggcaccaacaagatacgagaagaacgaag

SEQ ID NO: 75616 - DNA, 421 bp, Zea mays
cgttgctcgcctcgggtcaaaccctaagcagggagttgatttatccgctgcagccatgagtaagttgcagtctgagtctgtcaaggatgccatctcccagattgttggggatgccaaggagaagaataggaagttcactgagactgtggaacttcagattggtctgaagaattatgatccacagaaggacaagcgtttcagtggctctgttaagttgccccatatccctcgtcccaagatgaaggtgtgcatgcttggtgatgcccagcatgttgaggaggccgagaagatgggacttgactacatggatgttgaggctctcaagaaaatgaacaagaacaagaagcttgttaagaggcttgccaagaagtaccatgctttcttggcatcagaggccatcatcaagcagattccccgtctc

SEQ ID NO: 75617 - DNA, 415 bp, Zea mays
accacgcgtccgcccacgcgtccggggaccgtgatgacagacgggaagagcaaaagtcttgttgcttaccatgaagttgggcatgcaatttgcggaactttgacgcctggccatgatcctgtccaaaaggttaccttagttccaaggggtcaagctcgtggtcttacatggtttatcccgatggatgacccaacactcatctccaggcagcaactttttgccagaattgttggcggccttggtggtagagctgctgaggaggtcatatttggagagcctgaggtgaccactggagctgctggtgacttgcagcaaattactggcttagccaagcagatggttgtgacattcggtatgtctgaaattggtccatggtctctgatggagggtggagcgcagagtggggacctcatca

SEQ ID NO: 75618 - DNA, 417 bp, Zea mays
aaacccatttccctcgctcccatcccgtcccgccccttgtctcttccgcttccccccgaccccgcgcgccgcggaccagcagccatgtcgtgctcccacctctccaccgcctggtcctcctcggcgctcgccagcagcgcctccaccacccgacggcgctcccccccgcgctcgggtctcctggtgcggtgttccctccgtgagctccgcacccgcatcgactccgtcaggaacacgcagaagatcacggaggccatgaagctggtggccgccgccaaggtccggcgcgcgcaggaggccgtcgtctcctctcgccctttctcggaggcgctggtggaggtgctctacaacatgaaccaggagatccagacggaggacatcgacctgcccctcacccgcacccggcccgtcaagaag

SEQ ID NO: 75619 - DNA, 401 bp, Zea mays
aacaaagaaaggtcgttttggtattctcccccgctatgcaaaggatgacaaactcatcagatggtttcaactccctaattgtttcatattccataatgctaatgcttgggaagagggtgatgaagttgttctcattacctgccgccttgagaatccagatttggacaaggtgaatggatatcaaagtgacaagctcgaaaacttcgggaatgagctgtacgagatgagattcaacatgaaaacgggtgctgcttcacaaaagcaattgtctgtttctgctgtggattttcctcgtgttaatgagagctatactggcagaaagcagcggtatgtctactgcactatacttgacagcattgcgaaggtgactggcatcataaagtttgatctgcatgctgaaa

SEQ ID NO: 75620 - DNA, 384 bp, Zea mays
acggccgacgcatctgccccgcgtacgatctcgccatgaagctggtcgccgccggcgtggcgaacctggtgcacgggttcgcgtggcggctgccggacggggtggcggcggaggacgtgagcatggaggagcatgtcgggctatccacgcgccggaaggtgccgctcttcgccgtggctgagcccaggctgccggtgcacctctacagcgcgaccgaatgaaaaccagggtctctatatacaaaactactggtattgtatatttgaaagtctacgttttgtatctcataatgttggagtactagtcaatccgtacattgccacagtttctatatattagatgagtaaactctattttaataagacataatagtatgtgtgtact

SEQ ID NO: 75621 - DNA, 413 bp, Zea mays
gcaatgaccaaacagggtgttcaagtgttcccagagataatggttcctcttgttggaacaccacaggaactggggcatcaagtgactcttatccgccaagttgctgagaaagtgttcgccaatgtgggcaagactatcgggtacaaagttgggacaatgattgagatccccagggcagctctggtggctgatgagatagcggagcaggctgaagtcttctccttcggaacgaacgacctgacgcagatgacctttgggtacagcagggatgatgtggggaagttcattcgcgtcgatcttgcttagggcatcctccaagatgaccccttcgaggtcggtggccggagggcagtgggcgaacgggaagtttgcacagagaggggcgcaaagcaggcctaacttgaagtgggcat

SEQ ID NO: 75622 - DNA, 434 bp, Zea mays
caagcaagcaagcagcgagtacatacatactaggcagccaggcagccatggcgcccaccgtgatgatggcctcgtcggccaccgccgtcgctccgttccaggggctcaagtccaccgccagcctccccatcgcccgccgctcctccagaagcctcggcaacgtcagcaacggcggaaggatccggtgcatgcaggtgtggccggcctacggcaacaagaagttcgagacgctgtcgtacctgccgccgctgtcgacggacgacctgctgaagcatgtggactacctgctgcgcaacggctggataccctgcctcgagttcagcaaggtcggcttcgtgtaccgcgagaactccacctccccgtgctactacgacggccgctactggaccatgtggaagctgcccatgttcggctgcaacgacgccacccaggtg

SEQ ID NO: 75623 - DNA, 418 bp, Zea mays
cccacgcgtccgcccggaacgcgccaggttcaacgacgacggcatgtaccgttccatcgacatctacttgaaggcgcatccgtatctgagcgaggccgagcggaagacggtgtgccgggtgatggactgccagaagctgtcgcgcgaggcgtgcgcgcacgcggcgcagaacaatcggctgccagtgcagacagtggtgcaggttctccaccacgagcagcggcgcctgcgcgaggcccctacgtcgtcgttctacggcggcgagtccccgaccccggcgccgagcctccagggccggcacggccggagcgtgccggacgagatgtcacagctgcagcgggagaacgaggagctcaagatggagctgctgcggctgaagatgaacctgagggacccgtcggggcccccgcaggccagc

SEQ ID NO: 75624 - DNA, 423 bp, Zea mays
cggacgcgtgggcgatctacacacatacatagtttcttctactacacgacgacaaacatggggaagcctgcgaagatcggagagtggggtggatacgccggcgatcgtcgggatctgagggctactccggaccggctgatcgaggtgaaggtcacggcggacaacagcagctgcatccgctccatctccttcatctacatcggagccgatggcaaaccgtacgaggaggggccatggggtttcggccatgctggcacggagtacaagattgatctgtgcaggttcgacgagagcttgacggagatctccgggaccacgggcccagcctacaacattgacaatctggtcaagtctctcaaattcgtcaccaacaaacgcgcttacggaccgtacggcagggacgaaggcaccccgttccgtgtc

SEQ ID NO: 75625 - DNA, 417 bp, Zea mays
agaagctgtacatccatttcacggtggagttccctgactcgttggcaccagagcagtgcaaggctctcgagacagtacttccaccaaggccttcatccaagctgacagacatggagatagatgaatgcgaggagacgactatgcatgatgtgaacaacatcgaggaagagatgcgcaggaagcaagctcacgctgcccaggaggcgtacgaggaggacgacgagatgccgggcggagcccagagagtgcagtgcgcgcaacagtaagcagactatcatcaaggcaattgggaggggtggtgcccttaaagcatgggagtgatctctggttttgctgtcgccgagctgggaaataggaagctgaatcgacctcgcaaccgggaatgtatccttttttgctgcaacataaaaaatgcta

SEQ ID NO: 75626 - DNA, 415 bp, Zea mays
acttgttgcaacattcatctcctcaagcctggtgaaaagagttggaattctaaaggcgggagctgctggattgatatttcaagcttcactcttgtcaatcgcgctcacagtgtattgggctggttcaatttcgcaaacgacacctctacttatattcctagcatccattgcattgtcgcggttggggcacatgtcttatgatgttgtggggactcaaattgtccagacaggtgttcctgcttctaaagcaaatctaattggaggaatggaggtttcaattgcaagccttgcggagctagtcatgcttgctatggctataattgcgaatgatgtctcccatttcggcttcctggcgatcctgtctgtgtcatcagttgctggggcagcatggatgttctgtccgtggttaacaaat

SEQ ID NO: 75627 - DNA, 407 bp, Zea mays
caacaaggcagcagcacaagcaagaaccacacctcctcccttcgcctgtgatcatgtcgtcttgctgcggcggcaagtgcgggtgcggctccagctgctcctgcggcagcggatgcaacggctgcggtatgtaccctgacgtggagaccgccgccaccagcagcgtcaagaccacggtcctcgccgcgccgaccaccaaggccagcgccggcggcttcgaggcggccaccgagggcggcggctgcgactgcaacacctgcaagtgcggcaccagctgcggctgctcctgctgcagctgcaactgagctggcccggcccggcgatggcgcacgagagtcgagaggaggaggacgacgacgaggcgtataaatataatagcggcgtccagtaaataagatcctgtcaac

SEQ ID NO: 75628 - DNA, 415 bp, Zea mays
cggacgcgtggaggacgcgtgggcggacgcgtgggcgattgttaattgttgatggtaaagaagttgtgaactttgcatcagcatgaggtctggagtctagacacagcgttgcaaactgaggtttaatcatcttagcaactacggtacgtgaccctgagcgcgtgattgttgcgaaacaacgaccacctcggtctacaccttaaaggtttgcgcgacatggcttttcatagtgctcaattggatctatcccctgagcataggagaaaagtatcaatttgtacagtggatccaagtattctataaagcatgcatcctccaatttcccacaagcgagaatgggatgatatgatggatgaaatggctgttgcggtcaattgtctttcaaggatcaattgtctttcaagaaccacacttt

SEQ ID NO: 75629 - DNA, 266 bp, Zea mays
cttcactcacatgcagagtgcaccgcaataatcagcttccggatggtggcgttttgtcagttttggatggaaatgcccaactggcagcctctgttttccctatgcatatgtaatttcctgcctctttatattcactcttgttgtcaattccaagtggaaaatcttggcatattatacatattgtgataataaacatcgttaaatctgcatgctgttttgtaataaataattaacatcccagtccattggatggacatgtttaaaaa

SEQ ID NO: 75630 - DNA, 399 bp, Zea mays
  unsure (1)..(399): unsure at all n locations
cggacgcgtgaaggcgacttgatctccttgtctgaacaagagcttgtcgactgtgacacttcgtacaatcaggggtgcaatggaggtctgatggactatgcatttgagttcatcatcaacaatggcggaatcgacaccgagaaggattacccttacaagggcacggacggacggtgtgatgtcaacaggaaaaacgcgaaggttgtcactattgacagctacgaagatgtaccagcgaacgatgagaagagtctgcagaaggcagttgcaaaccagcctgtcagtgtcgcaattgaggctgctggcacagcatttcagctctacagctcgggtatcttcactggaagctgtggaacagcgctggaccatggtgtcacngccgtcggctacgggacagag

SEQ ID NO: 75631 - DNA, 419 bp, Zea mays
gctcgccgtcgccaggccgtcggcccgctccatccgcaggccccgcgcagccgccgtggtggccaagtacggcgacaagagcgtctactttgacctcgacgacatcggcaacaccaccggacagtgggacctctacggctctgacgcgccctcgccctacaacccgctacagagcaagttcttcgagacgttcgcggctccgttcaccaagagaggtctgctgctcaagttcctgctgctgggcggcggctcacttctggcctacgtcagcgcgtcggcgtcaccggacctcctgccgatcaagaagggacctcaggagccgccgcagccgggcccgcgcggcaagatctaagctcagcttctccatttgcatggtctagtagcttgctttgtactgctagcgccggtcgattcgtcgc

SEQ ID NO: 75632 - DNA, 417 bp, Zea mays
  unsure (1)..(417): unsure at all n locations
accacgcgtccggcatctatagcaaccggtccagcactttcacgctcagctccagcaatggctgcctccaccatggcgatctcctccacggcgatggccggcacccccatcaaggtgggctccttcggcgagggccgcatcaccatgcgcaagaccgtgggcaagcccaaggtggcggcgtccggcagcccctggtacggccccgaccgcgtcaagtacctcggccccttctccggcgagcccccgagctacctcaccggcgagttccccggcgactacggctgggacaccgccgggctgtccgccgaccccgagaccttcgccaagaaccgcgagctggaggtgatccactcccgctgggccatgctcggcgcgctcggctgcgtcttccccgagctgctctcncgcaacggcgtc

SEQ ID NO: 75633 - DNA, 423 bp, Zea mays
atcctcctccaccaacccgatccagctacatccgttgaggcccgtgcgtttcttccctgttctcccatcaatcgacctagccttacgccgaccaggggcttcctctaatcgatctggtgtctgttctgtggtcttggtctgggtgcactccagggccaggagcagctagccgtcttcgatcgatccgttcgcatccccaacgcagttcggtttgtaaggtaggaaggagcgtgatggccaagacaagctcgttcaagctggagcaccccctcgagaagaggcaatctgaggctaaccgtatcagagagaagtaccctgacagaattccagtgattgttgagaaggctgagaggagtgatattcctgacatcgacaagaaaaagtacctcgtcgctgcagatcttacagtcgggcagttcgtgt

SEQ ID NO: 75634 - DNA, 412 bp, Zea mays
accacgcgtccgggttgctctagatccgttcatcctggtggttttgtgaggtcgaaagcggcgagcgaattagaagatgctggacaagctgtgggacgacgtggtggccgggcctcgcccggagacgggcctcgagaagctccgcaaggccaccaccgcccgtccgctcgtcatcaacaaagacgcggacggcggcagctacaagcgggcgcagtcgatgccgtcgaccccgacgacgccggtgacgccgtcgtcgtcgtcgtcgtcgacgacgccgcgcggcgccggcaacgtgtggcgcagcgtcttccacccggggagcaacctggccaccaagggcatgggcgccaacctcttcgaccggccgcagcccaactcccccaccgtctacgactggctctacagcgacgag

SEQ ID NO: 75635 - DNA, 405 bp, Zea mays
cacacacacacacacacagacaagtggtttccaaagccaagtgtgtgtactagcaaccagctagctcgggcggcagcaggcagccatcatgtcggaggagaagcaccaccacttcttcaaccaccacaagaaggacgaggagcagcccgccggcgagtacgggtactccgagaccgaggtggtcaccgccaccggcgagggcgagtacgagaggtacaagaaggaggagaaggagcacaagcacaagcagcacctcggcgaggccggcgccatcgccgccggcgccttcgcactctacgagaagcacgaggcgaagaaggaccccgagcacgcgcacaggcacaagatcacggaggaggtcgctgccgcggcggccgtcggcgccggcggctacgtattccacga

SEQ ID NO: 75636 - DNA, 403 bp, Zea mays
  unsure (1)..(403): unsure at all n locations
cccacggcctcgcccacgcgtcaacngacgcgtgggttttttttttttgaacgaacatgtttccatgttattgagagaatctagtgaacggcagccagtaaaggattacagactccaccagattgaggatcccatctaaaggaatgaactgagaaatcaactgaagagaacagcactacgtgcgacaatatgcatctacatataaagttattaagacccataggaaagagaagtctaagtggaaaacgtagagctttacaacttgcacatgggaaatcatgcgtgaccacctaaagagactccaattcaagataagctgagcctttctcagcagctgatgtagccttctggcttgatgaagctacagaacgaaggatctcaactggcttggggagatcaggtg

SEQ ID NO: 75637 - DNA, 412 bp, Zea mays
  unsure (1)..(412): unsure at all n locations
cccacgcgtccgtgctcatgggcgccgtcgagggctaccgcatcgccggcggcccgctcggcgaggtcgtcgacccgctctatcccggcggcagcttcgacccgctcggcctcgccgacgaccccgaggccttcgctgagctcaaggtgaaggagctcaagaacggccgcctcgccatgttctccatgttcggattcttcgtccaggccatcgtcaccgggaagggcccgctcgagaacctcgctgaccacattgccgaccccgtcaacaacaacgcttgggcctacgccaccaacttcgtcnccggcaagtgagggaggcgccgccggtgacctttaggtgtccggatgcatgtgagcgcacgctggtttccggtttgtaccatgatgtaaactattgttcaatcaacaag

SEQ ID NO: 75638 - DNA, 432 bp, Zea mays
accacgcgtacgcccacgcgtccgcggacgcgtgggtccccatccgcacctctctccatctccctgctcctccgccttcttcttgatccagccaagccagggatcgccatgtcggactcggaggagcaccacttcgaatcgaaggccgacgccggagcgtccaagacctacccgcagcaggctggcaccgtccgtaagaacggcttcatcgtcatcaagaaccgcccctgcaaggttgtggaggtttctacctcaaagactggtaagcatggtcatgccaaatgccactttgttgccatagatatattcaacgggaaaaagctcgaagatattgttccttcgtcacacaactgtgatattccgcatgtgaaccgtactgagtatcagctgattgatatatcagaagatggatttgtgagccttcttacttca

SEQ ID NO: 75639 - DNA, 414 bp, Zea mays
atagacattagctacaactgtatcaaggaaattccacacaaaatctctgctcttaaatctctaaataaattgctcctaactgaaaatgatatagttgatgatagcatctgctgggaaggtctatcatgtcttcaaaagctattgaatttatctttaagcgaaaaccgactggttagcttgccaccaactttgggttcactgacttctcttcgtgaactgtgtgttgcaaagaacaggcttgataacttgcctgtagaaataggactgctgaagcacctccaggtcctcatagcaaataacaacaggataacttcattgccttcatcaataggagattgtgaatctctcactgtggttcacctgtcatcaaatctcttaactgaactgccagagacctttgcgaaccttcgtaat

SEQ ID NO: 75640 - DNA, 400 bp, Zea mays
accacgcgtccggaacatcgaggacattgtaagtgaattatgtgctgagacgggagccaaccaggaggatgccctcgcgcgaattgaaaagctttcagaagtaaacccgatgcttggcttccgtgggtgcaggcttggtatatcgtaccctgaattgacagagatgcaagcccgggccatttttgaagctgctatagcaatgaccaaccagggtgttcaagtgttcccagagataatggttcctcttgttggaacaccacaggaactggggcatcaagtgactcttatccgccaagttgctgagaaagtgttcgccaatgtgggcaagactatcgggtacaaagttggaacaatgattgagatccccagggcagctctggtggctgatgagatagcggag

SEQ ID NO: 75641 - DNA, 405 bp, Zea mays
ggtagagatggctacagcagcttacgctcccatggcgagccaggtgatgaagagcagcccggtgcactcgaggccgaggggcctgtcaggcgctgcgctcacgcggccccggccccggttcagcgtcgtcaaggccgccatccagcccgagaaggcaacgtaccaggtggtgcagcccatcaacggcgacccgttcatcggcagcctggagacgcccgtcacctccagcccgctcatcgcgtggtacctctccaacctgccggcctaccgcaccgccgtgagcccgctgctgcggggcgtcgaggtcggcctcgcccacggctacctcctcgtcgggcccttcgcgctcaccggcccgctccgcaacacgcccgtgcacggccaggcgggcgcgctcggcgccgc

SEQ ID NO: 75642 - DNA, 411 bp, Zea mays
cccacgcgtccgggcatgctactatcacgtgcaagaataaggctttctatctgactgatctcgggagtgaacatggtacctggattaccgacaatgaaggtagacgttaccgcgtgccaccaaacttcccggttcgtttccatccttccgatgtcattgagtttggttccgataagaaggctatgttccgggtgaaggtgctgaacacgctcccatacgaatcagcaagaagtgggaagcagcaggggctgcagcaagagcaagtcctccaggcagcatgaatggagacaccagtcaccatcccatcatcagcgacactgtactgtatagcaatcgggagatacacgatactccaacgcgtaaaaaagcgtaaaagatacgtcaaaacagatgtgatttttgcatccatgc

SEQ ID NO: 75643 - DNA, 423 bp, Zea mays
ataagcagcagatcatcacctgagggagagcagcccggaggagggggagcaagcagcagccgtccgtggaagaagatgtcgtacctgctgccgcatctgcactcggggtgggcggtggaccaggccatcctcgccgaggaggagcgcctcgtcatcatccgcttcgggcatgactgggacgagacctgcatgcagatggatgaagtgctggcagcagtagctgagaccatagagaactttgcggtcatctaccttgttgacatcacagaggtccctgatttcaacaccatgtatgagctgtacgacccttcgacagtgatgttcttcttccggaacacgcacatcatgattgatctcgggactgggaacagcaacaagatcaactgggccctgaaggacaagcaggagttcatcgacattgtg

SEQ ID NO: 75644 - DNA, 420 bp, Zea mays
cacacgcgtccgcgcgcagagcatcctggccatctgggcgtgccaggtggtgctcatgggcgccgtcgaggggtaccgcgtcgccggcggcccgctcggggaggtggtcgacccgctgtaccctggcggcagcttcgacccgctcgggctcgccgacgacccggaggcgttcgccgagctcaaggtgaaggagatcaagaacggccgcctcgccatgttctccatgttcggcttcttcgtgcaggctatcgtcaccggcaagggccccctcgagaacctcgccgaccacatcgccgaccccgtcaacaacaacgcctgggcttacgccaccaacttcgtccccggcaagtgagcgagggcatgatgcttgcatgcgtgtaccgtagacgtaccgtattcctacgtactgcaggttgcacc

SEQ ID NO: 75645 - DNA, 421 bp, Zea mays
cccacgcgtccgcaccactccgcgctagctgaggacggtacagcggcacagaggtgcgacgtacgacgacgacgacgcaggcgccacacatggcatcccagctctccgccgccgtgccccggttccacggcctccggggctacgccgcgcccaggtccgcggtggcagcgctgccgtccgtgagggtgggcaggaagaggtcgtcgtcgcagggcatccgctgcgactacatcggctccgccaccaacctgatcatggtgacgacgacgacgctgatgctgttcgcggggcggttcgggctggcgccgtcggcgaaccgcaaggcgacggcggggctgaagctggaggcgcgcgactccggcctgcagacgggtgaccccgccgggttcaccctcgccgacacgctggcctgcggcgccgt

SEQ ID NO: 75646 - DNA, 426 bp, Zea mays
  unsure (1)..(426): unsure at all n locations
cacgcacgcatacacagcacagagtgaggtaagcatccgaaaaaagctgtgatctgatcgacatggccgccgccaccatggctctcacctcccgcgcgctcgtcggcaagccggcgaccagcaccagggacgtcttcggcgaggggcgcatcaccatgcgcaagactgctggcaagcccaagccagcggcgtccggcagcccctggtacggggccgaccgcgtcctgtacctgggcccgctgtccggccagcccccaagctacctgaccggcgagttccccggcgactacggctgggacaccgcggggctgtccgccgacccggagactttcgccaagaaccgcgagctggaggtgatccactgccgctgggccatgctgggcgcgctcgggtgcgtgttcncggagctgctcgcccgcaacggcg

SEQ ID NO: 75647 - DNA, 403 bp, Zea mays
ggcgcaggcgggccgccgcgccgtgctcgggctggtgggcactggcatcgtcggcggcgccttgtcgcaggcggtgcacgccgagaccgtcaagaccatcaagatcggagccccgccgccgccctccggtggactccccgggactctgaactctgaccaggcgagggacttcgacctccccttgaaggagcggttctacctgcagccgctgccgccggcggaggcggtggcgagggtgaagacgtcggcgcaggacatcatcaacctcaagccgctcatcgacaagaaggcgtggccgtacgtccagaacgacctccgcctccgggcctcctacctgcgctacgacctcaagaccgtcatcgcttccaagcccaaggaggagaagcagagcctcaaggagctc

SEQ ID NO: 75648 - DNA, 390 bp, Zea mays
acgccgattcgcgtcgccctttgttggaaggaacgatggagcagaccttcatcatgatcaagcccgacggcgtccagcggggcctgatcggggacatcatcagtcgcttcgagaagaaagggttctacctcaaggggatgaagttcatgaacgtggagaggtccttcgcgcagcagcactacgctgacctttccgacaagcctttcttccccgggttggtggagtacatcatttccggccccgtggtggcgatggtgtgggaggggaaggacgtcgtgttgactggccgcaggatcattggggccaccaggccttgggaggcagcccccggtaccattcgtggggactacgccgtggaagtcggcaggaatgtcatccatggaagcgact

SEQ ID NO: 75649 - DNA, 418 bp, Zea mays
ccatacattattattctagttattctgacctccatacctcgatcgagatagtggacataggatgccactctttaaaatgaaaaaaaggagtaatcagctgtgacacggaaagaaaacgaatccttttgtagctcgtcatttattggcaaaaatcgaaaaggtcaatatgaaggaggagaaagaaataatagtaacgtggtcccgggcatctagcattctacccgcaatggttggccatacaatcgcgattcataatggaaaagaacatatacctatttacataacagatcctatggtacgtcgcaaattgggggaattcgtgcctactcggcatttcacgagttatgaaagtacaagaaaggatagcaaatctcgtcgttaattgaattcaggatagaaagattcagaatagacaaga

SEQ ID NO: 75650 - DNA, 416 bp, Zea mays
atccgatgaagctgtacggggcggtgatgtcgtggaacgtgacgaggtgcgcaacggcgctggaggaggctggctccgactacgagatcgtgcccatcaacttcgccaccgccgagcacaagagccccgagcacctcgtccgcaacccgtttggtcaggttccagctctgcaggatggtgacttgtacctcttcgaatcacgagcaatctgcaagtacgctgctcgcaaaaacaagccagagctgttgagggaaggaaacctcgaggaggcagcaatggtggatgtttggatcgaggtggaggctaaccagtacaccgctgcactgaatcccatcctcttccaggtcctcatcagtcctatgcttgggggaaccaccgaccagaaagttgtggatgagaaccttgagaagctgaag

SEQ ID NO: 75651 - DNA, 400 bp, Zea mays
gtggaaagaggttccatgtctggttcaccaacctccacaactccatcagggatgaccgctatctgattggccgaaggctgcacaactttggtgaggacacacccgagccgagtgaatctggagcaactatagggtcagatgatcaggaccaagctcttgtcctgcgagatcaggaagaggaagtggggttgaggatgaggcgcaataatatgcgtgcaaaccaacaacccaggctggctttttaaggaggagatagttttggatatagagctcataaccatggtataagctttggcctgcagcttctgcttgtgctttgtaatgggagttgtagagggggtttatgtggttgcgataggaaagagtctaaggactgttctacgacaagcctgggagaaag

SEQ ID NO: 75652 - DNA, 370 bp, Zea mays
acgcagagcatcctggccatctgggcgtgccaggtggtgctcatgggcgccgtcgaggggtaccgcgtcgccggcggcccgctcggggaggtggtcgacccgctgtaccctggcggcagcttcgacccgctcgggctcgccgacgacccggaggcgttcgccgagctcaaggtgaaggagatcaagaacggccgcctcgccatgttctccatgttcggcttcttcgtgcaggctatcgtcaccggcaagggccccctcgagaacctcgtcgaccacatcgccgaccccgtcaacaacaacgcctgggcttacgccaccaacttcgtccccggcaagtgagcgagggcatgatgcttgcatgcgtgtaccg

SEQ ID NO: 75653 - DNA, 412 bp, Zea mays
cgcgggacttgatcagctctttgctcaaatctcaagtgtttggtgccattatcgcggtggtgagctgtgcctggggagttacaacccatggaggagccaagggtgttggcgagtctacaacatctgccgtagttgtttccttggttggaatcttcattgcagactttgctctctcgtgcctgttcttccagggtgctggtgattcgctcaagtatgcaatgggttgaggtgggtcagtgcagaggaagttttttcctttctaggaggatagcatagtcttgtacattaaaaagagtggtgcactggattctagtaggtgaacattgcaacttctgccacagtccaggtgacatgcatagttgtttccccttgatacctacgacaatcattacctttgttgtactgaactgct

SEQ ID NO: 75654 - DNA, 433 bp, Zea mays
cgctcctgggacgccgaccgacaggaccgattcgtgaggcgattcgccgactcgctcggacacccaaaggtcagccaggagctcaggtccatctggatagacctcctcgccaaggtacgtggatggcatggcatggcagtggcacacgtgttttcgttccatctagctactcatgcatgatatatatacgattgctttgcatatgcagtgcgacgcgtcgctggggatgaagattgccacccggctcaacatgaagccaaacatgtgatgcatcatgcttgtgctgaataataatgaagacgcatgcatgtcgtcgccaggaacaaagatcgagaaataatacaagaccagcacgcatgcatgggcatactctatatatatatatgtatagcccgtgcccgtgcccgcctttgtaccaatacaagccaaacca

SEQ ID NO: 75655 - DNA, 425 bp, Zea mays
gttcctctccggcgggcagtcggaggtggaggcgacgcagaacctcaacgccatgaaccaggggcccaacccgtggcacgtgtccttctcctacgcgcgggcgctgcagaacacctgcctcaagacctggggcggccagccggacaaggtcaaggcggcgcaggacgcgctgctgctgcgcgccaaggccaactccctggcgcagctcggcaagtacacctccgacggcgaggccgccgaggccaaggagggaatgttcgtcaagaactacagctactaattaatcgcccggccatcacccgggataccgccgcccctccgagagatacgtgtgtactgatcatggttaagcacgtactccgatccattcccatcccatgaagccatgataatgatgatatgatccatggaccatgcatggtgct

SEQ ID NO: 75656 - DNA, 294 bp, Zea mays
cccacgcgtccgccgccaccgtctccgacggcaagctctacatctgcaaggcgcaggccggcgacaagcggtggttcaagggcgccaggaagggcgtcgagaaggccgccgcctccttcagcgtcgcgtgaccgacgtaaactattgtttctttgatgcttttcatcagggatgcacatgcacgcaccgtgtgtacgtagagagctaggcatggcctggctcgccatgcttgttgtgtgtttctttgattgtacatgagaggacccgtttctgctgccatccaagttgtttgag

SEQ ID NO: 75657 - DNA, 429 bp, Zea mays
  unsure (1)..(429): unsure at all n locations
gttggctgtgaagttgacaatgaaaagatggaactccttctgtcccaactgagcggtaaggacattaccgagctcattgctgctggcagggagaagtttgcttcagtcccatgtggcggtggcggtgtggctgttgcggcagctgcccctgctgctggcggcgctcctgcagctgaggcgaagaaagaagagaaggtggaggagaaggaagaaagtgatgacgacatgggcttcagcctcttcgactaagcctgtgcaatagtcaagagtattgtttttgagtcgcggaagcagagggaagaaaaatcgtagtcatgtttggactttaactttgttttatgttggaaagtacttgaaagacttttcctgtggtaattctaggcgtaggttgctgtgctggttggggtttactggtgaaccanagttttt

SEQ ID NO: 75658 - DNA, 275 bp, Zea mays
aagctctacatctgcaaggcgcaggccggcgacaagcggtggttcaagggcgccaggaagggcgtcgagaaggccgccgcctccttcagcgtcgcgtgaccgacgtaaactattgtttctttgatgcttttcatcagggatgcacatgcacgcaccgtgtgtacgtagagagctaggcatggcctggctcgccatgcttgttgtgtgtttctttgattgtacatgagaggacccgtttctgctgccatccaagttgtttgagaaatcttggtact

SEQ ID NO: 75659 - DNA, 385 bp, Zea mays
caccgtcaccaacgtgggggcgcaagaggcggcctcctacacggtcgccgtcagcgcgccgcccggcctggacgtgaaggtcacgcccagtaagctcgagttcaccagaggcgtcaagaagctggccttccaggtgagcttctcccgtagcgggaacgacgacgacgcggcggcggccaagggcgccctttcgggctccataacatggtcagacgaaaagcacatggtccgcagcccgtttgtggtcaccagctgaaacatcatggcaatacctgacgcgcaggcacgtcaagaaatgctgtgatctcagatataaagtataggatacgatgttgaaagccactgctagtggcaaactcagaatcatcgaagattctgaaactgg

SEQ ID NO: 75660 - DNA, 378 bp, Zea mays
accaaccaaacccgcacgacacgacaccaagtcgaggagctcgagggcaccaatcatggccggcgtgaactccagcgtcgtcgggctcaagcccgccgcggcagtgccgcaggccgccgccgcctcatcgccggcgaagcgggtgcagctggccgcgcccgagggccgccgcgccgctctgctcggcctggcggccgtcttcgccgtcacggccaccaccgggtcggccaaggccacgatcttcgatgagtacctcgagaagagcaaggccaacaatgagctgaacgacaagaagaggctggccaccagtggcgccaactttgcgcgcgcctacaccgtggagttcggcagctgccagttcccctacaacttcactgg

SEQ ID NO: 75661 - DNA, 428 bp, Zea mays
aaggttttgctgctctccgaccccgagctccgaaggccgcagcatcaggcgcgccccccctcgcgtgtgaccgagatggcgctgccgaatcaggggaccgttgattaccccagcttcaagctcgtcatcgtcggcgatggtggaactggtaaaactacatttgtgaagaggcatctcactggagagtttgagaagaaatatgaaccaaccattggtgtggaagttcatccgttggatttcaccactaactgtggtaagatcaggttctactgctgggataccgcagggcaagagaagtttggtggcctcagggatggatactatatccatggccagtgtgcgatcatcatgtttgatgtaacctcaaggcttacttacaagaatgttcctacgtggcatatggaactgtgcaaggtctgtgaaaacat

SEQ ID NO: 75662 - DNA, 432 bp, Zea mays
aggacgcgtgggccccggcgaagttgttaaacctgaccaattcaaggcgataaacgacgaggggatgcctatttaccagaggcccttcatgaaggggaagctctacattcatttcacagtggagttccccgactcgctggcgccagagcagtgcaaggctctcgagtcggtacttccgccaaagccttcgtccaagctgacagacatggagatcgatgaatgcgaggagacgaccatgcatgatgtgaacaacatcgaggaagagatgcgcaggaagcaggctcatgctgctcaggaggcctacgaggaggatgacgagatgcctggcggagcccaaagagtgcagtgcgctcaacagtaagcagactaccataatgggattcaaggcactttgggtgctcttcaattatgcgagtgcgcctgtggactgtg

SEQ ID NO: 75663 - DNA, 428 bp, Zea mays
gtagcacagtccattattgccgtctcccttttgcgtgagcaaagaaagagagcgagaagcagtcgccatgtctggcatcatccacaagatcgaggagaagctccacatggggggcgaccacaagaataaggaggaggagcaccacaagaaggccgaggagcaccacaagaaggaggagggggagcaccacaagaaggacggcggggagcacaaggaaggcatcgtggagaagatcaaggacaagatcaccggcgagcacggcgacaagtccggcgaccacaaggagaagaaggacaagaagaagaaggataagaagaagcacggcgagggccacgaccacgacggcggccacagtagcagcagcagcgacagcgactgagatctggtgtcgcaggtaattaattgatctggggctgtaattttttttc

SEQ ID NO: 75664 - DNA, 369 bp, Zea mays
gccagccagtgtgtgcgttcgattcgcttctgctgcagctagggtttagaggttttctgggcgcggagcgggaggcggcggcggctatggctgcggcggaggaggagatcgcggtgaaggagccgctggatctgatacgcctcagcctcgacgagcgcatctacgtcaagctccgatccgaccgcgagctgcgcggcaagctccatgcgtatgatcaacatttaaacatgatacttggagatgttgaagaggtcgtgacaactgttgagatagatgatgaaacatatgaagaaattgtgcgcaccacgaaacgcactatgccctttctttttgtccgaggtgatggtgtcatattggtttctccacccc

SEQ ID NO: 75665 - DNA, 426 bp, Zea mays
  unsure (1)..(426): unsure at all n locations
ccatagtgagcggaatgggaactcctaatccagtagcaaatgcagttacaactggtgttgcttttgcagtatttcaaggtggctttttcatgatcgggcagaaattctcaaagccaccaagtgaagatacatactactctcggacaagaagcatgctgcacaaactgggtcttgaaaagtatgagaagaatttcaagaggggtctcctcaatgatcaaacgttaccactccttacggacagtgctctgagagatgtgaagattcctcctggacccagacttctcatactcgaccaaattaaaagggaccccgagctggttcaagcaaagtagcagtcacaattgtcgacagctggttctttctgggttgcatanggtttgaaagcgatgccgtctctagtttcttaataaactttctaggcaagca

SEQ ID NO: 75666 - DNA, 414 bp, Zea mays
  unsure (1)..(414): unsure at all n locations
gtcgccggggcggggcatcctggcgatggacgagtcgaacgcgacgtgcgggaagcggctggcgtccatcgggctggagaacacggaggccaaccggcaggcgtaccgcacgctgctggtcacggcgccgggcctgggccagtacatctccggcgccatcctcttcgaggagacgctgtaccagtccgccgtcgacggccgcaagatcgtggacatcctggcggagcagggcatcgtgccggggatcaaggtggacaagggccttgtcccgctcgccggctccaacaacgagtcgtggtgccagggcctggacggcctggcgtcncgcgaggccgcctactaccagcaaggcgcgcggttcgccaagtggcgcaccgtcgtcagcatcnctaacggcccctccgagctcgccgt

SEQ ID NO: 75667 - DNA, 421 bp, Zea mays
gagaggattaaggctgtcaggcagatgattatggctcccacgcttgagctgaggcagcaggcgctcgaccgtctcttgccgtatcagaggtctgacttcgaaggcattttccgtgctatggatggactcccggtgaccatccgactcctggaccctcccctccacgagttccttccagaagggaacatcgaggacattgtaagtgaattatgtgctgagacgggagccaaccaggaggatgcccttgcgcgaattgaaaagctttcagaagtaaacccgatgcttggcttccgtgggtgcaggcttggtatatcgtaccctgaattgacagagatgcaagcccgggccatttttgaagctgctatagcaatgaccaaccagggtgttcaagtgttcccagagataatggttcctcttgttg

SEQ ID NO: 75668 - DNA, 437 bp, Zea mays
  unsure (1)..(437): unsure at all n locations
ccgagaagcgctttagccgtagccgtagcgataagagtgagctagctggtgcacaccggcatggcggccacggcgtactccgtggcgctcctcggcggcgcgcgccttcccgccgctccgcgctccgccctcctccctcggcgcagcgtctgccagcttcgcttccaagatgcaccgaggctctccctgctccgtgcgaaggccgcttccgaggacacatcggcctccggcgacgagttgatcgaggacctcaaagcgaagtgggacgccgttgaggacaagcccaccgtcctcttgtacggcggcggcgccgtcgtcgccctttggctgacgtccgtggtcgtgggcgccatcaacgccgtgccgctgctccccaagatcctggagctcgttgggctcggctacnacggctggttcgtgtaccgctaccttctctg

SEQ ID NO: 75669 - DNA, 384 bp, Zea mays
acatccccaaggggctgtcggaggccaccgtccgccgcatctcggagctcaaggcggagccggcgtggatgctggacttccgcctcgccgcctaccgccgcttcctcaccatggtcgagcccacctggagcgacaacgagtacgcgcccgtggacctgcagtctatctgctactactccgcgcccaaaactaagcccaagctcaatagcctcgacgaggtcgacccggagctgctcaataccttcgaccgcctcggcatcccgctcagcgagcagaagcgcctcgccaacgtcgctgtcgacgccgtcatcgactccacttccatcgccaccacccaccgcgaggcgctcatggccaagggcgtcatcttctgctccatctccg

SEQ ID NO: 75670 - DNA, 434 bp, Zea mays
agctgcaggaggccatcgccgcgtacccggacgccttccaccgcgtcatcggcttcgacaacgtcaggcagacgcagtgcgtcagcttcatcgcctacaagccccccggcagcgagtagagaccgtggctagatcgacccatggccatgcctctgcctgttgatcggatcaccttcttgcattggttcctctctctctctccctccttttttttccctttatctcatcatttcttttctcctgcatgcaatggttccttttgcttccaacaattctcctgctgatgtatccagcatggcatcatccatctacaattacgtacgtagtgcaacgactgtcgattcgttgggtgaggaacatatatgtgaatgcaagctccggctaccatacatgtgtaatgtgtaatagatatatatacaaaactgccgaggggc

SEQ ID NO: 75671 - DNA, 435 bp, Zea mays
gcagcgcttgcaagaactagtgttgccagtaccacagtgctgtcttcaacttcaggactcttcactcttttcattggtgttttacttggccaagactccataaatgctgcgaaaattattgctgttttcattagcatggctggcgttgtaatgacaactgtgggccagacttgggcatctgatgaatcagaagcaggcaaatctggttttacacagaggactcttctaggtgatatgtttggtcttatgtcagcaatcgcctatggtctatttactgtgctgcttaaaaaattttgtggagaggaaggagaaaaggttgatgtccaaaaactgtttggttatcttgggctttttacccttgttgctctatggtggattgtctggccattaaccgcactaggcgttgagccaaagttttcaatgccccactcagct

SEQ ID NO: 75672 - DNA, 373 bp, Zea mays
aaaaaacttttacacccagattacttggtgtcatgcctgattctgatgaaaaggtttttttgaaacaaggcccatatggccactatgttcagattggagaggacaaaaagggactgtttccgaaaagggcttccctttccaaggtcaaagatatagactctgttactctagaagatgcaatcgagcttttgcaatatcccaaaattttgggaaaacatcctgaagatgattatcctgtacttataacacattctaaagttggatacaacatcaagcataggagatctctagctctagtgccaaagagtgttgacccaaagaagatgacacttgagcgtgcgctcaagctactaagcggtaaaagtgtcagacg

SEQ ID NO: 75673 - DNA, 425 bp, Zea mays
aactgagtcgtagggaaccgatcactcatggtctcgaatttcctaggagcagacgcgatggctgggaagggatgaaaatgattgctcgccacgaacaccacggcggccaagtcggcggagaatgacaaggggaagaaggcccccatctcacggtcctctcgcgcgggcctccattttcctgttggacgaatccaccgtcacctgaagcaaaggactcatgcaaatggccgcgttggtgccactgcagccgtctactctgctgccatcctgcagtacttgactgccgaagttctggagctggatgggaacgctatcaaggatctgaacgtgaatcgtatcacccctcgccagctacagttggacattcgccgcgacgacgacctggacaacctcatcaacggcaccatcgcaggtggaggtgtcat

SEQ ID NO: 75674 - DNA, 435 bp, Zea mays
agaggttatggaagtaaatattctcgcatttattgctacagcattgttcattctagttcctactgcctttttacttattatttatgtaaaaacagccagttaaaatgattaattggaattccaattaatcattgaagaaatgaaaaagggattaaagaaaataaaaaatccaagtcttaaatgaaagggtctggttggaatcataaagtgtggtagaaagaactacatatagttttttctaccacactttagattctttctattatattatcttgaatctacatagaatcgattagtagattgaaatagtagtctaattcaacttcttttttcactgcatccacttaatttcaatcaagtcaaaatcaaaaaaatcgaagataattcttcattgaaagaatccaaagagggggagaaaaataatacgagaataga

SEQ ID NO: 75675 - DNA, 403 bp, Zea mays
accacgcgtccgcccacgcgtccgcggacgcgtgggggagatccgcccggcggggcagagcatcaacgtctccgtcaacatgttcttcaccttctgcatcgcgcaggccttcctcaccatgctctgccacttcaagttcggcctcttctacttcttcgccggctgggtcgtcatcatgaccgtcttcatcgccttcttcctgcccgagaccaagaacgtgcccatcgaggagatggtgcttgtctggaagtcacactggttctggaaaaggttcatcgccgacgaggacgtgcacgtcggcattggcaacaaccacccggccaaaaacggcagcgacaccaagggggccgacgcgtgaacgtgatctcaacatctatattccatctacagtcacaactgaaat

SEQ ID NO: 75676 - DNA, 394 bp, Zea mays
accacgcgtccggttctagatcgcgagcggccgccctttttttttttttttatttacagcatattttattgttcagctccacagcatgcatacaaatacactagcggtacaatctctggctcccaaagctcccttcacaaatactggtgcaacctgcagtacgtaggaatacgtacgtctacggtacacgcatgcaagcatcatgccctcgctcacttgccggggacgaagttggtggcgtaagcccaggcgttgttgttgacggggtcggcgatgtggtcggcgaggttctcgagggggcccttgccggtgacgatagcctgcacgaagaagccgaacatggagaacatggcgaggcggccgttcttgatctccttcaccttgagctcggcga

SEQ ID NO: 75677 - DNA, 381 bp, Zea mays
atccacgacgtctgcccagcgcatcggaatgacgtgtgcatatgccaggacagagcagatgttcgcttgcttcagatgagaggataaatgctcttacgcacaacattatggctcttacacattatctgatagcatcaagctctcgagcgttccttgcacgtagtagatgtctgacatcgaactgcattttccgtgctatggatggactcccggtgaccatcttactccagcaggctctactccaagagttccttccacaatggaacatccaagacattgtacatcaagtatgtgcagagacaggagccatgtatcaggatactctcccgcgaagttataatcgttcagaactaacatcagacgcttggcttccatgggtgc

SEQ ID NO: 75678 - DNA, 412 bp, Zea mays
accacgcgtccgggcagcacactcagctatccagcaaaagagatcgagaggcaggagtcatggccaccgtcagcgccgccgtggtgaccaccatcgttgcccgcgccgcgatcgccaggcccaatgctctagggctgcctgcgctgagggcgaggagcgagagggtgcggtgcagctacgccaaggacgcggccccagtcagcaccaagggcgcaggcgcgtcgctgctcgccgcagcgggcgcggtgaccgcgtcggcggggcccgcgctggcgctcgtggacgagcgcatgtccacggagggcaccgggctgagcctcgggctcagcaacaacctgctggggtggatcctcctgggggtcttcggcctcatctggtccctctacaccatctagacctctgacctcgacca

SEQ ID NO: 75679 - DNA, 412 bp, Zea mays
accaccaaaccgccggccacactcgtctttctcacgagccacaggcacaggcaggctctcgagctcagtccacccagcgcaggggatggcgtcgtcgttcgccgtggcaacggtcccgtcgctggcggccccggcggccaagaagcggtccggcggcgtcacgtacgtggagggcatgaacgcctacagcggcctcaaggggctcaacaaggtgaacatgctcggggtgcgcaagaccgccgactactccttcgccaaggtcgtggcgtcgctcagccccgcgggcaggaagcggcgcggcggcgcgttcggcgcccagatgaacgccgccgccgagatcttcaggatcgccgccaccatgaacggcctcgtgctcgtcggcgtcgccgtcgggttcgtgctgctccgggtg

SEQ ID NO: 75680 - DNA, 430 bp, Zea mays
atcaaacgctacctctggtggttcccatgagcaaatcaagtacttggtgtctgagggctgcatcgtgccgctgtgcgaccttcttgtttgccctgatccgagaattgtaacagtttgtctggagggtcttgagaatattcttaaagtaggggagcacgacaagaccatgggcgcaacaggtgacattaatgttttcgctcagatgattgacgacgcggaaggcctggaaaaaatcgagaacctacagagccatgataataatgaaatctatgaaaaggctgtgaagcttcttgagacttactggatggaggaggaagatgatgcaatggctactgctggggaagctgctcctgctgtttttgactttagccaaggtggcaaccctcctggtggtggtttgaacctcaactgaatacagtatttgaccaaa

SEQ ID NO: 75681 - DNA, 427 bp, Zea mays
accgcggtcgtcttcctcggcccgctccttatcaagaagattgttgtacctattcttcactgggaatcaacaacgttcagcagaccatctattgctctaatatgtttcggcacaatcgcattattcccaagtgttttgttaccttcttcgcccttcatgtggcttgcggggatgacttttggatatctttatggttttttaataatcacagtgggtatgagcataggcatgtcattgccgtattttataggttctgcattccactgtaggatacatagatggttggagaagtggccaaagaaagcagcttttgtaaggcttgctggcgagggagattggcatcatcaatttaaggctgtagctttactcaggatttctccatttccgtatatagtttttaactatgcttctgtggctacgaatgtca

SEQ ID NO: 75682 - DNA, 369 bp, Zea mays
cggacgcgtgggattcagaaggagtccaccctccacctggtgctccgcctccgcggtggcgccaagaagcgtaagaagaagacgtacaccaagcccaagaagatcaagcacaagcacaagaaggtgaagctctccgtgctgcagttctataaggtggacgacgccacaggcaaggtgacccgcctccgcaaggagtgccccaacacagagtgcggcgcgggcgtcttcatggccaaccacttcgaccgccactactgcggcaagtgcggcctcacctatgtctacaaccagaaggcgtaattgcttgccccgatttgctttatccgccaacctatcaagcattcagatgttggttactcaaattgtatc

SEQ ID NO: 75683 - DNA, 387 bp, Zea mays
aagctattctgtcacatactccagatctgggacaaggtggctccactgctgtaaccgccattcttgtgaacggcaggaagttatgggtagctaatgttggcgattcaagagctgttcttttgaaaggtggtgagcccatacagatgtcgatagaccatgatccgaatgttgagcgcagtgtaatcgaaaataggggtggttttgtttcaaatatgccaggagatgttccccgagtatgtggtcagttggctgtctccagagcttttggagacaggaatctaaaatcactattgagatcagagcctgatataaaagtcgaagacatagatcacactgccgagctacttgttcttgcgagtgacggtctttggaaggtgatgaacaatc

SEQ ID NO: 75684 - DNA, 397 bp, Zea mays
accacgcgatccggacatcacggtggaggagtggctcaacacgcacggtcccaacgaccgcacgctcgcgcaggggctcaagggtgaccccacgtacctggtggtggagcaggacaagacgctggccacctacgggatcaacgccgtgtgcacccacctcggctgcgtcgtgccgtggaacggcgccgagaacaagttcatctgcccctgccatggatcccagtacaacaaccagggcaaggtggtccgcggaccggcgcctctgtcgctggctctggttcacgccgacgtcgacgacggcaaggtcctcttcgtcccgtggatggagaccgacttcaggaccggccaggacccgtggtggagtgcatgaggaggatcatccgacacaagcggtgct

SEQ ID NO: 75685 - DNA, 435 bp, Zea mays
acagcacaagcaagaaccacacctcctcccttcgcctgtgatcatgtcgtcttgctgcggcggcaagtgcgggtgcggctccagctgctcctgcggcagcggatgcaacggctgcggtatgtaccctgacgtggagaccgccgccaccagcagcgtcaagaccacggtcctcgccgcgccgaccaccaaggccagcgccggcggcttcgaggcggccaccgagggcggcggctgcgactgcaacacctgcaagtgcggcaccagctgcggctgctcctgctgcagctgcaactgagctggcccggcccggcgatggcgcacgagagtcgagaggaggaggacgacgacgaggcgtataaatataatagcggcgtccagtaaataagatcctgtcaactgcacccgccattatccatggtcgctcgctcctcgcct

SEQ ID NO: 75686 - DNA, 427 bp, Zea mays
cacggccctccttctccgccccgtggtcgctgcggctgccggcgccggcgcggcgccgggtggccacggccgcgcggatcaccatgcgggtcgcgtccaagcaggcctacatctgccgtgactgcgggtacatctacaacgacaggacgccgttcgacaagctggctgacaactacttctgccctgtttgtggagctccgaagagaaggttcagaccctacgagccggcagtctccaagaacgcgaacgccaccgatgccagaaaggcgaggaaggaggagctgaagaaggaggagagcatggggaaagccttgcctattgccatcgtcgtcgggatcattgccttggctggcctgtacttctacctcaacaatgtctacagctaaacgatgaatagacccgtttggtgcggcgaacaggattcatg

SEQ ID NO: 75687 - DNA, 420 bp, Zea mays
aggacgcgtgggttttttttttaggatatgcattgctcagcataactttgttaagtagtagacatatgtttacactcttgtttcatacaacaacacaataatgatctttcgctcatacacaaacatgataacgatgaggggctccaggctgaattgtgaacgacggaagcgtcacttcatgtacctctgaagaaatttacggtggaaatcactcctgatggtgtcgttgatgaaccgtttcggtgtcttggtctctcctcgtgcttgattcttgaataccacgtcgtcgtcccaccttctcttaacactgaaggagccagcattgttgatattaatcaacgggtttccccgcatcagttcagcctccttcatcttggcctcctcttctgcttgttgccgctcccttctaagcttctcccc

SEQ ID NO: 75688 - DNA, 409 bp, Zea mays
atgaacacttgattgattcagtaggtagctagctagctgaatcacaatggatcctaccaagttccgtccgtccagtagccacgacacgacggtgacgacgacgaacgctggcgctcctgtgtggaacgacaacgaggcgctgactgtggggcctcgcggtcccatcctgctggaggactaccacctgatcgagaaggtggcgcacttcgcgcgggagcgcatcccggagcgcgtggtgcacgcgcgcggggcctccgccaagggcttcttcgagtgcacccacgacgtgacgtcgctgacgtgcgccgacttcctgcgcgcgcccggcgtgcggacgcccgtgatcgtgcgcttctcgacggtgatccacgagcgggggtccccggagacgattcgcgacccgcgcggg

SEQ ID NO: 75689 - DNA, 397 bp, Zea mays
aaccgctttcccgttccccaccccgaccgactgctccccctcccccgcaccagcctcaagccctcaaggcctcaaggcatcgccggcgccgcaacttcgctgaggaagcccgcacccctgcccggatccgatggccaacagcaacctcccgcggcggatcatcaaggagactcagcggctgctcagcgagccagcaccggggatcagcgcgtcgccctcggaggagaacatgcgctacttcaacgttatgatccttgggccggcgcagtcgccctatgaaggtggagtttttaagcttgaactctttttacctgaggaatatccaatggctgccccaaaggttaggtttctgacaaagatttatcatcccaacatcgacaagcttggtacgatatgc

SEQ ID NO: 75690 - DNA, 356 bp, Zea mays
aagacgcgtgggcggacgcgtgggccgcagccggagcacatggctctctactaccgccagcgggcgacgcccggcggcttcctcatcgccgaggcctgcgccgtgtcggagagcgcgcgcgggtacccggacgttccggggctgtggacccaccaacaggtcgaggcctggaagccgatcgtcgacgccgtccacgccagcggtgccgtcttcttcgcccagctctggcacaccggccgggcctccccctcagaattccaaccaaatgggcaagcaccgatctctaacacggacaagcaaatcccaacacaagtgaaccattccggtgacgtcaacacgttcgcggtgcctccgag

SEQ ID NO: 75691 - DNA, 306 bp, Zea mays
gtcggcgcccgcggatcggaccgtcatgaccatatctacctacgcatgatcactacttgaatgtctactactgctacgtactactactgaataaaaaaacctctccgcgcacatcgtccttgtgtttgtgtgtgtgagagagagaggagacggagagccggccatgtccttttggctgtttgtttggtttatttttgagttcatgcggtctttatttatttccatgtacgctgcttcctcgtacccactttaaatttgtaccatgcatgcatgttccttatgatacactcacctctttttgtttgc

SEQ ID NO: 75692 - DNA, 415 bp, Zea mays
accaactcgccgtctgccttctgcgcctccatttcggcctctgtccctcgcaagttcaatctcacctccaaccatgggtaaagagaagtcccacatcaacattgtggttattggtcatgtcgactctggcaagtcgaccaccacaggacaccttatctacaagcttggaggcattgacaagcgtgtgatcgagaggttcgagaaggaggctgctgaaatgaacaagcggtccttcaagtacgcgtgggtgctcgacaagctcaaggctgagcgtgagagaggtatcaccattgatatcgctctgtggaagtttgagaccaccaagtactactgcacggtcattgatgcccctggacaccgtgacttcatcaagaacatgatcactggtacctcccaggctgactgtggcgtccct

SEQ ID NO: 75693 - DNA, 416 bp, Zea mays
cacgacaccaagtcgaggagctcgagagggcaccaataatggccggcgtgaactccagcgtcgtcgggctcaagcccgccgcggcagtgccgcaggccgccgccgcctcatcgccggcgaagcgggtgcagctggccgcgcccgagggccgccgcgccgctctgctcggcctggcggccgtcttcgccgtcacggccaccaccgggtcggccaaggccacgatcttcgatgagtacctcgagaagagcaaggccaacaaggagctgaacgacaagaagaggctggccaccagtggagccaactttgcgcgcgcctacaccgtggagttcggcagctgccagttcccctacaacttcactgggtgccaggacctcgccaagcagaagaaagtccccttcatcagcgacgacctcgag

SEQ ID NO: 75694 - DNA, 411 bp, Zea mays
agcgccgccgccggccagcgcaacaccagccgcgccagcggcagcaaatgcgcaacccaagctgactgccgtgaagctgaggatgatcatcaagggcgtgctcgggcggtaccagcgctggaaccccgtgcacccgacggccggcaccttctggggtgtggggctcggcgtcggctgtggcgtcggctggggccccggcttcgggcctgaggtgattgggtacgtaggcgccgggtgcggcgtggggttcagcgttgggttcacgctcgccggcgtcggcatcggcctgccgcagcacagcctcatcaggaaccacgaccacggtggttttgcgagcagcgtccctgttgattcagcgagattctacgccctaaccatcatcagaggtctggtatgggacgccatcagcta

SEQ ID NO: 75695 - DNA, 407 bp, Zea mays
ataataaactgcggattctttctttctcttccattcttacgtttccatattaaagtgtagtttttttacttaaatttaataatattaatctaatatgcccattggtgttccaaaagtaccttaccggattcccggagatgaagaagcgacttgggttgacttatacaatgttatgtatcgagaaaggacactttttttaggtcaagagattcgttgcgagatcacaaatcatattacaggtctgatggtatatctcagtatagaagatggaaatagcgatatttttttgtttataaactcccctggcgggtggctaatctcaggaatggcgatttttgatacgatgcaaacggtgacacctgatatatatacaatatgcctcggaatagccgcgtccatgggctcct

SEQ ID NO: 75696 - DNA, 417 bp, Zea mays
aaaagcagttatgcatttcttggttaatcatacaaaaagggcgctgcataattaccttataacaaaactttatagagatgatcttttggaagacttgctcaaagaacctgatgagataaccataaagaggaagcagatacgtgaaaatctcaaggtccttcaacaagcttacaaaactttggacgagataccacttgacgcagaggcagtagagaggggtggatactccctggattctgatgcgattggtctgccaagggcccatgggctttcttcatccctccacggattcaacgatggaagctcaccatattcaaccccgaagcagtcaaggtcaaggaggtcaaaccattctggcgagcagcttcctttcaaccccaatatgagtggcaatggtttttgatgccaccctcctac

SEQ ID NO: 75697 - DNA, 426 bp, Zea mays
gacgacttgtttcattgattcttgaagagatcgagcttcttttgcaccacaaggtcgaggatgtcttgcaactgcggatcaagctgcggctgcggctcaagctgcaagtgcggcaagaagtaccctgacctggaggagacgagcaccgccgcgcaggccaccgtcgtcctcggcgtggccccggagaagaaggccgcgcccgagttcgtcgaggccgcggcggagtccggcgaggccgcccacggctgcagctgcggtggcaactgcaagtgcgacccctgcaactgctgatcacatcgatcgacgaccatggatatgattattatctatctagcttgtggtggtggttgaacaataataagcgaggccgagctggctgccatacataggtattgtgtggtgtgtgtgagagagagagaaacagag

SEQ ID NO: 75698 - DNA, 277 bp, Zea mays
gtccgaccacgcatccgcccacgcgtccgcaaccaagcccgcacgacacgacaccaagtcgaggagctcgagagggcaccaataatggccggcgtgaactccagcgtcgtcgggctcaagcgcgccgcggcagtgccgcaagccgccgccgtcgcatcgccggcgaagcgggtgcagctggccgcgcccgatggccgccgcgccgctctgctcggcctggcggccgtcttcgccgtcacggccactaccgggtcggccaaggccacgatcttcgatg

SEQ ID NO: 75699 - DNA, 359 bp, Zea mays
accacgcatccgcggacgcgtgggcgaggtcaatgccaaactgtcagagacgcccggcctgatcaacacgagcccgtacgaggacgggtggatgatcaaggtgaagccgagcagcccgggggaggcggacgccctgctggacgccgccaagtacaccaagcattgcgaggaggaagacgctcactagacccaggcccgcccagccagcaagcgtggatgcttaccacgacagtgcgcgtttggtggtgttgatccgctcagtcgttctttagtgttgcaaaaactccaccaagcagtccgccaatgccggcgtacctgatgccttccgttttctttgtgctggtaccttattttttttt

SEQ ID NO: 75700 - DNA, 204 bp, Zea mays
cccggcgttcgcgctggtgaacaaggcgaccggggaggccatcaagcactcgctggggcagtcccacccggtgcgcctggtgccctacaagccggacttcctggacgagtcggtgctgtggacggagagccgcgacgtcggcaacagcttccgctgcgtccgcatggtcaacaacatctaactcaacttccaatccctccacgg

SEQ ID NO: 75701 - DNA, 405 bp, Zea mays
  unsure (1)..(405): unsure at all n locations
atcgaccttcaagtctcgctacgtagcagtgcaataaaaaaagcagccgcaatggcgagcagcaccatggccctctcctccacggccttcgccggcaaggccgtgaacgtgccgtcgtcgtccgccttcggcgaggcccgcgtgacgatgcgcaagacggcggggaaggccaagccggcggcggcgtccgggagcccgtggtacggccccgaccgcgtgctgtacctgggcccactgtccggcgagccgccgagctacctgacgggcgagttcccgggcgactacggctgggacaccgcggggctgtcggcggacccggagacgttcgccaagaaccgggagctggaggtgatccactnccgctgggccatgctgggcgcgcctcggctgcgtcttcccggagct

SEQ ID NO: 75702 - DNA, 364 bp, Zea mays
attcgctcgctcgatcctagcttcccttccaagaagcgcagcgcccatggccatgtccacgcaagcctccgccgccacgcgccacctgctggccgctgcctgggcgccggcggcgaagccgcggcagctgagctcgcagctcgcgctgccgtcgtcgtcctcccgcgggccggccccgctccgcgcgtccaccgaggaggcggtggaggcgcccaaggggttcgtggccccgcagctggaccccagcacgccgtccccgatcttcggcggcagcacgggcgggctgctccgcaaggcgcatgtggaggagttctacgtcatcacgtggacgtcccccaaggagcaagtgttcgagatgcccacc

SEQ ID NO: 75703 - DNA, 277 bp, Zea mays
accacgcgtccggccaggattttgagaaggctggggaattgagagaccgtgaaatggcattgaaggcccacataacagccctcagtgacaggagcaaggaattgagcaaagcagaggaagagtctggagagacaggacctatggtcaatgaagaagatatccagcacatagtatcttcatggactggcatccctgtggagaaggtttccagcgaggagtctgataagcttcgtaagatgggacagactttggacaagcgtgtcatcggccaagatga

SEQ ID NO: 75704 - DNA, 411 bp, Zea mays
cccacgcgtccggtgtttttgtcatcggtttctcaatcattgtttttggcaacaaaattagcacacaaactggaattggcacgtccattgccatagctggtgttgctatgtactcttacattaaggctaagattgaagaggagaaaaggaaaaagagcgcatgactgctgtgaataatattatcgagaccttcctcggacacaacatcgtcgacaatcacgacctacttctatatcttgttttgttttcatcttgagtcagtcggtccattgtttgttcccagtctggtgattaaaagtctgcaaattctgtttgtggaattggcagcgatacaaatttggcttctttaagtaaatccggttgccggtacacaacggtattaattcacctgtaactgaatggaataccgtg

SEQ ID NO: 75705 - DNA, 366 bp, Zea mays
acaccatcgacgcgtcgctcagcatggtcatgggcgacgacatggtcaaggtcgtcgcctggtacgacaacgagtgggggtacagccaacgcgtggttgatctggcgcacctggtggcggccaagtggcccggcgcggcggcggccggcagcggcgaccctctggaggacttctgcaaggacaaccccgagaccgacgagtgcaaggtgtacgaagcatgaggccacggttctttccacgacggaacgtacagcacgggcgcgagggttctttccatagagaataatatacagattattcgcccaaagagacctatgttatatatatatgagttgtatgcagtcacccaactgggacaggtttccg

SEQ ID NO: 75706 - DNA, 327 bp, Zea mays
  unsure (1)..(327): unsure at all n locations
accgcgtgcgttatcctttgagcagtttgggcgctgagcaagtccagtgagagagggagagcggcgagaggatggctgggatggcgtcgctgcanggcgccatggcgtcgctcctcaatctccgccctaggtgcggcaacggcaaccaccaccaccttctggggcaaccggttcgcaacctattccgcgccgcagcctggggtaaggtttatggtcaagatatgcccaattgaaatgagacttaagaaatgggaccgaaagaagtgtaaaccaaacattcttcctgtgctgcacaagatgcatgttaggatcggggacacggtacag

SEQ ID NO: 75707 - DNA, 373 bp, Zea mays
gggttcggccgcatcgggcgcaacttcctgcggtgctggcacgggcgcggcgacgcctcgcccctcgacgtcatcgccatcaacgacaccggcggtgtcaagcaggcgtcccacctgctcaagtacgactccacgctcggcatcttcgacgccgacgtcaagcccgtcggcgacaacgccatctccgtcgacggcaaggtcatcaaggtcgtgtccgaccgcaaccccagcaacctgccgtggggcgagctcgggatcgacctcgtcatcgagggcaccggcgtcttcgtcgaccgcgagggcgcggggaagcacatccaggcggaggccaagaacgtgctcatcacggcgcccggcaagggcgacatcccca

SEQ ID NO: 75708 - DNA, 318 bp, Zea mays
cccacgcgtccgcacgcatactgcatacacaacacagagcatcagaaggagctgcgatctgatcgacatggctgccgccaccatggctatcacctcccgcgcgctcatcggcaagccggcggctggcacgagggacgtcttcggcgagggccgcatcaccatgcgcaagaccgccgccaggcccaagccggcggcgtccggcagcccctggtacgggtgccgacggcgtctggtacctgggcccgcggtccggctcgcccccgagctacctgaccggcgagttccccggcgactacgggtgggacaccgcggggctgt

SEQ ID NO: 75709 - DNA, 357 bp, Zea mays
agtcggcacgcaggctagcagcacagcagcagccagagccatcccctctcctcgctacgcttcgcttcctcggcgccgattcctcctcctcctcctccaccctcgtccgtcccgttccggcgcgcgagctcgcccgagatggcgaacgcgagatcgggtgtcgctgtgaacgatgagtgcatgctgaagtttggcgagcttcagtcgaagaggctgcaccgcttcataactttcaagatggacgacaagttcaaggagatagttgtggaccaggtcggggatcgcgctaccagctacgatgacttcacaaacagcctccctgagaatgactgccgatacgcgatctatgatttcgac

SEQ ID NO: 75710 - DNA, 327 bp, Zea mays
tcgaagaaaacccagccgccgccgcatcggcctcccaggtaagcagtagcgtccaccccagccgccgccatgaagcgcaacccccgcgtcacgagctcccgccggaagtgccgcaaggcgcacttcacggccccgtcctccgtccgccgcgtgctcatgtccgcggcgcgatcgacggagctccgccacaagtacaatgtgcgttccatcccgatccgcaaggacgaccaggtgcaggtcctgcgcggcacctacaagggccgtgagggcaaagtcgtgcaggtgtaccgccgtcactgggtcatccagcttgagcggatcacccgc

SEQ ID NO: 75711 - DNA, 382 bp, Zea mays
atcatctcttccaaatcccaccagcaaatccccaattcctccgagttcgagcgaccatgtcggggcgtggcaagggcgggaagggtctgggcaaaggcggcgccaagcgtcaccgcaaggttctccgcgacaacatccagggcatcacgaagccggcgatccggaggctggcgaggaggggcggcgtgaagcgcatctcggggctcatctacgaggagacccgcggcgtgctcaagatcttcctcgagaacgtcatccgcgacgccgtaacctacaccgagcacgcccgccgcaagaccgtcaccgccatggacgtcgtctacgccctcaagcgccagggtcccaccctcgaccgattcggccgctgacaggcgccaccgcc

SEQ ID NO: 75712 - DNA, 342 bp, Zea mays
acccaaccaagcccgcacgacacgacaccaagtcgaggagctcgagagggcaccaataatggccggcgtgaactccagcgtcgtcgggctcaagcccgccgcggcagtgccgcaggccgccgccgcctcatcgccggcgaagcgggtgcagctggccgcgcccgagggccgccgcgccgctctgctcggcctggcggccgtcttcgccgtcacggccaccaccgggtcggccaaggccacgatcttcgatgagtacctcgagaagagcaaggccaacaaggagctgaacgacaagaagaggctggccaccagtggagccaactttgcgcgcgcctacaccgt

SEQ ID NO: 75713 - DNA, 381 bp, Zea mays
accacgcatccggggcatgctggcgccccgagcggcggcgcagacgccgaactgcgcggcgaagctggtcccgtgctcgtcgtacatgaacacgacggggacgccgccggacacctgctgcggcccgctcaaggacgccgtcaagaacgacctcaagtgcctctgcgatctctacgccacgccggagatcttcaaggccttcaacatcagcctcgacgaggccctcggcctctccaagcgttgcggcctcagcgacaccaccgccgcctgcaagggcctttcacctacccaatctcctccaggttcaccatcaggtggtggcagtggcagcaactccggtcatcacactctgtcggtcggtttcccaagattcatgagctt

SEQ ID NO: 75714 - DNA, 393 bp, Zea mays
  unsure (1)..(393): unsure at all n locations
aggtaacctgccgttcagcgtcgacagtgcgcagctggccgggctcttcgagcaggcgggctccgtcgagatggtcgaggttgtatacgatagaatgactgggcggagccgtggatttggattcgtgacaatgtcttcagctgaagaagccggggctgctgtcgagcaattcaacggttatacatttcaaggaagacctctgagggtgaactgcgggccaccgccacctagagatggatccgcaccaagagcaccaaggggtggtggtggtggcggcggcggcagcagctttgtcgattcanggaacaaggtatacgtggggaaccttgcatggggcgttgacaactcgactctggagaacctattcagtgagcaaggacaggtgctggatgc

SEQ ID NO: 75715 - DNA, 385 bp, Zea mays
gccgccggcctctcattcccccgcgccggggccccgttcatcctcctccgcacctcctgtttctctccgtgggcagctctggtgccccgccgtcgacttctctctgggcctcccactgccggtgatcccccgcccccggcgctcccgccaacttcgaagctcgccgccccgccggttgtgggaacgccggagcccccgctgccgtttagggccgtggaggcggagatccttcgcgatattgaccccgtcgtcctgctcatcaaggatatcctccactccgatagatacggggatggcgaatgtctctgcccaagggacgaaaatgtcgtcgtggagaagctcctctcctaccatccacgcgcgcaggacaaaattgggtgtggac

SEQ ID NO: 75716 - DNA, 354 bp, Zea mays
cccacgcgtccgcggacgcgtgggggccgacaagctgcagacctccgacggctgggccaagttcaccgggggattcttcttcggcggcatctccggcgtgctctgggcctactttctcctctacgtgctcgacctcccctacttcttcaagtagaaatcatcacagatgcgtatatatatagctccggccgatcctcctctctagctgcatggtatgtacgtggtgtggtccttgtttcatttcactccagcggtgatcagcgccgtgtataaatgtaattcctctgctttgcacatggatggattgggatgtaacctgttcaacttttttttaccttaatggatgcatcattc

SEQ ID NO: 75717 - DNA, 357 bp, Zea mays
cacaccactccgcgctagctgaggacggtacagcggcacagaggtgcgacgtacgacgacgacgacgcaggcgccacacatggcatcccagctctccgccgccgtgccccggttccacggcctccggggctacgccgccccaggtccgcggtggcagcgctgccgtccgtgagggtgggcaggaagaggtcgtcgtcgcagggcatccgctgcgactacatcggctccgccaccaacctgatcatggtgacgacgacgacgctgatgctgttcgcggggcggttcgggctggcgccgtccgcgaaccgcaaggcgacggcggggctgaagctggaggcgcgcgactccggcctgcag

SEQ ID NO: 75718 - DNA, 345 bp, Zea mays
agccggacaaggtcaaggcggcgcaggacgcgctgctgctgcgcgccaaggccaactccctggcgcagctcggcaagtacacctccgacggcgaggccgccgaggccaaggagggaatgttcgtcaagaactacagctactaattaatcgcccggccatcacccgggataccgccgcccctccgagagatacgtgtgtactgatcatggttaagcacgtactccgatccattcccatcccatgaagccatgataatgatgatatgatccatggaccatgcatggtgctctggtcgatgccgtacgtgtgtccctgatacaatactagtttagtactgatgctagt

SEQ ID NO: 75719 - DNA, 393 bp, Zea mays
aaccggtccaacactttcacgctcaggcgctcagctctagcaatggctgcctccaccatggcgatctcctccacggcgatggccggtacccccatcaaggtgggctccttcggcgagggccgcatcaccatgcgcaagaccgtgggcaagcccaaggtggcggcgtccggcagcccctggtacggccccgaccgcgtcaagtacctcggccccttctccggcgagcccccgagctacctcaccggcgagttcctcggcgactacggctgggacaccgccgggctgtccgccgaccccgagaccttcgccaagaaccgcgagctggaggtgatccactcccgctgggccatgctcggcgcgctcggctgcgtcttccccgagctgctctcccgc

SEQ ID NO: 75720 - DNA, 397 bp, Zea mays
accacgcgtccgatggagtatcggttgcatttttgcggagatcttaactgggaagccattttttccaggaaataaaggcttcccagttaagatctcctggaaaaaatgtggtccaccagttagatttgatgactgatctcttgggtactccatcacttgatacagtttccaggattcggaatgagaaggcaaggaggtacttgagtagcatgaggaaaaaacagccagtaccatttactgaaaagtttcctaaagcagatcctgctgcactcaaacttttgcagaggcttttggcatttgatcccaaggataggccaactgctgaagaggcattggctgatccgtattttaaaggcctcgcaaaagtagagagagaaccatcatgccagccaataac

SEQ ID NO: 75721 - DNA, 371 bp, Zea mays
cttgagtatattggcggataagaaggtgaacaagaagttgacagccaagctgaccctatactcaggatgtgttgtgccttctggtggtgaaaccgtctctttaagcaactgaactggtttaactataacagaagagctcagtgatttaccctttagaaaatcctctaccttgctagctctgatggcatggtcagctccataagcaccgagtaccaagcatatatcctccatgatgttcttccctgaagctgcatcagttgaagtccttgccaagagagcagcattgacatatgaagcagcattgccaaatggtcgaggcgctgcccggaatgtctcaaaggtgaggccatcgcaatcgcactttgggaggc

SEQ ID NO: 75722 - DNA, 382 bp, Zea mays
gcgagggcgggcttgactacctcggcaacccgagcctgatccacgcgcagagcatcctggccatctgggcgtgccaggtggtgctcatgggcgccgtcgaggggtaccgcatcgccggtggcccgctcggggaggtggtcgacccgctgtaccccggcggcagcttcgacccgctcgggctcgccgacgacccggaggcgttcgcggagctcaaggtcaaggagatcaagaacggccgcctcgccatgttctccatgttcggcttcttcgtgcaggccatcgtcaccggcaagggtcccgttgagaacctcgccgaccacctcgctgaccctgtcaacaacaacgcctgggcctacgctaccaacttcgtccccggcaaatg

SEQ ID NO: 75723 - DNA, 352 bp, Zea mays
cacacgcgtccgcccacgcgtccgggcaggagtggctgctgtcggagctgcgaggcaagcgcccgctgctgcccccggaccttccccagaccgacgagatcgccgacgtcatcggcgcgttccacgtcctcgcggagctcccgcccgacagcttcggcccctacatcatctccatggcgacggccccctcggacgtgctcgccgtggagctcctgcagcgcgagtgcggcgtgcgccagccgctgcccgtggtgccgctgttcgagaggctggccgacctgcagtcggcgcccgcgtccgtggagcgcctcttctccgtggactgggacatggaccgggttaaggggaaggc

SEQ ID NO: 75724 - DNA, 274 bp, Zea mays
accacgcgtccgcttacgtaagtgctttaccagcatatgtagtgtagtaaaaaacatggcattgaatcccttcatgcttactataactagttatttcggttttctactgggtgctttaactataaccctagctctatttattagcttgaacaacatacgtcttatttgaaatgaattgaatatcagaatctttcttttggattcttggtattctagactcttttccacactacttaccaatttttttcttggtcattgagattcgtgggtagtt

SEQ ID NO: 75725 - DNA, 367 bp, Zea mays
cagacgcgtgggcagcgccagcccgcgccgtggtcagaaggaggtccttcaccgtgcgcgcctctctccgcaaggccaccggcaccgccgccgtggcaatggctgccagcgccctgcttgccggcggtgccatggcccaggaggtgctgctgggcgcaggcgacggcgggctcgtcttcgagcccagccagttcaccgtcaaggccggcgacaccatcacattcaagaacaacgccggcttcccgcacaacgtcgtcttcgacgaagacgacgtgccgagcggcgtcgacgccaccaagatctcgcaggaggagtacctcaacgcgccaggcgagacctactccgtcaccctcaccgtgccgggaac

SEQ ID NO: 75726 - DNA, 382 bp, Zea mays
agactcccagctagcccctcacgcgctcgtcggcgccctgtcgagtcgagcccgcatctcgcccgatcgagagcgagcgcatccgcgcgccggggagagctttgctttcggtggtctgtaacgactcaacgacgacggcaggcggtagataaaggcgcgcgatgtgcgacgcggcgccgaggtacaggggcgtgcggaagcggccgtggggccggttcgcggcggagatccgggacccggcgaagcgcgcgcgcgtctggctcggcaccttcgactcggccgaggccgcggcgcgcgcctacgacgtggccgcgcgggccctgcgcggcccgctcgccaggaccaacttccccgcgctcgccaccacctcccgccgccccgc

SEQ ID NO: 75727 - DNA, 371 bp, Zea mays
ccacgcgtccgcagaaccctaaccaagaatccgacccggcgctagacgattcggacggaaggaagacgagaaggccccgaggcgagcgggggatcaaagaagaagatgaaggtccgtgcggcggtgaagcgcctgtgccggttctgcaaggtggtgaagcgccggggaatcgtcttcgtccaatgcacggccaatgccaagcacaagcagcgccagggcttctccaccatcgccgaagcagccgccgtctcgtgcgttcacctgcctccgccgccgcccgctagcggttccgcctccgccgcagcgttcgcagagacttcgaaagtggcgaggcaagacatgtccatgaacttcaactggcggctgggttt

SEQ ID NO: 75728 - DNA, 362 bp, Zea mays
accacgcatccgctctctctacaattatcactacctgctgctccctcatgcaccgtgctcaaatctgaccaaagtgggttctgctgactgttttttgtttttttggggtctctcgatcttctctggatgcaggcaagattaagatcggaatcaacggcttcggaaggatcggcaggctcgtggccagggtcgccctccagagcgaggatgtcgagctcgtcgccgtcaacgaccccttcatcaccacggactacatgacctacatgttcaagtacgacaccgtccacggccactggaagcacagcgacatcacactcaaggactccaagacccttctcttcggtgacaagccggtcaccgtc

SEQ ID NO: 75729 - DNA, 381 bp, Zea mays
ggcacccacgcatactcttctcccccccagtccggaccccggaggagccaagccatggcgtccacctcctgctgcctcctccaccagtcaaccgcccgcctcggcgcgtcgccgcgcctggccgccgccccgccgcgcagcgcccagctgctcgtctgcaaggcccggaagcaggaagccgccgcggaccagagcgacgtctcgcgccgcgccgcgctcgcgctcctcgccggcgtcacggccgccgccggcgccaaggtgggtcccgccgccgcggcatacggagaagcagccaacgtgttcggcaagcccaaggcgagcacggagtacatcgcgtacagcggcgacggcttcaagctgctgattccggtcaagtgggac

SEQ ID NO: 75730 - DNA, 395 bp, Zea mays
attgggcatggaagattatggtatcgttcaccagctagttactagtgtctcaaatgtttcatcagagtaccatcgtcagctgcttgaaaataccatgctatgtggtggcacctcatcaatgactggctttgaggacaggttccagagagaagcaaatctgtctgcttcagcaatctgtccatcacttgtgaagcctcctgaatacatgcccgagaacctagcaaggtattcggcctggttgggtggtgcgatattggctaaggtcgttttccctcaaaaccagcatgtgaccaagggcgagtatgatgagacggggccgtccattgtgcacaagaagtgcttttagagacaaatgccttgaactagcacggttggtgcaccatttgctgctgttc

SEQ ID NO: 75731 - DNA, 396 bp, Zea mays
accacgcgtccgggaggtgatccactgccgctgggccatgctcggcgcgctcgggtgcgtgttcccggagctgctcgcccgcaacggcgtcaagttcggcgaggcggtgtggttcaaggcgggctcccagatcttcagcgagggcgggctggactacctcggcaacccgagcctggtccacgcgcagagcatcctggccatctgggcgtgccaggtggtgctcatgggcgccgtcgaggggtaccgcgtcgccggcggcccgctcggagaggtggtcgacccgctgtaccctggcggcagcttcgacccgctcgggctcgccgacgacccggaggcgttcgccgagctcaaggtgaaggagattaagaacgggcgcctcgctatgttctccatgtt

SEQ ID NO: 75732 - DNA, 385 bp, Zea mays
tcgacgcgcccgtccgcacacgcgaccgatcacacagagctagccacgcatgctccttgaccaaaagctagataggcaaccatgtcggaggagaagcaccaccacctattccaccaccacaagaaggacgaggagcagcccaccggccggcgagtactcagagaccgtggccaccgaggcggtgaccaccggcgacggtgagaacgactacgaggggtacaagaaggagcacaggcacaaccagcacctcggcgaggccggcgctatcggcgctggcgccttccggctgtacgacaagcacgaggggaagaaggaccccgagcacgcgcacaggcacaagatcgaggaggagctccccgccacagcggccgtgggcgccggcggg

SEQ ID NO: 75733 - DNA, 294 bp, Zea mays
aggacgcgtgggctgagcggtggggcccgcgcggccaagttatcctgttcgctaccgtgatgtttaccctagtccagagggtttatcttcgttcgtctcgtttgttgttgcccatctgtgtttttgattgcaaggtcgctctgtgtcagttgttagtgctgtgttcatcctcggctccagcagacccatgcatcaaccagcatggactgtggatcgatggatgctgttactcctgtcaggatttgttctaagttaatcctaaggaaaaaatggtgcttcttggtgctgcaaaaa

SEQ ID NO: 75734 - DNA, 365 bp, Zea mays
gtcattaagaacaagaacttatcagttaagcaacatgatgatgagatagaggttgaaattgatagcatggatgctgagacactttgggagcttgacaggtttgtgtcgaactacaagaagaacctgagcaagcaaaagagaaaggccgagcgagcgatgccttgccgaacaagatgcaaatttgcgtgcacagaacccaatacaacaaccacaaccaaccccattcccccaagaaccttttggtgaaaaatctccaaaacaagttgtgaaagattcgctggaaggcgagcaactgccagcatctgcaccagaacaaaatggtgagaatagacagaatgcgagtagttcaagcaattcaagcagct

SEQ ID NO: 75735 - DNA, 381 bp, Zea mays
agcaagctcgatctactactactactagctggtacacatactagccagcctgccagccagcttgccatggcgcccaccgtgatgatggcctcgtcggcaaccgccgtcgccccgttccagggtctcaagtccgccgccagcctccccgtcgcccgccgcagcaccaggagcctcggcaacgtcagcaacggcggaaggatccggtgcatgcaggtgtggccggcctacggcaacaagaagttcgagacgctgtcgtacctgccgccgctgtcgacggacgacctgctgaagcaggtggactacctgctgcgcaacggctggataccctgcctcgagttcagcaagctcgggttcgtgtaccgcgagaactccaactccccg

SEQ ID NO: 75736 - DNA, 253 bp, Zea mays
tccgggtccaccacacgtccgagcacgcatacacagcacagagtgaggtaagcatccgaaaaaagctgtgatctgatcgacatggccgccgccaccatggctctcacctcccgcgcgctcgtcggcaagccggcgaccagcaccagggacgtcttcggcgacgggcgcatcatgatgcgcaagactgctggcaagcccaagccagcggcgtccggcagcccctgctcccgggccgagggcgtcccgtacctgg

SEQ ID NO: 75737 - DNA, 338 bp, Zea mays
gcctggggctcgctcggccctgctcaagtccaacgaccccgtgggcttcaacctcgtcgacgtcctcgcctggggctcgctcggccacatcgtcgcctactacatcctcgccacctccagcaacggatacgaccccaacttcttctgagcggtcgtcgaggatgtattctacagacagccgtgtgcgtgcgtgtgtgcttgtcatgtatccgatcaaagtttggttaatttggacaagtagtgcaactgcagaataattggtatttgtatagtgcaccatgccaacatgaatttgatctgtctctgtcttcactattcagttaaaaaacaggaaggac

SEQ ID NO: 75738 - DNA, 398 bp, Zea mays
cactcctcgccatcacataaaaccagtgcaagcagaagcagcgcaatggcgagcagcaccatggccctctcctccacagccttcgccggcaaggcagtgaacgtgccgtcgtctctcttcggcgaggcccgcgtgacgatgcgcaagacggcggcgaaggcaaagccggcggcgagctccggcagcccgtggtacggccccgaccgcgtgctctacctgggcccgctgtccggcgcgcccccgagctacctgacgggcgagttcccgggcgactacggctgggataccgcggggctgtcggcggacccggagacgttcgccaagaaccgggagctggaggtcatccactcgcgctgggccatgctgggcgcgttgggctgcgtgttcccggagctggt

SEQ ID NO: 75739 - DNA, 378 bp, Zea mays
accacgcatccgagcagacccgcgccgggcagcgcacgcgcttcaaggccttcgtcgtcgtcggcgacggggacggccacgtcgggctcggcgtcaagtgcgccaaggaggtcgccaccgccatccgtggcgccatcatcctggccaagctctcggtcgtgcccgtcaggaggggctactggggaaacaagatcggccagccgcacactgtgccctgcaaggtcaccggcaagtgcgggtccgtcaccgtgcgcatggtgccggcgcccagggggtccgggattgtcgctgcccgcgtgcccaagaaggtcctccagttcgccggcattgaggatgtctttacctcgtcccgtggctccaccaagacactcggtaact

SEQ ID NO: 75740 - DNA, 392 bp, Zea mays
acagatagctacaaacaccttggagcgagtggctcctctgacacatgctgtcggcaatgtgttgaaacgtgtttttgtcatcggtttctcaatcattgtttttggcaacaaaattagcacacaaactggaattggcacgtccattgccatagctggtgttgctatgtactcttacattaaggctaagattgaagaggagaaaaggaaaaagagcgcatgactgctgtgaataatattatcgggaccttcctcggacacaacatcgtcgacaatcacgacctacttctataccttgttttgttttcatcttgagtcagtcgatccattgtttgttcccagtctggtgattaaaagtctgcaaattctgtttgtggaattggcaacgatacaaa

SEQ ID NO: 75741 - DNA, 354 bp, Zea mays
accacgcatccgcatcgagcgacagcagcacatacgcagctagctacgcgcagcaccactgcagcggcgatggcggcctccatgatctcctcgtcagctctggcagtggagcgtcagggcctgccgcctctcggtcgccgcgcctcctccttctccgtcgtctgctccaagaacaacattacgacggacaacccctacgggattgtgggtggcctgaccgtccacgtcgacgccaacgggagaacgggcatcggcaacgtcgtgtatcagttcggcgagcaagtaagcgcgatcgtcgacggatagacgtcaatctacagcgaggatgactggtctcccacctgcgacgtctac

SEQ ID NO: 75742 - DNA, 298 bp, Zea mays
cacgcctccggaagcacggacgcgaatgaggaggagcagcagcagcaggcggcgccgaggagcggcatcccactcagtgcttgcaaccatgggtaggggattgaagaagcacttgaagaggctcaatgcgcccaagcattggatgctccacaagcttggcggagcttttgctcccaagccatcttctggaccccacaagtccacggagtgccttcctctgatcctcatcatcaagaacagggtcaactttgcgctgaagtaccgtgaagtcctttctatcctgatgccacgccatgta

SEQ ID NO: 75743 - DNA, 388 bp, Zea mays
accacgcatccgatcggcaggctcgtggccagggtcgccctgcagagcgaggatgtcgagctcgtcgccgtcaacgaccccttcatcaccacggattacatgacctacatgttcaagtacgacaccgtgcacggccaatggaagcacagcgacatcaccctcaaggactccaagacgcttctcttcggcgagaagccggtcaccgtctttggcatcaggaaccccgaggagatcccgtggggtgaggctggtgctgagtatgtcgtggagtccaccggtgtcttcactgacaaggacaaggctgctgcacatctgaagggtggtgccaaaaaggttgttatctctgccccaagcaaagatggcaccatgtttgttgttggtgtcaatg

SEQ ID NO: 75744 - DNA, 370 bp, Zea mays
accacgcgtccggtaccacaccactccgcgctagctgaggacggtacagcggcacagaggtgcgacgtacgacgacgacgacgcaggcgccacacatggcatcccagctctccgccgccgtgccccggttccacggcctccggggctacgccgcgcccaggtccgcggtggcagcgctgccgtccgtgagggtgggcaggaagaggtcgtcgtcgcagggcatccgctgcgactacatcggctccgccaccaacctgatcatggtgacgacgacgacgctgatgctgttcgcggggcggttcgggctggcgccgtcggggaaccgcaaggcgacgggggggctgaagctggaggcgcgcgagtccgggct

SEQ ID NO: 75745 - DNA, 288 bp, Zea mays
agattttgagacacaagggatgattttggatgatgagataaatacagcattagttcgaccacttcctcatggagttaaacttcatgcactcattgatgcttgtcatagtgggactgcacttgatttgccttatctctgcagaatgaacaggagtgggcaatatgtatgggaagatcaccgaccgcgatctggtgtctggaaaggcactagtggtggggaagctagttcccttagtgggtgtcatgatgatcacagctctgcagatactcctgcattagcatcgatcag

SEQ ID NO: 75746 - DNA, 208 bp, Zea mays
ccgggtccaccacgcgtccgcgaccttcacgtctcgctacgtagcagtgcaataaccaaagcagccgcaatggcgagcagcactatgggcctcgcctccacggccttcgccggcaaggccgtgaacgtgccgtcgtcgtccgccttcggcgaggcgcgcgtgacgatgcgcaggacggcggggaagggccatcccgcggcggcgtccg

SEQ ID NO: 75747 - DNA, 355 bp, Zea mays
accgtccgcacacgcgtccgcggacgcgtgggggagcgggcagcagcacacagccccatcgcaatcctagtcgatcttcttcccctcctcaaggaagaaaagaagctgaaccatggggaagagaaagtcagctgctaagccacctcctaagaagcggatggacaagcttgacactgtcttttcctgcccattctgcaaccacgggagtagtgttgagtgccgaattgacatgaagaatcctgattggcgaagcatcctgtagaatctgtcaggaaaacttcagcacaactgttaatgcactcactgagcctattgatatatatagtgaatggattgatgactgtgagcgtgtcaa

SEQ ID NO: 75748 - DNA, 420 bp, Zea mays
  unsure (1)..(420): unsure at all n locations
aataagacgacttgtttcattgattcttgaagagatcgagcttcttttgcaccacaaggtcgaggatgtcttgcaactgcggatcaagctgcggctgcggctcaagctgcaagtgcggcaagaagtaccctgacctggaggagacgagcacccccgtgcaggccaccgtcgtcctcggcgtggccccggagaagaaggccgcgcccgagttcgtcgaggccgcggcggagtccggcgaggccgcccacggctgcagctgcggtggcaactgcaagtgcgacccctgcaactgctgatcacatcgatcgacgaccatggatatgattattatctatctagcttgtggtggtggttgaacaataataagcgaggccgagctggctgccatacatangtattgtgtggtgtgtgtgagagaga

SEQ ID NO: 75749 - DNA, 416 bp, Zea mays
ctttccgagacaggcacgcacgacacgcgctcgcacgcagagcaactgcttcgatctctccgtgtccgtcctctactctctagctaaccgcggtcggcccggggaggtggcgatgggcagcgaggacatgctcgtcgagatccacccccgcgagctccgctttctcgttgaggtgaagaagcagagttcatgttgtatccatcttgttaataagtcagatcaatatatcgcattcaaggttaaaacaacttctccaaaaaaatattgtgttcgaccaaatataggagttattcttccattggcatcacgtgattttacagttactatgcaagcgctaaagaatgttccacctgatttgcaaacaaaagacaagtttcttgtgcagaccacagttgttccatttggtacagctgacg

SEQ ID NO: 75750 - DNA, 403 bp, Zea mays
  unsure (1)..(403): unsure at all n locations
gtaacctggcggcagcttcgacccgctcgggctcgccgacgacccggaggcgttcgccgagctcaaggtgaaggagatcaagaacggccgcctcgccatgttctccatgttcggcttcttcgtgcaggctatcgtcaccggcaagggccccctcgagaacctcgccgaccacatcgccgaccccgtcaacaacaacgcctgggcttacgccaccaacttcgtccccggcaagtgagcgagggcatgatgcttgcatgcgtgtaccgtagacgtaccgtattcctacgtactgcaggttgcaccagtatttgtgaagggagctgtgcgtgggagccagagattgtaccgctagtgtatttttgtatgcacgctgtggagctgatcaatgaaatatgctgtanat

SEQ ID NO: 75751 - DNA, 380 bp, Zea mays
  unsure (1)..(380): unsure at all n locations
cccaagcgtccggccatggcctcctcgcgcacaccggctcctcttcctcgcggtgccgcgccgtcgccgccgaggtcgagggcctcaacatcgccaaccacgtcagccagctcatcggcaagacaccaatggtatatctcaacaatgtcgtcaagggctctgtcgccaatgttgctgctaagcttgagattatggagccctgttgtaacgtcaaggacaggatanggtacagtatgataaatgatgctgaacagaagggcttgattactcctggaaagagtgttttagtggaagctacaagtggaaatacacgcattggtcctgcctttaatgctgccttccaaggatataagttgatattaacaatgccttcatcaatg

SEQ ID NO: 75752 - DNA, 334 bp, Zea mays
gtcgaccacgcgtccgccagactctgcagcgcttcacggccgccacgctggagcacggcatgcacccgccggtctctcccaagcccgagtggcgcaagctcatggacgagatggcggtcgtggccacggaggagtaccgctccgtcgtcgtcaaggagccgcgcttcgtcgagtacttcagatcggctacaccggagaccgagtacgggaggatgaacatcggcagccggccagccaagaggaggcccggcggcggcatcacgaccctgcgcgccatcccctggatcttctcgtggactcagaccaggttccaccttcccgtgtggctgggagt

SEQ ID NO: 75753 - DNA, 418 bp, Zea mays
cggacgcgtgggcggacgcgtggggctctggagcccttcttcagcgcagcggctactcagtttatccttggacagcaagttcccttctctctgtggctttctcttgcccctgtggtcattggtgtttcaatggcatcccttactgagctttcattcaactggactggcttcatcaatgccatgatatcaaacatctcattcacttacaggagcatttattccaagaaagctatgactgacatggatagcaccaacgtgtatgcttacatctcaataatcgctctaattgtttgcattccacctgcattgatctttgaagggcccaagctaatgcagcatggatttagtgatgccattgcaaaagtaggtttgacaaagtttgtcagtgacctattcttggttggactgttcttacatc

SEQ ID NO: 75754 - DNA, 417 bp, Zea mays
cccaagcgtccgcggacgcgtggcaagaaacacaactgcaaaagcgaggatcggagcactccgatccttaattccttcttggattctcttctactctagagctctgctagaccgatctccagttaagtttcagacacatggagagcaacgcctcgtccaactgcgccaccgtgccgcagccgccgccgtcgacagggaagctgatcacgattctgagcatcgatggtggcggcatccgcggcctcatcccagccaccatcatcgcgcacctcgaggccaagctgcaggagctggacggcccagatgctcggattgccgactacttcgacgtgatcgccgggacgagcaccggcgcccttctcacgtcgatgctggcggccccggaccagaacaacggccgctgttcttcgcaaagga

SEQ ID NO: 75755 - DNA, 268 bp, Zea mays
cccaagcgtacgcccacgcgtccgctcttccatacgaccataccctacctccaaattcccaattgtcaacctctcctcagagttcgagtgaccatgtcggggcgcggaaagggcgggaaggggctgggaaagggcggcgcgaagcgtcaccgcaaggtcctccgcgacaacatccagggcattacgaagccggcgatccggaggctggcgagaaggggcggcgtgaagcgcatcccggggctcatctacgaggatacccgcggcgtgc

SEQ ID NO: 75756 - DNA, 448 bp, Zea mays
aacagcgccactgtccagtgcgcgcgtcaagcttgcttagctagccgccatggcctccctcgccgccgtctccgtgaagcccgtggccatcaagggtctcgccggcagctccatctccggaaggaagctcgccgtcgccaggccgtcggcccgctccatccgcaggccccgcgcagccgccgtggtggccaagtacggcgacaagagcgtctactttgacctcgacgacatcggcaacaccaccggacagtgggacctctacggctctgacgcgccctcgtcctacaacccgctacagagcaagttcttcgagacgtgcgcggctccgttcaccaagagaggtctgctgctcaagttcctgctgctgggcggcggctcacttctggcctacgtcagcgcgtcggcgttcacggacctcctgccgatcaagaaaggacctcaggagccg

SEQ ID NO: 75757 - DNA, 265 bp, Zea mays
agaagcagagcctcaaggagctcaccggcaagctcttcagcaccatcgacgatcttgaccatgccgcaaagatcaagagcaccccggaggccgagaaatacttcgcagcaaccaaagatgcgctcggcgacgtcctcgccaagctagcctagatggaagctaatagatgggttaacgatggccacgtaatttcggacttgtgtttgttcatatggagccggcaaatgtaccgtttcctgttcatattatatcacgagttcttgac

SEQ ID NO: 75758 - DNA, 374 bp, Zea mays
gggccacgttggtgtcggcgtgggaaaggccaaggaggtcacggaggccatcaccaaggccgccatgaacggccggcgcaaccttgtcacagtgccgctaactaagtactccacattcccgcacagagctgatgcggactatggagcagccaaggtgatgctgaggcctgcttgccctggatctggtgtcattgctggtggagccgtgagggttgtgctggagatggctggtgttgaaaatgctctgggcaagcagctgcgcagcaagaaccccctgaacaacgctcgagccactatcaacgcgacgcagatgatgaagcagttcaaggatgtcgctgaggagcgttgtattccaatggaggagctgtggaaat

SEQ ID NO: 75759 - DNA, 350 bp, Zea mays
tgggccgtccgcatgagatcaacacgctgtcttgtcagaccctacgatatgtctcaactgcaggagaaattaatatcttcaagtgtaacttgtgttcattctgtttcagtcgtcgcaacatccgtatatgaacctcttgcactatcagctggctcgatcgtcttctcagttaaataggttctgagattaggttaacgatggccacgtaatttcggacttgtgtttgttcaggtggcagcgccaaatgttccagtttcatgttcatattatatcaagagttcttgacattcagaatgtcaccgtaaattcaggtcacgtggcaggtcgttttgggaggtcgttctagggga

SEQ ID NO: 75760 - DNA, 451 bp, Zea mays
cgatgtcatggacgggcgctttgtgccaaacatcacaattggacccttggttgttgatgctctgcgtccagtgactgatcttccgttggatgtacatctgatgattgtggaacctgagcagcgagtccccgattttatcaaggcaggtgctgatattgttagtgtccactgtgaacagacatcgaccatccatttgcaccgaacagtcaatcagattaaaagtctaggagcaaaggcaggagttgttttgaatccagcgactccactcactgcaattgattatgttcttgatgttgttgacctggtgctgattatgtctgtgaatcctgggtttggtggccagagctttatcgagagtcaagtaaagaagattgcagaactgagaaggttatgtgcagagaagggagtgaacccctggattgaggttgatggtggtgttggtcccaaaaat

SEQ ID NO: 75761 - DNA, 341 bp, Zea mays
gtcactcttccaccttccaccacaagcgccgccgcagccggtgcctgctccttcccgatccccgaggcaaagctgcgactccgcaaccgccgccatggcgttcgagaagatcaaggtctccaacccaatcgtcgagatggacggtgatgagatgaccagggtattctggcagtctatcaaggacaagcttatcctcccatttctggacctggacatcaagtactatgatttggggatactgcaccgtgaagcaactgaagacaaggtcacagtggacgctgcagagggcactctcaagtacaacgtggccattaagtgtgcgaccattaacccagatgaaa

SEQ ID NO: 75762 - DNA, 452 bp, Zea mays
ccgccgcccaccggtggactccccgggactctcaactctgaccaggcgagggacttcgacctccccttgaaggagcggttctacctgcagccgctgccgccggcggaggcggcggcgagggtaaagacgtcggcgcaggacatcatcaacctcaagccgctcatcgacaagaaggcgtggccgtacgtccagaacgacctccgcctccgggcctcctacctgcgctacgacctcaagaccgtcatcgcttccaagcccaaggaggagaagaagagcctcaaggagctcaccggcaagctcttcagcaccatcgacgatcttgaccatgccgcgaagatcaagagcacccctgaggccgagaaatacttcgcagcaaccaaagatgctcttggcgatgttctcgccaagctaggctagacgcaatggctaataatggccatgtaatttcggac

SEQ ID NO: 75763 - DNA, 176 bp, Zea mays
acggacggattccgggtcgaccacgcgtcaggttcaagatcgcgagcggccgcccttttttttttttttttttacaagaaaaacacattactggatatcaacaattaaccagcatgaaacataaaccatcactattgcacaaacatggttcatcttagtgtacaacgccaattcga

SEQ ID NO: 75764 - DNA, 338 bp, Zea mays
gttactgagaaagtgttcgccaatgtgggcaagactatcgggtacaaagttggaacaatgattgagatccccagggcagctctggtggctgatgagatagcggagcaggctgaattcttcgccttcggaacgaacgacctgacgcagatgacctttgggtacagcagggatgatgtggggaagttcattcccgtctatcttgctcagggcatcctccaacatgaccccttcgaggtcctggaccagaggggagtgggcgagctggtgaagtttgctacagagaggggccgcacagctaggcctaacctgaacgtgggcatttgtggagaacacggtgg

SEQ ID NO: 75765 - DNA, 208 bp, Zea mays
aaatcacaaggatcaaagaaagctacaaggatattcgttgctcgaattccgcaatcggtggatgagtcgatgtttcgtagacattttgaagcttttggggaaattcttgatctttacatgggaaaggaacatggttcaaaagggcatcgtggaattgggtttatcacgttgcagagtgcagagtctgtggacgacgtcaggcaagagt

SEQ ID NO: 75766 - DNA, 315 bp, Zea mays
cccaagcgtccgagagggaagagcaccaaggaccttcggcgcccgttcaggatccacatcttcccgagcgagttcttggttgacctcttcctcttcggaccacctccaaggcttttggtgtagcttgccactctcaccaatcaagttttcatgtctgatctcgacattcagatcccaactgccttcgattccttcgctgaggccaatgctggggactctggtgcggcagcagggtcaaaggactacgtacacgtgcgcatccagcagcgtaatggtcgcaagagcctgactaccgttccagggattgaagaagga

SEQ ID NO: 75767 - DNA, 447 bp, Zea mays
caacgccgacggcatcatcgaggagtccttctggccgggcaagtacgccgtcgagcttagctccgtggcgtacggcgcgacgtggcagttcgacacggaggcgctgcccaacgacctcgtcaagcgcgggctggccgtgcgcggggaggacggggagctggagctcaccatcaaggactacccctacgcccacgacgggctcctggtctgggactccatcaagcagtgggcgtccgagtacgtcaacgtctactacaagtccgacgaggccgtggccgccgaccccgagctgagggcgttctgggacgaagtgcgcaacgtggggcacggcgacaagaaggacgagccgtggtggcccgtgctggacacccgcgacagcctggtggagacgctgaccaccatcatgtgggtccaccccggccaccactcggccgtcaactttcggca

SEQ ID NO: 75768 - DNA, 208 bp, Zea mays
ctcaagcgtacgcccacgcgtccgggcattttccgtgctatggatggactcccggtgaccatccgactcctggaccctcgcctccacgagttccttccagaaggggaaatcgaggagattgtcggtgaagtgcctgctgagaccggagccacgccagtggaggccctcgcgcgaagtgaagaccgttcagaagttcacgctatgcgtg

SEQ ID NO: 75769 - DNA, 447 bp, Zea mays
cggacgcgtgggctcagctttaatgttggtcgaagtgagaaatgtcaggcagcaagagaagaaaagatgcacatattgccatgggactgggtacttgccatgtgctcgctgttctgctagtgggatgttattgaacacaaagcagttttcattattggggcataatatgtggtcaatgaaaggaaggtgtcagaattgttctggagctggaaaggtgatgtgtccgacgtgcttgtgcacaggaatggcgatggcaagtgagcatgatccacggattgacccttttgattagtttgatatgacaatacgctttttgtctgtttcgtggaaaatatgttgccgataacagcaataaactcatgtttgtatgtacgttatgtttgttactacgtgatcacttgagaggagttgagtgcaacccttgtccaaaagaggacactacaaatg

SEQ ID NO: 75770 - DNA, 265 bp, Zea mays
ttcagatctcataatgaggatcttgaaggactataaccagtatgtcatgaggaatttagcacggggctactcgaggaaagatcttggtgtgagctatgtcacggagaaccaattgcaagttcatatgaagatcactagactgcgggagactgtgacggcacatcaggaaaagttgcaaacagtggcaaacactgctggtttgaatcatgaagaatggcttgctaatgcggatcactgggtcgctggtctcctagagacgtttgag

SEQ ID NO: 75771 - DNA, 421 bp, Zea mays
ggaaagttagggcgatctaccaattcgacatggccgtgtacaccaagatcttcctcaagttccccaggaagttctggcctgaagggaaaggaagggagttcttcctctacgccagcagcaggagaggttactacggagtgtggcaggagttcgagaagcagtaccctgacgccaatgtcctcctggtcaccgtgaccgacgaggagtcgaggcgcatcgagcagcagtcggacgagcagaccaaggcggagatcatgcaggtgctgcggaagatgttccccggcaaggacgtcccggacgccaccgacatccttgtcccgagatggtggtccgacaggttctacaagggcaccttctccaactggccagttggcgtcgaacgctacgaatacgatcagcttagggcaccggttgggacggt

SEQ ID NO: 75772 - DNA, 334 bp, Zea mays
ccaagtcccacgaggtgctcatcaccgtggaggaaggctccatcggcgggttcggctcgcacgtcgcccagttcatggccctggacggccttctcgacggcaaactcaagtggcgaccgctggtgcttcctgacaggtacatcgaccatggatcgccggccgatcagctggccgaggctgggctgacgccgtcacacatcgccgcgtcggtgttcaacatcctggggcagaacagggaggctcttgccatcatggcagtgccaaacgcgtagaacttgtgctgatctgggcctatagagatgattgtacattttgtcgttaactagagtgtctg

SEQ ID NO: 75773 - DNA, 413 bp, Zea mays
  unsure (1)..(413): unsure at all n locations
gttgatggcttgtgaaagcaggttcttggcctaagactgactcagatgacccttcaaagaggatggaataacaaatctaagcttctaattgttgaggatttgtctgcacggcaagtgtatgagaagctcctagaagctgtacaaccttaggcacccgagcgatggagcaatgtggtatgcagtatgcgtctggatattctctttcgagggcatangagaaggtttccatctatattgtgcaacaagtggagcagaacgtgtcgagacgaggtcgaaacatggctcaaatgtataactagaccatagcagtatccggttcattgtttctgtcgtgactcagatattgtatcctgtggtctcaagggaggtggttttgtgatttccacattctgatccagactgtttttgtggcc

SEQ ID NO: 75774 - DNA, 428 bp, Zea mays
cccaagcgtacgaagcaagcagcgagtacatacatactaggcagccaggcagccatggcgcccaccgtgatgatggcctcgtcggccaccgccgtcgctccgttccaggggctcaagtccaccggcagcctccccatcgcccgccgctcctccagaagcctcggcaacgtcagcaacggcggaaggatccggtgcatgcaggtgtggccggcctacggcaacaagaagttcgagacgctgtcgtacctgccgccgctgtcgacggacgacctgctgaagcaggtggactacctgctgcgcaacggctggataccctgcctcgagttcagcaaggtcggcttcgtgtaccgcgagaactccacctccccgtgctactacgacggccgctactggaccatgtggaagctgccatgttcggctgcaacgac

SEQ ID NO: 75775 - DNA, 446 bp, Zea mays
cccacacgtccgcccacgcgtccgcccacgcgtccgcccacgcgtccgtgctacgagctgcgctgcgacaacaacgggcagtcgtgcctgccgggcaccatcaccgtcacggccaccaacttctgcccgcccaactacggcctccccagcgacgacggcggctggtgcaacccgccgcgcccgcacttcgacatggcccagccggccttcctccagatcgcgcagtaccgcgccggcatcgtgcccgtcgcctacaggagggtgccgtgcgtgaagaagggcgggatcaggttcaccatcaacggccactcctacttcaacctggtgctggtgaccaacgtggccggcgccggggacgtgcagtccgtgtccatcaagggctccagcaccgggtggcagcccatgtcccgcaactggggccagaactggcagagcaactcgctcct

SEQ ID NO: 75776 - DNA, 174 bp, Zea mays
tcggtatctaggtcgaccggcgtccgggggtcgaagagctatcaagaaggctcgtggcctagatcagtggccttcattgcactttggagggtgcgctggtttaccatctcccacggggagagtggacgtcataatttgtggtagagggggtacgcgttcgcgcggcccctgttg

SEQ ID NO: 75777 - DNA, 432 bp, Zea mays
aacgctccgcaacacgcccgtgcacggccaggcgggcgcgctcggcgccgccggcctcgtcgccatcctcagcgtctgcctcaccatgtacggcgtcgcctccttcaacgagggcgactcgtccacggcgcccacgctcatgctcaccggcaggaggaatgaggccgacaagctgcagaccgccgacggctgggccaagttcaccggacggttcatcttcagtggtatctccggcgtgctctgggcatacttcctcctctacgtgctcgacctccccgacgacatcaagtacaatacaaattcataacgatgcatatatataatatagctccgcctccgatcctcctctctgcatgcaaaggtatgccatttcaggagtgacgaccagcgtggatacatgcaattcctctgcacatggatggattgggatgt

SEQ ID NO: 75778 - DNA, 402 bp, Zea mays
gattcttgaagagatcgagcttcttttgcaccacaaggtcgaggatgtcttgcaactgcggatcaagctgcggctgcggctcaagctgcaagtgcggcaagaagtaccctgacctggaggagacgagcaccgccgcgcaggccaccgtcgtcctcggcgtggccccggagaagaaggccgcgcccgagttcgtcgaggccgcggcggagtccggcgaggccgcccacggctgcagctgcggtggcaactgcaagtgcgacccctgcaactgctgatcacatcgatcgacgaccatggatatgattattatctatctagcttgtggtggtggttgaacagatgtaagcgaggccgagctggctgccatacatacgtagtgtgtggtgtgtgtgagagagagag

SEQ ID NO: 75779 - DNA, 292 bp, Zea mays
cgcaataatcagcttccggatggtggcgttttgtcagttttggatggaaatgccgaactggcagcgtctgttttccctatgcatatgtaatttcctgcctctttatattcactcttgttgtcaagtccaagtggaaaatcttggcatattatacatattgtaataataagcatcgtacaatctgcatgctgttttgtaataattaattaatatcccagcccattggatggacttgtttaataaaaaaaaaaaagataaaatgcataaaaaaagagaagaataaagttaaaaa

SEQ ID NO: 75780 - DNA, 225 bp, Zea mays
gtcggactcagggtcgaccacgcgtccgtagacataatgcatatctaaatgcataccaaaagttatctgtctagatatagtgttttttctatgtatccagacataatgcatatctaaatgcataccaaaagttatctgtctagatacatagaaaaaacaatatatctagaaaagccaaagcattttataatttgtaatagagggagtatatgattgcttcagaag

SEQ ID NO: 75781 - DNA, 192 bp, Zea mays
cggacgcgtggggccgcgtgaagagcaagcgtgggaggtgggatgcagtgaaagacgggctcgcgaacctcaacatcagccagtgcaccgccctgacgcccccggcggtgcaggccgtctgcgactccggtccggcgctgcacagctgccccgagaggcactccctcaacatccgtggctgcctcagcctca

SEQ ID NO: 75782 - DNA, 438 bp, Zea mays
cccacgcgtccgcagaatatgcaaggtattgtgggatcgaggcactagaaccattgggaatatatcttcctggtgacataaactacccaggaggacccctttttgatcccttgggcctgtccaaggatcccgtggcatttgaagatctcaaggtgaaagaaatcaagaacggtcgccttgcgatggtagcatggtttggattttacatccaggcggctgtcacaggcaagggccctgtacagaacctggttgaacacttgtccgacccactaaataacaatatattgtcctccttccactaaatgaaaatatgcaagagtggcacgaaccatagcaacgggtgtatattgtattagcgtttacagttttacactaatgggttctgaaaattggctattatatttatttagatagacatttaacggtgattagtgatct

SEQ ID NO: 75783 - DNA, 437 bp, Zea mays
tcaggtgggtaacaaaaccgatctgaagcatgcgcgtgaggtgagcaccgcggaaggacaagcactggccgaggctcagggcctcttcttcatggaaacctcagctttggattcgtcgaatgttgcagcagcttttcaaactgtggttaaggagatctacagcatactaagcaggaaggtgtttcagtcactagagcagaagaaaagcgagctgcagtcgctaagcagcgggaaagccgtggtgctgcagggtggccaaccaaacaagcagtggtgggaggtggtgctgttcctcgtgacctgacacgaggactgcagctatggagggcgatcggattgtgagacatttgggtgtgtaaccctgtaggtccgatttgtgaaaagttgcttttcccccatgttcttgttctaaaggtaagctggcgtggctgcttgta

SEQ ID NO: 75784 - DNA, 275 bp, Zea mays
accggaagaaggaaccgaggaatggaaacttctggaagcctgcataaacccgaaggattggatctgattagccgtcattcttgagatcttttgttagagttttcccttctgtagggctaagaccacgtgcagtttcattatttctttttgcatctgtagaatcgtgaataaatatgatgtagtaatgctgtagctgtttgtatctatctgctgttttttccccatgtgaatgagtgaaccattggcttctgtatttacgaaggattcaggtttct

SEQ ID NO: 75785 - DNA, 376 bp, Zea mays
gatgcagatctttgtgaagactctgacggggaagactatcactttggaggtggagtcctcggacaccatcgacaatgtgaaggccaagatccaggacaaggagggcatccccccggaccagcagcggctcatcttcgccggcaagcagctcgaggacggtcgcacccttgccgactacaacatccagaaggagtccaccctccacctggtgctccgcctccgcggcggcgccaagaagcgtaagaagaagacgtacaccaagcccaagaagatcaagcacaagcacaagaaggtgaagctctccgtgctgcagttctataacgtggacgacaccactagcaaggtgacccgcctccgcaaatgagtgccccaaact

SEQ ID NO: 75786 - DNA, 324 bp, Zea mays
ggcagcagcacaagcaagaaccacacctcctcccttcgcctgtgatcatgtcgtcttgctgcggcggcaagtgcgggtgcggctccagctgctcctgcggcagcggatgcaacggctgcggtatgtaccctgacgtggagaccgccgccaccagcagcgtcaagaccacggtcctcgccgcgccgaccaccaaggccagcgccggcggcttcgaggcgggcaccgagggcggcggctgcgactgcaacacctgcaagtgcggcaccagctgccgctgctcctgctgcagctgcaactgagctgggccgggccggcgatggcgca

SEQ ID NO: 75787 - DNA, 293 bp, Zea mays
atcaagctcaccgtcgacacgccgcgccttggccgcagggaagctgacatcaagaacagatttgtcctgccaccacacctgacgctcaagaacttcgaaggtctggacctcggcaaaatggaccaggctgctgattcagggctggcttcctatgtcgccggccaagtcgaccgcaccctgagctggaaagacgtcaagtggttgcagaccatcaccacgctgccgatcctcgtcaatggagtgctcagcgctgaagacacgaggcttgctgtggcgagcggcgccgcggggat

SEQ ID NO: 75788 - DNA, 196 bp, Zea mays
cccacgcgtccgcccacgcgtccgggccacggaggagtaccgctccgtcgtcgtcaaggagccgcgcttcgttgagtacttcagatcggctacaccggagaccgagtacgggaggatgaacatcggcagccggccagccaagaggacgcccggcagcggcatcacgaccctgcgcgccaccccctgaatcttcccg

SEQ ID NO: 75789 - DNA, 307 bp, Zea mays
cccacgcgtccggtgggagcagcgcgtgccctcgccgcgcggcccgaggcgtggatcgacttccccgtgctcgccctagatgagggttctgtaatttctggtatccaaagagatgatatggaatccattgaaaaacttgtcccagatttagcatctctacggggtaggctctgtccttcttacatggatgaagacatattctggaagatttactttaggttgcttgagtcaaacataagtgagcatagttctgaggaagatgtcctgagcgtgccagattctggtcatcacaccaatgagagagagt

SEQ ID NO: 75790 - DNA, 218 bp, Zea mays
aaagcagctgctgtacctgggtatctgcgtcgtctggtgccctctggtgtacctctatatggatgtcgtcgtctaataaacatctgtggtttgtgtgtcatgaatcgtggttgtggcttcgttggtttaatggacctgttgtgtcctctgtgtgttgtacccaaaactcttctgcagcagtatggctcgaatccttatgaagtttgatgtttgaactt

SEQ ID NO: 75791 - DNA, 421 bp, Zea mays
cgcagcggaccagagcgacgtctcgcgccgcgccgcgctcgcgctcctcgccggcgtcacggccgccgccggcgccaaggtgggtcctgccgccgcggcatacggagaagcagccaacgtgttcggcaagcccaaggcgagcacggagtacatcgcgtacagcggcgacggcttcaagctgctgatcccgtccaagtggaaccccagcaaggagcgggagttccccgggcaggtgctccgctacgaggacaacttcgacgccaacagcaatgtgtccgtcatcatccagcccacgtccaagaagaccatcgccgactacggctctcccgaggagttcctctcccaggtcgactacctgctcggcaggcaggcctacggcggcaagaccgacccgacggcgggttcgagaccggccccgtgg

SEQ ID NO: 75792 - DNA, 255 bp, Zea mays
ggaaaaatatgcagagaactgcatgtacactcccgtctaccgcaactaccggtagtgctgcggggatcaattttgcagtaataaaaatctatcaacgcggatggtactctgttgtttatagtccctgctgctaaccacccttgttgctggtgctgctggagaggcattgtacctgtccatgcatatatgatatatatgttgtaacgttgtgaaagcaaacaatcttgggtaccaatgtttgttattctttcgctc

SEQ ID NO: 75793 - DNA, 208 bp, Zea mays
ccaacatcgaccttcaagtctcgctacgtatcattgcaacaagaaaagcagccgcagtggcgagcagcaccatggccctctcctccacggccggtcgccggcaaggccgtgaacgtgccgtcgtcgtccgccttcggcgaggctcgcgtgacgatgcgcaggacggcggggaacgccaagcgggctgcggcgtccgggaggcccgtgg

SEQ ID NO: 75794 - DNA, 369 bp, Zea mays
gtgaggttcaaggccggctcccagatcttcagcgagggtggactggactacctcgggaacccgagcctcatccacgcgcagagcatcctcgccatctgggcctgccaggtcgtgctcatgggcgccgtcgagggctaccgcatcgccggcggcccgctcggcgaggtcgtcgacccgctctatcgcggcggcagcttcgacccgctcggcctcgccgacgatcccgaggccttcgctgagctcaaggtgaaggagctcaagaacgggcgcctcgccatgttctccatgttcggattcttcgtccaggccatcctcaccgggaagggcccgctcgagaagctcgctgaccacatttgcgaccccgtcaac

SEQ ID NO: 75795 - DNA, 415 bp, Zea mays
cccacgcgtccgcacgcatactgcatacacaacacagagcatcagaaggagctgcgatctgatcgacatggctgccgccaccatggctatcacctcccgcgcgctcatcggcaagccggcggctggcacgagggacgtcttcggcgagggccgcatcaccatgcgcaagaccgccgccaagcccaagccggcggcgtccggcagcccctggtacggtgccgaccgcgtcctgtacctgggcccgctgtccggctcgcccccgagctacctgaccggccagttccccgcgactacgggtgggacaccgcggggctttcggccgacccggagaccttcgccaagaaccgcgagctggaggtgattcagtgccgctgggccatgctcggcgcgctcgggtgcttgttcccggagctgc

SEQ ID NO: 75796 - DNA, 430 bp, Zea mays
ccaacgcgtccgcggacgcgtgggtttttttttttttgacccataaaatctttgtgatttcatatactttttactcatgaaccctttctttgggttctgctacatttgcaatataagatagttcgtattcgtgaatgctatgtggcctagagttgttcttgctacaatctattcagtatccagcggcgtgtttctcttggattggattcctgtgctttgatcattgctgctgcgcctggagctcggcctgcgtgataaagatgccgtggaagccgtaggggacgcgcgcgggcagctgcacctcggcgacgatgtccagctgcgccgacctggcgtccatcaccacgaactggttctcgccggtccgctcgttgtggacgtagcacaccaagtagccgtcgtcctcgttgctattcccctccacgtcgtc

SEQ ID NO: 75797 - DNA, 324 bp, Zea mays
ccgggtcgaccacgcgtcagctgagtttagtgacagatacgaggaatttgagaagttgaacactgaggttcttggtgtttccattgacagtgtgttctcccaccttgcatgggtgcagacagacaggaagtcgggtgggctcggcgatcttaaatacccacttgtttctgatgtgaccaaatcaatttcaaaggcctttggtgttctgatccctgaccagggtattgctttgagaggactgttcatcattgacaacgagggagtgattcagcactctaccattaacaaccttgccattggtcgtagtgtggatgagaccatgac

SEQ ID NO: 75798 - DNA, 396 bp, Zea mays
ccgggctcgaccacgcgtccagctgatcccgtccaagtggaaccccagcaaggagcgggagttccccgggcaggtgctccgctacgaggacaacttcgacgccaacagcaacgtgtccgtcatcatccagcccacgtccaagaagagcatcgccgactacggctctcccgaggagttcctctcccaggtcgactacctgctcggcaggcaggcctacggcggcaagaccgactccgagggctggttcgagaccggcgccgtggccaccgccaacgtcctggagagctcgacccccgtgatcgagggcaagcagtaccacgccgtgtccgtgctcacgaggacggcggacggcgacgagggcgggaggcaccagctcatcgcggcgaccgtcgccga

SEQ ID NO: 75799 - DNA, 233 bp, Zea mays
tccgtgctgaagcaggtggactacctgctgcgcaacggctggataccctgcctcgagttcagcacggtcggcttcgtgtaccgcgagaactccacctccccgtgctactacgactgccgctactggaccatgtggaagctgcccatgttcggctgcaacgactccacccaggtgtacacggagctccaggaggcgatcaagacctacccggaggccttccaccgcgtcatcgg

SEQ ID NO: 75800 - DNA, 239 bp, Zea mays
ctattttccattcattattattctatttattctgacctccatacctcgatcgagatagtggacataggatgccactctttaaaatgaacaaaatgagtaatcagctgtgacacgaaagaacgcgaatccttttgtagctcgtcagttattggcaaaaatcgaaaaggtcaatatgacggaggagagagagataatagtaacgtggtcccgggcatcgagcattctagccgcaatggttg

SEQ ID NO: 75801 - DNA, 233 bp, Zea mays
cggacacgtgggcaacggcgaccccttcatcggcagcctggagacgccggtcaactccaacccgctcgtcacgtggtagctctgcaagctcccggcctagcgcaccgccgtgagcccgctgctgcggggcgtccaggtcggcctcgcgcacggcgacctcctgcgtggggccttgcgcgccaacggcccgctcctcagcaacgcccgtgcacggccaggccggcgcgctcggc

SEQ ID NO: 75802 - DNA, 340 bp, Zea mays
acgcgtccgctcatcgccatcacatagaaccagtgcaagcagaagcagcgcaatggcgagcagcaccatggccctctcctccacagccttctgcggcaaggcagtgaacgtgccgtcgtctctcttcggcgaggcccgcgtgacgatgcgcaagacggcggcgaaggcaaagccggcggcgagctccggcagcccgtggtacggccccgaccgcgtgctctagctgcgcgcgctgtccggcgcgcccccgagctacctgaggggcgagttcccgggtgactacggctgggagaccgctgggctgtcgggcgacccggaaacgttcgccaagaaccgggag

SEQ ID NO: 75803 - DNA, 239 bp, Zea mays
cggaagcgtgggcggacccgtgggagctcacgtgctcttaccccggcatcaaattcgcctacggcccagacatttacttcggaaacgaggtatctgttttggagatggatgggcagttcgacagactagacgagctcatctacgtggagagccatctgagcaacctctcgaccaagttctacggggaggtgacacagcagatgctgaagcacgcggacttcctggaagcaacaacggac

SEQ ID NO: 75804 - DNA, 259 bp, Zea mays
cgggctcgaccacgcgtccaggaactcaagaacggccgcctcgccatgttttccatgttcggcttcttcgtccaggccatcgtcaccggcaagggcccgctcgagaacctcgctgatcacatcgctgacccagtgcggaacaatgcatgggcctacgccaccaacttcgtctccggcaactaagctcaacggctatgctatgccacttcactgtctttcggatcggagacggtgtacgtacctgcattgactgatgctg

SEQ ID NO: 75805 - DNA, 377 bp, Zea mays
cgcacgcttcagcttcaccagcccgccgccgccatcgcacgcccgcagccgcatccgctatgggtgcgtacaagtacgtctcggagctatggcggaggaagcagtccgatgtgatgcggttcgtgcagcgcgtgcgctgctgggagtacaggcagcagccggccatcgtccgcctcacaaggcccactcgccctgacaaggcgcgccgcctcggctacaatgccaagcagggttatgttgtttaccgtgtccgtgttaggcgtggtggcaagaagaggcctgtgcctaaaggtattgtcgatggcaagccagagcaccagggtatcacccagctcaagttccacaggaacacagagtctgttgctgacgagagggct

SEQ ID NO: 75806 - DNA, 392 bp, Zea mays
ctcagcacgcaggctagcagcacagcagcagccagagccatcccctctcctcgctacgcttcgcttcctcggcgccgattcctcctcctcctcctccaccctcgtccgtcgccttccggcgcacgagctcgcccgagatggcgaacgcgagatcgggtgtcgctgtgaacgatgagtgcatgctgaagtttggcgagctgcagtcgaagaggctgcaccgcttcataactttcaggatggacgacaagttcaatgagatagttgtggaccaggtcggggatcgcgctagcagctacgatgacttcacagacagcctccctgagaatgactggcgatacgcgatgtatgaattcgactttgttactgcagaggatgtccagaagagcaggatc

SEQ ID NO: 75807 - DNA, 371 bp, Zea mays
cccacgcgtctgatgaagagctagaaacacagctaaaggaggcagcagtgatatctatgggaacagaagttagtgacctcgacttgtcaaatataagagagctatgcgatcaagtgctggcactttctgagtacagagcccagctgtatgactatttaaaaagcaggatgaacactattgcaccaaatctgacagccctagtgggtgaattagttggtgctcgccttattgcacatggtggaagtttgctaaatttagccaagcagcctggtagcacaattcagatacttggtgcagagaaggctttattcaaagctctaaagacaaagcattctactcctaagtatggcctcatctagcatgcatcctta

SEQ ID NO: 75808 - DNA, 371 bp, Zea mays
agtcaaccctggcttacatgatgaaggaataccctgggactgaagaagaaaagatgcgagccgctgttggcaggttcggcctgtcaggaaaggcgcaggtgatgccgatgaagaatcgttctgatgggcaaaggagccgcgtcatctttgcatggctggcatataggcagccgcaactgctactgcttgatgagccgacaaaccatctggatatcgagaccattgactcactggcagatgcgctgaatgagtgggatggtggtttggtcttggtgagccacgatttcatgctgatcaagcaggtcgctcacgagatctgggtgtgtgagaatcaagaggtgacaatgtgggaaggcgatatcatggatttc

SEQ ID NO: 75809 - DNA, 330 bp, Zea mays
cccaagcgtccgctcatggggaagtgaagctgttacccgcaagacccgtatcctcgacgtggtctacaatgcatcaaacaatgagcttgtgaggacacaaacccttgtgaagagtgccattgtgcaagttgatgctgccccattcaagcagtggtacctcactcactatggagttgacattggtaggaagaagaaaacccctgctgcaaagaaggataatgctgagggacaagaggttgaggcaacagctgaggaaacgaagaagagcaaccatgtcacgaggaagcctgagaagcgcaaggaaggacgtacccttggaccacacattga

SEQ ID NO: 75810 - DNA, 430 bp, Zea mays
gaagaatgacccagagtttgcacagaagcttgcctccctagcagatctttatgttaacgatgcatttggaacagcccacagggcgcatgcatcgaccgagggagttaccaagtttttgcagccttctgttgcagggttccttctgcagaaggaactcgactaccttgtcggagctgtttcaagccctaaacgcccttttgctgccatcgtgggtggttcaaaggtgtcatccaagatcggggttattgagtccctgttggagaagtgtgatatccttctcttgggtggtggtatgatcttcacgttttacaaggcacaaggtctccctgttggtgcttcattggtcgaggaagacagacgcgagcttgcgacgtctctccttgcacaggctaaggaaaagggcctctcccttatggcgccaactgatgtt

SEQ ID NO: 75811 - DNA, 285 bp, Zea mays
cgaagatattgttccttcgtcacacaactgtgatattccgcatgtgaaccgtactgagtatcagctgattgatatatcagaggatggatttgtgagccttcttacttcagatggcaacactaaggatgatcttagactcccaactgatgagactcttgtggcccagatcaaggaagggtttgaaagtggcaaggatcttgttgtgactgtccagtctgctatgggggaggagcagatctgcgcgctgaaggatgttggccccaattaacttccctgccttggaat

SEQ ID NO: 75812 - DNA, 442 bp, Zea mays
tccacccgacgcgtccgcactcgggtaaagctatctcgagctagctagctgctgtaagccgttgccatggccaaaatggtgttgctctgcgtgctcgtctccttcctcctgatgcccttggcctccctagccctgacgcaggacttctgcgtcgccgacctgacctgcagcgacacgccggcggggtatccgtgcaagtccagcgtcaccgccaacgacttctagttccacagcctggccgggcagggcaaaataaacccactcatcaacgccgccgtgaccccggccttcgtgggccaattcccgggcgtcaacgggcttggcatctctgcggccatgctcgacatcgaggtgggcggggtcatgccgctggagacccacccggcgggctcagagctcctcttcgtgatccagggcaccgtcgccgccggcttcatgagct

SEQ ID NO: 75813 - DNA, 330 bp, Zea mays
cactgaactctgaccaggcgagggacttcgacctccccttgaaggagcggttctacctgcagccgctgccgccggcggaggcggtggcgagggtgaagacgtcggcgcaggacatcatcaacctcaagccactcatcgacaagaaggcgtggccgtacgtccagaacgacctccgcctccgggcctcctacctgcgctacgacctcaagaccgtcatcgcttccaagcccaaggaggagaagcacagcctcaaggagctcaccggcaagctcttcagcaccatcgacgatcttgacaatgccgcaaagatcaagagcaccccggaggccg

SEQ ID NO: 75814 - DNA, 395 bp, Zea mays
gcgtacccgtcgtctccatgcggccacctccagttcccgcggcggcacggcggcccgcgcgcggtgcggctgcgggtgcaggtgtccaccaccgagaccgcggaggcggagccggtcaagaagctggagaaggtgtccaagaagcaggaggaggggctcgtcaccaacaagtacaagcccaaggagccgtacgtcgggaggtgcctgctcaacaccaggatcaccggcgaccaagcgcccggtgagacgtggcacatggtcttcagcacagaaagcgaggtcccctacagagagggcagtccatccgcgtccaccccgatggccagggcaaaaacggaagccgcaaaccctcaggctcaatccaatcgccagaagggccctcggggatttcgggg

SEQ ID NO: 75815 - DNA, 432 bp, Zea mays
ggctcagattgagatcctgaggaagaaggggcactcctactctgagatcatcaacgagagcgtgattgagtcggtggactcgctgaacccgttcatgcacgcccgtggggtcgccttcatggtggacaactgctccacaacggctcgcctgggatccaggaagtgggcgcctcgcttcgactacatcctgacgcagcaggccttcgtggcggtggacaaggacgccccgatcaaccaggatctcatcagcaacttcttgtcggaccctgtccatggtgccattgaggtctgcgccgagctgaggcccaccgtcgacatctctgtgcctgccaacgccgactttgtgcgcccggagctccggcagtcttcctagattgaggcagtgaacggagagggaaacggagagagaaagagaggatttcgtgtcccgag

SEQ ID NO: 75816 - DNA, 438 bp, Zea mays
acgatccgtcgtgtcaaccagacctatgtcattgctacatcaaccaaggttgacatctctggtgttgatgtcgcgaagtttgatgacaagtactttgccagggagaaaaggcagaaggtgaagaagtcggagggtgagctttttgagacagataaggaggcgtccaagtctctgcctgatttcaaaaaggatgaccagaaggccgtggatgctgctctgatcaaggctattgaggctatcccagagctgaaggcctatcttggcgctcggttctcccttagggatggtgacaagccccacgagatggtcttctaaaccgagttttggagttcggaggaagtcgctttggctgtactctcttgtgacaagccccacgagatggtctcccagagctgaaggcctaccttgtttcattctgcttgaagtctgtcaaataat

SEQ ID NO: 75817 - DNA, 425 bp, Zea mays
  unsure (1)..(425): unsure at all n locations
agtgaggttctccggggttcggtttcgtgggtgagcggatcgagatggcggcgtcggatgttgagtaccgctgcttcgtcggcggcctcgcctgggccacggacgaccactccctccacaacgccttcagcacctacggcgaggtcctcgagtccaagatcatcctcgatcgggagacgcagaggtcccgcggcttcggcttcgtcaccttctccacggaggaggcgatgcggaacgccatcgagggcatgaacggcaaggagctggacggccgcaacatcaccgtcaacgaggcccagtcccgcggcggccgtggaggcggcggcggcggcgggtacggtggtggccgtggaggcngcggctacggcggtggcgggcgccgtgatggcggcggcggctacggcggtggcggcggctacggtggt

SEQ ID NO: 75818 - DNA, 425 bp, Zea mays
cacacgcgtccgcccacgcgtccgccggcggcggcggcggcggcgcagcagcggcagcagcatccgaagatggtgaagttcctcaagcccggcaaggccgttatcctcctccagggccgcttcgccggcaggaaggcagttatcgtgcgcgtgttcgaggagggcacccgcgaccgcccctatggccactgcctcgtcgcaggcctcgccaagtacccaaagaaggtgatccgcaaggactccgccaagaagactgcgaagaagtcgcgcgtcaagtgcttcatcaagctcgtcaacttcactcacctcatgcccacccgctacaccctcgacgtcgatttcaaggatgtcgccaccggtgggcccgacgcactctctacccacgacaagaaggtcgccgcctgcaagacggccaaagcgcgcct

SEQ ID NO: 75819 - DNA, 425 bp, Zea mays
caccaaggagagtacgtggaggagcagccatggcttcatcggtggccgccgcggcgagcacattcctgggcacccgcctggcggacccggcgccacagaacgggcgcatcgtggcccggttcgggttcgggttgggcggcaaggcgaagcctgctccgaagaaggtggcgaagacatcgacctcctctgaccggccgctgtggttccccggcgccgtggcgcccgactacctggacggctcgctggtcggcgactacgggttcgacccgttcggtctcgggaagcccgtggagtacctgcagttcgagttggactcgctggaccagaacctggccaagaatgaggccggcggcatcatcggcaaccggttcgagtcctccgaagtcaagtccaccccgttgcagccctacagcgaggtgttcggc

SEQ ID NO: 75820 - DNA, 433 bp, Zea mays
gaggacgcgagtgagtgaacaccagccgtattgtcccgactcctgacccctaccgatcctcgcctgctgcagccatggcgacctccgcggcgctctccaccgccgccaatcccacccagctctaccggtcccgcgcttcgctgggcaagccggtgaaggggcttggcctgagcatgggccgcgagcgcgcccagcggagcattgtgtgccaggcggcgagcagcatctccgccgaccgcgtccccgacatggagaagcggaagctgatgaacctcctcctcctcggcgccatctcgttgcccaccgtcggcatggtcgtcccctacggcgccttcttcgtccctgccggctccgggaacgccggcggcgggacctacgcgaaggacaagctgggcaacgacatcacggtggaggcgtggctcaacacgcacgg

SEQ ID NO: 75821 - DNA, 303 bp, Zea mays
cgcacgcatacacagcacagagtgaggtaagcatccgaaaaaagctgtgatctgatcgacatggccgccgccaccatggctctcacctcccgcgcgctcgtcggcaagccggcgagcagcaccagggacgtcttcggcgaggggcgcatcaccatgcgcaagactgctggcaagcccaagccagcggcgtccggcagcccctggtacggggccgaccgcgtcctgtacctgggcccgctgtccggccagcccccaagctacctgaccggcgagttccccggcgactacggctgggacaccgcg

SEQ ID NO: 75822 - DNA, 443 bp, Zea mays
gcagtgggttatcaacctacccttagtacagaaatgggttctttgcaagaaagaattacttctaccaaaaagggatctataacttcgatccaagcagtttatgtacctgcagacgatttgaccgaccctgctcctgccacaacatttgcacatttggacgctactaccgtactttccagaggattagcttccaagggtatttatcccgcagtggatcctttagattcaacctcaactatgttacagcctcggattgttggcaacgaacattatgaaactgcgcaaagagttaaggaaactttacaacgttacaaagaacttcaggacattatcgcaattcttggattggatgaattatcggaggaggatcgtttaactgtagcaagagcacgaaaaatcgagcggttcttatcacaaccgttctttgtggcaaaagtttttac

SEQ ID NO: 75823 - DNA, 288 bp, Zea mays
ccggcgactacggctgggacaccgccgggctgtccgccgaccccgagaccttcgccaagaaccgcgagctggaggtgatccactcccgctgggccatgctcggcgcgctcggctgcgtcttccccgagctgctctcccgcaacggcgtcaagttcggcgaggccgtctggttcaaggccggctcccagatcttcagcgagggcgggctggactaccttggcaaccccagcctgatccacgcgcagagcatcctcgccatctgggcctgccaggtcctgctcaagggcg

SEQ ID NO: 75824 - DNA, 386 bp, Zea mays
ggcacaagccatggcgtccatgaccggcctctcgcagggcgttctgcccagcaggcgcgccgccaacagggccaggacggccgccgtcgtcagggcgtccgccgaggcgcaggcgcaggcgggccgccgcgccgtgctcgggctggtggccactggcatcgtcggcggcgccttgtcgcaggcggtgcacgccgagaccgtcaagaccatcaagatcggagccccgccgccgccctccggtggactccccgggattctgaactctgaccaggcgagggacttcgacctccccttgaaggagcggttctacctgcagccgctgccgccggcggaggcggtggcgagggtgaagacgtcggggcaggacatcatcaacctcaagccac

SEQ ID NO: 75825 - DNA, 411 bp, Zea mays
  unsure (1)..(411): unsure at all n locations
cggacgcgtgggcgacatcacggtggaggcgtggctcaacacgcacggtcccaacgaccgcacgctcgcgcaggggctcaagggtgaccccacgtacctggtggtggagcaggacaagacgctggccacctacgggatcaacgccgtgtgcactcacctcggctgcgtcgtgccgtggaacggcgctgagaacaagttcatctgcccctgccacggatcccagtacaacaaccagggcaaggtggtccgtggaccggcgcctctgtcgctggccctggttcacgccgacgtcgacgacggcaaggtcctcttcgtcncgtgggtggagaccgacttcaggaccggcgaggacccatggtggaaggcatgaggatgatcgggaaccagcggtgctcagtgctcacacatgag

SEQ ID NO: 75826 - DNA, 358 bp, Zea mays
gcccgagggccgccgcgccgctctgctcggcctggcggccgtcttcgccgtcacggccaccaccgggtcggccaaggccacgatcttcgatgagtacctcgagaagagcaaggccaacaaggagctgaacgacaagaagaggctggccaccagtggcgccaactttgcgcgcgcctacaccgtggagttcggcagctgccagttcccctacaacttcactgggtgccaggacctcgccaagcagaagaaagtccccttcatcagcgacgacctcgagattgagtgcgaggggaaggagaagttcaagtgcggctccaacgttttctggaactggtgaagcaactagcagcagcgtctg

SEQ ID NO: 75827 - DNA, 367 bp, Zea mays
gagagagaccgacgcgccggcagatcccaagttcaccggagagggggaagagggcgaccgaaggcggcgatgggtttcatcatggacttcgcggagaatctgatcctccgtctgatggaggacccggacaagcgcgaccaggttcggcgggagcatgtctacaagatgaaggagcggtgcgagcgcactaaggcggcgtggagcctccctctgcgcccctacggcttctggaccttcgaccgcttcaactcgcagctctcctgggatccccagatcagccaggccgccggccgtcgggacccctacgacgacctcatcgcccgccactctggctcgccgccgtcttcctgaacacccgttccgatct

SEQ ID NO: 75828 - DNA, 420 bp, Zea mays
  unsure (1)..(420): unsure at all n locations
gagatggtgtcatccaagaaagtgtgcgtggtcggcgctggcgtgtcggggctggcgtgtgcccgcgagctgctccgcgagggccacgacgtgacggtcatggagcagagcggcggcgtcggcgggcagtggctgtacgacccgagggcggacggcggcgacccactcggcgctgccggcgcgcatagcagcatgtacgcctccgtccggctcatcagcccgagggagctcacgggcttctccgacttccccttcttccccagagacgacggcaccggcgactcccggcgggtaccggggcacgctgagttcctgaggtacatcanggacttctgcgacgcgttcgggctcatggacgtcgtcaggctcaacaccaaggtcctgcgcgtccgcctgccggcgccgcgtgccgctgatgac

SEQ ID NO: 75829 - DNA, 283 bp, Zea mays
ggcccacgcaccttgccatcctgtcccagccgccggacaccatcaacgggtccatccgtgtgacggtgcagggcgaggtcatcgagttctgcttcggggaggagcacctgtgcttccagactctgcagcgcttcacggccgccacgctggagcacggcatgcacccgccggtctctcccaagcccgagtggcgcaagctcatggacgagatggcggtcgtggccacggaggagtaccgctccgtcgtcgtcaaggagccgcgcttcgtcgagtacttcagatc

SEQ ID NO: 75830 - DNA, 435 bp, Zea mays
cacacgcgtccgcccacgcgtccgaagacgacttgtttcattgattcttgaagagatcgagcttcttttgcaccacaaggtcgaggatgtcttgcaactgcggatcaagctgcggctgcggctcaagctgcaagtgcggcaagaagtaccctgacctggaggagacgagcaccgccgcgcaggccaccgtcgtcctcggcgtggccccggagaagaaggccgcgcccgagttcgtcgaggccgcggcggagtccggcgaggccgcccacggctgcagctgcggtggcaactgcaagtgcgacccctgcaactgctgatcacatcgatcgacgaccatggatatgattattatctatctagcttgtggtggtggttgaacaataataagcgacgccgagctggctgccatacatacgtaatgtgtggtgtgtgtga

SEQ ID NO: 75831 - DNA, 83 bp, Zea mays
aaataatttggtatatttgccattccgctattgtgtactctttggcatacatacaataattaaaatggcgttgcgtggctctc

SEQ ID NO: 75832 - DNA, 439 bp, Zea mays
aggagacgtacgctctctgctagcacccatcttgcagcaggcggagccgcccgacccgatccgtgcgtgtgtgttggtagagatggctacagcagcttacgctcccatggcgagccaggtgatgaagagcagcccggtgcactcgaggccgaggggcctgtcaggcgctgcgctcacgcggccccggccccggttcagcgtcgtcaaggccgccatccagcccgagaaggcaacgtaccaggtggtgcagcccatcaacggcgacccgttcatcggcagcctggagacgcccgtcacctccagcccgctcatcgcgtggtacctctccaacctgccggcctaccgcaccgccgtgagcccgctgctgcggggcgtccaggtcggcctcgcccacggctacctcctcgtcgggcccttcgcgctcaccggcccgctcggc

SEQ ID NO: 75833 - DNA, 432 bp, Zea mays
gagttccaggcctacacgctgaagcggataagggaccccaacttcaaggtgacgccccagccgccgctgtccaaggagttcgccgacgagaacaagcccgccggactggtcaagctgaacccggcgagcgagtacccgcccggcctggaagacacgctcatcctcaccatgaagggcatcgccgccggcatgcagaacactggctaggcggcttctcttcactcacctgcagagtgcaccgcaataatcagcttccggatggtggcgttttgtcagttttggatggaaatgccgaactggcagcgtctgttttccctatgcatatgtaatttcctgcctctttatattcactcttgttgtcaagtccaagtggaaaatcttggcatattatacatattgtaataataagcatcgtacaatctgcatgctgtt

SEQ ID NO: 75834 - DNA, 421 bp, Zea mays
caccactccgcgctagctgaggacggtacagcggcacagaggtgcgacgtacgacgacgacgacgcaggcgccacacatggcatcccagctctccgccgccgtgccccggttccacggcctccggggctacgccgcgcccaggtccgcggtggcagcgctgccgtccgtgagggtgggcaggaagaggtcgtcgtcgcagggcatccgctgcgactacatcggctccgccaccaacctgatcatggtgacgacgacgacgctgatgctgttcgcggggcggttcgggctggcgccgtccgcgaaccgcaaggcgacggcggggctgaagctggaggcgcgcgactccggcctgcagacgggtgaccccgccgggttcaccctcgccgacacgctggcctgcggcgccgtccggcacatcct

SEQ ID NO: 75835 - DNA, 429 bp, Zea mays
cacacgcgtccgcggacgcgtgggcgcccgctcccggagagcatgtcggacttcctcatgggctccggcttcgagcggctgctggagcagctggcccagatggaggccggcggcggtctggcggcgcgcgcccgtgacgcgccgccggcgtccaaggccgccgtggactccatgcccgcgctccgcgtcggcgccgcccacgtcgcggccgacgcgcactgcgccgtctgcaaggaggccttcgagctgggcgccgaggccagggagatgccctgcgcccacatctaccatgccgactgcatcctgccctggctcgcgctccgcaactcctgccccgtctgccgccacgagatgcccgccgacaacgccgccccgcgcgctgccgccgccgccgccgctgacgaggacccagggtcggcctcaccatct

SEQ ID NO: 75836 - DNA, 436 bp, Zea mays
agcaagccaactcggccgtccgaacgaaagcgaagcgcggccaaactcactcgctaaacgctcccgttctcctccgcctgcccccaccggctccccttgtacacgagcgccggagacgccatggcggcggcgcagccgaagccggccaagaggctgggcggcatggcggaggcgctcgccatcgccgccgacctcggattccccgcctctaccacgcaggaagatcagactagctccgacaaaagcgatgatttggtgaaggttttgagggaactgactgtcgtgcagaggaacattgccaacttgcaagtggagctacagggaagaaaggatgataaaaacattgctcatttgactcatgtgagtgagatggaaaagaagtgcgagtctttggccagaatgactgcaattttgaaagatgtaattcagaacaagg

SEQ ID NO: 75837 - DNA, 430 bp, Zea mays
agctaacgacctgcagccaaccatctaccagcgactcagcgagcgagagcagcacacactgcacgcagctagctaggagcagcagcagcggcggcgatggcggcctccatgatctcctcgtcagctctggcggtggcgcctcagggcctgccgcccctcggccgccgcgcctcctccttcgctgtcgtctgctccaagaagaagatcaagaccgacaagccctacgggattgggggtggcctgaccgtcgacgtcgacgccaacgggagaaagggcaagggcaagggcgtgtaccagttcgtcgacaagtacggcgcgaacgtcgacggatacagcccaatctacaacgaggatgactggtctcccaccggcgacgtctaagtcggtgggaccactgggcttttgatctgggccgtcaccctcgctggga

SEQ ID NO: 75838 - DNA, 435 bp, Zea mays
cccacgcgtccgcagcgactcagcgagcgagagcagcacacacgcagctagctaggagcagcagcagagcagcggcgatggcggcctccatgatctcctcgtcagctttggcggtggcgcctcagggcctgccgcccctcggccgccgcgcctcctccttcgccgtcgtctgctccaagaagaagatcaagaccgacaagccctacgggattgggggtggcctgaccgtcgacgtcgacgccaacgggagaaagggcaagggcaagggcgtgtaccagttcgtcgacaagtacggcgcgaacgtcgacggatacagcccaatctacaacgaggatgactggtctcccagcggcgacgtctacgtcggtggcaccactgggcttctgatctgggccgtcaccctcgctgggattctcggcggccgcgccctcctcg

SEQ ID NO: 75839 - DNA, 399 bp, Zea mays
cccacgcgtccgcggcgatggccggtacccccatcaaggtgggctccttcggcgagggccgcatcaccatgcgcaagaccgtgggcaagcccaaggtggcggcgtccggcagcccctggtacggccccgaccgcgtcaagtacctcggccccttctccggcgagcccccgagctacctcaccggcgagttccccggcgactacggctgggacaccgccgggctgtccgccgaccccgagaccttcgccaagaaccgcgagctggaggtgatccactcgcgctgggccatgctcggcgcgctcggctgcgtcttccccgagctgctctcccgcaacggcgtcaagttcggcgaggccgtctggttcaagggcggctcccagatcttcaccgaaggcgggc

SEQ ID NO: 75840 - DNA, 414 bp, Zea mays
accacgcgtccgggagagcaaaggcagcacactcagctatccagcaaaagagatcgagaggcaggagtcatggccaccgtcagcgccgccgtggtgaccaccatcgttgcccgcgccgcgatcgccaggcccaatgctctagggctgcctgcgctgagggcgaggagcgagagggtgcggtgcagctacgccaaggacgcggccccagtcagcaccaagggcgcaggcgcgtcgctgctcgccgcagcgggcgcggtgaccgcgtcggcggggcccgcgctggcgctcgtggacgagcgcatgtccacggagggcaccgggctgagcctcgggctcagcaacaacctgctggggtggatcctcctgggggtcttccgcctcatctggtccctctacacgatcctacactctgac

SEQ ID NO: 75841 - DNA, 430 bp, Zea mays
gaaggaggtccttcaccgtgcgtgcctctctccgcaaggccactgccaccgccgccgtggccgttgccgccagcgtcctgcttgccggcggcggcgccatggcccaggaggtgctgctgggcgcaggcgacggcgggctcgtcttcgagcccagccagttcaccgtcaaggccggcgacaccatcaccttcaagaacaacgccggcttcccgcacaacgtcgtgttcgacgaagacgatgtgccgagcggcgtcgacgcctccaagatctcgcaggaggagtacctcaacgcgccaggcgagacctactccgtcaccctcaccgtgccgggcacctacggcttctactgcgagccgcaccaaggagcatgaatggtcggcaagatcacagtcaactaaagctagctatccattccatgcatctcgatctg

SEQ ID NO: 75842 - DNA, 433 bp, Zea mays
aagcaagaaagcaagcagcgagtacatacatactatgcagccaggcagccatggcgcccaccgtgatgatggcctcgtcggccaccgccgtcgctccgttccaggggctcaagtccaccgccagcctccccatcgcccgccgctcctccagaagcctcggcaacgtcagcaacggtggaaggatccggtgcatgcaggtgtggccggcctacggcaacaagaagttcgagacgctgtcgtacctgccgccgctgtcgacggacgacctgctgaagcaggtggactacctgctgcgcaacggctggataccctgcctcgagttcagcaaggtcggcttcgtgtatcgcgagaactccacctccccgtgctactacgacggccgctactggaccatgtggaagctgcccatgttcggctgcaacgacgccaccca

SEQ ID NO: 75843 - DNA, 438 bp, Zea mays
cccacgcgtccgcccacgcgtccgccgctaggcaagttcatggatgagcgggacgccaagatccgcggtgagctcggcgatgtcaagggcgcctccgaggaggtgaagcagctggaggaccaggcggcggccatcatgaaggcggcgcgcgccgagatcgcggcggcgcttaacaagatgaagaaggagaccaccgcggagctggaggccaagctggacgagggacgcagccgtgtggaggccgagctcgtagaggcgctcgccaacctcgaggcgcagaaggaggaggctgtcaaggcgctcgacgcccagatcgcctcgctcagtgatgagatcgtcaagaaggtgctcccatccgcgtgatgaaaccaaaccgggcctgccttatcctacgactatagttacatgaacatcataaattaatgataattttgaaga

SEQ ID NO: 75844 - DNA, 445 bp, Zea mays
cggacgcgtggggtagtttgcccggcaagcaaacatctccggcagccatggcgtccactgtaacagccgccaatagcagccatggaagcgccctgcgtacccgtaccgcctccccaaggccggtcgcgggctggagctgcagacgcacgctttccacgcctgcacaccaccaccacgcgcggccgtcacccagagctcgggttgtcgccgtccgagccgccggcactcagcgggcgacctggttgcccggactggacccgcccccatacctcgacggcacactaccaggtgacttcggcttcgaacctctgggcctccgcgaggagcccgaagccctgaagtggtacgttcacgccgagctcgtgcactgccggttcgccatggcaggggtccccggcatccttttcactgacttgctccgcgtatcagggaacacgatctcccc

SEQ ID NO: 75845 - DNA, 420 bp, Zea mays
cacacgcgtccgattgaagattaattactatgtttagtatttgcttaacagactgtgcctgattgccacaatctgtacaagaattcattcacatatcacagtcttcaacgggacaggcctttggattttgatgaggcaaaccaatatctagagaaatgtgaaagagataaatcgcgtgttcttgttcattgcatgactggaaaaaacaggtctgctgctattgttgcagccttcttgatgaagtctagagggtggagacttgcacaatcttttcaatgggtgaaagatcgaagaccacaggttcaactgacagatggttagcttcataccctttgaagcttgttgactaattaagacaccgtctctactacattatgaatcattgggtccttgcctatcacatggttacattttttctca

SEQ ID NO: 75846 - DNA, 197 bp, Zea mays
gcagcgagtacatacatactaggcagccaggcagccatggcgcccaccgtgatgatggcctcgtcggccaccgccgtcgctccgttccaggggctcaagtccaccgccagcctccccatcgcccgccgctcctccagaagcctcggaaacgtcagcaacggcggaaggatccggtgcatgcaagtgtggccggccta

SEQ ID NO: 75847 - DNA, 436 bp, Zea mays
agcccacgcgtccgcctcctcctcgtcgtcgtcgccgcggctgcggcgagcggcatcgcctccgctaagccgacggcgtacgaagccctcgccgactacgacttccccccggggatccttcccaagggcgtggtcgcctacacggtcgacaacgccacgggcgccttcacggccacgctcgatgcctccgcgtccggcgcgggatcctccatctgcgagttctccatcgagggctcctactcgctacgctaccagaccaagatcaccggcaagatctcccccgaccacctcaccgacctccagggtgtctccgtcaaggtcctcttcttttggctcaacatcgtcgaggtcacccgccatggcgataatctcgagttctccgtcggcatcgcctccgcggacttcgggattgacaacttcctcgagtgcccaacct

SEQ ID NO: 75848 - DNA, 435 bp, Zea mays
aacaggcggagccgcccgacccaatccgtgcgtgtgttggtcgagatggctacaacagcttacgctcccatggcgagccaggtgatgaagagcagcccggtgcactcgaggccgaggggcctgtcaggcgctgcgctcacgcggccccggccccggttcagcgtcgtcaaggccgccatccagcccgagaaggcaacgtaccaggtggtgcagcccatcaacggcgacccgttcatcggcagcctggagacgcccgtcacctccagcccgctcatcgcgtggtacctctccaacctgccggcctaccgcaccgccgtgagcccgctgctgcggggcgtcgaggtcggcctcgcccacggctacctcctcgtcgggcccttcgcgctcaccgggccgctccgcaacacgcccgtgcacgggcaggcgggcgcgctc

SEQ ID NO: 75849 - DNA, 208 bp, Zea mays
gtccgacaaaatagtgtagtggacaggaagaatagaactctattggacatgacaagaaccatgcttgatgaataccagactttggatcggttttaagccgaggcggtcaacaccgcttgccaggccatcaaccggttgtatctacaccgaatcctcaagaagacatcgtatgaactcctcaacggtaacaaacccagtatttcatagt

SEQ ID NO: 75850 - DNA, 437 bp, Zea mays
gtgggacgacgcaagactctaaagtgagtcgtaatatatcgcaagatacagaatggtgatttcaggtgccctagttggttttcacacaaactcaagaagctcttgtacaagatcctcgaccccagcccagacagaggaatttcagtgcagaagataaaagagtctacctggtttcgaaaaggccctgtggagacccgtacagtaaaggagaaaattctgagtgagaatgacaccacagatgctgctccagccgttgctatgaggcgcaagaagaatgttcatgaagacgtgaagcccccgactgtcacaagcttaaacgcctttgaaattatatctttctccacaggattggacctctctggcctatttatcagaaacgagtgtaagaaggagacgcggttcaattctgataaggggtcccgtgtccatcaatctcg

SEQ ID NO: 75851 - DNA, 413 bp, Zea mays
caaagttcttgaagccttctgttgcagggttccttttgcagaaggagcttgactaccttgtcggagctgtttcaagccctacacgcccatttgctgccatcgtgggtggttcaaaggtgtcatccaagatcggggttattgaatccttgttggagaagtgtgatatccttctcttgggtggtggtatgatcttcacattttacaaggcacaaggtctttctgtcggtgcttcgttggttgaggaagacaaactcgatcttgcaacatctctacttgcaaaggctaaggaaaagggtgtctcccttatgttgccaaccgatgttgtcatcgctgataagtttgctcctgatgctaacagccagattgttccagcatctgcaattcctgatggttggatggggctggatattggg

SEQ ID NO: 75852 - DNA, 366 bp, Zea mays
cagacgcgtgggcggacgcgtgggtttcagaggaactccaaacgtgctcgctcacaaaaatccagaaactggagttttgaaacagacgaggaggatgaagtatcagctccatcagaggtatctttggcactacaagctcttgggttgagcacttctggtccgcttaaacttgaagatgttaaaagcgcataccgagcatgtgcacttagatggcatccagatcgccacaatggatcatctaagtctacagcggaggagaaattcaggcattgcagtgcagcagacaagaccttatgtgatactttggccgctgcatagataattttgaatgagcatggactctgggatgagccccttccaaacttt

SEQ ID NO: 75853 - DNA, 426 bp, Zea mays
cagacgcatgggcgacgccgcgcggcgccggcaacgtgtggcgcagcgtcttccacccggggagcaacctggccaccaagggcatgggcgccaacctcttcgaccggccgcagcccaactcccccaccgtctacgactggctctacagcgacgagaccaggagcaaccaccgctagatcgggcgagatggatggacagtgaagaggccatgtttgctggtccttgtggttatctaaaacgcacgcatgctctattatagctagtcatcactatatatatacttgtgtttgtgtattgttgttcttgttctgctggtgtctccgccgtttaatttgacctatgttatggagtgagtgatatatgtgccgtcactcctagtatatagtagtgagtgactaattggtatgtgtagtactgtactatctt

SEQ ID NO: 75854 - DNA, 364 bp, Zea mays
cagacgcattggcggacgcgtgggcatcgatgaaccaagcaatgtcaagaatgaacctgagagttcaactaaattgcaaggccaagcagctgcgtaccacaagccatagctgcgaccatcaagagttgctgggtttcttctaggcaacttcctgcttgatgtggacagtccagaaaacagaagtgaatccgcaatacgtccctgccatttcaaatttgacttggttacacctatctgtgacaatgttgaatgtatgagatcccatggcactagtgaagttcccaggtgtccacctgggaatgcttgcggttgagagagacgatactcagagtgcccatgtatacatgacgcccatgatctcatt

SEQ ID NO: 75855 - DNA, 381 bp, Zea mays
agcaagcagcgagtacatacatactaggcagccaggcagccatggcgcccaccgtgatgatggcctcgtcggccaccgccgtcgctccgttccaggggctcaagtccaccgccagcctccccatcgcccgccgctcctccagaagcctcggcaacgtcagcaacggcggaaggatccggtgcatgcaggtgtggccggcctacggcaacaagaagttcgagacgctgtcgtacctgccgccgctgtcgacggacgacctgctgaagcaggtgggctacctgctgcgcaacggctggataccctgcctcgagttcagcaagggcggcttcgtgtaccgcgagaactccacctccccgtgctactacgacggccgctactgga

SEQ ID NO: 75856 - DNA, 361 bp, Zea mays
cacacgcgtccgacgatgaggagctccacaaggagaacatcaagaacgccgcctcctccaccggcaacatcacgttgagcgtcaccaagagcaacccggagaccggtgaagtcatcggtctcttcgaaaccgtggagccgtctgatagcgagctccgtgctaaggcgcccattgatgtcaatatacagcgggtctggtacgctcagctcgagtgattcgagtgtctaactgctacgtgtccgaccgccgtcatggatcttgggaaggtgtatgtataccatggaaaactttggagagcacatgatgaatcgtgtatgtaatgtacttgttaatgcaaattcgggctgtcgcttttttactc

SEQ ID NO: 75857 - DNA, 413 bp, Zea mays
cccacgcgtccgcccacgcgtccgcggacgcgtgggcactcccgggtctccagcattcctatcctctccccgcccgcccgtgccgccgccgcggcttcccttcctctcccgagccaagatgaatgttgaaaagctcaagaagatggcaggtgctgtgcgcaccggggggaagggtagcgtgcgcaggaagaagaaggcagtccacaagactacaaccacagatgacaaacggcttcaaagcaccttgaaaagaataggagtgaacagcattcctggtattgaagaggtcaacatctttaaggatgatgttgttattcagtttgtaaatcctaaagtgcaagcgtcaattggtgctaatacatgggttgtcagtggaactcgacagacaaagaagctgcaagatctgcttccgt

SEQ ID NO: 75858 - DNA, 431 bp, Zea mays
  unsure (1)..(431): unsure at all n locations
cacgtacgcacgcaccgggacaccagcaacccccaacagcgccactgtccagtgcgcgcgtcaagcttgcttagctagccgccatggcctccctcgccgccgtctccgtgaagcccgtggccatcaagggtctcgccggcagctccatctccggaaggaagctcgccgtcgccaggccgtcggcccgctccatccgcaggccccgcgcagccgccgtggtggccaagtacggcgacaagagcgtctactttgacctcgacgacatcggcaacaccaccggacagtgggacctctacggctctgacgcgcnctcggcctacaacccgctacagagcaagttcttcgagacgttcgcggctccgttcaccaagagaggtctgctgctcaagttcctgctgctgggcggcggctcactttctggctacgtcagc

SEQ ID NO: 75859 - DNA, 418 bp, Zea mays
cacgcgtccgcttcgccgcaccagcgccagcccgcgccgtggtcagaaggaggtccttcaccgtgcgcgcctctctccgcaaggccaccggcaccgccgccgtggcaatggctgccagcgccctgcttgccggcggtgccatggcccaggaggtgctgctgggcgcaggcgacggcgggctcgtcttcgagcccagccagttcaccgtcaaggccggcgacaccatcacattcaagaacaacgccggcttcccgcacaacgtcgtcttcgacgaagacgaggtgccgagcggcgtcgacgccaccaagatctcgcacgaggagtacctcaacgcgccaggcgagacctactccgtcaccctcaccgtgccgggaacctacggcttctactgcgagccgcatcaaggagccgggatggt

SEQ ID NO: 75860 - DNA, 418 bp, Zea mays
cccacgcgtccgcccacgcgtccgtgcagttcgaactggactcgctggaccagaacctggccaagaacgacgccggcggcatcatcggcacccggttcgagtcctccgacgtcaagtccaccccgctccagccctacagcgaggtgttcggcctccagcggttccgcgagtgcgagctcatccacggccgatgggccatgctcgccaccctcggcgctctcaccgtcgagtggctcaccggcgtcacctggcaggatgctggcaacgtggagctggtggatgggtcctcctacctgggccagccgctgccgttcaccatctcgacgctcatctggatcgaggtgcctgtgatcggctacatcgagttccagcgcaacgccgagctcgacccggagaagaggctgtacccggcggctcc

SEQ ID NO: 75861 - DNA, 288 bp, Zea mays
atcagaatcacgatttctcagatactggagcatccttggttcaaaaaggggtacaagcctcctgtttttgacgagaaataccaaactaacttggatgacgtggatgctgcttttggagattcagaagaccggcatgtgaaagaggaaactgaacatcagccaacctcaatgaatgcattcgaactgatttctctaaaccaggcactgaatctggagaatttgtttgaagcagaggaggagtataaaagagagacaagattcatctcacagtggcccccaaaagaagat

SEQ ID NO: 75862 - DNA, 452 bp, Zea mays
cccacgcgtccgcacaagccatggcgtccatgaccggcctctcgcagggcgttctgcccagcaggcgcgccgccaacagggccaggacggccgccgtcgtcagggcgtccgccgaggcgcaggcgcaggcgggccgccgcgccgtgctcgggctggtggccactggcatcgtcggcggcgccttgtcgcaggcggtgcacgccgagaccgtcaagaccatcaagatcggagccccgccgccgccctccggtggactccccgggactctgaactctgaccaggcgagggacttcgacctccccttgaaggagcggttctacctgcagccgctgccgccggcggaggcggtggcgagggtgaagacgtcggcgcaggacatcatcaacctcaagccactcatcgacaagaaggcgtggccgtacgtccagaacgacctccgcctccgggcctcc

SEQ ID NO: 75863 - DNA, 421 bp, Zea mays
cccacgcgtccgcccacgcgtccgcccacgcgtccgcctacgcgtccgcaagcaagcaagcaagcagcgagtacatacatactaggcagccaggcagccatggcgcccaccgtgatgatggcctcgtcggccaccgccgtctctccgttcgacgggctcaagtccatcgccagcctccccgtcgcccgccgctcctccagaagcctcggcaacgtcagcatcggcggtacgatccggtgcatgcaggtgtggccggcctacggcaacaagaagttcgagacgctgtcgtacctgccgccgctgtcgacggacgacctgctgaagcacgtggactacgtgctgcgcaacggctggataccctgcctcgagttcagcaatgtcggcttcgtgtaccgcgagaactcagctccccgtgctacta

SEQ ID NO: 75864 - DNA, 384 bp, Zea mays
gcgatcgacagcgtggtggatcccctccgcgacttcgccaaggacagcgtccgcctcgtcaagcgctgccacaagcccgaccgcaaggagttcaccaaggtggcggcgcggacggcgatcgggttcgtcgtcatgggcttcgtcggcttcttcgttaagctcatcttcatccccatcaacaacatcatcgtcggttccggctaggcttacaggagtacacggcgactagcatgggagtagtgcaatacttttgggagcaatagataacgaggatcctggtctttcgaatagtattgttaatgaaatttttcgttcggttgtgtttctgatgtaaccgttgtactgagtagaccttcgggataccggattctgagtaaacctttg

SEQ ID NO: 75865 - DNA, 383 bp, Zea mays
ggaagctgcccatgttcggctgcaccgacgccacgcatgtgtacaaggagctgcaggaggccatcgccgcgtacccggacgccttccaccgcgtcatcggcttcgacaacgtcaggcagacgcagtgcgtcagcttcatcgcctacaagccccccggcagcgagtagagaccgtggctagatcgacccatggccatgcctctgcctgttgatcggatcaccttcttgcattggttcctctctctctctccctccttttttttccctttatctcatcatttcttttctcctgcatgcaatggttccttttgcttccaacaattctcctgctgatgtatccagcatggcatcatccatccacaaatacgtacgtagtgcaccgac

SEQ ID NO: 75866 - DNA, 326 bp, Zea mays
cctcactcgggatcaaagctgccaatggtgtagtcattgccactgacgaagaagctgccttctattttagtggatgaaacatctgtgcaaaagattcaggcactaacacctaatattggagttgtctatagtgggatgggtccagatttccgtgttctggtgagaaaaagtcgaaagcaggcacaacaatattatcggttgtacaaggaacatatacctgtaacacagcttgtacgagagactgctgctgtcatgcaggagttcacacagtcacgtggtgtgaaaccatttggagtatcactgttgattgctgggtatgatgacaa

SEQ ID NO: 75867 - DNA, 405 bp, Zea mays
aaggagagtacgtggaggagcagccatggcttcatcggtggccgccgcggcgagcacattcctgggcacccgcctggcggacccggcgccacagaacgggcgcatcgtggcccggttcgggttcgggttgggcggcaaggcgaagcctgctccgaagaaggtggcgaagacatcgacctcctctgaccggccgctgtggttccccggcgccgtggcgcccgactacctggacggctcgctggtcggcgactacgggttcgacccgttcggtctcgggaagcccgtggagtacctgcagttcgagttggactcgctggaccagaacctggccaagaatgaggccggcggcatcatcggcacccggttcgagtcctccgaagtcaagtccaccccgttgcagcccta

SEQ ID NO: 75868 - DNA, 454 bp, Zea mays
acacactcctcccttcgcctgtgatcatgtcgtcttgctgcggcggcaagtgcgggtgcggctccagctgctcctgcggcagcggatgcaacggctgcggtatgtaccctgacgtggagaccgccgccaccagcagcgtcaagaccacggtcctcgccgcgccgaccaccaaggccagcgccggcggcttcgaggcggccaccgagggcggcggctgcgactgcaacacctgcaagtgcggcaccagctgcggctgctcctgctgcagctgcaactgagctggcccggcccggcgatggcgcacgagagtcgagaggaggaggacgacgacgaggcgtataaatataatagcggcgtccagtaaataagatcctgtcaactgcacccgccattatccatggtcgctcgctcctcgcctgcgtctcctggtcctggggtccgtctgaacgtcctc

SEQ ID NO: 75869 - DNA, 365 bp, Zea mays
aagggacacattgattcacatgcttgatgaggtcgtaaggaattgagaagatgatgtaagttcttgaatatgagcgtaatatcttctaccctacgagcatattgagatggtctctcaactaatatatctgccagctccaaaatatgcaattgaagctctctgttgagggtcctaagctccttcttgaagtcaatattgggaccctttggataaagctgacggacattatgactctccaagcttggaatcacaacatctcctgtgtaatcaacacccaaggctttgaatggttcatcaattggtggtggacgttctggtgcagatgatggatcttgctcaaattttttactagttctagatcgcga

SEQ ID NO: 75870 - DNA, 445 bp, Zea mays
  unsure (1)..(445): unsure at all n locations
agcgagtacggccgaccagaccaatggcactgcggctacccatctcctcgacccacgggctggcctcctcgccagcgcccatctcctccacgacgacgtgccggccggccgccgccagtgggagcttgatcccgccagctgccctggtcgcagttgccatccgctgggcgtcggcgtcggcgtcccaaaagaggggcctgctgctgacgacggcgaggggcggcggagtcctcgcgccggtgaggtcgagcgggatcgagacgacgacgacctcggtgggagctgaggccgtcaccgggcaggtcacggaggtcaacaaggacaccttctggcccatcgtcgaggccgccggcgacaaggtcgtcgtcctcgacatgtacaccgaatggtgcgggccttgcaaagtgatggctcccaagttccangagatgtccgagaagaacct

SEQ ID NO: 75871 - DNA, 295 bp, Zea mays
attgattaggagttcggcagagagaattatattatacatatgtaaattatcacattttgttcgtctatatagccttggtgtgcatgcaagtcatcgaacatgcagcttcttggatgcaataattgttgtgaacctagttgtgtagaaccttgtggtttaggttgctaggtgcccacaagatatgtattattcgtcagataagagttttctagcatcaggttcattttgtatctggttattgtcatattgcagtttttggtgatgggatagtcaacacaggtgtattctcagtttg

SEQ ID NO: 75872 - DNA, 231 bp, Zea mays
agtaacgtgtaccctccgtggcaagatgctggacggtggtgtatctgtgctcccggttggcgtcaacctgatctggtcttaagaaccccggtggcgacttgacatatgcaacggttaagtgctacatatgtcctgtgattgacgattctcagctgactacaatccattccgatcgccgtaccttcgtggttatgaatacttggtcactgccctaaacgtaccaatccaatc

SEQ ID NO: 75873 - DNA, 72 bp, Zea mays
gtggagatattcttgaggcatgagtaatgctacatgcatgtgatgtaaacaaatacaggtgcagctccaaat

SEQ ID NO: 75874 - DNA, 337 bp, Zea mays
tccgcggacgcaagtgttaccacaggctcattcagctagacgcagatcagacagacatgaaaagtagaaagaattttgatcaaatcaatagaacgaaggatcccttacctgatttgaatttcatcctcctttaaatatgatatgctctaagtcttcccatacattcctataatgactgctacgattttctccattttgcgaattcctagtttacttgaagtatattactatcatattcattatctaaatcgatccactttaaataaaataaaagcaatctacttgaactaaggtagaaagagtacatatacaacaagatattctgtttcagaattct

SEQ ID NO: 75875 - DNA, 360 bp, Zea mays
gtaacgtgtaccctccgtggcaagaggctggacggtggtgtatctgtgctctcggttggcgtgaacctgatctggtcttaagaaccccggtggcgagttgacatatgcaagggttaagtgctacatatgtcgtgtgattgaagatcctcagctgagtataatcgattcggatcgccgtaccttcgtggttatgaatacttggtcactgccctacacgtagcaatccagtgaagatgaagggatgatgaaaagacggctagtataggccaagtgcttgaactagggtagaaagaactctagatgcaggtaactttacttaacctgataagtaaaattggattttaaggatccactcatagt

SEQ ID NO: 75876 - DNA, 350 bp, Zea mays
gggatggcttctcctccccctccggttcgggttcgggttcgtgaggttctccggggttcggtttcgtgggtgggcggatcgagatggcggcgtcggatgttgagtaccgctgcttcgtcggcggcctcgcctgggccacggacgaccacaccctccacaacgccttcagcacctacggcgaggtcctcgaatccaagatcatcctcgatcgggagacgcataggtcacgcggcttcggcttcgtcaccttctccacggaggatgcgatgcggaacgccatcgagggcatgaacagcacggagctggactgccgcaacatcaccgtcaacgatgcccagtcccgcgggggc

SEQ ID NO: 75877 - DNA, 406 bp, Zea mays
atggcgtcgtccatgctctccgctaccaccgtgccactccagcatgggggcggcctgtccgagttctccgggctcaggagctccgcgtcgctgcccatgcgccggaatgccacctccgacgacttcatgtccgccgtctccttcaggacccacgcggtctgcacgagcggcgggtcgcggcgggcgccgacggaggcgaagctgaaggtggccatcaacgggttcggccgcatcgggcgcaacttcctgcggtgctggcacgggcgcagcgacgcctcgcccctcgacgtcatcgccatcaacgacaccggcggtgtcaagcaggcgtcccacgtgctcaagtacgactccacgctcggcatcttcgacgccgacgtcaagcccgtcggcgacaacgccatctccg

SEQ ID NO: 75878 - DNA, 185 bp, Zea mays
ccatcctgtattattctgttccagggtttcacctttatcgtcagtgtgtggtcaggtttcaacccttctcagaacaaccccctcccagaaaaaaaacaaaggaagaagtttgtgtccaggtttcagaatcccctgtctgtaattaccattttgcatgacaataatgagatactgtagatattaat

SEQ ID NO: 75879 - DNA, 391 bp, Zea mays
ataacgttggaatgggcaaggatcacacactcctttctttgatacatggactcgtcaagtttgataagtatgggccggacaagaaaaaggttaatgtttacccatatgagaacgatcctgaaaacccaaacagttacagagcaaggaatagagagtacttccgcatgcggcgtgaacagcacaaggcgagagcggaaggcgccgctgagcctcagttggtatcacctgctgttgatgaaaactctgaggtcagcgctgactgctgataagtttcctgtgtggtgtttctctttttcacagcccttgttacactttttcatccttaattgtaagatcatatgatctatcaaggtcatacttacatctgttgtttacatcaatggatatgttc

SEQ ID NO: 75880 - DNA, 448 bp, Zea mays
cactgtccagtgcgcgcgtcaagcttgcttagctagccgccatggcctcgctcgccgccgtctccgtgaagcccgtggccatcaagggtctcgccggcagctccatctccggaaggaagctcgccgtcgccaggccgtcggcccgctccatccgcaggccccgcgcagccgccgtggtggccaagtacggcgacaagagcgtctactttgacctcgacgacatcggcaacaccaccggacagtgggacctctacggctctgacgcgccctcgccctacaacccgttacagagcaagttcttcgagacgttccgggctccttcaacaacagaagtctgctgcccaagttcctgctgctgggcggcggtcaagtctggcctacgttagcgcgtccgcgtcacgggcctcctgccgataactaggggactcaggaaccgccgaaccggggc

SEQ ID NO: 75881 - DNA, 429 bp, Zea mays
ccccagccccactctctccatctagctccctaactgcaccggccgccacaccaccccgaccggaccctccacaacaatggccaccgtcctgggcagcccccgcgcgccggccttcttcttttcgtcgtcctccctccgcgccgcgccggcgcctaccgccgtggcgctgcctgcggccaaggtgggcatcatgggccgtagcgccagcagcaggcgcaggctgcgcgcgcaggccacctacaacgtgaagctgatcacgccggagggggatgtggagctgcaggtgcccgacgacgtgtacatcctggaccaggccgaggaggacggcatcgacctgccctactcctgccgcgcggggtcctgctcctcctgcgccggcaaggtcgtctccggctccgtggaccagtccgaccagagctacctcgacga

SEQ ID NO: 75882 - DNA, 427 bp, Zea mays
caggcacggcgacttcttctctgccctgctcaaggctcagccgcagttcctcaatgactggaaggccaagctctggtcacggttcttctgcctctcggtgtatgtgaccatgtacctgaatgactgccaacgcactgcattctatgagggaattggtctggacaccaaagaattcgacatgcatgtgatcatcgagaccaaccgcacaacggcgaggatcttccctgctgtcctagacgtcgagaaccccgagttcaagatgaagcttgacaggatggttgagatcaaccagaagatcattgccgtcggagagtccgacgaaatccccctagtgaagaacctgaagaggattcctcttgtcgcctctctggtgtccgagatcatcgccgcatacctcatgccccccatcgagtctggctcggttaat

SEQ ID NO: 75883 - DNA, 445 bp, Zea mays
cccacgcgtccgggtgggttggcttctcctccccctccggttcgggttcgggttcgtgaggttctccggggttcggtttcgtgggtgggcggatcgagatggcggcgtcggatgttgagtaccgctgcttcgtcagcggcctcgcctgagccacggacgaccactccctccacaacgccttcagcacctacggcgacgtcctcgagtccaagatcatcctcgatcgggagacgcagaggtcacgcggcttcggcttcgtcaccttctccacggaagaggcgatgcggaacgctatcgacggcatgaactgcaaagagctggactgccgcaacatcaccgtcaacgatgcccattcccgcggaggccgtggaggcggctgctgaggctacggtggtggccgtggaggcggcggctacggcggtggcgggcgccgtgatggcggcgg

SEQ ID NO: 75884 - DNA, 342 bp, Zea mays
cttgctctgatagcttgctccaggacgtacgtacgtacgtagatcgatccatcgatcgctagctagctgacgaccatggcgtccctctcctctgccgccatcaccgccccttccttcacggccgcgcccgctcgcgcagtggtcagcaggaggtccttcaccgtgcgtgcctctctccgcaaggccactgccaccgccgccgtggccgttgccgccagcgtcctgcttgccggcggcggcgccatggcccaggaggtgctgctgggcgcatgcgacggccggctcgtcttcgagcccagccagttcagcgtcaaggccggcgacaccatcaccttcaagaac

SEQ ID NO: 75885 - DNA, 442 bp, Zea mays
gacgacttgtttcattgattcttgaagagatcgagcttcttttgcaccacaaggtcgaggatgtcttgcaactgcggatcaagctgcggctgcggctcaagctgcaagtgcggcaagaagtaccctgacctggaggagacgagcaccgccgcgcaggccaccgtcgtcctcggcgtggccccggagaagaaggccgcgcccgagttcgtcgaggccgcggcggagtccggcgaggccgcccacggctgcagctgcggtggcaactgcaagtgcgacccctgcaactgctgatcacatcgatcgacgaccatggatatgattattatctatctagcttgtggtggtggttgaacaataataagcgacgccgagctggctgccatacatacgtattgtgtggtgtgtgtgagagagagagaaacagagttcttcagtttgctat

SEQ ID NO: 75886 - DNA, 425 bp, Zea mays
  unsure (1)..(425): unsure at all n locations
cggacgcgtgggatcttgcagcaggcggagccgcccgacccaatccgtgcgtgtgttggtcgagatggctacaacagcttacgctcccatggcgagccaggtgatgaagagcagcccggtgcactcgaggccgaggggcctgtcaggcgctgcgctcacgcggccccggccccggttcagcgtcgtcaaggccgccatccagcccgagaaggcaacgtaccaggtggtgcagcccatcaacggcgacccgttcatcggcagcctggagacgcccgtcacctccagcgcgctcatcgcgtggtacctctccaacctgccggcctaccgcaccgccgtgagcccgctgctgcggggcgtcgaggtcggcctcgcncacggctacctcctcgtcgggcccttcgcgctcaacggcccgctccgcaaca

SEQ ID NO: 75887 - DNA, 333 bp, Zea mays
gtcggattctagggtcgactcacccatccgctctcctcagccgccgtcatcgccccttccttcgccgcacgagtgccaacccgcgacgtggtcactaggaggtccttcaacgtgcgcgcctctctccgcaaggacaacggcaacgtcgccatagcaatcgctgctacccgcgctggtgccggacgtgccatggcccaccaggtgcagatggccgcatgctacggccggctcgtcttcgagcccagccacttcaacgtcaaggccggcgacaccatcacattcaagaacaacgccagcttctcgcacaacgtcgtcttcgactaagacgatgtg

SEQ ID NO: 75888 - DNA, 439 bp, Zea mays
ctgagctcacgccagtagatatgaaggccacgtcgtcgcccgtggctgccgccatcctcgcagcaccttcctccgccgccgtccgtaatcctcaagcctctgcctcgtggcgcatcgaatggctgcagcacgggcaggcccgacgtgcttgcctggacttggctgagcgcgtgtctgcagctggcgctggggcatgtgtgcggagcggcgcgtgcggcagaccaggaatacgtgagcgatacgaacgaagtgatatggaacgtgcggtcgacgatcaatctggacaagtcggaccctagcgtggcagacgctgtggcggagctccgggagctgtccaactcgtgggtggccaagtaccggcaggataaatcgctgctggggcggccgtcgttccgggacatgtactcagcgctcagcgccgtgtctggccattacatca

SEQ ID NO: 75889 - DNA, 448 bp, Zea mays
  unsure (1)..(448): unsure at all n locations
ggaaatgcttgtctataagtacatggcaaaaggtgacctcacaaccgcactgcacaagaagtcagtggaagttgaacaggggttgcgctcattggattggataacgaggctcaagattgcaataggtgtggctgaggccttgtgcttccttcatgacgaatgcaatcctccgttggtccacagagatatccaagccagcagtgtgcttcttgaggacaaatttgaagtgtgccttgggagtctgagtgaaatatgcactcaacaaagtgcaggaagccaaagtttcttctctcggattctaagatcatcgaagttccttgacaagaacataccaggtccaccagctagctgctcatacgacatttactgtttcgggaaggttctactanagctaatcactggaaacttcggtgcgagtggctcaaacaacgcagattcagaagagtgg

SEQ ID NO: 75890 - DNA, 428 bp, Zea mays
cccacgcgtccgcccacgcgtccggcaagctcgatctactactactactagctggtacacatactagccagcctgccagccagcttgccatggcgcccaccgtgatgatggcctcgtcggcaaccgccgtcgccccgttccagggtctcaagtccgccgccagcctccccgtcgcccgccgcagcaccaggagcctcggcaacgtcagcaacggcggaaggatccggtgcatgcaggtgtggccggcctacggcaacaagaagttcgagacgctgtcgtacctgccgccgctgtcgacggacgacctgctgaagcacgtggactacctgctgcgcaacggctggataacctgcctcgagttcaacaagctcgggttcgtgtaccgcgaaaactccaacctccccgtgctactacgacggccgctaact

SEQ ID NO: 75891 - DNA, 236 bp, Zea mays
  unsure (1)..(236): unsure at all n locations
ccgggcgactacagctgggacaccgcggggctgtcggcggacccggagacgttcgccaagaaccgggagctggaggtgatccactcccgctgggccatgctgggcgcgctcggctgcgtcttcccggagctgctcgcccgcaacggcgtcaagttcggcgaggccgtgtggttcaaggccggctcccagatcntcagcgagggtggactggactacctcgggaacccgagcctcat

SEQ ID NO: 75892 - DNA, 433 bp, Zea mays
gcaaggcgttcggcgtcgactccggcgccgccaggatgacgtgctccctgtaggacgtcgacagcaggtgcgtcgacgccgcgaagctcgccggcttcgcgctcgccatctcggtgctcctcggctcgggcgcgagcgcggcgggcacgcacaagatgctgacctacgacgagatccagagcaaaacgtacatggaggtgaagggcacgggcacggcgaaccagtgcccgaccatcgacggtggcgtggcgtcgttcccgttcaatgccggcaagtaccagatgatgaagctgtgcctgcagccgaggtccttcaccgtcaatgcggagggcatcgccaagaacgcaccgcccgagttccagaagagcaagctcatgagacgccgcacgtacacgttggacgagatcgagggcccgctcgatgtctgctccga

SEQ ID NO: 75893 - DNA, 434 bp, Zea mays
ctccgcggcgctctccaccgccgccaatcccacccagctctaccggtcccgcgcttcgctgggcaagccggtgaaggggcttggcctgagcatgggccgcgagcgcgcccagcggagcattgtgtgccaggcggcgagcagcatctccgccgaccgcgtccccgacatggagaagcggaagctgatgaacctcctcctcctcggcgccatctcgttgcccaccgtcggcatggtcgtcccctacggcgccttcttcgtccctgccggctccgggaacgccggcggcgggacctacgcgaaggacaagctgggcaacgacatcacggtggaggcgtggctcaacacgcacggtcccaacgaccgcacgctcgcgcaggggctcaagggtgaccccacgtacctggtggtggagcaggacaagacgctggccacct

SEQ ID NO: 75894 - DNA, 365 bp, Zea mays
  unsure (1)..(365): unsure at all n locations
aacaaatctaggcttccaagcgagcgaaagcctacctccgccagccgatctaccaacatcctctccgccgattggaggcacctgcgaagatgccgcagcggcactcaaagaacaacaacgacctcgccttcttcacgtacgaggagaagcggaagctcgggtacggcacgcagcgggagcgcctgnggaaggactccatcaagcccttcgacgcctgctgcctctgcctcaagccgctcatcgacccgctctgctgccccaagggccataccttctgcaaggagtgcatccttgagtgcctcctcgcccaaaagaaggacatcaagcgtaagctagcagctcacgaggcccagaagaagcaagag

SEQ ID NO: 75895 - DNA, 448 bp, Zea mays
cgccaagatcctggggctggaggccatgatccgcgtgcagtgccacaagcgcaaccacccgtcggcgcggctgatgacagcgctccgcgagctcgacctggacgtgtaccacgccagcgtgtccgtcgtcaaggacctcatgatccagcaggtcgccgtcaagatggccagccgcgtgtacacgcaggaccagctcagcgccgcgctctacagccgcctcgcggagcccgggtctgccatgggcacgtaatcaatgaggagagctgctcagctcgcttgtggctgccggaataggcactgatactactgctactcaccagcggactgtcctgtcgtcgtggtcaccacggttacaacacgataggcagaaagactcacgagggatggagacgacgacgatgccggtgctgtataaactttagaatgaacgatggatggatgatgatac

SEQ ID NO: 75896 - DNA, 357 bp, Zea mays
gaggaggcccgccgccggcgtcacgtacgtggagggcatgaacgcctacagcggcctcaaggggctcaacaaggtgaccatgctcggggtgcgcaagaccgccgactactccttcgccaaggtcgtggcgtcgctcagccccgcgggcaggaagcggcgcggcggggcgttcggcgcccagatgaacgccgccgccgagatcttcaggatcgccgccaccatgagcggcctcgtgctcgtcggcgtcgccgtcggcttcgtgctgctccgggtggaggccgccgtcgaggaggccgagtagggcgctcgcgcctgcttcataagccgtgatatatatataaaaacgtgatgtatgct

SEQ ID NO: 75897 - DNA, 435 bp, Zea mays
cgggatcatgttcctctccggcgggcagtcggaggtggaggcgacgcagaacctcaacgccatgaaccaggggcccaacccgtggcacgtgtccttctcctacgcgcgggcgctgcagaacacctgcctcaagacctggggcggccagccggacaaggtcaaggcggcgcaggacgcgctgctgctgcgcgccaaggccaactccctggcgcagctcggcaagtacacctccgacggcgaagccgccgaggccaaggagggaatgttcgtcaagaactacagctactaattaatcgcccggccatcacccgggataccgccgcgcctccgagagatacgtgtgtactgatcatggttaagcacgtactccgatccattcgcatcccatgaagccatgataatgatgatatgatccatggaccatgcatggtgctc

SEQ ID NO: 75898 - DNA, 446 bp, Zea mays
cggacgcgtgggcggacgcgtgggcacccccacaacccgaagcagcgaaagctcccctaaccctctccgcgcatccgatcgcaaggaagaagagggagatgagctactacgggcagcagccccccgtcggcgtcccgccgcagcaaggctacccgggcaaggacggctacccgccagcggggtacccgccggccggctaccccccgccggcgcagggctaccctccgcagggctacccgccgcagtacgcgcagccgccgcctccacagcagcagcagagcagcgggccttccttcatggagggatgcttggctgccctctgctgctgctgcctcctggacgcctgcttctgagagtgagaggggccgaccgacggattcgacacggcgacaagtgaaactactagctttctatgcgagggagagagagagagagctggaactggg

SEQ ID NO: 75899 - DNA, 435 bp, Zea mays
gcacagaggacgacgcggcagcgaggcggaagcaaaggaaaggggatatgtcgaggccgcccaacaggagcgacgcgcacctctccgccgaggacgaggcggcgctggaggccgaggtgcgggagtactacgacgacgcggcgccaaagcgccacaccaagccctcccgcagcgagcactccgccgcgtacgtcgacgcgctcgtcccggacgtcggcggcaactcccacccggagctggacaagttccaagagctggaagcccacaccgagaggttggtgtacgagggcgccaatgtgggagatgagttcgtggagacggagtactacaaggacctcggcggcgtcggcgagcagcaccacacgaccggaacgggcttcatcaagatggacaaagctaaaggcgcccccttcaaactgtctgaagattccaatg

SEQ ID NO: 75900 - DNA, 343 bp, Zea mays
caagaccaacatcgcttccaggcccaaggaggagaagaagagcctcaatgagctcaccggcaagctcttcagcaccatcgaggatcttgaccatgccgcgaagatcaagagcacccctgaggccgagaaatacttcgcagcaatcaaagatgcgcgtggcgatgttctcgccaagctaggctagacgcaatggctaataatggccatgtaatttcggacttgtgtttgttcatatggacccggcaaggcaatgtaccagtttctgttgatattgtatcaggaagcacttaactacaatgctaacctgagtccttgacaaattgctgtaaaaagggcggccgct

SEQ ID NO: 75901 - DNA, 329 bp, Zea mays
cgcacatctccggggtcaacttcgacctgccgcacgtcatctccgaggcgccgccgttccccggcgtgcgccacgtgggcggggacatgttcgcgtccgtgcccgccggcgacgccatcctcatgaagtggatcctccacgactggagcgacgcgcactgcgccacgctgctcaagaactgctacgacgcgctgccggaaaatggcaaggtcatcgtcgtcgagtgcgtgctgccggtcaacacggaggccacccccaaggcgcagggcgtgttccacgtcgacatgatcatgctcgcgcacaacccaagcggcaaggagccgtacgag

SEQ ID NO: 75902 - DNA, 429 bp, Zea mays
gccagccgtctcgcgagggtttctccgccgccgccgccgccgccatgcctcgccgcagctcaggaaggtctgcgccacgcgcagctccccgtgctgctccagtgaggaacccgccacagccagcacgccaggctcctcctccagctcctgttcgagatggtggtggctccatgtttggaggaattgggtccaccattgctcaaggtatggcgtttggcacgggtagtgccatggcacacagggctgttgatgctgtattacgtccccggaccattcagcatgagactgttgcctcagaagctgctgctgctgcccctgcccctccattgatgaatgcggatgcttgcagcatccattctaaggctttccaagattgtctcaacaactatggcagcgagatcagcaattgccatttcaacctagacatgc

SEQ ID NO: 75903 - DNA, 379 bp, Zea mays
cccaagcgtccggggagacccgcgagaggctgccgtgtacggaccgtcgactcagcgactgcgaacgatggataacgggatggccgggatcggaccgatcaggcacgactgggagccggtcgttgtgcggaagaaggcacccaccgccgccgccatcaacgatgacaacgccgtcaacgccgcgcgccgcgccggtgcggagatcgataccatgaagaagtacaacgctggtacgaacaacgcggcatccatcggtacatcgctcagacacaagcgcctcgacgacgacaccgaaaacctcgcgcatgagctacttccaagtgatctgaataataatctcatgcaagcaaagctcgataagaagctgacacatgcacaa

SEQ ID NO: 75904 - DNA, 403 bp, Zea mays
cggacgcgtgggcggacgcgtgggcgggaccacgggcccagcctacaacattgacaatctggtcaagtctctcaaattcgtcaccaacaaacgcgcttacggaccgtacggcagggacgagggcaccccgttccgtgtcaaggtgatgaacaacggccacgtcgctggcttctttggccgctctggagattgcctggacgcgatcgggctctacgtgaaccccaactaataactaaaacgatggatcggatcatctgcatgcatgcatatgcagtatgcatgctgcttgcctgcctgtaacgaatatgaatgcataaaataacgcccctgctgctcccatgcatcagcagtgtgtaccactatgttatatatatatatactgtatttcgctaaaaaaaaagaa

SEQ ID NO: 75905 - DNA, 450 bp, Zea mays
  unsure (1)..(450): unsure at all n locations
acgccatggcggagaacaacgtcatgttcgagggcatcctgctgaagccgtccatggtgacgcccggcgcggaggccaaggacagggccaccccggagcaggtggccgcgtacaccctcaagctcctccaccgccggatccccccctccgtgcccgggatcatgttcctctccggcgggcagtcggaggtggaggcgacgcagaacctcaacgccatgaaccaggggcccaacccgtggcacgtgtccttctcctacgcgcgggcgctgcagaacacctgcctcaagacctggggcggccagccggacaaggtcaaggcggcgcaggacgcgctgctgctgcgcgccaaggccaactccctggcgcagctcggcaagtacacctccgacggcgaagccgccgaggccaagganggaatgttcgtcaagaactacagctactaattaatcg

SEQ ID NO: 75906 - DNA, 504 bp, Zea mays
  unsure (1)..(504): unsure at all n locations
gcgtaccggtactctaggctcgacccacccgtccgaatcaccaagaggagtgtgcttgatcgangggtgagtgagggttgactaagcacaccatcgtcatggacggcggatactacggcggtcgcgatcagcgctacagcggcgggtactacggcggcggtggcatcgcaacgccggggtacgctccggcggtcccgtacgggatgtcgcaggtgaacatcgacggcaacgggtgcgggcgggcgctgccgccgcagccgaccgtgaacgtgtactgccgcgccaaccccaactacgccatgagcgtccgcgacgggaatgtggtgctggcgccggcgaaccccacggacgagtaccagcactggatcaacgacatgcggtggagcacgatcatcaaggaccaggaaggttacccggcgttcgcgctggtgaacaaggcgaccggggaggccatcacgcactcgctggggcagtcccacacggtgcgcctggtgccctacaacc

SEQ ID NO: 75907 - DNA, 491 bp, Zea mays
gtaccggtacggtagtctcggcccgcccgtccggttgagcaaaccctacatcaacaccctgaacgtgttccaggcctacacgcagaagcggataagggaccccagcttcaaggtgacgccccagccgacgctgtccaaggagttcgccgacgagaacaagcccgccggactggtcaagctgaacccggcgagcgagtacccgcccggcctggaagacacgctcatcctcaccatgaagggcatcgccgccggcatgcagaacactggctatgcggcttctcttcactcacctgcagagtgcatcgcaataatcaacttccggatggtggcgttttgtcagttttggatggcaatgccgaactggcagcgtctgttttccctatgcagatgtaatttcctgcctcattataatcacgcctgttgtcaagtccaagtggaaaatcttggcatattatacatagtgtaataatcaacatcctacaatctgcatg

SEQ ID NO: 75908 - DNA, 430 bp, Zea mays
caaggaccgcaactgggccaggggtgtccggagcaccaagtaccctggtgttccttacaccttcttctcgcagaggcaggggtgcaaggttactctgtaccaggacgctcatgtcccggacaacttcgttcccaggatcccgctcgccgatggcaagaactacgagccacacaggtgctgggaggatatctttgatgccataagcaaggcccagcatctgatttacatcactggctggtccgtgtacaccgagatcaccttggttcgggacaccagcaggccgaaacctggaggcgatgttactcttggggagttgctcaagaggaaggccagcgaaggtgtccgtgtccttatgctagtgtgggatgataggacttcggtcggcttgcttaagaaggatggcttgatggctacccatgatgaggagact

SEQ ID NO: 75909 - DNA, 454 bp, Zea mays
cccacgcgtccgcccacgcgtccgcccacgcgtccgccgtcggttcacttctccaggtaaggaaagggttcgtactcatggcgccgccgcagccaaagtcgggcctcttcgttggcatcaacaagggtcatgtcgtcaccaagcgcgagctgcctccccgcccgtgccaccgcaaggggaaatcaacgaagagggtgtctatggtcaggggcctgatcagagaggttgctgggtttgctccttatgagaagcgtatcactgagcttctgaaggttggcaaggacaagcgtgccctgaagcttgctaagagaaagcttggaactcacaagagggcaaagaagaagagagaggagatggcgggcgtcctcaggaagatgaggtcggctggtacgcacactgacaaaaagaaatagagagcatttcaagttcatggagctggctgccagagattatg

SEQ ID NO: 75910 - DNA, 403 bp, Zea mays
cccacgcgtccgcaaccatggcggcaaccggaatgtccccctccccctcggccgcaataactcgccacatccatgctcgtcgttcctgtgctgctgcttccttgtccctccgccgctcgggcttcctggggcgcgtcgtgctggccgcggtgccagtggccgtggacgccacccggcgccgccgcgtctccgtgtcggtgcggatggcctgggacggtccgctctcgtctgtgcgcctcatcatgcacagcaggaacgcgaagctgagcgagaagctcaaggatcacatcgaggacaacgtgggtcgggcggtgtccaagcactgccacctggtccgggatgtagacgtgcgcctctccgcgcgcggcggctatctcggccggggccccaatacgtcgcgctg

SEQ ID NO: 75911 - DNA, 441 bp, Zea mays
cccaaatcgcatctgcttccagagccccccgccgccgctgcgccctcatctcggtcctgccgtccgtcaaggtaaaaggacagcatggtgagggtcagcgtgctcaatgatgctctcaagtccatgtacaatgctgaaaagatacggaaacgtcaggtcatgatcaggccgtcatccaaagtgatcatcaagttcctgacggtcatgcagcgccatggttacattggcgagttcgagtacgtggatgaccacagagctgggaagatcgtggtggagctgaatggaagactgaataaatgtggtgttattagcccacgttttgatgtaggtgttaaggagatcgatggatggacagcgaagcttcttccatctcgccagtttggctacatcgtcctaacaacttctgctggaattatggaccatgaggatgcccgccgtaag

SEQ ID NO: 75912 - DNA, 425 bp, Zea mays
acgcgtacgccaacttcggagtctggcccggcgacaagctgaccggagtgaccggcggcgaccaggtcgctgccgcgatgggcatctacggtcctcgcacgacctacattgtcgccctcaaggattgccctgggacgcacgagttcctcctcctcgacgaaggtaaatggcagcatgtgaaggacaccacgaccattggggaagggaagatgttctctcctgggaatctgacggcgacattcgataaccctgagtacgacaagctcatcaactactacgtcaaggagaagtacacattgcgctacactggtggaatggttcccgatgtcaaccagatcatactgaatgataatggcatcttcaccaacgtgacgtccccgacggccaaggctaagctgcggctcctcttcgaggtggcgcccctg

SEQ ID NO: 75913 - DNA, 408 bp, Zea mays
attcaagtctcgctacgtagcagtgcaataaaaaaagcagccgcaatggcgagcagcaccatggccctctcctccacggccttcgccggcaaggccgtgaacgtgccgtcgtcgtccgccttcggcgaggcccgcgtgacgatgcgcaagacggcggggaaggccaagccggcggcggcgtccgggagcccgtggtacggccccgaccgcgtgctgtacctgggcccactgtccggcgagccgccgagctacctgacgggcgagttcccgggcgactacggctgggacaccgcggggctgtcggcggacccggagacgttcgccaagaaccgggagctggaggtgatccactctcgctgggccatgctgggcgcgctcggctgcgtcgtcccggaggtggtcgcccgg

SEQ ID NO: 75914 - DNA, 343 bp, Zea mays
atcgaggtgaactcactgaggccagtctggtcaaggcgtagttgttggtagacacgccggcgtagttcaccttgttgaaccgcaccaccaccgggtaacgggtgttaggatcctgatcgacggtgacgacgttgccgatcccgttgtaccagtaggactcccgcctcaggatcttcaccttggcgcccctcttgggcccgatcggcggcggcttctcggccttgggcttggtggccacggcgccctccccttccgccgtgggcgccggctctgccggggactcctcatcggcccggaccacaagcctcctgccaagccggttgggcgccgaggcgaagctgac

SEQ ID NO: 75915 - DNA, 484 bp, Zea mays
  unsure (1)..(484): unsure at all n locations
cgcgggtcgacccaagcctctacactagagtcagtgagtagccagaaccctgttcgccacctcaacccgcgcactcttctcccgtccttcgctcattctccgccagcagtccacaaaagccatgtctgtccctactttgctctctgtcgctgacctcaagagcaagctcggtgggcccgtagtggtcgatggcagctggcacatgcccgccgccaacagagacccgtacaaggagtttaaaggaaacggccatatcccaggagcacgctactttgatattgagtccatcaaggacaagacgagcagccttccccacatgatgccgtctgcggagcaattcgcacagcaagtcggagagctaggcatctcgaacgatgatcatgttgtcgtatacgacactgtcggcttcttctctgcaccacgcgtatactggatgtttaaggcatttgggcacaagaaagtgtctgtnttggatggtggattc

SEQ ID NO: 75916 - DNA, 457 bp, Zea mays
  unsure (1)..(457): unsure at all n locations
gtggagctggtcatactcccgctgggcgtcctcaagtccaactctgtcgcgttctcgccccctttgcctgagcggaaacagacagccattcaccggctcgggttcggcaccatggtcaagattgtcctgtacttcccgacctgcttctggcccgaggacaagcacttcatcaactttttacccatacccaacagtatacccaatcctaaactctgtcgccacctcaacaggcgacagatggcggccttgaaaacatacatgaatgatctcgccaactatacgtcgctcatgcccatccacggggcacccattctgattgcatacgcagccaacgactcggccgaggtatttggaaagttgacggaccaggaggctatggaggtacttgtttgccagctgtcgcattattttgacgtccttgtcaagggagntggcgccacaaggcccactcgcacgt

SEQ ID NO: 75917 - DNA, 474 bp, Zea mays
cgtagtccgacccaagcctctacataaagtcgcttgaccaccgcttcacttccctccattccttcgccctatcactcaagctgtagccaattcaaacacctccaccccactctcattcctctctgtcatacccgcacgcactttcgcaaggaccttgacttctccttctgtacatattcttatttcctgtaaagcgtttaatcgcccgccatgtcgaccccctctcgccgccgtctgatgaaggacttcaagcgcctgcagagtgaccctccaggtggcatctctggtgctccttgctctgataatatcatgctgtggaatgcagtcatctttggtccaggtgatacgccctttgaagacggcacattcaagttgctgctccagtttgacgagacgtaccctaacaaaccaccgacggtcaagtttgtgtccaagatgtttcatccgaacgtgtatgccaacggcgagctgtgt

SEQ ID NO: 75918 - DNA, 466 bp, Zea mays
gtcgacccgcccgtccgatgatggtcagccacaagattgccaagaacggccccgctgatgagatcgagctctctgttgctcaggctctcttcgatttggcgaacaacgtcgctgacttgaagaaggagctcaagccccttcagatctccagcgccaaggaggttgagaccggcaacggcaagaaggccattgtcatcttcgtccccgttccccagctgaaggccttccacaagatccagcagagactcacgcgcgagctcgagaagaagttctctgaccgccacgtcgtctttgttgcccagcgtcgcagcatggctaagcccatccgcacctcccgtgccaagcagatgcgtctccgctcccgcaccctcacctcggttcacgagaagcttttggaggacttggtctaacccaccgagattaccggcaagcgtacccgtgtccagactgaacagaagcgcatcat

SEQ ID NO: 75919 - DNA, 479 bp, Zea mays
tcgacccaggcctccaaattgtctcaaatgattactcctctcaagaagcacaccatcgtgaagaagcacaccgctaccttcaagcgtcaccagtctgaccgctacaagaccgtcaaggagtcatggagaaagcccaagggtattgataaccgcgttcgtcgccgtttcaagggccagattgccatgcccaagattggttacggtaacaacaagctcacccgccacttgatgccctctggcttcaagaagttcctcgtgtccaacattgccgagttgaacctcttgttgatgcacaaccgcacctttgctgccgagattgcccacaacgtctcgtcccgcaaccgcatcgccattgtcgagcgtgcccagcagctcaacatccgcgtcaccaacgccaacgcctcgtgtcagaacccgatgcttaaatatcttcgtctggaaccccgcccccccttcctccctcctacattttttttttg

SEQ ID NO: 75920 - DNA, 469 bp, Zea mays
aaccctctagagtaaatcgtacgatcacgcacatcaaatacaaccgcgagggagatttgctcttttccgtgtccaaggatcatgtcgtcaatgcctggttctcgcacaatggagagcgtctcggcacatacgagggacacattggtgctgtctggaccgtcgatgtcaactccacgacgacgctcttggtctctggttctgccgacaacactgccaagctctgggatgtttcgaacggaaagtgcttaaagtcatgggagttcaacactgccgtcagacgtgtgcagttctcagaggacgacaagatgatccttctcgtcactgagccccgtatgggtttcctcgccaccctccagatcttcaacgtcgagaacggcgccacggagaccgtctcctcggagcccttgaccgtcattcatcccgaacgtcccaagatcatcgtcgctgcatggggagctctcatcaaata

SEQ ID NO: 75921 - DNA, 459 bp, Zea mays
  unsure (1)..(459): unsure at all n locations
tgcccgtctcgacgataaacatcctccgtggctcggcgccggatagccctaacaagagcggtgcgtcctcgagtgctaagcattcaatcgcatattgtttctggttactgtgggaacaaagcggcgacatttccgctgcagctgcttggattcgatgttgatgtcatgaacaccgtcagcttctccaatcacactggatatccgtcgtggacaggcgaaaaggcaacaggcgaacaacttaccaagctctttgaagggcttgaggcgaatggcctcgtagagtacacacacattttgactggttatattggtagtgcccagaatctgacagctgttacagagattatttcccagctgaaggcacagagcaatccgttctttgttctagatcctgtcatgggcgataacggacaactttatgttcaaccagatgtgattccaatttacanggagcttatg

SEQ ID NO: 75922 - DNA, 434 bp, Zea mays
tagagtgattcatattatccaagaggactggggtgcatatcagcaggccaacacgctctttgcaaaggctatcacggagattgttcgcgatggcgatctggtctgggttcaggattaccacctcatgctgctgccccggcttttgcgggaagaggtccacaaccagcgtgagagcgatcagcctgtcaagaatatcaagattggattcttcttgcatacgccattccccagtagtgaggtctacaggattctgcctgtgcgcaaagagatcctgctcggggtcctgaactcggatctgattggcttccacacctacgactatgcgcgtcacttcctctcttcctgcactcgcatcctcggtctttccaccatgcccaacggcggtcgacttttaacgggtccctatgcccaagttcggcacccttccccattgg

SEQ ID NO: 75923 - DNA, 439 bp, Zea mays
catcccgcccacgctggcgagtgaccaagtggtgtcgagtcttggagccatgttctttttctgctccatgatggtcatctttatttgcgtgctcaaccagatcgtcaccgagaaggagctccacctccggcacagcatgcagatgatgggcctcaagacactcgtctactggttctcgtggtggctctcgaacgctgtcctggtcctgatcagcgcagtcgtcatttgcggctttggaatcgcgttcggctttagcgtgttcaagaacagcaactttttggctcttcttgtcacctttttcctctttggactgtccatggtgaccatggcgttctggatcaccaccatggtcaaggcaagcaggaccgccatcgtgatcggcatctttttgttcaccctcggaatgctccttgagagcatggtgttctcgaacagctac

SEQ ID NO: 75924 - DNA, 452 bp, Zea mays
tcgaccaagcctctaatcaaattcgaacaaattgaaaaggctttccagaagcagcatggtatcttccaaaacgccaaggttgctggcaagaagtccgtcaagaacaaccgctggtacaaggaggttggtctgggcttcaagacccccagggaggccattgagggacactacatcgacaagaagtgccccttcaccggtgatgtttccattcgtggccgcatcctcactggtgaggttatctccaccaagatgaagcgcaccatcgtcatccgtcgcgagtaccttcacttcatctccaagtacaaccgttacgagaagcgccacaagaacttggccgctcacttgtctccttgcttcattggagtccaacagggtgactctgtcactgttggtcagtgccgccccctttccaagactgtccgcttcaacgtcctcaatgtccagaagaagat

SEQ ID NO: 75925 - DNA, 459 bp, Zea mays
  unsure (1)..(459): unsure at all n locations
cggacgcgagggacaatatgaagttgaacattgccaacccagccactggctgccagaagaccatcgacttcgatgatgagcgcaagacccgcatcttttacgacaagcgtatctccgctgaggttgccgtcgactctctcggtgacgagttcaagggctacgtcttccgcatcaccggaggtaacgacaagcagggtttccccatgaagcagggtgtcctcctcccttcccgtgtccgcctcttgttgtccaagggtcactcttgctaccgcccccgccgcaccggtgagcgcaagcgcaagtcggtccgcggatgcattgtcggttccgacatgtcggtcctctctgtcaccattgtcaagcagggtgagcaagacctcnccggtcttactgacaccactgtccccaagcgtctcggacccaagcgtgccaaccacatccgcaagttcttcaacttga

SEQ ID NO: 75926 - DNA, 495 bp, Zea mays
ctgggactcgtgggtcgacgcaagactctacactgagtcgtatgtacgcatcatgaccgacgtgaccattcctgaagactacctgcctattgtcgatggcctcctctggaagaagatcctcagggagggatcgggtgaatcgcccagcataaagtcgaatgtcaatgttcactatgtcggaacccttttcacaaccggagagaaattcgactcctctcgcgatcgctcctctcccttcaacttcaaacttggcgttggccaggtcatcaagggttgggacgaaggtgtcaagaccatgaagattggagagctggctgaactagtgtgcgcacctgaatatgcctacggagctcaaggaagccctcccaagatccccggcaactctactctcaagttcgaggttgagctgcttgacttccaggagtccgctgacaaacccactgccaagctggctttggcccagaagaagaacgatcaacgaaatgcatctttcaa

SEQ ID NO: 75927 - DNA, 458 bp, Zea mays
  unsure (1)..(458): unsure at all n locations
ctttatataaccatgctcagatctctcagccgcgctgcccgccccgctgccatcgccttggcccgcagctcccctgtggttcgcgccaacgttggtgccttctctgccatccgcaactacgccaccgccaagcccgccacctctgaggtcacctccatccttgaggaccgcatcagtggccttaactcgtccgttgacattcaggagactggtcgtgtcttgtccattggagacggtattgcccgtgtgtatggcttgaagaactgccaggccgaggagatggttgagttctccagcggagtcaagggtatggccatgaacttggaggccgataacgtcggtattgtcgtcttcggtaacgatcgtctcattcgtgagggtgataccgtcaagcgtaccggtaacattgtcgatctcnccgtcggcgaggctcttttgggccgtgtcatcgatgccct

SEQ ID NO: 75928 - DNA, 458 bp, Zea mays
gcaatggataacattcaagccaaagcccgctactacaatgcgcaactggacaaggagctgagcaaatacccgcaactgaatcagttccaggccgcgacgggtgttcccaaaacctacttggccttaggcgccggaacgttcatgactgcaatgatatttttcaactttgcgggaaagcttctctccaacgtcctcggttgggtctaccctgcctatcgctccttcaaggccctggaaacacctagcaaggatgatgataagcaatggctgacgtactgggccgtatatggattcgtctccattctcgagtcattcacggacgtccttctatactggttcccattctacttctttctcaagtctgtcttcttgctttggctcatggtaccctcatttaacggtgccgccacgatttaccttagaatccttcgtccgttcttggttcaacatcgtggcga

SEQ ID NO: 75929 - DNA, 395 bp, Zea mays
tcgtcccaagcctctacagtgagtcgtactatcctcacgtagaagcttttttccctcctcccctttgtacctctcccctgccctcgttgactgacaagaaaaagttgagcaaccatggttaactttactattgaccaaatccgtgccttgatggacaaggttgcgaacgtccgcaacatgtccgtcattgcccacgtcgatcacggaaagtcgaccttgacagactccctggtgtcgatggctggtatcatctcccaagcccgtgccggtgaagcccgctttacggacacccgtcaggacgagcaggaccgtggtatcaccatcaagtcaacagccatctcgctgttcttcgagatgacagaagatgacctcaggggacgtcaagcaaaagaccg

SEQ ID NO: 75930 - DNA, 440 bp, Zea mays
cggaagcgtgggtctcacccgtcctagtccccttcaacccccctctttgacaaagacaacaaaccatggctgctgctcccagtgtgaggacgtttactcgggccgaggttttgaatgccgaggctctgaatgagggcaagaaggatgccgaggcacccttcttgatgatcatcgacaacaaggtgtacgatgtccgcgagttcgtccctgatcatcccggtggaagtgtgattctcacgcacgttggcaaggacggcactgacgtctttgacacttttcaccccgaggctgcttgggagactcttgccaacttttacgttggtgatattgacgagagcgaccgcgatatcaagaatgatgactttgcggccgaggtccgcaagctgcgtaccttgttccagtctcttggttactacgattcttccaaggcatactacgcc

SEQ ID NO: 75931 - DNA, 466 bp, Zea mays
caaacccatatcctcgacatcctgacccagcaccctccactcccacaacccactcttataaaacacctttacaacatggactcttcaatcgagaacaagatcaaccgcgcccctgccgccaaagtcggaggcatgagagtcgccgcaccagaccaccccgtccccgttgtccgcaaggagcacgaacgcaagaaggccgactccgaggaggaaagcaacgaggatgagcgtgagctcgagaagacggatcggttcgagcacgagcaacagacccgcatggccgccgctgaacgccaggcaaagatgcagcagaaccagcccaagcacgagcccatcaacaacttccgtcaaaaccagaacatccaggtcaaccagcccatcctgcatacccacagcaagtccggtgccgctgcccagaactaagcaagtataatcactggaacgacgagcgcatgaacctgtattc

SEQ ID NO: 75932 - DNA, 459 bp, Zea mays
cccaacatgaagctgaccatcacccccaggtcaccaaagtcgcgcaaattccccattactcttgacctgaatggcacccccgctgaggtcaaggttgaggctgtgcaggccgccatcgcgaagcagttccctgagttctaccctgaccgccagcgtttgaccgtcgagaagactgctctggagaccggcaagactctggctgaatatggactcaaggatggcgactcggttgccttcaaggaccttggccctcagattagctggcgcacagtcttcttgatcgaatatggaggcccactgttgatccaccccctgatttactacctcccgtccttgttctacggcaaggactttacacacagctggatgcaaactgtcgcctactggatggtcatgctccatttcttgaagcgtgaatacgaaaccgtgtttgtacaccgattttcacatggaacgatg

SEQ ID NO: 75933 - DNA, 456 bp, Zea mays
cgacccaaccctctataaaggctcatgttgacatcttcacctgccccttggatgtcgcccaaaccgagaccaaacgaacagtcgtgatgcacaacgccaatgatatgcgtgattgcactaaaggagaggagaagcacatggagcagatgttgcaaggtatcgccgatgcatgtgtcaatgtcgtcgtcagtggcaatgatgtcggagagctcgcccttcactacttgaacagatttggcatcatggtcgtcaaagttctctcaaagtttgatctgaggagattgtgccgtgtcactggcgctaccgcgctggctcgtgttggtgcccctatggctgaagagatgggattcggcgacattgtcgagagtgttgaacacggaggtgaccgtgttactgtgttcagacatgatgatgagatttcatagactgccacgattgtcagtcgctgtgccaccc

SEQ ID NO: 75934 - DNA, 388 bp, Zea mays
caacagcatggactggatgtacgccaactgctcgaccacagcccagcgtggtgctctcgactggtggaagaagttccatgatgcctccaagcccatctttgaggagctgtacgagtctgtcgccaacggcaccgagaccaggaggtcgctcaccaagaactcagcccccaactaccgtgctgagctcgaggctgagttggccgagatcgccaaccacgagatgtggcgcactggcaagtctgtccgcaagttgagacccgagaaccagtaaaacgcatgcccaggccgactatccatttctcctttctagactgttttcctcattatgcgctttgcaattgtaccataccacactgaagtcagagaataaatgcaccttctgaacccc

SEQ ID NO: 75935 - DNA, 437 bp, Zea mays
cgggccgaggacctcactatacggcggacgacctttttttttttttttggagttagaatgctatgaattccaaaccagagaagattcaaataaaacagagactaaaaaggctgttcaaacagtaataattcttgcacatgaacactaaaccagaacgataacaggaaacaaagatacagtcagtactcagtagtttgagggcacctacggaaagcaagtaatactacagagggtagacgttccagtgcttaatgatgaaacatcatcagtacaagcaaacgtgtttttcatcatacaccgtatcactttcacaagtggctgcagtcattccgcagcataaggagattgacttcgagaagcagcatcaactttgcgcagaggagcagggctaccaggagatggggacctctcattgctacgcctttcacgagacatct

SEQ ID NO: 75936 - DNA, 413 bp, Zea mays
  unsure (1)..(413): unsure at all n locations
cgttccatcaccttctattcaccatgagcaacccgcgttaccccgccggcaactaccacaacaccaagcctgacggcacgtactactacacaaactcgtcaaaccccaactcgtactactacaacaacagcaacggctcctactactaccagaacgccgacggctccaagtactacaacaaccccaacaccggcacctcccgctacaccaccccgagtggctatgaaatcaacaccaaaggtggcagaaagtattaacgggctttcttttcgtggccaatggctctattaacctatgccataatctctgaggccacccaagcatgacaaaggctaaccctgcccgctatttacctgtatatcgaatanaacgacanacgaaaagaaaaaataaagccttcttgtcctacttca

SEQ ID NO: 75937 - DNA, 434 bp, Zea mays
aacaccctataaagagtcggacgacctttttttttttttttggagttagaatgctatgaattccaaaccagagaagattcacataaaacagagactaaaaaggctgttcaaacagtaataattcttgcacatgaacactaaaccagaacgataacaggaaacaaagatacagtcagtactcagtagtttgagggcacctacggaaagcaagtaatactacagagggtagacgttccaatgcttaatgatgaaacatcatcagtacaagcaaacgtgtttttcatcatacaccgtatcactttcacaagtggctgcagtcattccgcagcataaggagattgacttcgagaagcagcatcaactttgcgcagaggagcaaggctaccaggagatggggacctctcattgctacgcctttcaagagacatctcctt

SEQ ID NO: 75938 - DNA, 478 bp, Zea mays
gggccgaccagctcactattcgtcggacgacctttttttttttttttggagttagaatgctatgaattccaaaccagagaagattcaattataacagagactaaaaaggctgttcaaacagtgataattcttgcacatgaacactaaaccagaacgataacaggaaacagagatacagtcagtactcagtagtttgagggcacctacggaaagcaagtattactacagagggtagacgttccagtgcttaatgatgagacatcatcagtacaagcaaacgtgtttttcatcatacaccgtatcactttcacaagtggctgcagtcattccgcagcattaggagattgacttcgagaagcagcatcaactttgcgcagaggagcacggctaccaggagatggggacctctcattgctacgcctttcaggagacatctccttagaatgagaggccttttgcaaagcaaggcttcttgggc

SEQ ID NO: 75939 - DNA, 291 bp, Zea mays
aaccatttctttttttttggagttataatgctatgaattccaaaccacagaagattcacataagacagagactaaaaaggctgttcaaacagtaataattcttgcacatgagcactaaaccagaacgataacaggaaacaaagatacagtcagtactcagtagtttgagggcacctacggaaagcaagtaatactacagagggtagacgttccagtgcttaatgatgaaacatcatcaatacaagcacacgtgtttttcatcagacaccgtatcactttcacaactggctg

SEQ ID NO: 75940 - DNA, 416 bp, Zea mays
tcagtctcctaacacgactctaccagaccggctcccccattctctccctctttcagcaccctcgctctccctctcaatcctttgcaaacatgcgtgaagttatttccatccacgtcggacaggccggtattcaaatcggtaacgcctgctgggagctctactgcttggagcacggcatctcgcctgacggtaccgttgcctctgacaagcagtcttctcagtttgactcctcctccagcaccttcttctcggagactggtgccggcaagcatgttccccgtgccatctttgtcgatcttgaggagaccgttgttgacgaggtcagacgcggcacctaccgcagccttttccaccctgagcagttgatcagcggaaaggaggatgctgccaacaactatgctcgtgggcactacacc

SEQ ID NO: 75941 - DNA, 430 bp, Zea mays
ggagttagaatgctatgaattccaaaccagagaagattcaaataaaacagagactaaaaaggctgttcaaacagtaataattcttgcacatgaacactaaaccagaacgataacaggaaacaaagatacagtcagtactcagtagtttgagggcacctacggaaagcaagtaatactacagagggtagacgttccagtgcttaatgatgaaacatcatcagtacaagcaaacgtgtttttcatcatacaccgtatcactttcacaagtggctgcagtcattccgcagcataaggagattgacttcgagaagcagcatcaactttgcgcagaggagcagggctaccaggagatggggacctctcattgctacgcctttcaggagacatctccttagaaggagaggccttttgcaaagcagggcttcttggg

SEQ ID NO: 75942 - DNA, 394 bp, Zea mays
ctttcaatatgagcagcaaaattcaggtttcggccgtccgcgagagcgttcgcaccgtcaagctccagtccgaggagaagaagcgtaactttgttgagaccgttgagctccagattggactcaagaactacgatccccagcgtgacaagcgtttctctggctcggtccgtctccccaacatcccccgccccaagatgtcggtctgcattctcggtgatgcccttcactgcgaccaggccaaggagatcggtatggagtaccagtccgttgatgacgtgaagaagctcaacaatgacaaggagcagattagaaagctccgcaagaagtacgatgccttcctccgctccgaaggcctggatcaagccaattcccccgtctcttggggacctggtct

SEQ ID NO: 75943 - DNA, 469 bp, Zea mays
cacacgaccggtactcgttctcgggcccaagaccccactaagcgtcggacgacctttttttttttttttggagttagaatgctatggattccaaaccacagaagattcaaataacacagagactaaaaaggctgttcaaacagtaataattcttgcacatgaacactaaaccagaacgataacaggaaacacagatacagtcagtactcagtactttgagggcacctacggcaagcaagtaatactacatagggtatacgttccagtgcctaatgatgaaacatcatcagtacaatcaaacgtgtttttcatcatacaccgtatcactttcacaagtggctgcagtcattccgcagcataaagagattgacttcgagaagcagcatcaactttgcgcagaagatcatggctaccaggagatggggatctcgcattgctacgcctttcaggagacatctccttagaaaga

SEQ ID NO: 75944 - DNA, 421 bp, Zea mays
cttcaacaggaatttcttgaccatggagttctcactcttctaaaaaactggcttgagccattacctgatggaagcatgccaaacatgaatactcgatctgctgtactgaaattattagctgattttccaattgacttggaacaatatgaccgaagagagcagcttaagaaaagtggcctgggaaaggtcattatgtttttgtccaaatctgatgaggagaccactgcaaataggaaattggctaaggagcttgttgataaatggagtcgaccaatattcaacaagagcacgagatttgaagacatgaggagatatgatgatgaaaaagcaccttacaggcggccacaaatgaagaaaccatccagtaactccggaatgggatccagagatgatgatgttgaagctgacctttcacaacgca

SEQ ID NO: 75945 - DNA, 390 bp, Zea mays
cacacacaagacacacccccactcacccggcagggacgccctcttcgtcggcggaggccatggtttccctcaagccgcagaagacgctcgccgccggagtcctaaaatgtggcaaggggaaggtgtggcttgaccccaacgaggtctacgagatctcgatggctaactcgcgtcagaacattcgtaagctggtgaatgatggattcataattaagaagccacagatgatccactcaaggtcccgggcaaagatggcccatgaagccaatcagaaagggatgcactctggttacagttagcgcaagggtaccagagatgctaagctccccaccaagatcctttggatgcgcatgatgcgtgtcctcaggcgtctgctgcgcaagtatcgtg

SEQ ID NO: 75946 - DNA, 363 bp, Zea mays
gcacgcatgcaagaagcacacgcgagcttggacgagcacatctcgagatggttcgggctggaccagtccaagtaccagtgggcgctcaacgactattatgagaggaccgggcaggagatagatttgagcaacgttggcactcgttagcagcacagttgtaaaaattcagaaagcttgaaaaagtggattatttctagtttttatgtgtgtaactaagctggtgccgtgtcaagctgcatatagaatccttttggttgcgtgaagactgagttctctttttctgcacccggaagctcttggttgtaacaaatccatatttagcacctttattgtagcttcgttgtggataaaaaaaaagaaaaa

SEQ ID NO: 75947 - DNA, 342 bp, Zea mays
cacacgcgtccgacgatacgcacccaccagaggaaaagggcaaaagccaaaaggcatcaccgccgcgacgacgatggcagcctcgctccaagccgcggccaccctgatgcagccggccaagatcggcggccgggcgccctttgcctcgctgccgtcccgcccgtcgtcgcaactcgcctgcagggcgttcggcgtcgacgccggcgccgccaggatcacgtgctccctgcaggacgtcgccagcaggtgcgtcgacgccgcgaagctcgccggcttcgcgctcgccacctccgcgctcctcgtctcgggcgcgagcgcggagggcacgcccaaagaggctga

SEQ ID NO: 75948 - DNA, 421 bp, Zea mays
  unsure (1)..(421): unsure at all n locations
agcaaccggtccagcactttcacgctcagctccagcaatggctgcctccaccatggcgatctcctccacggcgatggccggcacccccatcaaggtgggctccttcggcgagggccgcatcaccatgcgcaagaccgtgggcaagcccaaggtggcggcgtccggcagcccctggtacggccccgaccgcgtcaagtacctcggccccttctccggcgagcccccgagctacctcaccggcgagttccccggcgactacggctgggacaccgccgggctgtccgccgaccccgagaccttcgccaagaaccgcgagctggaggtgatccactcccgctgggccatgctcggcgcgctcggctgcgtcttccccgagctgctctcncgcaacggcgtcaagttcggcgaggccgtctggttc

SEQ ID NO: 75949 - DNA, 425 bp, Zea mays
  unsure (1)..(425): unsure at all n locations
cggacgcgtggggtcgaggtcgaggacggcaacatgctggtcatcagcggacagcgcagcagggagaaggaggacaaggacgacaagtggcaccgcgtcgagcgcagcagcggccagttcgtcaggcgcttccgcctgccggagaacaccaaggtggatcaggtcaaggctggcctcgagaacggcgtgctcacggtcaccgtgcccaaggcggaggagaagaagcctgaggtgaaggctattgagatctctggttgagcatccaatccaatatggacgattggacgtggaaggtttcctgtgtcttctacgatataataattggtcgctgtcctgtgtggatgtttcctgtgtcgtctacgatatattaatgtacttctgtctgtntcgtttcgtatgtacaatcttccgggtatccttcatgt

SEQ ID NO: 75950 - DNA, 342 bp, Zea mays
ttttaatgtcgagaaggttcagtataagaatgtggcattcactgtgtgggatgtgggtggacaagaaaaactcaggtcactgtggaagatgtacctgagtaattctgatgcactgatctatgtcgttgattctctggacagagaaaggatcagagatgcgaggcaagagttccagaccattatcaaggaccctttgatggcaaacagcataatcttggtatttgcaaacaaacaggacctgagaggcgcgatgagcacggacgatggtcagcgaaggctggggctgcatgacctcaggaacaggatctggcacatacaggggaactgcgcgctccgcggcga

SEQ ID NO: 75951 - DNA, 373 bp, Zea mays
gaggctccgcctgatatcgctcgcaccctcctatacgtatacataattattatagggaacatatctggtgcatatataaatttagtgtacatggtgcatatattaaatcagcattactcattttagatataatgtctctagttgttggtatattttgctaagaacaccctccgacgtggtgaagtatagcggtggaaaatattatttataaattgcaatgatcaactagagacgttaaatctaaaataaatagtgatgatttaatatgtgcaccatatatactaagcttcgatgtacaccagatatgtcctcgttattacatgtacacgaggtatgatatgcattccatgttttcgtggtggtttcgattgag

SEQ ID NO: 75952 - DNA, 431 bp, Zea mays
  unsure (1)..(431): unsure at all n locations
cgcacgcatacacagcacagagtgaggtaagcatccgaaaaaagctgtgatctgatcgacatggccgccgccaccatggctctcacctcccgcgcgctcgtcggcaagccggcgaccagcaccagggacgtcttcggcgaggggcgcatcaccatgcgcaagactgctggcaagcccaagccagcggcgtccggcagcccctggtacggggccgaccgcgtcctgtacctgggcccgctgtccggccagcccccaagctacctgaccggcgagttccccggcgactacggctgggacaccgcggggctgtccgccgacncggagactttcgccaagaaccgcgagctggaggtgatccactgccgctgggccatgctgggcgcgctcgggtgcgtgttcccggagctgctcgcccgcaacggcgtcaagtt

SEQ ID NO: 75953 - DNA, 456 bp, Zea mays
actcgcgggtcgacgcaagcctctacactgacgtcgtgactagagcctgatccacgcgcagagcatcctggccatctgggcgtgccaggtggtgctcatgggcgccgtcgaggggtaccgcatcgccggtggcccgctcggggaggtggtcgacccgctgtaccccggcggcagcttcgacccgctcgggctcgccgacgacccggaggcgttcgcggagctcaaggtcaaggagatcaagaacggctgcctcgccatgttctccatgttcggcttcttcgtgcaggccatcgtcaccggcaagggtcccgttgagaacctcgccgaccacctcgctgaccctgtcaacaacaacgcctgggcctacgctaccaacttcgtccccggcaagtgagcgagggcatatacatacgtgtatgcgtgtaccgtagacatacctaatcgtatatgtactgc

SEQ ID NO: 75954 - DNA, 435 bp, Zea mays
gcaatttcgccctcgattcgaccccgattcgtccgcccgcgaccgggattccctccgccaagcgcggatctgaacgctgcgctccgtgtcgccgctcgaatccgccatgaagggggccaaatccaagggcgccgccaaggccgatgccaagctggcggtgaagagcaagggggcggagaagcccgccaagggcaggaaagggaaggccggcaaggaccccaacaagcctaagagggctcccagcgctttcttcgtgttcatggaggaatttcgcaaggagttcaaggagaagaaccctaagaacaagtctgtcgctgcggtggggaaagctgctggcgacaggtggaaatccctgagcgagtcggacaaggctccctatgtagccaaggctaacaagctcaagctcgagtacaacaaggccatcgctgcctacaa

SEQ ID NO: 75955 - DNA, 424 bp, Zea mays
gatatcctttttgctcaacaaacagcagagaacattgcagcactccttacaccacagtccggggcttattatgacctgtgggtggatggcgagaagataatgtcagctgaagagcctcctgaggtgacaaaagcccgcaatgacaactcgcatggaacgaacttccctgactctccggaaccaatctatggcacccagtatctaccaaggaagttcaaggttgcagttaccgcggctggtgataactctgttgatattctgaccaatgacatcggtgttgttgttgtttcagatgatgcaggagaacctattggctttaacatctatgttggtggtggcatgggaaggacacaccgagtggaaactacattccctcggctggctgatccattgggttatgttccaaaagaagatatattatatg

SEQ ID NO: 75956 - DNA, 409 bp, Zea mays
cacacgcgtccgcccacgcgtccgggctcacgatcatctctcggaacgggtcgcgcgcgatcgagaacgaagccgagctggtgcgcgccgctgcgggcgccgggttccgcgtcgccgtgctccagccacgccaggacacggagctcgccaggatgtaccgcgccctaaacgcctctgacgtcatggtgggcgtgcacggcgcggccatgacgcacttcctgttcatgcgcccgggctcggtgttcattcaggtggtgccgcttggcaccgactgggccgccgagacgtactacggcgagcccgcgcggcggctgggcctacgccacttgccgtacagaatcctggcgtccgagagctcgatttacaggaagtacgccaacgacgacccggtgctgactgacccggatac

SEQ ID NO: 75957 - DNA, 428 bp, Zea mays
caaaagggtcccaactctcaactcgcgctcaatgcatccgctatcgtctctcctcctgttccgttccgccgcgccgcccagcgcgctccccttgcggcggcggcggcggagtcacacgccagtgcgagcatcatggcaggagctgggggcgtgctggtgttttccgccatccccttcactgcagtcaaggccctcgccaacagtcccctgggtgcccgcctccgccgccgcctcgaggacaggaaggccgccgcagctgccgaggctgacgctctccgcgctgcctcgcgcggcgcccgtaacaacagcttttggtacggtggagatcggccacggtggcttggtcccgtgccttacgactaccctgagtatttgacaggagagtaccctggagattatgggttcgatattgcaggtctgggaaggga

SEQ ID NO: 75958 - DNA, 424 bp, Zea mays
ggtggagctcttgtcctcagtaccccttgtactcggcctccatagctcttcatggtggagctcttgtcccctattaccttgatgaaaaaactgggtggggtttggagatctctgatcttaagaaacaactcgaagatgctcggtcaaaaggcattgatgttagggccttggtggttatcaatccaggaaatccgactgggcaggttcttgctgaagacaaccaatatgatatagtgaaattctgtaaaaatgagggccttgttcttctagctgatgaggtatatcaagagaacatctatgttgacaacaagaaatttaactctttcaagaagattgcaagatccatgggatacggcgaggatgatctccctctagtatcatttcagtctgtctccaaaggatactatggagagtgtggtaaaag

SEQ ID NO: 75959 - DNA, 427 bp, Zea mays
cggaccgacgagcgacgaagcgcgcagaaagagaagaacctcggagctgagatggcacaagccatggcgtcgatgaccggcctctcgcagggcgtcctgcccagcaggcgcgccgacagcagaaccaggacggccgtcgtcatcgtcagggcgtccgcggagggcgacgccgttgcgcaggcgggccgccgcgccgtgatcgggctggtggccactggcatcgtcggcggcgccttgtcgcaggcggcgcgcgccgagaccgtcaagaccatcaagattggagccccgccgccgccctccggtggactccccgggactctcaactctgaccaggcgagggacttcgacctccccttgaaggagcggttctacctgcagccgctgccgccggcggaggcggcggcgagggtgaagacgtcggcgcagg

SEQ ID NO: 75960 - DNA, 353 bp, Zea mays
tcgcaagtctctagattgagtcgtatctatactcttctcccccccagtccggaccccggaggagccaagccatggcgtccacctcctgctgcctcctccaccagtcaaccgcccgcctcggcgcgtcgccgcgcctggccgccgccccgccgcgcagcgcccagctgctcgtctgcaaggcccggaagcaggaagccgccgcggaccagagcgacgtctcgcgccgcgccgcgctcgcgctcctcgcctgcgtcacggccgccgccggcgccaaggtgggtcccgccgccgcggcatacggagaagcagccaacgtgttccgcaagcccaaggggagcacggggtacatcgcg

SEQ ID NO: 75961 - DNA, 426 bp, Zea mays
cacacgcgtccgacgctatggcgggtgcagtcgcagggtgccagggagtctttcatgtcgccactcctgtgccttcagggaagatcaccgatccagagcgagagatgctgggtcctgctgttaccggcaccataaacgcactcaaggctgtgtctgctgcaaatgctcgtcgagtggtcgtcgtttcatccatggttgccgttgagatcaacccgaaagactggcccagagacaagatcaaagatgagaactgctggtcagataaagagttctgcaggaaccaatagaactggtattctgtcgccaagatctcgtcagaagaggccgcacttgaatacgcgaagcagaccgggctggatgttgtgacggtcaatccagctgtggtctttggccctcttctgcagccgacgctcaacacgagctgcc

SEQ ID NO: 75962 - DNA, 433 bp, Zea mays
aggacgcgtgggcggacgcgtgggcggacgcgtgggcggacgcgtgggttcgtgcttgtttgctctagggtttttgccacgccgccgccgctctgccccttccaccccaccgatataccaagatgacggcgcaggctgcggaggagctcgccgcccagatcgagcagcagaagctcgaggagcagaagaccgaggcagaagaggttgtggtggaggaggatgacgaggatgatgaggatgacgatgatgatgacaaggatgatgatgaactggatggacaagaaggggatgggagtggcaagtcgaagcaaagcaggagtgagaagaagagccgcaaggccatgctgaagcttggcatgaagcccatcactggtgtcagccgggtcactgtgaagaagagcaggataagctttttgtcatctcgaagccagat

SEQ ID NO: 75963 - DNA, 434 bp, Zea mays
ctcgcgcctcccactcctccccgccactcgccgccagcgaccaaccatcgcccgcccagcagcagcacggccccacgccaggactcgacccacgcgcggctagctaagctcccgccgccatgatcacggccctgcaggtctccggcggcggcctgccgctcctgttcgcccggcgccggcgccgggcgttccggccgccccaagcggtggcgtccgacgccgccgccgccgccgagggcacggcgagggaggatggcgggaaggtggccctgggcgggtccggcgtctccgtcaccaagctcggcgtcggggcgtggtcctggggcgacaccacctactggaacgagttccggtgggacgatacgaagctgaaggcagccaaaggagcgtttgacgcgagcatcgactgcggaataactttcttcgacaccgcc

SEQ ID NO: 75964 - DNA, 433 bp, Zea mays
cacacgcgtccgagcaaccggtccagcactttcacgctcagctccagcaatggctgcctccaccatggcgatctcctccacggcgatggccggcacccccatcaaggtgggctccttcggcgagggccgcatcaccatgcgcaagaccgtgggcaagcccaaggtggcggcgtccggcagcccctggtacggccccgaccgcgtcaagtacctcggccccttctccggcgagcccccgagctacctcaccggcgagttccccggcgactacggctgggacaccgccgggctgtccgccgaccccgagaccttcgccaagaaccgcgagctggaggtgatccactcccgctgggccatgctcggcgcgctcggctgcgtcttccccgagctgctctctcgcaacggcgtcaagttcggcgaggccgtctggttc

SEQ ID NO: 75965 - DNA, 418 bp, Zea mays
caagaagcgcagcgcccatggccatgtccacgcaagcctccgccgccacgcgccacctgctggccgccgcctgggcgccggcggcgaagccgcggcagctgagctcgcagctcgcgctgccgtcgtcgtcctcccgcgggccggccccgctccgcgcgtccaccgaggaggcggtggaggcgcccaaggggttcgtggccccgcagctggaccccagcacgccgtccccgatcttcggcggcagcacgggcgggctgctccgcaaggcgcaggtggaggagttctacgtcatcacgtggacgtccccaaggagcaggtgttcgagatgccaccggcggcgccccatcatcgggagggcccaactcttgagctgggccagggacatgctgggctcggacaggtgcgctcagtaagatac

SEQ ID NO: 75966 - DNA, 401 bp, Zea mays
  unsure (1)..(401): unsure at all n locations
cgcctcctcgtcctccaccaccgccgtcacggcgctccccaggaatgggcagcgggcgtcgtcctccttcctcggcggcaagacgctgctgagacaggccgaggcggcccggccgtcgttcgccgtgcgcgccgcggcggaccccaacaggccgatctggttccccggcagcacccctccgccgtggctcgacggcagccttcccggcgacttcggctttgatccctgnggcctcggatctgacccggagagcctgcggtggaacgtgcaggcggagctggtgcactgccggtgggcgatgctcggcgcggcgggcatcttcatcncgggagttcctgaccaagatcggcggtcctcaacacgccccttcctggtacaaacgccggcgaagcagcaagtac

SEQ ID NO: 75967 - DNA, 390 bp, Zea mays
catccgcgccgccacagccgggcgcgcctccccgatcgagatccaggagatatgcctcgttatgatgatcgccatgggaatacacgcttgtatgttggaagattggcccctcgcacccgttcccgcgacctagaatatcttttcagcaaatatggaagaatacgtgaagtggagttgaagcgtgactatgcattcattgaattcagtgacccccgtgatgctgatgatgcgcagtacaacctagatggcaaggaagtcgatggaagccgtattattgttgaatttgctaaaggagttcctcgtggttctgggggttcacgtgagtacatgggaagaggacctccaccaggaacaggtcgttgttttaactgtgggatggatgggcactgg

SEQ ID NO: 75968 - DNA, 429 bp, Zea mays
  unsure (1)..(429): unsure at all n locations
cccacgcgtccggccgcatcgccgccgccggaagcgcctccctcgatccagatccaggagatatgcctcgcaatgatgatcgctatgggaatacacgcttgtatgttggaagattgtctccccgcacccgttctcgtgacctagaataccttttcagcaaatatgggagaattcgagaagtggagttgaagcgtgactatgcattcattgaattcagtgacccccgtgatgctgatgatgcacagtacaacctagatggcagggacgtcgatggaagccgcattattgttgaatttgctaaaggggttcctcgtggttctggtggttcacgtgattacaacggaagaggacctccaccaggaacaggccgttgttttaactgtggagttgatggtcactgngcaagagactgtcaggctggtgactgga

SEQ ID NO: 75969 - DNA, 323 bp, Zea mays
cccacgcgtacgcccacgcgtccgcccacgcgtccgcccacgcgtctgccaatacagggatcgccatgtccgactcggatgagcaccacttcgaatccatggccgacgctggggcgtccaagagctacccgcaccatgctggcaccgtccgtatgaaccgcttcatcgacatcacgaaccgtccctgcaaggttgtagaggtttctacctccattactggtaagcatggccacgccagatgccactttgtcgccatagacatattaagtgggaaaaagcttgaagatattgttccttcatcagacaggctgtgacattccaca

SEQ ID NO: 75970 - DNA, 423 bp, Zea mays
atcgaccttcaagtctcgctacgtagcagtgcaataaaaaaagcagccgcaatggcgagcagcaccatggccctctcctccacggccttcgccggcaaggccgtgaacgtgccgtcgtcgtccgccttcggcgaggcccgcgtgacgatgcgcaagacggcggggaaggccaagccggcggcggcgtccgggagcccgtggtacggccccgaccgcgtgctgtacctgggcccactgtccggcgagccgccgagctacctgacgggcgagttcccgggcgactacggctgggacaccgcggggctgtcggcggacccggagacgttcgccaagaaccgggagctggaggtgatccactcacgctgggccatgctgggcgcgctcggctgcgtcttcccggagctgctcgcccgcaacggcgtc

SEQ ID NO: 75971 - DNA, 425 bp, Zea mays
ctcgtggactcagaccaggttccaccttcccgtgtggctgggagtcggcgccgccttcaagttcgccatcgacaaggacgtcaggaacttccaggtcctcaaagagatgtacaacgagtggccattcttcagggtcaccctggacctgctggagatggttttcgccaagggagaccccggcattgccggcttgtatgacgagctgcttgtggcggaagaactcaagccctttgggaagcagctcagggacaaatacgtggagacacagcagcttctcctccagatcgctgggcacaaggatattcttgaaggcgatccattcctgaagcaagggctggtgctgcgcaacccctacatcaccaccctgaacgtgttccaggcctacacgctgaagcggataaggggacccaacttcaaggtgacgc

SEQ ID NO: 75972 - DNA, 430 bp, Zea mays
gtcggtattgccttgcgaagagctttacttggagaaatagaaggaacatgtatcacacgcgccaaatttgggaacgtgccacatgaatattccacaatagtaggtattgaagaatccatacaagaaattttactaaatttgaaagaaattgtattgagaagtaatctctatggagttagagacgcatcaatttgcgtcaaaggtcctagatacataaccgctcaagatataatcttaccgccttccgtagaaatcgttgatacgacacaacctatagctaacttgagagaacccgttgatttctgtattgagttacagatcaagagagatcgcgcatatcatacggaactcagaaagaactctcaagatggaagttatcctatagatgctgtattcatgcctgttcgaaatgtgaattatagtaattttt

SEQ ID NO: 75973 - DNA, 429 bp, Zea mays
ggcggtcgcgtcgcttctgatgagaagccagaagtacgccatgctaaagcagcagctcgccgtggccgcccaatttgaggattacaaggaagcagcgaggttgagggactcgctgaggtccttcgaggagaaggagcccgtgttgtgcctccgccggttgatgaagaaggccattgaggaggagaggtttgaggatgctgctaaatacagagatgaattaaagattttggctccacactccctcctcaaatgttctagcgatgcaactactttggggataagagttcaagtcaggagtgtctatattgaaagccggagccagccattgaaagggcaattcttttttgcttatagaattagaattacgaatagttctcagcgccctgttcagcttctcaaaaggcactggattgttacagatggaaatgg

SEQ ID NO: 75974 - DNA, 106 bp, Zea mays
gacgcattacgagccattgctaaaagtggtgtacggttaagttgtatacgcgatgtaacacctatgccgcataatggatgtcgacctcctaaaaaaagacgtctgt

SEQ ID NO: 75975 - DNA, 353 bp, Zea mays
gcgatagactcctgaagcaggggctggtgctgcgcaacccctacatcaccaccctgaacgtgttccaggcctacacgctgaagcggataagggaccccaacttcaaggtgacgccccagccgccgctgtccaaggagttcgccgacgagaacaagcccgccggactggtcaagctgaacccggcgagcgagtacccgcccggcctggaagacacgctcatcctcaccatgaatggcatcgccgccggcatgcagaacactggctaggcggcttctcttcactcacctgcagagtgcaccgcaataatcagcttccgggatgtggcgttttgtcagttttggatggaaatgccg

SEQ ID NO: 75976 - DNA, 423 bp, Zea mays
ccgtatagagaggggcagtccatcggcatcatcgctgatggcgaagacaagaacggcaagccgcacaagctcaggctatactccatcgccagcagcgccctcggagatttcggcgactccaagacggtatcgctttgcgtgaagaggctagtctacaccaacgatcagggggagattgtcaaaggagtctgctcaaacttcctgtgtgacttgaaacctggcgccgatgtgaagatcacagggccagtgggcaaggagatgctcatgcccaaagaccccaatgcaacagtcatcatgctcgcaacggtgaccggtattgctccgttccgctccttcttgtggaagatgttcctggaggagcacgaggactacaagttcagcggccttgcgtggctgttcttgggagtcccgacgagcgacagc

SEQ ID NO: 75977 - DNA, 427 bp, Zea mays
gtagccgtagcgataagagtgagctagctggtgcacaccggcatggcggccacggcgtactccgtggcgctcctcggcggcgcgcgcctccccgccgctccgcgctccgccctcctccctcggcgcagcgtctgccagcttcgcttccaagatgcaccgaggctctccctgctccgtgcgaaggccgcttccgaggacacatcggcctccggcgacgagttgatcgaggacctcaaagcgaagtgggacgccgttgaggacaagcccaccgtcctcttgtacgggggcggcgccgtcgtcgccctatggctgacgtccgtggtcgtgggcgccatcaacgccgtgccgctgctccccaagattctggagctccttgggctcggctacaccggctggttcgtgtacccgaacttccccttaaggaaag

SEQ ID NO: 75978 - DNA, 414 bp, Zea mays
cagacgcgtgggcggacgcgtggggcgcacagggcgtgagaacctcaagaaactatttgcagcttggtacgagaggaggcaaatgaggaagatatactcgccgcttctggaaggaatcttggctttctaccttggcttcgaatggatccagaccgacaatatcctggcacctatgatcacccacggcatatactccactgttgttcttggccatgggctctggaagatccacgaccaccggagaaggctacggcagcggattcagaaggtcaggagtgaagggagtagctctgcagacgacacattgtaactgcagcatgtagatcggcgtggtctactgctggatagctagctgctgattgcacgcgcgtactgggtgatcgatcgatctaccgatcagtcagaagaccagag

SEQ ID NO: 75979 - DNA, 430 bp, Zea mays
ccttgatccatctagtagtgggtgtcgtatactgcctcatcagctggagtgtcggtctccccaagcgagcgcctatcaatggcacgctcctcaagcttctctttccagtcgccctgtgccatggtattggtcacatcactagcaatgtgtccttcgctgctgttgcagtctcatttgctcacactatcaaagctctggagcccttcttcagcgcagcggctactcagtttatccttggacagcaagttcccttctctctgtggctttctcttgcccctgtggtcattggtgtttcaatggcatcccttactgagctttcattcaactggactggcttcatcaatgccatgatatcaaacatctcattcacttacaggagcatttattccaagaaagctatgactgacatggatagcaacaacgtgtatgc

SEQ ID NO: 75980 - DNA, 423 bp, Zea mays
cacacgcgtccgcccacgcgtccgcggacgcgtgggtttttttttttttttttaacaatacaacaattttagagagcaagagagattattgagtacacggtgaataaagcaagcaattacatgatatgattatgtggattatgctattacacataggatcgatgttgtgacgctagccagcacagcatgcagcttcacagcctcatttcacaactactacaaatcaatcacacggtagctagcgcggagcccttgagccggccggccccacttatttcacctctaagacctcgtccaaggcgtagttgttggtggacacgccggcgtagttcaccttgttgaaccgcacaaccaccgggtagcgggtgttgggatcctgatcgacggtgacgacgttgccgatcccgttgtaccagtacgact

SEQ ID NO: 75981 - DNA, 426 bp, Zea mays
cactctctctattcgttccccgcctcaccccgagccagccgtctcgctagggtttcgccgccgccgccgccgccgccgccgctatgcctcgccgcagctcaggaaggtctgccccacgcccagctacccgtgctgctccagtgaggaacccgccacagccagcacgccaggctcctcctccagctcctgttcgagatggtggtggctccatgtttggaggaattgggtccaccattgctcaaggtatggcgtttggcacgggtagtgccatggcacacagggctgttgatgctgtattaggtccccggaccattcagcatgagactgttgcctcagaagctgctgctgctgcccctgcccctccagtgatgaatgctgacgcttgcagcatccattctaaggctttccaagattgtctcaacaact

SEQ ID NO: 75982 - DNA, 432 bp, Zea mays
ggcgatgcgcgggaagcggctcatgttcgtgggggactcgctgaaccgcaaccagtgggagtcgctggtgtgcctcgtgcagcccatcctgtccaagggcaggaagaagatcgtcaagcggggctccttcaacaccttctacgctaaggagtaccgcgccacgctcgagttctactgggcgcccttcctcgtcgagtccaactctgacaaccccaacttccacagcatcaaggaacggatcatcagtcccgagcggatcgaggcgcacgccaagcactggaaggatgctgactacctcatcttcaacacctacatctggtggatgaacaacgccgacatcaaagtcaggagacccaattcgaggtactggtctgacaacgatgaggttcccaggattgaggcgtatggccgtgtgttcaagacatggtctga

SEQ ID NO: 75983 - DNA, 431 bp, Zea mays
aagacgacttgtttcattgattcttgaagagatcgagcttcttttgcaccacaaggtcgaggatgtcttgcaactgcggatcaagctgcggctgcggctcaagctgcaagtgcggcaagaagtaccctgacctggaggagacgagcaccgccgcgcaggccaccgtcgtcctcggcgtggccccggagaagaaggccgcgcccgagttcgtcgaggccgcggcggagtccggcgaggccgcccacggctgcagctgcggtggcaactgcaagtgcgacccctgcaactgctgatcacatcgatcgacgaccatggatatgattattatctatctagcttgtggtggtggttgaacaataataagcgacgccgagctggctgccatacataggtattgtgtggtgtgtgtgagagagagagaaacacagttc

SEQ ID NO: 75984 - DNA, 429 bp, Zea mays
  unsure (1)..(429): unsure at all n locations
agcacaggcagcacactcagctatccagcaaaagagatcgagaggcaggagtcatggccaccgtcagcgccgccgtggtgaccaccatcgttgcccgcgccgcgatcgccaggcccaatgctctagggctgcctgcgctgagggcgaggagcgagagggtgcggtgcagctacgccaaggacgcggccccagtcagcaccaagggcgcaggcgcgtcgctgctcgccgcagcgggcgcggtgaccgcgtcggcggggcccgcgctggcgctcgtggacgagcgcatgtccacggagggcaccgggctgagcctcgggctcagcaacaacctgctggggtggatcctcctgngggtcttcggcctcatctggtccctctacaccatctacacctctgacctcgacgaggacgaggagtccggtggcctct

SEQ ID NO: 75985 - DNA, 427 bp, Zea mays
cacacgcgtccgcccacgcgtccgcccacgcgtccgctcttggaggagttgacccatcagtttgcttgcctatcacaattgatgttggtacaaataacgagaaactgcttaatgatgagttctacattggactccggcaaaaacgtgcgactggcgaggagtatgatgagcttattgaagagttcatgtctgctgttaagcaattctatggtgagaaagtcctcattcagtttgaggactttgccaatcataatgcctttgatttgcttgaaaaatatagcaagagccatcttgttttcaatgatgatatccagggcacagcatcagtggtccttgcaggtttgttagcagcactcaagatggttggtgggaccctggcagagcagacttatttgttccttggtgctggggaagctggaactggtat

SEQ ID NO: 75986 - DNA, 429 bp, Zea mays
cacacgcgtccgcaacaagccaaacaacccagtggctgctagccgagacaggggatagattgagagagaggcgcgcagatggcgacgccgtcgtcgtcgctttgctccagcttcgcctccctgcggaccgcctccatcggccacccccgtggcatcgcctcctccacgcccaggaaggcattccatgtgagggcatcagctcgggttgacaaattctcaaagagtgacatcatcgtgtccccttcgattctgtctgcaaactttgcgaagcttggtgatcaggtaaaagctgtggaggtggcaggatgcgactggattcatgtcgatgtcatggacgggcgctttgtgccaaacatcacaattggacccttggttgttgatgctctgcgtccagtgactgatcttccgttggatgtacatctgatgatg

SEQ ID NO: 75987 - DNA, 328 bp, Zea mays
ggccgctcaacaactgggccacccacctgagcgacccgctccacactaccatcttcgacacgttcggagggtcctcttaagcccgccattgctccgccccgtccatcgaccggaacgtgttcttggattaattaactacgatctctatgagcctggggatggatcaacccgtcgtgcgtggtctcgttttgtgatgagtgggagagagaagatgacaagatcgatcctttgttaatggagatctcgttaattaggagagctaccgctgggacttggtggtttgtaatatatgatccaaccagtgatgaatcaatgcattcacttgtgt

SEQ ID NO: 75988 - DNA, 418 bp, Zea mays
cacgcacgcatacacagcacagagtgaggtaagcatccgaaaaaagctgtgatctgatcgacatggccgccgccaccatggctctcacctcccgcgcgctcgtcggcaagccggcgaccagcaccagggacgtcttcggcgaggggcgcatcaccatgcgcaagactgctggcaagcccaagccagcggcgtctggcagcccctggtacggggccgaccgcgtcctgtacctgcgcccgctgtccggccagcccccaagctacctgaccggcgagttccccggcgactacggctgggacaccgcggggctgtccgccgacccggagactttcgccaagaaccgcgagctggaggtgatccactgccgctggggcatgctgagcgcgctcgggtgcgtgttccggagctgctcgcccgc

SEQ ID NO: 75989 - DNA, 442 bp, Zea mays
cacgaccctgcgcgccatcccctggatcttctcgtggactcagaccaggttccaccttcccgtgtggctgggagtcggcgccgccttcaagttcgccatcgacaaggacgtcaggaacttccaggtcctcaaagagatgtacaacgagtggccattcttcagggtcaccctggacctgctggagatggttttcgccaagggagaccccggcattgccggcttgtatgacgagctgcttgtggcggaagaactcaagccctttgggaagcagctcaaggacaaatacgtggagacacagcagcttctcctccagatcgctgggcacaaggatattcttgaaggcgatccattcctgaagcaagggctggtgctgcgcaacccctacatcaccaccctgaacgtgttccaagcctacacgctgaagcggataagggaccccaac

SEQ ID NO: 75990 - DNA, 485 bp, Zea mays
cggtctggacaaccgggtcgaccccagccttcggcccacacttcgggcattgcaacgtcggtaggttcagccgcgccgacctgttggaggcgagcgtggagcttcgtcatcacgccctcggctacgtcaagtccacgggcctccggtgcgctgtcaagctcggcgtcgccaatgccatctagcgccgtggcggcatggcctccgtcgaggacctgctcaccgagctctctctggacgcatgcagactccgctgcctgcacagcgtcatgcgcgcgctcgccgcgttgggcgtcttcaaggacgggagcgacggcgagtaccggctcactgccgtttcctctctgctcgtggacgacgacagcagcgtccgacgtagcctccggtcgatcacgctcttgtacctggagcctgcattcatggggccagtgctcaacctggcagattgggcccttgctggtgtcaatggtagccaagacgacaacaac

SEQ ID NO: 75991 - DNA, 381 bp, Zea mays
agaagacaaacgccggcacgcgcacgcagacacgatggcgatctgcagcgcgcacactaccacctccctgcgctccccatgcacgaccgtctcgaacgcaggtctgaggcagaagcaagtcatcttcgtcaccagcaacaggaggagcggcggcggcaggaggcacggaggggcaaggagcttccaggtctcgtgctccgtcgacaagccggtggtgattggcctggcggcagactcagggtgcggcaagagcaccttcatgcgccggctcaccagcgtcttcggtggcgccgcggagccgcccaagggcgggaacccggactccaacacgctcatcagtgacaccacgacagtgatatgcctcgacgactaccattccct

SEQ ID NO: 75992 - DNA, 288 bp, Zea mays
cccacgcgtccgggaactggggcatcaagtgactcttatccgccaagttgctgagaaagtgttcgccaatgtgggcaagactatcgggtacaaagttggaacaatgattgagatccccagggcagctctggtggctgatgagatagcggagcaggctgaattcttctccttcggaacgaacgacctgacgcagatgacctttgggtacagcagggatgatgtggggaagttcattcccgtctatcttgctcagggcatcctccaacatgaccccttcaaggtcctgaa

SEQ ID NO: 75993 - DNA, 450 bp, Zea mays
  unsure (1)..(450): unsure at all n locations
gtgggtcgaaaccttctacgccatggcggagaacaacgtcatgttcgagggcatcctgctgaagccgtccatggtgacgcccggcgcggaggccaaggacagggccaccccggagcaggtggccgcgtacaccctcaagctcctccaccgccggatccccccctccgtgcccgggatcatgttcctctccggcgggcagtcggaggtggaggcgacgcagaacctcaacgccatgaaccaggggcccaacccgtggcacgtgtccttctcctacgcgcgggcgctgcagaacacctgcctcaagacctgcggcggccagccggacaaggtcaaggcngcgcaggacgcgctgctgctgcgcgccaaggccaactccctggcgcagctcggcaagtacacctccgacggcgaggccgccgaggccaagagggaatgtncgtcaagaactac

SEQ ID NO: 75994 - DNA, 214 bp, Zea mays
  unsure (1)..(214): unsure at all n locations
accactctagaatcacgtcgtattacttatcaagtcctcctcgggttanggttccttanggttttgtggacgggcgatggcagcggctgatgtggagtatcgttgcttcgtcggcggacttgcctgggccaccagcaacgagtcgctggagaatgccttcgcctcctacggcgagatcctcgactccaaggtcatcaccgaccgggagaccggg

SEQ ID NO: 75995 - DNA, 437 bp, Zea mays
  unsure (1)..(437): unsure at all n locations
cggacgcgtgggcgaggactacaagtacaccgggctcgcgtggctgttcctgngcgtcncgaccagcgacaccctgctgtacaaggaggagctggagaagatgaaggagatggcgccggacaacttccggctggacttcgcggtgagccgagagcagacgaacgcggccggggagaagatgtacatccagacgcgcatggcggagtacaaggangagctgtgggagctgctcangaaagacaacacctacgtctaaatgtgcgggctcaaaggcatggagaagggcatccacgacatcatgctcgacctcgcagccaaagacgggatcaactggttggactacaagaagcagctcaagaagagcgagcaatgggacgtcgaagtctactgatgatgattcttcattgtaatgttcagctcaagcaatctggtggtga

SEQ ID NO: 75996 - DNA, 447 bp, Zea mays
ctcagctagtcagctacctccatccaccagaccagaccagaccaatggccctgcgcctaccaatctcatcgtcccacgggctggcctccacgccggcgccaatctccacgactacgtgccggccggccgtcttggcgacggccgcggcccagaagaggagcctgctgctggcgacggcctccgagacgaggggagtcgcgccggtgaggtccagcgggatcgagacgagcacggtgggtctgggatgtgaggccgtcaccgggcacgtcacggaggtcaacaaggacaccttctggcccatcgtcgaggccgccggcgacaaggtcgtcgtcctcgacatgtacaccgaatggtgcgggccttgcaaagtgatggctccgaaattccaggagatgtctgagaagaactggatgttgtgttcctgaagctcgactgcaccaggacaac

SEQ ID NO: 75997 - DNA, 310 bp, Zea mays
cgtcaagtggttgcagaccatcaccacgctgccgatcctcgtcaagggagtgctcaccgctgaagacacgaggcttgcggtggcgaacggcgcggcggggatcatcgtgtcgaaccacggcgcgcggcagctggactacgtgccggcgaccatcagcgcgctggacgaggtcgtgaaggccgcccggggccagctccccgtgttcgtcgacggtggcgtccgccgcggcaccgacgtcttcaaggcgctcgcgctcggcgccgccggcgtattcgtcggaaggccggtgggtgttctccctgccggtggc

SEQ ID NO: 75998 - DNA, 408 bp, Zea mays
gaaggagcaatgtaccttttccctcagatccatctgccacataaggcaattgaggctgctaaagctgccaagaaagcacctgatgcattctatgcgctccgtctccttgaatcaactggaattgttgtggttcctggatctggatttggccaagttcctggaacatggcacgtcagatgcacgatcctgccgcaggaagataaaatccccgcggtgatcacccgcttcaaggctttccatgaggcgttcatggctgagtaccgtgactgaactgttacagtggctgagtaccaccgtgtagaccgaaacaaaataaagctcccccctctctctgtgtctgtgcgtgtgtgtgaactgatctctgaatggacgaacaatgtactctgttggcgcctttaatggcaattg

SEQ ID NO: 75999 - DNA, 416 bp, Zea mays
  unsure (1)..(416): unsure at all n locations
cccacgcgtccgcccacgcgtccggacatactcaagccctcccaaccatatatattcattgatccatcctatacacaagatttagaccactacaaacaacacaagtgccacaaaagagaaagtaagcaagagagagctactcatttgagtttagcactagtgccttgtgagattcattgagagatagtgtgtgctacatatttgtgttcatttgtgcatggagttttgactcccattgaacttcctccgaagttttggaggccttgtaaaagctagcaacaccaaagagtgtggtggtccttgtggggtcttaagtgatccttgagaagaagaagagctcgctgatcttgagtgatcggtggagagagggaaagggttganaaaganccgtccttagtggactcctcaacggggac

SEQ ID NO: 76000 - DNA, 283 bp, Zea mays
  unsure (1)..(283): unsure at all n locations
gttcgggctggcgccgtccgcgaaccgcaaggcgacggcggggctgaagctggaggcgcgcgactccggcctgcagacgggtgaccccgccgggttcaccctcgccgacacgctggcctgcggcgccgtcggccacatcctcggcgtctgcatcgtgctcgggctcaagaacaccggcgccctcgaccagatcatcggctagatccctacgtcgccgttgttanaatcagactcagcagcctcgatcgcgccgccggccggcaggtgcaagtggtgactttgt

SEQ ID NO: 76001 - DNA, 379 bp, Zea mays
agccgttcgtgcagcagacgatagccatggccagggccgtgcaccggcagcggtaccgcatgggatgcggctacaagctcacagacgatgggacaataaccgaggagtactgggagccggttgaggactctaacactgacgaggaaaacgaagtaccggcaaggaagccctaccggatcgagctcgttggtgtggtctgtgacgcatatctagcggttgtcaggggaatcaggagagctgtagtcactgggagagcagtgagggtgaagtcgcagctgcagtctcacaagcgatttgctacggctttcaacagctactgcagcctcgtcgacaacgccatgctctacagcagcaacaccttgggtgttcccaagctgat

SEQ ID NO: 76002 - DNA, 442 bp, Zea mays
cccacgcgtccgcggacgcgtgggcggcatggagcgagctgcgctactggatatcaatggccaaatctttgctgaccaggggaaagcacttaatgcggtcgcctcgcggaacgcgaaagtcttagttgtcggaaatccctgtaacactaatgcgctgatttgtttgaaaaatgccccaaacataccggcaaaaaactttcatgcattgacgaggttggatgaaaatagagcaaagtgccagctggcactaaaagcaggtgtattttatgacaaagtatcaaacgtgactatttgggggaaccattcgacgactcaggttcctgatttcttgaatgccaaaattgatggaagaccagtgaaagaagtcattaaggataccaagtggttagaggaagagttcaacctcacagttcaaaagcgtggaggtgtgctcatccaaaaa

SEQ ID NO: 76003 - DNA, 452 bp, Zea mays
ccccggtgagccttgacgccgaggacatccgcaacgagaaggtgaaggtgctgaggtccatgaggcagctgaagctcgaggacgtggtggtgggccagtacaagggccactccaagggcggcaagtcgtacccgggctacgccgacgaccccaccgtgcccaagggcagcgtcacgcccaccttcgccgccgccgcgctcttcatcgacaacgcgcgctgggacggtgtgccgttcctgatgaaggcaggcaaggcgctgcacacacgacgcgcggagatccgggtgcagttccggcgcgtgccgggaaacctgtaccggcggaacatcggcgcggacctggacaaggcgaccaacgagctggtgctccgggtgcagcccgacgaaggcatctacctcaaagtcaacaacaaggtgcccgggctgggcatgcgcctcgaacgcagcaacctc

SEQ ID NO: 76004 - DNA, 442 bp, Zea mays
  unsure (1)..(442): unsure at all n locations
cggacgcgtgggggaaagtgtttttctgttattcttggtggagatcaagtcccaaatggaaaaccttcccctgacatatttttggaggctgcaaagaggcttggtgcaaatccatcgtcttgcttggttatagaagattctgtcgttggagtcaagggtgccaaggcttctggggcaaaggcagttgcagtaccatcacttcaaaatcagaggaaccactattacattgctgatgtcatcctatattcgcttttggactttcaacctgagatgtggggtcttcctccatttgaagatcgcattcaaggtgttctgccaattgatcccttactttcaaatgcccggataagtggtaaaattttgaacaacattcattgggtaatttcagatgactgtgcctacgagtatattccntgacaaatatcangaattttttttgggt

SEQ ID NO: 76005 - DNA, 221 bp, Zea mays
cccacgcgtccgcggcgcgatcgacaacgagatgaccatcgtgctggccagcatatccacggcgtgcaagcagatcgcggcgctggtgcagcgcgcgcccatctccaacctcacgggcgttcacggcgccgtcaacgtgcatggcgaggaccagaagaagctcgatgtcgtctccaacgaggtgttctccaactgcctcaagtcgagcgggcgcaccggcg

SEQ ID NO: 76006 - DNA, 374 bp, Zea mays
ctctgatagcttgcaccaggtcgtacgtacgtacgtagatcgatcgatcgatcgctagctagctgacgaccattgcgtccctctcctcagcggccatcaacggccattccttcacgggcgcacccgctcgcgcagtggtcagcaggaggtccttcaccgtgcgtgcctctctccgcaaggcgattgccaacgccgccgtggtcgttgccgccagcgtcctgcatgccggcggctgagccatggctcacgatgtgctgctgggcgcaggcgacggcgggctcgtcttcgatctcagacagttcaccgtgaacgtcggcgacaccatcacctttaagaacaacgccggcttcccgcataaagtcgtgttcgacgaa

SEQ ID NO: 76007 - DNA, 311 bp, Zea mays
cggacgcgtggggtttgatgaagagacacttgtcaacgtgaacagcatcaagaggaataaaggaggcagccaaagatcaagtggttttagcaacgagtacattgtgataaccatattggttgctgctgagggagtacataagctgccggttataaatagcagcaatgacttaaagacagctctacaaaagatgggtgccataccatcaagcaaaatactggcagtcgaggtcctgtggactccgcaaaatgagaatgacacattgtccgagcgagagctccttgaagattacccgctcttagggcctctgt

SEQ ID NO: 76008 - DNA, 446 bp, Zea mays
cccaagcaagcaagctcgatctactactactactagctggtacacatactagccagcctgccagccagcttgccatggcgcccaccgtgatgatggcctcgtcggcaaccgccgtcgccccgttccagggtctcaagtccgccgccagcctccccgtcgcccgccgcagcaccaggagcctcggcaacgtcagcaacggcggaaggatccggtgcatgcaggtgtggccggcctacggcaacaagaagttcgagacgctgtcgtacctgccgccgctgtcgacggacgacctgctgaagcatgtggactacctgctgcccaacggctggataccctgcctcgagttcagcaagctcgggttcgtgtaccgcgagaactccacctcgtcgtgctactacgaccgccgctactggaccatgtggaagctgcccatgttcggctgcacg

SEQ ID NO: 76009 - DNA, 430 bp, Zea mays
cccacgcgtccgcccacgcgtccgcggacgcgtgggccctccctccggtctgcgctcccacagcctcacccctgcgcccccgccgattcgcgtcgccctttgttggaaggaacgatggagcagaccttcatcatgatcaagcccgacggcgtccagcggggcctgatcggggacatcatcagtcgcttcgagaagaaagggttctacctcaaggggatgaagttcatgaacgtggagaggtccttcgcgcagcagcactacgctgacctttccgacaagcctttcttcaccgggttggtggagtacatcatttccggccccgtggtggcgatggtgtgggaggggaaggacgtcgtgttgactggccgcaggatcattggggccaccaagccttgggaggcagcccccgggtacattcgtggggactacg

SEQ ID NO: 76010 - DNA, 400 bp, Zea mays
cccacgcgtccgaaaagcagccgcaatggcgagcagcaccatggccctctcctccacggccttcgccggcaaggccgtgaacgtgccgtcgtcgtccgccttcggcgaggcccgcgtgacgatgcgcaagacggcggggaaggccaagccggcggcggcgtccgggagcccgtggtacggccccgaccgcgtgctgtacctgggcccactgtccggcgagccgccgagctacctgacgggcgagttcccgggcgactacggctgggacaccgcggggctgtcggcggacccggagacgttcgccaagaaccgggagctggaggtgatccactcccgctgggccatgctgggcgcgctcggctgcgtcttcccggagctgctcgcccgcaacggcgtcaag

SEQ ID NO: 76011 - DNA, 427 bp, Zea mays
  unsure (1)..(427): unsure at all n locations
cgagaagaacctggacgtcgtgttcctcaagctggactgcaaccaggacaacaagcctctcgcgaaggagctgggcataaaggttgtgccgacgttcaagatcctcaagggcgggaaggtcgtgaaggaggtcaccggcgccaagatcgacgagctagcggaagccatcgagatagccaacaagaagtcaggctgacaaaggaatagcaagatcgacgtgcagtgcaagcaaggatgaatggatgatcgatgaactagctagtgaagactgcgaatgaatgcgccccggccgcgcatttgtgggaccggcaacatgcatgcagaanacaagctattctagttcttctgcttaggccgtccgcaattgctatctcaaatagctagctgatgtggagctgagagaagaatacaaatagtaagttatctc

SEQ ID NO: 76012 - DNA, 438 bp, Zea mays
ggtggatacgccggcgatcgtcgggatctgagggctactccggaccggctgatcgaggtgaaggtcacggcggacaacagcagctgcatccgctccatctccttcatctacatcggagccgatggcaaaccgtacgaggaggggccatggggtttcggccatgctggcacggagtacaagattgatctgtgcaggttcgacgagagcttgacggagatctccgggaccacgggcccagcctacaacattgacaatctggtcaagtctctcaaattcgtcaccaacaaacgcgcttacggaccgtacggcagggacgagggcaccccgttccgtgtcaaggtgatgaacaacggccacgtcgctggcttctttggccgctctggagattgcctggacgcgatcgggctctacgtgaaccccaattaataactaaaacga

SEQ ID NO: 76013 - DNA, 410 bp, Zea mays
  unsure (1)..(410): unsure at all n locations
aaaagatctgtcgcgaaacgcatgggcttgaaggagctgaaaatgggatacaacattgacatccatgattacagcgtgaggcttaaagctgcanaaaaagtttcttaaagctggcgacaaggttaagataattgtgaacctgaaaggacgggaaaacttgtataaaaaagaagctatcgaactccttagaagattccaaaatgatgttggcgagctggcgacagaagaaagtaagaatttcgcggagaggaatatatatctggttcttgttccaataagatagctatacagaaagaacaagatgaattgaacaaaaagggtgctgtgagagaagagaaagaccaatcagacagtgatgaaccagaagagaacgaacaaccagacagcgatgtacccctgacagaactgct

SEQ ID NO: 76014 - DNA, 389 bp, Zea mays
  unsure (1)..(389): unsure at all n locations
cccacgcgtccgcccacgcgtccgccaccaacaggtcgaggcctggaagccgatcgtcgacgccgtccacgccagcggtgccgtcttcttcgcccagctctggcacaccggccgggcctccccctcagaattccaaccaaatgggcaggcaccgatctctagcacggacaagcaaatcccagcacaggtgaaccattccggtgacgtcaacacgttcgcggtgcctcggagactagagacagaggagataccacacgtcgtcaatgacttccgggttgccgccagaaacgccatcaaagcaggctttgatggagtggagattcacgcggcaaacgggtacctgttcgatcagttcatgaanggacagcacaatgaccgagacgactcct

SEQ ID NO: 76015 - DNA, 427 bp, Zea mays
  unsure (1)..(427): unsure at all n locations
cgcaggacattcactaccaagaacggcaagaaggtcagcaaggcacctaagatccaacggcttgtgacacccttgaccctccagaggaagcgtgctagaatcgctgacaagaagaagaggataactaagaagaagtctgaggctgctgagtaccagaagcttcttgcccagaggctgaaggaacagagagaccgccggagcgagagcttggccaagaggaggtccaagctttctgccgccgccaaggcttctgctgccacctctgcttaagaatgttcagtgttttgggatcnttgtaaggtctatcttgtaacggcaaaagtgttttgggattcttgtaagctccatagttcacatcacttaagtgtttctgctagtagtggatcacaacctattgcttgcctggctctgagtcacacctgaccga

SEQ ID NO: 76016 - DNA, 179 bp, Zea mays
cccacgcgtccgcacgcacgcatacacagcacagagtgaggtaagcatccgaaaaaagctgtgatctgatcgacatggccgccgccaccatggctctcacctcccgcgcgctcgtccgcaagccggcgaccaacaccaaggacgtcttcggcgaagggcgcatcaacatgcgcaagact

SEQ ID NO: 76017 - DNA, 405 bp, Zea mays
  unsure (1)..(405): unsure at all n locations
cggacgcgtgggtaaagttcgagcctgagctgccccagtggaagagctccgccatcgccgacctcggcgtgggcaccgagaacaagatcgccatgcacttcgacagggtcttttggcccaacgtcgaggtgctgggaatggtcgggccgacgcccaaagcctgtgggtacttcctgaacctgcacaaagccaccggcaatccggtcctcgtgtacatggccgccggaaggttcgcccaggaggtggagaagctgtcggacaaggaagccgtcggcctggtcgtttctcacctgaagaagatgctcccggatgccactgaaccgacgcagtacctggtgtcgcgatggggctccgaccccaactccctgnggtcctactcgtgcgacctggtcgcgaagccggcga

SEQ ID NO: 76018 - DNA, 442 bp, Zea mays
  unsure (1)..(442): unsure at all n locations
cccacgcgtccgatcactctatgctagtgggcgtactactggtattgttcttgactctggtgatggtgtgagccacactgtgcccatttacgaaggatatgcccttcctcatgccattcttcgtttggatcttgctggtcgggacctcacagactccctcatgaaaatcctgactgagaggggttactccttcacaacctctgccgagcgagaaattgtaagggacatcaaggagaagctggcatatatagcccttgactatgagcaagagttggaaactgccaagaacagctcctcagttganaagagctatgagctacctgatggccaagtaatcaccattggtgcagagagattcagatgccctgaggtcctcttcccagcatccatgattggtatggaggctgccggaatccatgagacaacatacaattcaatcatg

SEQ ID NO: 76019 - DNA, 244 bp, Zea mays
gtcgagcacgcgtccgcccacgcatccggcaagctcgatctactactactactagctggtacacatactagccagcctgccagccagcttgccatggcgcccaccgtgatgatggcctcgtcggcaaccgccgtcgccccgttccagggtctcaagtccgccgccagcctccccgtcgcccgccgcagcaccaggagcctcggcaacgtcagcaacggcggaaggatccggtgcatgcaagtgt

SEQ ID NO: 76020 - DNA, 418 bp, Zea mays
cggacgcgtgggcggcgctgcttatctcgcgctcccggctctcctcctcgcccgcgccgcgatgaacacagccatggccaccacctccttatccctccaaggccgcccatcccacgctcccactaggaagctctcctccccgttcctcggagcccccgcgtcctttctccggccgctggctcccacgcccgccgccggcccctcctcgcggcggacgcttgccgtcagggccatgggcgcctcccaagcccggagggaagcccaagaaagtggtgggccttaaaaacctgcggcccaaggccgggaaggcgacgcctgagccgcccgtcaggccggcgctcggtgccaacggagtcaacatcatggcgttctgcaaggggtacaatgctaagactgccgacaagcccgggtacatcat

SEQ ID NO: 76021 - DNA, 407 bp, Zea mays
catcggcatgatcagcgccgtgcccgggatgaaggcgctcgacatgaacgccgccgaggacgagatcgtgcgcctcacgcgcgaggtcgtgcccggcatgatcgtcaccgggatggaggtcgccgagatcgacggcgccccgaggatgggcccgacgttcggcgccatgatgatctccggccagaaggcggcgcacctggcgctgaaggcactgggcaggcccaacgccgtggacgggaccatccccgaggtgtcgccggcgctgcgcgaggagttcgtgattgcgtccaaggacgacgaggtcgtggacgcctgagcgagcatccacgcgccagcatgcaagcagcgtcttatctggggcggcgccatcacggggtttcttcttttaatctgggactttgttggtg

SEQ ID NO: 76022 - DNA, 221 bp, Zea mays
  unsure (1)..(221): unsure at all n locations
cggacgcgtgggcggtggaggcgtggctcaacacgcacggtcccaacgaccgcacgctcgcgcaggggctcaagggtgaccccacgtacctgntggtggagcaggacaagacgctggccacctacgggatcaacgccttttgcactcaactcggttccttcttcccttggaacggccctaaaaccagttcaaccggcccctgcaacggttccaattacacc

SEQ ID NO: 76023 - DNA, 424 bp, Zea mays
gtcatcacactcctcgccatcacataaaaccagtgcaagcagaagcagcgcaatggcgagcagcatcatggccctctcctccacaggcttcgccggcaaggcagtgaacgtgccgtcgtctctcttcggcgaggcccgcgtgacgatgcgcaagacggcggcgaacgcaaagccggcggcgagctccggcagcccgtggtacggccccgaccgcgtgctctacctgggcccgctgtccggcgcgcccccgagctacctgacgggcgagttcccgggccactactgctgggataccgcggggctgtcggcggacccggagacgttcgccaagaaccgggagctggaggtcatccactcgcgctgggccatgctgggcgcgttgggctgcgtgttcccggagctgctcgcccgcaacggcgtcaag

SEQ ID NO: 76024 - DNA, 404 bp, Zea mays
ctcctcgccatcacataaaaccagtgcaagcagaagcagcgcaatggcgagcagcaccatggccctctcctccacagccttcgccggcaaggcagtgaacgtgccgtcgtctctcttcggcgaggcccgcgtgacgatgcgcaagacggcggcgaaggcaaagccggcggcgagctccggcagcccgtggtacggccccgaccgcgtgctctacctgggcccgctgtccggcgcgcccccgagctacctgacgggcgagttcccgggcgactacggctgggataccgcggggctgtcggcggacccggagacgttcgccaagaaccgggagctggaggtcatccactcccgctgggccatgctgggcgcgttgggctgcctgttcccgggagctgctcgcccgc

SEQ ID NO: 76025 - DNA, 344 bp, Zea mays
  unsure (1)..(344): unsure at all n locations
cccacgcgtccgcacagagcctagtatagaggagcttgcggccaaagaacgtgcggagccaggctactgcggtcgagtgagggacttcgttgtgggtcgacatgactacggcagcatcaaatttttcggggagacggacgtgaggtgcctcgatctggagtcaattgtggagtttaacgaccgggaggttattgtgtacaaggacgatagcaagaagccccctgtgggcgaggggctgaacaaggctgcagaggtgactctactgaacatcaagtgcgtaaacaagaagaccggggagccgtgccagggggcaagagtggagaggtacanggagatgctggtga

SEQ ID NO: 76026 - DNA, 437 bp, Zea mays
cggaagcgtgggggcgcgtcgctgctcgccgcagcgggcgcggtgaccgcgtcggcggggctcgcgctggcgctcgtggacgagcgcatgtccacggagggcaccgggctgagcctcgggctcagcaacaacctgctggggtggatcctcctgggggtcttcggcctcatctggtccctctacaccatctacacctctgacctcgacgaggacgaggagtccggtggcctctcgctctagatccacctcctctcctgttaatgatctgaatgtaaacatggtggtggtcatcggtgttaatttagacatggctatttgcatctaagatccatcctctcctgttaataatgtttggagactacgtacgcctgaagcaatagcaactttgcgagaaaacttgctgcacaaaaaaaaaaaaaaaaaaaggcggccgctct

SEQ ID NO: 76027 - DNA, 262 bp, Zea mays
cccacgcgtccgctcccctccacgagttccttccagaagggaacatcgaggacattgtaagtgaattatgtgctgagacgggagccaaccaggaggatgccctcgcgcgaattgaaaagctttcagaagtaaacccgatgcttggcttccgtgggtgcaagcttggtatatcgtaccctgaattgacagagatgcaagcccgggccatttttgaagctgctataacaatgaccaaccacggtgttcaagtgttcccagagat

SEQ ID NO: 76028 - DNA, 407 bp, Zea mays
cccacgcgtccgtggaaagacagttcattccataaaaggacatcgggactactcatttgcatcggcttggagccctgatgggcgaacatttgctaccggcaaccaagacaagacatgccgaatctgggacgtgaggaacctttcaaaatccgtccatgtgttgaggggtaaccttggagccatccggtccatccgcttcacctcggatggccagttcatgtccatggctgaacctgctgactttgtgcacatctacgacgtgaagagtgactacaacaaaaggcaagagctggacttctttggcgagataaccggcacatcgttcagcccagacactgacacgcttttcgttggtgtgtgggataggatgtatgggagcctgctacaatttggcgcctgtacaacta

SEQ ID NO: 76029 - DNA, 435 bp, Zea mays
caacaatcatcatgctcgcaacgggtaccggcatcgctccgttccgctccttcttgtggaagatgttcttcgaggagcacgacgactacaagtacaccgggctcgcgtggctgttcctgggcgtcccgaccagcgacaccctgctgtacaaggaggagctggagaagatgaaggagatggcgccggacaacttccggctggacttcgcggtgagccgagagcagacgaacgcggccggggagaagatgtacatccagacgcgcatggcggagtacaaggaggagctgtgggagctgctcaagaaggacaacacctacgtctacatgtgcgggctcaagggcatggagaagggcatcgacgacatcatgctcgacctcgcagccaaggacgggatcaactggttggactacaagaagcagctcaagaagagcgagc

SEQ ID NO: 76030 - DNA, 389 bp, Zea mays
ctctccagaaactgctttctcctcaacttcatctctctcgctttcccccaaaaaaaaagaccctttcagggatttgggggacacagcacccagatatccaactcacactcatttcacacaactcttccccaaatcttcgattagattctcgttgacaagaagactataaccgaacctgaccatgtcgctgatccgccgcagcaacgtgttcgatcccttctccctcgacctctgggacacctttgagggcgtctccttcggctccggcagcagcagcagtctcttctcctcgttctcgcggaccagctcggagaccgcggccttcgctggcgcgcggatcgactggaaggagactccacaggcgcacgttgtcaatgcagacgtaccgg

SEQ ID NO: 76031 - DNA, 431 bp, Zea mays
cggacgcgtgggcgccggcggcccgctcggagaggtcgtcgacccgctctaccccggcggcagcttcgacccgctcggcctcgccgacgaccctgaggccttcgcggagctcaaggtgaaggagctcaagaacggccgcctcgccatgttctccatgttcgggttcttcgtccaggccatcgtcaccggcaagggcccgctcgagaacctcgccgaccacctcgccgaccccgtcaacaacaacgcatgggcctatgccaccaactttgtgcccggcaagtgagggggtggaggcgccaccgcccaccggccaccgctgcggatatctaggtgttcggatgcacgtgagcgcgcactggttccagtttgtaccatgatgtaaattacttaccgtaccagggttcaatcggcaaggaagaattgttgtgttc

SEQ ID NO: 76032 - DNA, 437 bp, Zea mays
  unsure (1)..(437): unsure at all n locations
cccacgcgtccgccggtgtgggaagtgacagcacgtgtgtgttctgccaccatctgctcgatgaaatcatgtccaaactgaaagatccagatgcggagtttgagataattcagattcttgtcaaggagtgcaataagatcgaaggtcacgtccagcagtgcaagaggctggttctgcaatacattcccctcatcttggtgaacggtgagaagttcctcgagaagaacgatgtctgcgcgctcgcacaggcttgtccagcgagcagtaggaagacgttcagctcgatgttgaagggagcgttgtggagtgacgcctggcttgaaggttgaagaagaacacacggagcggtttagcagtggtcaganatagtgtgaacaagtgctgtgctgtacatataataatgtcgtgtataaacgcatgaaggacgtgtgccctgc

SEQ ID NO: 76033 - DNA, 442 bp, Zea mays
ctcaacctggctggccgcgacctcaccgactacctcatgaagatcctgactgaacgcggctactccttcaccaccactgctgagcgggaaattgtcagggacatgaaggagaagctcgcctacattgccctggactacgaccaggagatggagactgccaagaccagctcttctgttgagaagagctacgagctgcctgacggacaggtcatcaccattggtgctgagcgcttccgctgccctgaggtcctcttccagccatccttcattgggatggaagctgctggtatccacgagaccacctacaactccatcatgaagtgcgacgtggatattacgaaggatctgtatggcaacatcgtcctctccggtggtaccactatgttccctggcattgctgacaggatgagcaaggaaatcaccgccctggctcctagcagca

SEQ ID NO: 76034 - DNA, 447 bp, Zea mays
cccaagcgtccgcacgcgaccacgcccccgctcctctcgtctctttcttcgcctcttccatcgcaggattcggcggccatgggcggcggcaacgcccagaagtccaagatggcgcgcgagaggaacgccgagaagaacaagggcggcaaaggcagccagctggaggccaacaagaaggccatgaacatccagtgcaagatctgcatgcagaccttcatctgcaccacctccgaggccaagtgcaaagaacatgcggaggcgaggcatcccaagaacgacctctaccagtgcttcccccacctcaagaactagtaagcagcagaagcatatgctctgctcagctaaaagacaagtactacatatatatatatacgctgtgtgtcaattaatgggttctaggctgctgctgatgccgctgcttcgttcgtgttgccccgttcgaatatg

SEQ ID NO: 76035 - DNA, 438 bp, Zea mays
  unsure (1)..(438): unsure at all n locations
cccacgcgtccgcccgttgcgtctctcgcgcgttaccaagctctcaagttttctcgcgccgacggcaatggatgaggtcaccgaggccgtgaacaacctcaacatctcgggcgtaggggccgcgggcgttgccggggcggaagggcacaagaagaatcgcatccaggtctccaacactaagaagcccctcttcttctatgtcaacctcgccaagaggtacatgcagctgcacaacgaagtagagctgtcggccctcggcatggccattgcgacggtggtgacagtagcagaaattctgaaaaataacgggcttgctgtcgcgaagagtatcatgacatctactgttgatatcaaggacgagactangacccggcctatccagaaagccaagattgaaatattgcttggcaagacggagaagtttgatgagctgatggc

SEQ ID NO: 76036 - DNA, 436 bp, Zea mays
cccacgcgtccggaggccgagaagcgctttagccgtagccgtagcgataagagtgagctagctggtgcacaccggcatggcggccacggcgtactccgtggcgctcctcggcggcgcgcgccttcccgccgctccgcgctccgccctcctccctcggcgcagcgtctgccagcttcgcttccaagatgcaccgaggctctccctgctccgtgcgaaggccgcttccgaggacacatcggcctccggcgacgagttgatcgaggacctcaaagcgaagtgggacgccgttgaggacaagcccaccgtcctcttgtacggcggcggcgccgtcgtcgccctttggctgacgtccgtggtcgtgggcgccatcaacgccgtgccgctgctccccaagatcctggagctcgttgggctcggctacaccggctggttcgtg

SEQ ID NO: 76037 - DNA, 463 bp, Zea mays
gagaattcttaattcatgagttgtagggagggacttatgtcaccacaaacagaaactaaagcaagtgttggatttaaagctggtgttaaggattataaattgacttactacaccccggagtacgaaaccaaggatactgatatcttggcagcattccgagtaactcctcagctcggggttccgcctgaagaagcaggagctgcagtagctgcggaatcttctactggtacatggacaactgtttggactgatggacttaccagtcttgatcgttacaaaggacgatgctatcacatcgagcccgttcctggggacccagatcaatatatctgttatgtagcttatccattagacctatttgaagagggttcttttactaacatgtgtacttccattgtgggtaacgtatttggtttcaaagccttacgcgctctacgtttggaggatctacgaattccccctg

SEQ ID NO: 76038 - DNA, 295 bp, Zea mays
gttcaggctggcgccgtccgcgaaccgcaaggcgacggcggggctgaagctggaggcgcgcgactccggcctgcagacgggtgaccccgccgggttcaccctcgccgacacgctggcctgcggcgccgtcggccacatcctcggcgtctgcatcgtgctcgggctcaagaacaccggcgccctcgaccagatcatcggctagatccctacgtggccgttgtgaagatcagactcagcatcctcgatcgcgccgccggtcgggacgtccaggtggtgactttgtaacgtgtgtgcg

SEQ ID NO: 76039 - DNA, 404 bp, Zea mays
cccaagcgtccgcataattcgtgacaaggttgatgttcttgtaaaagtggagaagatagccaatgccatgaggtggaagacaagattggctgatcatgagggtggccctcatgtacctgagaagatactcttcgcggtcaagcaatactggactgctgaaaaaacaagcagctaacgttgttcattttcatttttttctccagtcacagctaacttgccccctggctgtgtttattggaaaaatttctgtcgattatacagcccatgtatgttactgacaatataaaacagcccccttgagggggagtaaattatgtgggatttagctgtgaacttgggatttgattattccactggtgccgagacgcacaagacatgccaaaacgattaattggcactgtact

SEQ ID NO: 76040 - DNA, 455 bp, Zea mays
cccacgcgtccgcactgatccaaattctactggaccccctcctgatatgcaacttctgctcccatttgtggaatcggctttgccagtggcttacggtgtcttggctatccaattatttcatgaaattggacactttttggcagcatttccaaaaaatgtgaaactaggcattcctttctttattccgaacttcacccttggaacttttggtgcaattactcagttcaagtccattcttccggatcgaaagacaatgtttgacatatcaatggctggtcctgtggctggagctgcactttccttttcaatgttctttgtaggcttattactctcttcaaatcctgttggggcaagtgatttagtagaagtacctagccagctgttcccaggttcattgttgcttggactcattagtagagcaacacttggatacagagctatgcatgctgctacag

SEQ ID NO: 76041 - DNA, 415 bp, Zea mays
ctcgagaagctcaagcacaagaaaaagagactcgtccagtcgcccaactccttcttcatggatgttaagtgccaggggtgcttcagcataaccactgttttcagccactcccagactgttgttgtgtgccctggctgccaaactgtcctctgccaacccacaggaggaaaggcaaggctcactgagggctgctctttccgcaggaagggagactagagcggatgtggtcttcaagttttgctctatgccagatactagcgtcatgaactgcctttagctaagattttccataagttgttctcgagcagctatgtgttgcatgttggctacttccaaacttatatctggtttggtttggattgtgatgaactaatggctctttgaatttatattatgatgttgacgatatttggtg

SEQ ID NO: 76042 - DNA, 433 bp, Zea mays
ccaacgcgtccgcccacgcgtccggcaaaggcagcacactcagctatccagcaaaagagatcgagaggcaggagtcatggccaccgtcagcgccgccgtggtgaccaccatcgttgcccgcgccgcgatcgccaggcccaatgctctagggctgcctgcgctgagggcgaggagcgagagggtgcggtgcagctacgccaaggacgcggccccagtcagcaccaagggcgcaggcgcgtcgctgctcgccgcagcgggcgcggtgaccgcgtcggcggggcccgcgctggcgctcgtggacgagcgcatgtccacggagggcaccgggctgagcctcgggctcagcaacaacctgctggggtggatcctcctgggggtcttcggcctcatctggtccctctacaccatctacacctctgacctcgacgaggac

SEQ ID NO: 76043 - DNA, 459 bp, Zea mays
cccacgcgtccgcccacgcgtccgcccacgcgtccgcccgtgtcgtgtagtgtgtagtcgcagcagctagcgcccggccggccagtcgagtgagtccatcctccatcgccatccaatgggcgccaccgccctgagcatgagcatcctccgcgcgccgccgccctgcttctcgtctccactcaggctcaaggtcgcggttgccaagccgctggcggcccccatgcggcgccagctgctgcgcgcgcaggccacctacaacgtgaagctgatcacgccggacggggaggtggagctgcaggtgcccgacgacgtctacatcctggacttcgccgaggaggaaagcatcgacctgcccttcccctgccgtgcggggtcctgctcctcctgcgccggcaaggtcgtctctggctccgtcgaccagtccgaccagagcttcctcaacgacaacaggtcgccgac

SEQ ID NO: 76044 - DNA, 453 bp, Zea mays
gcatcaagtgactcttatccgccaagttgctgagaaagtgttcgccaatgtgggcaagactatcgggtacaaagttggaacaatgattgagatccccagggcagctctggtggctgatgagatagcggagcaggctgaattcttctccttcggaacgaacgacctgacgcagatgacctttgggtacagcagggatgatgtgggaaagttcattcccgtctatcttgctcagggcattctccaacatgaccccttcgaggtcctggaccagaggggagtgggcgagctggtgaagcttgctacagagaggggccgcaaagctaggcctaacttgaaggtgggcatttgtggagaacacggtggagagccttcctctgtggccttcttcgcgaaggctgggctggattacgtttcttgctcccctttcagggttccgattgctaggctagctgc

SEQ ID NO: 76045 - DNA, 458 bp, Zea mays
  unsure (1)..(458): unsure at all n locations
gatgagctcatctacgtggagagccatctaagcaacctttcaaccaagttctacggagaggtgacacaacaaatgctaaagcatgcagacttcccaggtagcaacaacgggacaggtctcttccagaccatcattggactgaagattagagacctctatgaacagattgttgctgagagggctggtgtaccagcggaagcagcaaaagtttaacgatctatgcattcagatgtcctaaaactacagctctccgaactcaatgggagtaacaaccttcgcatctgttgggatatatggcgagctaggaggtatagaaatgtcattgcagaactcaggaaaacgtgcaatggaatttcttgaaatcnctcttgaagagagtgagaactcgatagatcaagaatcaccacacgttgtattaatcgtatggtataatatttatacatgtacaggatgagcta

SEQ ID NO: 76046 - DNA, 431 bp, Zea mays
  unsure (1)..(431): unsure at all n locations
agggattatagtagctgggtttggtttgtggctggctggctggctggataccacaccggtaatagcggccgagagagcaaccacgtccacggccatttaactgtcatctctcctcctgatttccttctctcctttcctttttgctccgatccgatccgatcaatgaccaagtcgaagggtggttcggtggacgcgcgcacgctggtggcgcacgtcctggcagcgggcgccgtcgtgctggtgctcttgtggtgcatccacttccgcggcggcctcgccctccgctcccaggacaagccgctcatcttcaacgtccaccccgtgctcatggtcctcggccccatcgtcctcggcggagaagccatcctcagctaccgctctctcncgctcgcncgcgacgccaggaagaaggtgcacctggcgctgcacgc

SEQ ID NO: 76047 - DNA, 378 bp, Zea mays
ctatcgggtacaaagttggaacaatgattgagatccccagggcagctctggtggctgatgagatagcggagcaggctgaattcttctccttcggaacgaacgacctgacgcagatgacctttgggtacagcagggatgatgtgggaaagttcattcccgtctatcttgctcagggcattctccaacatgaccccttcgaggtcctggaccagaggggagtgggcgagctggtgaagcttgctacagagaggggccgcaaagctaggcctaacttgaaggtgggcatttgtggagaacacggtggagagccttcctctgtggccttcttcgcgaaggctgggctggattacgtttcttgctcccctttcagggttccga

SEQ ID NO: 76048 - DNA, 457 bp, Zea mays
gcgagggcgggctggactacctcggcaaccccagcctgatccacgcgcagagcatcctcgccatctgggcctgccaggtcgtgctcatgggtgccgtcgagggctaccgcattgccggcgggccgctcggcgaggtcgtcgacccgctgtaccctggcggcagcttcgaccccctcggcctggccgacgaccccgaggccttcgccgagctcaaggtgaatgagctcaagaacggccgcctcgccatgttttccatgttcggcttcttcgtccaggccatcgtcaccggcaagggcccgctcgacaacctcgctgaccacatcgctgacgcagtcaacaacagcgcatggggctacgccaacaacttcgtccctggcaactaagctcaaacggtatgctatgcaacttcactgtctttccgatcggagaaggtgtacgtacgtggattgattgatgc

SEQ ID NO: 76049 - DNA, 444 bp, Zea mays
ccgactccaccgccgtcacgccatctcgccgggggcggaaccccgaccgcgagtatggggaacatcttcgtgaagaagcccaagatcactgacgtcgatagggccatcctcaccctcaagacgcagcgccgcaagctcgcccagtttcaacagcagcttgagaaggtaatcgaagcagaaaaggaagctgcacggcagttggttcaacagaagaagagagacagagctttgattgctctgaagaagaagaaagctcaggaagagctgttgaaacaagttgacacatggcaaatgaatgttgaacaacagctggcagatattgaactagcaagtaaacaaaaggctgtatttgaaagcctgaaggctggaaatgctgccctgaagtctatacagaatgagataaacattgatgatgtccaaaagctgatggatgacacagccgag

SEQ ID NO: 76050 - DNA, 272 bp, Zea mays
catcaatgtgatgatagctcgtcaccggcggcgacagcagcaccgccgtcaccttcgactgcacctcctgggtgcatcccaagttccacaacccggagaagcgcatcttcttcaccctcaagtcatacctgccgtccgacacgcccaaggggctggaggacctgaggaagagggacctgcaagcgctgcgcggcgacgggcacggcgagcgcaaggtgttcgatcgcgtctacgactacgacgtgtagaacgacctgcgcgacccggacaag

SEQ ID NO: 76051 - DNA, 150 bp, Zea mays
cacaacagcgccactgtccagtgcgcgcgtcaagcttgcttagctagccgccatggcctcactcaccgccgtctcagtgaagcccgtggccatcaaaaggtctcgccggcagctccatctccggaaggaagctcgccgtcgccaggccgt

SEQ ID NO: 76052 - DNA, 437 bp, Zea mays
agaccccatccatcgattggaacccagatccgcaggccgcagcacaagagggtgggatcggatcggatcggagcagagcaaaggggacaaccgaccagaatccgccggcgaccaccatgggctccgcgagccgtgccgtctcgtgcctgtgctgcccctgcaagtgcctggcgtgcgggctcctgagctgcctgtgcagcatcctcgtctcgctcgccgtcgtcctgggcgtcgtcgccctcatcctctacttcatcttcaagccgcacatgatcgcggccaccgtggactcggcctcgctctcgcagttcgcgctgtcggcgtcctccacgctctcctacgacctcaacgtcaccatgacggtgcgcaaccccaacacgcgcgtggggctctactacgacgacgtccaggcgctggccctgttcagcgaccagcgc

SEQ ID NO: 76053 - DNA, 433 bp, Zea mays
cgaccttcaagtctcgctacgtagcagtgcaatagaaaaagcagccgcagtggcgagcagcaccatggccctctcctccacggccttcgccggcaaggccgtgaacgtgccgtcgtcgtccgccttcggcgatgcccgcgtgacgatgcgcaagacggcggggaaggccaagccggcggcggcgtccgggagcccgtggtacggccccgaccgcgtgctgtacctgggcccactgtccggcgagccgccgagctacctgacgggcgagttcccgggcgactacggctgggacaccgcggggctgtcggcggacccggagacgttcgccaagaaccgggagctggacgtgatccactcgcgctgggccatgctgggcgcgctcggctgcgtcgtcccggaactgctcgcccgcaacggcgtcaagttcggcgag

SEQ ID NO: 76054 - DNA, 480 bp, Zea mays
tcggtattcaggtcgaccacgcgtccgcggaagcgtgggcccacgcccagctacccgtgctgctccagtgaggaacccgccacagccagcacgccaggctcctcctccagctcctgttcgagatggtggtggctccatgtttggaggaattgggtccaccattgctcaaggtatggcgtttggcacgggtagtgccatggcacacagggctgttgatgctgtattacgtccccggaccattcagcatgagactgttgcctcagaagctgctgctgctgcccctgcccctccagtgatgaatgctgacgcttgcagcatccattctaaggctttccaagattgtctcaacaactatggcagcgagatcagcaagtgccaattctacctagacatgctgaacgagtgccgccctggtggtgtgtctgcctaacctgcctctgggggttattcgtggattttctttcggtgatgctatctcat

SEQ ID NO: 76055 - DNA, 301 bp, Zea mays
aggcaattcgacacggaggcgctgcccaacgacctcatcaagcgcgggctggccgtgcgcggggaggacggggagctggagctcaccatcaaggactacccctacgcccacgacgggctcctgttctgggactccatcaggcagtgggcgtccgagtacgtcaacgtctactacaagtccgacgaggccgtggccgccgaccccgagctgagggcgttctgggaccatgtgcgcatcgtgcggcacggcgacaggacggccgagccgtggtggcccgtgctggacacccgcgacagcctgg

SEQ ID NO: 76056 - DNA, 392 bp, Zea mays
cggatgacgagaaggaaatggtcatgcgaactgtctattgtacaaacatagataagatggttactcagttagatgtaaagaaattctttgaagaactttgcggtgaggtctctcggttgaggcttctaggggataatgtacattccacaaggattgcttttgttgaatttgtccatgctgagggtgccatcatggctctgaattgcagcgggatgattttgggaacactgcctgtcagggtgagcccttccaagactccggtgaagccccgtgtaaatcgagtgggatctaactgactctgcgcaagctgaactggattgttcacgggaaggcgtcgccataagctcgaaggttccgcggtccggtgcatcatgatgcgtctgctcacattc

SEQ ID NO: 76057 - DNA, 291 bp, Zea mays
cagatctgcccgctgaaggatgttggcccaaattaacttccttggctttggagacggaaccctactctatctcaacttaaatcggaaaagaagtgtatcaccaaaggattgctaccgagacattcacctggcttgagctggcttttgctatagcgtgcaaggggttgctgggtgtcgtacctacctgacttatcattatctgtggttacattctggaccctgtattttctatgctttcatgtctctctactttctagtattaattatcaataagttggtttggaatggttg

SEQ ID NO: 76058 - DNA, 453 bp, Zea mays
cccacgcgtccgcaagacagggattgccatgtcggactcggaggagcaccacttcgaatcgaaggccgacgctggggcgtccaagacctacccgcagcaggctggcaccgtccgtaagaacggcttcatcgtcatcaagaaccgtccctgcaaggttgtggaggtttctacctccaagactggtaagcatggccacgccaaatgccactttgtcgccatagacatattcaatgggaaaaagcttgaagatattgttccttcatcacacaactgtgacattccgcatgtgaaccgtactgagtatcagctgattgatatttctgaggatggatttgtgagccttcttacttcagatggcaacactaaggatgatcttagactcccaactgatgagactcttgtggcccagattaaggaagggttcgaaagcgggaaggatcttgttgtgactgt

SEQ ID NO: 76059 - DNA, 465 bp, Zea mays
  unsure (1)..(465): unsure at all n locations
caccgatccatttcagccgccgccgcgcgtatcaagcacgagcagcaaggatgccggctggccacgggctgcgctcgcggacgcgcgacctgttcgcgcgccccttccgcaagaagggctacatcccgctcaccacctacctccgcacctacaagatcggcgactacgtcgacgtcaaggtgaacggcgccgtccacaaggggatgccgcacaagttctaccacggccgcaccggtcgcgtctggaacgtcaccaagcgcgccatcggcgtcgagataaacaagcaggtgaatggtcgcatcatcaggaagcgtatccatgtccgcgtggagcatgtgcagccgtcccgctgtacagaagagttccgcctgaggaaggtgaagaatgatcagctgaaggcggatgcaaaggagcgcggcgaggtcatcangcacaagaggcacccgttgggtcgcaagcctggct

SEQ ID NO: 76060 - DNA, 448 bp, Zea mays
gttttctcaggcgggacagcatttaacggtgttgttgaagaattgaagaaagtcactactcgagtcgcgcacgtgctccctgtttctgatgatggtggaagcacagctgagattgtgcgtgtgcttggcgggcctgctgtgggagacataagatcaagatgtttgaggttgtctgatgaaagtactgcagaagctctttctgttcgaaaattgcttgggcatcgtttgcctattgatccttcggaggcaaagctggaatggtaccagattgtagaaggagaccacactttatgggagggagtctctcgtccatacagggaaacaattcgtgcctttttggtctactttcacagtgagatacttcgacggtcagctgaaatgttttgcttcaccaatggcagcattggaaaattcctttttgctggggcacgcatattcttccagtcgt

SEQ ID NO: 76061 - DNA, 442 bp, Zea mays
ccagaagcctcggcaacgtcagcaacggcggaaggatccggtgcatgcaggtgtggccggcctacggcaacaagaagttcgagacgctgtcgtacctgccgccgctgtcgacggacgacctgctgaagcaggtggactacctgctgcgcaacggctggataccctgcctcgagttcagcaaggtcggcttcgtgtaccgcgagaactccacctccccgtgctactacgacggccgctactggaccatgtggaagctgcccatgttcggctgcaacgacgccacccaggtgtacaaggagctgcaggaggccatcaaatcctacccggacgccttccaccgcgtcatcggcttcgacaacatcaagcagacgcagtgcgtcagcttcatcgcctacaagcccccgggcagcgactagaccgcgcccgccggccgcccccgccg

SEQ ID NO: 76062 - DNA, 391 bp, Zea mays
cccacgcgtccggccggctccgcggggctgtcctgcgcgtacgagctctccaaggaccccgccgtgagcatcgccatcgtggagcagtcggtgtcgccgggcggcggcgcgtggctgggcgggcagctgttctcggccatggtggtgcgcaagccggcgcacctgttcctggacgagctgggcgtggcgtacgacgaggccgaggactacgtggtcatcaagcacgccgcgctcttcacgtccacggtcatgagcctgctcctggcgcgccccaacgtgaagctgttcaacgccgtggccgtggaggacctcatcgtcaggggagggcgcgtccggggcgtcgtcaccaactgggcgctcctgtccatgaaccacgacacgcagtcctgca

SEQ ID NO: 76063 - DNA, 235 bp, Zea mays
ctccgcgctagctgaggacggtacagcggcacagaggtgcgacgtacgacgacgacgacgcaggcgccacacatggcatcccagctctccgccgccgtgccccggttccacggcctccggggctacgccgcgcccaggtccgcggtggcagcgctgccgtccgtgagggtgggcaggaagaggtcgtcgtcgcagggcatccgctgcgactacatcgggtccgccaccaacctga

SEQ ID NO: 76064 - DNA, 402 bp, Zea mays
gcgtccgacattatgtcgaagcctgagcagatccgggctaagattgtcgaagggcgtgtaaagaagaggcttggagaattcgcgttgttcgaacagccattcatcaagaacgacaaggtcacaataagtgagtggctgaagcaaactatagctacaactggagagaatatgaaggtcaggagatttgcccggtacaacctaagtgaagggctggagaagaaaagccaggattttgctgctgaagttgcagcccagacagcagcgaagccgccaccagctcctcccaaggatgacaagcctgctgaaacaacagaatccgcggagaagaagccggctgttgcactttcagcctcgttggtgaagcaactccgagacgaaaccggggctggcatgatggactgc

SEQ ID NO: 76065 - DNA, 424 bp, Zea mays
cgacttgtttcattgattcttgaagagatcgagcttcttttgcaccacaaggtcgaggatgtcttgcaactgcggatcaagctgcggctgcggctcaagctgcaagtgcggcaagaagtaccctgacctggaggagacgagcaccgccgcgcaggccaccgtcgtcctcggcgtggccccggagaagaaggccgcgcccgagttcgtcgaggccgcggcggagtccggcgaggccgcccacggctgcagctgcggtggcaactgcaagtgcgacccctgcaactgctgatcacatcgatcgacgaccatggatatgattattatctatctagcttgtggtggtggttgaacaataataagcgaggccgagctggctgccatacataggtattgtgtggtgtgtgtgagagagagagaaacagag

SEQ ID NO: 76066 - DNA, 435 bp, Zea mays
  unsure (1)..(435): unsure at all n locations
cccacgcgtccggctgtttcgatagtggatgctattagatccctcgtaactcctaccccagaaggtgactggttttctacaggggtttatacgactggaaatccttatggcatagcagaggatatcgtgttcagcatgccatgcagatcgaagggtgatggtgattacgaactagctagtgatgtgttgatggacgattttctctgggaacggattaaaaagagcgaagctgaattgcttgctgagaagaaatgcgttgcccatcttacaggagaggggaatgcattctgtgatcttccggaagataccatgctaccaggagaagtgtagtttagttacagaagcaacagcagcggaatgcatttgccaatacattagctgagacttganacatctgcttgccagatgcagcaactacttttatatatatatgtg

SEQ ID NO: 76067 - DNA, 432 bp, Zea mays
cccacgcgaccgcccacgcgtccgcccacgcgtccgtcgaccttcaagtctcgctacgtagcagtgcaataaaaaaagcagccgcaatggcgagcagcaccatggccctctcctccacggccttcgccggcaaggccgtgaacgtgccgtcgtcgtccgccttcggcgaggcccgcgtgacgatgcgcaagacggcggggaaggccaagccggcggcggcgtccgggagcccgtggtacggccccgaccgcgtgctgtacctgggcccactgtccggcgagccgccgagctacctgacgggcgagttcccgggcgactacggctgggacaccgcggggctgtcggcggacccggagacgttcgccaagaaccgggagctggaagtgatccactcccgctgggccatgctgggcgcgctcggctgcgtcttcc

SEQ ID NO: 76068 - DNA, 413 bp, Zea mays
cagacacgtgggcggacgcgtgggtttttttttttttaacaatacaacaattttagagagcaagagagattattgagtacacggtgaataaagcaagcaattacatgatatgattatgtggattatgctattacacataggatcgatgttgtgacgctagccagcacagcatgcagcttcacagcctcatttcacaactactacaaatcaatcacacggtagctagcgcggagcccttgagccggccggccccactcatttcacctctgagacctcgtccaaggcgtagttgttggtggacacgccggcgtaattcaccttgttgaaccgcacaaccaccgggtagcgggtgttgggatcctgatccacggtgacgacgttgccgatcccgttgtaccagtacgactccctcc

SEQ ID NO: 76069 - DNA, 430 bp, Zea mays
cgagagtgagtgaacaccagccgtattgtcccgaccccgaccgatcctcgcctgctgcagccatggcgaccgcacgctcgcgcaggggctcaagggtgaccccacgtacctggtggtggagcaggacaagacgctggccacctacgggatcaacgccgtgtgcactcacctcggctgcgtcgtgccgtggaacggcgccgagaacaagttcatctgcccatgccacggatcccagtacaacaaccagggcaaggtggtccgtggaccggcgcctctgtcgctggccctggttcacgccgacgtcgacgacggcaaggtcctcttcgtcccgtgggtggagaccgacttcaagaccggcgaggacccgtggtggaaagcatgacgatgatccgaaaccagcggtgctcagtgctcacacatgagacctacg

SEQ ID NO: 76070 - DNA, 355 bp, Zea mays
ataagtgttgaattagctggaagttcagttcaattgccccttgtgtggaatattcaagtgagcacatggctacgatactatgtctatgagaggttaattcataaaggaaagaaaccaggtttccttcaattgttgggtacacagacagtcagtgccatctggcatggactatagcctggatatatcatattctttgttcaatcagcattgatgataaatggttcacgagttatatacagatggcatcatgcagcgagcagttcattcctgagcggtatcctggcctttccaaattttgcttatacattgctggtgcttaactactcctgcatcgggttccaggtactgagcttca

SEQ ID NO: 76071 - DNA, 354 bp, Zea mays
  unsure (1)..(354): unsure at all n locations
ggacggcgacgagggcggcaagcaccagctcatcgcggccaccgtctccgacggcaagctctacatctgcaaggcgcaggccggcgacaagaggtggttcaagggcgccaggaagggagtcgagaaggccgcctcctccttcagcgtcgcatgatgatgtaattttatttcttcgatgggatgggatgcacgcactacgtagagagcttggctaggccaggcctggctgagcacgcttgtgtgttccttcgactgtacatgagaacaaagactaaggagagctccattcccgtacaaggatcgatttcttcagtcnagaaaagaaaagggaacaaaaaaaagggcggccgctct

SEQ ID NO: 76072 - DNA, 336 bp, Zea mays
acccacgcgtccggtcaccaagagcaacccggagaccggcgaggtcatcggcgtcttcgagagcgtgcagccgtccgacaccgacctcggggccaaggcgcccaaggatgtcaagatccaaggggtctggtacgctcagctcgagtgattcgagtgtctaactgctacgtgtccgaccgccgtcatggatcttgggaaggtgtatgtataccatggaaaactttggatagcataggaggaatcgtgtatgtaatgtacttgttaatgcaaattcgggctgtcgcttttttaaaaaaacgtccatcacggcaaggtcatcttcgtcccatgagaaaa

SEQ ID NO: 76073 - DNA, 353 bp, Zea mays
ctcacgcgtccggttcctctccggcgggcagtcggaggtggatgcgacgcataacctcaacgccatgatccaatggcccataccgtggcacgtgtccttctccgacgcgcgggcgctgcacaacacctgcctcaagacctgtggcgggcagccggacaaggtcaaagcggcgcaagacgcgctgctgctgcgcgccaaggccaactccctggcgcagctcggcaagtacacctccgacggcgaggccgccgaggccaacgagggaatgttcgtcaagaactacagctactaattaatcgcccggccatcacccgggataccgccgcccctccgagagatacctgtgtactgat

SEQ ID NO: 76074 - DNA, 415 bp, Zea mays
gctactcaagttgctgcccttgattacataatcgcagttgaaagtgatgtgtttattccatcacactctggcaatatggcaaaagctgtagaaggccatcgtcgatttctagggcatcgtaaaactatcactcctgacaggaaaggattggtggaactctttgatttactggaaaaaggggatctcacggaaggtcctaagctgtcggcacttgttactgacatgcacaagtacagacaaggggctccaaggaagaggtatggctccttgccaggaagcaagggcagagcacggcttaagagtgaggaatctttttacgaaaacccgtttcctgagtgcatctgtttgactgggaggtcctgatgtatagctttgcatgatgatgacacggtgcacccatcattggaagtgtgct

SEQ ID NO: 76075 - DNA, 421 bp, Zea mays
gagatgcccaccggcggcgccgccatcatgcgggatgggcccaacctcctgaagctggcgcgcaacgagcagtgcctcgcgctcggcaccaggctgcgctccaagtacaagatcacctaccagttctaccgcgtcttccccaacggcgaggtgcagtacctccaccccaaggacggcgtctacccggagaaggtcaaccccggcagggagggcgtcggccagaacttccgcagcatcggcaagaacgtcaaccccatcgacgtcaagttcaccggcaagagcaccttcgactaatcacacatcacgccgcccgcccggccggtgatccaaatcaaaggacttcttcttctagttcttatattaataattaagctagctgctggatgcatggtttgatctaaatatatgtgggcatggatgt

SEQ ID NO: 76076 - DNA, 390 bp, Zea mays
tacagacacttgtgcgaacgcgtgggttttatctttttttttgaatgccatcttactagtttaattggtattaactcagagtctcaaacgtgcctcttgttgcattgacacacatgtacaatacaatcgtacatatagtacgttttatgcgacaagcagcctctggatgcaataatactacaccccccgatttaattggactaatgcatgctgaggatggatcagatggagatgctgctggggatgcccctcccggtgactcgcagcttggataagggcttgagcaactcgtacggcacgatcccggcgccgcagctgttcttgaggtccaggttgttgttgcactcgtcgattaacccctcgatctccttcatcctgccgccgaacttc

SEQ ID NO: 76077 - DNA, 390 bp, Zea mays
  unsure (1)..(390): unsure at all n locations
gtggccccgcagctggaccccagcacgccgtccccgatcttcggcggcagcacgggcgggctgctccgcaaggcgcaggtggaggagttctacgtcatcacgtggacgtcccccaaggagcaggtgttcgagatgcccaccggcggcgccgccatcatgcgggagggccccaacctcttgaagctggcgcgcaaggagcagtgcctggcgctcggcaccaggttgcgctccaagtacaagatcacctaccagttctaccgcgtcttccccaacggcgaggtgcagtacctccaccccaaggacggcgtctacccggagaaggtcaaccccggcaagggagggcgtcnngccagaacttccggcagcatccggcaagaacgtcaaccccat

SEQ ID NO: 76078 - DNA, 413 bp, Zea mays
  unsure (1)..(413): unsure at all n locations
cgagacgcgtgggcaggaggtccttcaccgtgcgtgcctctctccgcaaggccactgccaccgccgccgtggccgttgccgccagcgtcctgcttgccggcggcggcgccatggcccangaggtgctgctgggcgcaggcgacggcgggctcgtcttcgagcccagccagttcaccgtcaaggccggcgacaccatcaccttcaagaacaacgccggcttcccgcacaacgtcgtgttcgacgaagacgaggtgccgagcggcgtcgacgcctccaagatctcgcaggaggagtacctcaacgcgccaggcgagacctactccgtcaccctcaccgtgccgggcacctacggcttctactgcgagccgcaccaaggagcaggaatggtcggcaagatcacagtcaactaaagc

SEQ ID NO: 76079 - DNA, 457 bp, Zea mays
ctcgcgggtcgccgcacgcgtctacaacgagtacctacacagcgagcgagagcagcacacactgcacgcagctagctaggagcagcagcagcggcggcgatggcggcctccatgatctcctcgtcagctctggcggtggcgcctcagggcctgccgcccctcggccgccgcgcctcctccttcgccgtcgtctgctccaagaagaacatcaagaccgacaggccctacgggattgggggtggcctgaccgtcgacgtcgacgccaacgggagaaatggcaagggcaatggcgtgtaccagttcgtcgacaattacggcgcgaacgtcgacggatacagcccaatctacaactacgatgactggtctcccaccggcgacgtctatctcggtgggaacactggggctctgaattgggccgtcaccctcggcgggaattctcgccggggcgtccctcctc

SEQ ID NO: 76080 - DNA, 452 bp, Zea mays
acggtcggactcagggtggcccacgcgtccggacagtgacgcaggaagctataagctagccaagacaggaataataatggcggcgtcgacggtggcgagcctctctgtcccggtgacgacgacgaccttcgcggcggcgggcggcggcgacgtgctgatcgtcgtcccgaggagggcgggcgccaagcgcgtcgtctggttccccgcggcggcgcgccgcggcggcgggcggttggtcgccgtgcggtccagcgggccggccacgccgccggagatctccgacaaggtgtcggagagcatcaagcaggcggaggagacgtgcgcggacgaccagaagggcgacgccgagtgcgcggcggcgtgggacgaggtggaggagctcagcgccacggccaaccacgcccgcgacagcctcaaggagaccaacgccaaacgaccgctcgaaaagtact

SEQ ID NO: 76081 - DNA, 332 bp, Zea mays
cgagcgcgtgggcaggaggtccttcaccgtgcgtgcctctctccgcaaggccactgccaccgccgccgtggccgttgccgccagcgtcctgcttgccggcggctgcgccatggcccaggaggtgctgctgggcgcaggctaccgcgggctcgtcttcgagcccagccagttcaccgtcaaggccggcgacaccatcacccttcagaacaaggccggcttcccgcacaacgtcgtgttcgactaagacgacgtgccgagcggcgtcgacgcctccaagatctcgcatgaggagtacctcaacgcgccaggccagacctaccccgtcaccctca

SEQ ID NO: 76082 - DNA, 347 bp, Zea mays
ggtcgacacaagcgtctacagtgattctcacaagtgggtgggggaaatgctgcgtctcgggatgctcaggcattcgcgtaaacgatgcggagaagctcgtgacgatcggaggccatgtgctgcgcgaaggtgagtggctgtcgctgaatgggtcgactggtgaggtgatccttgggaagcagccgctttccccaccagcccttagtggtgatctgggaactttcatggcctgagtggatgatgttagaaagctcacggtcctggcaaacgccgatacccctgatgatgcaatgactgcgcgaaacaatcgggcacaatgaattggagtacgcccgacagagcacatg

SEQ ID NO: 76083 - DNA, 433 bp, Zea mays
  unsure (1)..(433): unsure at all n locations
cgccaaagacaagctgggcaacgacatcacggtggaggagtggctcaacacgcacggtcccaacgaccgcacgctcgcgcaggggctcaagggtgaccccacgtacctggtggtggagcaggacaagacgctggccacctacgggatcaacgccgtgtgcacccacctcggctgcgtcgtgccgtggaacggcgccgagaacaagttcatctgcccctgccatggatcccagtacaacaaccagggcaaggtggtccgcggaccggcgcctctgtcgctggctctggttcacgccgacgtcgacgacggcaaggtcctcttcgtcccgtgggtggagaccgacttcaggaccggccaggacccgtggtggagtgcatgangacgatcatccgacacaagccgtgctcagtgctcataggctttctccgagggc

SEQ ID NO: 76084 - DNA, 427 bp, Zea mays
gaaatcggcatgatcagcgccgtgcccgggatgaaggcgctcgacatgaacgccgccgaggacgagatcgtgcgcctcacgcgcgaggtcgtgcccggcatgatcgtcaccgggatggaggtcgcagagatcgacggcgccccgaggatgggcccgacgttcggcgccatgatgatctccggccagaaggcggcgcacctggcgctgaaggcactgggcaggcccaacgccgtggacgggaccatcccagaggtgtcgccggcgctgcgcgaggagttcgtgattgcgtccaaggacgacgaggtcgtggacgcctgagcgagcatccacgcgccagcatgcaagcagcgtcttatctgggccggcgcatcacggggtttcttcttttaatctgggactttgttgctgttggacgaatgaattccct

SEQ ID NO: 76085 - DNA, 419 bp, Zea mays
ggccatttctttggatgacccgaaagcatctcttgtgaacgacgtggatgatgttgagaagcattttccggggacactgactgccatcagagactggttcagagactacaagatacctgatggaaagcctgccaacaaatttggtctcggcaacaagcccgcaagcaaggaatacgccctgaaggtcattcaagagaccaacgaatcatgggagaaattggtaaagagaaatattcccgctggagagctctcgttggcctgattttggcccatggaagccaccacattcttttgaactgctttcgtgagcatgtcgttttgtatgctgtgaccatgcttcttcgtttgcattccaaaccttttttacgaactgtttaacaaaaatgatcttgtcggataaataatgattctggtgcgag

SEQ ID NO: 76086 - DNA, 410 bp, Zea mays
atcacgatcggacgaccctttttttttttttttttttttttttttttttttttttatcaccatcagtaccatttcatcttggtttaaactatacatacagtcgcagctgacacaacccaaggcatgcctattatatacacacccttggctttgcttggctgctgttattctgtaagcacgctagctagcttctccagctctccgggctctaacacgtagatgtaaaccatctgctacacatacgtacatagcgtggtggacagaaatggatggatcagggtcttcaggcgtgcgccagctccttggagacgccgtcctggtacggcgcctcgcagaactcgccgccaaggtcatcgcacgcctcgcccgggaacaccgtccttggctcgtcgtaggacaggtaatccctg

SEQ ID NO: 76087 - DNA, 424 bp, Zea mays
cggacacgtgggcggacgcgtgggctgttatgtagcttatccattagacctatttgaagagggttctgttactaacatgtttacttccattgtgggtaacgtatttggtttcaaagccttacgcgctctacgtttggaggatctacgaattccccctgcttattcaaaaactttccaaggtccgcctcacggtatccaagttgaaagggataagttgaacaagtacggtcgtcctttattgggatgtactattaaaccaaaattgggattatccgcaaaaaattacggtagagcgtgttatgagtgtctacgcggtggacttgattttaccaaaggatggtgagaacgtgaactcacagccatttatgccccgggagagaccgttttggtctttgtgccgaagcaatttcaaaagcacaagccg

SEQ ID NO: 76088 - DNA, 418 bp, Zea mays
ccaacacgtccgccccgccacaaggaggagcgtccgtgtagctgccgtcgtcgcgaccgaggccgcgcagatcgactacagctcaagcgtctcggtgttcccgatggaggcctgcgacctgcttggtggcgacgcgtgcaacgggcccatgttcccggaggccaagcccgcctcggcggcggcggcggcgagcaggagtgtggtcggggtggacagggactacctgtcctacgacgagccaaagacggtgttcccgggcgaggcgtgcgatgaccttggcggcgagttctgcgatgcgccgtaccaggacggcgtctccaaggagctggcgcacgcctgaagaccctgatccatccatttctgtccaccacgctatgtacgtatgtgtagcacatggtttacatccacgtgttaagcc

SEQ ID NO: 76089 - DNA, 433 bp, Zea mays
ccaacatcgaccttcaagtctcgctacgtagcagtgcaataaaaaaagcagccgcaatggcgagcagcaccatggccctctcctccacggccttcgccggcaaggccgtgaacgtgccgtcgtcgtccgccttcggcgaggcccgcgtgacgatgcgcaagacggcggcgaaggccaagccagcggcggcgtccgggagcccgtggtacggccccgaccgcgtgctgtacctgagcccactgtccggcgagccaccgagctacctgactggcgagttcccgggcgactacggctgggacaccgcggggctgtcggcggacccggagacgttcgccaagaaacgggagctggaggtgattcactcccgctgggccatgctgggcgcgctcggctgcgtcttccccgagctgctcgccccaacggcgtcaagttc

SEQ ID NO: 76090 - DNA, 360 bp, Zea mays
ctctacagtgaatcgtattaagagatagagaagacagagataatagagagatagatcagaggagtgggagacccgcgagaggctgccgtgtacggaccgtacactcagcgtctgccaacgagggataacgggatcgccgggatccgaccgatcaagcatgactgggagccggtcgttgtgcggatgaatgcacccaccgccgccgccaacaaagatcagaaggccgtcaacgccgcacgccgcgcccgttcggacatccataccatgacgaactagcaacgctggtacgagataagcggcatccagcggtacaaccctcaatagcacacgcctctattacgacacctcctgacctccccc

SEQ ID NO: 76091 - DNA, 423 bp, Zea mays
ataaaagaaacactaatggcagccctttttccaatgccaaatcgacgacctatgtataaaaaaaagagaaattttttggatttgaagaaaaaataaaaggaattctatcaatttttattttccatttatttagttagtttttcttaatgaaattgaaattattaactaacagagcaaacacaaataaagaaacaactttgctgaccatgatagatttttatctagttggaagagtcctcttaatattcatctagtcttatataagtttgggtatatagaaatacaaacagaaaagagaggatagaggataggctcattacataaaaaaaagatatggaaatagccataatacataacaaaaaagaaaaaaaggagcgggagagccaaatgaatcgaaagattcatgtttggttcgggaagaga

SEQ ID NO: 76092 - DNA, 399 bp, Zea mays
  unsure (1)..(399): unsure at all n locations
gcaaaggcagcacactcagctatccagcaaaagagatcgagaggcaggagtcatggccaccgtcagcgccgccgtggtgaccaccatcgttgcccgcgccgcgatcgccaggcccaatgctctagggctgcctgcgctgagggcgaggagcgagagggtgcggtgcagctacgccaaggacgcggccccagtcagcaccaagggcgcaggcgcgtcgctgctcgccgcagcgggcgcggtgaccgcgtcggcggggcccgcgctggcgctcgtggacgagcgcatgtccacggagggcaccgggctgagcctcgggctcagcaacaacctgctggggtggatcctcctgngggtcttcggcctcatctggtccctctacaccatctacacctctgacct

SEQ ID NO: 76093 - DNA, 417 bp, Zea mays
cccacgcgtccgcccacgcgtccgcccacgcgtccggtaagtgaattatgtgctgagacgggagccaaccaggaggatgccctcgcgcgaattgaaaagctttcagaagtaaacccgatgcttggcttccgtgggtgcaggcttggtatatcgtaccctgaattgacagagatgcaagcccgggccatttttgaagctgctatagcaatgaccaaccagggtgttcaagtgttcccagagataatggttcctcttgttggaacaccacaggaactggggcatcaagtgactcttatccgccaagttgctgagaaagtgttcgccaatgtgggcaagactatcgggtacaaagttggaacaatgattgagatccccagggcagctctggtggctgatgagatagcggagcaggctgaa

SEQ ID NO: 76094 - DNA, 468 bp, Zea mays
gtcgacgcgcgcgtccggtcattcaccgtgcgcgcctctctccgcaaggccaccggcaccgccgccgtggcaatggctgccagcgccctgcttgccggcggtgccatggcccaggaggtgctgctgggcgcaggcgacggcgggctcgtcttcgagcccagccagttcagcgtcaaggccggcgagaccatcacattcatgaacaacgccggcttcccgcacaacgtcgtcttcgacgaagacgatgtgccgatcggcgtcgacgccaccaagatctcgcaggaagagtacctcaacgcgccaggcgagacctactccgtcaccctcaccgtgccgggaacccacggcttctactgcgagccgcatcaatgagccggaatggtcggcaagatcaccgtcaactaagtaagctagctatcgatcgatatccattcatgtaatagctgttgcctcctgccttgtccttcc

SEQ ID NO: 76095 - DNA, 430 bp, Zea mays
tacagacactcgcgcggacgcgtgggcggcctccggggctacgccgcgcccatgtccgcggtggcagcgctgccgttcgtgagggtgggcaggaagaggtcgtcgtcgcagggcatccgctgcgactacatcggctccgccaccaacctgatcatggtgacgacgacgacgctgatgctgttcgcggggcggttcgggctggcgccgtcggcgaaccgcaaggcgacggcggggctgaagctggaggcgcgcgactccggcctgcagacgggtgaccccgccgggttcaccctcgccgacacgctggcctgcggcgccgtcggccacatcctcggcgtcggcatcgtgctcgggctcaagaacaccggcgccctcgaccagatcatcggctagatccctacgtcgtcgttgttaagatcagactcagcag

SEQ ID NO: 76096 - DNA, 399 bp, Zea mays
acgcgtccagccactctgcggtggtgcagctgcactcgcgggaggacgtggaggcgctcatcgacgagcaccgcggcgacaagggcaagctcgtcgtgctggacgtgggcctcaagcactgcgggccctgcgtcaaggtgtaccccaccgtgctgaagctgtcgcggtccatggtcgacaacaccgtcttcgcgcgcatgaacggcgacgagaacgacagctgcatggacttcctcatggccatgaagatcgtggaggtgcccactttcgtcttcatcagggacggccagatcgtcggccgctacgtcagctccggcaagggggagctcgtccgtgagattctccgatacaagcgcgtcacggtcacctactgaagtgaactactgaacatcaaaccag

SEQ ID NO: 76097 - DNA, 386 bp, Zea mays
gcgtcaaccaacgcgtccggtcagttgttgacctcacggtcagaatcgagaacggggcctcttacgaggaactcaagagagctattaaggctgcctctgagggcgcactcaagggtattacgggctacgtcgaggacgatctggttgccaccgacttcagcggtgacagcatgtctagcctctgcgatcccgggggcaggattgcgactgcaactaccagttcatcgcgctcgtcacgtggtaccaccactcagtggggccaccggagccccgtcatcgagctgatccgtcagtcgatctcgacttagtcaacacacagctgtctgcgtcacgaacgccggtcgtccacaaccggactgggtcccacaggaacaatgccacggatc

SEQ ID NO: 76098 - DNA, 434 bp, Zea mays
cgctgagaagaaggatcggctgcagctggcggagatcaagcacgcgcgcctcgccatggtcgccttcctcggcttcgccgtgcaggccgccgtcaccggcatggggccactcaacaactgggccattcaccttagcgacccactccatacgacacatcttcgacactttctgacgatcctcttaatcccgtcattgctctgctccgtccatcgatcgaaacgtggtcttgaattaactattatcgctatgagcctgcagatggatcaacccgtcatgcgtcgtgtcagtttgtgatgaatgggagagagggtattggacaacattgatcacaccgtcgtgcttatgtctcgttaattatgagagctacagctccgatttggcgatttgtaatatatgaaccagtgatgaataaatgcattcacttgttcaaaaa

SEQ ID NO: 76099 - DNA, 460 bp, Zea mays
gggtcgacgcaagcctctacgctgagtgcatactacagcttgtgcgcgcgcaatggcactcgtgtccgcctcctcgtcctccaccagcgccgtcgcggcgctccccaggaatgggcagcagcgggcgtcgtcgtcgttgttctcctcctcctcctcttcctccttcgtcgtcggcaagacgctgctgatgcatgccgaggcagcccggccgtcgttcgccgtgcgctccgcggcggattccgacaggccgatctggttccccggcagctccgctccgccgtggctcgacggcagccttctcggcgacgtctgctttgatgcctggggcctcggatctgacccggagagcctgccgtggaacatgcatgcggagctggtgcactgccggtgggcgatgctcggcgcggctggtatcttcatcccggagttcctgaccaagatcggcgtcctcaacacgccc

SEQ ID NO: 76100 - DNA, 406 bp, Zea mays
catctaccagcgactcagcgagcgagagcagcacacacgcagctagctaggagcagcagcagagcagcggcgatggcggcctccatgatctcctcgtcagctctggcggtggcgcctcagggcctgccgcccctcggccgccgcgcctcctccttcgccgtcgtctgctccaagaagaagatcaagaccgacaagccctacgggattgggggtggcctgaccgtcgacgtcgacgccaactggagaaagggcatcggcaagggcgtgtaccagttcgtcgacaagtacggcgcgaacgtcgacggatacagcccagtctacaacgaggatgactggtctcccaccggcgacgtctacgtcggtggaaccactgggcttctgatctgggccgttcacctcgctggga

SEQ ID NO: 76101 - DNA, 412 bp, Zea mays
caccaccggacgctagctcaccaccaacctcagcacatcgaggagaagaggagtggccatggcttcgtcggtggccaccgcggcgagcacattcctgggcacccgcctggcggacccggcgccgcagaacgggcgcatcgtggcccggttcgggttcggcggcggaaagcccaaggctgccgtcccgaagaaggtggcgaagacgtcgatctcctctgaccggccgctgtggttccccggcgccgtggcgcccgactaccgcgacggctcgctggtcggcgactacgggttcgacccgttcgggctcgggaagcccgtggagtacctgcagttcgaactggactcgctggaccagaacctgaccaagaacgacgccggcggcatcatcggcacccggttcgagtcctccgac

SEQ ID NO: 76102 - DNA, 432 bp, Zea mays
cccacgcgtccgggtccagcttcgactggctcgcagtggcaactggcaggtatgcacacgcgaagcgataaggtcggttaagccgtaacagtcgttgatgtcgccgccgccgtcgtccctcgtggtgctcccgctcctcctccccctcctcctcgccgctgtatcccacgctacggctaatgcggccggtgccggcgcccctcccccagtgccgacgccgtggccggagcagttccacgcggtggtcttcaccaatctcaccgagagcggcggccggctgcagctgatcgacctgtactacgactggcccaggggccgcaacctcaacctcatccgggaccagctctccagcgacccgctctacgacgtcgagtggaccaacggcacctcctacttcttcgactccgggtcctgccgcaccatgcgtttccc

SEQ ID NO: 76103 - DNA, 405 bp, Zea mays
cgcattcatgaccttcttcggaatttgtggcttgctcctcggctctgtcccatgcttcctcaagggatgcgttttcgtgatggatgccttcgtcgagtactaccggcacggcggagggaaggtcatcctcctgctggtggaagccattgagatgtttctcattgcaacggtcacgtttgtcttggggacgggcttgtacgagctcttcatcagtaacatggactccttttacgggtccaacctcctcggcctgttcagccttccggaacgggccaagtgggttgaaatcaagtcggtaaatgatctcaagacaaagctgggccatgtcattgtcaagggtcctctggttggcatccttcgagaaagagcaagaaggtgaccaccaaatcctgtgctgacctcttg

SEQ ID NO: 76104 - DNA, 459 bp, Zea mays
cggacaatcgcgcccaggctgcattagctcgccttgaagctcttgagagcgataatggtggggtcgaggtggtagatcttaatgatgatgagtacggatccacggatgaagaagaccctgttctcatgcaaaaaaaacagtccaagatcatgaaacgtaaaacaaggcaagggaaagctttggagaagagggcagcaagatcactcatggatgtgctacaagaagcaaatttggagtccgttcctcctcatgtgccaacatattcaagggctgctgtgggtccaccgagcacttcatctcgacgccactactgctcagtttgcggtagctctgcaacctacacatgcgtgaggtgtgggacgcggttctgttcatgccgctgtcaagtcatacacaatgatacacgctgcctgaagtttgtggcttgatcggctggatatgtataagctacatttgatg

SEQ ID NO: 76105 - DNA, 454 bp, Zea mays
gctgcttcgtcggcggcctcgcctgggccacggacgaccactccctccacaacgccttcagcacctacggcgaggtcctcgagtccaagatcatcctcgatcgggagacgcagaggtcccgcggcttcggcttcgtcaccttctccacggaggaggcgatgcggaacgccatcgagggcatgaacggcaaggagctggacggccgcaacatcaccgtcaacgaggcccagtcccgcggcggccgtggaggcggcggcggcggcgggtacggtggtggccgtggaggcggcggctacggcggtggcgggcgccgtgatggcggcggcggctacggcggtggcggcggctacggtggtggcggcggcggctacggtggtggtggcggcggctacggcggtggcaaccgtggcggcggctacggcaactccgacgggaactggaggaactgagcggt

SEQ ID NO: 76106 - DNA, 453 bp, Zea mays
  unsure (1)..(453): unsure at all n locations
agcccacgcgtccgggtaggagtcatggccaccgtcagcgccgccgtggtgaccaccatcgttgcccgcgccgcgatcgccaggcccaatgctctagggctgcctgcgctgagggcgaggagcgagagggtgcggtgcagctacgccaaggacgcggccccagtcagcaccaagggcgcaggcgcgtcgctgctcgccgcagcgggcgcggtgaccgcgtcggcggggcccgcgctggcgctcgtggacgagcgcatgtccacggagggcaccgggctgagcctcgggctcagcaacaacctgctggggtggatcctcctgggggtcttcggcctcatctggtcnctctacaccatctacacctctgacctcgacgaggacgaggagtccggtggcctctcgctctagatccactcctctcctgttaatgatctgaatgtanacatggtggtg

SEQ ID NO: 76107 - DNA, 434 bp, Zea mays
  unsure (1)..(434): unsure at all n locations
cggacgcgtgggtcacgccaagagcgagggcgcggcggcggccacggacaagcagcggttcaagacgctgccggcgtcggaggcgctgccgcggggccaggccatcggcgggtacatcttcgtctgcaacaacgacaccatggacgagaacctcaggagggagctgttcgggctgccgtccaggtacagggactctgtgcgtgctatccgcccgggactgcccctcttcctctacaactactccacgcaccagctccacggcatctttgaggccgcgagcttcggcgggaccaacatcgacccgacggcgtgggaggacaagaagtgccccggcgagtcgcgcttccctgcgcaggtgcnggtggcaacgcggaagatctacgacccgctggaggaggacgccttcggccccatcctgcaacactacaacgggc

SEQ ID NO: 76108 - DNA, 450 bp, Zea mays
gcagatacagcagagagccatcgacacgatcgcgagcgcaagcacgtacgttgtcggaagctcaagttagaagaagcaccagtgcctgatcgatggcagcccatgctctcctctccggccggcagctgctgggccgccccgtgcagtcggccgtctctaggtcgtcggcgacgaaggtgcccttcgttgtcacggctagctccagccctccagccaatcaaggtgccgataggcagctgtggttcgcgtccaagcagtcgctctcctaccgcgatggcacgctgcccggcgactatggcttcgacccgctgggcctctcggacccggagggcaccggcggcttcatctagcccaagtggctggcctatggcgaggttatacaaggccgctacgccatgctgggcgcggtgagcgccatcgcaccggagatcttcagcaagatgggcatca

SEQ ID NO: 76109 - DNA, 327 bp, Zea mays
gtcgcagcagctagcgcccggccggccagtcgagtgagtccatcctccatcgccatccaatggccgccaccgccctgagcatgagcatcctccgcgcgccgccgccctgcttctcgtccccactcaggctcagggtcgcggttgccaagccgctggcggcccccatgcggcgccagctgctgcgcgcgcaggccacctacaacgtgaagctgatcacgccggagggggaggtggagctgcaggtgcccgacgacgtctacatcctggacttcgccgaggaggaaggcatcgacctgcccttctcctgccgtgcggggtcctgctcct

SEQ ID NO: 76110 - DNA, 450 bp, Zea mays
cggacgcgtgggtgccatcaaccttacttgatgatctccctaacgaagttgctctccagtgccttgcacgggtaccattcttgttccatccgacgcttcagttggtttgccgctcttggcgagcatcagtttgcagtggcgaacttctcaaaattcgtaaccagattggtacgacagaagagctcttgtgtgtgttggcgtttgaaccagaaaacatgtggcaactttatgatcccctacgagacaagtggataactcttcctgtcatgccatctcagattaggaacatagcccgctttggcgtggcctcagttgctggcaagctctatgtaattggtggtggcagtgatcgagttgatccgcttactggagatcacgacaggatctttgcaagcaatgaggtttggtcttatgatccgctgcaccgtgtgtggtcccagagggctccta

SEQ ID NO: 76111 - DNA, 459 bp, Zea mays
aaagacaatctgattcattgattcttgaagagatcgagcttcttttgcaccacaaggtcgaggatgtcttgcaactgcggatcaagctgcggctgcggctcaagctgcaagtgcggcaagaagtaccctgacctggaggagacgagcaccgccgcgcaggccaccgtcgtcctcggcgtggccccggagaagaatgccgcgcccgagttcgtcgaggccgcggcggagtccggcgaggccgcccacggctgcagctgcggtggcaactgcaagtgcgacccctgcaactgctgatcacatcgatcgacgaccatggatatgattattatctatccagcttgtggtggtggttgaacaataataagccaggccgagctggctgccatacataggtattgtgtggtgtgtgtgagagagatagacacagagttcttcagtctgctatctctctctgcatgt

SEQ ID NO: 76112 - DNA, 303 bp, Zea mays
atgcatagtgtgtgactcgttagttttttctttagggtcaaaaatggaaaaaaacttagtaatgatagaaaattaactaataaccaacctattgcttcgtattgtcgagatcctaactaagaaacagtcactatgtgaataaatacatctatcaaaaatgagtagatctatcatatagttgtagcaactgcatttttttctctacaaaagaaacctgattctaggctgtgaagcaaaactaaagggatgtggataaaaggagggatgatagataaaaaaaaaaaagaaaaaaaaagaagaagg

SEQ ID NO: 76113 - DNA, 373 bp, Zea mays
cttgctctgatagcttgctccaggacgtacgtacgtacgtagatcgatccatcgatcgctagctagctgacgaccatggcgtccctctcctctgccgccatcaccgccccttccttcacggccgcgcccgctcgcgcagtggtcagcaggaggtccttcaccgtgcgtgcctctctccgcaaggccactgccaccgccgccgtggccgttgccgccagcgtcctgcttgccggcggcggcgccatggcccaggaggtgctgctgggcgcaggcgacggcgggctcgtcttcgagcccagccagttcaccgtcaaggccggcgacaccatcaccttcaagaacaacgccgggttcccgcacaacgtcgtgttcg

SEQ ID NO: 76114 - DNA, 456 bp, Zea mays
gtgtagtgtgtagtcgcagcagctagcgcccggccggccagtcgagtgagtccatcctccatcgccatccaatggccgccaccgccctgagcatgagcatcctccgcgcgccgccgccctgcttctcgtccccactcaggctcagggtcgcggttgccaagccgctggcggcccccatgcggcgccagctgctgcgcgcgcaggccacctacaacgtgaagctgatcacgccggagggggaggtggagctgcaggtgcccgacgacgtctacatcctggacttcgccgaggaggaaggcatcgacctgcccttctcctgccgtgcggggtcctgctcctcctgcgccggcaaggtcgtctctggcttcgtcgaccagtccgaccagagcttcctcaacgacaaccaggtcgccgacggttgggtgctcacctgcgctgcgttacccacctccgacg

SEQ ID NO: 76115 - DNA, 444 bp, Zea mays
cccacgcgtccgcagtcaccaaaccaaaaccgctctcgagtctccatccattctctccgctcatccgcagctctcgagtctccagctctagctagccttagtctcgtccaagggacgaaggggccaccatgagcgtggtgatcctggacggctccacggtgcgcggcttcgtggcggacgaggcggccttcgcgcgcagcctggacgcgcggttcgccgcgctggacgccaacggcgacggcgtgctgtcccgcgccgagctccggcgcgcgctcgagtccttccgcctcctcgacggcggcggcttcgggtccgcccagccggcgccgctccccgccgaggtcgccgcgctctacgacgccgtcttcgagcagttcgacgccgaccacagcggcgccgtcgaccgcgccgagttcatgacgagatgcgccgcatcatgctcgc

SEQ ID NO: 76116 - DNA, 458 bp, Zea mays
gatttatcacccgaatgtcgatgagatgtctggctctgtctgtttggatgtcataaaccagacatggagcccaatgtttgatctagtaaatgtttttgaagtattccttccacagctgttgctgtacccaaatccttctgatccattaaatggggaggctgcagcactgatgatgcgtgatcggcctgtttatgaacagaaagtgaaagaatattgtgaaaagtatgctaaaccagaggacgctggcatcaccccggaagacaagtccagtgatgaagagcttagcgatgatgacgacgacgacgacaatgactccggggacgaagctatacttggcaatcctgatccttagtctgagtaggaaacagcgcagtcaggtcatcaatacattgtccaattgcagaaactgcaagtaaacaaaaactgaaaaactaaaaagaaaaaaaacctctggatgt

SEQ ID NO: 76117 - DNA, 458 bp, Zea mays
  unsure (1)..(458): unsure at all n locations
ggcagcgacacgatcgcgagcgcacgcacgtaagcacgttgtcggaagctcaagttagaagaagcaccagtgcctgatcgatggcggcccatgctctcctctccggccggcagctgctgggccgccccgtgcagtcggccgtctctaggtcgtcggcgaggaaggcgcccttcgtcgtcagggccagctccagccctccagccaagcaaggtgccgacaggcagctgtggttcgcgtccaagcagtcgctctcctacctcgatggcacgctgcccggcgactatggcttcgacccgctgggcctctcggacccggacggcaccgggggcttcatcgagcccaagtggctggcctacggcgaggtgatcaacggacgctacgccatgctgggcgcggtgggcgccatcgccccggagatcttcggcaagatgggcatcatcncgccggagatcgcgctg

SEQ ID NO: 76118 - DNA, 458 bp, Zea mays
  unsure (1)..(458): unsure at all n locations
cccacgcgtccgcactcatcgatctacacacatacatagtttcttctactacacgacgacaaacatggggaagcctgcgaagatcggagagtggggtggatacgccggcgatcgtcgggatctgagggctactccggaccggctgatcgaggtgaaggtcacggcggacaacagcagctgcatccgctccatctccttcatctacatcggagccgatggcaaaccgtacgaggaggggccatggggtttcggccatgctggcacggagtacaagattgatctgtgcaggttcgacgagagcttgacggagatctccgggaccacgggcccagcctacaacattgacaatctggtcaagtctctcaaattcgtcaccaacaaacgcgcttacggaccgtacggcaaggacganggcaccccgttccgtgtcaaggtgatgaacaacggccacgtcgctg

SEQ ID NO: 76119 - DNA, 238 bp, Zea mays
gcttactctgaaaaccgagagggaaaagaagcgtgagaagtacttccccatgaggaagtatgctatcaatgcctatgtcagaactgtgagatgctgtgcttagcatatcatccgctgtgttttaatttttggtttgtatggacatttgttgtgggtcggaagtacgatgtattcctctgtttctataaatggctagattggtttgactggcaaaaaaagaggtggcgacaaaaaagaa

SEQ ID NO: 76120 - DNA, 464 bp, Zea mays
  unsure (1)..(464): unsure at all n locations
cccaagcgtccgcattgccactggtctgccagcctcacctggggctgctgtgggccaggttgtgttcactgctgaggatgctgaagcatggcattcccaagggaaagctgctattctggtaagggcggagaccagccctgaggacgttggtggcatgcacgctgctgtggggattcttacagagaggggtggcatgacttcccacgctgctgtggtcgcacgtgggtgggggaaatgctgcgtctcgggatgctcaggcattcgcgtaaacgatgcggagaagctcgtgacgatcggaggccatgtgctgcgcgaaggtgagtggctgtcgctgaatgggtcgactggtgaggtgatccttggaaagcagccgctttccccaccagcccttagtggcgatctgggaactttcatggcctgngtggatgatgttagaaagctcaaggtcctggctaacgccgata

SEQ ID NO: 76121 - DNA, 462 bp, Zea mays
  unsure (1)..(462): unsure at all n locations
cccacgcgtccgcattgccactggtctgccagcctcacctggggctgctgtgggccaggttgtgttcactgctgaggatgctgaagcatggcattcccaagggaaagctgctattctggtaagggcggagaccagccctgaggacgttggtggcatgcacgctgctgtggggattcttacagagaggggtggcatgacttcccacgctgctgtggtcgcacgtgggtgggggaaatgctgcgtctcgggatgctcaggcattcgcgtaaacgatgcggagaagctcgtgacgatcggaggccatgtgctgcgcgaaggtgagtggctgtcgctgaatgggtcgactggtgaggtgatccttggaaagcagccgctttccccaccagcccttagtggcgatctgggaactttcatgggctgngtggatgatgttagaaagctcaaggtcctggctaacgccgg

SEQ ID NO: 76122 - DNA, 463 bp, Zea mays
gcaactgcaaagcagcaagctctactcttcttctgtactgaacgtgtgactagataacaataagcgtgaaccatggcggacgagtacggccgcagcggctacggcaggtccggcgccggcgacgactacgacagcggctacaacagcaagtccggcactgatgactacggccgtggcgaaggtggctacaacaagtcgggcggcgatgacgactacggccgcagcggcggcgatgggtacggcaggtccggcggcgacgactacggccgtggcaccggcggtggtggctacaacaagtccggcggcggcgacgactacggccgcagcggcggcgatgggtatggaaggtccggcggcgacgactacggccgtggcaccggcggcggcgggtacaacaagtccggcaacgacggctacgacagcgggtacaacagatcgggcagcaccaacgacgacgaatacg

SEQ ID NO: 76123 - DNA, 460 bp, Zea mays
cccacgcgtccgcacgcacgcatacacagcacagagtgaggtaagcatccgaaaaaagctgtgatctgatcgacatggccgccgccaccatggctctcacctcccgcgcgctcgtcggcaagccggcgaccagcaccagggacgtcttcggcgaggggcgcatcaccatgcgcaagactgctggcaagcccaagccagcggcgtccggcagcccctggtacggggccgaccgcgtcctgtacctgggcccgctgtccggccagcccccaagctacctgaccggcgagttccccggcgactacggctgggacaccgcggggctgtccgccgacccggagactttcgccaagaaacgccagctggaggtgatccactgccgctgggccatgctgggcgcgctcgggtgcgtgttcccggagctgctcgcccgcaacggcgtcaagttcggcgaggccgtgtg

SEQ ID NO: 76124 - DNA, 466 bp, Zea mays
tcgtgggtcgacacaagcctctacactgagacgtagaagttgagtgttttccgctcaaacaaacatctgtatgctcaagtcatcgacgacacaaagcaatgtactctggcttcagcttcaaccatgcacaaatctctctccaaggaatttgaatactcagctgggccaacgatcgaaatagcacaaaagatcggtgaggtgattgccaagtcttgcttggagaaagggatcaacaaggttgtcttcgaccgaggtggtttcctctaccatggccgcataaaggctctcgctgattctgccagggagcacgggcttgaattctgagtcgtccaggcgtttgttcatatctccaggatcacctgtaatcttctttttttttttctctccatatgccgaacagattgtagtcactcgccttgttctgcatggtgcaaagccatggccactcgttgaccatgtcacgttt

SEQ ID NO: 76125 - DNA, 474 bp, Zea mays
tcgtgggtcgacgcaagcctctacagtgagtcatatatacgagagcagcacacacgcagctagctaggagcagcagcagagcagcggcgatggcggcctccatgatctcctcgtcagctctggcggtggcgcctcagggcctgccgcccctcggccgccgcgcctcctccttcgccgtcgtctgctccaagaagaagatcaagaccgacaagccctacgggattgggggtggcctgaccgtcgacgtcgacgccaacgggagaaagggcaagggcaagggcgtgtaccagttcgtcgacaagtacggcgcgaacgtcgacggatacagcccaatctacaacgaggatgactggtctcccaccggcgacgtctacgtcggtggaaccactgggcttctgatctgggccgtcaccctcgctgggatcctcggcggcggcgccctcctcgtctacaacaccagcgccctctccggct

SEQ ID NO: 76126 - DNA, 464 bp, Zea mays
  unsure (1)..(464): unsure at all n locations
gtaaggtttcagcaattcagctccctcgcctccgccgcggcaccggcactacgagtgcttcgctaccagccagccagcacactctacgagtcgccatcttccactccaccgaggcagctccaagccatggccatggagaaggccgcctccttcctctcctccctcttaggcggcggcggcggggagccggcggcgactgtgaaatctatcttcatataccctatcaagtcctgcaggggtcttgccgtgtcacaggcgcccatcacctccactgggttccggtgggatcggcagtgggtggtggtgaacgccaaagggcgagcatacacccagagggtggagcccaagcttgctctggtccangtggagttgccgccggaggccttcgctgagaactggcagcccacgcccgacgaccacctggttatcagagcacccggaatggacacactgaagatacctct

SEQ ID NO: 76127 - DNA, 439 bp, Zea mays
ggcaaactccataaagcatcaccgccgcgacgacgatcgcagcctcgctcaaagccgcggccaccctgatgcagccggccaagatcggcggccgggcgccctttgcctcgctgccgtctcgcccgtcgtcgcaactcgcctgcagggcgttcggcgtcgacgccggcgccgccaggatcacgtgctccctgcacgacgtcgccagcaagtgcgtcgacgccgcgaagctcgccggcttcgcgctcgccagctcggcgctcctcgtctcgggcgcgagcgcagagggcacgcccaagaggttgacctacgacgagatccagagcaaagcgtacatggaggtgaacggcacgggcacagcgaaccagtgcccgaccatcgacgggcgcgtggagtcgttcccgttcaatgccggcaagtacaacatgaagaacctgtgcct

SEQ ID NO: 76128 - DNA, 446 bp, Zea mays
  unsure (1)..(446): unsure at all n locations
ataaacaagacggcctgctccacacgacttgtggcacgcctgcttatgttgccccagaggtgattaacagaaagggttatgatggtgcaaaggctgacatatggtcttgtggggtcatcctgtttgtgctattggctggttatcttccgttccatgataagaacttgatggacatgtataagaagattgagaaagctgacttcaaatgtccaagttggttttctaccgatgttcggaggcttttgcaaaggattcttgatcctaaccctagtagaaggatttcggtggaaaaaatcatggagaatccatggtttangaanggtttaagtgcanagctacttaagtacgatttacagaataagaatgcccctcatgtggacaagaaggcagattttgattcactgagcaccaacgtaacaactgagagcaagcaacatgaagaaaag

SEQ ID NO: 76129 - DNA, 462 bp, Zea mays
actagttctagatcctgttggacggcgagcacggcatcgagcgcacgttcgaggtggcgcagaaggtgtgggccgaaaccttctacgccatggcggagaacaacgtcatgttcgagggcatcctgctgaagccgtccatggtgacgcccggcgcggaggccaaggacagggccaccccggagcaggtggccgcgtacaccctcaagctcctccaccgccggatccccccctccgtgcccgggatcatgttcctctccggcgggcagtcggaggtggaggcgacgcagaacctcaacgccatgaaccaggggcccaacccgtggcacgtgtccttctcctacgcgcgggcgctgcagaacacctgcctcaagacctggggcggccagccggacaaggtcaaggcggcgcaggacgcgctgctgctgcgcgccaaggccaactccctggcgcagctcggcaagt

SEQ ID NO: 76130 - DNA, 455 bp, Zea mays
  unsure (1)..(455): unsure at all n locations
agcaagctcgatctactactactactagctggtacacatactagccagcctgccagccagcttgccatggcgcccaccgtgatgatggcctcgtcggcaaccgccgtcgccccgttccagggtctcaagtccgccgccagcctccccgtcgcccgccgcagcaccaggagcctcggcaacgtcagcaacggcggaaggatccggtgcatgcaggtgtggccggcctacggcaacaagaagttcgagacgctgtcgtacctgccgccgctgtcgacggacgacctgctgaagcaggtggactacctgctgcgcaacggctggataccctgcctcgagttcagcaagctcgggttcgtgtaccgcgagaactccacctccccgtgctactacgacggccgctactggaccatgtggaagctgcccatgttcggctgcancgacgccacgcaggtgtt

SEQ ID NO: 76131 - DNA, 454 bp, Zea mays
tacacatagacgttctgacaaccactccctctcctctcccgtcctatccatccggcacgcccagcatccatccactcctcccctgctccggctccggctccggctctgccatgggcctttcaacagtttactccccggccggaccgcgcctcgtgccggcccctctcggccgctgccgctctgcccagccccgccgcccgcgccgggcccagctcgccaccgtccggtgctccgtcgacgccaccaagcatgcgcaggatggcgtggcgacggcggtcgcgacggaggcgccagcgtcgcggaaggagtgcttcggggtcttctgcaccacctacgacctcaaggcggaggacaagaccaagtcgtggaagaagctagtgaatgttgctgtgtcaggcgcggccgggatgatatcaaatcacctgttgttcaaactcgcttctggtgaggtttt

SEQ ID NO: 76132 - DNA, 467 bp, Zea mays
tcgtggtacgacgcaagactctacagtgagtacttatatagatggctgtctcaatctccccaaaccatgaggttgcatccatcttcgcagcagctttcttttctctcttcaatctcttctcgggcttcttcattccgagaccgagaattcccggatggtggatctggtactactggatttgcccactggcatggacagtgtatgggctcatcgtgacacaatatggagacctagaagacctcatctcagtccctggagaaagtgagcagacgataagctactatgtaatacatcattttggataccacaaggattttctgccagtcattgcgccggttctggtactctttgcagcattcttcgcgttcttgtacgcggtctgcatcaagaagctgaactttcagcaacgataagaaaaagatatagcaacaaaagctcttgagatttttttggaaacacttcctttt

SEQ ID NO: 76133 - DNA, 447 bp, Zea mays
caacgacgacggaggcggcaaagagcggctcagccgcaccggtgcggtgccagcggatcggctgcgacgccgtattcaccgacgatgacaaccgcgagggctcctgccaataccacccctccgcacctatgtttcatgacggcatgaaagaatggagctgctgcaagcaaagaagccatgatttcagcttatttttgcagatacctggatgcacaacaggaaagcatacaaccgaaaaaccaatcacaaaagctgtttcatctaaccgtacaaaggcaacaccgatccagtcctctaagcagggtgtgggagttgatgtgtgtgcaaggtgtcgtcaaggtttcttttgctccgatcatggatcacagcccaagccacaaaagccagctgctaccgacgatacaaacaaggaacctgttgagaaatcagctgttccaccgcccaagg

SEQ ID NO: 76134 - DNA, 460 bp, Zea mays
  unsure (1)..(460): unsure at all n locations
gcttctggcgaccaaattctgccgtctccaccgccgccgcagccagcgtcaccggagggatctgccgtctcccttgctccacgcgatgaacaccgacatcaccgcctcgactaagccggagtacccggtggtggatcggaacccggccttcaccaaggtggtcggcaacttctctgcgctcgactacatgcgcctctccaccatctccgccgtctccgtcaccgttggctacctctccgggatcaagccggggatccggggcccgtcgatggtcacgggcggcctcatcggggtcatgggagggttcatgtacgcctaccagaactccgccgggcgcctaatgggattctttcncaacgacgccgaggttgcgcgctacaagcacaagcttcattgaggatccagctccattccgtctctcttttcgcaaccgtttcgcctgttcccttcctgattccgt

SEQ ID NO: 76135 - DNA, 429 bp, Zea mays
gacgagacgtgcacaacgtgtacgttgaccgccccgaggacgccgaccctgaggagttccacatccgcaccctcacccccgtcctcggcagcgaacagaaggccagggacgcagtgctctaccactacaagaacgccgccagcggcttctccgcgaagctcaccccctagcaggtcaaggatctcaaggagcaaccaggtgttctccaggttgtgccgagccagacttaccagctacatggtcctgggtctggcactcaccagggcacgacacacaccttgggccttatgtgaaggcgtatgagaatcaagaagactgtgtttagtatggctgtatggcacaggtctgacgaatgtgtatagtacagtactatgtaagaataacggacgtatcgtctatatactgctttgcgcatgttcagccctgttc

SEQ ID NO: 76136 - DNA, 453 bp, Zea mays
gagacgggagccaaccaggaggatgccctcgcgcgaattgaaaagctttcagaagtaaacccgatgcttggcttccgtgggtgcaggcttggtatatcgtaccctgaattgacagagatgcaagcccgggccatttttgaagctgctatagcaatgaccaaccagggtgttcaagtgttcccagagataatggttcctcttgttggaacaccacaggaactggggcatcaagtgactcttatccgccaagttgctgagaaagtgttcgccaatgtgggcaagactatcgggtacaaagttggaacaatgattgagatccccagggcagctctggtggctgatgagatagcggagcaggctgaattcttctccttcggaacgaacgacctgacgcagatgacctttgggtacagcagggatgatgtggggaagttcattcgcgtctatcttgct

SEQ ID NO: 76137 - DNA, 427 bp, Zea mays
  unsure (1)..(427): unsure at all n locations
cacacacgggtaaagctatctcgagctagctagctgctgtaagccgttgccatggccaaaatggtgttgctctgcgtgctcgtctccttcctcctgatgcccttggcctccctagccctgacgcaggacttctgcgtcgccgacctgacctgcagcgacacgccggcggggtacccgtgcaagtccagcgtcaccgccaacgacttctacttccacggcctggccggccagggcaaaataaacccactcatcaaggccgccgtgaccccggccttcgtgggccagttcccgggcgtcaacgggcttggcatctctgcggccaggctcgacatcgaggtgggcggcgtcgtgccgctgcacacccacccggcgggctcagagctcctcttcgtgacncaaggcaacgtcgccgccggcttcatcagct

SEQ ID NO: 76138 - DNA, 461 bp, Zea mays
cccaaccatctctctctagccgccagccatctcctatcccaacgctagcttcttttcccagccacaacatgtgagctcctcctcttaagccgttgccatctccctcctcggccacctttaccggccccctctacttcctggctcccaagcttcagccatggagcacgacccctccttgcctctctgtagcgtcaggacctcctccgagctcgacaaggatgtgctgtgtctcccccagtaccgaccatgtcgagctccggtgaccccttcccacagcacagcacgccgacgcccctgcatatgctcctccaccggggttctcctccagcagcacttccccgtagcgtgagcttcgtcgagccgttgctcccttcgtccccagcttcggcagccgagctccaaccagggacgtctagcgcccaggacgtacggccccctgctcctctatccacgacgcagag

SEQ ID NO: 76139 - DNA, 439 bp, Zea mays
cacgcacgcatacacagcacagagtgaggtaagcatccgaaaaaagctgtgatctgatcgacatggccgccgccaccatggctctcacctcccgcgcgctcgtcggcaagccggcgaccagcaccagggacgtcttcggcgaggggcgcatcaccatgcgcaagactgctggcaagcccaagccagcggcgtccggcagcccctggtacggggccgaccgcgtcctgtacctgggcccgctgtccggccagcccccaagctacctgaccggcgagttccccggcgactacggctgggacaccgcggggctgtccgccgacccggagactttcgccaagaaccgcgagctggaggtgatccactgccgctgggccatgctgggcgcgctcgggtgcgtgttcccggagctgctcgcccgcaacggcgtcaagttcggcga

SEQ ID NO: 76140 - DNA, 454 bp, Zea mays
attcatcacagtgtgactcattgctgatcggggataatgcggctgcgaacacctatcccaccattcaggtgggttgcactagtggccgtgttgagcacgaggcaagcacttccaaaatcggagaggatcagctattttatttccagcaaagaggggtagatcatgaaaaggctgttgccgccatgattggtggattctgcagatcggttttcgagcaccttccctatgaattcgcacaggaggtggacgcactcatgaaccttaaacttgaggggtcagttggctaatttgttggctcagcgactgcgtgcaaaactccatgacagccagttacctagaaaatccatgtgtacagcagtacgagaagaatgaagtgcacgatagatatacatatacatttcctggcttgtaatactgaatgttcacattatgcctatggcaattggcaacgaag

SEQ ID NO: 76141 - DNA, 466 bp, Zea mays
ccctagcgtccgcccacgcgtccgcggacgcgtgggcggacgcgtgggagaacatgaaggaaacaccgccgccgccgcgccttccattccagtactcgcggaggaaatgaacaccagccagcgccatggtcacgtcgacgaccgccgccgccgtgctgtccccgccgtccgtggccgggcttcgcctggcgccgtctccccgggcgcgcgtggcgttccgcgcggcgcgggcgcggcggtccgtggcggcgcgcgcggagctgagcccgtcgctggtgatcagcctgagcacgggcgtgtcgctcttcctgggccgcttcgtcttcttcaacttccagcgagaacgtggcgaagcaggtgcccgagcagaacggcaagacgcacttcgacgccggcgacgagcgcgccaatgagttctcgggcctgctcaagttcaacgaccccgtgggcttcaacctcgtcgacg

SEQ ID NO: 76142 - DNA, 438 bp, Zea mays
gcaaaccgtccccgatcttcggcggcagcacgggcgggctgctccgcaaggcgcaggtggaggagttctacgtcatcacgtggacgtcccccaaggagcaggtgttcgagatgcccaccggcggcgccgccatcatgcgggagggccccaacctcttgaagctggcgcgcaaggagcagtgcctggcgctcggcaccaggttgcgctccaagtacaagatcacctaccagttctaccgcgtcttccccaacggcgaggtgcagtacctccaccccaaggacggcgtctacccggagaaggtcaaccccggcagggagggcgtcggccagaacttccgcagcatcggcaagaacgtcaaccccatcgacgtcaagttcaccggcaaggccaccttcgactaatcacacttcacgtacgccgcaagccccagccgggatt

SEQ ID NO: 76143 - DNA, 459 bp, Zea mays
cacacatacatagtttcttctactacacgacgacaaacatggggaagcctgcgaagatcggagagtggggtggatacgccggcgatcgtcgggatctgagggctactccggaccggctgatcgaggtgaaggtcacggcggacaacagcagctgcatccgctccatctccttcatctacatcggagccgatggcaaaccgtacgaggaggggccatggggtttcggccatgctggcacggagtacaagattgatctgtgcaggttcgacgagagcttgacggagatctccgggaccacgggcccagcctacaacattgacaatctggtcaagtctctcaaattcgtcaccaacaaacgcgcttacggaccgtacggcagggacgagggcaccccgttccgtgtcaaggtgatgaacaacggccacgtcgctggcttctttggccgctctggagattgcc

SEQ ID NO: 76144 - DNA, 408 bp, Zea mays
agcacaccgcccccggtgtgctctccatggccaacgccgggcccaacaccaacggctcccagttcttcatctgcaccgtcgcgaccccttggctcgacggcaagcacgtcgtcttcggccaggtcgtcgagggcatggacgtcgtcaaggccatcgagaaggtgggcacccgcaacggctccacctccaaggtggtcaaggtcgctgactgcggacagctctcctagatctctctgatctggtctgttcggccgccctccctccgtcatcgtcgactccccctgcgtccgttcctttggatctgaataagatggtggtgatctgagtggtggtcttaggttatcatgtatcgctcgcagtttaatttagcggtttacgtgtggatctgtaaccccatggcgcctctgc

SEQ ID NO: 76145 - DNA, 448 bp, Zea mays
cttgaacaattattggatgacgacgacgacatggctgatctttatttgtctcgaaagttggctggggcatcttcccctgtcagtggttctggtggaccaaattggttccctgcctccccaactattggttcaaaaatatcaagagcaagtagagccagtgcagctactgtgcatggaaatgagaatgatgttgaagagctagagatgttgctggaggcatatttcatgcaagttgatggcacattaaacaaattgacaacgttaagagagtacatcgatgacacggaagattacatcaatatccagcttgataaccaccgtaatcagttgatccagctagagttattcttgagttctggtaccgtctgtctgtcgctgtactcattagttgctggagtctttggtatgaatattccgtatacctggaatgacggccacggatacatct

SEQ ID NO: 76146 - DNA, 334 bp, Zea mays
ctcaggactgggtatccatgccaggtgttataccggtggcttctgggggtattcatgtttggcatatgccagctctgaccgaaatctttggagatgattccgtattacaatttggtggaggaactttaggacatccttggggaaatgcatctggtgcagcagctaatcgtgtggctttagaagcctgtgtacaagctcgtaacgaagggcgcgatcttgctcgtgaaggtaatgaaattatcaaagcagcttgcaaatggagtgctgaactagccgcagcttgtgaaatatggaaggagatcaaatttgatggtttcaaagcgatggataccat

SEQ ID NO: 76147 - DNA, 347 bp, Zea mays
atcgagcgcacgttcgaggtggcgcagaaggtgtgggccgaaaccttctacgccatggcggagaacaacgtcatgttcgagggcatcctgctgaagccgtccatggtgacgcccggcgcggaggccaaggacagggccaccccggagcaggtggccgcgtacaccctcaagctcctccaccgccggatccccccctccgtgcccgggatcatgttcctctccggcgggcagtcgtaggtggaggcgacgcagaacctcaacgccatgaaccaggggcccaacccgtggcacgtgtccttctcctacgcgcggccgctgcagaacacctgcctcaaaacctggggcgg

SEQ ID NO: 76148 - DNA, 458 bp, Zea mays
cccacgcgtccgcggacgcgtgggggccgagaagcgctttatccggccgtacgtagcgataagagtggtgcacccgtagcggcacggcatggcggccacggcgtactccgtggcgctcctcggcggcgcacgcctgccggccgccttcctccctcgacgcagcagcgtgtgccaccaccagcttcgcctccaagacgcaccgaggctgatctccctgcaccgtgccagggccgcttccgaggacacgtcggcctccggcggcgacgagctcatcgaagacctcaaggcaaagtgggacgccgttgaggacaagcccaccgtcctcctgtacggcggcggcgccgtcgtcgcgctatggttgacgtccgttgtcgtcggcgccatcaacgccgtgccgctgctccccaagatcctggagctcgttggcctcggctacaccggctggttcgtctaccgct

SEQ ID NO: 76149 - DNA, 464 bp, Zea mays
  unsure (1)..(464): unsure at all n locations
cgtccgcaagaagcgcagagcccatggccatggccacgcaagcctccgccgccacgcgccacctgctggccgccgcctgggcgccggcggcgaagccgcggcagctgagctcgcagctcgcgctgccgtcgtcgtcctcccgcgggccggccccgctccgcgcgtccaccgaggaggcggtggaggcgcccaaggggttcgtggccccgcagctggaccccagcacgccgtccccgatcttcggcggcagcacgggcgggctgctccgcaaggcgcaggtggaggagttctacgtcatcacgtggacgtcccccaaggagcacgtgttcgagatgcccaccggcggcgccgccatcatgcgggaggggcccaacctcttgaagctggcgcgcaaggagcagtgcctggcgctcggcaccaggttgcgctccaagtacangatcacctaccagttctaccgcgtc

SEQ ID NO: 76150 - DNA, 394 bp, Zea mays
aaccgcgccgcaccagcgccagcccgcgccgtggtcagaaggaggtccttcaccgtgcgcgcctctctccgcaaggccaccggcaccgccgccgtggcaatggctgccagcgccctgcttgccggcggtgccatggcccaggacgtgctgctgggcgcaggcgacggcgggctcgtcttcgagcccagccagttcaccgtcaaggccggcgacaccatcacattcaggaacaacgccggcttcccgcacaacgtcgtcttcgacgaagacgaggtgccgagcggcgtcgacgccaccaagatctcgcaggaggagtacctcaacgcgccagccgagacctactccgtcaccctcaccgtgccgggaacctacggcttctactgcgacccgcatc

SEQ ID NO: 76151 - DNA, 443 bp, Zea mays
cacacatactgcatacacaacgcagagcatcagaagcagctgcgatctgatcgacatggctgccgccaccatggctatcacctcccgcgcgctcgtcggcaagccggcggctggcacgagggacgtcttcggcgagggccgcatcaccatgcgcaagaccgccgccaagcccaagccggcggcgtccggcagcccatggtacggtgccgaccgcgtcctgtacctgggcccgctgtccggctcgcccccgagctacctgaccggcgagttccccggcgactacgggtgggacaccgcggggctgtcggcggacccggagaccttcgccaagaaccgcgagctggaggtgatccactgccgctgggccatgctcggcgcgctcgggtgcgtgttcccggagctgctcgcccgcaacggcgtcaagttcggcgaggcggtgtggt

SEQ ID NO: 76152 - DNA, 455 bp, Zea mays
accaaaccagaccagaccagaccaatggccctgcgcctaccaatctcatcgtcccacgggctggcctccacgccggcgccaatctccacgacgacgtgccggccggccgtcttggcgacggccgcggcccagaagaggagcctgctgctggcgacggcctccgagacgaggggagtcgcgccggtgaggtccagcgggatcgagacgagcacggtgggtctgggatgtgaggccgtcaccgggcaggtcacggaggtcaacaaggacaccttctggcccatcgtcgaggccgccggcgacaaggtcgtcgtcctcgacatgtacaccgaatggtgcgggccttgcaaagtgatggctccgaaattccaggagatgtctgagaagaacctggatgttgtgttcctgaagctcgactgcaaccaggacaacaagccgcttgcgaaggagctgggcat

SEQ ID NO: 76153 - DNA, 457 bp, Zea mays
agcccacgcgtccgcccacgcgtccggtgaaatcccgcacctacctccttcctctctcaccgaggaccctcgcaccaagaactgagcgggaagagaggtagagaggcaagcgcacgagagtttctgctcctagtctcgtctcgccccgcctccgtctcctttccctctctggttctctctctgcgattctcgtcgcattggttccgttccctcacgaaaggcggtagctttctgtcttccctgatctatctagataatggcgaccacgacgtcagcgaccaccgccgcagcagcagccgccaccatcgccaagccgcgggggtcgtcgtcggacctctgccagagggtggccggcggcggcaggcggtgctccggggtggtgccgtgcgacgccgccggcgtggaggcccaggcgcatgccgtggcaaatgcggccagcgtcgccgccctcgagcag

SEQ ID NO: 76154 - DNA, 459 bp, Zea mays
ggcttctcctccccctcttaccaagtcctcctcgggttagggttccttagggttttgtggaggggcgatggcggcggctgatgtggagtaccgttgcttcgtcggcgggcttgcctgggccaccagcaacgagtcgctggagaatgccttcgcctcctacggcgagatcctcgactccaaggtcatcaccgaccgggagacggggaggtctcgcggcttcggcttcgttaccttctcctccgagaactccatgctcgacgctatcgagaacatgaacggcaaggagctcgacggccgtaacatcaccgttaaccaggcccagtcccgtggcggtggcggtggcggcggtggctacggcggcggtcgcggcggcggcggctatggtggcgggcgccgtgacggcggttatggcggcggtggcggctacggcggtcggcgcgagggtggtggcggcggcta

SEQ ID NO: 76155 - DNA, 431 bp, Zea mays
tacacacgcgttctggcatcacggccgacgacgtgaacgcggcgttccgcaaggccgccgccggcccgctgcagggcatcctggatgtctgcgacgtgccgctcgtgtccgtcgacttcaggtgctccgacgtgtcctgcaccatcgacgcgtcgctcagcatggtcatgggcgacgacatggtcaaggtcgtcgcctggtacgacaacgagtgggggtacagccaacgcgtggttgatctggcgcacctggtggcggccaagtggcccggcgcggcggcggccggcagcggcgaccctctggaggacttctgcaaggacaaccccgagaccgacgagtgcaaggtgtacgaagcatgaggccacggttctttccacgacgggacgtacagcacgggcgcgaggggtttcttcatagagaataatatacag

SEQ ID NO: 76156 - DNA, 432 bp, Zea mays
cccacgcgtccgggcaacccgagcctgatccacgcgcagagcatcctggccatctgggcgtgccaggtggtgctcatgggcgccgtcgaggggtaccgcatcgccggtggcccgctcggggaggtggtcgacccgctgtaccccggcggcagcttcgacccgctcgggctcgccgacgacccggaggcgttcgcggagctcaaggtcaaggagatcaagaacggccgcctcgccatgttctccatgttcggcttcttcgtgcaggccatcgtcaccggcaagggtcccgttgagaacctcgccgaccacctcgctgaccctgtcaacaacaacgcctgagcctacgctaccaacttccgtccccggcaagtgagccagggcatatacatacttgtatgcgtgttccgtagacatacgtattcgtatatgtac

SEQ ID NO: 76157 - DNA, 389 bp, Zea mays
aaaaacgctttctgaaagatgtacttgatgttccttttgccttcaaaagagtagacgtaatgttgtacagagcaaactttggcgctgaagtgaattatttaaagaaatcttttggaacgctagaggcagcttgtacagatttaaggagcagcaagctattcctgaagttgctagacgcagtgctcaagactgggaaccgcatgaacgacggaactaaccgaggcgaggcgagggccttcaaactcgacacccttctaaagcttgcagacatcaagtcgacggatggaaaaacgacagtgctccatttcgtggttcaagagatcatccgatccgaaggcttgggttccgatcaagcagcagcagcagcagcgaatcctggaagcaacagc

SEQ ID NO: 76158 - DNA, 424 bp, Zea mays
cctcgctcggcggattcaaacacttgtcttcaaggctggcatggccaagtccattcaccatgctcgtgtcttgatcaagcagcgtcacatcagggttggcaggcaaattgtcaacgtcccatcattcatggtgagggtggagtctgagaagcacattgacttttcactgtcaagcccattcggtggaggccccgcaggaagggtgaagagaaagaatcagaagaaggcaagcggtggcggggatgctggtgatgaggatgaggagtgaggatggacaagtagtgttacaccaatataataatattatctagttttcttgaacttgttcgaatgatgagtgcttagctgtgtgatctgacgcagagtcccctgtgctgactctgtgtcagggatggtccattttatcctgtggtattatcaccct

SEQ ID NO: 76159 - DNA, 165 bp, Zea mays
gtagaaaaatcagaacattgtccggatgattataatttggaaatgaagaggaaaagaaacgatgggacaaaagggacaattgttccaaataacgggtccaaagtagaaggaatgttaagtcctttgggacaagccaatcacagtggcaaggcacctgttccgaat

SEQ ID NO: 76160 - DNA, 453 bp, Zea mays
  unsure (1)..(453): unsure at all n locations
ctcgcgggtcgacgcaagcctctagactgatgtcggaataccgctccactacaagggctccaccttccaccgcgtcatccccgagttcatgtgccagggcggcgacttcacccgcggcaacggcaccggcggcgagtccatctacggcgagaagttccccgacgagaagttcgtgcgcaagcacaccgcccccggtgtgctctccatggccaacgccgggcccaacaccaacggctcccagttcttcatctgcaccgtcgcgaccccttggctcgacggcaagcacgtcgtcttcggccaggtcgtcgagggcatggacgtcgtcaaggccatcgagataggtgggcaccgcaacggctccacctccaaggtggtcaaggtcgctgactgccgacagctctcctagatctctctgatctggtctgttcngccgcccctcctccgtcatcgtcg

SEQ ID NO: 76161 - DNA, 421 bp, Zea mays
gcaagctcgatctactactactactagctggtacacatactagccagcctgccagccagcttgccatggcgcccaccgtgatgatggcctcgtcggcaaccgccgtcgccccgttccagggtctcaagtccgccgccagcctccccgtcgcccgccgcagcaccaggagcctcggcaacgtcagcaacggcggaaggatccggtgcatgcaggtgtggccggcctacggcaacaagaagttcgagacgctgtcgtacctgccgccgctgtcgacggacgacctgctgaagcaggtggactacctgctgcgcaacggctggataccctgcctcgagttcagcaagctcgggttcgtggtacgcgagaactccacctcccgtgctactacgacggccgctactggaccatgtggaagctgccc

SEQ ID NO: 76162 - DNA, 426 bp, Zea mays
ctcgcgggtcgacgcaagcctctagtgtgattcatggcaaccgcattgccggcgggccgctcggcgaggtcgtcgacccgctgtaccctggcggcagcttcgaccccctcggcctggccgacgaccccgaggccttcgccgagctcaaggtgaaggagctcaagaacggccgcctcgccatgttttccatgttcggcttcttcgtccaggccatcgtcaccggcaagggcccgctcgagaacctcgctgaccacatcgctgacccagtcaacaacaacgcatgggcctacgccaccaacttcgtccccggcaactaagctcaacggctatgctatgcaacttcattgtctttcggatcggagagggtgtacgtacgtggattgattgatgctgcgagatgcatgtgtgtcttttgtgtcacgttgc

SEQ ID NO: 76163 - DNA, 420 bp, Zea mays
acaggactaggactcgcgggtcgacgcaagcctctacacacacgttctggcaggacgaggggcgcagccgtgtggaggccgagctcgtagaggcgctcgccaacctcgaggcgcagaaggaggaggctgttaaggcgctcgacgcccagatcgcctcgctcagtgatgagatcgtcaagaaggtgctcccatccgcgtgatgaaaccaaaccggccctgccttatcctacgactatagttatatgaacatcataaattaatgataattttgaagaaattggccgatgactccgacactgtactcatgaaagattattggatgggttgtgtccaccgcctgtgttgggtgtggattgttgtagactcgcagtgatctttctcgataagcttgtacagttcagtacatacagacacacattg

SEQ ID NO: 76164 - DNA, 399 bp, Zea mays
cgggtcgacgcaagactctatcaagtcgtacgtattcagctcatcttgctccgccttctgcttctgcgcatcctccaaggatcgtgatggccatggccacgcaagcctccgcggccacgcgccacctggtggccgccgccgcttccgcctgggcgccgtcggcgaagccgcggcagctaagctcacagctcgcgctgccgccgtcgtcctcccgcgcgccggccccgctccgcgcgaccgccggggaggcggtgaccgatgaggcggcccaacgggttcgtgggcccgcaggctggaccgcagtaggccgtctccgatcgtctgcggcagcacaggcgggctgctccgcaaggcgcaggtggaaggagttctacgtcatcacgttgggtgtcccccgaa

SEQ ID NO: 76165 - DNA, 418 bp, Zea mays
caccaaggcgagtaagtggaggagcagccatggcttcatcggtggccgccgcggcgagcacattcctgggcacccgcctggcggacccggcgccacagaacgggcgcatcgtggcccggttcgggttcgggttgggcggcaaggcgaagcctgctccgaagaaggtggcgaagacatcgacctcctctgaccggccgctgtggttccccggcgccgtggcgcccgactacctggacggctcgctggtcggcgactacgggttcgacccgttcggtctcgggaagcccgtggagtacctgcagttcgagttggactcgctggaccagaacctggccaagaatgaggcggcggcatcaaccggacccggtttgagtcctccgaagtcaagttcaccccgttgcagccctacaccgaggtg

SEQ ID NO: 76166 - DNA, 424 bp, Zea mays
acttcctcggcctcgagaagttcctcgccggctccggcgacccgtcctaccccggcgggcccctcttcaacccgctcggcttcggcaagaccgagaaggagatgaatgagctcaagctcaaggagatcaagaacggcaggctcgccatgctcgccatcctcggttacttcatccaggggctcgtcaccggcgttggcccgttccagaacctgctcgaccacctcgccgaccccgtcaacaacaacgtgctcaccagcctcaagttccactagaacgttggtgcatcagcatacctgctgccgccgccgccagttgtttgctgtggaaagctagatgcatgcgtgttgtaaagggaactgaagcgttgcatcggtcatgattcatgcatggccagcctgctgccggtaaaacaaactagtattga

SEQ ID NO: 76167 - DNA, 344 bp, Zea mays
ctcgtgggtcgacgcaagcctctaaaatgagtcctataatgagtgcgaggggaaggagaagttcaagtgcggctccaacgttttctggaagtggtgaagcagctagcagcagcgtctgatgggaatggaggagatcatcacctgtcttgtcgaccctagagatgtccaaactgcagggaaattaaatcttcatgtgtaattgtgctcattctgtttcaatcatctcaacatccgatcatgaatctcttgcattattaactggctcgatcgtcttctcagtttaagacattggaggctgctttgtttgtttcagacgtccttcttaagatgatgctatattttgt

SEQ ID NO: 76168 - DNA, 420 bp, Zea mays
atcagccatggcgcacgcctccgccacgtcccgccccctcctgggtcgccccgccggcaccgcgcggccccacctcgccgtttcctcatcctcccccgcctcctcgatccgcttcccccgcggcgccggcggcggcgccagcagaacggccgtctctctccgcgcccccacgcctccagcggcggcaacagcagcagcaacatctggtagcattgctccagcaatttcattgactgaaaaggccttgaaacatctgaaccaaatgagagctgaacggaatgaagttttgtgcttgagaattggagtgaaacagggtggatgctcaggcatgtcttacaccatggaatttgaaaatcgagagaatgccagccctgatgattctgttgtagagtatgatggttttgcaatagtctgtgaccc

SEQ ID NO: 76169 - DNA, 413 bp, Zea mays
cctcagggacctctggcccaacaaggagtactactaccggatcgggcacgagctcccggacgggtcggtggtgtggggcaagccctactcgttccgcgcgccgccgtcgccggggcagccgtctctgcagcgcgtgatcgtgttcggcgacatggggaaggcggagcgggacgggtcgaacgagtacgcggcgtaccagcccgggtcgctcaacaccacggacgcgctgatcgcggacctggacaactacgacatcgtgttccacatcggggacatgccctacgccaacggctacatctcgcagtgggaccagttcacggcgcaggtggcgcccatcaccgcccgcaagccctacatggtgggcagcggcaaccacgagcgggactggcccgacacggcggcgttctgggacg

SEQ ID NO: 76170 - DNA, 446 bp, Zea mays
tcgcgggtcgacgcaagcctctacagatgagtcctaatacaagtcgaggagctcgagagggcaccaataatggccggcgtgaactccagcgtcgtcgggctcaagcccgccgcggcagtgccgcatgccgccgccgcctcatcgccggcgaagcgggtgcagctggccgcgcccgagggccgccgcgccgctctgctcggcctggcggccgtcttcgccgtcacggccaccaccgggtcggccaaggccacgatcttcgatgagtacctcgagaagagcaaggccaacaaggagctgaacgacaagaagaggctggccaccagtggagccaactttgcgcgcgcctacaccgtggagttcggcaactgccagttcccctacaacttcactggggtgccagggacctcgccaagccagaagaaagtccccttcaatcaagcgatgac

SEQ ID NO: 76171 - DNA, 347 bp, Zea mays
gaggccatcgccgcgtacccggacgccttccaccgcgtcatcggcttcgacaacgtcaggcagacgcagtgcgtcagcttcatcgcctacaagccccccggcagcgagtagagaccgtggctagatcgacccatggccatgcctctgcctgttgatcggatcaccttcttgcattggttcctctctctctctccctccttttttttccctttatctcatcatttcttttctcctgcatgcaatggttccttttgcttccaacaagtctcctgctgatgtatccagcatggcatcatccatctacaattacgtacgttgtgcaacgactgtccgattcgttgggtgag

SEQ ID NO: 76172 - DNA, 428 bp, Zea mays
ggaatccttcagtctttagctcgccgtgcaaaggcactggaagatgcattcaacacgcttgagggattttcatgtaacaaggctgaaggagcaatgtaccttttccctcagatccatctgccacataaggcaattgaggctgctaaagctgccaagaaagcacctgatgcattctatgcgctccgtctccttgaatcaactggaattgttgtggttcctggatctggatttggccaagttcctggaacatggcacgtcagatgcacgatcctgccgcaggaagataaaatccccgcggtgatcacccgcttcaaggctttccatgaggcgttcatggctgagtaccctgactgaactgttacagtggctgagtatcaacgtgttgaccgaaacaaaataaagctcccccctccctctgtgtccgtgcg

SEQ ID NO: 76173 - DNA, 429 bp, Zea mays
acatatacctggagtcagggccgttcaatctttgccagtggcagtccatttgcccccgtggagtacgaaggaaagacttttgtgcctgggcagtcgaacaatgcctacattttccctggactcggcctcggtcttgtgatctctggagccgtccgtgtccacgaggacatgcttctcgccgcctcgaaagcgctagctgatcaggccacacaggacaacttcgagaagggctccatcttcccacccttcaccagcatcagaaagatctctgcgcacatcgctgcagccgtggctgcaaaagcccacgagctcggtctggcgacccgtctgcctccccccagcgacctggtgaaatatgcagagaactgcatgtacactcacgtctaccgcaactaccggtagtgctgcggggatcaattttgcagtaat

SEQ ID NO: 76174 - DNA, 403 bp, Zea mays
acatgtaggacggttgtctgagcttcttggcattcaggtgcaaaaagccgacgatgttattggccctgaagttgagaagctggtggcggccttgcccaacggtggggttctgctgcttgagaacgtaagattctacaaggaagaggagaagaatgacccagagtttgcacagaagcttgcctccctagcagatctttatgttaacgatgcatttggaacagcccacagggcgcatgcatcgaccgagggagttaccaagtttttgcagccttctgttgcagggttccttctgcagaaggaactcgactaccttgtcggagctgtttcaagccctaaacgcccttttgctgccatccgtggtggttcaaacgtgtcatccaggatcggcgttattgaatccctg

SEQ ID NO: 76175 - DNA, 450 bp, Zea mays
ctcgtgggtcgacgcaagcctctagactgcgtcctcctatgccgccgtcaccgccccttccttcgccgcaccagcgccagcccgcgccgtggtcagaaggaggtccttcaccgtgcgcgcctctctccgcaaggccaccggcaccgccgccgtggcaatggctgccagcgccctgcttgccggcggtgccatggcccaggaggtgctgctgggcgcaggcgacggcgggctcgtcttcgagcccagccagttcaccgtcaaggccggcgacaccatcacattcaagaacaacgccggcttcccgcacaacgtcgtcttcgacgaagacgaggtgccgagcggcgtcgacgccaccaagatctcgcaggaggagtacctcaacgcgccaggcgagacctactccgtcagcctcaccgtgccgggaacctaccggttctactgcgagccgca

SEQ ID NO: 76176 - DNA, 452 bp, Zea mays
tcgcgggtcgacgcaagcctctaaagagagtcatattacgagcggccgccctttttttttttttttttttgggagctgtgtgtgattaagcaaaacaaggttactggacaaatatgcgtaactcaacattggaaatagaagcgcgcacagagagagagagagacgatggcagggcggtgtctgaaaactccacgcttacatgaactgcgctcaaatgaaacccaagcagtacgtacgcgcgtactcaaattacacacaacgacacacagagatatatagagagagagatggatgggcatgattatgcgccggtgagctcctcctccttgtgcgtctcgatgacgacgtcagaagtggggtacgcgtggcaagtgagcacccagccgtcggggatctggccgtcgtccaggtagctctggtcggactggtccacggacccgggacgacctgcc

SEQ ID NO: 76177 - DNA, 417 bp, Zea mays
gggtcgacgcaagcgtctagtaaagatcatataaatgctgtcactctcttacttgaagatgctttaatggatagagatctggttcaccggcagactgctgcatctgctgttaagcacatggctctaggtgttgctggcttgggttgtgaggatgctcttgttcatctgcttaactatgtttggcccaacatatttgagacatctccccacgttataaatgctgtcatggaggcaattgagggtatgagggttgcgctaggtgcagctgtgattttgaattattgcctgcaaggtctcttccatccagcaaggaaagtacgtgaagtttattggaagatatacaactctctgtacattggtgcacaggattcacttgttgcgtcttatcctgccctggaagacaatggggataacata

SEQ ID NO: 76178 - DNA, 466 bp, Zea mays
  unsure (1)..(466): unsure at all n locations
acaggactaggactcgcgggtcgacgcaagcgtctaggcgtagtgatagaaaggtgtctgtcgacgttcctgatgtacgtggaaggacagagattctaaaagtgcatggtagcaacaagaaatttgattctgatgtttctcttgatgtcatagcaatgagaacacctgggttcagcggagcagacttggcaaaccttctgaatgaagcagccattctggctggaagacggggaaggacagcaatttcttcaaaagagattgatgattctattgacagaattgtagctggtatggaagggaccgtgatgacagacgggaagagcaaaagtcttgttgcttaccatgaagttgggcatgcaatttgcggaactttgacgcctggccatgatcctgtccanaaggttaccttagttccaaggggtcaagctcgtggtcttacatggtttatcncgatggatgacccaac

SEQ ID NO: 76179 - DNA, 439 bp, Zea mays
ctcgtgggtcgacgcaagcctctacagtgacgtcgctgacctacgcgtccgcggacgcgtgggcaacgccacagcttgcgcccgcaatggcactcgtctccgcctcctcgtcctccaccaccgccgtcacggcgctccccaggaatgggcagcgggcgtcgtcctccttcctcggcggcaagacgctgctgagacaggccgaggcggcccggccgtcgttcgccgtgcgcgccgcggcggaccccaacaggccgatctggttccccggcagcacccctccgccgtggctcgacggcagccttcccggcgacttcggctttgatgcctggggcctcggatctgacccggagagcctgcggtggaacgtgcaggcggagctggtgcactgccggtgggcgatgctcggcgcggcgggcatcttcatccccgagttcctgac

SEQ ID NO: 76180 - DNA, 379 bp, Zea mays
accacgcgtccgcgatcttattcgtgggctttatccagaagctgtatccattggcgaagatgtcagcggaatgcctacattttgtatccctgtccaagatggtggtgttggttttgattatcgtcttcatatggctgtcccagacaaatggattgaacttctgaagcaaagtgacgaatattgggaaatgggtgacatcgtgcacaccttaacaaatagaaggtggcttgaaaagtgtgtcacttattgtgaaagtcatgatcaagctcttgttggtgacaagacaattgcattctggttgatggataaggatatgtatgatttcatggctctggacaggccttcaacgcctcgcatcgatcgtgggatagcattacat

SEQ ID NO: 76181 - DNA, 459 bp, Zea mays
ctcgcgggtcgacgcaagcctctacacatgacgttctgctcactcttgcgattcgctcgctcgatcctagcttcccttccaagaagcgcagcgcccatggccatgtccacgcaagcctccgccgccacgcgccacctgctggccgccgcctgggcgccggcggcgaagccgcggcagctgagctcgcagctcgcgctgccgtcgtcgtcctcccgcgggccggccccgctccgcgcgtccaccgaggaggcggtggaggcgcccaaggggttcgtggccccgcagctggaccccagcacgccgtccccgatcttcggcggcagcacgggcgggctgctccgcaaggcgcatgtggaggagttctacgtcatcacgtggacgtcccccaaggagcacgtgttcgagatgcccaccggcggcgccgccatcatgcgggaggggcccaacctcttgaagctg

SEQ ID NO: 76182 - DNA, 429 bp, Zea mays
ctcgcgggtcgacgcaagcctctagactgactcgtactatacctgggcccgctgtccggctcgcccccgagctacctgaccggcgagttccccggcgactacgggtgggacaccgcggggctgtcggcggacccggagaccttcgccaagaaccgcgagctggaggtgatccactgccgctgggccatgctcggcgcgctcgggtgcgtgttcccggagctgctcgcccgcaacggcgtcaagttcggcgaggcggtgtggttcaaggcgggctcccagatcttcagcgatggcgggctggactacctcggcaacccgagcctggtccacgcgcagagcatcctggccatctgggcgtgccaggtggtgctcatgggcgccgtcgacgggtaccgcgtcgccggcggcccgctcggagacgtgggcgac

SEQ ID NO: 76183 - DNA, 423 bp, Zea mays
agggatgctaatatacttattgtgtgacatagatcccctcacaaaaagagcagctgcctgcctgtgtagggacaacagatcacggttctgagatatgaactgtgtggtctgcaacggcctgctcgtcctgcagaagaaacaaaaccgatcattgccttgatacttgactgataatccagtttcgattcgtgtggctaagacttcctctgtggtgtggacgcacgtacgcaggtgggtggctgcgcagagcgtgttctaccacctgtacaaccaggtgtcgtacatgtcgctggacgagatctcgccgctcacgttctccatcggcaacaccatgaagaggatctccgtcatcgtcgcctccatcatcatcttccagacgcccgtccagcccatcaacgcgctcggagccgccatcgccatcct

SEQ ID NO: 76184 - DNA, 334 bp, Zea mays
gtaagctggcacacgccatggcgtccatgaccggcctctcgcagggcgttctgcccagcaggcgcgccgccaacagggccaggacggccgccgtcgtcagggcgtccgccgaggcgcaggcgcaggcgggccgccgcgccgtgctcgggctggtggccactggcatcgtcggcggcgccttgtcgcaggcggtgcacgccgagaccgtcaagaccatcaagatcggagccccgccgccgccctccggtggactcaccgggactctgaactctgaccaggcgagggacttcgacctccccttgaaggagcggttctacctgcagccgctgccgcc

SEQ ID NO: 76185 - DNA, 402 bp, Zea mays
  unsure (1)..(402): unsure at all n locations
ctcgcgggtcgacgcaagcctctaaaatgagtacgctgcatggcgagcagcaccatggccctctcctccacggccttcgccggcaaggccgtgaacgtgccgtcgtcgtccgccttcggcgaggcccgcgtgacgatgcgcaagacggcggcgaaggccaagccagcggcggcgtccgggagcccgtggtacggccccgaccgcgtgctgtacctgggcccactgtccggcgagccaccgagctacctgacgggcgagttcccgggcgactacggctgggacaccgcggggctgtcggcggacccggagacgttcgccaagaaccgggagctggaggtgatccactcncgctgggccatgctgggcgcgttcggctgcgtcttccccgagctgctcgcccgc

SEQ ID NO: 76186 - DNA, 412 bp, Zea mays
atacgcatgattgtcagcaaggacaataatatcttggaggcatttgacgcccaggatcaagcatcaactcttcagtttcccagctatgctttggagggttcagtttttcaaaggtttgacactgacctcatcaagaaagtcagcaccaactgtcttgtcatgcaaaatcacagatatggtatatcaccaaggcgatatcgagagaacgatgcactatcaagtttcttcaaaatcttgactacatcacctgatgaaaacggcaaggtctatgtctcaactgtacaagccaataattatccaatcacttgcacgcaatggcatcctgagaaagccatttttgagtggaagaaaccaatgattccacacagttaagatgcagtacaagttactcaacattttgccaatcatttta

SEQ ID NO: 76187 - DNA, 420 bp, Zea mays
gcgacatggcgcccgccgcccggtggtccacgtcccctgtgctcttcctcctgctgctgctcgcggcggccacggcgacgacgacgacgacgaccactacagcaaagcatgagcatccgtcgccgacgccgtggccggagcgtttccacgcggtgctgttcacgaacctgaccaactacacggaagcctccacgggcccgccgctgcgcgtgacggacctctactacgactggccgcggcggcggaacctgaacctggtgcggcaccagctgtcggccgacccgctgtacgacgtggagtggaacaacggcaccggcttctacttcgactccaaggcgtgccgcgtggagcagttccccgtgggcgtgctgccgccgtggtgggtctccggcggcggcgccgagtacgtgggccgccgcg

SEQ ID NO: 76188 - DNA, 338 bp, Zea mays
acatggtcgccttcctcggcttcgccgtgcacgccgccgccaccggcaaggggccgctcaacaactgggccacccacctgagcgacccgctccagagcaccatcttcgacacgttcggagggtcctcttaagcccgccattgctccgccccgtccatcgaccggccggaacgtgttcttggattaattaactacgatctctatgagcctggggatggatcaacccgtcgtgcgtggtctcgttttgtgatgagtgggagagagaggatggcacgatggatcctttgttaatggagatctcgttcattaggagagctaccgctgggacttggtggtttg

SEQ ID NO: 76189 - DNA, 249 bp, Zea mays
atactatacaacgttgaagtgatgagtcctagaacagcatctgggtcatgttattggtgatttgaactctataacaggacaggtcaacatcttcggggataagcctggtggactcaaggtggttgattcgtttgtgccacttgctgagatgttccaatacgtcagcaccctccggggcatgaccaaggggcgagcgtcctagacgatgcagctcgccaagtttgacgtcatcccacagcacatccagaa

SEQ ID NO: 76190 - DNA, 438 bp, Zea mays
tgcccacgcgtccgcgactccggtatctactaccagctggctcttatgtggccaggagcatactgcgagcagaccagcgctgggtgctgcaagccgaccaccggcgtctcgccggcgcgcgacttctacataacgggcttcaccgtccttaacgcgaccaccgacgctgcagtgacgggatgcagcaacaaagttccttacgaccctaacctgattaccggcatccaaggcctgaatcagtactggagcaacatcaggtgccccagcaacaacgggcagagcagctggaagaacgcctggaagaaggccggcgcctgctccggcctcagcgagaaagactacttcgagactgccctctccttccgtagccggattaacccactcgttcgcctcaaagccaaaggtatcgagccggacttcgggctctacggcctcaag

SEQ ID NO: 76191 - DNA, 401 bp, Zea mays
  unsure (1)..(401): unsure at all n locations
aacaaatgctaaagcatgcagacttcccaggtagcaacaacgggacaggtctcttccagaccatcattggactgaagattagagacctctatgaacagattgttgctgagagggctggtgtaccagcggaagcagcaaaagtttaacgatctatgcattcagatgtcctaaaactacagctctccgaactcaatgggagtaacaaccttcgcatctgttgggatatatggcgagctaggaggtatagaaatgtcattgcagaactcaggaaaacgtgcaatggaatttcttgaaatcnctcttgaagagagtgagaactcgatagatcaagaatcaccacacgttgtattaatcgtatggtataatatttatacatgtacaggaaaaaaaaaaaaacaaaa

SEQ ID NO: 76192 - DNA, 390 bp, Zea mays
cccacgcgtccgcccacgcgtccgccgtgctccacttggcgagaacacagtcctcttgaggggccccaagaatgcccgtgaggcggtgaggcacttcggcaaggctcctggagtgccgcacagccacaccaagccatatgtgcgctccaagggaaggaagttcgagaaggctcgtggcaggaggaacagccgtgggttcaaggtttaagaaagttgtgggccatcagcatagtaatcacttcctaccgagtagtagcacattttgttgccttggcttggattttgaaagatatttgaaggattttcgtgccttgtctactggttactggttgaacaagaagacaatgttcttttgcaaaagaaaatgggtggggataaaaaaaagggggg

SEQ ID NO: 76193 - DNA, 341 bp, Zea mays
cgacgcaagcctctagcatgcgtcgtgatacgatggccgcgctccgcctcgcctccttcaccctccgccccgccgccgcctcttccggcgcgacctcatcggctccccggtccgcctccttctccagcgcggcgcgggggctcccctctctctgcctggccccgccccgccgccgccgcggggacctcgccaagccccgcgccgcggtcgaggccgcggcggagagctacgcatccgcgctggcggaggttgccgtcgagaacggcacgcctcgagcagacggtctctgacctccagaagctggtgaagatgttcgtcgaacgaggccgtcgccgagttct

SEQ ID NO: 76194 - DNA, 408 bp, Zea mays
acccacgcgtccggcaaccggtccaacactttcacgctcaggcgctcagctctagcaatggctgcctccaccatggcgatctcctccacggcgatggccggtacccccatcaaggtgggctccttcggcgagggccgcatcaccatgcgcaagaccgtgggcaagcccaaggtggcggcgtccggcagcccctggtacggccccgaccgcgtcaagtacctcggccccttctccggcgagcccccgagctacctcaccggcgagttccccggcgactacggctgggacaccgccgggctgtccgccgaccccgagaccttcgccaagaaccgcgagctggaggtgatccactcgcgctgggccatgctcggcgcgctcggctgcgtccttcccgagctgctctcccgc

SEQ ID NO: 76195 - DNA, 418 bp, Zea mays
gaatgagtcgcttgacattaggtgcctccaaggtatggcttcagatgagaaaaggaacctatattttgtgtcaacaaatgcaacgtccacatttcgttccatagtttcaagttatcctggacggttgactcttgtcacaatacagtgcccaaatcctgacttcaacaaagagcaaaataggtggagaatggtgcgaagaatgctcattgaagctatcgtcgaccttcttcataccaatggacaggtttatctgcagtcagatgtggagtccgttctgctcgtgatgaaagagcagttcctctcctacagcaagggtcagcttgtcacggacggcgatggtggcaactgcatcgataacccgttcggcgtggtatccgactgggagcgccatgtcctcgctcgcggagctcccatgtac

SEQ ID NO: 76196 - DNA, 444 bp, Zea mays
cgatctacacacatacatagtttcttctactacacgacgacaaacatggggaagcctgcgaagatcggagagtggggtggatacgccggcgatcgtcgggatctgagggctactccggaccggctgatcgaggtgaaggtcacggcggacaacagcagctgcatccgctccatctccttcatctacatcggagccgatggcaaaccgtacgatgaggggccatggggtttcggccatgctggcacggagtacaagattgatctgtgcaggttcgacgagagcttgacggagatctccgggaccacgggcccagcctacaacattgacaatctggtcaagtctctcaaattcgtcaccaacaaacgcgcgtacggaccgtacggcaaggaccagggcaccccgttccgtgtcaaagtgatgaacaacgggcacgtcgctggcttc

SEQ ID NO: 76197 - DNA, 353 bp, Zea mays
ggaccgacgagcgacgaagcgcgcacaaagagaagaacctcggagctgagatggcacaagccatggcgtcgatgacaggcctctcgcagggcgtcctgcccagcaggcgcgccgacagcagaaccaggacggccgtcgtcgtcgtcagggcgtccgcggagggcgacgccgttgcgcaggcgggccgccgcgccgtgatcgggcttgtggccactggcatcgtcggcggcgccttgtcgcaggcggcgcgcgccgagaccgtcaagaccatcaagattggagccccgccgccgccctccggtggactcgccgggactctcaactctgaccaggcgaggggactcgaactcccc

SEQ ID NO: 76198 - DNA, 391 bp, Zea mays
cgcctcttctcggtggactggtacatggaccggatcaagggcaagcagcaggtcatggtcggctactccgactccggcaaggacgccggccgcctgtccgcggcgtggcagctgtacagggcgcaggaggagatggcgcaggtggccaagcgctacggcgtcaagctcaccttgttccacggccgcggaggcaccgtgggcaggggtggcgggcccacgcaccttgccatcctgtcccagccgccggacaccatcaacgggtccatccgtgtgacggtgcagggcgaggtcatcgagttctgcttcggggaggagcacctgtgcttccagactctgcagcgcttcacgggcgccacgccggagcacggcatgcacccgccggtcctctcca

SEQ ID NO: 76199 - DNA, 311 bp, Zea mays
agagaggagaggcgcagagcatcgacgatggcgagcggcagcatgaagagggagatcagcgagacccacgacaccctccgcttcggcctcaatgccggcgtcaaagccgacctcgcgccggggcatgcgcgccagtccagcgtccaatccgaggccaagttctgggcggacaacaagaagtttgggacataggccaacgacggatccgccttgaacatccgcaaggatctcgatgcccagatcctctcaaggttccaaaggccccctggtgcgttgcgatcaactctgcttggatatgaggcactgacagg

SEQ ID NO: 76200 - DNA, 409 bp, Zea mays
gccgggcgggaatccaaggaggagctcatgcgggtgcgcaaggagatcgtcgacttccacggcgagatggtgctgctcgagaactacagcgccctcaactacacaggattggttaagattctcaagaaatatgacaagagaactggagccctgatccggctgcctttcattcagaaagttcttcagcagcctttcttcaccactgatctcctgtataagcttgtgaagcagtgtgaagccatgctggagcagctccttccggttagtgaggcatctgtctcaagtgaagatggaaaaggagactctaatgatgaagagaagctggcgaagccaagttcttccttggtaaatggtggtggcatgccagagttagatgagatcgagtacatggagagtatgtacatgaaga

SEQ ID NO: 76201 - DNA, 373 bp, Zea mays
gtcgacccgtccgtccggcactaccaacaacgccaaggcgctcagcgtcagcctcgtgctccccgtcgccatctcggtgctcgttaacgagtgcggcaagcatgtgccctccagcttccagtgcccgtaatcacatcagctgcggatatgtgctactatgatgtatcaccaccacgaatctatatccgcatgcatgcatcaatgcatgggtgattaagggtttatacgcggtcaaagttatacacgcatatatatgtagcttcatacatggagctgtgggttgtgcattcattttcaaatcatgtaccagtattatattgtagtatcatagaccagtgtgagagttgtggcccttggtgggggtgcttgtaag

SEQ ID NO: 76202 - DNA, 374 bp, Zea mays
cggacgcgtgggcggaagctcaagttagaagaagcaccagtgcctgatcgatggcggcccaggctctcctctccggccggcagctgctgggccgccccgtgcagtcggccgtctctaggtcgtcggcgaggaaggcgcccttcgtcgtcagggccagctccagccctccagccaagcaaggtgccgacaggcagctgtggttcgcgtccaagcagtcgctctcctaccttgatggcacgctgcccggcgactatggcttcgacccgctgggcctctcggacccggagggcaccgggggcttcatcgagcccacgtggctggcctacggccaggtgatcagcggccgcgacgccatgctgggcgcggtgggcgcg

SEQ ID NO: 76203 - DNA, 444 bp, Zea mays
caacaagcaaagcatatacccccaaatccccaatccccaaaccctaggttatctcggcgcggcggcgatggcggcggcgggcctgaggaaggggaatgcgcgcctcccgccggaggtgaaccgggtgctctacgtgcggaacctgccgttcaacatctcgagcgaggagatgtacgacatcttcggcaagtacggcgcgatccggcagatccgtttgggcaacgccaaggacacgcgcgggaccgcttacgttgtctacgaggacatctacgacgccaagaacgccgtcgaccatctctccggcttcaacgtcgccaaccgctacctcatcgtgctctactaccagcccgccaagatgtccaagaagtcggatgtcaagaagaaggaggacgagatcaccaggctccaggagaagtacggaatcgggtccaagacgcccggccc

SEQ ID NO: 76204 - DNA, 432 bp, Zea mays
gaaaaccttgtatgatgctgttcagtccatcaaacctacagttctgatcgggacatctggagttggaagaacattcacaaaagaaatcattgaggccatgtcttccttcaacgagaggcctatcatcttttcactgtcaaacccaacctcgcattctgaatgcactgctgaacaagcatatacctggagtcagggccgttcaatctttgccagtggcagtccatttgcccccgtggagtacgaaggaaagacttttgtgcctgggcagtcgaacaatgcctacattttccctggactcggcctcggtcttgtgatctctggagccgtccgtgtccacgaggacatgcttctcgccgcctcgaaagcgctagctgatcaggccacacaggaaaacttcgagaagggctccatctttccaaccttcatcagcat

SEQ ID NO: 76205 - DNA, 459 bp, Zea mays
  unsure (1)..(459): unsure at all n locations
cgccacaccgccgcttttctctcaaatgcagcgcctccaacggtgacaactccaaccccaactccatctccatctctcccacctcgccgcctcggctaacggtgtcggacggcgtcgagtctgtggacgttaacgggttgcgtcgcccgccagcgcccgcctccgtccccgccgcccgcgatccccactggctgcctcgtccgctcacaagtgcggacgtcatggaggtggacgggaaggggctcaaggttgcttaccagggttgtgctggagcgtacagcgaagcagcagcaaagaaggcgtacccgaattgtgagactgtgccctgtgagcacttcgacactgcatttcaggctgttcaaaactgggtagctgatanggccgtactgccacttgagaattcattgggaggtagcatacataggaattatgatcttttgcttcggcatagtttgcaca

SEQ ID NO: 76206 - DNA, 399 bp, Zea mays
gtaatacgcttttcataacaataggacctgtggatttcttggttcatcatgctattgctctaggtttgcatacaactacattgattttagtaaagggtgctttagatgcacgcggttccaaattaatgccggataaaaaggatttcgggtatagttttccttgcgacggcccacggcgcggcggtacttgtgatatttctgcttgggacgcgttttatttggcagttttctggatgttaaataccattggatgggttactttttattggcattggaaacacattacattatggcagggcaacgtttcacaatttaatgaatcctccacttatttgatgggatggttaagagaatacctatggttaaactcttcaaaacttattaatggatataatcctt

SEQ ID NO: 76207 - DNA, 437 bp, Zea mays
ggtgaggacatgtttcattggcaagcaacaattatgggaccacctgacagtccctatgctggtggtgttttcttagtgaacattcatttcccgccagattaccccttcaaacctccaaaggtttctttcaagacaaaggtcttccatcctaatatcaacagcaatggaagtatatgccttgacattctcaaagagcagtggagccctgctttgacaatttctaaggtcctgctctccatctgctccctgctgaccgaccccaacccggacgaccctcttgtcccggagattgcccacatgtacaagacggaccggccgaagtacgagtccacggcccgcagctggacgcagaagtacgcgatgggctgacgaacgctttcctgctcgtctgggcgctattgttcccttggatttgttgttggtcgtatgtatccctg

SEQ ID NO: 76208 - DNA, 441 bp, Zea mays
gagaattcttaattcatgagttgtagggagggacttatgtcaccacaaacagaaactaaagcaagtgttggatttaaagctggtgttaaggattataaattgacttactacaccccggagtacgaaaccaaggatactgatatcttggcagcattccgagtaactcctcagctcggggttccgcctgaagaagcaggagctgcagtagctgcggaatcttctactggtacatggacaactgtttggactgatggacttaccagtcttgatcgttacaaaggacgatgctatcacatcgagcccgttcctggggacccagatcaatatatctgtgatgtagcttatccattagacctatttgaagagggttctgtaactaacatgtttacgtccattgtgggtaacgtatttggtttcaaagccttacgcgctctacgtttg

SEQ ID NO: 76209 - DNA, 416 bp, Zea mays
aaccgcagcagatggcgtcgacgatcatggccgccacctcccgcatcgtcgcggccaagacgccgtttcttggccagggtcgcgccgccgccgccgccgccaatgccagccccctccgcgacgtcgccgccgccgctgctggcggccggatcaccatgggcgaggacgtgtggtacggcccggaccgcgtcaagtacctgggccccgtcgccggccagacgccctcgtaccggaccggcgagttccccggcgactacggctgggacagcgccgggctgtccgcggacccggaggcgttcgcgcggaacagggcgctggacgtgatgcacgggcggtgggcgagcctgggtgcgcggggctgcatggccccggaggtgcgggagaaaggggtcgccgtggacgttcggggaccccgt

SEQ ID NO: 76210 - DNA, 248 bp, Zea mays
acgcatactgcatacacaacacagatcatcagaacgatctgcgatctgatcgacatggctgccgccaccatggctatcacctctcgtgcgctcatctgcaagctcgcggatggcacaacggacgtcttcggcgagggccgcatcaccatgcgcaacaccgccgcaaatcccaagccggctgcgttcagcagcccctgtttcggtgccgaccgcgtcctgtagctgggcacgctgtccggctcgcccca

SEQ ID NO: 76211 - DNA, 298 bp, Zea mays
gaaagaggttatggatttagatggctcaattgaagacaaccgatatagagatcagaaattaaggatgaagaaatgtgggctgaggaagttgatatatcttgttgaaggtgatctcaaccgtgcaccaaagagggttaaaacagcctgtttcaccactgagattctcgatggatttgatgttcagagaactactgggtttgccgatacccagaagaaatatgttgatcttacacgttcggtaaaaccatactatgatgcaagtttctcgatcgttggtaaagcttcccctgtttgccca

SEQ ID NO: 76212 - DNA, 441 bp, Zea mays
cccacgcgtccggcttcggggaggagcacctgtgcttccagactctgcagcgcttcacggccgccacgctggagcacggcatgcacccgccggtctctcccaagcccgagtggcgcaagctcatggacgagatggcggtcgtggccacggaggagtaccgctccgtcgtcgtcaaggagccgcgcttcgtcgagtacttcagatcggctacaccggagaccgagtacgggaggatgaacatcggcagccggccagccaagaggaggcccggcggcggcatcacgaccctgcgcgccatcccctggatcttctcgtggactcagaccaggttccaccttcccgtgtggctgggagtcggcgccgccttttaagttcgccatcgacaaggacgtcaggaacttccaggtcctcaaagagatgtacaacgagtggccattcttc

SEQ ID NO: 76213 - DNA, 244 bp, Zea mays
acagtgagtacgtatgagaatgccttcacggaaggtacggcacagcaaaatgcacatagtatttttgtgtcacttgctttaaaacttttggaatagcgagttcatgtcgcatgcaaagaaattattacgttggagaaacaggtgcttagtacacctctagataaaattaacatgaggttgacgtgatcgtacttgtcaacatcaaacggtggctgaagttattgcagagcaaacttcttgagga

SEQ ID NO: 76214 - DNA, 228 bp, Zea mays
cccacgcgtccgcccacgcgtccgcccacgcgtccgcggacgcgtgggtttagaccttccattctctttccttgtgttgctgagcttctatcatcgtgtcttattgtgaagagggaactcttcactaatgttttgttatgtacttgttgtgttcaaaagttcttgtactgtaggctactgttatgatgcgcctagctcaatttgtcgatgcaattcgaaattttgtct

SEQ ID NO: 76215 - DNA, 151 bp, Zea mays
tcaccaaaggattgctaccgagacattcacctggcttgagctggcttttgctatagcgtgcaaggggttgctgggtgtcgtacctacctgacttatcattatctgtggttacattctggaccctgtattttctatgctttcatgtctctct

SEQ ID NO: 76216 - DNA, 282 bp, Zea mays
cggacgcgtgggttcggagcagtcttcatcgagctcttcttcatcctgacgtcgatctggcttcatcagttctactacatctttggcttcctgttcctggtgttcattatcctcatcgtcacctgtgcggagatcacaatcgtgctgtgctagttccaactgtgcagtgaggactacctgtggtggtggaggtcctttctgacctcaggatcatcagcaatccacctcgtcctggatgccgggttctacgtcttcacgaagctgcagatcactaatgtggtg

SEQ ID NO: 76217 - DNA, 445 bp, Zea mays
aagaaaagcaagcggctttggaagttggaatccatggcgtccacctcgtgcttcctccaccagtccaccgcccgcgtggccgcgccgtcgccgcgcctcgccgccccgccgcgcagcgcgcaactgttcgtctgcaaggcccagaagcagcaggccgccgcggcggagagcgacgtgtcgcgccgcgccgcgctcgcgctcctcgccggcgtcgcggccgtcggcgccaaggcgagccccgccgccgccgcctacggggaagcagccaacgtgttcggcaagaccaagaagaacacggacttcatctcctacgtcggcgacggcttcaagctgctgatcccgtccaagtggaaccccagcaaggagcgggagttccccgggcaggtgctccgctacgaggacaacttcgacgccaacagcaacgtgtccgtcatcatccagccca

SEQ ID NO: 76218 - DNA, 365 bp, Zea mays
cccacgcgtccgcgaaatatcactggaaaccctgaaatcacggggtctgatcaatccatcaggcagggaaaggaagctgccgctgaagatcttaggagatggggatgtatcggttaagttgaatatcaaggctggagcgttttcagcttcagctaaagagaagcttgaggcagctggttgttccctaactctgttacctaaacgaaagaaatggctttcacaaaattatctaaagaaccaagcccgagcagaagagtactttgccaagaaaaaagctggtgctggtgaatctgatagcggctctgcatagacgttctatgtgatgtactcctcgtctcgtgcttttagcgtatgcgtagtgctga

SEQ ID NO: 76219 - DNA, 464 bp, Zea mays
gcgagcggctgccctttttttttttttttagctagtagtaatttatatataagctcttgtttctacaagcagacaacccaacgcgacaccctaccttcgaggtctcatcacgaataattgatacacagcaaagcacttacgcgcgcgcaccgagacgcacagtcacaggtaaaagtaaacgcacacgactcatgtccgaggccagcagcagcagccagcagcctattcctcttcctcgccgatgatgaacctgccattgccggggttgatggcggcgatgaagaagaagaggacgttgaagatgacgagcggctctatctcgttgatgggcacccccgtctcgatgttgagctgcgccagcgcgcccttccccgtgatgatctcgccgatgatggagaaggccacgcccagctgcgccatccgccccaggaacagctcgttcgacttggtgagaccgaacagcg

SEQ ID NO: 76220 - DNA, 381 bp, Zea mays
tgctctcgtccctagaaataaagcagctcctccgcggggcggcgaactgctactcatcgccaaaaccctagccccgatccggtcgaggagcactacttcttggcatggcgggcacccctagccaggcaagcctcctgctccagaagcagctcaaggatcttgcgaagaaccccgtggatgggttctccgcagggcttgtagacgatagcaacgtcttcgagtggcaggtcaccatcatcggcccgcccgacaccctatatgatggaggctacttcaatgcaataatgacctttccccagaactatcccaacagcccgccatcagtaagatttacttctgggatgtggcatccgaatgtttaaccggatgggccgtgtttgc

SEQ ID NO: 76221 - DNA, 363 bp, Zea mays
acacatacatagtttcttctactacacgacgacaaacatggggaagcctgcgaagatcggagagtggggtggatacgccggcgatcgtcgggatctgagggctactccggaccggctgatcgaggtgaacgtcacggcggacaacagcagctgcatccgctccatctccttcatctacatcggagccgatggcaaaccgtacgatgaggggccatggggtttcggccatgctggcacggagtacaagattgatctgtgcacgttccacgagagcttgaccgagatctccgggaccacgggcccagcctacaacattgacagtctggtcaagtctctcaaattcctcaccaacaaacgcgccta

SEQ ID NO: 76222 - DNA, 414 bp, Zea mays
cccacgcgtccggcatacacaacacagagcatcagaaggagctgcgatctgatcgacatggctgccgccaccatggctatcacctcccgcgcgctcatcggcaagccggcggctggcacgagggacgtcttcggcgagggccgcatcaccatgcgcaagaccgccgccaagcccaagccggcggcgtccggcagcccctggtacggtgccgaccgcgtcctgtacctgggcccgctgtccggctcgcccccgagctacctgaccggcgagttccccggcgactacgggtgggacaccgcggggctgtcggcggacccggagaccttcgccaagaaccgcgagctggaggtgatccactgccgctgggccatgctcggcgcgctcgggtgcgtgttcccggagctgctcgcccgc

SEQ ID NO: 76223 - DNA, 403 bp, Zea mays
gaagctacaatcctaaaaccatctgcttcagctagccccaagtttagtcggccgatcattcactgaagtagtaatggcctccgtcaacagctggaccctcgagatcgcgtcgccggtggctccgcagcgcctgttccgcgccgccgtgatggactggcacaccctggcgcccaaggtcgcctcccacgtcgtcgccagcgcgcagcccgtggagggcgacggcggcgttggcagcgtcaggcagttcaacttcacctcaggtaagtgcccactgcccagcgcagaccagcatgccctccctcgctctctctctctcgctctcgcctgatcgatcaaacagctaggcgcacgacgtcgtgcggtcgctcttgcagtcaggccgtgcagcctcatgaaggagcgt

SEQ ID NO: 76224 - DNA, 418 bp, Zea mays
gggatgaccgaggcggggcccgtgctggccatgtgcctggccttcgccaaggagccgttcgaggtcaagtccggctcctgtggcaccgtcgtcaggaacgcggagctgaagatcgtcgacccagacaccagcgcgtcgctgggacggaaccagccaggcgagatatgcatccgcggcgaacaaatcatgaaaggttatctgaatgatccagaggcgacaaagaacaccattgataaggacggatggctgcacaccggggacattggttatgtggacgatgacgacgagatcttcatcgttgacaggctgacagagataatcagatacaagggcttccaagtacctcctgcggagcttgaagcccttctcatcacacatcctgaaatcagagatgccgctgttgtctcgatgaaagatg

SEQ ID NO: 76225 - DNA, 353 bp, Zea mays
ctgaatcctccgaggttttgaggccttacttttggctccaccccaacaaaggtggattgagatggatttgggtgtagccaaacaagaactgagacggatagtggattgcaaccaaacaagttcttggcatttttcggactaattttctttactccatgaggagttgtggttctcctgtcaatctgctcactgctcacggacccaaaccctgatgatcctcttgtccctgagattgctcacatgtacaagaccgacagggccaagtatgagtccaccgcacgctcctggacacagaagtatgccatgggctagaagcaaggctaaaagctggccaaactggtgaatgtgccgga

SEQ ID NO: 76226 - DNA, 411 bp, Zea mays
cccgtgcagttcgagcaggaccccgtgcagatcctggacgcgctgctcccgctctacctcaacagccagatcctccgtgccctgcaggagtcgctcgccagcgagctcgccgcccggatgagcgccatgagcagcgccaccgacaacgccatcgagctccgcaagaacctctccatcgcctacaaccgacagcgccaggccaagatcaccggggagatcctcgagatcgtcgccggtgccgacgccctcgctggctgagcctgagtccccttggtggtgccgtgctcctgctatatataattctttttcctcattttctccactctgcctgtaattcctgataatagcacaaacgcaacggagttctgtgttccttgcgacacacaagaatttcaatcgagagatgccagg

SEQ ID NO: 76227 - DNA, 434 bp, Zea mays
ctgaaccaagctgtcacttcactgagtagaacacttgatcactcacagaaagttcagatcagaaaatgcaggttgccgctactgccgtcaggttctcggccgtgctgcctgtcaagggccggccggcggcgaagagtacggtggtggtccgtgtccctgcctcaaggaggagcgtccgtgcagctgctgttgtcgcggccgaggctgcggagatcgactacaactcgagcttctcggtgtttccgatggaggcctgcgacctgctcggcggcgatgcgtgcagcgcgcagatgtacccagagaccaagctcgcctcggcggcggcggcggcgagcaggaaggtggaggaggtggagagggactacctgtcgtacgacgagccaagaacggtgttcccgggcgaagcgtgcgacgacctcggcggcgagttctgc

SEQ ID NO: 76228 - DNA, 411 bp, Zea mays
cctaaacgtccgccggcgactacggctgggacaccgccgggctgtccgcggacccggaggcgttcgcgcggaacagggcgctggaggtgatccacgggcggtgggcgatgctgggtgcgctgggctgcatcaccccggaggtgctggagaagtgggtgcgcgtggacttcaatgagcccgtgtggttcaaggccggcgcgcagatcttctcggagggcgggctggactacctgggcaaccccaacctggtgcacgcgcatagcatcctgaccgtgctccgcttccaggtcatcctcatgggcctcgtcgagggcttccgcatcaactgcctcgacggcgtcggcgagggcaacaacctctacaccggcgggcagtacttccaaccgccgggcctcgccgacgaccccgtca

SEQ ID NO: 76229 - DNA, 418 bp, Zea mays
  unsure (1)..(418): unsure at all n locations
ccttgattccaaactgtacaggtacgtttacctcctacatgattgtgagtgccttcactctcgtgttcgtaatcgtttgggtgccagagacaaagggaagaaccctcgaagagatacaatggtcgttccgctgagcaccaacatcgtcaaaatgcgaaatggttcttcgagttttgtcgctttagatactcaaatcactcgacgaaggccacacattctttctgttcataaaaggtcttgtacatgagattgcatacaccgttgttataactttacccccaatagacttgtaaatgcttgtgcagtaactcttatattacttttgcttcaacattgtaagatanaagacttgccaaaataaaatctgaaccttggggtcaaaaaaaaaaagcgaaaaaaaaaaaaggggggccgctct

SEQ ID NO: 76230 - DNA, 318 bp, Zea mays
gctcgccatggcctccctctcctctgccgccgtcaccgccccttccttcgccgcaccagcgccagcccgcgccgtggtcagaaggaggtccttcaccgtgcgcgcctctctccgcaaggccaccggcaccgccgccgtggcaatggctgccagcgccctgcttgccggcggtgccatggcccaggaggtgctgctgggcgcatgcgacggcgggctcgtcttcgagcccagccagttcaccgtcaaggccggcgacaccatcagattcaggaagatcgccggcttcacgcacaacgtcggcttcgacgaagacgaggt

SEQ ID NO: 76231 - DNA, 327 bp, Zea mays
cccacgcgtccgcggacgcgtgggccagaaggagaacatcaagaacgccgcctcctccaccggcaacatcacgttgagcgtcaccaagagcaacccggagaccggcgaggtcatcggcgtcttcgagagcgtgcagccgtccgacagcgagctcggggccaacgcgcccaaggatgtcaggatccaacgggtctggtacgctcagctcgagtgagtcgagtgtcgaactggtatgtgtccgaccgccgtcatggatcgtgggaacgtgtaggtataccacgggaaggtttggggagcagaggaggaatcgggtaggtgctgtagggg

SEQ ID NO: 76232 - DNA, 271 bp, Zea mays
ccggaacgtgttcttggattaattaactacgatctctatgagcctggggatggatcaacccgtcgtgcgtggtctcgttttgtgatgagtgggagagagaggatgacaagatcgatcctttgttaatggagatctcgttaattaggagagctaccgctgggacttggtggtttgtaatatatgatccaaccagtgatgaatcaatgcattcacttgtgtacacaagaaagaaggagaaggagagggaggaggggggacggggggaaggaag

SEQ ID NO: 76233 - DNA, 459 bp, Zea mays
aaccactccatcgccgaccccatctggtcctccaccacactggatcctccctcctccttcagcgacgccccgggcctcataggatccgccaagctcgcctttggcaacgccaccacggccaacgccgaccgctacaacgccaacgccgccggtgtcgccagcaagagcatgagcgtgggcatgatcgaccattacctcaacaagaacactaacaacgacgtcgtcaagagctacttcaacaagtccgtcggcagcaggccggccaacaacaacaccaccacaaccgtcaagaagaactccgccgcccaccacgacaagaagcacaagaactccggcaacggcgccggcgtcgacaagaggttcaagagcctgccggcggcggaggcgctgcccaggggcgaggccatcggcggctacatcttcgtctgcaacaacgacaccatggaggagaacctcaag

SEQ ID NO: 76234 - DNA, 372 bp, Zea mays
cctgaagcacgggctggtgctgcgcaacccctacatcaccaccctgaacgtgttccaggcctacacgctgaagcggataagggaccccagcttcaaggtgacgccccagccgccgctgtccaaagagttcgccgacgagaacaagcccgccggactggtcaagctgaacccggcgagcgagtacccgcccggcctggaagacacgctcatcctcaccatgaaaggcatcgccgccggcatgcagaaaactggctaggcggcttctcctcagtcacctgcacagtgcagggcagtagccagcttccggatggtggcgttttgtcagttttgggtgcgaatgggcaaggggcagcgtccggattccccaggcat

SEQ ID NO: 76235 - DNA, 450 bp, Zea mays
cactcatcgatctacacacatacatagtttcttctactacacgacgacaaacatggggaagcctgcgaagatcggagagtggggtggatacgccggcgatcgtcgggatctgagggctactccggaccggctgatcgaggtgaaggtcacggcggacaacagcagctgcatccgctccatctccttcatctacatcggagccgatggcaaaccgtacgaggaggggccatggggtttcggccatgctggcacggagtacaagattgatctgtgcaggttcgacgagagcttgacggagatctccgggaccacgggcccagcctacaacattgacaatctggtcaagtctctcaaattcgtcaccaacatacgcgcttacggaccgtacggcaaggacaagggcacccgttcggtgtcacggtgatgaacaacgggcacgtcgctggcttc

SEQ ID NO: 76236 - DNA, 424 bp, Zea mays
ctggcaggacgctggcaaggtggagctggtggatgggtcctcctacctgggccagccgctgccgttcaccatctcgacgctcatctggatcgaagtgcttgtgatcggctacatcgagttccagcgcaacgccgagctcgacccggagaagaggctgtaccccggcggctcctactttgacccgctcgccctggcggccgacccggagaagaaggagcggctgcagctggcggagatcaagcacgcgcgcctcgccatggtcgccttcctcggcttcgccgtgcaggccgccgccaccggcaaggggccactcaacaactgggccacccaccttagcgacccactccataccaccatcttcgacacgttcggaggatcctcttaagcccgccattgctccgctccgtccatcgatcgaaacgtg

SEQ ID NO: 76237 - DNA, 451 bp, Zea mays
  unsure (1)..(451): unsure at all n locations
cgaaaatcgacgcggcgacgacgaaccggggcggcggcaaggccgggcaggcggaccggctggggcaggacaagggcgggcacgcgaagctggcgtgccccctctgccgcaccccggcgcccgacatcaagtccatgcagatccaccacgaggcgcgccaccccaagctccccttcgagccggagaagctcctcaacctgcactcctccgcccccgctgctgctgccgccgccgccgccactgccgacgccaccacctccaagcccaagcccggcgtccgcggcagcctcaagaagtaagcttgctggcttggttggctcgcccgcctgcatggggcacaattcccttcggtttcaatcccatccgccgnaccgatctataatcaatcaaatcgccgctctccggcctggcggctgccgcagtcggcctgcggtgtactgttagtctgctg

SEQ ID NO: 76238 - DNA, 285 bp, Zea mays
gatccactcccgctgggccatgctggaggtgatccactcccgctgggccatgctgggcgcgctcggctgcgtcttccccgagctgctcgcccgcaacggtgtcaagttcggcgaggccgtgtggttcagggccggctcccagatcttcagcgagggcgggctggactacctcgggaacccgagcctcatcgacacgcagagcatccttgctatctgggcctgacaggtcgtgctcatgggcgccgtcgagggctagcgcatcgccggcgggccgctcggcgaggg

SEQ ID NO: 76239 - DNA, 300 bp, Zea mays
accacgcgtccgcccacgcgtccggtggtaacaaggttgatgtcaagaacaggcaagtcaaggccaagcaagttacattccaccggaagaagaacttgcagtactatgagatttctgccaggagcaattacaactttgagaagcccttcctttacctcgctaggaagctggcaggggatcagaaccttcactttgttgaagctgttgctcggaagccaccacaagtgcagattgatatggccctgcatcatcagcatgaagctgagcttgcagctgccgctgcacagcccctccccgatg

SEQ ID NO: 76240 - DNA, 465 bp, Zea mays
ctctctcgtggagacgactgggccgccgtcgttgctgccctacgcggctacacccacgtcttcttcgggcccttagccgcgacgagcgccaccagggagtagaagaggttaaccttctggttggaaacgatgtacttcgaaggctatggcttccgtggaagtactttcgagcagacatatcgctgctatcctgcgtctttcatcgacaagccacaacttgaggccggtgacaaaattataatgccaccatcagctcttgatcgtcttgcatctctgcatattgaataccctatgctatttgaagtccacaatgcagcagcagaacggacttcgcattgtggtgttctggagttcagtgcagaagaaggcatgatctacatgccatattggatggatgcaaaatcttcttttgcaagagggagatatggtgttcataaaaaatgccaacctccccaacggcacata

SEQ ID NO: 76241 - DNA, 377 bp, Zea mays
cccacgcgtccgcggacgcgtgggggcgaccataagcatggccgcgatcaggcaggccaactgcctccgacgggacggcgccggcgccggcgcgcgctgcgacgcgccagggaccgtgctcatgctggcgttcagcgtggtccaggtggtgctgtcccagttccctggcctggagcacatcacctggctgtccgtcgtcgcggcggccatgtcgttcgcctactccttcgccggcctcggcctctccgtagggcactgggtgtctcgtggcggcggcggcctcgggggcagtgttgcatgtgccgccgcgggatcctccaccaggaggctctggaacgtgcttctcgcgctggggagcattgccttcggcctagacg

SEQ ID NO: 76242 - DNA, 308 bp, Zea mays
cgtttcgcgtctgcctcagcccgccgcaaggagaggtaagttcaggagacatcttcgagaagctgaaatggctcctaaagctgctcctgccaagaagggtgatgccaagacccaggccttgaacgttgccaaggctgtgaagtctggggcagccaagaagaagaccaagaagatccgcacgtctgtgacatttcaccgccccacgaccctgaagaaggctagggaccccaagtacccacgaatcagcactaccggaaggaacaagcttgatcagtaccaaattctcaagtacccccttaccacaggaa

SEQ ID NO: 76243 - DNA, 400 bp, Zea mays
aagaactcaagccctttgggaagcagctcagggacaaatacgtggagacacagcagcttctcctccagatcgctgggcacaaggatattcttgaaggcgatccattcctgaagcaggggctggtgctgcgcaacccctacatcaccaccctgaacgtgttccaggcctacacgctgaagcggataagggaccccaacttcaaggtgacgccccagccgccgctgtccaaggagttcgccgacgagaacaagcccgccggactggtcaagctgaacccggcgagcgagtactcgcccggcctggaagacacgctcatccctcacatgacaggcatcgccgccggcatgcaaaacactggctaggcggcttctcttcactcacctgcatagtgcaccgcaat

SEQ ID NO: 76244 - DNA, 385 bp, Zea mays
caggtctaggactcgcgggtcgacgcacgcctctgcacagacgttctgctacgcgtccgcggacgcgtgggcggacgcggggcggctcctagctgccttggggctataaaagggacccctaggcgcatggaggaagagaccaagcattctctaagcattcctaagcaccaagactccaattccgcgcattcgattctttgtgatagcaactagagctccatttgagtagagaactctttgggttgtgttgtgagctcgagttgcgacttgtgtgcgtgtttgtgctctgattttgtgtcttgtgtgcgttgctcatcgcagccgtacttatgtgcttctttgtgagcatcaaattgtaagggcgagaggctcgaagttgtggaga

SEQ ID NO: 76245 - DNA, 421 bp, Zea mays
ctgaatttggtgctgcagctgatggagatgctgaccgcaacatgattcttggtaaaagattctttgtgacaccgtcggactctgttgccattatcgcagccaatgctgttcaatcaattccttactttgcttctggcctgaagggagttgccaggagcatgccaacatctgctgcccttgatgttgttgcaaagaatttgaaccttaagttctttgaggtgcctactggatggaagttttttgggaatttgatggatgctggaatgtgctcaatctgtggtgaagaaagctttggcactgggtctgaccacattcgtgagaaggatggcatctgggctgtgcttgcatggctttcaattattgctttcaagaataaggacaaacttggaggagataagcttgtcactgttgaagatattgt

SEQ ID NO: 76246 - DNA, 281 bp, Zea mays
acaggactaggactcgcgggtcgacgcaagcctctacacacgacgtcgtaatagcacgggcacggagaaccagtgcccgaccatccacggcagcgtggactcgttcccgttcaaggccggcaagtgccagaataagaaccatgtgccgggagccgacgtccttcaccgtcaacggggacggcagcaccaagaacgcaccgcccgagttccagaacaccaagctcatgaggcgccgcatttagacgctggactagatcgagggcccgctcgacgtcagctcc

SEQ ID NO: 76247 - DNA, 429 bp, Zea mays
gcaacccctcaacagcagccactgtccagtgcgcgcgtcaagcttgcttagctagccgccatggcctccctcgccgccgtctccgtgaagcccgtggccatcaagggtctcgccggcagctccatctccggaaggaagctcgccgtcgccaggccgtcggcccgctctatccgcaggccccgcgcagccgccgtggtggccaagtacggcgacaagagcgtctactttgacctcgacgacatcggcaacaccaccggacagtgggacctctacggctctgacgcgccctcgccctacaacccgctacagagcaagttcttcgagacgttcgcggctccgttcaccaagagaggtctgctgctcaagttcctgctgctgggcggcggctcacttctggcctacgtcagcgcgtctgcgtcaccggacctc

SEQ ID NO: 76248 - DNA, 304 bp, Zea mays
atgcaacgggagccacatcaccgtagtccgacccctcgataacaatggccaccgtcctaggcagcccccgcgcgccggccttcttcatctcgccgtcctccctccgtgccgcgccggcgcacaccgccgtggcgctgcctgcagccaaggtgggcatcatgggccgtagcgccagcatcaggggcaggctgcgcgcgcaggccacctacaacgttaagctgatcacgccggagggggaggtggagctgcaggtgctcgacgacgtgtacatcctggaccaggccgatgaggacggcatcgacct

SEQ ID NO: 76249 - DNA, 380 bp, Zea mays
aaccccctacattgattcacaatatcagttccgcctattccacattaatgggagtacatttatgtttctgctttacgaatatgatattttttggacatttctaataatagcaagccttattcctattttggtattttggatttcaggacttttagccccggttagtgaacgaccagagaagctttctagttatgaatcgggtatagaacccatggggggggcttggttacaattccgaatacgctattacatgtttgcgcaagtttttgttgtttttgatgtggaaacagtctttctctaaccttgggcaatgaatttccacctattgggtgtatccctttttatccaagctttcatttatgtgcttatccaagttgttg

SEQ ID NO: 76250 - DNA, 287 bp, Zea mays
gcaagcctctacacagactcctgctcgccaccctcggcgccctcaccgtcgagtggctcaccggcgtcacctggcacgacgctggcaaggtggagctggtggatgggtcctcctacctgggcgagccgctgccgttcaccatctcgacgctcatctggatcgaagtgcttgtgatcggctacatcgagttccagcgcaacgccgagctcgacccggagaagaggctgtaccccggcggctcctactttgacccgctcgccctggcggccgacccggagaacaaggag

SEQ ID NO: 76251 - DNA, 453 bp, Zea mays
  unsure (1)..(453): unsure at all n locations
ctcgcgggtcgacgcaagcctctacactcagtcgtcttatgcggttctgccgtctacgcctccaatttggcctctctcccttgcaagtttaagcttcatcttcagccatgggtaaggagaagtcccacatcaacattgtggtcattggccacgtcgactctggcaagtcgaccaccaccggccacctgatctacaagcttggaggcattgacaagcgtgtaatagagaggtttgagaaggaggctgctgagatgaacaagcggtccttcaagtatgcttgggtgctcgacaagctcaaggctgagcgtgagaggggtatcaccattgatattgctctgtggaagtttgagaccaccaagtattactgcaccgtcattgatgcccctggacaccgtgacttcatcaagaacatgatcactggtacctcncaggctgactgtgctgtccttatca

SEQ ID NO: 76252 - DNA, 418 bp, Zea mays
cgtgggtcgacccaagcctctacagtgactcgtgctaacgcgtgggcggacgcgtggggcaaaagccaaaaggcatcaccgccgcgacgacgatggcagcctcgctccaagccgcggccaccctgatgcagccggccaagatcggcggccgggcgccctttgcctcgctgccgtcccgcccgtcgtcgcaactcgcctgcagggcgttcggcgtcgacgccggcgccgccaggatcacgtgctccctgcaggacgtcgccagcaggtgcgtcgacgccgcgaagctcgccggcttcgcgctcgccacctcggcgctcctcgtctcgggcgcgagcgcggagggcacgcccaagaggctgacctacgacgagatccagagcaaaacgtacatggaggtgaacggcacgggcacggggaa

SEQ ID NO: 76253 - DNA, 435 bp, Zea mays
tcgcgggtcgacccaagcctctaaagacactcgtgcgacagcggaggcgtcaggaacgcgtcccacctcctcaagtacgactcgatgctcggcaccttcaaggccgacgtcaagatcgtggacgacacgaccatcagcgtcgacggcaagcccatcacggtcgtctccagcaggcacccgctcaagctcccatggggtgagctcggcattgacatcgtcatcgagggcaccggagtcttcgtcgacggccccggcgccggcaagcacatccaggccggcgcgaagaaggtgatcatcacggctcccgccaagggcgccgacatcccgacctatgtcgtcggcgtcaacgagggcgactacgaccacagcgtcgccgacatcatcagcaacgcgtcctgcacgatcaactgcctcgcgccattcgtcaagatcttg

SEQ ID NO: 76254 - DNA, 441 bp, Zea mays
cgttggtcgtcccaagactctaaactgagtcgtattactccaaattgttgcatgaggctggactacctgagggtgttgtgaatgtcgtttctggttttggccctactgctggtgctgctcttgctagtcacatggatgttgataagatcgcatttactggatctaccgatactggaaaaattattctcgagttggctgcaaagagcaaccttaagacagtgacactggagttaggaggcaagtcccctttcatcataatggacgatgctgatgttgaccatgctgttgagcttgcgcactttgccctgttctttagccagggacaatgctgctgcgctggatctcgcacgtttgtacatgagcgtgtttatgatgagtttgtggagaaggccaaggctcgtgcattgaagcgcgtcgttggtgatccgttcacgaaaggtg

SEQ ID NO: 76255 - DNA, 364 bp, Zea mays
agtgcccgaccatcgacggcggcgtggactcgttcccgttcaagcccggcaagtaccagatgaagaagctgtgcctggagccgacgtccttcaccgtcaaggcggagggcatcgccaagaacgcgccgcccgagttccagaagaccaagctcatgacccgcctcacctacacgctggacgagatcgagggcccgctcgaggtcgcctccgacggcaccctcaagttcgaggagaaggacggcatcgactacgccgccgtcaccgtgcagctcccgggcggcgagcgcgtgcccttcctcttcaacgtcaagcagctcgtcgccaccggcaagccggacagcttccgcgggcccttcctcgtgcc

SEQ ID NO: 76256 - DNA, 421 bp, Zea mays
ggcagtggctgttggaggaggttatatcggcctcgaactgagtgcagccctgaagatcaatgactttgatgtcactatggtgtttcctgaaccttggtgcatgcctcgcctcttcactgccgatattgctgctttctatgaggcttactatactaacaaaggtgtaaagatcttgaagggcacgctagctgttggttttgatgctgatgccaatggtgatgtcactgcagttaagctaaaggatggcacagtacttgaagccgatattgttgttgtcggtgttggaggcagaccattgactactctcttcaagggtcaagttgctgaggagaagggtggaatcaagactgacgcttcctttgaaacaagcgttcctggagtatatgccattggttatgtggctaccttccctttgaagatg

SEQ ID NO: 76257 - DNA, 442 bp, Zea mays
ctcgtgggacgacgcaagactctaaactgagtcgtaatacccttcctcagtccggaaccccattccccgccgcctcgcgcccccgctcgcttcacttctctagagatggcggtgccgctgctgacgaagaagatcgtgaagaagcgggtcaagcagttcaagaggccccacctcgaccgctacaagtgccttaagccaagctggcgcaggccaaagggtattgactcccgtgtcaggaggaagttcaagggatgcaccttgatgcccaacattggttatggttctgacaagtcgaccaggcactacctccccaacaagttcaagaagtttgtggtccacaacgtttctgagctggagttgctcatgatgcacaacaggacctactgcgctgaaattgctcacaacgtgtccactaagaagcgcaaggagatcgtggagcgtg

SEQ ID NO: 76258 - DNA, 447 bp, Zea mays
  unsure (1)..(447): unsure at all n locations
gggtcgacgcaagcctctaaaatgcgtacgtattaaaaaggagcagcttcgattcgagatcgcggcgccatcgaccatgcagctcaagaatcgccgcgaagccgtgacggcgacagtgctcgtggccgtatcagtcctggcgaccctggcgcgcaccgacggcgccctctgcgacaagtccgacaaggcagccttgcttgccgtgaagtcggcgctgggcaacccactggcgctctccggctggaactccaccgtggcctgctgctcctgggagggcatctcctgcaacgccaccaccggccgcgtcaccgacctgaccgtcttcgcgctcaacatctcggcgccggtcncggccgccatcgccaacctcaacgcgctgcagagcgtcaacctgggctacaaacagctgtaccggagcatcccggcgttcctgggccgcgcgcgctg

SEQ ID NO: 76259 - DNA, 421 bp, Zea mays
ctcgtgggacgacgcaagcctctacactgagtcttacaatgcaataaaaaaagcagccgcaatggcgagcagcaccatggccctctcctccacggccttcgccggcaaggccgtgaacgtgccgtcgtcgtccgccttcggcgaggcccgcgtgacgatgcgcaagacggcggcgaaggccaagccagcggcggcgtccgggagcccgtggtacggccccgaccgcgtgctgtacctgggcccactgtcgggcgagccagcgagctacgtgacgggcgagttcccgggcgactacggctgggacaccgcggggctgtcggcggacccggagacgttcggcaagaaccggggagctggaggggatccagtccggctgggccatgctggggccgctcgggggcgtcctcccgagctgctcgcc

SEQ ID NO: 76260 - DNA, 453 bp, Zea mays
ctcgtgggtcgtcgcaagcctctacagtgactcgtgctgacgcgtgggcgtgcttatgggcgccgtcgagggctaccgcatcgccggcggcccgctcggcgaggtcgtcgacccgctctatcccggcggcagcttcgacccgctcggcctcgccgacgaccccgaggccttcgctgagctcaaggtgaaggagctcaagaacggccgcctcgccatgttctccatgttcggattcttcgtccaggccatcgtcaccgggaagggcccgctcgagaacctcgctgaccacattgccgaccccgtcaacagcaacgcttgggcctacgccaccaacttcgtctccggcaagtgagggaggcgccgccggtgacctttaggtgtccggatgcatgtgagcgcacgctggttttcggtttgtaccatgatgttaactattgttcaatcaacaaggaa

SEQ ID NO: 76261 - DNA, 316 bp, Zea mays
aaaaggaggccgacaagctgcagacctccgacggctgggccaagttcaccgggggattcttcttcggcggcatctccggcgtgctctgggcctactttctcctctacgtgctcgacctcccctacttcttcaagtagaaatcatcaaagatgcgtatatatatagctccggccgatcctcctctctagctgcatggtatgtaggtggtgtggtccttgtttcatttcactccagcggtgatcagcgccgtgtagaaatgtaattcctctgctttgcacatggatggattgggatgtgagacacggggaggtgagaa

SEQ ID NO: 76262 - DNA, 373 bp, Zea mays
accatggcctccctctcctctgccgccgtcaccgccccttccttcgccgcaccagcgccagcccgcgccgtggtcagaaggaggtccttcaccgtgcgcgcctctctccgcaaggccaccggcaccgccgccgtggcaatggctgccagcgccctgcttgccggcggtgccatggcccaggaggtgctgctgggcgcaggcgacggcgggctcgtcttcgagcccagccagttcaccgtcaaggccggcgacaccatcacattcaagaacaacgccggcttcccgcacaacgtcgtcttcgacgaagacgaggtgccgagcggcgtcgacgccaccaagatctcgcaggacgagtacctcaacgcgccaggcg

SEQ ID NO: 76263 - DNA, 379 bp, Zea mays
agaggggtaccgcgtcgccggcggcccgctcggagaggtcgtcgacccgctctaccccggcggcagcttcgacccgctcggcctcgccgacgatcccgaggccttcgcggagctcaaggtgaaggagctcaagaacggccgcctcgccatgttctccatgttcgggttcttcgtccaggccatcgtcaccggcaagggcccgctcgagaacctcgccgaccacctcgccgaccccgtcaacaacaacgcatgggcctacgccaccaagttcgtgcccggcaagtgagggggtcggacgcgccaccgcccaccgccaccggccaccgctgccgatatctaggtgttcggatgcacgtgagcgcgcactggttccagtttg

SEQ ID NO: 76264 - DNA, 431 bp, Zea mays
taatgtcatacggagatcaagaacggccgcctcgccatgttctccatgttcggcttcttcgtgcaggccatcgtcaccggcaagggtcccgttgagaacctcgccgaccacctcgctgaccctgtcaacaacaacgcctgggcctacgctaccaacttcgtccccggcaagtgagcgagggcatatacatacttgtatgcgtgtaccgtagacatacgtattcgtatatgtactgcaggagatgtaccagtatttgtgaagaagggagcatgggctcagagattgtaccagtagtgtacgtatttgcatgcatgctttggtccttgtggacattatcaatgaaatatgctgtaaattatacatacgtctttaataatgcatactgtacatgatttgctctggcaaaaaaaacaaaagaaaagggcggccgc

SEQ ID NO: 76265 - DNA, 394 bp, Zea mays
tgctatcgcttatagcatgtcagccatggccaccgccgccgcgtctagcctcctcaagtcctccttcgcgggctcccggctcccggccgccacgcggaccacaccggcgtccctcgtggtggccaccggcccgcgcggcgccggcgcggggcccatctgcgcgtccatgtccatgtcctcctccaacccgccctacgacctgacgtccttccggttcagccccatcaaggagtccatcgtgtcccgcgagatgacccgtcgctacatgacggacatgatcacctacgccgacaccgacgtcgtcatcgtgggcgccggctccgcggggctgtcctgcgcgtacgagctctccaaggaccccgccgtgagcatcgccatcgtggagcagtcggtg

SEQ ID NO: 76266 - DNA, 353 bp, Zea mays
gtatcgcgggtcgacgcaagactctagagtgattcttatgaaccacgccctcagcagcggcgacgcggagcgcgagccctccgtcttctccaggatcaccaagttcgaggaggagctccgcgcggtgctgccccacgaggtggaggccgcccgcgtcgccgtcgccgagggcaccgcccccgtggccaaccggatcgcggacagccgctcgttcccgctgtaccgcttcgtgcgccaggagctcggctgcgtgttcctcaccggcgagaagctcaagtcccccggcgaggagtgcaacaaggtgttcctccggcatcagccagggcaagctcgtcgacgccatgctcgagtgc

SEQ ID NO: 76267 - DNA, 415 bp, Zea mays
caactctctaaagtgactcgtgctaacgcgtgggcaacgccacagcttgcgcccgcaatggcactcgtctccgcctcctcgtcctccaccaccgccgtcacggcgctccccaggaatgggcagcgggcgtcgtcctccttcctcggcggcaagacgctgctgagacaggccgaggcggcccggccgtcgttcgccgtgcgcgccgcggcggaccccaacaggccgatctggttccccggcagcacccctccgccgtggctcgacggcagccttcccggcgacttcggctttgatccctggggcctcggatctgacgcggagagcctgcggtggaacgtgcaggcggagctggtgcactgccggtgggccatgctcggcgcggcgggcatcttcatcccggaggttcctgaccaag

SEQ ID NO: 76268 - DNA, 454 bp, Zea mays
tccgggtcaccacgccgtccaacatacccggcagacgagagaggggacgaggtgacagacaatgtggcggtcatcgagggagaaagcatgatggataaggatgaggatctgagcagcgacagcgaggacgaagaggtggaagatggacccaaaaagaaaggatggttctcatcaatgttccagagtatttctggtaacaatgtattggagaagtctgatctgcagcctgcgctcaaagctctcaaagataggctgatggcaaagaacgtgccttgtgcaggcagaggaaattgcagagaagctttgtgaatctgtcgcagctagccttgagggcaagaagctaggatctttcactagaatatcatcaacagttcagacagctatggaggatgcgcttcttcgtatcttgacccaaggcgctctattgacatactgagggatgtgcacgctgcca

SEQ ID NO: 76269 - DNA, 439 bp, Zea mays
tcgcgggtcgacgcaagcgtctaaacagacgcgtggtacgagttcgtcaccgtctagtacgactgtgcgagggaggaagaggcgaggagaagatgcagatcttcgtgaagaccctgacggggaagaccatcaccctcgaggtggagagcagcgacaccgtcgacaacgtcaaagccaaaatccaggacaaggaagggattcccccagatcaacagcgactgatattcgctggcaagcagctggaggatggacgcacgctggctgactacaacatccaaaaggagtcaactcttcatttggtcctcaggcttaggggtggaaccatgatcaaggtcaaaactctcactgggaaagagatcgagatcgacattgaacccactgactcgattgacaggatcaaggagcgtgttgaagagaaagaaggcattcctcccgtgca

SEQ ID NO: 76270 - DNA, 350 bp, Zea mays
aacaacctctaccccggcggccagtacttcgacccgctgggcctcgccgacgaccccgtcaccttcgccgagctcaaggtcaaggagatcaagaacggccgcctcgccatgttctccatgttcggcttcttcgtccaggccatcgtcaccggcaaggggcccctcgagaacctgctcgaccacctcgacgaccccgtcgccaacaacgcctgggtctacgccaccaagttcgcaccagggtcttaagctagctaccgggccgcggcgtgccaggacattgtgttgtacactactcgtttctgtcgtgatctgtaccatgaacgaatgcaaatattcttgtgctctcccag

SEQ ID NO: 76271 - DNA, 372 bp, Zea mays
tacacaaacgttctgaaacatttcactgtcaaacccaacctcgcattctgaatgcactgctgaacaagcatatacctggagtcagggccgttcaatctttgccagtggcagtccatttgcccccgtggagtacgaaggaaagacttttgtgcctgggcagtcgaacaatgcctacattttccctggactcggcctcggtcttgtgatctctggagccgtccgtgtccacgaggacatgcttctcgccgcctcgaaagcgctagctgatcaggccacacaggacaacttcgagaagggctccatcttcccacccttcaccagcatcagaaagatctctgcgcacatcgctgcagccgtggctgcaaaagccta

SEQ ID NO: 76272 - DNA, 410 bp, Zea mays
atgcctaagccagagcataaacctgagccaaagccagagcctaaacccaaaccgaaaccagagccaaagccagagccacaaccaaaaccagagcctaagccagagcctaaacccgaaccgaaaccggagccaaagccagagccccaacctaagccagagcctaagcctgagccgaaaccagaaccaaagccagagccacaaccaaagcctgagcctaaaccagaaccaaaaccagagccaaagccagagcctaagcccgaaccaaaaccagagccaaagcctgagcctaaacccgaaccaaggccagaacctaagccagagccaaagcctgagcctaaaccgaaaccagatccaaagccagagccacaagcagagccagagcctaagccagaaccaaaaccagagccaaa

SEQ ID NO: 76273 - DNA, 304 bp, Zea mays
gtaggacgacgcaagactctatagagagtcgtagtattgcgttgcgccgttgcctgggtcgcggatgcgtcggagccccgagtcgaataaaagaggcagcatcctgtcttgcatttgctgctgcgccatgtgtgaacagcctgtgtaataaacactgttgctttcgtgtgtgttcattgccttttggttggtctttgcatatcctactactgctgatctttttgtgaagcttggattggatggacgcgttttcttcaccgtaattcccttcttcctgagcgacgtgactgttgattcgaacaac

SEQ ID NO: 76274 - DNA, 369 bp, Zea mays
atcctgggcagcccccgcgcgccggccttcttcttttcgtcgtcctccctccgcgccgcgccggcgcctaccgccgtggcgctgcctgcggccaaggtgggcatcatgggccgtagcgccagcagcaggcgcatgctgcgcacgcaggccacctacaacgtgaagctgatcacgccggagggggaggtggagctgcaggtgcccgacgacgtgtacatcctggaccaggccgaggaggacggcatcgacctgccctactcctgccgcgcggggtcctgctcctcctgcgccggcaaggtcgtccccggctccgtggacgagtccgaccagagctacctctacgacgggcagatcgcccaccgctgggtg

SEQ ID NO: 76275 - DNA, 295 bp, Zea mays
tcgcaacactctagaatgagtcgtatcatccatgctctccgctaccaccgtgccactccagcaggggggcggcctgtccgagttctccgggctcaggagctccgcgtcgctgcccatgcgccggagtgccgcgtctgacgacgtcatgtccgccgtctccttcaggacgcacgcggtcggcaccagctgtaggtcgcggcgggcgcccacggaggccaagctgaaggtggccatcatcgggttcggccgcagctggcgcaagttcctgcggtgctggcacgggcgcggcgacgcc

SEQ ID NO: 76276 - DNA, 406 bp, Zea mays
caaactggttctgcaccggttccagaattttctcccatttccagggtctccccgtttctgtccggcggttctgccgttccactgcttttgatttcggagtgtgagcttacatcttgctggacaataaagattggattttaagcgatttggggggtgcttgcctgatctccccctgcgaggtactgccgggggattggatttcggggaagttttggtggtttgatattcggcttggccggagcaggaatgacgatcgacatgtccattcccgggagctccgggctgctgaacgctgcggggaagagggacatgaagttcttcagcaacccctacgtgcttgcgctcacgggcgctgcaagaatcggtggattcctctttggctacgatacaggtgtcatatctggag

SEQ ID NO: 76277 - DNA, 416 bp, Zea mays
  unsure (1)..(416): unsure at all n locations
tcgtgggtcgacgcaagcctctagagtgagtcgtactgaattgtcccgactcctgacccctaccgatcctcgcctgctgcagccatggcgacctccgcggcgctctccaccgccgccaatcccacccagctctaccggtcccgcgcttcgctgggcaagccggtgaaggggcttggcctgagcatgggccgcgagcgcgcccagcggagcattgtgtgccaggcggcgagcagcatctccgccgaccgcgtccccgacatggagaagcggaagctgatgaacctcctcctcctcggcgccatctcgttgcccaccgtcggcatggtcgtcncctacggcgccttcttcgtccctgccggctccgggaacgccggcggcgggaactacccgaaggacaagctgggcaaccacatcac

SEQ ID NO: 76278 - DNA, 428 bp, Zea mays
aagacgacttgtttcattgattcttgaagagatcgagcttcttttgcaccacaaggtcgaggatgtcttgcaactgcggatcaagctgcggctgcggctcaagctgcaagtgcggcaagaagtaccctgacctggaggagacgagcaccgccgcgcaggccaccgtcgtcctcggcgtggccccggagaagaaggccgcgcccgagttcgtcgaggccgcggcggagtccggcgaggccgcccacggctgcagctgcggtggcaactgcaagtgcgacccctgcaactgctgatcacatcgatcgacgaccatggatatgattattatctatctagcttgtggtggtggttgaacaataataagcgaggccgagctggctgccatacataggtaatgtgtggtgtgtgtgagacagagagaaacagag

SEQ ID NO: 76279 - DNA, 450 bp, Zea mays
tcgtgggtcgtcgcaagcctctataatgagtcctactagcgagagcagcacacacgcagctagctaggagcagcagcatagcagcggcgatggcggcctccatgatctcctcgtcagctctggcggtggcgcctcagggcctgccgcccctcggccgccgcgcctcctccttcgccgtcgtctgctccaagaagaagatcaagaccgacaagccctacgggattgggggtggcctgaccgtcgacgtcgacgccaacgggagaaagggcaagggcaagggcgtgtaccagttcgtcgacaagtacggcgcgaacgtcgacggatacagcccaatctacaacgaggatgactggtctcccaccggcgacgtctacgtcggtggaaccactgggcttctgatctgggccgtcaccctcgctgggatcctcggcggcggcgccctcctcgtct

SEQ ID NO: 76280 - DNA, 329 bp, Zea mays
acgctgggccatgctgggcgcgttgggctgcgtgtttccggagctgctcgcccgcaacggcgtcaagttcggcgaggccgtgtggttcaaggccgggtcgcagatcttcagcgagggtgggctggactacctcggcaacccgagcctgatccacgcgcagagcatcctcgccatctgggcctgccaggtcgtgctcatgggcgccatcgaggggtaccgcgtcgccggcggcccgctcggagaggtcgtcgacccgctctaccccggcggcagcttcgacccgctcggcctcgccgacgaccctgacgccttcgcggagctcaaggtga

SEQ ID NO: 76281 - DNA, 272 bp, Zea mays
aaagtcacgtgggcgctgacccagtcaacaacaacgcatgggcctacgccaccaacttcgtccccggcaactaagctcaacggctatgctatgcaacttcattgtctttcggatcggagagggtgtacgtacgtggattgattgatgctgcgagatgcatgtgtgtcttttgtttcacgttgcattgcatacgcaagtcgagatgatgagttggcgttgtacactaagatgaaccatgtttgtgcaatatgcaaaaggcaaggatttgcaaa

SEQ ID NO: 76282 - DNA, 435 bp, Zea mays
ggtccgggcaagcctctaaactgagtcgtgttaggtttttcgatgacaagctgggggcgctctgcatgcaatggttggaagacaaggtcttttcaatcagagatgctgccgctaacaacttgaagcgccttgcagaagagtttggtccagagtgggcaatgcagcatataatccctcaggtgctggagaagatcaacaacccacactatttataccgcatgacgattctgcaggcaatctccttgctagctcctgtcatgggtgcagagatcacctgtcaaaagctgcttccagtcgtcattaattcttcgaaggacaaggttcccaacatcaagttcaatgttgcgaaagtactacagtcacttgtaccgatcctcgaccaatctaccgtgaaaccgtgcctcgttgagctcagcgaggaccctgacgtcgacg

SEQ ID NO: 76283 - DNA, 409 bp, Zea mays
aggaccatgatgacgacgcactcgtacaccggcgaccagaggctgctggacgcgtcccaccgcgacctccggcgggcccgcgcggcggcgctgaagatcgtgccgacgagcacgggcgccgccaaggccgtggcgctggtgctgccgcagctgaaggggaagctgaacggcatcgcgctgcgggtgccgaccccgaacgtgtccgtggtggacctggtgatcaacaccgtgaagactggcatcacggtcgacgacgtgaacgcggcgttccgcaaggccaccgccggcccgctgcagggcatcctggatgtctgcgacgtgccgctcgtgtccgtcgacttcaggtgctccgacgtgtcctgcaccatcgacgcgtcgctcagcatggtcatgggcgactacatggtca

SEQ ID NO: 76284 - DNA, 344 bp, Zea mays
  unsure (1)..(344): unsure at all n locations
agatgatgtcataaagctcaaggtcctggctaacgccgatacccctgatgatgcattgactgcgcgaaacaatggggcacaaggaattggattatgccggacagagcacatgttctttgcttcagacgagaggattaaggctgtcaggcagatgattatggctcccacgcttgagctgaggcagcaggcgctcgaccgtctcttgccgtatcagaggtctgacttcgaaggcattttccgtgctatggatggactcccggtgaccatccgactcctggaccctcncctccacgagttccttccagaagggaacatcgaggacattgtaagtgaattatgtgctg

SEQ ID NO: 76285 - DNA, 369 bp, Zea mays
aacacactgaccacggcttacaccgattcccctgaagatgcatcgactgcacgaaacactggggcacaatgcattggattatgccggacagagcacatgttctttgcttcagacgataggattaaggctgtcacgcagatgattatagctcccacgcttgagctgaagcatcaggcgctccaccgtctcttgccgtatcacaggtctgacttccactgcattttccgtgctatggagtggactcccggtgactatccgacacctggaccctcccctccacgagttccttccagaagggaacatcgatgacattgtccatgaattatgtcctgagacgggagcctgccaggatgattccctcgcgcgaat

SEQ ID NO: 76286 - DNA, 444 bp, Zea mays
gtcgtcggaccactctaaactgacgtcgtgactatgtcgcttccaggggtttctcttctactgaaacagttgtcccaaggaaccaagacgccggcctagctgacctcccagcaactgtggctgctgtgaagaatcctaaccctaaggtggtttatgatgagtacaaccatgaaagatatcctcctggagatcccagcaagcgtgcctttgcatactttgtcctgagtggtgggaggttcatatatgcatcactgctgcgtcttctcgtactgaagtttgtcctgagcatgtcagcaagcaaggatgtgcttgcccttgcttcacttgaggtggacctctccagcatcgagccagggaacacagtgaccgtgaagtggcgtggaaagccagtcttcatcaggcgtcggacagacgatgacatcaagcttgccaacagtgtggatg

SEQ ID NO: 76287 - DNA, 427 bp, Zea mays
cacacgacgtccgcttggacagcaagttcccttctctctgtccaaggataaactgagtagccgctgcgctgaagaagggctccagagctttgatagtgtgagcaaatgagactgcaacagcagcgaaggacacattgctagtgatgtgaccaataccatggcacagggcgactggaaagagaagcttgaggagcgtgccattgataggcgctcgcttggggagaccgacactccagctgatgaggcagtatacgacacccactactagatggatcaaggacacaaagtatgggtatgggaagtagttgtagatcttcttgttgaggatgttgaatatgacgttgaggaagtaccacatgaagaagaagaagccggtgaccagggccgggtacttctccaggaaacccacagacttggcctcccctgc

SEQ ID NO: 76288 - DNA, 387 bp, Zea mays
gtccacgcaagactctaaactgacgtcctgactacgcgtccgttttttttgacacgaggaactcatcatgaatccactaattgctgctgcttccgttattgctgctggattggccgtagggcttgcttctattgggcccggagttggtcaaggtactgctgcaggacaagctgtagaaggtattgcgagacagccagaagcacaaggtaaaataagaggtactttattgcttagtctagcttttatggaagctttaacaatttatggactggttgtggcactagcgcttttatttgcgaaaccttttgtttaatcctaaaaaacaacaattagtcctttaaaattagatacttttttctttttttagtacattggcatttgcctatg

SEQ ID NO: 76289 - DNA, 449 bp, Zea mays
cgggtcgacgcaagcctctacactgacgtcgtgagtagcttcgaccccctcggcctggccgacgaccccgaggccttcgccgagctcaaggtgaaggagctcaagaacggccgcctcgccatgttttccatgttcggcttcttcgtccaggccatcgtcaccggtaagggcccgctcgagaacctcgctgaccacatcgctgacccagtcaacaacaacgcatgggcctacgccaccaacttcgtccccggcaactaagctcaacggctatgctatgcaacttcattgtctttcggatcggagaaggtgtacgtacgtggattgattgatgctgcgatatgcatgtgtgtcatttgtttcacgttgcattgcataagcaagtcgacatgattagttggcgttgtacactaagatgaaccatgtttgtgcaatagtggtggtttttgttt

SEQ ID NO: 76290 - DNA, 387 bp, Zea mays
tcgtgggtcgacgcaagactctacagtgacgtcgtgactaacgcgtggccaagtccgtctccgtgaagacgctcgccctgttcggcaaatccaaggtcaagaccgcgccggcgaagaaggctgctgcgcccaagcccaagccgaaggttgaggatggtatcttcggcacgtccggcgggatcggtttcaccaaggagaacgagctgttcgtcggccgcgttgccatgcttggctttgccgcatcgctacttggagaggccattaccgggaagggcatccttgcgcagctgaacctggagacgggcatccccatctacgatgcggagcccctcctcctgttcttcatcctcttcaccctccttggcgccatcagcgctctcggagacc

SEQ ID NO: 76291 - DNA, 428 bp, Zea mays
agaacgctgccaccgccatcgctaagccgtcgctgtccaagaagccctcgccgtcgttccgcctccggaacggcagcctcaacgcactgcgcctgcgccgcgtgttcgacctcttcgaccgcaacggcgacggcgagatcaccctcgacgagatggcctcggcgctcgacgcgctcggcctcggcgccgaccgctccggcctggaggccgcggttggcgggtacatcccggccggcgccgcggggctccgcttcgacgacttcgaatccctccaccgcgcgctcggggacgcgctgttcggccccatgccggtggctgtgaccgaggacgacgacgacgagggggacatgaaggaggcgttccgggtgttcgatgaggacggcgacggcttcatctcggccgccgagctgcaggccgtgctcaagaag

SEQ ID NO: 76292 - DNA, 456 bp, Zea mays
tcgtgggtcgtcgcaatcctctaaagtgacgtcgtgacttatcgcgtccgcccacgcgtccgggagaaccaagagcagatagacatggcgccccaccagcagcagcgggcgctgctcctgttcccactcgtcttcctcctcctcctccttgccccgcccctcgccggcgcgtggggaaaggagggccacatcatggtctgcaagatcgccgagaagtacctgtcgggagaatgcggcggcggcggtgcatgcgctgctgccggagtccgcgggcggggatctgtcgacggtgtgcccgtgggcggaccaggtgcgctggcactaccactgggccagcccgctccactacgccaacaccccccaagtctgcaacttcaagtattctcgggactgccacaattctcgtggccagcaagggatgtgcgtcgtcggggctatcaacaactacacggacca

SEQ ID NO: 76293 - DNA, 429 bp, Zea mays
  unsure (1)..(429): unsure at all n locations
actctagggtccacgcacccctctaaagtcactcgtgctaacgcgtgggcgccgcaccagcgccagcccgcgccgtggtcagaaggaggtccttcaccgtgcgcgcctctctccgcaaggccaccggcaccgccgccgtggcaatggctgccagcgccctgcttgccggcggtgccatggcccaggaggtgctgctgggcgcaggcgacggcgggctcgtcttcgagcccagccagttcaccgtcaaggccggcgacaccatcacattcaagaacaacgccggcttcncgcacaacgtcgtcttcgacgaagacgaagtgccgagcggcgtcgacgccaccaagatctcgcaggangagtacctcaacgcgccaggcgagacctactccgttcacctcaccgtgccgggaacctacggcttccactgcg

SEQ ID NO: 76294 - DNA, 446 bp, Zea mays
  unsure (1)..(446): unsure at all n locations
gggtcgacgcacgcctctaatctgagtcgtactaagcgagcgagagcagcacacacgcagctagctaggagcagcagcagagcagcggcgatggcggcctccatgatctcctcgtcagctctggcggtggcgcctcagggcctgccgcccctcggccgccgcgcctcctccttcgccgtcgtctgctccaagaagaagatcaagaccgacaagccctacgggattgggggtggcctgaccgtcgacgtcgacgccaacgggagaaagggcaagggcaagggcgtgtaccagttcgtcgacaagtacggcgcgaacgtcgacggatacagcccaatctacaacgaggatgactggtctcccaccggcgacgtctacgtcggtggaaccactgggcttctgatctgggccgtcnacctcgctgggattctcggcggcggcgccctcct

SEQ ID NO: 76295 - DNA, 404 bp, Zea mays
gtgagattgcacaaaccatggcgtccatgaccggcctctcgcagggcgttctgcccagcaggcgcgccgccaacagggccaggacggccgccgtcgtcagggcgtccgccgaggcgcaggcgcaggcgggccgccgcgccgtgctcgggctggtgggcactggcatcgtcggcggcgccttgtcgcaggcggtgcacgccgagaccgtcaagaccatcaagatcggagccccgccgccgccctccggtggactccccgggactctgaactctgaccaggcgagggacttcgacctccccttgaaggagcggttctacctgcagccgctgccgccggcggaggcggtggcgagggtgaagacgtcggcgcaggacatcatcaacctcaagccgctcatcgacaag

SEQ ID NO: 76296 - DNA, 400 bp, Zea mays
gcaaccggtccagcactttcacgctcagctccagcaatggctgcctccaccatggcgatctcctccacggcgatggccggcacccccatcaaggtgggctccttcggcgagggccgcatcaccatgcgcaagaccgtgggcaagcccaaggtggcggcgtccggcagcccctggtacggccccgaccgcgtcaagtacctcggccccttctccggcgagcccccgagctacctcaccggcgagttccccggcgactacggctgggacaccgccgggctgtccgccgaccccgagaccttcgccaagaaccgcgagctggaggtgatccactcccgctgggccatgctcggcgcgctcggctgcgtcttccccgagctgctctcccgcaacggcgtcaagt

SEQ ID NO: 76297 - DNA, 416 bp, Zea mays
agacctcctcagacccgaagaagcgcactctgcggcacatgagacgcacaccggacacggaactcgagggaaagcgaaaaaaggagaggcccgtctcaaagcccgcgggcccaggaaaaaatctgtgacaaggtccctgaaagccgggctccagttccccgtctgccgcatcgggcgctacctcaagaaaggccgctacgcgcagcgcgtcggcagcggtgcccccgtctacctcgcggccgtcctggagtacctcgccgctgaggtcctggagctcgccggcaacgctgccaaggacaacaagaagacgcgcatcgtcccgcgccacgtgctgctggcgatccgcaacgacgaggagctcgggaagctgctgaccggcgtgaccatcgcccacggcggcctgttgcccaacatca

SEQ ID NO: 76298 - DNA, 433 bp, Zea mays
cgcacgactctagactaattccatgagactacggctgggacaccgccgggctgtccgccgaccccgagaccttcgccaagaaccgcgagctggaggtgatccactcccgctgggccatgctcggcgcgctcggctgcgtcttccccgagctgctctcccgcaacggcgtcaagttcggcgaggccgtctggttcaaggccggctcccagatcttcagcgagggcgggctggactacctcggcaaccccagcctgatccacgcgcagagcatcctcgccatctgggcctgccaggtcgtgctcatgggtgccgtcgagggctaccgcattgccggcgggccgctcggcgaggtcgtcgacccgctgtaccctggcggcagcttcgaccccctcggcctggccgacgaccccgaggccttcgccgagctcaaggt

SEQ ID NO: 76299 - DNA, 447 bp, Zea mays
gggtcgaggcacgcgtccgcccacacgtccgataagacaaacgccggcacgcgcacgcagacacgatggcgatctgcagcgcgcacactaccacctccctgcgctccccatgcacgaccgtctcgaacgcaggtctgaggcagaagcaagtcatcttcgtcaccagcaacaggaggagcggcggcggcaggaggcacggaggggcaaggagcttccaggtctcgtgctccgtcgacaagccggtggtgattggcctggcggcagactcagggtgcggcaagagcaccttcatgcgccggctcaccagcgtcttcggtggcgccgcggagccgcccaagggcgggaacccggactccaacacgctcatcagtgacaccacgacagtgatatgcctcgacgactaccattcgctggacaggaactgcaggaaggagaaaggtgtgaccg

SEQ ID NO: 76300 - DNA, 401 bp, Zea mays
tgaaaagacgtccgctcacgcgtccgcccacgcgtccgggcgcgggtcgcatgggcggcaccacccagtacacggtgaacaaccagatggtcaacgccaccctgatgaacatcgccgacaaccccaccaacgtgcagctcccggggatgtacaacaaggaggacaacccccgcgtgcccatcatcgtcaccggcaacgacttctccacgctctacgcgccgctcatccgcgacggccgcatggagaagttctactgggcgcccacccgcgaggaccgcatcggcgtctgcaagggcatcttccgcaccgacggcgtcgacgaggagcacgtcgtccagctggtcgacaccttccctggccagtccatcgacttcctcggcgcgctgcgtgcccgggtctac

SEQ ID NO: 76301 - DNA, 419 bp, Zea mays
cagacacttgggcggctgcaaccgcgagatgaggaggatgaaggcggaggccgacgacgggctccggctggacgtcctcgaccacaactacctccccagggtgatgccccacttcctcgcctggaagcagcagtacagtaggttttcgttccaacgtcgcgcaggggagccattcctgtactggatgggtccgcggccccgggtctgcctcttcgactacgagtcggtaaggcaagttcttttcaacaagtccggccatttcttcaaggacgacgcccacccgactatcctggcaatgatgggcaaagggctggtcctggtggaaggcaccgactgggtgcgccatcggagggtggtcaacccagccttcgccatggacaagctcaagatgatgacggagacgatggtcagctgtgctg

SEQ ID NO: 76302 - DNA, 76 bp, Zea mays
gtccgaacgctaggacatggaggtttgtaatatatgatccaaccagtgatgaatcaatgcattcacttgtgtacac

SEQ ID NO: 76303 - DNA, 400 bp, Zea mays
aacactctatagtgacgtcgtattacacgtccggcggcgccctcggcctcagcgagggagggccgctgttcgggttcaccaagtcgaacgagctgttcgtggggcggatggcgcagctgggcgtggccttctccatcatcggcgagatcatcacggggaagggcgcgctggcgcagctcaacatcgagacgggggtgcccatcaacgagatagagccgctcgtcatcttcaacgtcgtcttcttcgtcatcgccgccatcaaccccggcaatggcaggttcatcatcggcgaggaagacgaatatgctgctggctgctgctggctggcctcggacatgagtcgtgtgcgtttacttttacctgtgactgtgcgtctcggtgcgcgcgcgtaagtgctttg

SEQ ID NO: 76304 - DNA, 405 bp, Zea mays
  unsure (1)..(405): unsure at all n locations
atggaagcacagaacaaattttattttcttcagccggagatgttgatgtatatgatctccaagccttatgcaataaggtaggatggccacgcaggcctctttcaaagatagcagcctcattaagaaatagctacttggttgctacactatattcaataattagatcttcagaaacagagggagaagagaagaaacagctcattgggatggcacgagcaacctcagaccatgccttcaatgcaacgatttgggatgtccttgttgatccttcataccagggtcagggtcttggtagagcactcatggagaaagtaattcgtactttgctccagcgagacatcaacaacattacactgtttgcggataacaaagttatagatttctacaagaacctgnggttcgaag

SEQ ID NO: 76305 - DNA, 411 bp, Zea mays
cccacgcgtccgcaacgtgttcggcaagaccaagaagaacacggacttcatctcctacgtcggcgacggcttcaagctgctgatcccgtccaagtggaaccccagcaaggagcgggagttccccgggcaggtgctccgctacgaggacaacttcgacgccaacagcaacgtgtccgtcatcatccagcccacctccaagaaggccatcaccgagtacggctcccccgaggagttcctctcgcaggtcgactacctgctcggcaagcatgcctacggcggcaagaccgactccgagggcgggttcgagaccgacgccgtggccaccgccaacgtgctggagagctccacccccgtggtggacggcaagcagtactacagcatcaccgtgctgaccaggacggcggacggcga

SEQ ID NO: 76306 - DNA, 446 bp, Zea mays
tcgcgggtcgacgcacgcctctacagtcacttgtgctgacgcgtgggttcgcgtccaagcagtccctctcctacctcgatggcacgctgcccggcgactatggcttcgacccgctgggcctctcggacccggagggcaccgggggcttcatcgagcccaagtggctggcctatggcgaggtgatcaacggccgctacgccatgctgggcgcggtgggcgccatcgccccggagatcttcggcaagatgggcatcatccccccggagaccgcgctgccgtggttcaagacgggcgtcatcccgcccgcgggcacctacaactactgggccgactcctacacgctcttcgtcttcaacatggcgctcatgggcttcgccgagcaccgccgcctccaggactggtacaacccgggctccatgggcaagcagtacttcctcggcctcgag

SEQ ID NO: 76307 - DNA, 375 bp, Zea mays
agtcggaaatccctgtaacactaatgcgctgatttgtttgaaaaatgccccaaacataccggcaaaaaactttcatgcattgacgaggttggatgaaaatagagcaaagtgccagctggcactaaaagcaggtgtattttatgacaaagtatcaaacgtgactatttgggggaaccattcgacgactcaggttcctgatttcttgaatgccaaaattgatggaagaccagtgaaagaagtcattaaggataccaactggttagaggaagagttcaccctcacagttcaaaagcgtggatgtgtgctcatccaaaaatggggcagatcatcagctgcatcgaccgctgtttccatagtggatgctaatagatccct

SEQ ID NO: 76308 - DNA, 429 bp, Zea mays
atctgtgtctcaatggcatcccttactgagctctcattcaactggactggcttcatcaatgccatgatatcaaacatctcattcacctacaggagcatttattccaagaaagccatgactgacatggatagcaccaacgtgtatgcttacatttcaataattgctctcattgtttgcattccgcctgcagtgatctttgaagggccccggctaatgcagcatggattcagtgatgccattgcaaaagtaggcttgacaaagtttgttagtgacctattcttggttggactgttctaccatctgtacaaccagattgctacgaacaccttggagcgagtggctcctctgacacatgctgtgggcaatgtgttgaagcgtgtgtttgtcattggcttctcaatcgttgtttttggcaacaaaattagcaca

SEQ ID NO: 76309 - DNA, 405 bp, Zea mays
gcgcgacctcagggtgcctgtgcctgctcccgctgttccttcctcatggccaccgcctgccacctcgccgcgccgctcggcctcgccccgttgccccgcggctgcgcctctgctggcgtcgtggccgtcgtccggtgcgctcggtcgtcaggctccaagattccgagaggcgttgctgtcagggcgacgtccggcggcgagggcgccacggaggaggtgccggagattgtgaaggctgcgcaggacgcgtgggacaaagttgaggacaagtacgccgtggccaccatcggtgtcgctgccatcgtcgcgctctggacggtagtaggtgccatcaaggccatcgacaagcttcctcttctgcctggtgtccttgagattgttggaattgggtatacaaggtggttc

SEQ ID NO: 76310 - DNA, 415 bp, Zea mays
ctcgcgggtcgacgcaagcctctagaatcagtcgtattaggtccagcactttcacgctcagctccagcaatggctgcctccaccatggcgatctcctccacggcgatggccggcacccccatcaaggtgggctccttcggcgagggccgcatcaccatgcgcaagaccgtgggcaagcccaaggtggcggcgtccggcagcccctggtacggccccgaccgcgtcaagtacctcggccccttctccggcgagcccccgagctacctcaccggcgagttccccggcgactactgctgggacaccgccgggctgtccgccgaccccgagaccttcgccaagaaccgcgagctggaggtgatccactcccgctgggccatgctcggcgcgctcggctgcgtcttccccgagctgctct

SEQ ID NO: 76311 - DNA, 435 bp, Zea mays
aggacgcgtgggttgcgattcgctcgctcgatcctagcttcccttccaagaagcgcagcgcccatggccatggccacgcaagcctccgccgccacgcgccacctgctggccgccgcctgggcgccggcggcgaagccgcggcagctgagctcgcagctcgcgctgccgtcgtcgtcctcccgcgggccggccccgctccgcgcgtccaccgaggaggcggtggaggcgcccaaggggttcgtggccccgcagctggaccccagcacgccgtccccgatcttcggcggcagcacgggcgggctgctccgcaaggcgcaggtggaggagttctacgtcatcacgtggacgtcccccaaggagcaggtgttcgagatgcccaccggcggcgccgccatcatgcgagagggccccaacctcttgaagctggcgcgcaag

SEQ ID NO: 76312 - DNA, 411 bp, Zea mays
agctagcagcagagtacatacatactaggcagccaggcagccatggcgcccaccgtgatgatggcctcgtcggccaccgccgtcgctccgttccaggggctcaagtccaccgccagcctccccatcgcccgccgctcctccagaagcctcggcaacgtcagcaacggcggaaggatccggtgcatgcaggtgtggccggcctacggcaacaagaagttcgagacgctgtcgtacctgccgccgttgtcgacggacgacctgctgaagcaggtggactacctgctgcgcaacggctggataccctgcctcgagttcagcaaggtcggcttcgtgtaccgcgagaactccacctccccgtgctactacgacggccgctactggaccatgtggaagctgcccatgttccgctgc

SEQ ID NO: 76313 - DNA, 438 bp, Zea mays
  unsure (1)..(438): unsure at all n locations
gggtcgagacacgcgtctgcacacacgtctggaaggttcctgaaatttactgggcacacactactcctcaggttttaacaatggagtatgtcncaggaattaaaattaacagaataaagcagttagataagttaggagtcgatagaaaaagattaggtcgttatgctgttgagtcctaccttgagcagatcttatcccatgggtttttccatgctgacccgcatccaggaaacattgctgttgatgatgtcaatggagggagacttatcttctatgacttcgggatgatgggaagtatcagtcaaaatattcgggaaggattgcttgaagtattctatggagtttatgaaaaggatcctgacaaagtgcttcaagcaatggttcaaatgggtgtccttgttcctactggagatatgactgctgtcagaagaaacgctc

SEQ ID NO: 76314 - DNA, 426 bp, Zea mays
cggagacgttcgccaagaaccgggagctggaggtgatccactcccgctgggccatgctgggcgcgctcggctgcgtcttccccgagctgctcgcccgcaacggcgtcaagttcggcgaggccgtgtggttcaaggccggctcccagatcttcagcgagggcgggctggactacctcgggaacccgagcctcatccacgcgcagagcatccttgctatctgggcctgccaggtcgtgctcatgggcgccgtcgagggctaccgcatcgccggcggcccgctcggcgaggtcgtcgacccgctctaccccggcggcagcttcgacccgctcggcctcgccgacgaccccgaggccttcgccgagctcaaggtcaaggagctcaagaacggccgcctcgccatgttctccatgttcggattcttcgtcc

SEQ ID NO: 76315 - DNA, 451 bp, Zea mays
  unsure (1)..(451): unsure at all n locations
ctcgtgggtcgacgcaagcctctagaatgtgtcttagtagatcgatccatcgatcgctagctagctgacgaccatggcgtccctctcctctgccgccatcaccgccccttccttcacggccgcgcccgctcgcgcagtggtcagcaggaggtccttcaccgtgcgtgcctctctccgcaaggccactgccaccgccgccgtggccgttgccgccagcgtcctgcttgccggcggcggcgccatggcccatgaggtgctgctgggcgcacgcgacggcgggctcgtcttcgagcccagccagttcaccgtcaaggccggcgacaccatcaccttcaagaacaacgccggcttcccgcacaacgtcgtgttcgacgaagacgaggtgccgagcggcgtcgacgcctccaagatctcgcaggangagtacctcaacgcgccaggcgagacctac

SEQ ID NO: 76316 - DNA, 425 bp, Zea mays
gtgacatgcacgagaagagagtctcggtgtagtgtctccgtctgagtcgattaaggatcgtctcgatgtaggcttgatgatcgaggaccctttagctggtcacatgcctcgtcatgggtaagccttgcctcgggcagactaaggccggaataagataacacgaaatgggcgtggagcggtggcgagagtagcgtgtaccctccgtggcaagaggctggacggtggtgtagctgtgctctcggtttgcgtgaacctgatccggtcttaagaaccccggtggcgggttgacatatgcaagggttaagtgctacatatgtcgtgtgattggagatcctcagctgagtacaatcgattcggatcgccgtaccttcgcggttatgaagacttggtcactgccctacacgtagcattccactaaagatgat

SEQ ID NO: 76317 - DNA, 432 bp, Zea mays
gggtcgacgcacgcctctacagtgacgatcatcatgacgcccgcaatggcactcgtctccgcctcctcgtcctccaccaccgccgtcacggcgctccccaggaatgggcagcgggcgtcgtcctccttcctcggcggcaagacgctgctgagacaggccgaggcggcccggccgtcgttcgccgtgcgcgccgcggcggaccccaacaggccgatctggttccccggcagcacccctccgccgtggctcgacggcagccttcccggcgacttcggctttgatccctggggcctcggatctgacccggagagcctgcggtggaacgtgcaggcggagctggtgcactgccggtgggcgatgctcggcgcggcgggcatcttcatcccggagttcctgaccaagatcggcgtcctcaacacgcccttctggtac

SEQ ID NO: 76318 - DNA, 381 bp, Zea mays
aacacgcatccgctaacgcgtccgcccacgcgtccgccgtcactcaatacagcacaggcagctcgatagagagagagagacatagatgtcgtggttcgggcaccaccatcgcgagcagccggctcccccggcgtcgggccgcaagcaggtgttcaagatgttctgctgcgcgaacgagaactactgcctggccgtccgcgacggcgccgtcgtgctggccccggtcaataccaaggacgaccaggagcactggtataaggacatgcgcttcagcaatcgggtccaggacgacgaaggcataccggcgttcgcgctcgtctgcagtgccacggggctcgcactcaagcattccctcagccagtcccacgcggtcaagctcgc

SEQ ID NO: 76319 - DNA, 417 bp, Zea mays
tgcactgacgttgtgtcatagccgcacttaaaagccgagtactctaccattgagttagcaacccggataaaataggatctcttagatacgatcaaaatctagaaatcgatgaaattatacgacattgaattagcaagacatcaaaagaaagattttctaatccattaaaaagactcaaatacaaaaatgaacagatccggttaaatttcactaaggctaagggtaacaaaaaaaaagcagccccaatcacaatggcaaaattgtgatttttttggcaatttaaagaagtaaaataatcttgtatgtgtatgagagtacatgcaagaggggcaaccctatcatttgaatgaagtgtagacagaaatacctaatatggagtgacaataaagagagccatctatctacaaagtcgatttg

SEQ ID NO: 76320 - DNA, 421 bp, Zea mays
gtcgacgcccgcctctacagtgagtcgtactaggtccacgcgcagagcatcctggccatctgggcgtgccaggtggtgctcatgggcgccgtcgaggggtaccgcgtcgccggcggcccgctcggggaggtggtcgacccgctgtaccctggcggcagcttcgacccgctcgggctcgccgacgacccggaggcgttcgccgagctcaaggtgaaggagatcaagaacggccgcctcgccatgttctccatgttcggcttcttcgtgcaggctatcgtcaccggcaagggccccctcgagaacctcgccgaccacatcgccgaccccgtcaacaacaacgcctgggcttacgccaccaacttcgtcgccggcaagtgagcgagggcatgatgcttgcatgcgtgtaccgtagacgtaccgt

SEQ ID NO: 76321 - DNA, 430 bp, Zea mays
caccgcgccgtcgcgcgatgagggcatcctcgcgcagcaccctcgcgccgccccctcgagcgcatccgcctcgcacccggccttcgcccttatcgaggagcgcctcgtagcccgggaccaggacatccaggagctcctcgtcgacaaccagcggttcgccgccacgcacgtcgcgcttcagcagcagcttatcgcggcgcagcacgagctccgggcggtctccgtcgctgccaccagggcgcgcgccgagcgggaggtcgaggtgcgagcgctggccgaccaggcgggccacatagaggccgaggcgcgggccgtcgccgctgcgcgcgcggaggtcgaccaggttcacgccgacgtccaggtgctcgtcgcggcgcgcactgaccttgtcaaccggctccagggcctacgggagaagctcgcgcacaag

SEQ ID NO: 76322 - DNA, 81 bp, Zea mays
cggacgcgtgggttaccctagtccagagtgtttatcttcgttcgtctcgtgtttgttgttgcccatctgtgtttttgattg

SEQ ID NO: 76323 - DNA, 420 bp, Zea mays
cggacgcgtgggaaaccttgaggttgtacccagcaggtgcctttgtttcaaggcaggccctccaggaactgaagctcggtggcgtacatataccaaaaggtgtcaacatctacatccctgtctccacaatgcatcttgacccagagctatgggggcctgatgtgaaagagttcaacccagagcgcttctctgatgttcgaccccagctacattcatacttgccatttggtgctggggcccgaacctgcctagggcagggatttgctatggctgagctcaagatcctcatctctctcatcgtctccaagtttgttttgaagctctcaccacactaccagcattctccaacactgaaactcattgtggagccagaacttggtgtagacctcaccttaacgaaagtgcaaagtgtctgtacta

SEQ ID NO: 76324 - DNA, 349 bp, Zea mays
gacgcagatccatatagctgttacggttgcttatccattacacctagttcaatatggttcggttccgatcatgtctacttccattgcaggtaacgtaattggtttcaaagccttacgcgctctacgtttcggcgatctactaattccccctgcttagtcaaaaactttccaaggtccgcctcacagtaaccaagttgaaatggataagttgaacaagtacggtcgtcctttactgggatgtactattcaaccaaaattgggattatccgcaccaaattactgtacagcgtgttatgagtgtctactcagtgggcttgattttacaatagatgatgagaacgtaaactca

SEQ ID NO: 76325 - DNA, 423 bp, Zea mays
actagtgggtcgacgcaagactctacactgagtcgtagcagtcaccgccccttccttcgccgcaccagcgccagcccgcgccgtggtcagaaggaggtccttcaccgtgcgcgcctctctccgcaaggccaccggcaccgccgccgtggcaatggctgccagcgccctgcttgccggcggtgccatggcccacgaggtgctgctgggcgcaggcgacggcgggctcctcttcgagcccagccagttcaccgtcaaggccggggacaccatcacattcaagaacaacgccggcttcccgcacaacgtcgtcttcgacgaagacgaggtgcccagcggcgtcgacgccactaagatttcgcacgaggagtacctcaacgccccaggccagacctactccgtcaccctcaccgtgcccgggaaacc

SEQ ID NO: 76326 - DNA, 425 bp, Zea mays
gcaagctcgatctactactactactagctggtacacatactagccagcctgccagccagcttgccatggcgcccaccgtgatgatggcctcgtcggcaaccgccgtcgccccgttccagggtctcaagtccgccgccagcctccccgtcgcccgccgcagcaccaggagcctcggcaacgtcagcaatggcggaaggatccggtgcatgcaggtgtggccggcctacggcaacaagaagttcgagacgctgtcgtacctgccgccgctgtcgacggacgacctgctgaagcaggtggactacctgctgcgcaacggctggataccctgcctcgagttcagcaagctcgggttcgtgtaccgcgagaactctagctccccgtgctactacgacggccgctactggaccatgtggaagctgcccatg

SEQ ID NO: 76327 - DNA, 433 bp, Zea mays
gaacgaactgaggtcgacgacgactgatcgagcagcgacgatggcggctgtgctgaacagcaggaagacgccgcaggtggttgccgtgctggtggcggcggcgctgctggcgtcgtccgcttcggcggcgatcatctgcgggcaggtggggtcgtcgctggctccgtgcatcccgtacgcgacggggagggccagcgcgctccccgcgtcgtgctgcagcggcgtcaagagcctcaacagcgcggcgcggaccagcgcggaccgccaggcggcgtgccgctgcctcaagagcctcgccaacagcgtcaagagcgtcaacatgggcaccgtcggccacatccccggcaagtgcggcgtctccgtcggattcgccatcagcatgtccaccgactgcaacaagatcagctaagttatacgacgaccaagctaatag

SEQ ID NO: 76328 - DNA, 409 bp, Zea mays
acgtcaagcagctcgtcgccaccggcaagccggacagcttcggcgggcccttcctcgtgcccagctaccgcggctcctccttcctcgaccccaagggccgcggcggctccaccggatacgacaacgccgtcgcgctccccgccggaggcagaggcgacgaggaggagctccagaaggagaacatcaagaacgccgcctcgtccacgggcaacatcacgctgagcgtcaccaagagcaacccggacaccggcgaggtcattggcgtattcgagagcgtgcagccgtcggacaccgacctcggggctaaggcgcccaaggatgtcaagattcagggggtctggtacgcgcagctcgagtgattcgttttaactgttagaggcgtcggaccgtcatggagaccttttgagag

SEQ ID NO: 76329 - DNA, 401 bp, Zea mays
gcaaccggtccaacactttcacgctcaggcgctcagctctagcaatggctgcctccaccatggcgatctcctccacggcgatggccggtacccccatcaaggtgggctccttcggcgagggccgcatcaccatgcgcaagaccgtgggcaagcccaaggtggcggcgtccggcagcccctggtacggccccgaccgcgtcaagtacctcggccccttctccggcgagcccccgagctacctcaccggcgagttccccggcgactacggctgggacaccgccgggctgtccgccgaccccgagaccttcgccaagaaccgcgagctggaggtgatccactcccgctgggccatgctcggcgcgctccgctgcgtcttcccccagctgctctcccgcaacggc

SEQ ID NO: 76330 - DNA, 450 bp, Zea mays
gggtcgtcgcaagactctatagtgacgtcgtattacgcgtccgccccctcggcctggccgacgaccccgaggccttcgccgagctcaaggtgaaggagctcaagaacggccgcctcgccatgttttccatgttcggcttcttcgtccaggccatcgtcaccggcaagggcccgctcgagaacctcgctgaccacatcgctgacccagtcaacaacaacgcatgggcctacgccaccaacttcgtccccggcaactaagctcaacggctatgctatgcaacttcattgtcttcggatcggagagggtgtacgtacgtggattgattgatgctgcgagatgcatgtgtgtcctttgtttcacgttgcattgcataggcaagtccagatgatgagtttgcgttgtacactaagatgaaccatgtttgtgcaatagtgggggtttttgtttccc

SEQ ID NO: 76331 - DNA, 432 bp, Zea mays
tgagaaaaaagaacagaaggagagggagctacgtgtccaaataattgctgaagccgaagaattcaagaaagccttttttgagaagaggatacagaactgtgcgtcaaacatggtgaacaacagagagagggagaagatttttgtagccagccaggagaaattccacgccggcgcagacaagcagtactggaaatcgatttcggatctcatcccacatgaaatagccaccatcgagaagcgggggaagaaagacaaggacaagaagccatccatcacagttgtccagggccccaagcctggcaagcccaccgacctctcccggatgcgccatatcttggtgaagctgaagcatgctccgccgccacatatgatgcagcctccaccaccagcacctgctgctaaagagggcacaaaggatggcagcgccaaggt

SEQ ID NO: 76332 - DNA, 428 bp, Zea mays
caccgcgccagctgaggacggtacagcggcacagaggtgcgacgtacgacgacgacgacgcaggcgccacacatggcatcccagctctccgccgccgtgccccggttccacggcctccggggctacgccgcgcccaggtccgcggtggcagcgctgccgtccgtgagggtgggcaggaagaggtcgtcgtcgcagggcatccgctgcgactacatcggctccgccaccaacctggtagatcatggtgacgacgacgacgctgatgctgttcgcggggcggttcgggctggcgccgtccgcgaaccgcaaggcgacggcggggctgaagctggaggcgcgcgactccggcctgcagacgggtgaccccgccgggttcaccctcgccgacacgctggcctgcggcgccgtcggccacatcctcggcgtcg

SEQ ID NO: 76333 - DNA, 425 bp, Zea mays
  unsure (1)..(425): unsure at all n locations
gccaccatcgaccttcaagtctcgctacgtagcagtgcaataaaaaaagcagccgcaatggcgagcagcaccatggccctctcctccacggccttcgccggcaaggccgtgaacgtgccgtcgtcgtccgccttcggcgaggcccgcgtgacgatgcgcaagacggcggggaaggccaagccggcggcggcgtccgggagcccgtggtacggccccgaccgcgtgctgtacctgggcccactgtccggcgagccgccgagctacctgacgggcgagttcccgggcgactacggctgggacaccgcggggctgtcggcggacccggagacgttcgccaagaaccgggagctggaggtgattcactcncgctgggccatgctgggcgcgctcggctgcgtcttcncggagctgctcgcccgcaacgg

SEQ ID NO: 76334 - DNA, 421 bp, Zea mays
  unsure (1)..(421): unsure at all n locations
agtggggaaaggagggccacatcatggtctgcaagatcgccgagaagtacctgtcggagaaggcggcggcggcggtgaaggcgttgctgccggagtcggcgggcggggagctgtcggcggtgtgcccgtgggcggaccaggtgcgctggcactaccactgggccagcccgctccactacgccaacaccccccaagtctgcaacttcaagttttctcgggactgccacaattctcgtggccagcaagggatgtgcgtcgtcggggctatcaacaactacacggaccagctctacagctacggccagaagacttcgtataacctgacggagagcctgatgtccctggcacacttcgtcggcgacgtccacagccgctgcacgtatgcttcgaagatgactaaggcggtaacnacatcaccgtc

SEQ ID NO: 76335 - DNA, 425 bp, Zea mays
  unsure (1)..(425): unsure at all n locations
aacattcctcgcgcggcgaccacccgattcgaagcgtgcggagagaccgaagaagcgggagagatggctcgtaccaagcagactgctcgcaagtccacgggagggaaggctcccaggaagcagcttgccaccaaggctgcccgtaagtctgcccccaccactggtggagtgaagaagcctcaccgctaccgccctggaactgttgccctccgtgagatccgcaagtatcagaagagcactgagctgctgatcaggaagctgcccttccagaggctcgtcagggaaattgcacaggacttcaaaactgatttgcgtttccagagccatgcggtgcttgccctccaggaggctgctgaggcataccttgttggcctgtttgaggacacaaacctgtgcgccatccatgctaagcgtgtgnacatcat

SEQ ID NO: 76336 - DNA, 408 bp, Zea mays
aagtcgaggagctcgagagggcaccaataatggccggcgtgaactccagcgtcgtcgggctcaagcccgccgcggcagtgccgcaggccgccgccgcctcatcgccggcgaagcgggtgcagctggccgcgcccgagggccgccgcgccgctctgctcggcctggcggccgtcttcgccgtcacggccaccaccgggtcggccaaggccacgatcttcgatgagtacctcgagaagagcaaggccaacaaggagctgaacgacaagaagaggctggccaccagtggagccaactttgcgcgcgcctacaccgtggagttcggcagctgccagttcccctacaacttcactgggtgccaggacctcgccaagcagaagagagtccccttcatcagccacgacctcgaga

SEQ ID NO: 76337 - DNA, 412 bp, Zea mays
gttgttcggagcgggcagcagcacacagccccatcccaatcctagtcgatcttcttcccctcctcaaggaagaaaagaagctgaaccatggggaagagaaagtcagctgctaagccacctcctaagaagcggatggacaagcttgacactgtcttttcctgcccattctgcaaccacgggagtagtgttgagtgccgaattgacatgaagaatctgattggcgaagcatcttgtagaatctgtcaggaaaacttcagcacaactgttaatgcactcactgagcctattgatatatatagtgaatggattgatgagtgtgagcgtgtcaacactgttgaaggcgacgatgatgcgtgagcttgcccatgcgatgaaactgttacctacatcgtaatgtaatgttgctggtatc

SEQ ID NO: 76338 - DNA, 355 bp, Zea mays
gagaggcgttcgccgagctcaaggtgaaggagatcaagaacggccgcctcgccatgttctccatgttcggcttcttcgtgcaggctatcgtcaccggcaagggccccctcgagaacctcgccgaccacatcgccgaccccgtcaacaacaacgcctgggcttacgccaccaacttcgtccccggcaagtgagcgagggcatgatgcttgcatgcgtgtaccgtagacgtaccgtattcctacgtactgcaggttgcaccagtatttgtgaagggagctgtgcgtgggagccagagattgtaccgctagtgtatttctgtatgcacgccgtggagctgatcaatgaaatatgctgt

SEQ ID NO: 76339 - DNA, 431 bp, Zea mays
  unsure (1)..(431): unsure at all n locations
cacgccatcacataaaaccagtgcaagcagaagcagcgcaatggcgagcagcaccatggccctctcctccacagccttcgccggcaaggcagtgaacgtgccgtcgtctctcttcggcgaggcccgcgtgacgatgcgcaagacggcggcgaaggcaaagccggcggcgagctccggcagcccgtggtacggccccgaccgcgtgctctacctgggcccgctgtccggcgcgcccccgagctacctgacgggcgagttcccgggcgactacggctgggataccgcggggctgtcggcggacccggagacgttcgccaagaaccgggagctggaggtcatccactcncgctgggccatgctgggcgcgttgggctgcgtgttcncggagctgctcgcccgcaacggcgtcaagttcggccaggccgtgtggt

SEQ ID NO: 76340 - DNA, 425 bp, Zea mays
accacgcgtccggccatgtccatgttcaataggatcttcgggaagcccaaggagcaggccaactccaatgccttggccactctggacaagttaaatgagactcttgatatgctggagaagaaagaaaaggtgctggagaaaaaagcagccgctgagcttgagagagccaaggagttctcaaaagctaagaataaaagagcggctatccaatccttgaagaggaaaaaactttatgagcaacaaattgagcagcttggaaattttcagttgagaatccatgatcagatgatcatgttagaagcagctaaagctacaacagagactgttgatgcattgagaactggagctgcagctatgaaagcaatgcaaaaagcaacaaacattgatgatgtagacaagaccatggatgaaattaatgaacagac

SEQ ID NO: 76341 - DNA, 347 bp, Zea mays
gggtcgaggcccgcgtctacagcgactcgcagcagatcccgtccaagtggaaccccagcaaggagcgggagttccccgggcaggtgctccgctacgaggacaacttcgacgccaacagcaatgtgtccgtcatcatccagcccacgtccaagaagaccatcgccgactacggctctcccgaggagttcctctcccaggtcgactacctgctcggcaggcaggcctacggcggcaagaccgactccgagggcgggttcgagaccggcgccgtggccaccgccaacgtcctggagagctccacccccgtgatcgacgggaagcagtactacgccgtgtcggtgctcacc

SEQ ID NO: 76342 - DNA, 391 bp, Zea mays
cgggtcgacgcaagcgtctagactgaatccatagaacgaactgaggtcgacgacgactgatcgagcagcgacgatggcggctgtgctgaacagcaggaagacgccgcatgtggttgccgtgctggtggcggcggcgctgctggcgtcgtccgcttcggcggcgatcacctgcgggcaggtggggtcgtcgctggctccgtgcatcccgtacgcgacggggagggccagcgcgctccccgcgtcgtgctgcagcggcgtcaagagcctcaacagcgcggcgcggaccagcgcggaccgccaggcggcgtgccgctgcctcaagagcctcgccaacagcgtcaagagcgtcaacatgggcaccgtcgccaccatccccggcaagtgcggcgtc

SEQ ID NO: 76343 - DNA, 433 bp, Zea mays
tgcacacgacgttctgctacgtcgtgctggaggcgcagtaccagtcgtccgtaaccgccgccgtgcagcagctcaacgccgacccgcgccgcgccgccgcgttcgaggtcgtgggctacctcgtcgaggagctccgcgacgaggacacctacgccaccttctgcgccgacctcgccgacgccaacgtcttcatcgactcgcttcccgtcggctcctacatcgacgtcaagggcccgcttggccacgtggagtacaccggccgcggcagcttcgtcatcaacggcaagcagcgccatgcgagccgcctcgccatgatctgcggcggaagtgggatcacgcccatgtaccagatcatccaggcggtgctgcgcgagcagccggaggaccacacggagatgcacctcgtgtacgcgaaccggacggaggacgacat

SEQ ID NO: 76344 - DNA, 342 bp, Zea mays
gtaccaggacgtacgtacgtacgtagatcgatccatcgatcgctagctagctgacgaccatggcgtccctctcctctgccgccatcaccgccccttccttcacggccgcgcccgctcgcgcagtggtcagcaggaggtccttcaccgtgcgtgcctctctccgcaaggccactgccaccgccgccgtggccgttgccgccagcgtcctgcttgccggcggcggcgccatggcccatgaggtgctgctgggcgcaggcgacggcgggctcgtcttcgagcccagccagttcaccgtcaaggccggcgacaccatcaccttcaagaacagtgccggcttcccgc

SEQ ID NO: 76345 - DNA, 422 bp, Zea mays
cgaccatcaagaagctgaggtcgtacgcggacaggatcagggcctcggagctcgagaagtgcctgcagaaagtaggtgaggacgccctcaccaagaagatgaggagagccatcgaggagctgagcaccggcatcgttaacaagctcctccatggcccgctgcagcacctgaggtgcgacggcagcgacagccgcacccttgacgagacgctcgagaacatgcacgccctcaaccggatgttcagcctcgacatggagaaggcgatcatcgagcagaagatcaaggccaaggtggagaagacacaaaactgaggccaggaagcaatttttctaccaccattatctatatatatagcgtctccaatctcattccatttttttatcctttcactcagtgagcccttcccctgctcactgtgatcg

SEQ ID NO: 76346 - DNA, 420 bp, Zea mays
atggtggactcaaagggtttgattgttgactctcgtaaaggctcccttcagccattcaagaaaccttgggcgcatgagcacgagcccttgaaaaccttgtatgatgctgttcagtccatcaaacctacagttctgatcgggacatctggagttggaagaacattcacaaaagaaatcattgaggccatgtcttccttcaacgagaggcctatcatcttttcattgtcaaacccaacctcgcattctgaatgcactgctgaacaagcatatacctggagtcagggccgttcgatctttgccagtggcagtccatttgcccccgtggagtacgaaggaaagatttttgtgcctgggcagtcgaacaatgcctacattttccctggactcggcctcggtcttgtgatctctggggccgtccgt

SEQ ID NO: 76347 - DNA, 389 bp, Zea mays
gacacacacaaacaccgcaagctaagaagatcccttgctgaattcagagagcacaaacacaaaagcgagtgcaaaaccaaatggctgcctcggcctacttccttcttgttgcctttctagcgttggtcacatctcaggccattgcctctgaccctagcccgctccaagacttctgtgttgccgacaaatactctccggtgaaggtaaatggatttgtttgcaaagaccccatggctatgaacgcagatgacttcttcaaggcagcaaaacttgaccaaccaagggacaccaagaacaaggtgggatccaacgttactttgatcaatgccatgcagttacaaggactcaacacattgggcatctcgttggctcgcattgactacgcaccc

SEQ ID NO: 76348 - DNA, 423 bp, Zea mays
cccacgcgtccgctctccccgcgtgctctccctctctctcgcgcgcgcggcgacgactcggctagtcggctaccgccgccgccccctacgccagcttcccagctcttcgtcaggcccttctccgtcaacgagcacccagcacatatcctgagcccctccacacctcaacgatggcgggattcagaagccttgcacccaagaccaggaacctggtggtggctgggggcctgtcggccttcgtgctcggggtctactactacaccatgagagccgtgggaggcacggacgagctgcaggtggcgatcgacaagtttgaggagatgaagaagaaggacgctgccagaaactccagcacaggaggatcgtaaacgcggcgcccttctcgtctctgtactgaacctggatctgcaggctgacatgata

SEQ ID NO: 76349 - DNA, 381 bp, Zea mays
  unsure (1)..(381): unsure at all n locations
cggacgcgtgggcagcttgcgcccgcaatggcactcgtctccgcctcctcgtcctccaccaccgccgtcacggcgctccccaggaatgggcagcgggcgtcgtcctccttcctcggcggcaagacgctgctgagacaggccgaggcggcccggccgtcgttcgccgtgcgcgccgcggcggaccccaacaggccgatctggttccccggcagcacccctccgccgtggctcgacggcagccttcccggcgacttcggctttgatccctgnggcctcggatctgacccggagagcctgcggtggaacgtgcaggcggagctggtgcactgccggtgggcgatgctcggcgcggcgggcatcttcatcccggatttcctgacc

SEQ ID NO: 76350 - DNA, 441 bp, Zea mays
cctgggtcgacgcaatactctatactgacgtcctgattattttttttttttatcgagaaagatcactgcgagtctacaacaatccacacccaacacaggcggtggacacaacccatccaataatctttcatgagtacagtgtcggagtcatcggccaatttcttcaaaattatcattaatttatgatgttcatgtaactatagtcgtaagataaggcagggccggtttggtttcatcacgcggatgggagcaccttcttgacgatctcatcactgagcgaggcgatctgggcgtcgagcgccttaacagcctcctccttctgcgcctcgaggttggcgagcgcctctacgagctcggcctccacacggctgcgcccctcgtccagcttggcctccagctccgcggtggtctcattcttcatcttgttaagcgccgccgcca

SEQ ID NO: 76351 - DNA, 353 bp, Zea mays
cggacacgtgggctgagacgggagccaaccaggaggatgccctcgcgcgaattgaaaagctttcagaagtaaacccgatgcttggcttccgtgggtgcaggcttggtatatcgtaccctgaattgacagagatgcaagcccgggccatttttgaagctgctatagcaatgaccaaccagggtgttcaagtgttcccagagataatggttcctcttgttggaacaccacaggaactggggcatcaagtgactcttatccgccaagttgctgagaaagtgttcgccaatgtgggcaagactatcgggtacaaagttggaacaatgattgagatccccagggcaacctctggtggc

SEQ ID NO: 76352 - DNA, 320 bp, Zea mays
tgcagacacttggggtgcatgttttgaaggctatggtccttgacacaaagcttattcagaacatgcacacgttacaaggtgtagtagagaagggatagagcacagtgctagtagcgttttgatatgcgtggcatggagcacttctgcttcctgtcatggaggatccccaagatgacagcagctgtttcctcgatagcttttccagtgaccgcaatgactggccacgatggattctgagcaaagatttgattaagctttgtgtcaaggaccatagccttcatgtaatttttttttgttggaccaccttctatgtggtgccg

SEQ ID NO: 76353 - DNA, 449 bp, Zea mays
ctcgcgggtcgacgcaagcctctaaacacgacgttctgaccaacgcgtccgcatcttttctcgtttagaacctctaaaatttcccccactcgccagtcgcagcagcacctgtagcagccatggacgccagcggagccggtagcaaggggaagaagggggcggccgggcgcaaggcaggcggccccaggaagaagtcggtgacgcggtccgtcaaggccgggctgcagttccccgtcggccggatcgggcgctacctcaagaagggccggtacgcgcagcgcgtgggcactggcgcccccgtctacctcgccgccgtcctggagtacctcgccgccgaggttctggagttggcatggaacgcggcgaaagacaacaagaagacgcgcatcatcccgcgccacgtgctcctggcgatccgcaacgacgaggagctcgggaagctgctggcc

SEQ ID NO: 76354 - DNA, 413 bp, Zea mays
gggtcgacgcccgcgtccgcggacacgtgggcgccgccgccgctgccaccgccgcttgctgccgcagccgccatgggggcgtacaagtacgtgtcggaactatggaggaggaagcagtcggacgtgatgcgcttcgtgcagcgcgtgcgctgctgggagtacaggcagcagccgtccatcgtccgcctcaccaggcccacccgccccgacaaggcccgtcgtctcggctacaaggccaagcagggatatgttgtctaccgtgtccgtgtgaagcgtggtggcaggaagaggcctgtgcccaagggtattgtctatggcaagcccaagcagcagggtatcacgcagctcaagttccagaggaacaagaggtctgtcgctgaggagagagctggacgtaagcttggtgggactga

SEQ ID NO: 76355 - DNA, 341 bp, Zea mays
aatgcgtccgccattcgcgagtctccagccaacggcatccagtccactcccatccccctcgaacccgacaaacccgacccgattgcgcccaatggcgataagaagccagcgcgagaagaagccggcggccgaagataatgcggagaagacgaccgcaggttataagcccaagtctgagaagcgcctgccggcctctaagtcctccggcaaggatggcggcgagaagaatgggaagaagaaagccaagaagagcgtgtagacctacaaaatctacatcttcaaggtcctgaagcatgtgcaccccgacattcggatctcctccaagggcatttcaatcatga

SEQ ID NO: 76356 - DNA, 390 bp, Zea mays
ggtccacgcaagcctctagaatgagtcgtatcaagttcagcaaggtcggcttcgtgtaccgcgagaactccacctccccgtgctactacgacggccgctactggaccatgtggaagctgcccatgttcggctgcaacgacgccacccaggtgtacaaggagctgcaggaggccatcaaatcctacccggacgccttccaccgcgtcatcggcttcgacaacatcaagcagacgcagtgcgtcagcttcatcgcctacaagcccccgggcagcgactagaccgcgcccgccggccgccccccgccggctagctagctagctagctcctgcgtgagctagtagctagtgccatgcgtcgtctctgtcgttcggttttgcttcgggtcaccgt

SEQ ID NO: 76357 - DNA, 398 bp, Zea mays
ggtcgaggcagagtctagaatgagtcatagtacatactttgggacaacgttccctcatctgttcctgatgacatacgagcacctcaagccacagaagctctcgcagcgctatgttcctcgtgtctttggcttcaagctccacaagccatgaacctcatgtatttgtcgtttaaactcctcaagacgtggcactgggggcatgcgggagttttgcaatctttgacgacttgcatataagagcgccattggcaggtcagtggattggtaaaattctatcatgctgcagcgtgcttgtaccttagctggctggcacctatccaacatttgaatgtagctctaatgatatcaatgttgtaacctaagtgctatggttcgttgattagttaaccaggaccccc

SEQ ID NO: 76358 - DNA, 447 bp, Zea mays
ctcgcgggtcgacacaagcctctagaatgactcttcctactgctgaagaaatgcctgtgactgaatttgttgatgctgacccccatgggtgtacccaatccgctgctgatcccaatgtgggtgctccatctgttgctgatcccaatgggggtgctgcttgtgttgccaatgtagacgaggaggaggaggaagatgaagttcctttgactcggaaaaacagtcggcagttcatcgccagcggtgaaagtagtggagttccctctcctgctttgtctgctctcattggtctgcaagaactgtccctggccaactttgatcagactcttgaggacatggttccagaggacttgttacctgagccagtggatgatggtgtgatggacgtttgcgctgatgtgcttgatgctgggttgatgtcatcacgtccctcgtcgaccttagaacgcg

SEQ ID NO: 76359 - DNA, 390 bp, Zea mays
cggacgcgtgggcggacgcgtgggcggacgcgtgggcggacgcgtgggtgtgaggcaggagctggtccatgcgaatcaaatctttgctcagaatccatcgtggccagtcattgcggtcactggaaaagctatcgaggaaacagctgctgtcatcttggggatcctccatgacaggaagcagaagtgctccatgccacgcatatcaaaacgatactagtactgtgttctatcccttctctactacaccttgtaatctgtgcatgttttgaataagctttgtgtcaagcaccatagccttcatgtaatttttttttgttggaccaccttctaggtggtgccgtgtgtatcataaacataacttgaagtttagtgcaccagagacacatgtat

SEQ ID NO: 76360 - DNA, 367 bp, Zea mays
cccacgcgtccgcggacgcgtgggcgcgcgtgggcggacgcgtgggcagaggtctgacttcgaaggcattttccgtgctatggatggactcccggtgaccatccgactcctggaccctcccctccacgagttccttccagaagggaacatcgaggacattgtaagtgaattatgtgctgagacgggagccaaccaggaggatgccctcgcgcgaattgaaaagctttcagaagtaaacccgatgcttggcttccgtgggtgcaggcttggtatatcgtaccctgaattgacagagatgcaagcccgggccatttttgaagctgctatagcaattgacaaccagggtgttcaagtgttcccagagata

SEQ ID NO: 76361 - DNA, 363 bp, Zea mays
acgcaacactctgaactgacgtcgtattacgcgtccgggcttctcctccccctcttatcaagtcctcctcgggttagggttccttagggttttgtggaggggcgatggcggcggctgatgtggagtaccgttgcttcgtcggcggacttgcctgggccaccagcaacgagtcgctggagaatgccttcgcctcctacggcgagatcctcgactccaaggtcatcaccgaccgggagacggggaggtcccgcggcttcggcttcgttaccttctcctccgagaactccatgctcgacgctatcgagaacatgaacggcaaggagctcgactgccgtaacatcaccgttaaccaggcccagtccc

SEQ ID NO: 76362 - DNA, 426 bp, Zea mays
cccaacagcgccactgtccagtgcgcgcgtcaagcttgcttagctagccgccatggcctccctcgccgccgtctccgtgaagcccgtggccatcaagggtctcgccggcagctccatctccggaaggaagctcgccgtcgccaggccgtcggcccgctccatccgcaggccccgcgcagccgccgtggtggccaagtacggcgacaagagcgtctactttgacctcgacgacatcggcaacaccaccggacagtgggacctctacggctctgacgcgccctcgccctacaacccgctacagagcaagttcttcgagacgttcgcggctccgttcaccaagagaggtctgctgctcaagttcctgctgctgggcggcggctcacttctggcctacgtcagcgcgtcggcgtcaccggacctcctgcc

SEQ ID NO: 76363 - DNA, 357 bp, Zea mays
cggacgcgtgggcgcgagtgagtgaacaccagccgtattgtcccgactcctgacccctaccgatcctcgcctgctgcagccatggcgacctccgcggcgctctccaccgccgccaatcccacccagctctaccggtcccgcgcttcgctgggcaagccggtgaaggggcttggcctgagcatgggccgcgagcgcgcccagcggagcattgtgtgccaggcggcgagcagcatctccgccgaccgcgtccccgacatggagaagcggaagctgatgaacctcctcctcctcggcgccatctcgttgcccaccgtcggcatggtcgtcccctacggcgccttcttcgtccctgccggc

SEQ ID NO: 76364 - DNA, 376 bp, Zea mays
atggcgtcgtctatgctctccgctaccaccgtgccactccagcaggggggcggcctgtccgagttctccgggctcaggagctccgcgtcgctgcccatgcgccggaatgccacctccgacgacttcatgtccgccgtctccttcaggacccacgcggtcggcacgagcggcgggtcgcggcgggcgccgacggaggcgaagctgaaggtggccatcaacgggttcggccgcatcgggcgcaacttcctgcggtgctggcacgggcgcggcgacgcctcgcccctcgacgtcatcgccatcaacgacaccggcggtgtcaagcaggcgtcgcacctgctcaagtacgactccacgctcgggatcttcgacgccgacg

SEQ ID NO: 76365 - DNA, 440 bp, Zea mays
acgtccgacaacctcagcacatcgaggagaagaggagtggccaatggcttcgtcggtggccgccgcggcgagcacattcctgggcacccgcctggcggacccggtgccgcagaacgggcgcatcgtggcccggttcgggttcggcggcggaaagcccaaggctgccgtcccgaagaaggtggcgaagacgtcgatctcctctgaccggccgctgtggttccccggcgccgtggcgcccgactacctcgacggctcgctggtcggcgactacgggttcgacccgttcgggctcgggaagcccgtggagtacctgcagttcgaactggactcgctggaccagaacctggccaagaacgaggccggcggcatcatcggcacccggttcgagtcctccgacgtcaagtccaccccgctccagccctacagcgaggtgttccggc

SEQ ID NO: 76366 - DNA, 108 bp, Zea mays
ctcacgggttgacacaagcgtccacacacacgttctggtaataataagcatcgtacaatctgcatgctgttttgtaataattaattaatatcccagcccattggatgg

SEQ ID NO: 76367 - DNA, 269 bp, Zea mays
  unsure (1)..(269): unsure at all n locations
cccacgcgtccgcgcccgcaacggcgtcaagttcggcgaggccgtgtggttcaaggccgggtcccagatcttcagcgagggcgggcttgactacctcggcaacccgagcctgatccacgcgcagagcatcctggccatctgggcgtgccaggtggtgctcatgggcgccgtcgaggggtaccgcatcgccggtggcccgctcggggaggtggtcgacncgctggtacccggcggcagcttcgacncgctcgggctcgccgacgacccgg

SEQ ID NO: 76368 - DNA, 397 bp, Zea mays
cgcatcggccggaacttcctccggtgctggcacggccgcgaggactcgccgatcgacgtcgtcgtcgtgaacgacagcggaggcgtcaggaacgcgtcccacctcctcaagtacgactcgatgctcggcaccttcaaggccgacgtcaagatcgtggacgacactaccatcagcgtcgacggcaagcccatcacggtcgtctccagcagggacccgctcaagctcccatggggtgagctcggcattgacatcgtcatcgagggcaccggagtcttcgtcgacggccccggcgccggcaagcacatccaggccggcgcgaagaaggtgatcatcacggctccccgccaaggcgccgacatcccgacctatgtcgtcggcgtcaacgaggccgactacg

SEQ ID NO: 76369 - DNA, 414 bp, Zea mays
  unsure (1)..(414): unsure at all n locations
gacttgtttcattgattcttgaagagatcgagcttcttttgcaccacaaggtcgaggatgtcttgcaactgcggatcaagctgcggctgcggctcaagctgcaagtgcggcaagaagtaccctgacctggaggagacgagcaccgccgcgcaggccaccgtcgtcctcggcgtggccccggagaagaaggccgcgcccgagttcgtcgaggccgcggcggagtccggcgaggccgcccacggctgcagctgcggtggcaactgcaagtgcgacccctgcaactgctgatcacatcgatcgacgaccatggatatgattattatctatctagcttgtggtggtggttgaacaataataagcgaggccgagctggctgccatacatangtattgtgtggtgtgtgtgagagagaga

SEQ ID NO: 76370 - DNA, 424 bp, Zea mays
accattcctcgcgcggcgaccacccgattcgaagcgtgcggagagaccgaagaagcgggagagatggctcgtaccaagcagactgctcgcaagtccacgggagggaaggctcccaggaagcagcttgccaccaaggctgcccgtaagtctgcccccaccactggtggagtgaagaagcctcaccgctaccgccctggaactgttgccctccgtgagatccgcaagtatcagaagagcactgagctgctgatcaggaagctgcccttccagaggctcgtcagggaaattgcacaggacttcaaaactgatttgcgtttccagagccatgcggtgcttgccctctaggaggctgctgaggcataccttgttggcctgtttgaggacaccaacctgtgcgccatccatgctaagcgtgtgaccatca

SEQ ID NO: 76371 - DNA, 418 bp, Zea mays
  unsure (1)..(418): unsure at all n locations
agtaggcttgacccagagttgataaatctgaaagcaaaactccaagatgtaaatcatggaaatggaagtctacaagacatagaagggattcggaagagtatagaagcacgtacgaaacagttgctgcctttatatacccagattgcaatacggtttgctgaattgcatgatacttccctaagaatggcagctaaaggtgtgattaagaaagttgtagactgggaagaatcacgctcgttcttctataaaaggctacggangaagatcgcagaagatgttcttgcaaaagaaataaggcagatagtcggtgataaatttacgcaccaattagcaatggagctcatcaaggaattgtaccttgcttctcaagccacaacangaagcactggatgggatgacgatgatgcttttgttgcct

SEQ ID NO: 76372 - DNA, 389 bp, Zea mays
atcaagaatatggcgggtgctgtgcgcactggaggaaagggcagcatgcgcaggaagaagaaggcagtccacaagaccgcaaccaccgatgacaagcggcttcagagcacgttgaaaagaattggagtgaacactattcctggtattgaggaggtcaacatcttcaaggatgatattgttatccaattccagaaccctaaagtgcaagcatccattcctgcaaatacatgggtagtcagtggagtaccccagacaaaaagtctacaagaccttctgccaacaattatcaaccaactgggccctgataacctggagaacctcaagaggcttgctgagcatttccagaagcaggtacctggtgccgaagccagcgccagtgcagctgccca

SEQ ID NO: 76373 - DNA, 360 bp, Zea mays
ctcgcgggtcgacgcaagcctctagactgagtcgtgtataagcccaaggagccgtacgtcgggaggtgcctgctcaacaccaggatcaccggcgaccaagcgcccggggagacgtggcacatggtcttcagcacagaaggcgaggtcccctacagagagggccagtccatcggcgtcatcgcggatggcgaggacaagaacggcaagccgcacaagctcaggctctactccatcgccagcagcgccctcggagatttcggcgactccaagacggtgtcgctgtgcgtgaagaggctggtctacaccaacgatcagggggaggtcgtcaaaggagtctgctcgaacttcctctgtgacttg

SEQ ID NO: 76374 - DNA, 399 bp, Zea mays
taaacacgcttctggcaaccggtccagcactttcacgctcagctccagcaatggctgcctccaccatggcgatctcctccacggcgatggccggcacccccatcaaggtgggctccttcggcgagggccgcatcaccatgcgcaagaccgtgggcaagcccaaggtggcggcgtccggcagcccctggtacggccccgaccgcgtcaagtacctcggccccttctccggcgagcccccgagctacctcaccggcgagttccccggcgactacggctgggacaccgccgggctgtccgccgaccccgagaccttcgccaagaaccgcgagctggaggtgatccactcccgctgggccatgctcggcgcgctcggctgcgtcttccccgagctgctctccc

SEQ ID NO: 76375 - DNA, 370 bp, Zea mays
ctcgtgggtcgacgcaagcctctacagtgactcgtgggagactatgagggccaagtggaagaagaagcgcatgaggaggctgaagaggaagcgccgaaagatgaggcagagatccaagtaggctgatggggattgtggatggtggtgtcggcatagttgtgttacgtttcttcgatgcgtgagttcatggagagatgtcacatcctagttcgtcgtcaccgtttgccatgggtccaatggctcgtcttggaaacctgcacttcagtaggccatctatcgtggtttctagctatatccagagttgtgctaagacaaatcagtcagtcgttttgtgaacctattatgatggagctttatttgctgctaatat

SEQ ID NO: 76376 - DNA, 455 bp, Zea mays
  unsure (1)..(455): unsure at all n locations
cgcgggtcgacgcaagcgtctgcacagacgtcctgataagaagagcggcggcgcgggcggacaaggagcaggcggaggaggagttgtgccaagccacaatgggtatctcgcgtgactcgatgcacaagcgccgagccaccggtggaaagcagaaggcctggaggaagaagcgaaagtatgagcttggtcgccagccagccaacaccaagttgtcaagcaataagacagtgaggagggtccgtgttcgtggaggtaatgtgaaatggagggctcttcgccttgatactggtaactactcatggggaagtgaagctgttacccgcaagacccgtatcctcgacgtggtctacaatgcatcaaacaatgagcttgtgaggacacaaacccttggtaagagtgccattgggcacgttgatgctgccccattcaagcagtggtanctcactcactatgga

SEQ ID NO: 76377 - DNA, 476 bp, Zea mays
  unsure (1)..(476): unsure at all n locations
cgggtccacgcacgcgtctgcaacacgcgtccggtgtttggtgaaatctaccctgatccagtaagagttgtatcagttggtcgcaaagttgaagatctgcttgcagatcccgatagcaaagagtggctatccatatcgactgaactatgtggaggtacacatatcacaaacacaagagatgctaaagcatttgcactcttatctgaggagggtattgcaaaaggagttaggaggataacagccgtgactgctggatgtgccacccaggctatggagttggcgtcatctatcgattctgatatcaataaagcatctcagttggagggagctttgttggaaaagaaaattgcttccatcaagagtgggctggatgcagctgctatccctgctgcgagaaaagctgatttgagaggcaaggtttcaaagttagaggacgaacttatgaaggcaaanaagaaaatgggggagcaaaatat

SEQ ID NO: 76378 - DNA, 406 bp, Zea mays
gggtcgtcgcaacactctacactgagtcgtattaggccggtacagcggcacagaggtgcgacgtacgacgacgacgacgcaggcgccacacatggcatcccagctctccgccgccgtgccccggttccacggcctccggggctacgccgcgcccaggtccgcggtggcagcgctgccgtccgtgagggtgggcaggaagaggtcgtcgtcgcagggcatccgctgcgactacatcggctccgccaccaacctgatcatggtgacgacgacgacgctgatgctgttcgcggggcggttcgggctggcgccgtccgcgaaccgcaaggcgacggcggggctgaagctggaggcgcgcgactccggcctgcagacgggtgaccccgccgggttcaccctcgccgacacg

SEQ ID NO: 76379 - DNA, 412 bp, Zea mays
ctcgtgggtcgacgcaagcctctacaatgagtcgtagaatggccatggcttcgtcggtggccaccgcggcgagcacattcctgggcacccgcctggcggacccggcgccgcagaacgggcgcatcgtggcccggttcgggttcggcggcggaaagcccaaggctgccgtcccgaagaaggtggcgaagacgtcgatctcctctgaccggccgctgtggttccccggcgccgtggcgcccgactacctcgacggctcgctggtcggcgactacgggttcgacccgttcgggctcgggaagcccgtggagtacctgcagttcgaactggactcgctggaccagaacctggccaagaacgaggccggcggcatcatcggcacccggttcgagtcctccgaagttaattccacccg

SEQ ID NO: 76380 - DNA, 391 bp, Zea mays
ctcgcgggtcgacgcaagcctctaggataaatggcataaggcaacaccgcccgcgacgaccacgatggcagcctcgctccaagtccaagccgcggccaccttgatgcaaccggccaagatcggcggccgggcgccgtccgcctcgctgccgtcgtcccgcccgtcgtcgcaactcgccagggcgttcggcgtcgacgccggcgccgccaggatcacgtgctccctccagtccgacgtcagggacgtcgccagcaagtgcgtcgacgccgccaagctcgccggcttcgcgctcgccacctcggcgctcctcgtctcgggcgcgagcgcggacggcacgcccaagaggctgacctacgacgagatccacagcaggacgtacctgaaagtgaag

SEQ ID NO: 76381 - DNA, 425 bp, Zea mays
  unsure (1)..(425): unsure at all n locations
taggctattgttcataatatgggcaatctcttcaccaacatgagccttgggaaagttgcagtgtcatttacgcacaccatcaaggctatggagcctttcttttctgttattctttctgcaattttccttggcgagctacctactatttgggtagtatcttctcttcttccaattgttggtggtgttgcattggcatctcttactgaggcatcctttaactgggctggcttttggagtgcaatggcttcaaatgttacctttcaatcccgaaatgtattgagcaagaagctcatggttaagaaagaggaatccttggacaaccttaatctcttctctatcattacagtgatgtcatttttccttttggcncctgttaccttctttacagaaggtgtcaaaattactcctacatttttgcaatctgc

SEQ ID NO: 76382 - DNA, 385 bp, Zea mays
ctcgtaggacgtcacaagactctacagtgagtcctagtgatctatcacaccgcacaccaagtttgaggctgttgtgtatgtgcttaagaaggaagagggtggccggcactcacctttcttccctggttaccgcccgcagttctacatgaggacaaccgatgtgacagggaatgtgactgtgattatgaatgacaaagatgaggaggcgaagatgtgcatgcctggtgaccgtatcaagatggttgttcagctcatccagcctgttgcttgtgagcacggtatgaggtttgctatccgtaagggtggtaagactgttggtgctggtgtcatcaacaaaatcattgagtaaactggatatatcatacccaccacgagaattttcctt

SEQ ID NO: 76383 - DNA, 399 bp, Zea mays
ctcgtaggacgacgcaagcctctacactgacgtcctgctcatccatctagctccctaactgcaccggccgccacaccaccccgaccggaccctccacaacaatggccaccgtcctgggcagcccccgcgcgccggccttcttcttttcgtcgtcctccctccgcgccgcgccggcgcctaccgccgtggcgctgcctgcggccaaggtgggcatcatgggccgtagcgccagcagcaggcgcaggctgcgcgcgcaggccacctacaacgtgaagctgatcacgccggagggggaggtggagctgcaggtgcccgacgacgtgtacatcctggaccaggccgaggaggacggcatcgacctgccctactcctgccgcgcggggtcctgctcctcctgcg

SEQ ID NO: 76384 - DNA, 353 bp, Zea mays
aaacgctctcgatctcaccgacaccgtcgaagaagagatcaatggcgtccgaccagggagtcgtgatcgcgtgccacagcaaggctgagtttgacgcccacatgaccaaggcccaggaagccggcaagctggtggtcatcgacttcactgccgcctggtgcggtccatgccgcgccatcgccccactgttcgtcgaacacgccaagaagttcactcaggtcgtcttcctgaaggtggacgtggacgaagtgaaggaagtcaccgcggcctacgaggtcgatgcgatgccgaccttccacttcgtcaagaacgggatcaccgtcgcgaccatcgtgggtgccaggaacgacgag

SEQ ID NO: 76385 - DNA, 444 bp, Zea mays
tcgcgggtcgacgcaagcctctacagagactcgtgctaacgcgtgggtgcaaatctagaagatgaacaaccttgatggggccctcaaggttggacagaaacgtggaagattgcatgcaaatctagaagatgaacaacctaaaaagaaggttagattagggagcccagcggctcaatggatttcagtttataatgctaggcgacccatgaagcagaggtaccattacaatgtggctgactcaaggctaagtcaacatatagaaaagggtaatgatgacgggctttacgttagttgtgtggcttcctcggcaaacctttgggcactcatcatggacgcaggaactggtttctgttctcaagtttacgagctctcaccagtttttctccacaacgactggataatggagcagtgggagaaaagttactacataacagcaattgctgg

SEQ ID NO: 76386 - DNA, 385 bp, Zea mays
tgggacgacccaagactctacagtgactcgtaccatcgcggggatctcggcctcgttcccggccaagggcggcgtcggcatggtgcacgcgcccaacccgaccaacaggtacttccgccacgtcgtgcactgcaagggttgcagggcaaccgtcaaaaagtacacctcgttgaacaccgtgttcgcggccctcgcggcggcggccctatcggccgccatcctggcggcgaccaggcactggaaggccgtcttggtggctgcgtcggccgtgctagcccgccgcatcctacgcgtgtgacgcggtgctttcgttgatcaccaccaacttcatcagaacacacaggagactgtacttaatgtgttccgggccaatgacacgggagcg

SEQ ID NO: 76387 - DNA, 382 bp, Zea mays
tgggtcgacgcaagactctacactgagtcatatgaggacggtacagcggcacagaggtgcgacgtacgacgacgacgacgcaggcgccacacatggcatcccagctctccgccgccgtgccccggttccacggcctccggggctacgccgcgcccaggtccgcggtggcagcgctgccgtccgtgagggtgggcaggaagaggtcgtcgtcgcagggcatccgctgcgactacatcggctccgccaccaagctgatcatggtgacgacgacgacgctgatgccgttcgcggggcggttcgggctggcgccgtccgcgaatcgcaaggcgacggcggggctgaagccggaggcgcgcgactcgggcctgcacacggggtgacc

SEQ ID NO: 76388 - DNA, 365 bp, Zea mays
ctcgtgggtcgacgcaagcctctagactgagtcgtagcaatccacagccacggtggcaacgccaccctgccccagatagtttccagggccgcgctccacccgtccaagatcccctgcctgcgtcgcctcatgcgggtgctcacagccgccggcatcttcagcgccgcccaccgctcgccggacgacggcggcggcgagctcgtctatggactcacaccggcgtctcagctcttggttggcggctcttcaagcctggctcccttcatgtccctggtgttacaccaggtctacgtgtcgcctttccttggcctcggcacatggttacagcacgagcgctcagacccgagcctgtttgagatgacgca

SEQ ID NO: 76389 - DNA, 394 bp, Zea mays
ctagatccgttcatcctggtggttttgtgaggtcgaaagcggcgagcgaattagaagatgctggacaagctgtgggacgacgtggtggccgggcctcgcccggagacgggcctcgagaagctccgcaaggccaccaccgcccgcccgctcgtcatcaacaaagacgcggacggcggcagctacaagcgggcgcagtcgacgccgtcgaccccgacgacgccggtgacgccgtcgtcgtcgacgacgccgcgcggcgccggcaacgtgtggcgcagcgtcttccacccggggagcaacctggccaccaagggcatgggcgccaacctcttcgaccggccgcagcccaactcccccaccgtctacgactggctctacagcgacgagaccaggagca

SEQ ID NO: 76390 - DNA, 452 bp, Zea mays
ctcgcgggtcgacgcaagcctctaaactgaggcgtctgagagcccgtggtacggccccgaccgcgtgctgtacctgggcccactgtccggcgagccaccgagctacctgacgggcgagttcccgggcgactacggctgggacaccgcggggctgtcggcggacccggagacgttcgccaagaaccgggagctggaggtgatccactcccgctgggccatgctgggcgcgctcggctgcgtcttccccgagctgctcgcccgcaacggggtccagttcggcgaggccgtgtggttcaaggccggctcccagatcttcagcgagggcgggctggactacctccggaacccgagcctcatccatgcgcagagcatccttgcgatctgggcctggcagggtcgtggcccatcgggcggccgtcgaagggctaccgccctcggccggcgggcccgct

SEQ ID NO: 76391 - DNA, 420 bp, Zea mays
tcgcgggtccacgcaagcctctacactaagtcgtcacactcctctgccgccgtcaccgccccttccttcgccgcaccagcgccagcccgcgccgtggtcagaaggaggtccttcaccgtgcgcgcctctctccgcaaggccaccggcaccgccgccgtggcaatggctgccagcgccctgcttgccggcggtgccatggcccaggaggtgctgctgggcgcaggcgacggcgggctcgtcttcgagcccagccagttcaccgtcaaggccggcgacaccatcacattcaagaacaacgccggcttcccgcacaacgtcgtcttcgacgaagacgaggtgccgagcggcgtcgacgccaccaagatctcgcaagaggagtacctcaacgcgccaggcgagacctactccgttcacctcaac

SEQ ID NO: 76392 - DNA, 391 bp, Zea mays
cgatccgcaacctctactccaccggcaccaacgacgtgtaccacccggtttccatggtcatcttcttcgtggcgtcctacgcgctcggcgtgctcagttacggcgttgtggcgccgtccgggcttttcgtccccatcatcctcacgggcgccacctacggccgcctcgtggcaatgctgctcgggggccgctccggcctcgaccacggcctcgtcgccatcctcggctccgcgtcattcctcggcgggacgctccggatgacggtgtccgtgtgcgtcatcatcctcgagctcaccaacaacctgctactgctgccgctcgtcatgctcgtgctgctcatctccaagacggtcgccgactccttcaactccagcatctacgatctcatcct

SEQ ID NO: 76393 - DNA, 363 bp, Zea mays
tgggtcgacgcaagcctctagagtaagtcgtattaatacgcagccgaagcgactgtcgcgaggcaaggccatcgtccgccatgacgctctccctctccacctctttcctccccatccccgccgccgctatgacgacctcccgcaccctacgctccgtcatcccctcccacgggatgcgctgctcgatgctcaagatggggttgcacccggacatctacgacgacgcgaaggtgtactgcaacggcgagctggtgctggtgaccgggggcaccaagccggagtacacggtggacgtgtggtccggaaaccacccctactatgtcggcgacacctcggcgctcgtggtcatggacagccagatcg

SEQ ID NO: 76394 - DNA, 248 bp, Zea mays
gtgggtcgacccaagactctacagctaagtcgtatcacctgcatgcaatggttccttttgcttccaacaattctcctgctgatgtatccagcatggcatcatccatctacaattacgtacgtagtgcaacgactgtcgattcgttgggtgaggaacatatatgtgaatgcaagctccggctaccatacatgtgtaatgtgtaatagatatatatacaaaactgccgaggcgccgacaatactttaaaa

SEQ ID NO: 76395 - DNA, 448 bp, Zea mays
ctcgtgggtcgacgcaagcctctacactgactcttaggaaagcagctcagggacaaatacgtggagacacagcagcttctcctccagatcgctgggcacaaggatattcttgaaggcgatccattcctgaagcaggggctggtgctgcgcaacccctacatcaccaccctgaacgtgttccaggcctacacgctgaagcggataagggaccccaacttcaaggtgacgccccagccgccgctgtccaaggagttcgccgacgagaacaagcccgccggactggtcaagctgaacccggcgagcgagtacccgcccggcctggaagacacgctcatcctcaccatgaagggcatcgccgccggcatgcagaacactggctaggcggcttctcttcactcacctgcaaagtgcaccccataatcagcttccggaatgttgccttttgtca

SEQ ID NO: 76396 - DNA, 406 bp, Zea mays
ctcgtgggacgtcgcaagactctagattgagtcatattaggttccatgatgcatgcaaccttcgtcaacactgctgctctttcaaagcagtcaaattcaagaaatggaaacacaaattctccaacgagtcatgcgcaactacagaaacttagcgcgatgactcctacatcatgggcacagatggttgtggatctttatcctccagggtcaaacagcagggattggacttgcactcactgcagggttgttcagccacctcgtactcggcactgccatgactgtgataaatgcgtccttcaatttgatcatcactgcatatggcttggaacatgcattggcaaaaagaagcattgtcgtttttggtggtacatatctgaagaaacaatcttgtgtatctggactgctg

SEQ ID NO: 76397 - DNA, 370 bp, Zea mays
catacgggctcgggaagcccgtggagtacctgcagttcgaactggactcgctggaccagaacctggccaagaacgaggccggcggcatcatcggcacccggttcgagtcctccgacgtcaagtccaccccgctccagccctacagcgaggtgttcggcctccagcggttccgcgagtgcgagctcatccacggccgatgggccatgctcgccaccctcggcgccctcaccgtcgagtggctcaccggcgtcacctgacacgacgctggcaaggcggagctggtggatgggtcctcctacctgggccagccgctgccgttcaacatctcgacgctcatctggatcgaagtgcttgtgatcggctacatcca

SEQ ID NO: 76398 - DNA, 362 bp, Zea mays
caacagaacattgaacaattctcgatgtcgcaaatcgaaaaggcgaccgacaacttccactcaagaaatttcatcggaggaggaggttatggcccagtctacaagggaaaagtgggcagcacatcagtggctattaagctgctgaagcctcgtggtagacaaggtttctcagagtatcagcaagaggtggtggtgctgagcaaattggagcacccacacatcgtgaggctgattggcgtgtgcccggagtcgtgcggcctggtgtacgagcacctccccaacggcacgctcaaggacaggctctccaagggcctcctgtggaaggaccgcgtcaggatcctcggcgagctgtcctctgcgct

SEQ ID NO: 76399 - DNA, 391 bp, Zea mays
cgtgggtcgacacaagactctagagagattcgtattacattggatgaatccttaaggaagacatatcacaaaagaaataaaggctaaagtaagcgctccttgcctttggtttgagcaaaacagattcttgtttcaccgaggaaaagagagaagttctggataaattgacaatgtcaacttgaattgactaattcagttccgcctattccacattaatgggagtacatttatgtttctgctttacgaatatgatattttttggacatttctaataatagcaagccttattcctattttggtactttggatttcaggacttttagcccctgttagtgaacgaccagaaaagctttctagttaagaatcgggtatagaatccaagggggggggc

SEQ ID NO: 76400 - DNA, 398 bp, Zea mays
tgggtcgtcgcaagcctctatagtgactcgtactaacgcgtgggcggacgcgtgggggacgcgagtgagtgaacaccagccgtattgtcccgactcctgacccctaccgatcctcgcctgctgcagccatggcgacctccgcggcgctctccaccgccgccaatcccacccagctctaccggtcccgcgcttcgctgggcaagccggtgaaggggcttggcctgagcatgggccgcgagcgcgcccagcggagcattgtgtgccaggcggcgagcagcatctccgccgaccgcgtccccgacatggagaagcggaagctgatgaacctcctcctcctcggcgccatctcgttgcccaccgtcggcatggtcgtcccctacggcgccctcttcgtccct

SEQ ID NO: 76401 - DNA, 334 bp, Zea mays
gtcgacccaagcctctagattaattcgaagaacacaagagtttgtgcagcaagtatggagtttccgggtatccaacaatccaatggttcccgaaaggatccttggagcccaaaaagtatgaaggacaacgcactgcagaagcccttgctgaatttctcaatactgaaggaggcacaaatgtaaagctggcaaccattccttcaagtgttgtggttctcaccccagagacctttgactcaattgtccttgatgaaaccaaagatgtccttgttgagttctatgccccatggtgtggtcactgcaagagtcttgcaccgacgtatgataaggtggc

SEQ ID NO: 76402 - DNA, 404 bp, Zea mays
ctatatcgcgagcggtgagcatggacggcgcgccgtacctcaggaaggtggacctccggatgtacaaggggtacagggagctcagggaggctctggacgcgctcttcaccaactccttctccgcggcggcagagggcggcggcgaccaccaccagcacgccatcgcctacgaagacaaggacggcgacctcatgctcgccggagacgtgccctgggatatgttcatctcttcgtgcaagaagctcaggataatgaagggctctgcctctgaggccaggtgatcgctgatccatacataaacagaggctacagacacgccacctgggaacgcggatccaagagcacacacggatcgtacttgacgaggaaggagggacgagcactgtggcttgagctctccagtg

SEQ ID NO: 76403 - DNA, 388 bp, Zea mays
cgcgggtcgacgcaagcctctacagtgactcgggcggacgcgtgggcgccggtctcttgctctgatagcttgctccaggacgtacgtacgtacgtagatcgatccatcgatcgctagctagctgacgaccatggcgtccctctcctctgccgccatcaccgccccttccttcacggccgcgcccgctcgcgcagtggtcagcaggaggtccttcaccgtgcgtgcctctctccgcaaggccactgccaccgccgccgtggccgttgccgccagcgtcctgcttgccggcggcggcgccatggcccaggaggtgctgctgggcgcacgcgacggcgggctcgtcttcgagcccagcgagttcaccgtcgaggccggcgacaggatcacc

SEQ ID NO: 76404 - DNA, 421 bp, Zea mays
tcgcgggtcgacgcaagcgtctggaaacagtcgaatgatccaattgaagagtgccgcaagaaggtttggctggtggactcaaagggtttgattgttgactctcgtaaaggctcccttcagccattcaagaaaccttgggcgcatgagcacgagcccttgaaaaccttgtatgatgctgttcagtccatcaaacctacagttctgatcgggacatctggagttggaagaacattcacaaaagaaatcattgaggccatgtcttccttcaacgagaggcctatcatcttttcattgtcaaacccaacctcgcattctgaatgcactgctgaacaagcatatacctggagtcagggccgttcgatcgttgccagttgcagttcattttccccccttggagttacgaaaggaaagactttttgtg

SEQ ID NO: 76405 - DNA, 358 bp, Zea mays
gctgccggcggcagaataggagaggcaggcgatgacgatggcgacgaaggcggcgtgcgtgctggcggtgtgggtgctcgtcgcatcgggcctgtccgacctgggctcagcgcgcgcgcccctgggcagcaagccgcagcgggagttcgactacttcgcgctctccctccagtggcccggcaccatctgcgcctccacccgccactgctgcgccaccaacggctgctgccgctcggagcctctccagacgtgcacgatctgtaagtgctcggcctttcgatttctgttcatatgttccgtcaggtgaatacgggatcggtttcgtctgaatttcgcgactgttgccgctcgagcagac

SEQ ID NO: 76406 - DNA, 383 bp, Zea mays
aagcctgatccacgcgcagagcatcctcgccatctgggcctgccaggtcgtgctcatgggtgccgtcgagggctaccgcattgccggcgggccgctcggcgaggtcgtcgacccgctgtaccctggcggcagcttcgaccccctcggcctggccgacgaccccgaggccttcgccgagctcaaggtgaaggagctcaagaacggccgcctcgccatgttttccatgttcggcttcttcgtccaggccatcgtcaccggcaagggcccgctcgagaacctcgctgaccacatcgctgacccagtcaacaacaacgcatgggcctacgccaccaacttcgtccccggcaactaagctcaaaggctatgctatgcaacttcattgt

SEQ ID NO: 76407 - DNA, 357 bp, Zea mays
ctatcctccatggtgaggacggggaagccgccggacttcgtgctgtgcatcggcgacgaccggtcggacgaggacatgttcgagagcatcgtgtgcccggcctccagcagcggcggcgtgaggctcccggccagcagcgaggtgttcgcgtgcacggtgggcaagaagccgagcatggccaagtactacctggacgacacggtggacgtggtcaagatgctggacggcctggccagcgcgccgtcgccgccgcgacggcccgggccggcggcggcggtgcagctccgggtctcgttcgaaggctcgctctgagggggggaacggaagtaaaacacacagcgcctaccggtaaacagc

SEQ ID NO: 76408 - DNA, 409 bp, Zea mays
tcgtgggtcgacgcaagcctctacagtgagtcagtacatacgagtacatacatactaggcagccaggcagccatggcgcccaccgtgatgatggcctcgtcggccaccgccgtcgctccgttccaggggctcaagtccaccgccagcctccccgtcgcccgccgctcctccagaagcctcggcaacgtcagcaacggcggaaggatccggtgcatgcaggtgtggccggcctacggcaacaagaagttcgagacgctgtcgtacctgccgccgctgtcgacggacgacctgctgaagcaggtggactacctgctgcgcaacggctggataccctgcctcgagttcagcaaggtcggcttcgtgtaccgcgagaactccacctccccgtgctactacgacgggcgctact

SEQ ID NO: 76409 - DNA, 328 bp, Zea mays
taaacagcggtcatagaaccgccgggcggcggacgcggctgcggcggccgatggcgggctgacgaggctgctcctcctgatgcagagcgggtgctcgccggcggcgagacagatggcgctggagctgctgaagatatacagggtgaacgccaagagctgtctcgccggctacgactccaagaccacccacatcatgccgttctgaggaaccgaagcggacgagagtggtttgccgcgatcctgggtggctgttttgacatgatgaaatggattcaattcagtgaatcaattaaatcgcatggaacatgggaatgtgttcttgttcctg

SEQ ID NO: 76410 - DNA, 434 bp, Zea mays
aggagagtacgtggaggagcagccatggcttcatcggtggccgccgcggcgagcacattcctgggcacccgcctggcggacccggcgccacagaacgggcgcatcgtggcccggttcgggttcgggttgggcggcaaggcgaagcctgctccgaagaaggtggcgaagacatcgacctcctctgaccggccgctgtggttccccggcgccgtggcgcccgactacctggacggctcgttggtcggcgactacgggttcgacccgttcggtctcgggaagcccgtggagtacctgcagttcgagttggactcgctggaccagaacctggccaagaatgaggccggcggcatcatcggcacccggttcgagtcctccgaagtcaagtcgaccccgttgcagccctacagcgaggtgttcggcctccagcggttccg

SEQ ID NO: 76411 - DNA, 467 bp, Zea mays
cgcgggtccacgcaagcctctagagtcactcatatgaagaatgaagcaacatgagaaggttcttgaggaaggtgtcctcaacccagaatcaactgttgttgcgatcttcctctctcctatgcattatgctgggccaactgaggttcaatggcatgctaaggctcgtattaatgctggtgcaaatttctatatcgttggaagggatcctgctggtatgagccaccccacagagaaaagggacctctatgatgctgatcacggaaagaaggttttgagcatggctcctggccttgagaggctcaacatccttcctttcaaggtggctgcgtatgacacaaagcagaagaaaatgggtttcctttgattcatcaaggaaagatgacttcctcttcatctctggcacagagatgcccactcttgccaagagacgagagagtctcccaaatggttttagttcccgggtggct

SEQ ID NO: 76412 - DNA, 437 bp, Zea mays
ggggccacccacgcgtccgcggacgcgtgggtacctgtgccgctccctcgtccgggctcctccgctcaagtcgaggagtgcagtgcgctgtccaagcgccgccccgccaggagccagcggtgccacctccacctccaagacacaagatccagttgaaaaccagaagctatgtgcctatttggttgagaaggcagtcaacagacttccgccaggagcagagaatatacttgggatctttgatctgcgaggctttcgggtagaaaatggtgatctccaattcctaaagtttttggttgttaaacctctgttgaaatcatatgcctccctgattttgtgataccgagactgtgaggaaggaatacttcaaagaagaaactgtgcatcctgatttccgcgattaggtgacatgattatttcttcagtaattgcaaaaatgt

SEQ ID NO: 76413 - DNA, 200 bp, Zea mays
gaccctagatatgtccaaactgcagggaaattaaatcttcatgtgtaattgtgctcattctgtttcaatcatctcaacatccgatcatgaacctcttgcattattaactggctcgatcgtcttctcagtttaagacattggaggctgctttgtttgtttcagaggtccttcttaagatgatgctatattttgtcatggtt

SEQ ID NO: 76414 - DNA, 423 bp, Zea mays
gagagctgcgtcaagctgcgctagcctcctagcacaaaggaggtgctactccgtggccgcggtcgtggtgaagggatgcgggcggaaggccgtggagaaggtggccaagcgcatcatgggcaaggaggtgaacaccgcggctgcctccggggagaagacgccgtgggtgccggacccggtcaccggctactaccgcccggcgggtggcgccaaggaggtggacgcggcggagcttcgcgccaggctgctcaccaagaggatcgccaactaaatcaatctagcagcagagcagtgcggctgagattatttagcgccagttgatctcttgggcctagagcatgacggtgctgtaacttttgaggcataatatatatagatagatagatgggaagagctcgaacgtatctccgttctagaaagaat

SEQ ID NO: 76415 - DNA, 417 bp, Zea mays
cagacacgtgggcggacgcgtgggcggacgcgtggggttaaagattacgaagcgctttgaatttgaataagaccactctccattttcataaaaagggtggtttggttgaaaatcaaatcaagaatttcattatatccctttcttctaccttcaattttatatcatatttcataaggataaacaatagggataggctctggaacagaagtaataaagtacataaaaatcggcaatctaaatattcctacctaatatatcaggacggtcttattaataattctaatgagttatcttggaattttgaatcgaatcaaaaaatctatattatgctcactcaaggaaagtagatgtagataggggcttataccctcagaaaaaaaatacaccagcttcttaaattaaaacgtaaaaaaagat

SEQ ID NO: 76416 - DNA, 398 bp, Zea mays
  unsure (1)..(398): unsure at all n locations
cttatccgcggaggaagaaccttggcccgacaccatgctcccaatggccgtccaccccaccaccacgccggccttgtccccgcgcgcccgcgtctcgccgcacaggcctcccatctcctccctggcggacccctcgtcctccccctgccatcgcatcgtcagtttcaaaagcaggaggctgccacttcgctctctccacatcgccgctgccgctgccgccggggcagaggaagaagaggcgcaactaggtggaagtgtgaacgcggtcgacgaggaggaagcggaggtaatggcctttcgtacccaatagctaggattcgagcaacttacccggctcagtcgctgtcntgtctgtataaccggaaattacgcagttcagatttaaaatggttatgttt

SEQ ID NO: 76417 - DNA, 431 bp, Zea mays
gcttaatcaacaacctgacaagttagctacccgcgcagcgccgcgcgccatggccacgatgaaccaccgcattgtgcccctcctgctggtcgcagccacactgctcgcgcaggccgcggcctgcccctactgcccgacgccgaagccgccgccgcctccgccgccgtcgtcgtcgtccacgccgtgccctcccccgccctactcgccgtcgccgtccacgccgacgggtaagtgccccgtgaacacgctcaagctgctcgcgtgcgtggacgcgctcaacggcctcgtgcacgccgtcatcgggaccaaggccagcgacacctgctgcccgctgctctccggcgtggccgacctcgacgccgcgctctgcctctgcaccaccatcaaggccaaggcgctcagcgtcagcctcgtgctccccgtcgccatct

SEQ ID NO: 76418 - DNA, 437 bp, Zea mays
cacacgcgtccgcccacgcgtccgatctccgaccggatccgcccgccgtggccgctgccggagattctcaccttcgtcgcgcgcttcgcgcccacggcggccatcgtgcccaccgccgacctcatcgagaagtccgtcaaggtgcccgccaagcgcatcgttgcagcgcgcaaccctgtgcgctacaacggccgtcccaggctcggcaccgtcgtcgagctgttgcgtgccaccgacgagctggccaagcgcctcggcgaagtcagcatcccgttccttgtcgtgcacggcagcaccgacgaggttaccgacccggaagtcagccgcgccctgtacgccgccgccgccagcaaggataagactatcaagatatacgacgggatgctccactccttgctatttggggaaccggacgagaacatcgagcgtgtccgtgg

SEQ ID NO: 76419 - DNA, 295 bp, Zea mays
cagacgcgtgggtttttttttttttttttttttttttttttttttttttttttttttttttttttttttttttttttttttttttttttataataagaagtccggttttagtatatatatagtatcaaatcatatcatcgtggaccaattaatatatggttacagcagatgcaatcggattaaccaacatgcaggtagacacacgtacgtacatgagcacaaagactgacgccaaacatgcagagagagatagcaaactgaagaactctgtttctctctctctcacacacaccac

SEQ ID NO: 76420 - DNA, 431 bp, Zea mays
  unsure (1)..(431): unsure at all n locations
aaacgaaccgaggaacaatccgggttctgcaggaacccactccaactgtgcggcgcgtccaaaaatacaaaaggcaagcgagcgagctccaagttcggctgctccaatttcactcggcatggctcctcaggcgtgggtcgtggcggagaacggcgaggacctccaacaacccagggaattcctgccgctctctaagcttgaagatgttggcgtgttgtattggcatttggaccctaagaagtctgaaagcgaggaggaactagcaaaaatccgcagagacagaggctacagttacatggatcttattgagatatgtcccgacaaactggaaaactatgaggagaaggtgaagaacttcttctgtgagcacatgcacgctgacgaagagatccgctattgcttgganggcagcgggtactttgacgtccgcg

SEQ ID NO: 76421 - DNA, 393 bp, Zea mays
aacagaatcccactaacgcgtgggcggacgcgtggggtcctactggtacaacgggatcggcaacgtcgtcaccgtcgatcaggatcccaacacccgctacccggtggttgtgcggttcaacaaggtgaactacgccggcgtgtccaccaacaactacgccttggacgaggtctcagaggtgaaatgagtggggccggccggctcaagggctccgcgctagctaacgtgtgattgatttgtagtagttgtgaaatgatgctgtgaagctgcatgctgtgccgggtagcgtcacaacatcgatccgatgtgtaatagcataatccacataatcatatcatgtaattgcctgctctattcaccgtgtacgcaataatctctcttgctctctaaaaa

SEQ ID NO: 76422 - DNA, 432 bp, Zea mays
ggcaagtacagcggcttcggcgtcgagacatgggccagaggtagccggtaccggggccagtaccggcagggactcaggcatggctacggcgtgtacaggttctacactggggatgtgtatgccggggagtggtcaaacggccagagccatgggtatggtgtgcacacctgtgaggacggtagccggtatataggggagtttaagaggggcgtcaagcatggtctcggccactaccatttcaggaatggtgacacctacgctggagagtactttgctgatacgatgcacggctttggcatctacagctttgccaatggccatagatatgagggagcatggcatgagggtagaacgcagggtttaggcatgtatagtttcaggaatggagagacacaagctgggcactggcaaaatggagttcttgatacttta

SEQ ID NO: 76423 - DNA, 461 bp, Zea mays
acacgtgggtccacacaagcctctagaatgagtcgttctacggtgagctcggcgatgtcaagggcgcctccgaggaggtgaagcagctggaggaccaggcggcggccatcatgaaggcggcgcgcgccgagatcgcggcggcgcttaacaagatgaagaaggagaccaccgcggagctggaggccaagctggacgaggggcgcagccgtgtggaggccgagctcgtagaggcgctcgccaacctcgaggcgcagaaggaggaggctgttaaggcgctcgacgcccagatcgcctcgctcagtgatgagatcgtcaagaaggtgctcccatccgcgtgatgaaaccaaaccggccctgccttatcctacgactatagttacatgaacatcataaattaatgataattttgaagaaattgccgatgactccgacactgtactcatgaaagattaatggatggg

SEQ ID NO: 76424 - DNA, 403 bp, Zea mays
gtcggcatggtgcacgcgcccaacccgaccaacaggtacttccgccacgtcgtgcactgcaagggttgcagggcaaccgtcaaaaagtacacctcgttgaagatcgtgttcgcggccctcgcggcggcggccctatcggccgccatcctggcggcgaccatgcagtggaaggccgtcttggtggcggcgtcggccgtgcaagccgccgcatcctatgcgtgtgacgcggtgctttctttgatgaccaccaacttcatcagaacacacaggatactgtaattaatgtgtcactggccactgacacgggagcgttctctgtacatttgtattaccgtaactgctggcctgcggctgttgtattttgtatatttgcagtaacgttttgcatgtcaaaaatccgaaa

SEQ ID NO: 76425 - DNA, 434 bp, Zea mays
tgcgctgcagtcctatcacggtgacaaaccccgcacccggatcgtccccggccgccgccggaggctccgacgcgccgatcgctacgccggctctccggctcttactgagccggctctccgacacggcgcggcgctcgctgtccgatcgccggccgtggggagagctcctcgaccgttcggcgttctcgaagccggactctctctccgacgccacctcccgtctgcgccgcaacctcgcctacttccgcgtcaactacgccgccgtggtcgccttcgcgctgggggcctcgctgctggcgcaccctttctcgctcctcatcctcctgggcctcctcgccgcctggtgcttcctctagctcttccgcgcgtcggaccagcctgtcgcgctcttcggccgaaccttctccgaccgcgagacgctcgcggggctcgtg

SEQ ID NO: 76426 - DNA, 384 bp, Zea mays
  unsure (1)..(384): unsure at all n locations
gaagctagcgcttatagcttgtcagccatggccaccgccgccgcgtctagcctcctcaagtcctccttcgcgggctcncggctcccggccgccacgcggaccacaccggcgtccctcgtggtggccaccggcccgcgcggcgccggcgcggggcccatctgcgcgtccatgtccatgtcctcctccaacccgccctacgacctgacgtccttccggttcagccccatcaaggagtccatcgtgtcncgcgagatgacncgtcgctacatgacggacatgatcacctacgccgacaccgacgtcgtcatcgtgggcgccggctccgcggggctgtcctgcgcgtacgagctctccaaaggaccccgccgtgagcatcgccatcgt

SEQ ID NO: 76427 - DNA, 421 bp, Zea mays
tggcgctttacccgtaaccgtagcgataagagtgagctagctggtgcacaccggcatggcggccacggcgtactccgtggcgctcctcggcggcgcgcgccttcccgccgctccgcgctccgccctcctccctcggcgcagcgtctgccagcttcgcttccaagatgcaccgaggctctccctgctccgtgcgaaggccgcttccgaggacacatcggcctccggcgacgagttgatcgaggacctcaaagcgaagtgggacgccgttgaggacaagcccaccgtcctcttgtacggcggcggcgccgtcgtcgccctttggctgacgtccgtggtcgtgggcgccatcaacgccgtgccgctgctccccaagattctggagctcgttggggtcggctacaccggctggttcgtgtaccgc

SEQ ID NO: 76428 - DNA, 171 bp, Zea mays
tcaccccgaaatgactcactttcggtgaaattcacccgtttcggcgaggtcgtccgaatataccggccaaatgtttccattggatttcaattattagtcaactctagagttgaaacaaacatacaagttcttcattcaataatcaatatagaagtgcatatctgtttcctc

SEQ ID NO: 76429 - DNA, 434 bp, Zea mays
  unsure (1)..(434): unsure at all n locations
aggagaggccgagaagcgctttagccgtagccgtagcgataagagtgagctagctggtgcacaccggcatggcggccacggcgtactccgtggcgctcctcggcggcgcgcgcctccccgccgctccgcgctccgccctcctccctcggcgcagcgtctgccagcttcgcttccaagatgcaccgaggctctccctgctccgtgcgaaggccgcttccgaggacacatcggcctccggcgacgagttgatcgaggacctcaaagcgaagtgggacgccgttgaggacaagcccaccgtcctcttgtacggcggcggcgccgtcgtcgccctatggctgacgtccgtggtcgtgggcgccatcaacgccgtgccgctgctncccaagatcctggagctcgttgggctcggctacaccggctggttcgtgtaccgc

SEQ ID NO: 76430 - DNA, 291 bp, Zea mays
cacacgcgtacgcggacgcgtgggtggggaaatgcacctggtgcagcagctaatcgtgtggctttagaagcctgtgtacaagctcgtaacgaagggcgcgatcttgctcgtgaaggtaatgaaattatcaaagcagcttgcaaatggagtgctgaactagccgcagcttgtgaaatatggaaggagatcaaatttgatggtttcaaagcgatggataccatataaaataggcgtcgttttagaacgtcgtgacggggaaaacccggggcgttacgcagcttaatcgcgttg

SEQ ID NO: 76431 - DNA, 386 bp, Zea mays
ttggcgtgctgctgctattagtagcttcgcccgcgatcgctgatgacgactccggtatcaactaccagctggctcttatgtggccaggagcatactgcgagcagaccagcgctgggtgctgcaagccgaccaccggcgtctcgccggcgcgcgacttctacataacgggcttcaccgtccttaacgcgaccaccgacgctgcagtgacgggatgcagcaacaaagttccttacgaccctaacctgattaccggcatccaacgcctgaatcagtactggagcaacatcacgtgccccagcaacaacgggcagagcagctggaagaacgcctggaaaaatggcggcgcctgctccgggctcagcgagaaagactacttcgagactgcc

SEQ ID NO: 76432 - DNA, 353 bp, Zea mays
gacagaatcgacctacaagtctcgctacgtagcagtgcaataaacaaagcagccgcaatggcgagcagcagcatggccctctcctccacggccttcgccggcaaggccgtgaacgtgccgtcgtcgtccgccttcggcgaggcccgcgtgacgatgcgcaagacggcggcgaaggccaagccagcggcggcgtccgggagcccgtggtacggccccgaccgcgtgctgtacctgggcccactgtccggcgagccaccgagctacctgacgggccagttcccgggcgactacggctggggacacgcgggggctgtcggggggaccggagacgttcgccaagacacgggagctgg

SEQ ID NO: 76433 - DNA, 433 bp, Zea mays
gctgggcatggcacgatcatttcagaaggagcttgaccaaatagctgagaaagcagatacatctactccggctggcttgagctatgtgttgacagagacaacattagcattacttcggcatccggattgttgtatctcagcttactcttcggtggatgtgaaacgtagcgtggatgatggtgagaaacgtttcaatcagctttcaattgaggagaggggcaagtttgatgaagagacacttgtcaacgtgaacagcatcaagaggaataaaggaggcagccaaagatcaagtggttttagcaacgagtacattgtgataaccatattggttgctgctgagggagtacataagcctccggttataaatagcagcaatgaccttaaagacagctctacaaaagatgggtgccataacatcaagcaaaatactggc

SEQ ID NO: 76434 - DNA, 424 bp, Zea mays
caggagcatcatttgaaggcactaaaagatcatggaattgggacatttgatgtggttgtggtgaatttgtatcccttttatgacaaagtcacctctggtaacatctcttttgaggatggcattgaaaatattgatattggtgggcccacgatgatcagagctgcagccaagaaccataaggatgttcttattgtggtggatcataatgattatcctgctttactggagtaccttaaaggaaagcgagacgatcagcagttccccaggatgttggcatggaaagccatgcagcatgtcgcctcttatgattctgcagtgtcagaatggttgtggaagcaatcaaataaaggagagatgttccccccaagctttactgtgccactggagctgaagtctacactccggtatggcgaggatcctcatc

SEQ ID NO: 76435 - DNA, 446 bp, Zea mays
gtcgacacaggcctctacatggattatgctacagttagcacttcttcatcgactagatggctattcagtgcatgcagatagtgatccagaggctgttcttcttcgccttggatatgtgaagcctgaagttatcagctggacgccaaggataattgttttccataattttcttagttcagaggagtgtgattacctaatggcaattgctagaccaagactccaaatatccactgtagtggatgttgcaacaggaaagggtgtaaaaagtgatgttcggacgagttctggtatgtttgtgaattctgaagaaagaaaatctccagtcgttcaggctatagagaaacgaatatctgtgttctctcaaatacctaaagaaaatggggagctcattcaagtattgaggtatgaagctagtcagtattatagaccacatcatgattacctct

SEQ ID NO: 76436 - DNA, 396 bp, Zea mays
cacacgcgtctgcggacgcgtggggcaacgatgaaatgctaggtgcgttgagaaattttgatttccctcgtccatctcatatccaggctatggcatatgggcctatcttagaggggaggagttgtgttgttgctgatcaaagtggatctggcaagacactggcatatctttgccctataatacaaaacttaaggaacgaagaagttcaagggctccataaatcatcccctaggaaccccagggtgatagtattgacccctactgctgaacttgcttctcaggtccttaacaactgccggttgatatcaaaatctggggttccatttaggtccatggttgcaaccggaggatttcgacaaaaaactcagttagagagccttgaccaagagctcgatg

SEQ ID NO: 76437 - DNA, 348 bp, Zea mays
cacaagcgaggaacccagtccagtcccgggaatggagtgcgtattgggcgtggttggccgcgacttcgtgctggtggcggccgacacctccgccgtgcagagtattctcgtccacaagaccgacgaggacaacgtgatggtgctcgactcgcaaaagctgatgggcgcttcaagggagcctggtgatcgggtgcaatttacggagttcatacagaagaacctccacctgtaccagttccggaacaccatcccgctctcaatcgccgccgccgccaacttcacacgcggcgaactcgccacagcccttcgcaagaatccatatatggtcaatattaatcatggtggtta

SEQ ID NO: 76438 - DNA, 203 bp, Zea mays
gtggttcgtcacaacactctagagtgagtcgtaataatggacgcctcaagctataggtcctttttctgctgcctctctccctgctcttcatctgtatcattctctggttcttgaatgcttgagtgaatggtgaataccgcatacctgtatttcaggaatcatatttgattaaatggtgaatgcactgcataccggattcaagg

SEQ ID NO: 76439 - DNA, 444 bp, Zea mays
  unsure (1)..(444): unsure at all n locations
gtcgacacaagcctctagaaatgtctaatacatgtagagaagggcaagctttatgctgcaatttgcgctgcaccagcaatgactctangaacttggggtttgctcaatggcttaaaggcaacatgttatccttcgttcattgataaacttccttcagaggtacatgctgtggaatcaagagtgcagattgatgggaagtgtatgaccagtcgtggaccgggaacagccatggagtattctgttattttggttgagcaactatatggaaaggaaaaagctaaagaagttgctgggccaatggttatgcgtcctcagcatggtgtggaattctctatgaaagaggtgaattcaactagttggaatgtttgtggaacaccaaatattctagtaccgatcgctaatgggacagangagatggaagcaactatgataattgacattttg

SEQ ID NO: 76440 - DNA, 427 bp, Zea mays
  unsure (1)..(427): unsure at all n locations
cccacgcgtccggcaccgtcgtcgtcgtccccgcgggtgccggcgacgacgccgccgtggccggaccagttccacgcggtggtggtgacgaacctgagcgcgcgcggcggcgggctgcagctgatcgacctgtactacgactggccgcgagggcgcgacctgaacatcgtccgcgaccagctgtccggcgagcggcgctggagctggaacgtggagtggagcaacggcaccgccttcctgttcgactccgcgtcctgccgcaccttccagttcgccgtgggcctcctgccgcccgactggaaggcccgcggcgccgcctacctgnggcgcgaccgcgtcgacggcttcgactgccacgtctggtccaacttcgtcttcggccgctactacgaggacgtcgccaccggacgccccgtcagctggaact

SEQ ID NO: 76441 - DNA, 410 bp, Zea mays
ctctaagataattcgcgctctcttggcgttggtcttggagccttttggagcctatggagatggcgaattcaagtggaattacggatatccttacattgccgctgtcataaacttcagccagacatgggcgttgtattgccttgtgaagttttacaacgcgacgcatgaaaggctacaggcgataaggccactagccaagttcataagctttaaggccatcgtgtttgccacttggtggcagggagtcggcattgcgatcgtctgccaaactggactcctgcccaaagagggcaaagtgcagaacgcgctacaggacttcctcatctgcatccagatggctatcgcagcggtatcgcatgcctacgtcttcaccgtggagccgtaccaacacgttcctgctctaactcctg

SEQ ID NO: 76442 - DNA, 419 bp, Zea mays
gaggaactaatagtacatactcccgctgaagcgctgagaagtagataagaataatatggggttcagtgaggcacaggaagagctcgtcctccgttcatggaaagccatgaagagcgactccgagtcgactgctcttaagttcttcctcacgatctttgagatcgcgccgggtgccaagcagatgttctccttcctgcgcgacgccggcgacgcgccgctggagaaacaccccaagctcaaggcccacgccgtcaccgtcttcgttatggcatgcgagtcggcgacgcagctgagaagcaccggcgacgtgaacgtgacggaggccaccctgaagcggctgggcgcgacgcacgccaaggcgggcgtcgctgacgcgcatttcgatgtcgtcaagacggcgctgctggacaacatcacgg

SEQ ID NO: 76443 - DNA, 399 bp, Zea mays
  unsure (1)..(399): unsure at all n locations
caaatacattggagaaagtgctcgtttgattagagaaatgtttggctatgcacgtgaccaccaaccatgcatcatcttcatggatgaaattgatgctattggtggtcgaagatttagtgagggaactagtgctgatcgtgagattcagcggacgttgatggagctccttaaccaattagatggatttgatgagctaggaaaggtaaaaatgatcatggccacaaatcgacctgatgttctggacccggcgctcctgcgtcctgnacgtttagataggaagattgaaattccgctacccaacgagcaatcaagaatggaagttctaaaaatccatgcagccggtatcgccaagcatggggagattgaatatgaagcagtcgtgaaactagctgaaggttc

SEQ ID NO: 76444 - DNA, 407 bp, Zea mays
acggcatccagcatgtcctcggcaccatggacccgtcgacgcacaacgtgacgcgccacctgtggccgtggacgaagtcccaggaggctggcttcgcgcactgcgctctgagggcccgggagagctgcgagtgggtggggttcatcgacgtcgacgagttcctccacttccccggcaaccagacgaccctgccagacatcctgcggagctactcgaacaggccgcgggtgggcgagctgaggacagcctgccacagcttcgggccctcggggcggaccagaatccccaagcaaggcgtgacgacgggctacacctgccggctcgcggcgccggagcgccacaagtcgatcgtgaggcccgacgcgctgaacccgtcgctcgtcaacgtggtgcaccacttccacctg

SEQ ID NO: 76445 - DNA, 409 bp, Zea mays
cccacgcgtccgaggagctggaccgccgcttccgcctgtaccgcttctgggagacgccccgcgaggagttcctccgcgcgcacgcgggcgccgtgcgcgccgtcgtcggcaacgccagctacggcgccgacgccgcgctcatcgacgcgctcccggcgctcgagatcgttgcctccttctccgtcggcatcgaccgcgtcgacctcgccaagtgccgcgaccgcgggatccgggtcaccaacacccccgacgtcctcaccgacgacgtcgccgacctcgccgtagggctcgccatcgccgtgctccgcaggatcccgcaggccgaccgatacgtccgcgcggggctctggaagtccaggggagactacaccctaaccacgcggttcagcggcaagcgggtgggcatcat

SEQ ID NO: 76446 - DNA, 415 bp, Zea mays
ggtgaacatctacccgttcatcagcctgttcctgaacgacgacttccccgtggacttcgccttcttcgacggcggcgccgcgccgctggtggacccgggcagcggcgtgtcgtacaccaacgtgttcgacgccaacttcgacaccctggtggcggcgctcaagtcggtggggcacggcgacatgcccgtcgtggtgggcgaggtcggctggcccaccgacggcgacaagcacgccaccaacgcgtacgcgcagcggttctacaacggcctgctgaggcggctggcggcgaacgccggcacgcccgcgcggccgaaccagtacattgaggtgtacctgttcgggctcctggacgaggacgtcaagagcgtggcgccgggcaacttcgagcggcactggggcatcctccggtacgac

SEQ ID NO: 76447 - DNA, 428 bp, Zea mays
agagctacaaaaagctagaggcaccccaacgcagtgatgatatggaacagtgccatatctgcctaactgaatatgaggatggagaccagatacgaattcttccttgcaagcacgagttccacctgcaatgtgttgacaaatggctgaaagaaatacacagggtgtgccctctgtgccgcggagacgtctgcgaagtcgcctcgtgaagaccttggcgctgccatccctttcctcacggcaccggcagatagcgcatcccccgcctgctccgttgttgaagctggtttggtcaggcaacggcgatcacgtcccgtcaatctgggcgtccctgccgaagagcgtggccagatcctgcgaccaatgcgtcgctgttcctgccatcaactttttaagataccgagactgtatatagctcttgtagcctctcc

SEQ ID NO: 76448 - DNA, 412 bp, Zea mays
cttaatggcagggattgaagaacttgctcaatccctccgaaaagtagttgacaatcagaatgtgtcatttttggatgctgcagaatctgctggctataagttgaatctagaggacctgcatagcgtatttttaaagacagacaaatactctgcttttatagaactgcacattgagcagggtcccatcttagaaaaggagggtatccctattggcattgttactgcaattgctgctcctgcaagtcttaaggtggactttgaagggaatggcggtcatgctggagcagtgctgatgcctgcaagaaatgatgctggactggcagcagctgaattagcattagcagtcgagaaacatgtcctggaatcaggatcaattgatacggttggcaccgttggtattctgcagttacat

SEQ ID NO: 76449 - DNA, 404 bp, Zea mays
tctaaagtgagtcatatcattttctgcgataaatagggcaatcgattatgagatctcccggcagattctgctccataaagaaggccaggctgatcaaattgtacaagaaacccgcctgtgggatgaatcttctcagaaaacttttacaatgcgaaaaaaggagggacttgccgactatagatattttccagaacctgatcttcctgaagtagttatcactagtgactatattaatgaaatcagcaagtcaatgccggagcttccagaagcaaagcgtacgcgttatgagaatatgggactcagcatgcaagatgttctgttccttgctaatgatgataatattggtcatttctttgattctactcttgagcatggtgctgatgcaaagctggctgccaactgga

SEQ ID NO: 76450 - DNA, 394 bp, Zea mays
gcaagcctctagattgagtcgtactagccgaaaaggagatgctacgaaatgtggaggccaagatactcacaaaacgagctgaactttccaaatttgagtcagagtatagggaggttttggcgaacttcactgaaatgaccagcagatacacacaagacatgcaagcgattgatggccttctgaaggaaaggaatgagatccatgcttcctataccaacaatccacctctaaaacggagttccagcaggaataaagccaagtcgccttcgaaagtggccaaaactggtacagaaaaacatcatcagaaggaaaagaaggtgaaggatcactgcatggatggatgtggaagtgacagcgataactcaagtgaaaagaaatcaaaagagcggttccc

SEQ ID NO: 76451 - DNA, 428 bp, Zea mays
cccacgcgtccgcccacgcgtccgactccatccactactttactcaaagtctagagctagctttttgctttgctcaccagacaaaccgcagcagatggcgtcgacgatcatggccgccacctcccgcatcgtcgcggccaagacgccgtttcttggccagggtcgcgccgccgccgccgccgccaatgccagccccctccgcgacgtcgccgccgccgctgctggcggccggatcaccatgggcaacgacctgtggtacggcccggaccgcgtcaagtacctgggccccttctccgcccagacgccctcgtacctgaccggcgagttccccggcgactacggctgggacaccgccgggctgtccgcggacccggaggcgttcgcgcggaacagggcgctggaggtgatccacgggcggtgggcgatgc

SEQ ID NO: 76452 - DNA, 420 bp, Zea mays
gcggcacactactacacttacaagcggccaaggcagtggttgtcttcagctggtcttggggctatgggatttggtttgccggctgctgctggtgcttctgtggcaaacccaggtgtcactgttgttgacatcgatggagatggtagctttctcatgaacgttcaggagctagctatgatccgaattgagaacctcccagtgaaggtctttgtgctaaacaaccagcacctggggatggtggtgcagtgggaggacaggttctataaggccaacagagcgcacacatacttgggaaacccagagaatgaaagtgagatatatccagatttcgtgtcgatcgccaaagggttcaacattccagcggtccgtgtgacaaagaagaacgaagtccgcgcagcgataaagaagatgctcgaaact

SEQ ID NO: 76453 - DNA, 419 bp, Zea mays
gtcgtgtagtgtgtagtcgcagcagctagcgcccggccggccagtcgagtgagtccatcctccatcgccatccaatggccgccaccgccctgagcatgagcatcctccgcgcgccgccgccctgcttctcgtccccactcaggctcagggtcgcggttgccaagccgctggcggcccccatgcggcgccagctgctgcgcgcgcaggccacctacaacgtgaagctgatcacgccggagggggaggtggagctgcaggtgcccgacgacgtctacatactggacttcgccgaggaggaaggcatcgacctgcccttctcctgccgcgcggggtcctgctcctcctgcgccggcaaggtcgtctccggctccgtcgaccagtccgaccagagcttcctcaacgacaaccaggtcgccgac

SEQ ID NO: 76454 - DNA, 421 bp, Zea mays
cccacgcgtccgcacagaaaaccctagccgccgccaccgaagcggcctcccaggtaagcaagagcgtccaccccgccgccgccatgaagcgcaatccccgcgtcacgagctctcgccggaagtgccgcaaggcgcacttcacggccccgtcctccgtccgccgcgttctcatgtccgccgggctgtcgacggagctccgccacaagtacaacgtgcgctccatcccgatccgcaaggacgacgaggtgcaggtcgtgcgcggcacctacaagggccgtgaggggaaggtggtgcaggtgtaccgccgccgctgggtcatccacgtcgagcggatcacccgcgagaaggtgaacggctccaccgtgaacgtgggcatccacccctccaaagtgatcgtcaccaagctgaagctcgacaaaga

SEQ ID NO: 76455 - DNA, 426 bp, Zea mays
cggacgcgtgggtccgggccgccgcggcggcgtctccccgggcgcccctagcacagctcgcgttccggtggaacagagaagagaggcgagaggatggagatccagtcgtctggccgctccatcgaggggctgatggagaaggtgctgtccgtgaacatcctctcctcggactacttcaaggagctcttcaagtacaagacctaccacgaggtcgtcgacgagatctacaaccaggtggaccacgtcgagccctggatgaccggcaactgccgcgggccctcctccgccttctgcctcctctacaagttattcaccatgaagctcaccgtcaagcagatgcacggcctgctcaagcaccaggactccccctacatcagagctattggattcctctacctacgatacgttgcagaaccgaagacactt

SEQ ID NO: 76456 - DNA, 414 bp, Zea mays
atctgcttccagagccccccgccgccgctgcgccctcctctcggtcctgccgtccgtcgaggtaaaaggacagcatggtgagggtcagcgtgctcaatgatgctctcaagtccatgtacaatgctgaaaagatagggaaacgtcaggtcatgatcaggccgtcatccaaggtgatcatcaagttcctgacggtcatgcagcgccatggctacattggcgagttcgagtacgtggatgaccacagagctgggaagatcgtggtggagctgaatggaagactgaataaatgtggtgttattagcccacgttttgatgtaggtgttaaggagatcgagggatggacggcgaggcttcttccatctcgccagtttggctacatcgtcctaacaacttctgctggaattatggaccatg

SEQ ID NO: 76457 - DNA, 446 bp, Zea mays
gtgggtcgtcgcaagcctctacactgagtcctactaggccatctgggcgtgccaggtggtgctcatgggcgccgtcgaggggtaccgcgtcgccggcggcccgctcggagaggtggtcgacccgctgtaccctggcggcagcttcgacccgctcgggctcgccgacgacccggaggcgttcgccgagctcaaggtgaaggagattaagaacggccgcctcgctatgttctccatgttcggcttcttcgtgcaggctatcgtcaccggcaagggccccctcgagaacctcgccgaccacatcgccgaccccgtcaacaacaacgcctgggcttacgccaccaacttcgtccccggcaagtgagcgagggcatgatgcttgcatgcgtgtaccgtagacgctgcaggttgcaccagtatttgtgaagggagctgtgggagccagaaga

SEQ ID NO: 76458 - DNA, 436 bp, Zea mays
cgcgggtcgacacacgcctctacactgcgtcgatagtgacccaccgaccgcacgctcgcgcaggggctcacgggtgactccacgtatttggtggtggagcacgacaagacgcggcacctacgggatcaacgccgtgtgcactcacctcggctgcgtcgtgccgtggaacggcgctgggaacacgttcacctgcccctgccacggatccgactacatcacccatggcaaggtggtccgtggaccggcgccactgtcgccggccctgattcacgccgacgtcgacgacggctaggtcctctgcgtcccgtgggtggagaccgacgtcaggaccggcgatgacccatggcggaaagcattatgatcatccggaaccaccagtgctcagtgctcacacatgagagctatgtatgcctccgttccttgtgatgacgcaata

SEQ ID NO: 76459 - DNA, 404 bp, Zea mays
gtgagatggcacaagccatggcgtccatgaccggcctctcgcagggcgttctgcccagcaggcgcgccgccaacagggccaggacggccgccgtcgtcagggcgtccgccgaggcgcaggcgcaggcgggccgccgcgccgtgctcgggctggtgggcactggcatcgtcggcggcgccttgtcgcaggcggtgcacgccgagaccgtcaagaccatcaagatcggagccccgccgccgccctccggtggactccccgggactctgaactctgaccaggcgagggacttcgacctccccttgaaggagcggttctacctgcagccgctgccgccggcggaggcggtggcgagggtgaagacgtcggcgcaggacatcatcaacctcaagccgctcatcgacaag

SEQ ID NO: 76460 - DNA, 403 bp, Zea mays
gcaagactctagagtgaatgctatcagccttatgccgatgattgatcagggagaggcagatgacaagatcattgcagtgtgcgctgatgatcccgagtacaggcattacaatgatatcaaggagctcccacctcaccgcttggctgaaatcaggcgcttcttcgaggactacaagaagaatgagaacaaggaggttgctgtgaatgactttctaccagcgagcgccgcttatgaagccatacagcactctatggacctgtatgctacatacatcgttgagggcctgaggaggtatgattctgatggctaggaaaggtggggaggatgttgacgaaaaactgggagaccatttaccgcatggaacgagtaccgttattattttatttgtgtcgtgtatactgct

SEQ ID NO: 76461 - DNA, 403 bp, Zea mays
aacacgcgtccggccaaggcgttcggggccaaggtcacggtcatcagcacgtcgcctgggaagaagcaggaggcgctcgaccggcttggcgccgacgccttcgtcgtcagcaaggacgccgaagaaatgaaggcggctgcgagcaccatggacggcatcatcaacacggtgtcggcgaacctcaccttggccccgtacatgggcctgctcaagcctaacggcaagatgataatggtcggcctgcccaccaagcctctcgagatcccgccctttgatctcatcattgggaacaagaccctggccgggagctgcatcggcggcatgagggacacgcaggagatgatcaacgtggcggccaagcacggcgtgacggcggacatagaactggtggccgcggactacg

SEQ ID NO: 76462 - DNA, 416 bp, Zea mays
aaggtgatcgacgaagccaccgtggggcggctgtaccggatccggcgcacggtgatgcagatgctccgtgaccgtggctacctggtggtggaccacgagctcgccaccagccgccgcgacttcctccgcaagttcggcgagtccttccaccgcgaggacctcctcatcaacaagtacaagaagaacgacccatccgaccagatatatgtcttcttccccaacgatgacaaggtagggatgaagcacatcaagaagtacgtcgaaatgatgacgcacgagaacgtctccagagctgtgctggttctccagcagaacctaactccgtttgcgaagtcgtttctcatagagctggagccgaagatccatctggaaattttccaggaggccgagatgcttataaacatcaaggaacatgt

SEQ ID NO: 76463 - DNA, 427 bp, Zea mays
aaactgacgtcgtattaacgcgtgggcggacgcgtgggtgcgtatccagtcccccctgtagcgatgacttcacctgctcctgttacaggaccaactgcctatgctcctgtgcagaacacaaaggataatcctccctgcaatacccttttcattggtaatctcggtgatactgtagtcgaagaggaattgcgaagtctcttcagtgtgcaacctggattcaagcaaatgaaagtgttacgtcaagataggaacactgtttgctttattgaatttgaggatgtgaatgctgctacatctgtgcaccaaactctgcagggtgctgttattcctagttctggtcgtggtggaatgcgaattcaattttcaaagaatccctttgggcgaaggaaggattcagctgctggccttgcgagcgttctaaatgggg

SEQ ID NO: 76464 - DNA, 450 bp, Zea mays
ctcgtgggtcgacacaagcctctacagtgagtcggacatatgcctctgtcgcacactagcaatgatgtccgtgcattaagaataagtgatttcatacatgcgcatgaacaggtgtgtgcaagtgtttcctcagattccagtaacatgaacgagcttgtgcaatggaatgatctctatggagaaggcgggtcaaggaaaaagacaacgctaagctacttcatgtagctgatgttgcaagtatatcgggagaagtgccctggcacaaagcagaaatggttggaggcagttgggggtgtgtatcgggtgcagttggaaaagagctaggttcacctgccatccatccattgagagaattgatggctcaggtggagcggaatggagtagtatacacattggttgctgcctccactctgggccatgtatcatgcatctggacatgacggatggtct

SEQ ID NO: 76465 - DNA, 418 bp, Zea mays
ggtcgacgcaagcctctagactaactcctagtagccgaagaactcaagccctttgggaagcagctcagggacaaatacgtggagacacagcagcttctcctccagatcgctgggcacaaggatattcttgaaggcgatccattcctgaagcaggggctggtgctgcgcaacccctacatcaccaccctgaacgtgttccaggcctacacgctgaagcggataagggaccccaacttcaaggtgacgccccagccgccgctgtccaaggagttcgccgacgagaacaagcccgccggactggtcaagctgaacccggcgagcgagtacccgcccggcctggaagacacgctcatcctcaccatgaagggcatcgccgccggcatgcagaacactggctaagcggcttctcttcactcac

SEQ ID NO: 76466 - DNA, 441 bp, Zea mays
ggtccacgcacgcgtccgcaatactgattggcatgtcagagccatctctgccacaaacttgtatcttcgtgtaaatcacatttatgtcaattctgatgatataaaggagactggctacacttacattatgccaaagaacatattgaagaaattcatatgcatagcagatctgcggacacaaattgctggatttttgtatgggctgagtccacaggacaatcctcaagtcaaagagattaggtgtatagccatccctccacagcatggaacacaccagatggtgactcttccagcaaatcttcctgagcacgagttccttaatgatctagaacccttgggatggatgcatacacagccaaatgaagctccacagctatcgccacagggactgacatcacatgccaagattctggagaacaacaaacaatgggatggtgagaa

SEQ ID NO: 76467 - DNA, 427 bp, Zea mays
cgggtccacgcacgcgtctacacagacgtctggaatttggatcaaaacttaaagaacacatgcagtattgtgtggatcaccctgaagaggttagcaagctggccaaagtgaaggcgcaggtttcagaagtcaagggtgttatgatggaaaacattgaaaaggttctggatcgtggagagaagattgagctgcttgtcgacaagaccgagaatcttcgctcacaggcacaagatttcagacagcagggaacaaatgtcaggagaaagatgtggttacagaacatgaaaatcaagctcatcgtcctgggaataatcatcgcactcattctgatcattatcctctctgtctgtcatggtttcaaatgccattaagcacagaccagaatactgatacattcaactgcacctattatactgctgcttggagc

SEQ ID NO: 76468 - DNA, 401 bp, Zea mays
accacgcgtccgggaaccggtccatcactttcacgctcagctccatgcaatggctgcctccaccatggagatctcctccacggcgatggccggcacccccatcagcgtgggctccttcggcgacggccgcatcaccatgcgcaagaccgtgggcaagcccaatgtggcggtgtctggcagccgctggtacggccccgaccgcgtcaagtacctcgggcccttctccggcgagcccccgagctacctcaccggcgatttccccggcgactacggatgggacaccgcccggctgtccgccgacctcgagaccttcggcaagaaccgcgagctggatgtgatccactcccgctgtgccatgcacggcgcgctcggctgcgtcttacgcgagctgctctctcgca

SEQ ID NO: 76469 - DNA, 350 bp, Zea mays
agtacgcatccgccgcaatcagggacaggtagctcgagcgcgcgctccacctgctccgacgcgatgcgggccaagtggaagaagaagaggatgcggaggctcaagaggaagcgccggaaaatgaggcagagatctaagtaggcgcatcttgtgaccgaggatggcgagcttctcctgcaccatggctgagacgcgttgggatgattgtctccctttgtagacgtgctttgctgtagacgtaggcgatgtaaaccgtcctttttgattaattctagtatgttctgagactgggtttatattgtaatttgaggataattatatgatgctctaagtttattgatattcctgtc

SEQ ID NO: 76470 - DNA, 429 bp, Zea mays
ggatatcacagcagggcatcgactacatccattaaccaaattgacataataacactaaaacatctatttttattcctagctttttattaactgccgacgaggccgtcgccgagttcttcgacaaccccaccgtcccgcgcgaggagaaggccgagctcatcggcgagatcgccaagtcgtccgagctgcagccgcacgtcgtcaacttcctcaacgtcgtcgtcgacaacttccgcgcgtccatcgtgccgcagatcgtcgtcgagttcgagaacgtctacaactcgctcacgggcaccgaggtcgccaccgtcacctccgtcgtgcagctcgagtcgcaggacctcgcgcagatcgcgcagcacgtccagaagatgaccggcgccaagaacgtccgcctcaagacgcagctcgaccaggcgctcatcg

SEQ ID NO: 76471 - DNA, 442 bp, Zea mays
ggtcgacgcaagactctacactgaatcgcatcactctctgctcctccgcctccgcctgatccatccaagacagggatcgccatgtcggactcggaggagcaccacttcgaatcgaaggccgacgctggggcgtccaagacctacccgcagcaggctggcaccgtccgtaagaacggcttcatcgtcatcaagaaccgtccctgcaaggttgtggaggtttctacctccaagactggtaagcatggccacgccaaatgccactttgtcgccatagacatattcaatgggaaaaagcttgaagatattgttccttcatcacacaactgtgacattccgcatgtgaaccgtactgagtatcagctgattgatatttctgaggatggatttgtgagccttcttacttcagatgggaacactaaggatgatcttagactcccaactg

SEQ ID NO: 76472 - DNA, 404 bp, Zea mays
cacttctttgtgatatgctcctgcgggatgctcctgttgggatatttacccagtcacctaatgtgatggatctagtaaagtgcgatggagctgcattgtattaccagaaccagcttttggtgcttggatcgacaccctccgagtcagagataaagagcattgcaacatggctgcaggataatcatgatggttcaactgggctgagtactgacagcttagtggaagcgggttatcctggtgctgttgcacttcgtgaagttgtgtgtggcatggcggccataaagatctcttccaaagattttatcttctggttccgatcgcacacaacaaaggagatcaagtggggtggggctaagcatgaaccggttgatgcagatgacaatggcaagaggatgcatccacga

SEQ ID NO: 76473 - DNA, 266 bp, Zea mays
gcaagactctaaagtgagtcttattaaactctatcaacgcggatggtactctgttgtttatagtccctgctgctaaccacccttgttgctggtgctgctggagaggcattgtacctgtccatgcatatatgatatatatgttgtaacgttgtgaaagcaaacaatcttgggtaccaatgtttgttaaaaaaaaaaaaagaatcaacaagactaaaataaagacaactaaataaaaacagaataaccacgaagcagatacacatcat

SEQ ID NO: 76474 - DNA, 415 bp, Zea mays
tcgcgggacgacacacgcgtccaaacacgacgtctgacccaacgcgtccggtgtgtttcgacatggacgcgaacggcatcctcaacgtgtcagcggaggacaagaccaccggacagaagaataagatcacgatcaccaacgataagggacggctaagtaaggaggagatcgagaagatggtgcaggaggcagagaagtacaaagccgaggacgaggaacaccagaagaaggtgaacgccaagaacacgctcgagaactatgcctacaatatgcgcaacaccatcagagacgacaagatcgcctccaagctaccggtggacgacaagaaaaagatcgatgacgccgtcgagggggccatcaattggctcgacaacaaccagctcgccgaggttgatgagtttgaggacaagatgaa

SEQ ID NO: 76475 - DNA, 428 bp, Zea mays
tcgcgggtcgacacacgcctctaaattgattcgtaccagccgacaacgcactcgatggcgtccgcgacggggggttcctcctcggaaatggcggtggaccacgcgacggggctgggcaccgtggagaagccgcggtttgatgctctgatgccgagtgagatgagcggcgggaggacgcagttccggaaagtgaccgtgccgcagcaccggttcgcgccgctcaagcgatgctggatggaaatctacacatccgtttacgagcacatggtgatcgacatacgcatgaatctcaaggcgacgagggtggagctatcgacaaggcaggacacaccatatgtcagcaaccttcagaaatgtgctgactttgtgcatgcttttatgctcgggttcgacattgctgatgccgtcgccttgccgcgtcctgatga

SEQ ID NO: 76476 - DNA, 422 bp, Zea mays
accacgcgtccgcggacgcgtgggcggacgcgtggggcagtgaaagcaaggcagcatgcatgtcgtcgttgaccacaaaagtgtttggagtgccccagccagggtggtacagggtttattacatcattaataatattcaagagttagtaaccgctctgacccaagagcatccggtggtgctgatgttctgggcggactggaaccagccaagcaaggccacgtactgggatctggccatcgctaaaaaggatgaggccgtattctgccagctggactttgataagtttaaagatgtcgtagagaagttcagagtgaaggctctgccgacgttcctcctgatcaaggagggcgaggagcagcgcaaggtcgtcggtgccaaggtcgaggagctcaacatggcattatcagatatcggataatct

SEQ ID NO: 76477 - DNA, 429 bp, Zea mays
tagagggccacatcgtccccagtgcccgccgccgtcctcgtcgccccctcctccgccgccgtagcagtgaaacctcgtgccgcagcgagtggcggcggaggcagcacagcaggcaggcgcgacgtgcttgccgccggtaccgggctgggcgcggcgctgctgctggcgctggggccggcgcgcgcggcggacgaggagtacgtgagcgagacgaaggaggtgatcgggaaggtgcggtcgacgatcgggctggacaagtcggacccgagcgtggccgacgcggtggcggagctccgggacctgtccaactcgtgggtggccaagtaccggcgggagaagtcgctgctggggcgtccgtcgttccgggagatgtactcggcgctcaacgccgtgtcgggccactacatcagcttcggccccacggcgccc

SEQ ID NO: 76478 - DNA, 403 bp, Zea mays
gattcatctggaaagaacacctaagcttcgaggcaaggttgtccttgtacagattgttaatcctgcaagaagcatcggaaaagacattgaggaagcgaaatatgaagctgaatctgtagctcaaaggataaatgataaatatggttctgctaattacaagcctgttgtcctcattgactactcaatacctttctatgaaaagatcgcattttatgctgcatctgactgctgtattgtaaatgctgtgagggatggcatgaatttgataccgtatgagtacaccgtatgcaggcagggaaatgaggagcttgataagctcagaggtcttaataagagctcatctcacacaagcacacttattgtgtctgaatttgtgggttgctctccatcacttagtggagca

SEQ ID NO: 76479 - DNA, 451 bp, Zea mays
  unsure (1)..(451): unsure at all n locations
gggtccacgcacgcgtccgcaaatgttgaaatgggaagctggccccaaggaatttgatggtatatgggcaccctggtggtatgggagtgtgcacaagtcttcaggtttctctaagcctcgccaatatcctctgactttcccattcgtgttttatgacctgcttgagcaaagcttgcctttctacaacatgctgaagcgccaaataaggaagataagaggaccgcagcaaccaccattatcggaccctcctctgcctgtccctgcaaataaaaacattcttgtttgggttggagatgaacttttgccccgtaacagtgcaaaggtttcagtgtttgattcagttgtacaaggaggagatgctgtttgggaaggtttacgtatatatgatggaaaagtattcanattagatgaacatttggacagattgtttgattctgcaaaagctatgggc

SEQ ID NO: 76480 - DNA, 428 bp, Zea mays
tcgcgggtcgacacaagcctctaaaatgagtcgcagcagccgctccgcctcagcgcatcgcccgccgcgacctcatcgatcaccttcagctttcaatcatggcggacgtcgatgtcgaaccggaggttgccgccggagctcccaagaagaggacgttccgcaagtacagctaccgcggcgtcgacctagatgcgcttctcgacatgtccacggacgaccttgtccagcttttccccgcgcgcgccaggagaaggttccagaggggtctgaagaggaagcccatggcgctcatcaagaagctgcgcaaggcgaaaaaggatgctcctgctggtgagaagcccgagccagtcaagacacatctccgtaacatgatcattgtccctgagatgattggaagcattgttggggtctacaacggcaagaccttc

SEQ ID NO: 76481 - DNA, 396 bp, Zea mays
ggagatgactgagctcaagctcaaggagatcaagaacggcaggctcgccatgctcgccatcctcggttacttcatccaggggctcgtcaccggcgttggcccgttccagaacctgctcgaccacctcgccgaccccgtcaacaacaacgtgctcaccagcctcaagttccactagaacgttggtgcatcagcatacctgctgccgccgccgccagttgtttgctgtggaaagctagatgcatgcgtgttgtaaaggaacctgaagcgttgcatcggtcatgattcatgcatggccagcctgctgcctgtaacaacaaactagtattgatcttattgagaccggaaactgtattgcacatggtaaatcaatgtacaattcctccctagatgcggaca

SEQ ID NO: 76482 - DNA, 426 bp, Zea mays
aaggtcacttgggcggacgcgtgggcggacgcgtgggcggtaccaaggaggaaccatctgtagttgagtcctactataacaagcggatagttggctgccctggtggtgagggagaggatgaacacgatgttgtatggttctggttgaaaaaagatgagccgcatgagtgtccagtctgctcgcaatactttgtgcttaaggtcattggtgatggtggtgatccagatggtcatgacgatgaagatgatggacatcactaaggatgccttgtggttctgaaaataagaacttggtgaggcagatgaatccattacacttctttttctagaaccagactgctccacggcatccttgtttatgaaaagacagttggccatcaagcaggtggtagttttcagctaggtattttgtccaaacaaaagctgt

SEQ ID NO: 76483 - DNA, 446 bp, Zea mays
tcgtaggacgacacaacaccctaaagtgacgtcgtattagacgaccaaggatgagaagaaagcgaagaaggcggaggtgagcaagtcccagaagacgcagacaaagggtgcggtccagaagggttccaagggccccaagttgggcggcggtggtgggaagcgctgaaagaacttaaggcctgtttggaggctgacgtcgagcgccacaccccgcctaagatgcggcggccaatttggccgccacaactgcggcgcgtggcgtgtggcgcggcgtggtgtttgcggcagcgatccaaacacgcccttagtgtcgtttctcgacattgcagtcgttccttagccaaagccactttcgtagaacctgtgttgaatttgcaagacttattcaagcgttgcttgtgcgtgctaaataccatggcaagagaacggatttatatttatgcctg

SEQ ID NO: 76484 - DNA, 420 bp, Zea mays
ctactcctatccactgcggcctggacgcgtgcgagagacttgaccaagcagcagcagcagggatggcgcctctgaagctgtacgggatgccgctgtcccccaacgtggtgcgcgtggccaccgtgctcaacgagaagggcctcgacttcgagatcgtccccgtcgacctcaccaccggcgcccacaagcagcccgacttcctcgccctcaaccctttcggccagatcccggctctcgtcgacggagacgaagtcctcttcgagtcccgtgcgatcaaccggtacatcgccagcaagtacgcgtcggagggcacggacctgctccccgcgacggcgtcggcggcgaagctggaggtgtggctagaggtggagtcgcaccacttctacccgaacgcgtcgccgctggtgttccagctgctcc

SEQ ID NO: 76485 - DNA, 411 bp, Zea mays
gggtccacacaagcctctatactgattcgtatgacgaagatgatggttcaagggaacatcaaggggactgatatttacagagacctgcatcactacaaggaggcccaaagagtttctgggttcttgatcttggccattgaagcaccgataaacttcgccaactccaactacctgaatgaaaggattaaaagatggatagaggaagaatcttttgaacaggataaacatactgaactccatttcataatcttggatctgtcagctgttcctgcaattgacacaagtggcatagcgttcctcattgacataaagaaatcaatagagaaacgtggtctggagcttgtgcttgtcaatccaactggagaagtcatggagaaaatacaacgtgcaaacgaagctgaaaactatttt

SEQ ID NO: 76486 - DNA, 424 bp, Zea mays
acgagtgagtgaacaccagccgtattgtcccgactcctgacccctaccgatcctcgcctgctgcagccatggcgacctccgcggcgctctccaccgccgccaatcccacccagctctaccggtcccgcgcttcgctgggcaagccggtgaaggggcttggcctgagcatgggccgcgagcgcgcccagcggagcattgtgtgccaggcggcgagcagcatctccgccgaccgcgtccccgacatggagaagcggaagctgatgaacctcctcctcctcggcgccatctcgttgcccaccgtcggcatggtcgtcccctacggcgccttcttcgtccctgccggctccgggaacgccggcggcgggacctacgcgaaggacaagctgggcaacgacatcacgggtggagggtggctcaacacgca

SEQ ID NO: 76487 - DNA, 402 bp, Zea mays
aggacgcgtgggcggacgcgtgggcgccgagcggctcccaggacatgaagtgtgtggggatgcagtaccttgaagccattcgccgtctccgttctgcaggatttgttccagatcgaaatatctatataacatttgttcctgacgaggagattggtgggcatggcggtgttgaaccatttgtttcatccaaggagttcaaagatatgaacgtggcattagtccttgatgaagggcttgcctctccaggggaggagtaccgtgtgttctatgcagagcgtagcccttggtggcttactataaaagcaacgggcgcaccagggcacggtgcgaagttgtatgatggtagtgcaatggagaatttgatgaagagcgtggaggctattaggagattcagggcatcac

SEQ ID NO: 76488 - DNA, 427 bp, Zea mays
agagatcctcgcagttgacactccttcagaaggaggcgacgctgttattgtcagtagcagtgacaattctacatctactccttcagctgtctcgtggcgagcccggttcgttgggcaaggttacaagcaggtttgtgggcgagcggatgtgtggggcgacggcgttgttcctgagatggcagcgcatctggagggagcgctgaacgtaagctttgacggtgtgtaccactctccggtaggttccgatgatgaacaaaggccctggtatggctctccggcgatcctcaagcagtgggtgcatcatcttctcagctgagatagtgacatacaagaggagctagctgccggaacagacagaaactgggatgtgtcctgcagctgacatgacaccattggccaccaaagggcaaaggggaattttctctct

SEQ ID NO: 76489 - DNA, 428 bp, Zea mays
  unsure (1)..(428): unsure at all n locations
aggcgtctataagaacctcagtgattgccaagcccaagccagcaaatcggtactccatccttcagtcactgtctacaaaggctattctctgcgtaaagaaactgaggaatatcttgctgcacgtgggttaaggaacgctgtctattccattggtgcagcggatgcaagtgacgaattgtttggcgatctggttccctgcccttttcagcaacctgatgagaacacacaatctattttgaaaatgtcacagggacaggagatggaaacaagatcatcagagcatcccaaagttgctgatctggaaccattaccagatagcgaactctcttgtattcttgaatttgatggagcttgtaaaggaaatcctgngaaatcangtgctggagtcattattcggcggttagatggatctgtgattgctgtactac

SEQ ID NO: 76490 - DNA, 415 bp, Zea mays
gacttgtttcattgattcttgaagagatcgagcttcttttgcaccacaaggtcgaggatgtcttgcaactgcggatcaagctgcggctgcggctcaagctgcaagtgcggcaagaagtaccctgacctggaggagacgagcaccgccgcgcaggccaccgtcgtcctcggcgtggccccggagaagaaggccgcgcccgagttcgtcgaggccgcggcggagtccggcgaggccgcccacggctgcagctgcggtggcaactgcaagtgcgacccctgcaactgctgatcacatcgatcgacgaccatggatatgattattatctatctaccttgtggtggtggttgaacaataataagcgacgccgatctggctgccatacataggtattgtgtggtgtgtgtgagagagagag

SEQ ID NO: 76491 - DNA, 421 bp, Zea mays
  unsure (1)..(421): unsure at all n locations
gtccacggatccatccgaccttttgaggtgttgccctcacttaagaggttgaagaaacgaattattgcagctggccgggatgattatagtgctgtttttatgtcaggaagtggaagcacaattgttggtattggttcaccggatcctcctgcattcgtgtatgacgatgaagactacaaggatgtttttgtgtcagaggcttgcttgctcactcgcgacgagaacgagtggtacagggaaccaatctcggccaatgccacgtctggcaaagaaggtttgcaagcctcggttgctgactgatttaagtcaggttctgtatcagttttgtgactattatacagatacaggatttgatcaacgcctcgacatggtangaaagaacactacggtataggcggggattgttcacaagacaatctgg

SEQ ID NO: 76492 - DNA, 395 bp, Zea mays
cccacgcgtccggttgaaacaaacagatatgcacttctatattgattattgaatgaagaacttgtatgtttgtttcaaccggacgcgtgggttctggttttgccaatagctccaatgggcggcaaataggttcttacttcaatagtagttcaaacagattaggcagtccaattggttatgttggccttaatgatgaaattagttggggaaaccttacttctgttcatgggatgggcaacatttcaagccttggaccgggaaaccttggccgtggaaccggagataacaactttggattgccttctggaacctacgtgaggagcaactcaactggtacaattggcgagccattttctgcatcagccaatccatatgaatcgaacaatctaagtgca

SEQ ID NO: 76493 - DNA, 430 bp, Zea mays
aaagaagctagcgcttatagcttgtcagccatggccaccgccgccgcgtctagcctcctcaagtcctccttcgcgggctcccggctcccggccgccacgcggaccacaccggcgtccctcgtggtggccaccggcccgcgcggcgccggcgcggggcccatctgcgcgtccatgtccatgtcctcctccaacccgccctacgacctgacgtccttccggttcagccccatcaaggagtccatcgtgtcccgcgagatgacccgtcgctacatgacggacatgatcacctacgccgacaccgacgtcgtcatcgtgggcgccggctccgcggggctgtcctgcgcgtacgagctctccaaggaccccgccgtgagcatcgccatcgtggagcagtcggtgtcgccgggcggcggcgcgtggctgggcgggc

SEQ ID NO: 76494 - DNA, 441 bp, Zea mays
ggggccacccaagcgtccggcgactacggctgggacaccgcggggctgtcggcggacccggagacgttcgccaagaaccgggagctggaggtgatccactcccgctgggccatgctgggcgcgctcggctgcgtcttccccgagctgctcgcccgcaacggcgtcaagttcggcgaggccgtgtggttcaaggccggctcccagatcttcagcgagggcgggctggactacctcgggaacccgagcctcatccacgcgcagagcatccttgctatctgggcctgccaggtcgtgctcatgggcgccgtcgagggctaccgcatcgccggcggcccgctcggcgaggtcgtcgacccgctctaccccggcggcagcttcgacctgctcggcctcgccgacgaccccgaggccttcgccgagctcaaggtcaaggagctcaag

SEQ ID NO: 76495 - DNA, 414 bp, Zea mays
cgctcatcttgctccgccttccgcgcatcctccaaggatcgtgatggccatggccacgcaagcctccgcggccacgcgccacctggtggccgccgccgcttccgcctgggcgccgtcggcgaagccgcggcagctaagctcacagctcgcgctgccgccgtcgtcctcccgcgcgccggccccgctccgcgcgaccgccggggaggcggtgaccgaggaggcgcccaaggggttcgtggccccgcagctggaccccagcacgccgtccccgatcttcggcggcagcacgggcgggctgctccgcaaggcgcaggtggaggagttctacgtcatcacgtgggtgtcccccaaggagcaggtgttcgagatgcccaccggcggcgccgccatcatgccggaggggccaacctcctg

SEQ ID NO: 76496 - DNA, 445 bp, Zea mays
gggtccacacacgcgtccaaaacgccgccgccgatccgcctcagcgcgtcgcccgccgccacatcctacagcgacctcatcgatcaccttcaactttcaatcatggcggacgtcgatgtcgaaccggaggttgccgccggcgctcccaagaagaggacgttccgcaagtacagctaccgcggcgtcgacctagatgcgcttctcgacatgtccacggacgacctcgtccagctcttccccgcgcgcgccaggagaaggttccagaggggtctgaagaggaagcccatggcactcatcaagaagctgcgcaaggcgaaaaaggatgctcctgctggtgagaagccagagccagtcaagacacatctccgtaacatgatcattgtccctgagatgattggaagcattgttggggtctacaacggcaagacgttcaaccaggttgaga

SEQ ID NO: 76497 - DNA, 431 bp, Zea mays
atccccttgcccacatctacagcccctctgctgcagcaagaaggaaagaagctagcgcttatagcttgtcagccatggccaccgccgccgcgtctagcctcctcaagtcctccttcgcgggctcccggctcccggccgccacgcggaccacaccggcgtccctcgtggtggccaccggcccgcgcggcgccggcgcggggcccatctgcgcgtccatgtccatgtcctcctccaacccgccctacgacctgacgtccttccggttcagccccatcaaggagtccatcgtgtcacgcgagatgacccgtcgctacatgacggacatgatcacctacgccgacaccgacgtcgtcatcgtgggcgccggctccgcggggctgtcttgcgcgtacgagctctccaaggaccccgccgtgagcatcgccatcgtg

SEQ ID NO: 76498 - DNA, 422 bp, Zea mays
gacaaaattggtgaagtagtggatggacctggtgaagctgctcaaggccaagttcatgatggtgttcggtatgattttgtttttaatgttgatattggagatggagaacccatacgaaaactaccctataatcgttcagatgacccatacacagtcgcggacaagtggctcctgaaagaaaatctgcctttgacatatcgccaacaggttgtagaatttatactgcagaattctggccagaacaactttgttccagatccatcttttcgggatccctatactggggccaatgcatatgtgcctgggcaaccatcatcatcatccaatggtaatactccggaaccaattttcaagcacataccgaagagtggaatgctgtcatttgagacagctcagtttgatggaatcctaaagaaagttgc

SEQ ID NO: 76499 - DNA, 433 bp, Zea mays
cacgccggggacagagagagagaccgacgcgccggcagatcccaagctcaccctagagggggaagagggcgaccgaaggcggcgatgggtttcatcatggacttcgcggagaatctgatcctccgtctgatggaggacccggacaagcgcgaccaggttcggcgggagcatgtctacaagatgaaggagcggtgcgagcgcactaaggcggcgtggagcctccctctgcgcccctacggcttctggaccttcgaccgcttcaactcgcagctctcctgggatccccagatcagccaggccgccggccgtcgggacccctacgacgacctcatcgcacgccactctggctcgccgccgtcttcctgaacacccgttccgatctttgcccagaaggtccacttgggcatcaataagaaactctttcccctcaaac

SEQ ID NO: 76500 - DNA, 405 bp, Zea mays
gtccgcacacgcgactggaactttgggtacagcagggatgatgtggggaagttcattcccgtctatcttgctcagggcatcctccaacatgaccccttcgaggtcctggaccagaggggagtgggcgagctggtgaagtttgctacagagaggggccgcaaagctaggcctaacttgaaggtgggcatttgtggagaacacggtggagagccttcctctgtggccttcttcgcgaaggctgggctggattacgtttcttgctcccctttcagggttccgattgctaggctagctgcagctcaggtgcttgtctgaggctgcctcctcattggcaaccggattgcctgctgctggtggatgtggtgatcaacagtattattacagagccatgctaggtgaacatta

SEQ ID NO: 76501 - DNA, 406 bp, Zea mays
aaccacgcgccggcagatcccaagctcaccctagagggggaagagggcgaccgaaggcggcgatgggtttcatcatggacttcgcggagaatctgatcctccgtctgatggaggacccggacaagcgcgaccaggttcggcgggagcatgtctacaagatgaaggagcggtgcgagcgcactaaggcggcgtggagcctccctctgcgcccctacggcttctggaccttcgaccgcttcaactcgcagctctcctgggatccccagatcagccaggccgccggccgtcgggacccctacgacgacctcatcgcacgccactctggctcgccgccgtcctcctgaacaccgttccgatctttggccagaaaggctacttgggcatcaataagaaactctttcccctc

SEQ ID NO: 76502 - DNA, 434 bp, Zea mays
  unsure (1)..(434): unsure at all n locations
agcgagtgagtgaacaccagccgtattgtcccgaccccgaccgatcctcgcctgctgcagccatggcgacctccgcggcgctctccaccgccgccaatcccacccagctctaccggtcccgcgctttgctgggcaagccggtgaaggggcttggcctgagcatgggccgcgagcgcgcccagcggagcattgtgtgccaggcggcgagcagcatctccgccgaccgcgtccccgacatggagaagcggaagctgatgaacctcctcctcctcggcgccatctcgttgcccaccgtcggcatggtcgtcncctacggcgccttcttcgtcnctgccggctccgggaacgccggcggcgggacctacgcgaaggacaagctgggcaacgacatcacggtggaggcgtggctcaacacgcacgggtcccaacgacgc

SEQ ID NO: 76503 - DNA, 65 bp, Zea mays
aaaaatccggttgccggtacacagcggtattaattcacctgtaactgaatggaataccgtgatgc

SEQ ID NO: 76504 - DNA, 374 bp, Zea mays
atcatttatttttgtcaggctagtcgatccaaataattccatactataacgtcttgtagtagttattttatgattgcttgtgccaaccttaaatttgctaacagtgccaaacttgacagagggcctatcgaagcatctcacaaactgtgttcactcaaaattgtctttcagccgattcctgcaatttcgggatccacgtgcccagaggcgacatccccttgttgatcccatggtcgtttcagagatccggcgatgcctcaacgaggggattgaattccaaggcgagctgctaaatttccggaaggatggcgctccactttacaacagattaagtctcattccaatgcacggggatgaaggctacgtgacacatg

SEQ ID NO: 76505 - DNA, 397 bp, Zea mays
cacacgcaaccggtcaatgcaagcaaatatcttattgctggagggattgctggtgcagcatctcgtactgcaactgctcctctggatcgcctcaaagtgatcatgcaagtacaaacaacacgtacttcagtcatgcatgcaattaaagatatctggactaaaggtggcatgctgggattttttagagggaatggattgaatgttgtaaaagttgctccagaaagtgcaatcagattttatgcctatgaaatgttaaaagaatatattatgaagagaaaaggagaaaataagagtgaagttggtgcttctgaacgtctcattgctggtggtttagcaggtgcagtggctcaaacagcaatttatcctatagagttagtaaagactcgtctacagactt

SEQ ID NO: 76506 - DNA, 426 bp, Zea mays
cagcgactcagcgagcgagagcagcacacacgcagctagctaggagcagcagcagagcagcggcgatggcggcctccatgatctcctcgtcagctctggcggtggcgcctcagggcctgccgcccctcggccgccgcgcctcctccttcgccgtcgtctgctccaagaagaagatcaagaccgacaagccctacgggattgggggtggcctgaccgtcgacgtcgacgccaacgggagaaagggcaagggcaagggcgtgtaccagttcgtcgacaagtacggcgcgaacgtcgacggatacagcccaatctacaacgaggatgactggtctcccaccggcgacgtctacgtcggtggaaccactgggcttctgatctgggccgtcaccctcgctgggatcctcggcggcggcgccctcctcgtct

SEQ ID NO: 76507 - DNA, 431 bp, Zea mays
aggacgcgtgggcggggtcgaagaggagcttggagcttggaccgacccgagccccaccgagcgagagagaggaaataatgggtgaagaggccagctgcaacgccgtcagcgcgatggaggccgccaccaacgccaggccggccaaggagaacggacgcgcgccggctgtggcggaggtagtggcccaggaggcggccactgacccccggctgcagggcatctccgacgccatccgcgtcgtgccgcacttccccaagcacggcatcatgttcaacgacatcaccacgctgctgctgcgccccagggtgttcaaggacgccgtcgacctgttcgtcgagcgctaccgcgggatgcgcatcgacgccgtcgccgggatcgaggccaggggcttcatatttggcccggcagtcgcattggctattggcgccaag

SEQ ID NO: 76508 - DNA, 436 bp, Zea mays
catgctcgtcgttcctgtgctgctgcttccttgtccctccgccgctcgggcttcctggggcgcgtcgtgctggccgcggtgccagtggccgtggacgccacccggcgccgccgcgtctccgtgtcggtgcggatggcctgggacggtccgctctcgtcggtgcgcctcatcatgcagagcaggaacgcgaagctgagcgagaagctcaaggagcacatcgaggacaaggtgggtcgggcggtgtccaagcactgccacctggtccgggaggtagacgtgcgcctctccgcgcgcggcggcgagctcggccggggccccaagacgtcgcgctgcgagatcaccctcttcaccaagcgccatggcgtcctgcgcgccgaggaggacgccgagtccacctacgccagcatcgacctcgccgccgccatcgtcaagcgca

SEQ ID NO: 76509 - DNA, 422 bp, Zea mays
atcaacttcgcctcagcgcccaaccggcttggcaggaggctcgtggcccgggccgacaacgaggccgccgcagctgaggcggcggaaggggagggtgccgtggccaccaagcccaaggccgagaagccgccgccgatcgggcccaagaggggcgccaaggtgaagatccttaggagggagtcctactggtacaacgggatcggcaacgtcgtcaccgtcgatcaggatcccaacacccgctacccggtggttgtgcggttcaacaaggtgaactacgccggcgtgtccaccaacaactacgccttggacgaggtctcagaggtgaaatgagtggggccggccggctcaagggctccgcgctagctaccgtgtgattgatttgtagtagttgtgaaatgaggctgtgaagctgcatgctgtgc

SEQ ID NO: 76510 - DNA, 284 bp, Zea mays
gattggttagcagccaagccaggctattagtacgaagaatgtcgtctataaacatgtgttcctacgttgccacatgctgagtcaatctgtatacagctagctctaggtggtcagctgcgtctaccacaatgagcatacatgtatggataaatcttctgtgaaagcattcgatgaataagggttgttttcgtgattcaaaaaaaaaaaaaaaaaaaagaagaaataaaaaaaacaaggaaagaaaaaaaaaggaaagagaaaaaaagaacagatgaggacaagag

SEQ ID NO: 76511 - DNA, 408 bp, Zea mays
agttcctcttgttggaacaccacaggaactggggcatcaagtgactcttatccgccaagttgctgagaaagtgttcgccaatgtgggcaagactatcgggtacaaagttggaacaatgattgagatccccagggcagctctggtggctgatgagatagcggagcaggctgaattcttctccttcggaacgaacgacctgacgcagatgacctttgggtacagcagggatgatgtgggaaagttcattcccgtctatcttgctcagggcattctccaacatgaccccttcgaggtcctggaccagaggggagtgggcgagctggtgaagcttgctacagagaggggccgcaaagctaggcctaacttgaaggtgggcatttgtggagaacacggtggagagccttcctc

SEQ ID NO: 76512 - DNA, 432 bp, Zea mays
gtccgcagacgcatgggcggagcgcgtggtgcacgcgcgcggggcctccgccaagggcttcttcgagtgcacccacgacgtgacgtcgctgacgtgcgccgacttcctgcgcgcgcccggcgtgcggacgcccgtgatcgtgcgcttctcgacggtgatccacgagcgggggtccccggagacgatccgcgacccgcgcgggttcgccgtgaagttctacacccgcgagggcaactgggacctgctgggcaacaacttccccgtcttcttcatccgcgacggcatcaagttccccgacgtgatccacgcgttcaagcccaacccgcggtcgcacgtgcaggagtactggcgcgtgttcgacttcctgtcgcacctccccgagagcctgcacaccttcttcttcctcttcgacgacgtgggcgtgccgtccga

SEQ ID NO: 76513 - DNA, 424 bp, Zea mays
agcgccgccgccgccgccgccgtgacggaaggaagaggaggagcaaggagcacgacgcgatgggccactccaacgtgtggaactcgcaccctaagaactacggccctggctcccgcgtctgccgggtctgcgcgaaccctcacggtctgatcaggaagtacgggctcatgtgctgcaggcagtgcttccgcagcaacgccaaggacattggtttcatcaagtaccgttgaagaggccactgtgctgctgtggagaacttcctacatcaaagaaatgggtccttcattagaaggcctaatttatgcgctttagctttttgttcagaacttgagactcatgtgttaaactcgacttgttaaagttttgatggctactttgtgcttgttggaccagctataatcagaagattgaaattttctcactc

SEQ ID NO: 76514 - DNA, 431 bp, Zea mays
aggacgcgtggggccaatttattggctaattcgaattagtatgtagaattcgtataattataactgttgaagccttaaattcaagtctcttggctcttttcacgctttctcacaaacagattacgaaatatattgcattatttgttaaagtttggataaaccattgcttcgtctggtgtctacaatacatctaatttatatagtactaatttcatttttaccagatcgaaaatttttatgttgaaaaggaaaatttagagatccaatgtcacattctgtaaaaatttatgatacatgtataggatgcactcaatgtgtacgagcttgcccaacagatgtattagaaatgataccttgggatggatgtaaagccaagcaaattgcttccgcgccgagaaccgaagattgtgtgggttgtaagagatgcgaat

SEQ ID NO: 76515 - DNA, 423 bp, Zea mays
acccaaccaaacccgcacgacacgacaccaagtcgaggagctcgagggcaccaatcatggccggcgtgaactccagcgtcgtcgggctcaagcccgccgcggcagtgccgcaggccgccgccgcctcatcgccggcgaagcgggtgcagctggccgcgcccgagggccgccgcgccgctctgctcggcctggcggccgtcttcgccgtcacggccaccaccgggtcggccaaggccacgatcttcgatgagtacctcgagaagagcaaggccaacaaggagctgaacgacaagaagaggctggccaccagtggcgccaactttgcgcgcgcctacaccgtggagttcggcagctgccagttcccctacaacttcactgggtgccaggacctcgccaagcagaagaaagtccccttcatcagcg

SEQ ID NO: 76516 - DNA, 407 bp, Zea mays
atctccggttccctcctctcggcggcggctcaggtccctctccatctccggcgtggcgcttggcgtctgacctcaacaagcaagaaagcaaatggcacgcggcagggttgcgcatgccaccctcaagggcccgagtgtggtgaacgagatcttcattggactgaccctgggtctgatcgcgggaggcatgtggaagatgcaccactggaacgagcagaggaagactaggtccttctatgacatgcttgacaagggccagatcagcgttgtcgtcgaagagtaaagagttcttcccagttattttcaaagaactctctcgagagcatgacaaagtgattgcttgctgtggagatttgtcctggaaataagcacaaccatttgggaacaccagattttgtcgaattttc

SEQ ID NO: 76517 - DNA, 444 bp, Zea mays
gtccggggctccagaactactattaggagcaaaggagtattcgactgctatcgatatgtggtcattaggttgcataatggcagaactcttgtcaaaagagccactcttcactgggaagtctgagatagatcaacttgagaagatatttagaatactcggcacacccaatgaggagcggtggcatggttgttccaaattgcctggcttcaaaggcaacttcgtaaagcgaccgtacaatagattaagggacaaatttccagctgtatccttcacgggaggcttgaccttgtcagaagctgggtttgacctgctaaataggttgctggcatatgaccctgagaagcgcatatctgctgctgatgccttgaaccatgagtggttccgtgaagttcctctgcccaagatgaaggaattcatgccaacttttcctgctctgaatgaaaa

SEQ ID NO: 76518 - DNA, 315 bp, Zea mays
atagtcggaaccattgttggggtcaacaacggaaaaactttcaacaaggttgaaataaaccctgaaatgatcggcaacaaccttgctgagttctcaatctcctataagccggtcaagcatggcaggcccggtatcggtgccacccactcctcgcggtttattcctctgaaatgagctgttacccgtctctgtagtctcccaagagtccgttggcaatgtccattcagcttttctacttgttttgaacaagttaaatgcccaagacattttgttttgttccattccagctcaagaattcaaagctaagcattgcac

SEQ ID NO: 76519 - DNA, 400 bp, Zea mays
agtctttctcacgagccacaggcacaggcaggctctcgagctcagtccacccagcgcaggggatggcgtcgtcgttcgccgtggcaacggtcccgtcgctggcggccccggcggccaagaagcggtccggcggcgtcacgtacgtggagggcatgaacgcctacagcggcctcaaggggctcaacaaggtgaacatgctcggggtgcgcaagaccgccgactactccttcgccaaggtcgtggcgtcgctcagccccgcgggcaggaagcggcgcggcggcgcgttcggcgcccagatgaacgccgccgccgagatcttcaggatcgccgccaccatgaacggcctcgtgctcgtcggcgtcgccgtcgggttcgtgctgctccgggtggaggccgccgt

SEQ ID NO: 76520 - DNA, 419 bp, Zea mays
acaagactctaaggtgagtcgtatgacccgcggcttcggcttcgttaccttctcctccgagaactccatgctcgacgctatcgagaacatgaacggcaaggagctcgacggccgtaacatcaccgttaaccaggcccagtcccgtggcggcggcggcggcggcggcggcggtggctacggcggcagtcacggtggcggcggctatggtggctggcgccgtgacggcggttatggcggtggtggcagctactgcggtcggcgcgacggtggtggctgcggctacggaggcggtggcggctaccgcggtcggcgcgagggtggtggtggcggctactgcggcggcggcggccgctggagggactgatgtgtggccccatcctggcttccgccgagttatcttatcgatctatagtatcgtg

SEQ ID NO: 76521 - DNA, 407 bp, Zea mays
agatcttttactacccgtcacaaactttatgttcgtaagttccagtgtgagtactgcgccgaacataaagtttgtgacgggtagtaaaagatctatttttcttttgactttgacatagagttcgatcctcaattatttctcgcgctatcttcttacgaagttttgttagggcatctataacagcctctggtttaggcgggcaacccggcaggtagacgtccacaggaattaacttatcaactcctcgaacagtactataggaatctgtactgaacatgccccctgtaatagtacaggctcccatagcaatgacgtatttcggttcaggcatttgctcatataatcgcactaaagatggagccattttcattgttaccgtaccagctgttaaaattaggtccgcttgt

SEQ ID NO: 76522 - DNA, 416 bp, Zea mays
gcttggtgatgcccagcatgttgaggaggccgagaagatgggacttgactacatggatgttgaggctctcaagaaaatgaacaagaacaagaagcttgttaagaggcttgccaagaagtaccatgctttcttggcatcagaggccatcatcaagcagattccccgtctccttggtcctggtctcaacaaggcaggcaagttcccgaccctggttactcaccaggaatccctcgagtccaaggtgaacgagactaaggcaaccgtcaagttccagctcaagaaggtcctttgcatgggtgtcgccgtcggcaacttggcgatggaggagaagcagatccagcagaacatccagatgagcgtcaacttccttgtttcccttctgaagaagaactggcagaatgtgagatgcctgtacg

SEQ ID NO: 76523 - DNA, 415 bp, Zea mays
cagacgcgtgggtttttcagcaaatggttatttatgtcacttattagcattatgtcactcgccacaagctggattactggaaatacagatgaaggatgagtaacgctgaaaaggtattacaggcaacacatgtcctggaagcctgagttcagctacgatcaaccatggagggcacatcacttccacttcttgaacttgccgccgccaaacatgccgtgcccgtgcttgccatgcttgaacttgccgtgcccgtgcttgaacttgccgtggtggccgtgaccatgcttgaacttgccgtggccaccatacccgtggccgtaaccaccgtgaccatagcctccaaaggccccatgtccaccgtgtccgctatggccatgagaaagcttgtgtgctccataagcggcagcggccgctc

SEQ ID NO: 76524 - DNA, 387 bp, Zea mays
cacacgcgtccggaactttgttaacattagagattaaaaggtagagccgtagcaaaatgaaggcaccatcactactggttcagtgtttccctggcttgcttcccagcaaggccactagttgcgtgccaattgtatctgagaaggatctgcagctaccatcaccagctgttgaaataatcccctcaaagagtgttcatccatacaaatatgctggagagaaggttgatgtgcaaggtcttaatattttcaagggtaaagtcagtgtagcagatatgatagttatctcaccttctgaagtagcatcatcaaaatatgatggaactctgaaatactgggagagttccattacccttgtcgacattcttaaaaatgagattcgtgatgggc

SEQ ID NO: 76525 - DNA, 434 bp, Zea mays
gtgggtcgacacaaccctctacagtgaggcgtagtatgcaactcaaacttggagatttgcgacttgatcaacacagagaaagttaacagtgtggaacttatacatgggatcaagaagaggatcatgatgaaggatgcgagagttcagtacctctcattggtcctgcttgagactattgttaagaactgtgagaaggccttctcagaagttgcggccgaacgggttcttgatgagatggtcagattgattgatgatcctcagaccgtggtgaataacaggaacaaggcccttatgctgatcgaagcatggggagagtccggtgatgaactccgctatctgccagtctatgaggaaacgtacaagagcttgaaatcaagagtgcggtttcctggacgtgacaatgagagcttggctcccatatttactcccccacg

SEQ ID NO: 76526 - DNA, 385 bp, Zea mays
taaacttcatcccgtcaccgccccgcacgatcccctccgccttcttcgccgccggcctccggaccgcgcagctccccggagccgacaaggacccggcgccatggggttctgggaggcttttcttaactggctccgcagcctcttcttcaagcaagagatggagctttccttgatagggctccaaaatgctgggaaaacgtcacttgtgaactctattgctactggaggctttagtgaggatatgatccctactgtaggattcaatatgagaaaagttacgaaaggaaatgtgacgataaagttgtgggatcttggaggccaaccaagattccgcagcatgtgggagagatactgccgtgcggtttctgcaattgtgtatgttgtt

SEQ ID NO: 76527 - DNA, 339 bp, Zea mays
ctcgcgggtccacacacgcctctacacagactcctggtaagatttcttctgggacgacgagttccgggtgaagaacagctgggacgacatgcttcttcagtacgagacactggaacagtgcgccaagactggaaccatggttgtccggtgggtcaggaagtttccgttcttctgcagcgacagggagtacatcataggccgcaggatatgggcatctgggaagacgttttactgtgtgaccaagggcgtgcctcgtccctctgttccaagacaaaacaaacctcgtcgtgtggacttgtactactcgaactggtgcatccgtccagttgaatcaagaaa

SEQ ID NO: 76528 - DNA, 429 bp, Zea mays
gcacaggtccaggactcgcgggtcaacacaagcctctacaggcattggtgatatcgacgccgcgctctgcctctgcaccaccatcaaggccaaggcgctcagcgtcagcctcgtgctccccgtcgccatctcggtgctcgttaacgagtgcggcaagcatgtgccctccagcttccagtgcccgtaatcacatcagctgcatatatgtgctactatgatgtatcaccaccactaatctatatccgcatgcatgcatcaatgcatgggtgattaagggtttatacgcggtcaaagttatacacgcatatatatgtagcttcatacatggagctgtgggttgtgcattcattttcaaatcatgtaccagtattatattgtagtatcataaaccagtgtgagagttgtggccttggtgggggtgcttgtaag

SEQ ID NO: 76529 - DNA, 392 bp, Zea mays
gtactccaccgtgcgtgcctctctccgcaaggccactgccaccgccgccgtggccgttgccgccagcgtcctgcttgccggcggcggcgccatggcccaggaggtgctgctgggcgcaggcgacggcgggctcgtcttcgagcccagccagttcaccgtcaaggccggcgacaccatcaccttcaagaacaacgccggcttcccgcacaacgtcgtgttcgacgaagacgaggtgccgagcggcgtcgacgcctccaagatctcgcacgaggagtacctcaacgcgccaggcgagacctactccgtcaccctcaccgtgccgggcacctacggcttccactgcgagccgcaccaatgagcaggaatggtcggcacgatcacagtcaactaaa

SEQ ID NO: 76530 - DNA, 417 bp, Zea mays
cacacgcgtccgcggacgcgtgggcgcacgggcccgacgccaccgacgcctggctgtggaagctggccaaggcgcacgtgctgacccacgacacggggtaccaccagctggtgagccactggctgcgcacgcactgctgcgtggagccctacatcatcgccgccaaccggcagctgagccggctgcacccggtgtaccgcctgctgcacccgcacttccgctacaccatggagatcaacgcgctggccagggaggcgctcatcaacgccgacggcatcatcgaggagtccttctggccgggcaagtacgccgtcgagcttagctccgtggcgtacggcgcgacgtggcagttcgacacggaggcgctgcccaacgacctcgtcaagcgcgggctggccgtgcgcggggaagaccggg

SEQ ID NO: 76531 - DNA, 300 bp, Zea mays
cccacgcgtccgcgaccacgacgagctgtagatggtggtggggagcggtgacgtggagtgccgggaaccaagccaaattttgtaatggtgtttaggggggaaggtggtggacaaaaaaacaaatcttggtgctgctctgcaaataaacggcctgaccaaaaaactttttcccctccaactcccttgtaatggtcctttttataaaggatccccatgggaatgtaatgtaaaaaaaaaaagaaaaacccccttcaaaaactgtgtacaacatttaaaaagtgaaagggcacatcacagtat

SEQ ID NO: 76532 - DNA, 403 bp, Zea mays
gaccttcaagtctcgctacgtagcagtgcaataaaaaaagcagccgcaatggcgagcagcaccatggccctctcctccacggccttcgccggcaaggccgtgaacgtgccgtcgtcgtccgccttcggcgaggcccgcgtgacgatgcgcaagacggcggctaaggccaagccagcggcggcgtccgggagcccgtggtacggccccgaccgcgtgctgtacctgagcccactgtccggcgagccaccgagctacctgacgggcgagttcccgggcgactacggctgggacaccgcggggctgtcggcggacccggagacgttcgccaataaccgggagctggaggtgatccactcgcgctgggccatgccgggcgcgctcggctgcgtcgtccccgagctgc

SEQ ID NO: 76533 - DNA, 263 bp, Zea mays
cagacgcgtgggcggcggcgccggcgtgcttgtgatctcaacccaagtcgtgcctccgctccggtcacccgtcgctccacgcaaccatgtcgaggaggaagaccagggagcccaaggaggagaacgtcacccttggacccactgtccgtgaaggagagtatgtctttggtgttgctcacatctttgcatccttcaatgacaccttcattcatatcactgatttgtctgggagggaaactccggttcggatcaccggtggcatg

SEQ ID NO: 76534 - DNA, 420 bp, Zea mays
cccacgcgtccgctccaggttcttctccactgttcacgatgggttgaagtacactcagtctcacgaatgggtcaagacgacgggcgacgtcgccaccgttggcatcacggaccatgctcagggccacctgggagaggtggtgttcgtggagctgccggaacccggcacgaaggtcgccgcgggaggacccttcggcaacgtggagagtgtcaaggccaccagcgacgtcaactccccgatctccggcgaggtcgtcgaggtcaatgccaaactgtcagagacgcccggcctgatcaacacgagcccgtacgaggacgggtggatgatcaaggtgaagccgagcagcccgggggaggcggacgccctgctggacgccgccaagtacaccaagcactgcgaggaggaagacgctcactagac

SEQ ID NO: 76535 - DNA, 433 bp, Zea mays
caagagatggaacgcgcagggtggaaaaagcaatgtttactttgcaaagacactggatgaaaggttcataatcaaacaagtcacgagaacagagctggagtcttttgtagagtttgctcctcagtacttcaagtatttaatggaatccttggcttctggtagcccaacctgcctggccaaaatagtagggttatatcaggttggcgtcaagagcttgaaaactgggaaggaagtgaggatggatctgatggtgatggaaaatgttttctttgaaaggaagatatctcgggtgtatgacctaaagggttcattgcgctcacgctacacggctggggacagcaaagtcctcttggatgcaaacctcatagaggcattgcatacgaagcctatatttttggggagcaaggcaaaacgaagattggaaagagctgtc

SEQ ID NO: 76536 - DNA, 165 bp, Zea mays
agatcttttactacccgtcacaaactttatgttcgtaagttccagtgtgagtactgcgccgaacataaagtttgtgacgggtagtaaaagatctatttttcttttgactttgacatagagttcgatcctcaattatttctcgcgctatcttcttacgaagttttg

SEQ ID NO: 76537 - DNA, 359 bp, Zea mays
gtgactgttgacattttcaggaacttgtcaccccatgttcaagcttgcgtgccagatctcctgaaggttgctctaaattgcattgacaatgttagagatactgatgggaccttgcgcgctgtcaaatcaaagatcgcaaaccttgtagcaagcaacatgagccggaattggccacaggatttgtatcagaaggtggcacagtgcatatgaagtggcttgtgttttgagttgatcaggaatctggactaatctgtatcagaactctgaagctttcaaacaatatggttgtcatcccatcctgtgtttaatgtgtgtcaaatgtaagatgtttatttttaaaaaaagaaatttccactgat

SEQ ID NO: 76538 - DNA, 428 bp, Zea mays
gatctagatcgcgagcggccgcccttttttttttttttttttttttttttttttttttttttttttttttttttttttttttttttattaggagtaactgcaatgctcaagctcaacaccagggacaccgtgtcaattgtgggacacgattgctggtaaatacattctctacagttgttacgcggtactgcactacactctgggtatccactcgtgcccctgtatgaagctggcgacgctgtacgcgtcgacgtggaccttgggaacctggctgctccacgccaccctccggcccgcggcgctgccggggccggcgctgtcgtactcgccgtagtagagcgtctggagcgcgaagtccccgttccacggcatccacccctgcggctgcacgatctccgcgagcgtgcacccgacgtacacggtgcggg

SEQ ID NO: 76539 - DNA, 372 bp, Zea mays
gcgcctgcaaggaccatttctcgcgccggcattgggggatcggcttcggcatgagtttcaaggtggtggcccttggcccgaatttccggcgcctctccgtggagcacattgtcccgtcgtatcggaggacggataaccggctgattctcctggactacgacggcaccgtgatgccggagaactccatcgacaggacgccgagcagtgaggtcatctctgtgttgaatcgtctgtgcgaggaccccaagaacagagtgttcatcgtaagcggacgggggaaggacgagctgagcaggtggttcgccccctgcgagaagttgggcatcgccgcggaacacggttacctcacaaggtggagcaaggacgcgccat

SEQ ID NO: 76540 - DNA, 406 bp, Zea mays
ggacgccttcgttgtcgaggagttcgaggaggccttcgcgtcggggcccaagaccagggatttcgtggccgctttgcagcggtgggggcttgacccgaagcagaaagccatgttctttgccacggacttcgacgacaatgtgcggctcagcggcaggaacattggttccctcaagatgctcacacccaggacgctgaacctgtacgacatactcgacgcacgcaagctcttctttactcctgctgctgtagactacctcaactccaggtacggagccagtgtttccgatgactactatactgatgacgaggatgatggcgaagaggaactggtcgagcaagaagcagaagaaggcaccacagcagatgctgctccagatgcaactgaagaaggcgaggcagacagc

SEQ ID NO: 76541 - DNA, 432 bp, Zea mays
  unsure (1)..(432): unsure at all n locations
cggacgcgtgggcacgagcagcgcaacggcgttcgttccttcgattcttctaatctcctaacccaggtgcgcatggtatggccggcctgatcagcttgcgcgccggtccgaggagttcaccgtcacttgcccggtcgtcgtccgcctgggcatcaccaccggcttcacatgtggcggttcgtttgccaagcccactgtttcgctgtgccaaacttcgtaggagccgtagtctactggcagcagcactggagatctctaaggacggttccgccgcggttctggccaacagcctgccttcccaaggggctatcgagacgttgcggaatgccgatgcagtgtgtttcgacgttgatagcaccgtcatcctggacgagggcattgacgagcttgctgatttctgcggngcggggaaagctgttgctgaatggactg

SEQ ID NO: 76542 - DNA, 433 bp, Zea mays
gcttggtgatgcccagcatgttgaggaggccgagaagatgggacttgactacatggatgttgaggctctcaagaaaatgaacaagaacaagaagcttgttaagaggcttgccaagaagtaccatgctttcttggcatcagaggccatcatcaagcagattccccgtctccttggtcctggtctcaacaaggcaggcaagttcccgaccctggttactcaccaggaatccctcgagtccaaggtgaacgagactaaggcaaccgtcaagttccagctcaagaaggtcctttgcatgggtgtcgccgtcggcaacttggcgatggaggagaagcagatccagcagaacatccagatgagcgtcaacttccttgtttcccttctgaagaagaactggcagaatgtgagatgcctgtacgtcaagagcaccatgggg

SEQ ID NO: 76543 - DNA, 431 bp, Zea mays
gcgaaccaactattcgtttgcttttcgtcttcgtcctctctttgcccagttgtcggtcgcccgcgccgtcgtctccgctccgccggccggcctgcgaaaccctagcgaggcgagcgagagagaaactagcggccatgttcggctacaggaaggctgacccggacctcgaggccggcgggtcctcgctgctgtacccgggaatgacggagagccccgagcttcggtgggcgttcgtccgcaagatctacgtcatcctagccgtccagctcgccatgacggccgcggtctccgccttcgtcgtcaaggtgcccgccgtctccaacttcttcgtctcctccaacgccggggtcgcactctacatcttcctcatcatcctgcctttcctcgtgctgtgccctctgcgctactaccaccagaagcatccggtcaat

SEQ ID NO: 76544 - DNA, 436 bp, Zea mays
  unsure (1)..(436): unsure at all n locations
gaagtttgaagctgatacaaagtattggaaacagctcatttcagaagtatatttcaatgacttcccacttaattggtcaagcatttgcaatgtaatggacatgaatgctgggtttggagggtttgccgcagcactcattgatcaacctttatgggttatgaatgctgtgccaattggtcaaccagataccttgccacttattttcaacagaggtttgattggggcatatcatgactggtgcgaatctttcagcacctaccctcgtacctatgatcttctccacatgagtaatctcattggaaatcttacaaacaggtgtgacctcatcgacgtggtggttgaaatcgacagaatactgagacctggaagatggtttgtgttgaaagacacgttagagatgatanagaagatacgcccaatcctgaagtctctgcac

SEQ ID NO: 76545 - DNA, 423 bp, Zea mays
aaacgggtctgttcaggtgtccaaggatatcaagtatgctgacaatcaaccagtggtgccttggggaccaagattctcccgatcaacagtgaaggacatgcgcataaatatggcagtatcagcagcatttgttgtttggatagctattatgggcaatgcagactggaagcctttgcagttcctttgttttgctttcttctacagaatactacagaagctaagagctactgaaccaccaattactccaatatacaatgaatatggtgaggtcgaaggacgagggataagaatggcaaaaagagtagtccgtgctttgggtttgatatttggatgtgtgttcgctgcatccctgggttatacagcagctattaacttgatcgagctttcaatgcagtacactccccgccttgtgtattactacca

SEQ ID NO: 76546 - DNA, 428 bp, Zea mays
cggacgcgtggggcattctcccgagagctcaggtgcagaagagtgggcctttgagaggagggaatatgtgaaggatgatgagaacaatttggtctctcaatccgatgagtctgaggaaaatgtcgaacctatgaatgaggaatatggtgagcatatttcaggctatccaagagacaattccgactccagacccgtacagatgatgggtgatgggagcgacgataatgatgaggatgctgaaggagatgagggtgaggaagatggagaggactatgaagctgaagatcctggtgatgaggatgatgacgttgagatggatggggatgatgatgtcgaggtggatgaggatgatgacattgagatggatgaggatgatgacattgaagatggtgatgacgacgacggtggagatggagcagccaacggag

SEQ ID NO: 76547 - DNA, 416 bp, Zea mays
cggacgcgtgggtttttcagcaaatggttatttatgtcacttattagcattatgtcactcgccacaagctggattactggaaatacagatgaaggatgagtaacgctgaaaaggtattacaggcaacacatgtcctggaagcctgagttcagctacgatcaaccatggagggcacatcacttccacttcttgaacttgccgccgccaaacatgccgtgcccgtgcttgccatgcttgaacttgccgtgcccgtgcttgaacttgccgtggtggccgtgaccatgcttgaacttgccgtggccaccatacccgtggccgtaaccaccgtgaccatagcctccaaaggccccatgtccaccgtgtccgctatggccatgagaaagcttgtgtgctccataagcggcagcggccgctct

SEQ ID NO: 76548 - DNA, 404 bp, Zea mays
cccacgcgtccggagctttgttaacattagagattaaaaggtagagccgtagcaaaatgaaggcaccatcactactggttcagtgtttccctggcttgcttcccagcaaggccactagttgcgtgccaattgtatctgagaaggatctgcagctaccatcaccaactgttgaaataatcccctcaaagagtgttcatccatacaaatatgctggagaaaaagttgatgtgcaaggtcttaatattttcaagggtaaagtcaatgtaacagatatgatagttaactcaacttctgaagtagcatcatcaaaatatgatggaactctgaaatactgggagaattccattacccttgtcgacattcttaaaaatgagattcgtgatgggcaattgagcttcaagggc

SEQ ID NO: 76549 - DNA, 406 bp, Zea mays
atcctttgagcagtttgggcgctgagcaagtccagtgagagagggagagcggcgagaggatggctgggatggcgtccctgcaaggcgccatggcgtccccccccaaccccgccccaagccccgccaccgcgaacaacaacaacttccggggcaaccggctccccaactactccgcgccgcaacctggggtaaggtttaaggtcaagatatgcccaattgaaatgagacttaagagatgggagcgaaagaagtgtaaaccaaacagtcttcctgtgctgcacaagatgcatgttaggatcggggacacggtacaggttattgcaggccgtgagaaaagaaaggttggagaagtcacacgccttttcaagcacaacagcacggtgatcgtgaaagacctgaacttgaa

SEQ ID NO: 76550 - DNA, 406 bp, Zea mays
cagacgcgtgggcggacgcgtgggcggacgcgtgggcttccaccttccaccacaagcgccgccgcagccggtgcctgctccttcccgatccccgaggcaaagctgcgactccgcaaccgccgccatggcgttcgagaagatcaaggtctccaacccaatcgtcgagatggacggtgatgagatgaccagggtattctggcagtctatcaaggacaagcttatcctcccatttctggacctggacatcaagtactatgatttggggatactgcaccgtgaagcaactgatgacaaggtcacagtggaggctgcagaggctactctcaagtacaacgtggctattaagtgtgcgaccattactccagatgaaactccggttaaggagttcaatctgaaacacatgtgg

SEQ ID NO: 76551 - DNA, 427 bp, Zea mays
cagacgcgtgggcggacgcgtgggcggacgcgtgggagtgagtgaacaccagccgtattgtcccgaccccgaccgatcctcgcctgctgcagccatggcgacctccgcggcgctctccaccgccgccaatcccacccagctctaccggtcccgcgctttgctgggcaagccggtgaaggggcttggcctgagcatgggccgcgagcgcgcccagcggagcattgtgtgccaggcggcgagcagcatctccgccgaccgcgtccccgacatggagaagcggaagctgatgaacctcctcctcctcggggccatctcgttgcccaccgtcggcatggtcgtcccctacggcgccttcttcgtccctgccggctccgggaacgccggcggcgggacctacgcgaaggacaagcctggcaacgacatcacg

SEQ ID NO: 76552 - DNA, 435 bp, Zea mays
caccccgcagccgccctagcacccgcgacgagcaggatctgcccagttgctcttgcggtagttcccccaactgtcaccatgcagaacgaggagggtaagactgtggacctttatgtccccaggaagtgctcggccacaaacaggatcatcactgccaaggaccatgcctctgtccagatcaacattggccacttggatgcgaatggcctgtatgatggtcacttcacaacgtttgctctctctgggtttgtccgtgctcagggcgacgcagacagctccttggacaggctgtggcagaagaagaaggctgatatcaagcagtagattttacatctagtttaccaagaattggacactgccttagctatgttttgaattcatgtcactatatgcaattgcagtgttgtgatttcagctggtaccttaaatctgaag

SEQ ID NO: 76553 - DNA, 434 bp, Zea mays
catcctcgcgctcgcgctctcgagtcccgactcacctgcttctagccatggaggcgcctccatcttctcccttcctagtgttgctcctgctgttcttcccttcgagcggccttgccgcccccatggattttaaccatgaagtgcaagtccttatggtgatcaagagcctcctcaaggacccctatggcgcgctgagaaactgggacaggaactccgtcgatccctgtacctggtccttcatctcctgctcgccggagaatctcgtcactgcactggaagctccaagcaagaacctttccggccggctctccccgagcatagggaacctgacaaaacttgagaagcttcagctgcagaacaacaacataattgggccaatcccagcagagatcggcaagttagcaaagctcaagacgctggttctgtccagtaac

SEQ ID NO: 76554 - DNA, 439 bp, Zea mays
  unsure (1)..(439): unsure at all n locations
cactcccatccagccgccaccaggtgcagagtctttcgtcatctcttctccggcgaagaacccccagtcgcccaccagatcacttgttaaactttgttgaggggtgatggcggtttctttcgcaaacctcaactccgaggcagggcttaaaaagcttgatgagtaccttctcactcgcagctacatcactggctaccaagcttccaaggatgacttggctgtctacacttcgttttcggctgctccctcgtccaagtatatcaacgtagcaaggtggtttaaccacattgatgcgctcgtgaggctgagcggaattactgcagagggccaaggtgtgaaggttgaatcctcagcagttccttcagccccaactccagatgttgctgaagcacaggccccagttgctgangaggacgacgacgatgatgttgaccttttt

SEQ ID NO: 76555 - DNA, 342 bp, Zea mays
ttcttcccccaaccaaagacacgaatcagccatggcgctcgcctccgccacgtcccgccccctcctcggtcgccccgccggcaccgcgcggccccacctcgccgtttcctcatcctcgcccgcctcctcgatccgcttcccccgcggcgccgacggcggcgccagcagagcgggcgtctctctccgcgcccccacgcctccagtctgtgaccccaaaagccttcttttcatgtctggaatggagctggactacagcgacgccctcattggtggcggcttcttgttccagaatcgaaacgcaacaaaaacctgtgggtgcggcaaatctttcgcgactggaaa

SEQ ID NO: 76556 - DNA, 406 bp, Zea mays
  unsure (1)..(406): unsure at all n locations
gacagtatcatcagtggactgaacaacctttcaagcaatgtcagcgaagttctcaagctagatgctggaatgaaggagcttgcctcttcgctgatcgactcagagtcgctcctcgtgttcggaaggggttacaactacgccaccgcgctggagggcgccctgaaggtcaaggaggtggcgctgatgcacagcgagggcatgctcgctggcgagatgaagcacgggccgctggccctcgtggacgagaacctccccatcattgtcattgcgacccgcgacgcgtgcttcagcaagcagcagtcggtgatccaacagctcctctcgcgcaaggggcgcctgatagtgatgtgctctangggagatgccgcggctgtgtgccctagcggtgggtcgttcaaagtcattg

SEQ ID NO: 76557 - DNA, 432 bp, Zea mays
cacacgcgtccgagcagctcaaaactctagctagctaccaggggggaaaatggctccacttctcgccgcagccatgaaccacgctacccatccagtccttagaagccatctaggacccaacaatgagagtttctcacgacaccacctatcttcttcaccacaaagcagtaagcgaaggtttaaccttagctttacgccacgatctgcaagggtaggcaatgaaaatggagtccaattgttgagcccctcggaaatccctcgaagggactggttcccctctgacttcatctttggtgccgccacttcagcgtaccaaattgaaggtgcatggaacgaagatggaaagggggaaagcaattgggatcacttctgccacaattttccggaaaggataatggacgggagcaatgcagacattggagcgaattcgta

SEQ ID NO: 76558 - DNA, 432 bp, Zea mays
ctaaccacctgcgctgcgctcgcgtctctcgtccccctcagatccaccgactcgctctgagtctctgaccgccccttccgtcgtccccgttcgaaggcgcggcaagcgagcgattcagccagattcgattcgacatgaatcccgagtacgactaccttttcaaacttctgcttattggtgattctggtgttgggaaatcatgcttgcttctcagatttgcggatgattcatatttggacagctacatcagcacaattggggttgattttaaaattcggacagtagagcaagatgggaagaccataaaacttcaaatttgggatactgctgggcaagagcgcttcaggaccatcactagcagctactaccgtggagctcatggaatcattgtaagttggccacctgaactagcaacttttgaaacttgtcaac

SEQ ID NO: 76559 - DNA, 422 bp, Zea mays
tcacgcatccggaacaagctctacttcacgccgctaggcaagttcatggatgatcgggacgccaagatccgcggtgagctcggcgatgtcaagggcgcctctgaggaggtgaagcagctggaggaccacgcggcggccatcatgaaggcggcgcgcgccgagatcgcagcggcgcttaacaagatgaacaaggagaccaccgcagagctggaggccaagctggacgagggacgcagccgtgtggaggccgagctcgtataggcgctcgccaacctcgaggcgcagaaggaggacgctgtcaaggcgctcgacgcccacatcgcctcgctcagtgatgagatcctcaggaatgtgctcacatccgcgtgatgataccatatcggccctgccttatcgtaagacgatagtcacatgaacatcat

SEQ ID NO: 76560 - DNA, 436 bp, Zea mays
cacttcaacccgtcgccgccccgcacgatcccctccgccttcttcgccgccggcctccggaccgcgcagctccccggagccgacaaggacccggcgccatggggttctgggaggcttttcttaactggctccgcagcctcttcttcaagcaagagatggagctttccttgatagggctccaaaatgctgggaaaacgtcacttgtgaactctattgctactggaggctttagtgaggatatgatccctactgtaggattcaatatgagaaaagttacgaaaggaaatgtgacgataaagttgtgggatcttggaggccaaccaagattccgcagcatgtgggagagatactgccgtgcggtttctgcaattgtgtatgttgttgacgcggcagatcgagaaaacatggccattgcaaagggggaactccaatgact

SEQ ID NO: 76561 - DNA, 439 bp, Zea mays
gtccttcaccgtgcgtgcctctctccgcaaggccactgccaccgccgccgtggccgttgccgccagcgtcctgcttgccggcggcggcgccatggcccaggaggtgctgctgggcgcaggcgacggcgggctcgtcttcgagcccagccagttcaccgtcaaggccggcgacaccatcaccttcaagaacaacgccggcttcccgcacaacgtcgtgttcgacgaagacgaggtgccgagcggcgtcgacgcctccaagatctcgcaggaggagtacctcaacgcgccaggcgagacctactccgtcaccctcaccgtgccgggcacctacggcttctactgcgagccgcaccaaggagcaggaatggtcggcaagatcacagtcaactaaagctagctatccattccatgcatctcgatctgtatgtactccgcccgt

SEQ ID NO: 76562 - DNA, 382 bp, Zea mays
cggcaggaattataagccttggagatgaaagagctagtcctgccgtgatttatggattgtcagctttatcacatcacttccaaaatagctttttcagttttgaggttcttccagggatgatgggtttcctcgcgtacaaggctgcagctttggttcaagtctacagagacaacgaggacctccgcttgatacttcctgatgaagaggccgctgacagtgacagcacttgatttatacgaattagagattatgttaacctagtggttgttgacaaatacaaaacagatctgttcaccaccgagtcaagcttcacttttgaacttttttttgtctttaagagattctgaaattcgtttgcttatcttcttgggaggggggaaac

SEQ ID NO: 76563 - DNA, 414 bp, Zea mays
cccacgcgtccggagagatttcttctgggacgacgagttccgggtgaagaacagctgggacgacatgcttcttcagtacgagacactggaacagtgcgccaagactggaaccatggttgtccggtgggtcaggaagtttccgttcttctgcagcgacagggagtacatcataggccgcaggatatgggcatctgggaagacgttttactgtgtgaccaagggcgtgcctcgtccctctgttccaagacaaaacaaacctcgtcgtgtggacttgtactactcgagctggtgcatccgtccagttgaatcaagaaaaggcgacggtgcaatgactgcatgtgaggtgctcttattccaccatgaagatatggggattccatgggagattgcgaagctcggtgtccggcaggggat

SEQ ID NO: 76564 - DNA, 436 bp, Zea mays
ccggcgtggccgacctcgacgccgcgctctgcctctgcaccaccatcaaggccaaggcgctcagcgtcagcctcgtgctccccgtcgccatctcggtgctcgttaacgagtgcggcaagcatgtgccctccagcttccagtgcccgtaatcacatcagctgcatatatgtgctactatgatgtatcaccaccactaatctatatccgcatgcatgcatcaatgcatgggtgattaagggtttatacgcggtcaaagttatacacgcatatatatgtagcttcatacatggagctgtgggttgtgcattcattttcaaatcatgtaccagtattatattgtagtatcataaaccagtgtgagagttgtggccttggtgggggtgcttgtaagtcatcattaagtaaaaccatgaataaaacgtgtgtaacatataaa

SEQ ID NO: 76565 - DNA, 256 bp, Zea mays
gatcagcacgaggtccttcaccgtgcgtgcctctctccgcaaggccactggcaccgccgccgtggccgttgccgccagcgtcctgcttgccggcggcggcgccatggcccaggaggtgctgctgggcgcaggcgacggcgggctcgtcttcgagcccagccagttcaccgtcaaggccggcgacaccatcaccttcaggaacaacgcctgcgtcccgcatatcgtcgtgttcgatgaagacgaggtgccgagcggc

SEQ ID NO: 76566 - DNA, 434 bp, Zea mays
  unsure (1)..(434): unsure at all n locations
ggcatcccttactgagctctcattcaactggactggcttcatcaatgccatgatatcaaacatctcattcacctacaggagcatttattccaagaaagccatgactgacatggatagcaccaacgtgtatgcttacatttcaataattgctctcattgtttgcattccgcctgcagtgatctttgaagggccccggctaatgcagcatggattcagtgatgccattgcaaaagtaggcttgacaaagtttgttagtgacctattcttggttggactgttctaccatctgtacaaccagattgctacgaacaccttggagcgagtggctcctctgacacatgctgtgggcaatgtgttgaagcgtgtgtttgtcattggcttctcaatcgttgtttttggcaacanaattagcacacaaactggaattggcacgt

SEQ ID NO: 76567 - DNA, 401 bp, Zea mays
  unsure (1)..(401): unsure at all n locations
gcaggataagtctaagctcacggggttggccttcggtcctagttatcagcctgccccttcagcaaaaggaaagccatccaagttgcataaaaggaaacatcagattggttctctgtactttgacatgaagtcaaaggagatggagcttgcggagaggcgttctaagggcattcttacgaaagcagaaactcaagcaaaatatggctggtgagganggatgtaaaagaactcaagatacatgtgtgggagctgtagaattgagatgcgtgaatttttgttgcacattttgttgtaagagttacggacttcgtaagttcaatcctgaacaaatagttcaataatgagtcaatatttttaaacttgtgttacccattaagaatcacgctcacattcaattgatg

SEQ ID NO: 76568 - DNA, 418 bp, Zea mays
cccacgcgtccgcggacgcgtgggcgcacgggcccgacgccaccgacgcctggctgtggaagctggccaaggcgcacgtgctgacccacgacacggggtaccaccagctggtgagccactggctgcgcacgcactgctgcgtggagccctacatcatcgccgccaaccggcagctgagccggctgcacccggtgtaccgcctgctgcacccgcacttccgctacaccatggagatcaacgcgctggccagggaggcgctcatcaacgccgacggcatcatcgaggagtccttctggccgggcaagtacgccgtcgagcttagctccgtggcgtacggcgcgacgtggcagttcgacacggaggcgctgcccaacgacctcgtcaagcgcgggctggcccgtccgcggggaagacgggg

SEQ ID NO: 76569 - DNA, 414 bp, Zea mays
cggacgcgtgggcggacgcgtgggcggacgcgtgggcggacgcgtgggaccgcattgtgcccctcctgctggtcgcagccacactgctcgcgcaggccgcggcctgcccctactgcccgacgccgaagccgccgccgcctccgccgccgtcgtcgtcgtccacgccgtgccctcccccgccctactcgccgtcgccgtccacgccgacgggtaagtgccccgtgaacacgctcaagctgctcgcgtgcgtggacgcgctcaacggcctcgtgcacgccgtcatcgggaccaaggccagcgacacctgctgcccgctgctctccggcgtggccgacctcgacgccgcgctctgcctctgcaccaccatcaaggccaaggcgctcagcgtcagcctcgtgctccccgttcgcatct

SEQ ID NO: 76570 - DNA, 401 bp, Zea mays
cggacgcatgggcgaggaccaaggcggtcaactacctgcaagttagcctcgcaatctttaggaagctatgcattctaaagggtgtctttccacgtcagccaaagaagaaggtggaagggaaccacaagacctactaccacacaaaggatattgcattcctcgctcatgaccctttgatcgagaagttcagggagattaaggtccatcgaaggaaggttaaaaaggctgttgctaagaaaaacagggatcttgcagacaggctgttgaatcggccaccaacttacaagcttgataggcttgtccttgaaaggtatccaacattcgttgatgctcttcgtgacttggatgactgccttacaatggtgcatctgtttgccgcattacctgctgttgacggtgaa

SEQ ID NO: 76571 - DNA, 402 bp, Zea mays
aaagatacgagggagcatcgacgttgtatggcccccacacgttgagcgcctacattcaggagttccagaaacttgctacagccatggtggcaaacaaagaggtcccgacaaattttcagcccccagacatgttggacaagcaaataggactcctcccaggcgttgtgttcgactccacacctcctggggtggagttcggagatgtcagctcagacgtccccgcaagctcaactttcaggaagggcagtgtcgtgaacgctacattctactcggcgtgcccgaggaatgaccttctcacggacggcacgttcgcgctcgttgagaagctggacggcagcaacagctgggttcctgcctacgacgacgacgactggtcactacgcttcaagtggtcgagaccgt

SEQ ID NO: 76572 - DNA, 411 bp, Zea mays
  unsure (1)..(411): unsure at all n locations
accacgcgtccgcaccgatagttaccatgtttgaaagaactgaagctgtaaatcacagtcgtcgttgcttgtgtgtgtgtgtttatagttcctccatggtttaccatcactttcagcttttctagtatatctagtgcttgctatgtttcataatttcgggctatgttgtttcagtgtacggtatttttgtttgtttccttccacgattatataatctagcttatggattatataagcaactattgacctgcttatggattaccataatctaggtgtctaggttatataatctatctaataatctgttttgtttgtttgcctctcaacttatttaagttggattactgtttgtttcctttcaaaattatacaatccaacttatanaanaaaaaaaaaaaaagggcggccgct

SEQ ID NO: 76573 - DNA, 134 bp, Zea mays
atcactcttgttgtcaagtccaagtggaaaatcttggcatattatacatattgtaataataagcatcgtacaatctgcatgctgttttgtaataattaattaatatcccagcccattggatggacttgtttacc

SEQ ID NO: 76574 - DNA, 416 bp, Zea mays
acggttctgggtttggacaggtccctggaacgtggcacttcaggtgcacgatactgccgcaggaggacaagatacctgcgatagtatccaggctcaaggagttccacgagaagttcatggatgaattccgtgattgagctgagtatccatcgccctggcgtgatttttatctgttcaaaataataatgctgccaattggttgcccccgctccctcgtcgtcccatggatgctacagccaaacaccatcccaaattgtgttacaggcagatccctatcgaaaaacctacagaatctcgggcactgcaatgccatggttctgtttgccttgtgagaagtgtatcaggctaggctctgagccctgatgtgtacaaacatacccgaactttgaaggcaatttgagttgtcccggggcatg

SEQ ID NO: 76575 - DNA, 273 bp, Zea mays
gtagagaccgtggctagatcgacccatggccatgcctctgcctgttgatcggatcaccttcttgcattggttcctctctctctctccctccttttttttccctttatctcatcatttcttttctcctgcatgcaatggttccttttgcttccaacaattctcctgctgatgtatccagcatggcatcatccatctacaattacgtacgtagtgcaacgactgtcgattcgttgggtgaggaacatatatgtgaatgcaagctccggctaccat

SEQ ID NO: 76576 - DNA, 399 bp, Zea mays
agcaagctcgatctactactactactagctggtacacatactagccagcctgccagccagcttgccatggcgcccaccgtgatgatggcctcgtcggcaaccgccgtcgccccgttccagggtctcaagtccgccgccagcctccccgtcgcccgccgcagcaccaggagcctcggcaacgtcagcaacggcggaaggatccggtgcatgcaggtgtggccggcctacggcaacaagaagttcgagacgctgtcgtacctgccgccgctgtcgacggacgacctgctgaagcaggtggactacctgctgcgcaacggctggataccctgcctcgagttcagcaagctcgggttcgtgtaccgcgagaactccacctccccgtgctactacgacggccgc

SEQ ID NO: 76577 - DNA, 377 bp, Zea mays
ggcatgcagccatgcaggcttagtagacgaagcactgcgttatttcgaggcaatgcacggagactacagcattaccgctgatgaggctcactatgcctgcatcgttgactgttttggcagagcaggtcagctccaacgggcttatgagttcatcagaggaatgccggtggttccaaatgcttgtgtgtggggtgccctacttagcagttgcaggatacacggaaatataggcctagcagaaattgccgcgaagaagctcgttgagctggaccctcagcattctggatactggatgctgctaaaggatatgtactcaaaagccaagagatggaatgatgtatcgcaacttcgagctgctatgagagataatggcgtta

SEQ ID NO: 76578 - DNA, 397 bp, Zea mays
gaagcgcgcgagagaaacgcgtatacccaggcggcggttgaggaagaggaggagaagaagaagaagatggcttcctccgcatacgcctcatggtccaagcggtggatccgtcccgaggtgtacccgctgttcgtgccgatggccgtggccttgggcatctgctcgtaccagcttgtgcgcaacatcacgggcaaccccgaggtgcgggtgaccaaggagaagagggcggccggcgtcctggacaaccacgacgagggcgagaggtacgctatgcacggcctcaggaagttcgtccgcgggaagaagcccgagatcatggcctccatcaactccttcttcgccgaccctcccaaggacgattaagctagattccgtcatggatggatggatggatgga

SEQ ID NO: 76579 - DNA, 403 bp, Zea mays
ctcacgagccacagcccacagcaggctagctctctagcggtctagccagtccacgcagcgcagggatggcgtcgttcgccgtggcaacggccccgtcgctagcggccccggcagccaagaggaggcccgccgccggcgtcacgtacgtggagggcatgaacgcctacagcggcctcaaggggctcaacaaggtgaccatgctcggggtgcgcaagaccgccgactactccttcgccaaggtcgtggcgtcgctcagccccgcgggcaggaagcggcgcggcggggcgttcggcgcccagatgaatgccgccgccgagatcttcaggatcgccgccaccatgagcggcctcgtgctcgtcggcgtcgccgtcggcttcgtgctgctccgggtggaggccgccgt

SEQ ID NO: 76580 - DNA, 432 bp, Zea mays
  unsure (1)..(432): unsure at all n locations
gtgggcgcgaacatctccggcgggcacgtgaaccctgccgtgaccttcggcgccttcgtgggcggcaacatcaccctgttccgggggctcctgtactgggtggcgcagctgctggggtccaccgtggcgtgcttcctgctccgcttctcgacgggcgggcaggccacgggcaccttcgggctgacgggcgtgtcggtgtgggaggcgctggtgctggagatcgtgatgaccttcgggctggtgtacacggtgtacgccacggcggtggacccgaagaagggcagcctgngcaccatcgcccccattgccatcggcttcatcgtgggggccaacatcctggtgggcggcgccttcgacggcgcgtccatgaaccccgccgtgtccttcggccccgccctcgtcacctgggagtggggctaccagtgggtgtac

SEQ ID NO: 76581 - DNA, 356 bp, Zea mays
cggacgcgtgggcggacgcgtgggtaaagatgaccaaattgctgcagcaaggcgcttgtccttatcttcaaaggaactggacttgagtggccttggagtgaccagtgtaccagctgccgcgtgggagacaagtgatgtggtgaaactggatctttctaaaaattcaatagaagatctaccaaatgagttgtcattatgctcatcacttcaatccttagttttgtctaataacaagataaaaaggtggcctcacacagtggtttcctcccttccctgtctgtcttccttaaagctggacaataaccccttggtagagatatcatccactgatcttgtgcctctgtccaaacttgaag

SEQ ID NO: 76582 - DNA, 374 bp, Zea mays
aggagtggctattagaataggtgggatggctaaaggttctggaatgattcacccaaatatggcaacaatgcttggtgttttgaccacagatgctcaagtcagcagtgatgtctggagagaaatgatccggatgtcagtgagtagaagtttcaaccaaattacagtggatggtgatactagtaccaatgactgtgttattgctatggcaagtgggttgtctggtttatctggaattcaaagtcttgatagcattgaggctcaacagttccaagcatgcctagatgcagtaatgcaaagtcttgcaaaatccatagcatgggatggtgagggtgcaacatgcctaattgagggtactgtaagtggcgccaacaacg

SEQ ID NO: 76583 - DNA, 407 bp, Zea mays
cccacgcgtccgcggacgcgtgggcatcgccatcgtggagcagtcggtgtcgccgggcggcggcgcgtggctgggcgggcagctgttctcggccatggtggtgcgcaagccggcgcacctgttcctggacgagctgggcgtggcgtacgacgaggccgaggactacgtggtcatcaagcacgccgcgctcttcacgtccacggtcatgagcctgctcctggcgcgccccaacgtgaagctgttcaacgccgtggccgtggaggacctcatcgtcaggggagggcgcgtcggcggcgtcgtcaccaactgggcgctcgtgtccatgaaccacgacacgcagtcctgcatggaccccaacgtcatggaggccaaggtcgtggtcagctcctgcggccacgacgggccct

SEQ ID NO: 76584 - DNA, 410 bp, Zea mays
cggacgcgtgggtgccagtgccaccatctcgccgtcggcgtcggctcgtcgcctgagagccgaggccacgcaggcacccgggccgggggatgtcggcgccggcggcacaggccgtggtggcgctggctctcgcggccatcctctcgaccccggcgccccaggcggacaccttctccaacgtcccgcccacgctctccgggggcgacgggaagcaagagcggatcaagcaccccaggtcggccaaggcgttgcagtgcacgaccaagtgcgtcggcacctgcatccgcggcggcggcggcgcgcccggcgaggggcccctcaacgtcaggaggcccctcgtggtgttcaaggacggcttccgcagccggcagtactggtgggtactactactacctgcactacagccccct

SEQ ID NO: 76585 - DNA, 411 bp, Zea mays
gtgcgagcgacccacgtccacacgacacgaaccaccaccaccaaccagcagccgcaccacgcacccagcgcaaagcgatggcgtcgctcaccatgatggcgtccttcgccgccgtggcggtggccgcgccctcgcgccgcggcaccttcgccgtggtcaggtccgccaaggtcgaccgctgccaggagcccgccacgctagcagcaaccgaggccaggcccgccgccgacggacgccgcgccgtcatgctcgcggctgctgcggcggccgtggcagccatcggcggcgccggcgccgccatggcgggccccaagaacgggacccccgaggcgaagaagaagtacgcggccatctgcgtcaccatgcccaccgccaaggtctgccacaactgagcacgcccgcgttgcatgc

SEQ ID NO: 76586 - DNA, 410 bp, Zea mays
ggctggtgatgctctgggcgccaagtgtgtacatcttgctcctcgcaaggctcattgatgggttcggtatcggtttggcggtcacacttgttcctctctacatctccgagactgcgccgacagacattcgtgggttgttgaacacgttgccgcagttcagtgggtcaggagggatgttcctctcctactgcatggtgtttgggatgtccctcatgcccaaacctgattggaggctcatgcttggagttctgtcgatcccgtcacttatttactttggactgactgtcttctacttgcctgaatcaccaaggtggcttgtgagcaaaggaaggatggctgaggcgaagagagtgttgcaaaggctgcggggaagagaagatgtctcaggggagatggctcttctagttgaa

SEQ ID NO: 76587 - DNA, 411 bp, Zea mays
gctctactctcattggtggtgagacagaagctctggagaggttgaagaagtttgctgcagaatgctctatgcagccaaacaaagtagacaaaagcaatacccaagatagcatatatggtgctaatttctcttgcaaaatttctccatggcttgctacaggttgcctctctccacggttcatgtatgaggagttgaagaagcatgctactaaagcaattccttttgggtcaacacccaagaataatgatggcacatctgatgctggaacaaattggttaatgtttgagttgctgtggagagatttcttcaggttcatcacaaagaagtacagctctgtacagaagacatctgaagttgccactggctgcactcccgccccagcgcttgcatgaacttacttagacaagctga

SEQ ID NO: 76588 - DNA, 389 bp, Zea mays
agtgccgcaggccgccgccgcctcatcgccggcgaagcgggtgcagctggccgcgcccgagggccgccgcgccgctctgctcggcctggcggccgtcttcgccgtcacggccaccaccgggtcggccaaggccacgatcttcgatgagtacctcgagaagagcaaggccaacaaggagctgaacgacaagaagaggctggccaccagtggagccaactttgcgcgcgcctacaccgtggagttcggcagctgccagttcccctacaacttcactgggtgccaggacctcgccaagcagaagaaagtccccttcatcagcgacgacctcgagattgagtgcgacgggaaggagaagttcacgtgcggctccaacgttttctggaagtggt

SEQ ID NO: 76589 - DNA, 418 bp, Zea mays
atagccttctcgtcgctcctgttcttctcgcatccccagcccaagtggtgtcccctgtcgcgttgatgcatgctccctcggcggtggccttgagctgaggcggcggagcgatgccggactccgacaacgactccggcgggccgagcaacgccgggggcgagctgtcgtcgccgcgggagcaggaccggttcctgcccatcgccaacgtgagccggatcatgaagaaggcgctcccggccaacgccaagatcagcaaggacgccaaggagacggtgcaggagtgcgtgtccgagttcatctccttcatcaccggcgaggcctccgacaagtgccagcgcgagaagcgcaagaccatcaacggcgacgacctgctgtgggccatgaccacgctcggcttcgaggactacgtccagccgct

SEQ ID NO: 76590 - DNA, 403 bp, Zea mays
cgcgagtgagtgaacaccagccgtattgtcccgactcctgacccctaccgatcctcgcctgctgcagccatggcgacctccgcggcgctctccaccgccgccaatcccacccagctctaccggtcccgcgcttcgctgggcaagccggtgaaggggcttggcctgagcatgggccgcgagcgcgcccagcggagcattgtgtgccaggcggcgagcagcatctccgccgaccgcgtccccgacatggagaagcggaagctgatgaacctcctcctcctcggcgccatctcgttgcccaccgtcggcatggtcgtcccctacggggccttcttcgtccctgccggctccgggaacgccggcggcgggacctacgctaaggacaagctgggcaacgacatcacgg

SEQ ID NO: 76591 - DNA, 419 bp, Zea mays
cgttcgacatcgacaagatgctcttcatggactggcgcgactcgcacctccccgaagggtcggagatcagggagcgcaaccgccgcatccccaccttcctctacgccatgcccttcttcgacctggagccacactactggcatggtttcctgtcatccagactgttcctgccggagctcttgatgttcggcctcgcactgttcgggaacgcctccaactcgtcgaggctggagatcatggccaagggcaccgtgcctcttggcaagatgattggcaacttgatacaggacagagatgggtgaggagggtatgtatacctacatttttcacgtgaagatctgatctccattggatctctgattttggtatccatgattttcactgtatttacgatttgcaaagatggattcacaaaacac

SEQ ID NO: 76592 - DNA, 367 bp, Zea mays
gtacgacggcggggaggcgaaagatagccagcagcgagagccagcgaggctaccttgctcccgagtacgccgccatgttcggcaaaccaactgcaggctgcgatgtatacagcttcgggatcatactgctggagcttgcgagcggcagaaggccagtcgagaagtcgggttctggcaaggcttgtggaatccgaagctgggtgctcccgctcgcaaggcagggcaggtacgacgagattgcggactcgaagctgggcgacaagttctctggatctgagctgagaaggatggtgttggtcggtctagcgtgcacacgttcagaacctgaaaagagacccacgatgcttcaagtcgtgccgttgctgaa

SEQ ID NO: 76593 - DNA, 384 bp, Zea mays
tttaatcgacaacatttgaataatatgtacataacattaaaaagcgtatacagctggtgataacgttgctacatccaaatagcgtgtagcatgcctagcaagccaaacatattaccttacagcaagcatcccattgccgcttcacacatctttgctgccttcgatcggacgcgtgggcaatcattgtttttggcaacaaaattagcacacaaactggaattggcacgtccattgccatagctggtgttgctatgtactcttacattaaggctaagattgaagaggagaaaaggaaaaagagcgcatgactgctgtgaataatattatcgagaccttcctcggacacaacatcgtcgacaatcacgacctacttctatatcttgt

SEQ ID NO: 76594 - DNA, 417 bp, Zea mays
  unsure (1)..(417): unsure at all n locations
acggacgcgtgggggcagctgcacgtgctttggcaatcctaggggagaatgagaacttacgtcgagcaataagaggaaggccagttgcaaagaagggtctacgcatcctatcaatggatggtggtggcatgaaaggccttgcaactgttcaaatgcttaaacagatagagcaaggaactgggaaacgcatacatgaaatgtttgacctcatatgtggtacatccactggtggcatgcttgcaatggctcttgggatcaagcagatgactttggatcagtgtgaagaaatatacacaaaacttggaaaacttgtatttactgaacctatcccaaaggatgaagctgctacgtggaaggagaagattgatcaacttttcanaagttcctcacaaagttttagagtgggtgtacatgggt

SEQ ID NO: 76595 - DNA, 409 bp, Zea mays
ggagcagacagcaccgcggacgttctacgacctgctcgggatctcagcggatgggagccccgatgatgttcgggcgtcctacaggcggctggcgctaaagtaccacccagacgtgtcccctccgggcgccgcggccgagaacacgcgccgcttcatcgaggtgcaggaggcctacgagacgctctccgacccaagccgccgctccagctacgaccgtgcactcgcccgcggcgtctgccgcctcgccttctccgggcgccgttcccaatcccaccacgcctactaccaccaccaggagcagggagagagatctgggtggagaaggtcctgggaggaccagatcgcagagctgaagatgaggagcgtggcgaaggattcagaatagaacctgtcgtggggcgctcgcatg

SEQ ID NO: 76596 - DNA, 408 bp, Zea mays
caccactccgcgctagctgaggacggtacagcggcacagaggtgcgacgtacgacgacgacgacgcaggcgccacacatggcatcccagctctccgccgccgtgccccggttccacggcctccggggctacgccgcgcccaggtccgcggtggcagcgctgccgtccgtgagggtgggcaggaagaggtcgtcgtcgcagggcatccgctgcgactacatcggctccgccaccaacctgatcatggtgacgacgacgacgctgatgctgttcgcggggcggttcgggctggcgccgtccgcgaaccgcaaggcgacggcggggctgaagctggaggcgcgcgactccggcctgcagacgggtgaccccgccgggttcaccctcgccgacacgctggcctgccgcgccg

SEQ ID NO: 76597 - DNA, 356 bp, Zea mays
gctttgatcatgggggagttaagatcaagaggaatcttaaatagtcacactttggcgtaccaggtaaatgctattaaaatttggtaggtaattgtttcactaacaacggagttgtgcccttatgttttaatgatcaccttgtaagaacactaggaatggaaactgccaagttatataggcttcaggagttaccagttccttaattttccaggtcaccattaactagtgttaacatttattgtacacgcagagtcgggtggggccagttcaatggctgaagccatatactgatgaagttttagtagaacttggtcaaaagggtgttaagagcctcctggctgttccagtaagctttg

SEQ ID NO: 76598 - DNA, 409 bp, Zea mays
cgaacagacctctaaaacctagcagaggcccgcgccgccgccgccaaccgcgacgaggaaggaagcaggaacgcgatgccgaagtcgaagcgcaaccgcccagtgaccttatcgaagaccaagaagaagccaggtttagagcgcaagggcaaagtagtcgccgagataaaagatgctgtcgacaaatacagcagcgcctatgtttttacctacgataacatgaggaatcagaagctcaaggacctcagggagcagctcaagtcttctagcaggatttttctcgctggaaagaaggttatgcagatagcgctggggcgttcgcctgctgatgaagctaaaacaggcctccacaaactttccaagttccttcaaggcaactctggtctgttattcaccaatcttccaaggg

SEQ ID NO: 76599 - DNA, 159 bp, Zea mays
aagtatatttccaacttatactttgaacgcgcttcgagaggaatatacataggccactgggaatcagagcagttcatggctctcacatgcaaactgtgcgcacagatcgtttctcggacactggacagctgaacctatttgacagagtgcccagcagca

SEQ ID NO: 76600 - DNA, 419 bp, Zea mays
cggacgcgtgggcgcttttgctctctccctcccggctctcggcttcttctacacgctaccgtctcacagccgtaaacgcccctcccggatcccgctagttcgccaccgccgcccgcccgcccgccgttcgcctcatcatggccgcctcgtcgaccgccacctccgtccacgacttcatcgtcaaggatgcgagcggcaaagacgttgacctcagcacctacaaggggaaggttcttctcattgttaacgtcgcatcccagtgtggcttaactaactccaactacactgagctggcccagctctacgagaagtacaaggaccaaggctttgaaatcctggctttcccatgcaaccagtttggtgggcaggagcctggtaccaatgaggagattgtccagtttgcctgcacacgcttcaag

SEQ ID NO: 76601 - DNA, 397 bp, Zea mays
cggacgcgtgggcggacgcgtgggcggacgcgtgggcttcgccgcaccagcgccagcccgcgccgtggtcagaaggaggtccttcaccgtgcgcgcctctctccgcaaggccaccggcaccgccgccgtggcaatggctgccagcgccctgcttgccggcggtgccatggcccaggaggtgctgctgggcgcaggcgacggcgggctcgtcttcgagcccagccagttcaccgtcaaggccggcgacaccatcacattcaagaacaacgccggcttcccgcacaacgtcgtcttcgacgaagacgaggtgccgagcggcgtcgacgccaccaagatctcccaggaggagtacctcaacgcgccaggcgagacctactccgtcaccctcaccgtgccg

SEQ ID NO: 76602 - DNA, 372 bp, Zea mays
aatccaaagaatggcttcgtgctgccgaggcctaagatgtccaacgctgacctgtgcaggatcatcaactctgaccaggtgcagtctgtggtgaagccactcaacacggaagtgaagctcagggagaagaggaataatccactcacgaacatggctgctgtgctcaaactcaacccctacctgtgcaccgcccggtagatggccacccttgctgaggctgctcgtgtgaatgccaagactgtgaagctcgactctaagacgaccaaacttaccccgtgacactgccaacgttatagctgcgggcaacgcatggtacaggaccatggtctcggaaagcgactacaccgagtttgagaacttctcaaagtggct

SEQ ID NO: 76603 - DNA, 424 bp, Zea mays
atcaaatttgaggaggcttctggtgaccctgctcgtgttcaagttctgtatgagcgagctgtttcagagcttcctgtttcaagtgatatatggatgggatatacaagttacctggatagaaccctgaaggtgccttctgtagtcagaagtgtttattacagagccacaagaaattgtacatgggttggtgagttatgggtccattatttgttgtctttggagcgtattcgtgcttctgaagaagagctgcagcatgtatttgaacgggcaatacaatgtaccttttcaaccatacaagagtatttcaatatttatcttactcgagttcatggtttaagacggaggatttctgatggcttggattttcaactgattaggcagacattaacggatgctgcagaatttctctcatctcaactgagta

SEQ ID NO: 76604 - DNA, 405 bp, Zea mays
ctccctctccgaaatcaaggtagcgtacaccgctgcagtttctagagccctctctgccactcgtgatcccactagtcacaatgcctgccctcgccaagcccgcctcccgcaccgccaagcccgccgcggctccgaagccgaagcctgccgccgccaagccgaaggcggccaccgctggtgcctcccaaccgccttacttcgagatgatcaaggaggctatcacggcgctcaaggagaggaccggctccagctcgcaagcgatcgccaagtatgtgggggacaagcacggcgcgtctctgccggccaacttcaagaagatgctttccatccagctccgtgggtccgcagccaatggcaagctcgtgaaggtcaaagcttcgtacaagctctcgggacgccgcaaga

SEQ ID NO: 76605 - DNA, 262 bp, Zea mays
gaagaagagcctcaaggagctcaccggcaagctcttcagcaccatcgacgatcttgaccatgccgcgaagatcaagagcacccctgaggccgagaaatacttcgcagcaaccaaagatgctcttggcgatgttctcgccaagctaggctagacgcaatggctaataatggccatgtaatttcggacttgtgtttgttcatatggacccggcaaggcaatgtaccattttctgttgatattgtatcaggaagcacttaactac

SEQ ID NO: 76606 - DNA, 407 bp, Zea mays
gcgaaatcggagcagaggccagggacgcgccagcgcgagcgataaggcacactgacatggccgccacggcgtactccaccgcgctccccggcggggcgcgcctccccgctgccggagccgccgcaccgccctctgccctcctcctcccgcggcgtaataaactgtctccgctccctctccggctccaagatgcgccgaggctgtcgttgctccgggtgaaggcctcctccgacgactcctcggccgcgagcggggacgagctcatcgccgacttgaaagccaagtgggacgccgtcgagaacaagagcactgtcctcacctacgccggcggcgctgtcgtcgctctctggctgacgtccgtcatcgtcggcgccatcaactccgtgcctctgctccccaagatcatg

SEQ ID NO: 76607 - DNA, 428 bp, Zea mays
aggaaggccatcagtgaagacagatatctttggttatggtgtcatgctgttagagattgtgacaggagagcgtgcaattgcattccatcctgaccgtatagaagaagcaggcgagatcctgctcactgatcaggtcaagctatggatggaagaagggcgactactcgacctagtggatcgcaatctaggtggcgtctacaaccttgaagagctggagaaggttacccagatagcacttctctgcactcacatggatcctgaacaacgccctacaatgtctgaggtggtgcagatgctggaaggagagattgtcccagcagagcggtgggaggagtggcagctggctgagctccaacgacgacaacagcatgagatgaggcaacacggcagactattcaacttcagtgaaaagtctcagaacatccagg

SEQ ID NO: 76608 - DNA, 400 bp, Zea mays
cccacgcgtccgggcaaagaacgtggcagaggaaattgcagagaagctttgtgaatctgtcgcagctagccttgagggcaagaagctaggatctttcactagaatatcatcaacagtccagacagctatggaggatgcgcttcttcgtatcttgaccccaaggcgctctattgacatactgagggatgtgcacgctgccaaggagcgtgggaggccatatgtcattgtttttgttggggtgaatggagttggcaaatccaccaatcttgcaaaggttgcttattggcttcttcagcataacctcagtgttacacttgcagcatgtgacaccttcagatctggtgctgttgagcagctgagaactcatgcaaggaggcttcaggtatcgatcaaactatct

SEQ ID NO: 76609 - DNA, 418 bp, Zea mays
cagagctctcatcctctctctctctctttctcgcgctcgctttgcttcctcgtcgaggtccaagttcctgcattgatggcgaccgaggtggctgagactcccgcgccgttggcggaggcggtccccgagacccccgcggaggcaccggcggcgcccgccgccgaggcgaagcctgccaaggccaagaaggcctctgcgcccaagaagcgtgccaacccgacccacccgccgtacgccgagatgatctcggaggctgtcacgtcgctcaaggagcggacggggtccagccagtacgcgatcgccaagttcgtcgaggacaagcacaaggacaagctcccgcccaacttccgcaagctcctgctcggccagctcaagaagctcgtcgccggcggcaagctcaccaaggtgaagaactcct

SEQ ID NO: 76610 - DNA, 416 bp, Zea mays
gcactccaaggtctgcggcacgcgcgagtaccgctgcgactgcggcacgctcttctcgcggagggatagcttcatcacccacagggctttctgcgacgccctcgcgcaggagagcgcccggctgccgcccccaggcctcaccgccagccacctctacggcgccaccaacgcggccaacatggggctcagcctctcgcaggtcggttctcacctcgcatccacactcggtgcggacgctcacggccaccatcaggacctcctccggctcggtggcagcaacgccgcgagccgctttgagcatcttctggggccgtccaatgcctccgcgttccgccccctgccgcctccaccatcgtcggcattcctcatgggcgctccgcaggagtttggcgcaggcgacggcagccggtcccacg

SEQ ID NO: 76611 - DNA, 385 bp, Zea mays
aggacgcttgggctggaacgagcagaggaagactaggtccttctatgacatgcttgacaagggccagatcagcgttgtcgtcgaggagtaaagagttcttcccagttattttcaaagaactctctcgagagcatgacaaagtgattgcgtgctgtggagatttgtcctggaaataagcacaacgatttgggaacaccagattttgtcgaattttcctttccttttgatgaatatttgagcacgtccatgtcaataccattcttgtggatggcagcaaccgcaaagatctgtagtggagccctgagctgggctcgttgcaaaatatgccagcctctcatcttcaaacagaaggggcggcgactcagaaggatcaacacttattttc

SEQ ID NO: 76612 - DNA, 241 bp, Zea mays
agccattgctccgctccgtccatcgatcgaaacgtggtcttgaattaactatgatctctatgagcctggagatggatcaacccgtcgtgcgttgtttcattttgtgatgaatgggagagagggtatgggacaagattgatcaacccgtcgtgcttacgtctcgttaattaggagagctaccgctcggatttggtgatttgtaatatatgaaccattgatgaataaatgcattcacttgtac

SEQ ID NO: 76613 - DNA, 412 bp, Zea mays
accacgcgtccggtctagcctcctcaagtcctccttcgcgggctcccggctcccggccggcaacccggacaaaacggggttcctccttggtggcaacgggcccccccggccccggcccggggccaacctgcccttcaagttcaagttcttcttcaaaccggccttacaacttgacttccttcgggttaaccccattcaaggattcaaccttttccggcaaaatgaccgttcgctacatgacggatatgttcactataccagacacggacttcgacatcgtgggcgccggctccgcggggctgtcgtgcgcgtacaatctctccagggaccccgctgtgcacatcgccatcgtggcacactctgtgtcgccgggcggcggcgcgtggctgggcgggcagctgttctcggccat

SEQ ID NO: 76614 - DNA, 415 bp, Zea mays
acccgatacgcctgccgacgacaaggccgaggaggttagcgccgcgcctagtggctccgcggaggcgcctatggcagagctggtgccgtcagaggcgtcatcatccccagatgatggcggcctggatgagattctaagcaagttgaacattgaagtgtctccaactttaatcctcactggatttggtgcttttattgctttatggatcctatcttctgttgttgctgcagttgattcagtccccctgctcccaaaattgctggaattaataggaactgcttacacaatttggttcatcgcacggtatctccttttcaaggaaagcagagatgacctgtttgcaaagttcgaagatctcaaacagaggattatttgatctatcgtcgaccttttgccacgtgtttaggctttacag

SEQ ID NO: 76615 - DNA, 426 bp, Zea mays
ctcgcgggtcgacgcacgcctctacacagacgttctggtaagcgagagcagcacacacgcagctagctaggagcagcagcagagcagcggcgatggcggcctccatgatctcctcgtcagctctggcggtggcgcctcagggcctgccgcccctcggccgccgcgcctcctccttcgccgtcgtctgctccaagaagaagatcaagaccgacaagccctacgggattgggggtggcctgaccgtcgacgtcgacgccaacgggagaaagggcaagggcaagggcgtgtaccagttcgtcgacaagtacggcgcgaacgtcgacggatacagcccaatctacaacgaggatgactggtctcccaccggcgacgtctacgtcggtggaaccactgggcttctgatctgggccgtcaccctcgctggga

SEQ ID NO: 76616 - DNA, 428 bp, Zea mays
aggacgcgtgggtggtgcgcaagccggcgcacctgttcctggacgagctgggcgtggcgtacgacgaggccgaggactacgtggtcatcaagcacgccgcgctcttcacgtccacggtcatgagcctgctcctggcgcgccccaacgtcaagctgttcaacgccgtggccgtggaggacctcatcgtcaggggagggcgcgtcggcggcgtcgtcaccaactgggcgctcgtgtccatgaaccacgacacgcagtcctgcatggaccccaacgtcatggaggccaaggtcgtggtcagctcctgcggccacgacgggcccttcggcgccaccggcgtcaagaggctccaggacatcggcatgatcagcgccgtgccggggatgaaggcgctcgacatgaacaccgccgaggacgagatcgtgcgcctc

SEQ ID NO: 76617 - DNA, 389 bp, Zea mays
acacactcgggtaaagctatctcgagctagctagctgctgtaagccgttgccatggccaaaatggtattgctctgcgtgctcgtctccttcctcctgatgcccttggcctccctagccctgacgcaggacttctgcgtcgccgacctgacctgcagcgacacgccggctgggtacccgtgcaagtccagcgtcaccgccaacgacttctacttccacggcctggccggccagggcaaaataaacccactcatcaaggccgccgtcaccccggccttcgtgggccagttcccgggcgtcaacgggcttggcatctctgccggcaggctcgacatcgaggtgggcggcgtcgtgccgctgcacacccacccggcgggctcagagctcctct

SEQ ID NO: 76618 - DNA, 406 bp, Zea mays
acccacacgtctgcgtgacgcgtgggcctcgccgcctccacccgcaccacaccaccggcgatgtccacagcggcggcgcagggcggcagcgacaagccggcgctccggaggcccgtcttcaccaaggtcgaccagctcaggccgggcaccaacgggcacaccctcaccgtcaaggtcgtcagcgccacccccgtgcctgggcgcgcgcgcccaggcgcacccgccgccgccccatcccgcgcgccgcgcatcgccgagtgcctcgtcggggacgagaccggcgccatcgtcttcaccgcccgcaacgaccaagttgacttgctgaagcccaatgcgacagtgatcttgcgcaatgccaaaatagacatgttcaaaggatcaatgaggcttgcagtggacaagtggg

SEQ ID NO: 76619 - DNA, 410 bp, Zea mays
cctcagtcctggctgagttacagaggcggatactaaaagccgaggccacagtacgtgaaaaggatgaagagaacgagatgcttcatcagcggcttcagcaatatgaaaaccgctggttagagtacgagcagaaaatgaaagctatggaggaaatgtggcagaagcaaatgcgttcgctgcaatcgagcctttccgtagcaaagaagagccttgttttggatgaaacgcctaggatgtcagactcatcagtggatcagagctgggaaagcaatgggaaccaccatgtcagcagcggttctcagctggtgccacacactggtggacgtgaaatgaatgctggcctcagcgtcatcagccgcttggcagaagaattcgagcagcggagccaggttttcgctgatgacccaagt

SEQ ID NO: 76620 - DNA, 417 bp, Zea mays
  unsure (1)..(417): unsure at all n locations
cccacgcgtccgcccacgcgtccggcttggtatatcgtaccctgaattgacagagatgcaagcccgggccatttttgaagctgctatagcaatgaccaaccagggtgttcaagtgttcccagagataatggttcctcttgttggaacaccacaggaactggggcatcaagtgactcttatccgccaagttgctgagaaagtgttcgccaatgtgggcaagactatcgggtacaaagttggaacaatgattgagatccccagggcagctctggtggctgatgagatagcggagcaggctgaattcttctccttcggaacgaacgacctgacgcagatgacctttgggtacagcagggatgatgtggggaagttcattcncgtctatcttgctcagggcatcctccaaacatgaccctt

SEQ ID NO: 76621 - DNA, 419 bp, Zea mays
gccgagatcacgccagtagagatgagggccacgtcgtcccccgtggctgccgccgtcctcgccgccccttcctccgccgccgccgtagtcgtaaagcctctgcctcgtggcgcagcgaatggcggcagcacgggcaggcgcgacgtgcttgccgggaccgggctgggcgcggcgctgctgctggcgctggggcccgtgtgcggcgcggcgcgtgcggcggacgaggaatacgtgagcgagacgaaggaggtgatcgggaaggtgcggtcgacgatcaacctggacaagtcggacccgagcgtggcggacgcggtggcggagctccgggagctgtccaactcgtgggtggccaagtaccggcgggagaagtcgctgctggggcggccgtcgttccgggagatgtactcggcgctcaacgc

SEQ ID NO: 76622 - DNA, 417 bp, Zea mays
gcggaaatagcagcagaggcagcgacacgatcgcgagcgcacgcacgtaagcacgttgtcggaagctcaagttagaagaagcaccagtgcctgatcgatggcggcccaggctctcctctccggccggcagctgctgggccgccccgtgcagtcggccgtctctaggtcgtcggcgaggaaggcgcccttcgtcgtcagggccagctccagccctccagccaagcaaggtgccgacaggcagctgtggttcgcgtccaagcagtccctctcctacctcgatggcacgctgcccggcgactatggcttcgacccgctgggcctcttcggaccggagggcaccgggggcttcatcgagcccaagtggctggcctacggcgaggtgatcaacgccgctaagccatgctgggcgcggtgggc

SEQ ID NO: 76623 - DNA, 425 bp, Zea mays
gtcgtcgcaacactctatactgacgtctattacgcgtccggccagaagctggaggagatgtttgacatccagggggagctgggttccacactaaagaaatggcgggtcattttcactgatgatgaggatgacatgatgcttgttggagatgatccttgggatgagttttgcaggatggtgaaaaggatttacatttacacatacgaggaggcaaagaagctgacatccaagtcaaagttaccggttagcagtgacagcagcaagctgagcgctgcgaactcactgtctgaatgactatgaacaaaaactgcagagtgctaacgtccctctaattttgttatttccatcatttgattatgggggtgaatgctcacggttgctccgtgggctgaagttgtggttggcattcaactgccttgagtttt

SEQ ID NO: 76624 - DNA, 420 bp, Zea mays
gaatctagaagtgaaaagactacataacgagcgcaaagaagcattgtccgcacagttcgctgcagaggcaacacttagaaggatccactcttctaaaaaagatgaggaatcagttccattcgacgccatcatagcgcccttggagtcagacataagaaaatacagacatgagattgcagtgctacaagatgacaagaaggcactagaacgacatctaaagttgaaggaggtggcgcttgttcaagcaggcaacattttgcacaccgcgcttgaaagggcactcatagtagaggatgttcagaatcagaacattgaattgaagaagcatatggagatataccatgaagagaataaattgttagagaaggctaacagacagaaggtgctagaggttgagaagctcacacaaacaattaatga

SEQ ID NO: 76625 - DNA, 431 bp, Zea mays
gaagcagattggttctacacgcccgtatacacgacatgcgatctcacccccaagggtcttcccttgcctttcaagtctcctcgaatgatgcgcagcgcgatccagctgattgctacgaattggccttactggaatagatcagagggcgctgatcatttctttgtcacgccccatgactttggtgcttgctttcattatcaggaagaaaaagcaatcggacggggaatccttcccttgcttcagcgtgctacgctggttcagaccttcggacagaagaaccatgtctgcctgaaggatgggtccatcaccatcccaccatacgcgcctcctcagaagatgcagactcaccttatccctgcagacacccctcgatccatcttcgtgtacttccgaggtctgttctatgacaccggcaatgaccccgagggtgg

SEQ ID NO: 76626 - DNA, 426 bp, Zea mays
ccccacgtacctggtggtggagcaggacaagacgctggccacctacgggatcaacgccgtgtgcacccacctcggctgcgtcgtgccgtggaacggcgccgagaacaagttcatctgcccctgccatggatcccagtacaacaaccagggcaaggtggtccgcggaccggcgcctttgtcgctggctctggttcacgccgacgtcgacgacggcaaggtcctcttcgtcccgtgggtggagaccgacttcaggaccggccaggacccgtggtggagtgcatgaggaggatcatccgacacaagcggtgctcagtgctcataggctttctccgagggcgttgttgctacaaattcacttgcctcttgcctccaaattatatatattacacacactgcatgaaacaagaacacagctgtttgtcatct

SEQ ID NO: 76627 - DNA, 418 bp, Zea mays
  unsure (1)..(418): unsure at all n locations
cccacgcgtccgcgctgccgtcgctccacacgccgccgtcaggacgaaggcggctgtctccgtcctccgcgcgctgcgcgccgaggcggccaccctccccgtgctctcattcaccggagagaaggtcggggaggtaaccctcgacctcaaatccgcgccaccctccaccgcgcgcgctgtcgtgcaccgcgctatcatcaccgaccgccagaacgcgcgccgaggcacggcctccacgctcacccgcggcgaggtcagaggcggagggaggaagccctatcagcagaagaagacggggaaggcgcggcgggggtcgcagcgtaccccgcttcgtcccggcggtggcgtcgtgttcggccccaagccccgcgactggtccatcaagatcaaccgcnaagagaagcgccttgccatctcc

SEQ ID NO: 76628 - DNA, 416 bp, Zea mays
ctctccttccgctcgaagagaagagaaaaaagaacggtccgtgctcggctgccgtgaatctctctcacctccccgaagcaagcgagcggggcagcgcgccaggaaggatcggaggagacgccatcaatcagcacttgcacgcgcgcggtcggccgcaggtggaggaagaagatgggcctgtgctcgtgctgctgccggtgcctggagctgctgtgctcggtcctcctcccgcccctcggcgtctgcctccgccacggctgctgctccatggagttctggatcagtgtgctgctcaccatcctcggctacctccccggcgtcctctacgccgtgtacgtcatctgctccgtcgacccccaccgccaccgcgacaacgacgactacgtctacgtagcatgacaagatggaccggtccc

SEQ ID NO: 76629 - DNA, 396 bp, Zea mays
cggacgcgtgggcggacgcgtgggggcggcgaggcggcggcgatcaaggaggaggacgcgcgcggggcgctgcggctgaagctcgtcgcggtggcgtccatcctggcgtcgggcgcggcgggggtgctggtcccgctgctgggccgctccgcctcggcgctgcgccccgacggggacgtcttcttcgccgtcaaggcgttcgccgcgggggtcatcctcgccaccggcatggtgcacatcctgcccgcggccttcgacgcgctcgcgcccccctgcggcggcggcgccagggccggcgggttcccctacgcgggactcgtcgccatgtgctctgccatggccaccatgatggtcgactccgccgccgcgggctactaccagcgcgcgcacatccgc

SEQ ID NO: 76630 - DNA, 424 bp, Zea mays
  unsure (1)..(424): unsure at all n locations
ggagagtgtagcgagcggcgttcagctcaccgggggctgctgggtgagtgagggagctagcgtcgtcgtgagagcgctccacgatgattacggggacggacttctaccacgtcatgacggccgtggtgccgctgtacgtggcgatgatcctggcctacgggtcggtgcggtggtggcgcatcttctcgccggaccagtgctccgggatcaaccgcttcgtggcgctcttcgcggtgccgttgctgtccttccacttcatctccaccaacaacccctacaccatgaacctgcgcttcatcgccgccgacacgctgcagaagctcatggtgctggccatgctcaccgcgtggagccacctcagccgccggggcagcctggagtggaccatcacgctcttctccctctccacgctgcncaacacgct

SEQ ID NO: 76631 - DNA, 430 bp, Zea mays
ctcgcccatgagcgagttccaagtgacctgaagaaaaatctcatgcaagcaaggctcgataagaagttgacccaggcacagcttgctcagatgatcaatgagaagccacaggtgatccaggagtatgagtcaggcaaggcaattcccaaccagcagatcattggcaagctcgagagggccctgggaacgaagctgcgtggcaagaaataaccaggagcatcatagcgaagacaaggcaaactgtctgcttattatttgctatgtttggtatctcaagtcatgcggactgtttgtgttggtacaagagtgaattaactgtgttctcctgaatgcttgctgcttgtcatatgagtatatgatctagctctaaaaaaattgtgatgaagatgtcaactgatatgacaacctcataaccagcgtgatcaagatg

SEQ ID NO: 76632 - DNA, 408 bp, Zea mays
acagaccagaccataccagaccagaccagaccaatggccctgcgcctaccaatctcatcgtcccacgggctggcctccacgccggcgccaatctccacgacgacgtgccggccggccgtcttggcgacggccgcggcccagaagaggagcctgctgctggcgacggcctccgagacgaggggagtcgcgccggtgaggtccagcgggatcgagacgagcacggtgggtctgggatgtgaggccgtcaccgggcaggtcacggaggtcaacaaggacaccttctggcccatcgtcgaggccgccggcgacaaggtcgtcgtcctcgacatgtacaccgaatggtgcgggccttgcaaagtgatggctccgaaattccaggagatgtctgagaagaacctggatgtggtg

SEQ ID NO: 76633 - DNA, 430 bp, Zea mays
cagccactactaggaattgccgagcgagcgagcttgcgccgtgcgcgatggagggtgacgagaagtcggcgggcggggcccctgcttactggggcctgggcgcgcggccctgcgacgcgtgcggcgccgaggcggcgcgcctctactgccgcgcggacgcggcgttcctgtgtgccgggtgcgatgcgcgggcgcacggcgccgggtcgcgccacgcgcgggtctggctctgcgaggtctgcgagcacgcgccggcggcggtcacgtgccgcgcggacgctgccgcgctctgcgcctcctgcgacgccgacatccactcggcgaacccgctcgcgcgccgccacgagcgcctccacgtggcacccttcttcggcgcgctggccgacgcgcccaagcccttcgcctcggcggcgccgcccaaagcaaccga

SEQ ID NO: 76634 - DNA, 418 bp, Zea mays
gccacgacgggcccttcggcgccaccggcgtcaagaggctccaggacatcggcatgatcagcgccgtgcccgggatgaaggcgctcgacatgaacgccgccgaggacgagatcgtgcgcctcacgcgcgaggtcgtgcccggcatgatcgtcaccgggatggaggtcgcagagatcgacggcgccccgaggatgggcccgacgttcggcgccatgatgatctccggccagaaggcggcgcacctggcgctgaaggcactgggcaggcccaacgccgtggacgggaccatcccagaggtgtcgccggcgctgcgcgaggagttcgtgattgcgtccaaggacgacgaggtcgtggacgcctgagcgagcatccacgcgccagcatgcaagcagcgtcttatctgggccggcgccatcac

SEQ ID NO: 76635 - DNA, 409 bp, Zea mays
cccacgcgtccgggcagccgaagcgactgtcgcgaggcaaggccatcgtccgccatgacgctctccctctccacctctttcctccccatccccgccgccgcgaggaccaccgcccgcaccctacgctccgtcgtcccctcccaggggatgcgctgctcgatgcgcaagaaggggttgcacccggagatctacgaggacgcgaaggtgtactgcaacggcgagctggtgctggtgacggggggcaccaagccggagtacacggtggacgtgtggtccggaaaccacccctactatgtcggcgacacctcggcgctcgtggtcatggacagccagatcgagaagttccgcaagaagtggggccacatcaaggagtactggcccgaggaccagtggagggagatgcaccaga

SEQ ID NO: 76636 - DNA, 399 bp, Zea mays
cgccgccgccgcgccttccattccagtactcgcggaggaaaggaacaccagccagcgccatggtcacgtcgacgaccgccgccgccgtgctgtccccgccgtccgtggccgggcttcgcctggcgccgtctccccgggcgcgcgtggcgttccgcgcggcgcgggcgcggcggtccgtggcggcgcgcgcggagctgagcccgtcgctggcgatcagcctgagcacgggcgtgtcgctcttcctgggccgcttcgtcttcttcaacttccagcgggagaacgtggcgaagcaggtgcccgagcagaacggcaagacgcacttcgacgccggcgacgagcgcgccaaggagttctccggcctgctcaagtccaacgaccccgtgggcttcaacctcgtcg

SEQ ID NO: 76637 - DNA, 440 bp, Zea mays
gggtcgacgcacgactctagagagactcatgttactggcacacttcgtcggcgacgtccaccagccgctgcacgtaggcttcgaagatgacgagggcggtaacaccatcaccgtccactggtaccggaggaaagcaaacctccatcacgtgtgggatgtcagcattattgatacggcaatcaaggacttctacaacaagagcatggataccatggtagaggctctcaagatgaatcttaccgatggatggtctgacgacatcgtccactgggaaaattgcaagaacaaacacgcgacctgcgcgaacgactacgcaattgagagcatccattattcctgcaactacgcctacaaagatgtggagcaagacatcactctaggagatgattattttttcagtaggtacccgattgtggagaagaggttagcgcaggctggaa

SEQ ID NO: 76638 - DNA, 430 bp, Zea mays
cggacgcgtgggcagccattacccgcagctagcaaacaaatggccaccgtcctgagcagcccccgcgcgccggccttctccttctccctccgcgccgcgccagcgcccactaccgtggccatgacccgtggcggtggcgccagcagcaggctgcgcgcgcaggccacctacaacgtgaagctcatcacgccggagggggaggtggagctgcaggtgcccgacgacgtctacatcctggactacgccgaggaggaaggcatcgacctgccctactcctgccgcgcggggtcctgctcctcctgcgccggcaaggtcgtctccggctccctcgaccagtccgaccagagcttcctcgacgacagccaggtcgccgacggctgggtgctcacctgcgttgcgtacccacctccgacgtcgtcatcgagacgca

SEQ ID NO: 76639 - DNA, 424 bp, Zea mays
ggaaaatctctcgtggaagaggataaacttgagctcgcaacttctcttattgagaaggcgaaggcaaagggggtttctcttttgcttcccactgatattgtagtagcggacaagtttgcagctgatgctgagagcaagattgtccctgccactgctatccctgatgactggatgggtcttgatgttggccctgatgccaccaaaacattcaacgaagcattggacaccaccaagactgttatttggaacggccccatgggagtgtttgagttcgagaagtttgcagctggcactgaggcgattgccaagaagctagctgagcttacaaccacgaagggtgtcactaccatcatcggcggcggcgactctgttgctgctgtcgagaaggctgggctggccgacaagatgagccacatttcgaccg

SEQ ID NO: 76640 - DNA, 407 bp, Zea mays
cccacgcgtccgcggacgcgtgggttttttttttttttgcatgaacggatataattgacgttggtttcagtaggaataataataaggccggccggccggccggtgatgacagtgacagggatatccgatcgatccacggaaagagaagaagagaagaaactacatgactgtgcacgcgtctacgttgtcgtcgttgaacatgttcatgtacttgagctccggcgcgccggggtccgccatggcctgcggcgcgctgcggacgaatcccgcgggcgccttcttgtcgtaggcgccgccgacgtaggggtaggtggtgagcgcgtatggcacgtagggccacatctcggcgttcttgccggtggccttgacgcgctccagcaccttggcgggctccacgttgccggtca

SEQ ID NO: 76641 - DNA, 421 bp, Zea mays
cagcgactcagcgagcgagagcagcacacacgcagctagctaggagcagcagcagagcagcggcgatggcggcctccatgatctcctcgtcagctctggcggtggcgcctcagggcctgccgcccctcggccgccgcgcctcctccttcgccgtcgtctgctccaagaagaagatcaagaccgacaagccctacgggattgggggtggcctgaccgtcgacgtcgacgccaacgggagaaagggcaagggcaagggcgtgtaccagttcgtcgacaagtacggcgcgaacgtcgacggatacagcccaatctacaacgaggatgactggtctcccaccggcgacgtctacgtcggtggaaccactgggcttctgatctgggccgtcaccctcgctgggatcctcggcggcggcgccctcct

SEQ ID NO: 76642 - DNA, 411 bp, Zea mays
  unsure (1)..(411): unsure at all n locations
gactacgtgtgggtgcagttctacaacaacccgccgtgccagtacagcgcgagcgccggcgtgggcagcctggcgaaagcgtgggcgcagtggacgtccatcagggcggggcgggtgttcctcggcctccccgccgcgccccaggccgctggcagcgggttcgtgccggcgagcgacctcgtggcgcaggtgctgccggtggtcaagaactccaccaagtacgggggcatcatgctctggtccaggtactacgacgggctcacggggtacagcgacgcggtcaagtcctacgtgtgagctagccagcctcgtgtcatgtcgggcgtgcaggagggagtangactgtangaggcacatgcttccatgtgcgtgcacgtgccgggcgttatcatacctatgggtatactgggt

SEQ ID NO: 76643 - DNA, 431 bp, Zea mays
ctcattccactccgacattcacgtgcagctgtcgggagcaggcaatggcgccggatctaagcgaactcgccgccgccgctccagcccgtggcgcctacctcgccggcgtcggtgtcgcggtcctcctcgctgcctccttcctcccagtagccgagtcgtcctgcgtgcgagataactcattggtgagagacataagccaaatgccgcaaagcagctatgggattgaaggattgtcacatataacagttgctggtgcgctcaatcatgggatgaaggaggtggaagtgtggcttcagacaataagtccaggtcaaaggacgccaatccacaggcattcctgtgaagaagttttcactgtcctcaaagggaagggtacgctcttgatgggatcaagctcactaaagtacccagggcagccacaggaaattcct

SEQ ID NO: 76644 - DNA, 418 bp, Zea mays
cccacgcgtccgcccacgcgtccgcccacgcgtccgagcgcttatagcttgtcagccatggccaccgccgccgcgtctagcctcctcaagtcctccttcgcgggctcccggctcccggccgccacgcggaccacaccggcgtccctcgtggtggccaccggcccgcgcggcgccggcgcggggcccatctgcgcgtccatgtccatgtcctcctccaacccgccctacgacctgacgtccttccggttcagccccatcaaggagtccatcgtgtcccgcgagatgacccgtcgctacatgacggacatgatcacctacgccgacaccgacgtcgtcatcgtgggcgccggctccgcggggctgtcctgcgcgtacgagctctccaaggaccccgccgtgagcatcgccatcgtggagc

SEQ ID NO: 76645 - DNA, 382 bp, Zea mays
aggatgttttgtttgccaaggatatatcactcgtcaagaagttctatatgctctatagcttcttctttgtgaggagagttgtagcgccgacggctgcctgtattctctacaatgtcatcatccccatctcagtcacaatcccggagctttacctaccagtgtggggtgttgcctatattcccatggtgcttaccgtggtcacagctataagacatccaaaaaatctacacatactgccattttggattttgtttgagagtgtgatgacattgcatcggatgagggctgcgatgactggactgctggagctagaaggattcaaccagtggattgtgacaaagaaggtggggaatgatctcgaggacactgaagttcctttgct

SEQ ID NO: 76646 - DNA, 411 bp, Zea mays
cgctgcttcatcacctagccgtcgccacccatcgcctacagcgacagccgtcttccgtcacagcggagcgcccctcagatccaagggacgctgcacgagcgcaagagcaggttgttgagaaggggaatataatcatggatatcatgcagactagtgactcttcacatcatggaattgtagaaaatagcccgtacagaattccatatgacagacatgcagaaggtggtcaacttggtgcttcatggtattttagtagaaaagaaatagaggagaattccctttcgaggagagacggcattgatctgaagaaagagtcttatcttcgcaagtcatattgcacatttctgcaggatttggggatgagacttaaagtacctcaagtgacaattgctactgctatagtggtctgtc

SEQ ID NO: 76647 - DNA, 416 bp, Zea mays
gtgtctctgattttggccttgcaaggctgcttgtagacaatgccgccgcccatgttaccactgttgtggcgggcacctttggatacctagcaccagagtacttgcaaaatgggcatgctactgagaaatcagatgtgtatagctttggagtgcttttgctggagctagtgacgggaaagaggccaaccgattcatgcttcatcaagaagggactgagcattgttggctggctgaacaccctgacgggggagcaccggctggaggatatcgtcgacgagcgatgcggcgacgtcgaggtggaagccgtggaagccatcctggacatcgcagcgatgtgcaccgacgcagacccggcgcagcggccgtccatgagcgctgtcctcaagatgctggaggaagagatcctgtccccctgc

SEQ ID NO: 76648 - DNA, 410 bp, Zea mays
gaaacaccgccgccgccgcgccttccattccagtactcgcggaggaaaggaacaccagccagcgccatggtcacgtcgacgaccgccgccgccgtgctgtccccgccgtccgtggccgggcttcgcctggcgccgtctccccgggcgcgcgtggcgttccgcgcggcgcgggcgcggcggtccgtggcggcgcgcgcggagctgagcccgtcgctggtgatcagcctgagcacgggcgtgtcgctcttcctgggccgcttcgtcttcttcaacttccagcgggagaacgtggcgaagcaggtgcccgagcagaacggcaagacgcacttcgacgccggcgacgagcgcgccaaggagttctcgggcctgctcaagtccaacgaccccgtgggcttcaacctcctcgacgt

SEQ ID NO: 76649 - DNA, 428 bp, Zea mays
ccgacgaccagtcggcactgatttacctcttgctctcgcaaaaggacaagtggatggacaaggtgttcattgagaattcctactacttgcatggcttctgggctgggttggtggataagtatgaggagatgatggagaatcaccacccaggcctcggcgacgagcggtggcctttcgtgactcactttgttgggtgcaagccatgtgggagctatggggattacccagtggagcgctgcctcaggagcatggagcgagcgtttaattttgccgacaaccaggtgcttcggctatatggtttctcacacaaggggctggaaagccccaagatcaagagattcagggatcagacaactagaccaattaatgatgtggagaacttagatatgaaggccaaaatatctacaatttcctgaaagttcagatga

SEQ ID NO: 76650 - DNA, 397 bp, Zea mays
cccacgcgtccgcggacgcgtgggtgccggtcaaagtgccataaaaacttcaagatgaagaggaaccctcgtaaggttaagtggacaaaagcatacaggcatttgcatggcaaggacatgacccaggatacaacctttgagtttgagaggaagaggaacaggcccgagcgctacgaccgcaatttgacggagcagaccctgaaggctatcccgcttattacaaagattaggcatgatcgtatggaaaaacacatctcaaacagacataaacctggtaaacgcaaggagatggaaaaggattccaaggagctggagcaggacatcgccatgctcccgaagaagcttattagcaaccatcttgcggctgagaaaacgaaggtcaaggttgaagttgttc

SEQ ID NO: 76651 - DNA, 380 bp, Zea mays
tagtagaggcaagcaaaagggcagggatagagcgccgccgagatatctagctagaagagcctagaagccggtgtagaggatcaggaggatgtctgggtcgtccggctccggcgtgtgggtgttcaagaacggcgtgatgcagctggagcagccggccgcggcggcgagccggaaggcgctggtgtacgtgccgacgaacgaggtggtgcggtcggtggaggcgctggagcggcggctgggcacgctgggctgggagcgctactacgagaaccgcagcatcgtgcagctccacaagcgcgacggcggcgccgacctcatcaccatcccgcgcgacttcgcaagcctccgctccacccacatgtacgacgtcgtcgtcaaga

SEQ ID NO: 76652 - DNA, 289 bp, Zea mays
cagcgacactgtccagtgcgcgcgtcaagcttgcttagctagccgccatggcctccctcgccgccgtctccgtgaagcccgtggccatcaagggtctcgccggcagctccatctccggaaggaagctcgccgtcgccaggccgtcggcccgctccatccgcaggccccgcgcagccgccgtggtggtcaagtacggcgacaagagcgtctactttgaactcgacgacatcggcaaacaccaccggacagtgggacctctactgttctgaagcgccttcgccctaaaacc

SEQ ID NO: 76653 - DNA, 390 bp, Zea mays
cagtcactcacacactcactatacactgctctgctgcagcaagaaggaagaagctagcgcctccctagctctcgttgtcagcaatggccaccaccgccgcgtccagcctcctcaagtcgtccttcgcgggctcccggctcccttcggccacgcgcaccaccaccccgtcgtccgtggccgtggccaccccgcgcgccggcggcggccccatccgcgcgtccatctcctcctcccccaccaccggcgtcaagaggctccaggacatcggcatgatcagcgccgtgcccgggatgaaggcgctcgacatgaacgccgccgaggacgagatcgtgcgcctcacgcgcgaggtcgtgcccggcatgatcgtcaccgggatggaggtcgcagaga

SEQ ID NO: 76654 - DNA, 423 bp, Zea mays
cacgtccaccgtgatgagccggctcctggcgcggcccaacgtgaagctgttcaacgccgtggcggtggaggacctgatcgtgcggcgggggcgcgtcggcggcgtggtcaccaactgggcgctcgtgtccatgaaccacgacacgcagtcgtgcatggaccccaacgtcatggaggccaaggtggtggtcagctcctgcggccacgacgggcccttcggcgccaccggcgtcaagaggctccaggacatcggcatgatcagcgccgtgcccgggatgaaggcgctcgacatgaacgccgccgaggacgagatcgtgcgcctcacgcgcgaggtcgtgcctggcatgatcgtcaccgggatggaggtcgcagagatcgacggcgccccgaggatgggcccgacgttcggcgccatgatgatctc

SEQ ID NO: 76655 - DNA, 422 bp, Zea mays
gtccgtggtggacctggtgatcaacaccgtgaagactggcatcacggccgacgacgtgaacgcggcgttccgcaaggccgccgccggcccgctgcagggcatcctggatgtctgcgacgtgccgctcgtgtccgtcgacttcaggtgctccgacgtgtcctgcaccatcgacgcgtcgctcagcatggtcatgggcgacgacatggtcaaggtcgtcgcctggtacgacaacgagtgggggtacagccaacgcgtggttgatctggcgcacctggtggcggccaagtggcccggcgccgcggcggccggcagcggcgaccctctggaggacttctgcaaggacaaccccgagaccgacgagtgcaaggtgtacgaagcatgatgccagggttctttccacgacgaaacgtacagcacgggcg

SEQ ID NO: 76656 - DNA, 436 bp, Zea mays
gtaaggttcacgggtcgacgacgcgtccggcagcacacagccccatcccaatcctagtcgatcttcttcccctcctcaaggaagaaaagaagctgaaccatggggaagagaaagtcagctgctaagccacctcctaagaagcggatggacaagcttgacactgtcttttcctgcccattctgcaaccacgggagtagtgttgagtgccgaattgacatgaagaatctgattggcgaagcatcttgtagaatctgtcaggaaaacttcagcacaactgttaatgcactcactgagcctattgatatatatagtgaatggattgatgagtgtgagcgtgtcaacactgttgaaggcgacgatgatgcgtgagcttgccccatgcgatgaaactgttacctacaatcgtaatgtaatgtgctggtattctcgaatgcca

SEQ ID NO: 76657 - DNA, 416 bp, Zea mays
cccacgcgtccgcaaagacaacatctactgagcatgtgcagcctccaggacaaccagctgccaagagaagaaaaaggagcagagcctcaaacaaaaattcgacagatgagttctcacaaattcgtaaacgggttagatacattttgaaccgaatgaattatgagcaaagcctaattgaagcttatgctagtgaaggctggaaaaatcaaagtttggataagataagacctgagaaggagcttgaacgagccaaatcagaaatcttacgatgcaaattgagaatacgggaagtcttccaaaatattgattctcttctatccaaggggaaaattgacgaatctttatttgattctgaaggagaaatatcttgtgaagatatcttttgtgctacttgtggttcgaaaaatgctacattg

SEQ ID NO: 76658 - DNA, 404 bp, Zea mays
tgaatcatccaggagctcgagggcaccaatcatggccggcgtgaactccagcgtcgtcgggctcaagcccgccgcggcagtgccgcaggccgccgccgcctcatcgccggcgaagcgggtgcagctggccgcgcccgaaggccgccgcgccgctctgctcggcctggcggccgtcttcgccgtcacggccaccatcgggtcggccaaggccacgatcttcgatgagtacctcgagaagagcaaggccaacaaggagctgaacgacaagaagaggctggccaccagtggcgccaactttgcgcgcgcctacaccgtggagttcggcagctgccagttcccctacaacttcactgggttgcaggacctcgccaagcagaagaaagtcccttcatcagcgaacgact

SEQ ID NO: 76659 - DNA, 430 bp, Zea mays
  unsure (1)..(430): unsure at all n locations
aaagcgtgtacatagatcccagcaacgtcgacgactacctggtcggctccatcacggcgccggcggcggaccccaacgccggcgaggtgtactacaggctgatgtcgcggttcatgtcgaaccagagccggtacacgctggaccggctgctggggaagatgtcgtgcccgctgctgctgctgtggggggacctggacccgtgggtcggcccggccaaggccgcgcggatccaggagttctacgccgacaccgccgtcgtgcacctgcaggccggccattgcccgcacgacgaggcgccggagcaggccaaccgcgcgctgctcgagtggctcgcggccctcgacgcccgcgccaagtcggccgagcccagcctacagaccgtctgatggatcgagcccaaagggcttagcgaatgctantccaagaatac

SEQ ID NO: 76660 - DNA, 436 bp, Zea mays
gcgtccgaatgtatgtcaccaagcgcaacatggcaaatgctgtttcaagcatgactaaacatttggagcaagtgcaaagttctcttgctgctgctaaaaggcatttgacacagcgcattgaaaagttggccgataaattggatcagcaaaaggctctatctggacaaataagaaataatgttactgatgcacgtctgaagcttgagaatattggttcagaaattaggaacatcaaagaattagtttggggtctggatgggaaaattgattcaatggaagctaaacaggacttctcatgtgctggtgtgatgtacctctgccaattcatacagcagaatggtggaaagcctccggatcgcctggaaggctccaaagtgactacaaagcgttttggaggtcaaaagttcttgcagggattgcaactggcaatagaatc

SEQ ID NO: 76661 - DNA, 394 bp, Zea mays
atcctgcggaagaagtttctaacgggctacatcccaccaccgcacgatgtcggcagcggcgcgagtgctgccgaaggcggtgaccttcgtgacgggcaacgccaagaagctggaggaggtccgcgccatcctcgggtcttccgtcccattccagtcgctcaagctcgacctgcctgaactgcaaggggagccagagtacatatccaaagagaaagcacgaatcgctgcatctcaggtgaatgggcctgtactggtggaggacacctgcctatgttttaatgcgctcaaaggcctaccaagaccctacataaagtggtttcttgagaagattgggcatgaaggtttaaataatctgttaaaagcttatgaagataaatcagcgtttgctatgtgc

SEQ ID NO: 76662 - DNA, 412 bp, Zea mays
  unsure (1)..(412): unsure at all n locations
gggcagcataaattcacgcacttcagaaggctcatgccagggaagtccagcaaaccaaacatttgtttgtaagccaatcgcttcaatgttcgcagaacctcaacttaatcaagaggagttcaacaaagaaccttttcaagaaccacaactaccactttcaaggatgctgattgaagattctggtagctccaaagatttgaagaatctcttcacttcaacatcggaccaaccatttttggcccctcccaacaacttggtgtcaatgaagcattcagggactgtaacgataaaggcgagttttaaggaagatattgtgaggttccgtttcccatgctcaggtggtgttattgtattgaaagaggaggtancgaagaggctaaggatggatgttggcacgttcgatatcaagtat

SEQ ID NO: 76663 - DNA, 415 bp, Zea mays
cactagcaatagaagcatttggaaaggttggctccattgaccaggcagaaaagatatggatccatataaaatcaacaaagaagttaagccttacagaacagtttaattctatgttatcagtttactgcaggcacggtgttgtcgataaagcatcatctgtattcaaggaaatgagagcaaatggatgccagcctaatgctattacttatcgccacttagcattgggttgcttgaaatcaggtcttgttaaagaagctttgaacacaatagatatgggaaagaaggaagtcgtcactaaaaaggtgaggagttcaacaccatggttggagaccacacatctgttgcttgagaactttgcagaaattggagacttggaaaatgcaaagagactgtacagtgaactgaatgaatccaa

SEQ ID NO: 76664 - DNA, 386 bp, Zea mays
atcctccttcccatcaaatctctcctctccatttgcatctcctcctcgtgcgccccgtgcccccatcaaatcgcctcgccccgtgccccctgctcaaaaccctagccctgccgcagccgtcctccatggctgcggatttccgcacccctgaccgcctcctgcccgccgcaactgaggagccgacgaccccgcagggccaccctcccaatccggtgctcagcacccccaccgtccccgacgccacccacgatggcctccgcttctggcagtacatgctcgccggctccgtcgccggcgtcgtcgagcacacggcgatgttccccgtcgacaccctcaagacccacatgcaggccagcacgccgccctgccgcccgacgctatctctg

SEQ ID NO: 76665 - DNA, 409 bp, Zea mays
  unsure (1)..(409): unsure at all n locations
attcttgaagtgagtgaaaggcagacatttgttgggccgcccgagaatgtgagggaccatgtaatggctgccacaagagccctcaacaagggtgatcaccaaaaggctttcagtgtcataaattcgttggagatttggaagcttttgaggaacagagagcatgtccttgagatgttgaagcttaagatcaaggaggaagctcttagaacctatctcttttcatactcgtcttcgtacgagtccttaagccttaaccagctcactaccatgtttgatctcagcgagcagcatgcccacagcattgttagcaagatgatgatgcatgaagagcttcatgctagctgggaccagccaacaaagtgcatcgtattccatagtgtggaccaaactaggcttcangggctactct

SEQ ID NO: 76666 - DNA, 403 bp, Zea mays
  unsure (1)..(403): unsure at all n locations
agtgactggaagtatctctggcctcaagccagggctccatgggttccatgtgcacgcgcttggcgacaccaccaacggctgcatgtcgactgggccacacttcaatcctgttggcaaggagcatggcgcaccggaagatgaggaccgccatgccggtgatcttgggaatgtgacagcgggagaagatggtgttgttaatgtcaatattactgacagccagatacctcttgctggaccccactcgatcattggccgagctgttgttgtccatgctgatccggatgaccttggcaaaggtggacatgagcttagcaagagcaccggaaatgctggcggacgtgttgcctgtggtatcattgggctccaaggctaaagcggttaacctccgaggcanacaccatag

SEQ ID NO: 76667 - DNA, 186 bp, Zea mays
  unsure (1)..(186): unsure at all n locations
ggtcacatcactagcaatgtgtccttcgctgctgttgcagtctcatttgctcacactatcaaagctctggagcccttcttcagcgcancggctactcagtttatccctggacaacaagttcccttccccccgggggtttcccctggccctgggggcaatgggggttccagtggaacccctaaggga

SEQ ID NO: 76668 - DNA, 178 bp, Zea mays
atgggatgtgtcacgtgcctataaataggtgaacagtacccccgtactgcgggggctgacttggcatttgctttagcgtcacgcttgtactttcgccttctttcaagccgaaggtacatttgtaatttgatattatttctaattttctataataataatacagaaacgagttgataat

SEQ ID NO: 76669 - DNA, 383 bp, Zea mays
  unsure (1)..(383): unsure at all n locations
cggacgcgtgggcaatcatcagacatgagaacccaggcgctgttcttcctcgcactcgcacttctcggcgccgtgctcgcgcagtccagcaacaggcaccaccaccactaccaccacgcccatgtccaaggcaaagggcagggagccggaggaggaggaggggagctggcgagccgggcgaaggcggcggcgcgcgcgtggccgtgctgtgacagctgcggcgggtgcaccagatcggagccgccgcggtgccagtgcctggacgcggcgccccgcgggtgccacccggcctgcagggactgcgtcaagtccagcctcagcgccgnaccgccgggtgttacagttgcatggacgcgtccccaactttctgcagcgccgctgca

SEQ ID NO: 76670 - DNA, 418 bp, Zea mays
  unsure (1)..(418): unsure at all n locations
gtagaattcacaagaatgtcaaacttgcggagaaagtanncagacaagtctttaagctggaacctgagaacacagggtactatgttcttcttgccaacatctatgctgaggctgagagatgggaggctgtcaagaagctcaagaacaagattggtggtcgagggctccgtgagaacactggctacagttggatcgaggtcagaggcaaggttcatgtctttattgcacataaccggaatcacccagactggaacaggattgcagagtttctggatgatgttgccagaaggatgcggcaagaaggccatgatcctaaganaaagtatgctctgatgggtgccgatgatgcagtgcatgacgaggcattatgtgggcacagctcaaagctccccgtcccattcggtgtgctgaatttacc

SEQ ID NO: 76671 - DNA, 251 bp, Zea mays
caggctcgccgccagcgccgtagagggtctccaagaacgagatcatccggttcgaggagaccctctacggctcgtccaggctcgccgccagcgccaccgccaccgcccgcgcccttatctgaattactagaatccgggctcgtagatgctggagtacacagtacagggaaattgcccacttttttcatcaacttaagtttttagattaaacttttttgaaacaatcagacaggagatctgtcttatatatt

SEQ ID NO: 76672 - DNA, 410 bp, Zea mays
gtttctgctccaaaaaggatcttctcctgatatcatacattgtcatgactggtcaagtgctcccgttgcttggctatacaaggaacagtatgctcttaatgggatgggaaatggtcggattgtatttaccatccacaatcttgagtttggagcgcatcacattggcaaggcaatggcacattgtgacaaggctacaactgtctctgatacatattcaaaggaagtggctggacacggagctattgcacctcactactataaattccatggaattcgaaatggaattgatcctgacatttgggatccatatactgacagatttattccggttcattatacatcagagaatgttcttgagggcaagagtgctgcaaaaaaggcattgcagcagatgcttggattacaacaaa

SEQ ID NO: 76673 - DNA, 414 bp, Zea mays
agcaagcaagcagcgagtacatacatactaggcagccaggcagccatggcgcccaccgtgatgatggcctcgtcggccaccgccgtcgctccgttccaggggctcaagtccaccgccagcctccccatcgcccgccgctcctccagaagcctcggcaacgtcagcaacggcggaaggatccggtgcatgcaggtgtggccggcctacggcaacaagaagttcgagacgctgtcgtacctgccgccgctgtcgacggacgacctgctgaagcaggtggactacctgctgcgcaacggctggataccctgcctcgagttcagcaaggtcggcttcgtgtaccgcgagaactccacctccccgtgctactacgacggccgctactggaccatgtggaagctgcccatgttcggctgc

SEQ ID NO: 76674 - DNA, 403 bp, Zea mays
atgtatgcatatttcgcagtccgtcctttgagagaagttccagagatacagatgccactagacaccataatcgagatacaaatgggcgtcactggtgtggaagagaagaggtacaaactcatggactgaatgaatacataaaagcagctggttggctgtttcatagagcaagtacacataacatagaagccttttcccttctcactctctctccacacggtgttcattgtaatttctttggaaaaaagacatgttgaacaatgtaaacaaacaactaataacgaactgtacgaatggcatgcttactgtaacgaataacgaatacatactgggggtcaccaatgcgtagtcagaaacatattccgtcaaagaacatagcgaaatgctgcagaagaaacgcccg

SEQ ID NO: 76675 - DNA, 219 bp, Zea mays
aacgtgttcttggattaattaactacgatctctatgagcctggggatggatcaacccgtcgtgcgtggtctcgttttgtgatgagtgggagagagaggatgacaagatcgatcctttgttaatggagatctcgttaattaggagagctaccgctgggacttggtggtttgtaatatatgatccaaccagtgatgaatcaatgcattcacttgtgtacac

SEQ ID NO: 76676 - DNA, 300 bp, Zea mays
gcagagcttccgggtcgtcctggtgaggaagaattcattgagaagcttgttcgtcaccagaggttctctatcgagaaacccaagtatggggatccacatgtgaaggccaatgctctgctgcaagcccatttttcaaggcacacagtggtcggaaatctggcagctgatcagcgcgagattctcctttctgctcataggttgctccaggcaatggttgatgttatatccagcaatggttggcttagtcttgctcttagtacaatggagctgagtcaaatggtgacacaaggcatgtgggat

SEQ ID NO: 76677 - DNA, 425 bp, Zea mays
  unsure (1)..(425): unsure at all n locations
ctccctctcctctgccgccgtcaccgccccttccttcgccgcaccagcgccagcccgcgccgtggtcagaaggaggtccttcaccgtgcgcgcctctctccgcaaggccaccggcaccgccgccgtggcaatggctgccagcgccctgcttgccggcggtgccatggcccaggaggtgctgctgggcgcaggcgacggcgggctcgtcttcgagcccagccagttcaccgtcaaggccggcgacaccatcacattcaagaacaacgccggcttcccgcacaacgtcgtcttcgacgaagacgaggtgccgagcggcgtcgacgccaccaagatctcgcaggangagtaccttaacgcgccaggcgagacctactccgtcaccctcaacgtgccgggaacctacggcttctactgcgagccgcatc

SEQ ID NO: 76678 - DNA, 384 bp, Zea mays
cggacgcgtgggccgcggcgctgctcccttcgttgcagcccgccaggaggcacacgctgcagccgcccgccgcagccgccgagtccgcaggggaggccaagtctgtgggtttcctggagaagtacccggccctggtcaccggcttcttcttcttcatgtggtacttcctcaacgtcatattcaacatcctcaacaagaagatctacaactacttcccatatccatactttgtgtccttgatccatctagtagtgggtgtcgtatactgcctcatcagctggagtgtcggtctccccaagcgagcgcctatcaatggcacgctcctcaagcttctctttccagtcgccctgtgccatggtattggtcacatcactaacaatgtgt

SEQ ID NO: 76679 - DNA, 413 bp, Zea mays
ggatgagcgggacgccaagatccgcggtgagctcggcgatgtcaagggcgcctccgaggaggtgaagcagctggaggaccaggcggcggccatcatgaaggcggcgcgcgccgagatcgcggcggcgcttaacaagatgaagaaggagaccaccgcggagctggaggccaagctggacgagggacgcagccgtgtggaggccgagctcgtagaggcgctcgccaacctcgaggcgcagaaggaggaggctgtcaaggcgctcgacgcccagatcgcctcgctcagtgatgagatcgtcaagaaggtgctcccatccgcgtgatgaaaccaaaccggccctgccttatcctacgactatagttacatgaacatcataaattaatgataattttgaagaaatttggcgatgactc

SEQ ID NO: 76680 - DNA, 377 bp, Zea mays
tttgccatggctggtgcatcgctcctctccccatcctgcacgctcctccgcctgattcccagcgcgtcgcacatctgctgctcgtcgcacttcaagagattcgatcgggttcgccggttcgcgcccgccgccatggcgacttcctcaggaccaaaggaggcgccagcgaataaccctgggctccagaccgaggtcgaccccgccaccaaaggctacttcttgcaacaaacgatgttacgtgtgaaggacccaaaagtgagccttgacttctactcacgtgtgatgggcatgtcgttgctgaaaaggttggattttgaagagatgaaattcagtttgtattttctaggttacgaggatgtgaccttagcccctgatga

SEQ ID NO: 76681 - DNA, 406 bp, Zea mays
acagtgggccttgtcgcctccaaggtcgatactggaggcgccgaaggtaaatacaatggacagagctcacatttctccaggcaccttccaatttctcttgactacaatgtgatgagggtgaaaggaggacgtatgggagccgtgaatggtatgcatccaaatgggaaggtagatgaaacctgtatgcagtcaagagaaatctggacaggagtaacacatagtttagcagcaacgatgctgctccatggaatggagcatcaggccttcactactgcagaaggcatttatactgcaggatggtctgaagagggctatgggtactggttccaaactccagaagcatggacaattgatggccattacaggtcactaatttatatgcgcccccttgcaatctgggcaatgc

SEQ ID NO: 76682 - DNA, 396 bp, Zea mays
aggacgcgtgggctgaggtaccattcactgttgatggaccgaatggagttcttcgacatctcgaacacctgatagagaccaagggatttgctctggtttgcgttgctgaaggagcaggacaggaatactttcaaaagtcaaatgcaactgatgcatcagggaacatggttcttagtgacattggtgtgcaccttcagcagaagatcaagtcccattttaaggacataggagtccattctgatgtcaagtatattgatccaacatacatgctccgcgctgtgcgagccaatgcatccgatgccatcctgtgcaccgtgcttggtcagaatgctgttcatggtgcctttgcgggttttagcggcatcacaaccggggtgtgcaacacacacaatgtgt

SEQ ID NO: 76683 - DNA, 391 bp, Zea mays
  unsure (1)..(391): unsure at all n locations
gggtcgagcacgcgtccggatccaccaacccgatcgcctcgtcgtcaaaaaatccccattcgttccccttctcgcctccacgagccttcacaaattgccctctcagatcttctcctaatcttactcaagccctagccaaatcccagacccatcccagccctagcgacaccaaccagctcgccagcgaccatggggaacccggagaagctgatgaatcagatcttcgacctcaagttcacctccaagtcgctgcagcggcaggcgcgcaagtgcgagaaggaggagaaggagcagaagctcaaggtcaagaaggcgatcgagaagggcaacatggacggcgcccgcatccaagccgaggncgccatccgcaagcgcaccgagcacatgaact

SEQ ID NO: 76684 - DNA, 400 bp, Zea mays
atgttatacgcctccaaccatcagaagccatgtacatgaaactaactgttaagaagcctgggttagaaatggctactgaacaaagtgaacttgatctgtcatatgggatgcggtaccaaaatgtcaaaattcctgaggcatatgaacgccttatcttggatacaataagaggtgatcagcagcactttgttcgcagagatgagctacaggctgcttggaagatcttcactcctttgctgcatgacattgacgacggcaagctgaaggccctcccgtatgaacctggcagccggggacccaaggaagccgacgaattgagcgcgagagttggatacatgcagacccacggttacatatgggtaccgccgacccttgcatagaagacaatacgaattgtttg

SEQ ID NO: 76685 - DNA, 323 bp, Zea mays
accaacgaaagacggaaccacaccgctgcatcgtgcggtctgtgatggaaatgttcagatggttgagttgttgctggaacacggagctgacgtcgacaagcaggacagtaatggctggtcgccaagagatctagctgatcagcaaggccatgatgacattcaggctctcttcaaatcacgaaaagcacacaggaagcatgcctcaaatggcagagtggcacctatgctgatagggagattcaacagtgagccctcgatgccagatatgagccatgaaaacgccagagtacgcagcgaagttgttccgcagaagctcctccgaa

SEQ ID NO: 76686 - DNA, 414 bp, Zea mays
cagctcattgcaaaatgcccgaacttactagttctcgcggtatcatctcctgctcatgtaaattatgaagatactgaattggcaatcttttcatggtaattgacagtatattttttccgataggtgaggaatgtgattggagatagaggattaggagttgttgcggatacgtgcaagaagctccaaaggctcagaatagagcgaggagatgatgaaggaggtgtgcaagaagagcagggaggggtctctcaagtgggcttgacggctatagccgtaggttgccgtgagctggaatatatagctgcctatgtgtctgatataaccaatggggccttggaatctatcgggacattctgcaaaaaactatacgacttccggcttgttctacttgatagagaagagaggataacagac

SEQ ID NO: 76687 - DNA, 278 bp, Zea mays
cccacgcgtccgcagcaagaccatgtcgacggcgctggaggcgacgcggcccggcgggaaggtgtgcctggtcgggatgggccacaacgagatgacgctgccgctgacggcggcggcggcgcgggaggtggacgtggtgggcgtgttccggtacaaggacacctggccgctgtgcatcgacttcctgcgcagcggcaaggtggacgtcaagccgctcatcacccaccgcttcggcttctcgcagcgggacgtggaggaggccttcgaggtcagcgccc

SEQ ID NO: 76688 - DNA, 409 bp, Zea mays
gtgaggcaggaactgctccatgcaaatcaaattttcgcccaacatccaatgtggccagtcattgcggtcactggaagagctatagaggaaacagctgctgtcgttgtgaggattctccaagacaggatacagaagtactccatgccacgcatatcaaaacggtactaagggcacgtttggtttcattagtctctgtttggtttcagggactaaaagtgttaagaactcattaaattactcataagaatactaaaatgtcctttaccattcttccgccattactcttcttccactgcaatagaaataaataaggggcaaaatgtggaattaatatggtttagtcccttttagtcatcccttgagggactagatactaaagcagtttagtctctattttagtcctactgtt

SEQ ID NO: 76689 - DNA, 412 bp, Zea mays
ctggcccgttctcagtcccagtgagaggctccatgaagatcctggtcgcggtgaagcgggtggtggactacgctgtcaaagtgcgcgtgaggccggacgggaggggcgtggagacggccaacgtgaagatgtccatgaatccattctgcgagatcgccgttgaggaggcgctgcggctccgggaggccggcgtcgccgctgaggtcgtcgccgccaccgtaggccctgcccagtccgccgacacgctccgcaccgcactcgccatgggcgccgatcgcgccgtccacgtgctccacgacccggaccctgcgcggcccctcctccctctcgccgttgccaagatccttcgcgccgtcgcgctccaggagaagcccggcctcgtcatcctcggcaagcaggcaattgatgatga

SEQ ID NO: 76690 - DNA, 418 bp, Zea mays
  unsure (1)..(418): unsure at all n locations
ccccaacgaagtgcgagcgacccacgtccacacgacacgaaccaccaccaccaaccagcagccgcaccacgcacccagcgcaaagcgatggcgtcgctcaccatgatggcgtccttcgccgccgtggcggtggccgcgccctcgcgccgcggcaccttcgccgtggtcaggtccgccaaggtcgaccgctgccaggagcccgccacgctagcagcaaccgaggccaggcccgccgccgacggacgccgcgccgtcatgctcgcggctgctgcggcggccgtggcagccatcggcggcgccggcgccgccatggcgggccccaagaacgggaccccgatgcgaagaagaagtacgcggccatctgcgtcaccatgcgcaccgccaaggtctgccacanctgagcacgcccgcgttgcat

SEQ ID NO: 76691 - DNA, 398 bp, Zea mays
  unsure (1)..(398): unsure at all n locations
cccacgcgtccgctcccatctctccccctctccctctcgtggccacgactgccgctgccgccctacgccaggtgtccaggtcatctccggcccattcgccggcgacgagcaccccactagatcgaccgagatatggacggcctgtggcatctgggggacgagctccgcgggcagcccaaggtggtggaggaccgccagtggtcgctcatgacgtccaagctggcagagatcaccaggtccaggggcgagaggacgaacgacctcgactacgccaggatgaacgccgcccccgacgccaagcagtggggcaaggccgcgtcctnacagcaccacgacgagggcaggatggaccaccacgtcggcctcagcctcaagatgaacgatctcaagatgaacga

SEQ ID NO: 76692 - DNA, 356 bp, Zea mays
accacgcgtccggtgtgcagcatcacggagacgaaggaggcgctcaagctcaaggaagaagcgaccgctgcaaacggtgaacatcaaggtgaagatggactgcaaaggttgcaagcgtcccgtgaaaaccgcggtgaagtcgatgcgcggcgtgacaagcgtgacggtgaacgcgaagcagagcaagtgcacggtgaccgggtacgtggagcccgccaaggtgctggagcgcgtcaaggccaccggcaagaacgccgagatgtggccctacgtgccctacacgctcaccacctacccctacgtcggcggcgcctacgacaagaaggctcccgcgggcttcgtccgcagcgcgccgc

SEQ ID NO: 76693 - DNA, 414 bp, Zea mays
  unsure (1)..(414): unsure at all n locations
cccacgcgtccgcaaggagtccatcgtgtcccgcgagatgacccgtcgctacatgacggacatgatcacctacgccgacaccgacgtcgtcatcgtgggcgccggctccgcggggctgtcctgcgcgtacgagctctccaaggaccccgccgtgagcatcgccatcgtggagcagtcggtgtcgccgggcggcggcgcgtggctgggcgggcagctgttctcggccatggtggtgcgcaagccggcgcacctgttcctggacgagctgggcgtggcgtacgacgaggccgaggactacgtggtcatcaagcacgccgcgctcttcacgtccacggtcatgagcctgctcctggcgcgccccaacgtcaagctgttcaacgccgtggccgtggnaggactcatcgtcaggggagg

SEQ ID NO: 76694 - DNA, 232 bp, Zea mays
gcagagtgcaccgcaataatcagcttccggatggtggcgttttgtcagttttggatggaaatgccgaactggcagcgtctgttttccctatgcatatgtaatttcctgcctctttatattcactcttgttgtcaagtccaagtggaaaatcttggcatattatacatattgtaataataagcatcgtacaatctgcatgctgttttgtaataattaattaatatcccagccc

SEQ ID NO: 76695 - DNA, 117 bp, Zea mays
cccgacccacccatccgcccacgcgtccggcaccaaagccaaagccaaagaatcctcttgacttgctgccaccaagcaagatggtccttgatgactggaagaggctatactcaaaca

SEQ ID NO: 76696 - DNA, 238 bp, Zea mays
ggaagagagaatcctaccaaacctagctaccaactcgatcgtcgtcatcacgctccaccgcggcaccgagtacgtgatcaacgcggcggcggaggccggcacggtgcggcgggtggtgttcacgtcgtccatcggcgccgtgaccatggaccccaagcgcgggcccgacgtcgtggtcgacgagtcgtgctggagcgacctcgagttctgcgagaaaaccaggaactggtactgctac

SEQ ID NO: 76697 - DNA, 398 bp, Zea mays
cccacgcgtccgatcagaatacacaaagcgtgtttacacatctcaactacaacacttgaaggacataactggcacattggcaacggaggaggctgatgattctggacatgtaagtaaactccgctctgctctggagtctgtggatcacaaaaggagaaagatcatgcaacaaatgcgaactgacactgccttgttaacaaaagaagaaggtggctcaccaattcgcaatcctcctactgccgcggaggatgcacgattagcatctctcatatctctagataacatcttgaagcaagtcaaggaagtaattagacaaagctctacaggacctatgagaaaatcaaaaaggaaagctttgctagagtcattggatgacctcttgacacagatgccctctc

SEQ ID NO: 76698 - DNA, 230 bp, Zea mays
tgaatcaggcaaggcaatccccaaccagcagatcattagcaagctcgagagggccctgggaaccaagttgcgtggcaagaaataactttcccaacaatttgtgtccccggagcaatcataatagggggaagacaaggcaagctgtctgcttatttgtctatgtttggtatctcaagtcctgcggactgtttctgttggcacaagaaggaataaatgtgttcaaggacctg

SEQ ID NO: 76699 - DNA, 391 bp, Zea mays
ttttccacaggggagccagggctgtagccggacgtgcgagtcgtcgttctgcatagtcccgccgctgctgaggtacggcaagtactgcgggatcctgtacagcggctgcccaggcgagaagccctgcgacgcgctggacgcctgctgcatggtccacgaccactgcgtcgacacccacaacaatgactacctcaacacgcggtgcaacgagaacctgctgagctgcctcgacggggtgagcccggcggggccgacgttcccggggaacgagtgcgacgtcggccagacggcgtccgtcatacgtggggtcatcgagtcggcggtgctcgcgggcaagatccttcacaagcgcgacgacggccagtagccggcgtcctgggctcctcctggc

SEQ ID NO: 76700 - DNA, 422 bp, Zea mays
cggacgcgtgggcggacgcgtgggctaccagcgactcacccgagcgagagcagcacacacgcagctagctaggagcagcagcagagcagcggcgatggcggcctccatgatctcctcgtcagctctggcggtggcgcctcagggcctgccgcccctcggccgccgcgcctcctccttcgccgtcgtctgctccaagaagaagatcaagaccgacaagccctacgggattgggggtggcctgaccgtcgacgtcgacgccaacgggagaaagggcaagggcaagggcgtgtaccagttcgtcgacaagtacggcgcgaacgtcgacggatacagcccaatctacaacgaggatgactggtctcccaccggcgacgtctacgtcggtggaaccactgggcttctgatctgggccgtcaccctcg

SEQ ID NO: 76701 - DNA, 405 bp, Zea mays
cccacgcgtccgcccacgcgtccggtccggaccccggaggagccaagccatggcgtccacctcctgctgcctcctccaccagtcaaccgcccgcctcggcgcgtcgccgcgcctggccgccgccccgccgcgcagcgcccagctgctcgtctgcaaggcccggaagcaggaagccgccgcggaccagagcgacgtctcgcgccgcgccgcgctcgcgctcctcgccggcgtcacggccgccgccggcgccaaggtgggtcctgccgccgcggcatacggagaagcagccaacgtgttcggcaagcccaacgcgagcacggagtacatcgcgtacaaggggcgacggcttcaagctgctgatcccgtccaggtgggaccccaacaaggagcgggagttcccccggc

SEQ ID NO: 76702 - DNA, 417 bp, Zea mays
ggagctcagccgagaagtttgagttccaagctgaggtttccagactcatggacatcatcatcaactcactctacagcaacaaggatatcttcctgagggagctcatatctaatgcctctgatgctggataagattaggttcctttcccttactgataaggaagttctgggtgaaggggacactgcaaagcttgagattcagattaagttggacaaagagaagaaaatcctctccattcgggataggggtattggtatgaccaaggaagatcttattaagaaccttggaacgattgctaaatctggcacttcaggaacaggagctgctcgagtctcttgtcgaagctgatacgagaaggcaggaaagagctaaaaagatggaagaaaagaaagtgtatctgcaactataccaagcaat

SEQ ID NO: 76703 - DNA, 447 bp, Zea mays
cgggtcgaagcacgcgtccgggcgtctcgaatggaaggagcccatccaacccaacgaagaagcaaaatccccaatctctgcgccgccgccgttctgtgtcgttcttcgcccgccgtcgttccgtgtcgttcttagcccgccgccgtttgtagtcgcggcttcatcgtcgcgtaccgatccccaccgcccccactgccaccagaggtgtcgacatgtctcagaacaacccctcccagcttctcccctcagagctgatcgaccggtgcatcgggtccaagatctgggtgatcatgaagggggacaaggagctcgttggcaccctctgcggctttgatgtctacgtcaatatggtgctggaggacgtcaccgagtatgaatacactgctgaagggcgccgtattacaaaacttgaccagatcctcctgaacggcaacaacatagccattt

SEQ ID NO: 76704 - DNA, 393 bp, Zea mays
gggaggtttgctctagaggttgccttgaagacattggtcctgtttaaggagtattttgctgtgccataccccctccccaaaatggacatggttgctattccagattttgcagctggagccatggagaactatggcttggttacataccgtgaaacagcattgctatttgatgagatgcactctgcagctgccaataagcaacgggttgcagttgttgtagctcatgaattagctcatcaatggtttggaaatcttgtcacaatggaatggtggacacatctgtggcttaatgagggctttgcgacttgggtgtcttacttagctgcagatcagttctttcctgaatggaatgtttggactcagtttctagaggaatctacaataggtttcaag

SEQ ID NO: 76705 - DNA, 313 bp, Zea mays
accacgcgtccgcccacgcgtccgagtggacaaggtggagaaattcttgacatcacacctacagagatccaccaaagagtgcctctgtacattgggagcgtggaggaagtggacaaggtggagaaattcctggcttgaatgtccctgcttcatgccagagctctctcatcagatggactccccaagacatcaagtttagggagggaatatgtactctctctttcccaccccaaataagtcttcttcgtctcatatttcgataaatcaaacaatctcaattttgatctaatatatacacacaacattaatattt

SEQ ID NO: 76706 - DNA, 396 bp, Zea mays
ggactacctcttgttcaaggttcgtgacgtgaagctcgacccgaatcctgaagaggtggccgatgtcaagtacatgaaccggcatcagctgaaggagctgctcaagaaagccgatgccggggaagatggcgttaagctctccccttggttcaagctggtggtggacaactttctcatgggctggtgggatcatgtcgagcaagggactctgcagggggcagcagacatgaaaaccatccataaattgtaaatcttctagatcgcttaagcacgagtcttgccctgttgaggaataagcgcttgtcctgctgtttggtgctggaggaataatcgataaaattataacagagtgatcttaattctggaacgtaactattaacattgaaacccatcctc

SEQ ID NO: 76707 - DNA, 409 bp, Zea mays
aagatgttcgacagtctgctcaactccaagttctacaacaaatgcaagcacgcgatcaagtgcacccggacccggctggatctgctgcggcggaagaagcaagcgatggtcaagttcctcaagaaggacgtcgctgacctcctcaccagcggccttgaatcgcacgccttcgcacggatggaagggctgatcattgagatgaaccaagcatcgtgctatgatacaatagaagagtactgcgaatatattgtgaagcagctcaaccacatgcagaaagagaggtaactgttggttcttcaagtgatgcagtcttgtttggatagctataacattatttttcttgttcttttgtgctcaaggcatgccatactcctgttctcatgcatatgtcgcgtttaagattgaaaat

SEQ ID NO: 76708 - DNA, 412 bp, Zea mays
atttctgtttgtggtttgtttctcttaattccagttggtgcttatggtgcaaagcaacagtaagtttttctgcgtaagatttgttatttgatttggccgaataacttcgagaaccatacagactaatctgtgtatggtgtgcccgatgatgatagaagtcaaggcttgtttctctacattcgcagttgccgcctaagagctttcgccctgccaggcttgagagctaatgctgctaattccttccttggatgtctgagggcacaataatgccagataattttgctttgaaatctgtttaactgttgttaccctggttttatagttttaattattaaattttattttatttgaaggatttgtaagagtatgcaggctttgtgggaagattttataagaacatgcgaagttcgtt

SEQ ID NO: 76709 - DNA, 408 bp, Zea mays
caggaatggagagacacaagctgggcactggcaaaatggagttcttgatactttaagcacacagaacttcatccctggatcacctattgctgtgaaccattccaaggtcctcaatgcagtgcaggaagcgagaagagctgcagagaaggcctatgacatcccaagagttgatgataaggtgaacagggcggttgcagcagctaataaagcagccaatgcagccagggtggctgccgtgaaggctgcacaaaagcgcatccccagtaatggtgacgatctaccactgtcagtagtgtgacaatgaagccaatatatgttggcatggagctgcttcgcgatgccatcgcatcaccaattgcccgacataaccttcaacttcccagtaggtgaagccactgctcgtccatc

SEQ ID NO: 76710 - DNA, 419 bp, Zea mays
cgcgctcgctttgcttcctcgtcgaggtccaagttcctgcattgatggcgaccgaggtggctgagactcccgcgccgttggcggaggcggtccccgagacccccgcggaggcaccggcggcgcccgccgccgaggcgaagcctaccaaggccaagaaggcctctgcgcccaagaagcgtgccaacccgacccacccgccgtacgccgagatgatctcggaggctgtcacgtcgctcaaggagcggacggggtccagccagtacgcgatcgccaagttcgtcgaggacaagcacaaggacaagctcccgcccaacttccgcaagctcctgctcggccagctcaagaagctcgtcgccggcggcaagctcaccaaggtgaagaactcctacaagctgcccgcacgcgccccggccgccgcc

SEQ ID NO: 76711 - DNA, 416 bp, Zea mays
gaagatcaagaccgacaagccctacgggattgggggtggcctgaccgtcgacgtcgacgccaacgggagaaagggcaagggcaagggcgtgtaccagttcgtcgacaagtacggcgcgaacgtcgacggatacagcccaatctacaacgaggatgactggtctcccaccggcgacgtctacgtcggtggaaccactgggcttctgatctgggccgtcaccctcgctgggatcctcggcggcggcgccctcctcgtctacaacaccagcgccctctccggctaaggatatccaatgcatgcgcttcttgcgattcgtcatgtaaaatcagggtgtctgtctataatctagcctccatggatgctcaaccttcgtcatgtaacaataatcagtgctactcttcattacataattttga

SEQ ID NO: 76712 - DNA, 355 bp, Zea mays
gtgacgaggaggagctccagaaggagaacatcaagaacgccgcctcctccaccggcaacatcacgttgagcgtcaccaagagcaacccggagaccggcgaggtcatcggcgtcttcgagagcgtgcagccgtccgacaccgacctcggggccaaggcgcccaaggatgtcaagatccagggggtctggtacgctcagctcgagtgattcgagtgtctaactgctaggtgtccgaccgccgtcatggatcttgggaaggtgtatgtataccatgggaaactttggagagcacaggaggaatcgtgtatgtaatgtgcctgttaatgcaaattcgggctgtcgcttttttactccgc

SEQ ID NO: 76713 - DNA, 397 bp, Zea mays
gaacagttgaagctactagcgtgtagctagggaagagaagcgcgcgagtagctagcagacgtacgtaggcagaagcctagctgggtttgaagggccccgatcgatgatcccctacgcgactgcggcggaggcggagggagcactggggcgcaccatgacgtgggctgagacagcatggtacgagtactcggcggtgatgccagattcctggctgcactgccacaccacatttatcctgttcgtcatctacagcatcgccccgctgcccctgctactcctagagcagttcgctccgtccgtcgtgctgccgtacaagctgcagccccgggtacggctgcccccggcagcctccctcagctgctacatggacgcggcctgcatctttccgctcgccgtt

SEQ ID NO: 76714 - DNA, 132 bp, Zea mays
aggacgcgtggggaaaatttaccgtaaggtgtgtaaaataacttctgcatactgatctgccccctctatcagttatatacccagctatagcaatgatctccatcctatccagtaatggatttggtatcgcga

SEQ ID NO: 76715 - DNA, 400 bp, Zea mays
ggaccacaccggcgtccctcgtggtggccaccggcccgcgcggcgccggcgcggggcccatctgcgcgtccatgtccatgtcctcctccaacccgccctacgacctgacgtccttccggttcagccccatcaaggagtccatcgtgtcccgcgagatgacccgtcgctacatgacggacatgatcacctacgccgacaccgacgtcgtcatcgtgggcgccggctccgcggggctgtcctgcgcgtacgagctctccaaggaccccgccgtgagcatcgccatcgtggagcagtcggtgtcgccgggcggcggcgcgtggctgggcgggcagctgttctcggccatggtggtgcgcaagccggggcacctgttcctggacgagctgggcgtggggtacga

SEQ ID NO: 76716 - DNA, 419 bp, Zea mays
aagtcattgagcatccaatcaaacatccggaactatttgagagccttggaattgcccaaccaaagggtgtcctcctttatggacctccaggcacaggaaagacattgctggcacgtgcggttgctcatcacactgactgcaccttcatcagggtgtctggttctgaattgggtcacaagtatattggtgaacgttcccggatggttcgggaactctttgttatggccagcgaacatgcgccatccattatatttatggatgaaattgactctatcggatctgctagaatggagtctggaactggcaacggtgatagtgaaatgcagcgtaccatgcttgaacttctaaaccagcttgatggttttgaagcttcaaacaaaattaacgttttgatggcaacaaacagaatatacattttg

SEQ ID NO: 76717 - DNA, 395 bp, Zea mays
gaaatagaaacgaactaatatatagataatcgaaatcgaaaagaactgtcttttctgtatactttccccgttctattgctaccgcgggtcttatgcaatcgatcggatcatatagatatcccttcaacacaacataggtcatcgaaaggatctcggacgactcaccaaagcacgaaagccagttagaaaatggattcctatttgaagagtgcctaaccgcatggataagctcacattaacccgtcaattttggatccaattcgggatttttcttgggaagtttcgggaagaaattggaataatatcgattcatacagaggaaaaagttctctattgatgcaaacgctgtacctagaggataaggatagaggaagagggaaaaatcgaaatgaaat

SEQ ID NO: 76718 - DNA, 417 bp, Zea mays
cggacgcgtgggcggacgcgtgggctcccgtcttcttcctcgaccgctaaccttaccggtccccaaatgtcgcctctcgtgctgctgctcctcgcgcacctactcgccacgggcactgcagcgggagcagcgcggaccaaggacgacgggcctcctgctccgtcgtcgtcgtccccgcgggtgccggcgacgacgccgccgtggccggaccagttccacgcggtggtggtgacgaacctgagcgcgcgcggcggcgggctgcagctgatcgacctgtactacgactggccgcgagggcgcgacctgaacatcgtccgcgaccagctgtccggcgagcggcgctggagctggaacgtggagtggagcaacgggaccgccttcctgttcgactccgcgtcctgccgcaccttccagttc

SEQ ID NO: 76719 - DNA, 414 bp, Zea mays
accacgcgtccgcattccactccgacattcacgtgcagctgtcgggagcaggcaatggcgccggatctaagcgaactcgccgccgccgctccagcccgtggcgcctacctcgccggcgtcggtgtcgcggtcctcctcgctgcctccttcctcccagtagccgagtcgtcctgcgtgcgagataactcattggtgagagacataagccaaatgccgcaaagcagctatgggattgaaggattgtcgcatataacagttgctggtgcgctcaatcatgggatgaaggaggtggaagtgtggcttcagacaataagtccaggtcaaaggacgccaatccacaggcattcctgtgaagaagttttcactgtcctcaaagggaacggtacgctcttgatgggaataagctcactaaag

SEQ ID NO: 76720 - DNA, 396 bp, Zea mays
agaggagggtgccaagctatatacctcattactcgaagagaagggtggtttgcagactctcttgaaatatattaaggagaataaccctgacaaactttctatagcacttgcttcatcacttgacactgttgctgaattggagctgttacaggctcctggtctgtcctttctcctgcctcaacagtatatagaatatccaaggctgacaggaagacgagttgttgaattcacagttgaaaaaggtgatggttcaacattctttccaactggtggtggtgaaccgaaaagtgttgctacaattcaggtcgttattgatgggtactctgccccactgactgctggaaactttgcaaaattggtcttggatggggtatatgacggggtaacacttaaatg

SEQ ID NO: 76721 - DNA, 415 bp, Zea mays
agatccatctcttcggctgcctgtgctacccttcccttcacctcacacaggaatatactacacattcctgccttagatacatatatacttttttactgaaaaaaaaagctgagccggtgcgagcgaagcttgagcaatggcgagcgcgtttagctcgagggcatgcgcgctgctggcgctgctcctggggctctgcaccgccggcgcggccgcgggcaaggtcgacgacgggctggaggtgacgtggggcgaccgccgccggagcgtctcgcccgacggccaagtgctgacactgtcgctcgaacgcacctccggctccgggttccgctccaaggacacgtacctcttcgcgcgcgccgacgtgcaaatcaagctcgtccccgacaactccgccggcacggtcaacaccttctac

SEQ ID NO: 76722 - DNA, 415 bp, Zea mays
acattttaatccaaacaatctgacgcacggtgcaccagaagacgaagtccgtcatgcgggtgacctgggaaacattgttgcaaatgctgagggcatagccgaggcaaccattgttgatacccagattcctttgactggcccaaattcagttgttgggagagcatttgtggttcatgagcttgaagatgatttggggaaagggggccatgagctcagcctctctactggaaatgctggtggaagactggcatgtggtgttgttggcctgactccattgtaagttgctcgccgggtgcccgggttgcagttgcagctacgctgttacatccttgccttggtggacttttgtcttcaatcgtgttattgggacagtgacctttttgtattacttggattcattccatgcatgtggtat

SEQ ID NO: 76723 - DNA, 386 bp, Zea mays
aaaaaagagggaaagagggaggatgggttgttgaacgtctcttaaatcagttacttatagaacttgatggtgctgatcaaagacaaggtgtctatgtgataggagctacaaacaggattgatgtgatagatgatgctgttttacgtcccggtagatttggaaagaaacattatgtacctttacctggtgcagaccagagagtttcaatattaaaggcacatgctcgtagcaagcccatctcgactgatgttgatttggatgcacttggtcgtcgtgctgagtgcaacaatctcactggtgccgacctaacatcactggtcaatgaagcagccatggcagcactggaagagagactggaaatccgtgacaaggggacatcctcactg

SEQ ID NO: 76724 - DNA, 408 bp, Zea mays
accacgcgtccgcggacgcgtgggcggacgcgtgggcggcccgcgacggagaggtggaccgccgtgacgtgggcaagatgaagcacgggtgcgagcattaccggcggaggtgcaagatcgtggcaccgtgctgcaaccaggtgttcccctgccgccactgccacaacgaggctacagcttccggagatcggcatacaatatgtcgtcaggatgttgaaaaagtagtttgcctactctgtgaaacaaaacagccggtgtcacaagtgtgcataagctgtggagtcaatatgggagagtacttttgtgatatatgcaaattttatgatgatgatacagacaaagggcagtaccattgcatcgattgtggcatatgcagggttggtggcaaggaaaacttcttccactgtg

SEQ ID NO: 76725 - DNA, 427 bp, Zea mays
catcatgctgcagttcgttgacgtggggacgatggtatcgccaacggtgtacgcgaggcggagcctgtgccacctcatgtgtgaccagcctgacgccgccctccgcgacgcaatgcaggcgcagtgcgtgtacccggactggccaaccgcgttctacatgcaagctgtcgcgctcgcgaagctgaacatgcagagcgatgccacggacatgttgaacgaggcatcgcagctcgaagagaagcgggagaagaacacaaaaccctgatgatggcttgttcctggtccaggggttgggaatgtaactgggggagtgtgctgcagagtcctgcgattgtaactacctggtttcgcatttctgtcatgcattttttttgggcccgtgtacatgttacatcgacgaaagtcgaaacaggcaaaatgcaagggg

SEQ ID NO: 76726 - DNA, 120 bp, Zea mays
accacgcgtccgaccacgcgtccgcggacgcgtgggtagaatggaagagataattcaatttattaagttttgaacttctacttttgtttagaatttaggcattatttttcccttgcttcc

SEQ ID NO: 76727 - DNA, 407 bp, Zea mays
agcacctggcgctgaaggcactgggcaggcccaacgccgtggacgggaccatccccgaggtgtcgccggcgctgcgcgaggagttcgtgattgcgtccaaggacgacgaggtcgtggacgcctgagcgagcatccacgcgccagcatgcaagcagcgtcttatctgggccggcgccatcacggggttttcttcttttaatctgggactttgttgttgttggacgaatgaattcccttcgatcggttagctttaatctgtctcgttagtgtgtcgtgttcgtgtagcaccatgccacaactacgccatgccgtgtgctctgtcacgtgggggccactcgtggggtctcctgctgctgtcagaacgaataagagaagatggaattgtggtgaaacaataaaaatgcatg

SEQ ID NO: 76728 - DNA, 394 bp, Zea mays
gacgccaacgagaaggaaccagtcactaagtcggcctctgtacggtccatgaacacacatcaacggagcgtgatgtccgctccggttcagacttcacctccttgaatgtttccgacatgagcgccgagtcgataaggaggacacagtaccccagcttcactgaccgcccatctaacctgagggtgttctcctttgctgaattgaagagtgccacccgcaacttccgccggtctctcatggttggctagggtggctttggctgtgtgtacaggggtgtcatcaagacctccgacgatctgaacgaacgaatcgagatcgctgttaagcagttgaatcgtaaaggacttcagggtccaattttgtggaaggaatgcttttgctccccttgcctttt

SEQ ID NO: 76729 - DNA, 416 bp, Zea mays
cgtcgacccgctgtaccctggcggcagcttcgaccccctcgggctggccgacgaccccgaggccttcgccgagctcaaggtgaaggagctcaagaacggccgcctcgccatgttttccatgttcggcttcttcgtccaggccatcgtcaccggcaagggcccgctcgagaacctcgctgaccacatcgctgacccagtcaacaacaacgcatgggcctacgccaccaacttcgtccccggcaactaagctcaacggctatgctatgcaacttcattgtctttcggatcggagagggtgtacgtacgtggattgattgatgctgcgagatgcatgtgtgtcctttgtttcacgttgcattgcataggcaagtcgagatgatgagttggcgttgtacactaagatgaaccatgtttgt

SEQ ID NO: 76730 - DNA, 419 bp, Zea mays
cgcgagtgagtgaacaccagccgtattgtcccgactcctgacccctaccgatcctcgcctgctgcagccatggcgacctccgcggcgctctccaccgccgccaatcccacccagctctaccggtcccgcgcttcgctgggcaagccggtgaaggggcttggcctgagcatgggccgcgagcgcgcccagcggagcattgtgtgccaggcggcgagcagcatctccgccgaccgcgtccccgacatggagaagcggaagctgatgaacctcctcctcctcggggccatctcgttgcccaccgtcggcatggtcgtcccctacggcgccttcttcgtccctgccggctccgggaacgccggcggcgggacctacgcgaaggacaagctgggcaacgacatcacggtggaggcgtgggtcaa

SEQ ID NO: 76731 - DNA, 379 bp, Zea mays
aagaaagccctcgtcctgacccctcgcaaaaccctagctccaaccaccatgaagggcaagggcaacgcctccaagaaagatgaggccaggctccgggccggcggcggcggcgccggaaaacgcaagaaaggcgccgcgagcgggaagcccaaacgccctccctccgccttcttcgtcttcaagtctgaattcatgcaggagtaacaagcgcagcaccctggcaacaagagcgttgcgggcgtgagcaaagcagcacgggaaaaatggcgctctatgtcagagcaagagaagcaaccctatgtggaccaaactgggcagaagaagcaggactattagaagactaaggcaaatattgagaaggagagcacaagctcaaaga

SEQ ID NO: 76732 - DNA, 375 bp, Zea mays
caccatggagtttgtagtgtttggtttacaaggtaacttccgcgttcgagccccaccgtgacgatgaggtttgggatgaacttgggcggggaaacgagcaaaagaaaacagaatagaacaaacgaaccggcttcagcccatgcgaaccaggagaagcggtgggtgctgtctgatttcgaggttgggaaacctcttgggaggggcaagtttggccatgtttatcttgccagagaaaaaaggagtagtgagattgtggctttgaaagttcttttcaagagccagctcaagcaatcacaggttgagcatcagctgcgacgtgaagtggagattcagagtcatcttcgtcatcctaatattcttcgcctgtatgggtac

SEQ ID NO: 76733 - DNA, 388 bp, Zea mays
acgcgtccgaccacacgtccgcccacgcgtccgggcgaggtttacgttttcgaatccgtcacccccgagaaggttcaagctgtgctgctacttttaggacgtggtgaactaccacctggtttagctggcatggttttacccaatcaaaatgaaaacaagggctatgacgatatacttcagaggacagacattccagcaaaaagggttgcttcactaattaggttccgtgagaaaaggaaggaaagaaattttgataagaaaatacgttatgctgttcgcaaagaagtggcactcaggatgcagcgtcggaaggggcaatttgctggaagagccagtctggagggagaatctccagctcctggatgtgatcctggttctcaaggctcaa

SEQ ID NO: 76734 - DNA, 390 bp, Zea mays
actagttctagatcgcgagcggccgctcgccggccatatagtccacacagcaggcagagagttcgagagctagctagagagagagagagagggacaacgactaaggcaagctagctcaccgatatcgaacgaatggaccgtgtgatgcagctggcgtcggagcgtgcggtggttgtgttcacgctgagcagctgctgcatgtgccacacggtgacgcagctgatggcggacctgagcgtgaacgcgctggtgcacgagctggacagcgaccccaggggcaaggacatggagcgcgcgctgctcaagatgctgggagggagggcgcccgctgtccccgccgtcttcatcggcggcaagctcgtcggcggcaccaacaatgtcatgtcgctc

SEQ ID NO: 76735 - DNA, 376 bp, Zea mays
acggacgcgtgggcggacgcgtgggcgcgccaaaccccaccgctgcgcagggatcgctctggaaccgcgcgagcgacctcgtggacgggctgttcgttgccccgagggaccctaggcagctgaataagctggccaggaagaacgtcaaggacactgccggcaagggctggttcgacatgccagctccgaccatcactcccgagttgaagaaggatctcgagattttgcagctgaggcatgtaattgacccaaaaaggcacttcaagcgggcaggaaaatccaaggcccttcccaagtacttccaagtcggtacggtcgttgagcctgcatctgagttctactcaagtacgctgagaaatagggaacgcaaggcaac

SEQ ID NO: 76736 - DNA, 365 bp, Zea mays
gacatccgggcaatgtgggtcagtgagacgagctgcttgtggcggcagaactcaagccctttgggaagcagctcagggacaaatacgtggagacacagcagcttctcctccagatcgctgggcacaaggatattcttgaaggcgatccattcctgaagcaggggctggtgctgcgcaacccctacatcaccaccctgaacgtgttccaggcctacacgctgaagcggataagggaccccaacttcaaggtgacgccccagccgccgctgtccaaggagttcgccgacgagaacaagcccgccggactggtcaagctgaacccggcgagcgagtacccgcccggcctggaagacacgctcatcctc

SEQ ID NO: 76737 - DNA, 392 bp, Zea mays
gcgtgaggtaaacatgctaagagaaagaaacaaatcctatggagcaataaagtttgttgacataagctcgaaagattactctccagatgacaatcaggggcttgattatgaaacttccatggggaggatacatgcggttctttcagatggaactgttgtcacagacgttgaggcatttagaaaactgtacgaggaagtaggacttggatgggtttatgctgttactaagtatgagcctgtagctagcatggcaaatgcagtatatggtttgtgggcaaaataccgtatgcaaattacaggtcgacctccgctagaagagatcatggcatcccgaagagctgcaggcgaatgtaaagatgacaaagtatgcaagatgtgagcataaagatgtt

SEQ ID NO: 76738 - DNA, 362 bp, Zea mays
acgcgcacccggttccgcgtgcctttccccacctactctcgcggctctcgccagccagtctagggtttcggtcccggcgtgcttatccgcccccgccggccatgtcgaagcaaggagggaaggccaagccgctgaaggcgcccaaggccgacaagaacgagtacgacgagacggatcttgcatatctgcagaagaagaaagatgaggaaaaagcactgaaggagcttaaggccaaggcacagaatggcgcgattgggggctcgggtctgaagaaaagtggaaagaaatgagactggtcacccgtctccaatacctagaggatgataaggcagctgtctatctgtgttgcgcttcactaagtg

SEQ ID NO: 76739 - DNA, 242 bp, Zea mays
atccttggaccatggtgtcaccgacgtcggctacggcacatacaactgcaaggactactggatcgtgaagaactcttggggcatcagctggggcgagtccggctacgtcaggatggaacgcaacatcaaagcgtccagcggcaagtgtggtatacccgttgatccgtcgtaccctccgaagaatggcgccaaccccccaaatcctgggcccatcccggcatcgtccataccacctgcctacc

SEQ ID NO: 76740 - DNA, 380 bp, Zea mays
  unsure (1)..(380): unsure at all n locations
aaaatatgatgctcatgttgttggtattgatctttccataaacatggtatcatttgcacttgagcgtgccattgggcgcagttgctcagtggagtttgaagttgctgattgcactacgaagacatacccagacaacacatttgatgtcatatacagccgtgatactatccttcacatacatgacaaaccctctttgttcaaaagttttttcaagtggctgaagcctgngggcaaggtccttatcagtgacaactgcaagggtcccgggaaaacatcaaaagaatttgcagcgtacattaagcagagaggttatgacctacatgctgtggaggcttatggacagatgttgaagagtgctggttttcgtgatgtcattgctg

SEQ ID NO: 76741 - DNA, 355 bp, Zea mays
aatggcctgggcctgtcgcgcgaggaggcctgccagaacctcctcttcgccaccaccttcaacagctacggcggcctcaaggtgctgttcccgggcctgctggccaacgtggccagcggtggcgagaagctccacgagcggctggtggccgatatccgcggcgccgtggccgacgccggcggcaacgtcaccctcgcggcggtggagacgatggagctggccaagtcggtggtgtgggagtcgctgcgcctggacccgcccgtcaagttccagtacgggcacgccaagaaggacctgctggtggagagccacgacgcggtgttccatgttaggaaaggcgagatgctgttcggct

SEQ ID NO: 76742 - DNA, 396 bp, Zea mays
cggacgcgtggggttcgaatccgtatagccctaatatatacgtcttttttccattttaggatggatatcttatgtttcctttagtatagttttcttttccttatttagtacttgtttatagactcgacggtcgattgcgccatagaatagagataaaagcattaccataggctcattcatcgaaacgcaaatcagagagacaggaaaagaaaaaagaattttgatcaaatcaatagaaggaaggatcccttacctgatttgaatttcatcctcctttaaataggatatgctctaagtcttcccatactttcctataatgactgcaacgattttctccattttgcgaattcctattttatttgaagtatattactatcatatacattatctaaatcg

SEQ ID NO: 76743 - DNA, 278 bp, Zea mays
ctcgtcgagcattccgaggtcctacagtcagtcgtattacagctgcagcaagaaagaataagcgagcgcctccctaacgctcgttgtcagcaagggccaacagcgccgcgtccagccgcctcaagtcgtccttctcgggctcgcggctcccttcgggcacgcggagcaccaccccgtcgtccgtggccgtcgccaccccggacgccggcggctgcccgatccgcgcgtccatctcctcctcacccaacccggcctacaacctgacgtccttccggttc

SEQ ID NO: 76744 - DNA, 341 bp, Zea mays
aacccgtgggcggacgcgtgggacgcgccgtacgggcagggcttcgcgcggcacaaggccaccggccgattctccgacggcaagatcgtcaccgacatcaccgccgaaacgctcggcttcgagagctacgcgccgccgtacctcagcccgcaggcgtcggggaagaacctgctcaccggcgccaacttcgcctccgcggcgtccagctactacgacgacacggcggccatgtatgacgcgatcacgctgacccagcagctcaagtactacaaggagtaccagtcgaagctggcggcggtggccgggcgcgctatgggccgcgccatccttggcgacgcgct

SEQ ID NO: 76745 - DNA, 309 bp, Zea mays
acggacgcgtgggcaggcattcgcgtaaacgatgcggataagctcgtgacgatcggaggccatgtgctgcgccaacgtgagtggctgtcgctgaatgggtcgactggtgaagtgatccttggaaagcagccgctttccccaccagcccttagtggcgatctgggaactttcatggcctgcgtggatgatgttagaaagctcaaggtcctggctaacgccgatacccctgatgatgcaattaatgcgccaaacaatggggcacaaggaatttgattaagccggacagaacacatgttctttgcttcagac

SEQ ID NO: 76746 - DNA, 292 bp, Zea mays
aatacgacagcggtcgcgtgggcccacgcgtccgccgacacctccactcggcttctgcttcgtcaccttctccacagaggactcgatgctcatcgccatcatgggcatgaaccgtaaggagcatcgacggccgcaccatcaccgttcacgaggcccattccctctgcggccgtggaggaggccgtggcggatactgtgacgggcgccgtgatggacgcggatactgcggtggcggtggaagctaccgcggtggtcgtggacgctaccgaggctgtgggggatacagtggtgc

SEQ ID NO: 76747 - DNA, 89 bp, Zea mays
ctcgcggatcgacacaagcctctagaatgacttataatatgctccatggttcaaaactctgttcttcaatacatcatcaattatcgatt

SEQ ID NO: 76748 - DNA, 369 bp, Zea mays
ctcgtgtagcaatccagggccgatacacgcgtccacacaagcgtctgagactttgtcaaacttcctatgtgaaaaagttgctagaaaaggtcggactgagccagtgcaacccatgttcaactccaatggaagctaagctgaaactgtccaaggacagtgattcttctcgagttgattcatctgaatatacaagtttgattgggagtctgaggtatttgttgcacactaggcctgaactgaatttcagtgtcagttatctgagccgttttatggaggcaccaagtcaggatgaccttgcagcagttaaacatttacttcgatatgtagctgggacaatggagcttgggctgttttatcccagaagaacac

SEQ ID NO: 76749 - DNA, 382 bp, Zea mays
ctcgtggatcgacacaagcctctatactgacgtcgtattacacaccaccgcgaaaccccagcagccgcatcgatggcgcctaaggcggagaagaagccggctgcgaagaagccagcggaggaggagcccgctgccgcgaaggccccggcggggaagaagcccaaggccgagaagcgcctcccggcggccaagtcgtccggcaaagaaggcggcgacaagaagggtaagaagaaggcgaagaagtcggtggagacctacaagatctacatcttcaaggtgctgaagcaggtccacccggacatcggcatctcttccaaggccatgtccatcatgaactccttcatcaacgacatcttcgagaagctcgccggcgaagctgcca

SEQ ID NO: 76750 - DNA, 385 bp, Zea mays
ggccggcgcgcagatcttctcggagggcgggctggactacctggggaaccccaacctggtgcacgcacagagcatcctggccatctgggcgtgccaggtggtgctcatgggcttcgtcgagggctaccgcgtcggcggcggcccgctcggggaagggctcgacaaggtgtaccccggcggcgccttcgacccgctgggcctcgccgacgacccggacaccgccgccgagctcaaggtgaaggagctcaagaacggccgccttgccatgttctccatgttcggcttcttcgtgcaggccatcgtcaccggcaagggccccatcgagaacctcttcgaccacgtcgccgaccccgtcgccaacaacgcctgggcatacgccacgaac

SEQ ID NO: 76751 - DNA, 327 bp, Zea mays
aaacgaggatgtcgcgtggtacgctggcaagcgcatggcgtacatctacaacgccaagaccaagagcaatgagacgcgctacaggtgcatctggggcaaggtcacccgtccgcacggaaactcgggcgtcgtccgtgccaagttcaagtccaacctcccgcctgagtccatggggcgcaaggtcagagtgttcatgtaccccagcagcatctaaggttttgttggaataaagatggactacaaatggccatgtgtttatttctcacttttctccgaacttaaaatgccttgtgttggtaacttagattgttcaagtgctgaacctgt

SEQ ID NO: 76752 - DNA, 162 bp, Zea mays
ctggtctagcactcgcggggccgacacacgcgctccaccctcttagtcattcgtctcgcgtcgatcctatgcttcccgttctcaagaagcgcagctgcccatgcggcactgtccacgcgaagcctccgaccgccacgcgccgagctggctggccgccggcct

SEQ ID NO: 76753 - DNA, 387 bp, Zea mays
attgttttgaaccacccactccagaggataacagagaagcagaacagggtctcgataaccgacaggatgtgggcaaggcttctgtcgtcgaccaaccagccgagcttcctctgcaacaaagtcatcgaagaggcaaagaaggagcaggaaagagcggcgcagcttttagatggctcgccttcccatcggaaggttgacgacgaggttgcagcttccaacttgggtcgtaccaagtgaggtgaacctttttttcctgtccaaagtttcagtagctatggcgaccggtgttgctgctgctcagtggtctgtgctccctgtccatttttttttctaaaaaaagaacacgttatccctttctagtttaaacagagtgttgaataatatcgt

SEQ ID NO: 76754 - DNA, 334 bp, Zea mays
atagttctcaacgacgtctgacggcagtgctcctgctcctcctcctccttcccggccgccgcgcgagcttgggttagtgtctcttctaagcggagacctgtgagaggagccatcatcatggccgctgttgagactgttgtcctcaacgttgctatgtcatgcgagggttgcgccggggcggtcagaagagtgctctccaagatggaaggagttgaaaccttcgacatagacctcaaggagcagaaggtgacagtcaaaggcaatgtcaagcctgaggacgtcttccagacggtttccaagtcggggaagaggacctcctactgggagggcgaag

SEQ ID NO: 76755 - DNA, 393 bp, Zea mays
  unsure (1)..(393): unsure at all n locations
acnccctatagtgagtcgtagtaanangagacttataatattgtggctgctcacggttattttggtcgattaatcttccaatatgctagtttcaacaattctcgttctttacacttcttcttggctgcttggcctgtagtagggatctggttcactgctttaggtattagtactatggcattcaacctaaatggtttcaatttcaaccaatctgtagttgatagccaaggtcncgttattaatacttgggctgatatcatcaaccgtgctaatcttggtatgggaggtaatgcacgaacgtaatgctcacaacttccctctagacctagctgctcttgaagttccttaccttaatggataaggnttttctcctaaacatataggaattttnga

SEQ ID NO: 76756 - DNA, 367 bp, Zea mays
atgtgtcctagcgccgccgccgccccaactcgccttgcgtgactgaaagctcgtcggcttccgtccacgcgagaagcgagagcatggacacccaggtgaagcttgctgttgtggtgaaggtgatgggcacgaccggctccaggggtcaggtgacccaggtcagagttaagttcttggatgaccagaaccgggtcatcatgaggaatgtcaaggggcccgtccgcgagggtgacatcctcaccctgctcgagtccgagagggacgccaggaggctgcgctgaagccctagcgttcttggtgggctcttgtttggtctttggtgtcttcgaatttgtgctatgtttgaacttctgtgaccctgtcttga

SEQ ID NO: 76757 - DNA, 383 bp, Zea mays
ctcaacctgagaagctagctagagctagctagctccgggcgcccgcagcctggccacgaacagccaccgcattattgcgcccggcctcctgctggtcgcggccacgacgctagtcgtcgtcgtcgtcgcgcagctcgcggcgccggctgccgcctgcccctactgcccgacgccgacgccgccccctccgccaccgcccccgcccccggtggtgaacccgccgccgtcgtccacgccgtgccctccgcctccctactcgccgtccacgccgacgggcaagtgccccgtggacacgctgaagctgctggcgtgcgtggacgcgctcaacggcctcgtgcacgccgtcgtcgggaccaacgccagcgacacctgctggccgctgc

SEQ ID NO: 76758 - DNA, 355 bp, Zea mays
acggacactcgggggcgagggtgaagacgtcggcgcaggacatcatcaacctcaagccactcatcgacaagaaggcgtggccgtacgtccagaacgacctccgcctccgggcctcctacctgcgctacgacctcaagaccgtcatcgcttccaagcccaaggaggagaagcagagcctcaaggagctcaccggcaagctcttcagcaccatcgacgatcttgaccatgccgcaaagatcaagagcaccccggaggccgagaaatacttcgcagcaaccaaagatgcgctcggcgacgtcctcgccaagctagcctagatggaagctaatagatgggttaacgatggccacgtaat

SEQ ID NO: 76759 - DNA, 374 bp, Zea mays
gacgcaggcctctacacatgacgtcatattaacgcgtgggcgatcgaaacgtggtcttgaattaactatgatctctatgagcctggagatggatcaacccgtcgtgcgttgtttcattttgtgatgaatgggagagagggtatgggacaagattgatcaacccgtcgtgcttacgtctcgttaattaggagagctaccgctcggatttggtgatttgtaatacaacaaccagtgatgaacaacttcattcacatgtacacatccatcttgaggtgaccgaagatattagacgcaccaaggtgaggacgaacaatagacggttgacacgtcagtgcccagcgccaagctacctccaaacaaaaaggggggccgcc

SEQ ID NO: 76760 - DNA, 353 bp, Zea mays
aacaaggatatagctagcgaacaccctgagagattttttgttggtgaaatagtgagggaaaagatttttgttcagtacagacaggaaattccttattcatgccaggttaatgttgtcagttacaaaagtcggcctacggccaaggccttaattcaggttgagatacttgtggagaaagaatcacaacgaggcattatactagggaaggatggcaacagcataaagatgctggcaaccgcatcgaggcttgacatccaggactttctacagaagaacatctaccgtgaggtggaggtcaaagtgaaggaaaactggcggcaggaccaactactcctgaagcggtatcgctacgg

SEQ ID NO: 76761 - DNA, 387 bp, Zea mays
gacgacttgtttcattgattcttgaagagatcgagcttcttttgcaccacaaggtcgaggatgtcttgcaactgcggatcaagctgcggctgcggctcaagctgcaagtgcggcaagaagtaccctgacctggaggagacgagcaccgccgcgcaggccaccgtcgtcctcggcgtggccccggagaagaaggccgcgcccgagttcgtcgaggccgcggcggagtccggcgaggccgcccacggctgcagctgcggtggcaactgcaagtgcgacccctgcaactgctgatcacatcgatcgacgaccatggatatgattattatctatctagcttgtggtggtggttgaacaataataagcgaggccgagctggctgccatacat

SEQ ID NO: 76762 - DNA, 390 bp, Zea mays
aagatcaagctggagcctgatctgattcatgtttttttctagattaccacagttgatgaagcaaagaaattatacatgttatttgtcattgtagcccagaaaagataatggaaacattagccccaaggacaaataacatgtataatttctgggctacaatgaagtatttctcaaatttgcgcaagacattgggtcctggaattgatggctgggaaatatctttggaaggaatgatgagcatagtggtacttcttggacttgcatctattggggagtgagcaagtttgttttgaatgatccttcattgtcaaagtcttatcgtaagaagaaaaagatgtcgatccacccgtcaagaacaaggtgcagcggagatctttctcctcgtcgctg

SEQ ID NO: 76763 - DNA, 273 bp, Zea mays
gtgacgatcggaggccatgtgctgcgcgaaggtgagtggctgtcgctgaatgggtcgactggtgaagtgatccttgggaagcagcggctttccccacaagcccttagtggtgatctgggaacttccatggcctgggtggatgacgttagaaagctcaaggtcctggctaaggccggtgcccctgaggagtcattgactgcccaagacaaggggggcaaagggattgggattatcccggacagaccagatgtcctttgcttcagacgagaggat

SEQ ID NO: 76764 - DNA, 388 bp, Zea mays
accttcggcgaggcccgcgtgacgatgcgcaagacggcggcgaaggccaagccagcggcggcgtccgggagcccgtggtacggccccgaccgcgtgctgtacctgggcccactgtccggcgagccaccgagctacctgacgggcgagttcccgggcgactacggctgggacaccgcggggctgtcggcggacccggagacgttcgccaagaaccgggagctggaggtgatccactcccgctgggccatgctgggcgcgctcggctgcgtcttcccggagctgctcgcccgcaacggcgtcaagttcggcgaggccgtgtggttcaaggccggctcccagatcttcagcgagggtggactggactacctcgggaacccgagcctcatcc

SEQ ID NO: 76765 - DNA, 402 bp, Zea mays
agtgttcgtttcgagaacgcacgcacagacgccatggaggtgacaccaaaccacaccctgaccgtgaccgggtgggcggccatgaacgagtccgccggcaaggtggagcccttcgtcttcaagagaagggagaacggcccggacgacgtgacgatcaaagtgcagtactgcggcatgtgccacacggacctgcacttcatcaacaacgactggggcatcaccacgtacccgctggtcccggggcacgagatcacgggcgtggtcaccaaggccgggcgcaacgtcacgggcttccgtgtcggcgaccgcgtcggcgtgggctgcatcgccgcctcctgcctggactgcgaccactgccgccgctccgaggagaactactgcgaccgtgtggcgctcacctac

SEQ ID NO: 76766 - DNA, 377 bp, Zea mays
acccacgcgtccggccgcaccagcgccagcccgcgccgtggtcagaaggaggtccttcaccgtgcgcgcctctctccgcaaggccaccggcaccgccgccgtggcaatggctgccagcgccctgcttgccggcggtgccatggcccaggaggtgctgctgggcgcaggcgacggcgggctcgtcttcgagcccagccagttcaccgtcaaggccggcgacaccatcacattcaagaacaacgccggcttcccgcacaacgtcgtcttcgacgaagacgaggtgccgagcggcgtcgacgccaccaagatctcgcaggaggagtacctcaacgcgccaggcgagacctactccgtcaccctcaccgtgccgggaacct

SEQ ID NO: 76767 - DNA, 380 bp, Zea mays
actggtctagcattcccgggcccaaccactgcgtccaccaaatcggcctacgcccacggttccacctcctcgtccacgaggtgaggaaaccctagcgaccgaccatggcgttgctcccgcgcaccgcgcggctggccctcctttccaccccgcgggcgtactccgctgccgctgctgcgggcgcctccccgacgtccccagcgccatacgggggcgccccccccaccggcgatgtcgaagacggccgagttcgtggtctctaaggtggacgacctgatgaactgggcgcgtaagggctcgatctggcccatgaccttcgggctcgcctgctgcgcggtggagatgatgcacgccggcgcgtcccgctacgacttcgaccg

SEQ ID NO: 76768 - DNA, 397 bp, Zea mays
caacttttctgggaagcgctgctgtagctggtacactacctgaatcaattttacaagtatcagataagagtggcactacactacaagatgttctgaaaatgaattcttttgaggctacctctactgctattagtcaagccaggtacaacccggagtctgtggggagttatgttgaggtacacatggagcaaggccctgtcctggaagcccttcattatccacttggtgttgtaaaaggaattgcaggacagacacgattgaaggtaatagtagatggttcgcaagggcatgctggcacagttccaatgaaattgcgccgtgatccgatggttgcagctgcagagctcgttgtgactctggaacgcctctgttaagagcccaacagtttgctgaccta

SEQ ID NO: 76769 - DNA, 416 bp, Zea mays
ccaagaagtgccctccactttgtaagctcgtttccgaaaagagctctagagccgccacacacacacacaccatggcaccgcgttctctgctggcagtgctcgccgtcgccgccctcgcgctcttgcacgccgcctcggccaagtcgtcgtggcttgacaggaggttcaccacggacggcaccgtccgcacgggatacgacgattcgggccagcaggtggtgatgctccgcctcgaccagcactccggcgctgccggcttcaactccaaggagcagtacctttacggcgagttcagcgtcgagatgaagctcatccgggggaactccgccggcaccgtctcgtgcttctacctctcttccggcgacggcgacgggcgcgacgagatcgacatggagttcatgggcaactcgagcggg

SEQ ID NO: 76770 - DNA, 290 bp, Zea mays
accacgcgtccgcggacgcgtgggcggacgcgtgggcgcagagcatcctggccatctgggcgtgccaggtggtgctcatgggcgccgtcgaggggtaccgcgtcgccggcgggccgctcggggaggtggtcgacccgctgtaccctgccggcagcttcgacccgctcgggctcgccgacgacccggatgcgttcggcgagctcaaggtgaaggagatcaagagcggccgcctcgccatgttctccaagttcggcttcttcgtgcaggctatcgtcagcggcacggggccc

SEQ ID NO: 76771 - DNA, 224 bp, Zea mays
aggtcacgatcgggggcacaggagccatccctgccctcgtggtcttgctgaccgatggcatgcagcgcgggaagaaggacgcggcggctgccctgttcaacctgtgcatctaccaggggaacaagggccgcgccatacgggctggcctcgtgccactcgtcatggggctctttacgaaccccaccggagctctgctggactaggccatggcgattctgtccata

SEQ ID NO: 76772 - DNA, 360 bp, Zea mays
acgtcgatgccaccaattgctactgctatcaagagcaggaaggaaacaccgccgccgccgcgccttccattccagtactcgcggaggaaaggaacaccagccagcgccatggtcacgtcaacgaccgccgccgccgtgctgtccccgccgtccgtggccgggcttcgcctggcgccgtcaccccgggcgcgcgtggctttccgcgcggtgcgggcgcaggggtctgtggcagctcgcgcggagctgaacccgtcgctggtgatcagcctgagcacgggagtgtcactcttcctgggctgcatcgtcgtcgtcaacttccagggggagaacatgtgcaatcaagtgccctaacagaacggc

SEQ ID NO: 76773 - DNA, 240 bp, Zea mays
agttcaacacagtgaactacgccggcgtgtccaccaacaactacgccttggacgaggtctcagaggtgaaatgagtggggccggccggctcaaaggctccgcgctagctaccgtgtgattgatttgtagtagttgtgaaatgaagctgtgaagctgcatgctgtgctggctaacgtcacaacatcgatcctatgtgtaatagcataatccacataatcatatcatgtaattgcgtgcttt

SEQ ID NO: 76774 - DNA, 420 bp, Zea mays
acggacgcgtgggctggaaaccctagccgccatatctcacgatccactcgagcaccaagccgagggaaggtgaggagcgatggcgcgcggcgtggtgtcggcgaagggcggcgcggtcgcgggcaagaagaaggggtcggtttccttcacgatcgactgcaccaagccagtggaggacaagatcatggaggtcgcctcgctcgagaagttcctgcaggagcgcatcaaggtcgccggcggcaaggctggcaacctcggcgactccgtcaccatctctcgcgagaagaccaaggtcaccgtcacctctgacggacccttctccaagaggtacctgaagtacttgaccaagaagtacttgaagaagcacaacgttcgggattggctacgcgtggttgctgccaacaaggaccgaaacgtcta

SEQ ID NO: 76775 - DNA, 383 bp, Zea mays
  unsure (1)..(383): unsure at all n locations
taagaagggagcgaatgaagcgacgaagaccctgaataggggcatatcggagtttgtagtgatggcggcggacacagagcctctcgagatcctgctccacctccccttgttagctgaggataagaacgtgccatatgtgtttgttccatcgaagcaagctcttggccgtgcttgtggtgtgacaagaccggttattgcttgctcagtgaccagtaatgagggtagccagctgaaactacagatacagggtctcaaggactccattgagaagcttctcatctgatctgccgaagacctttcagtgtgatgggcctcatcgacacttttttcagaggcttggactggtgatggtgtcntgtttactttgcgcttttcaaactata

SEQ ID NO: 76776 - DNA, 416 bp, Zea mays
aaccaaacttactgaggtgtctgtgagtgacaaacttgaaggcttccgtgcaacaaaagagaactttaaaggtttgagttttcctacaatttcatctgtgggaccaaatgcagcagttattcactataaacctgaagcaagcacatgttcggaaatggatgctgataaaatatatctttgtgactctggggcacagtacctggatggtacaacagacattacaagaactgtacattttggtaaaccctcagcacatgagaagtcatgctacacagcagttttgaaaggccacattgcactagacattgctgtgtttcctaatgggacgacaggacatgctcttgatattctttcacgagcaccactctggagagagggtcttgactatcggcatggtacaggccatggaattggat

SEQ ID NO: 76777 - DNA, 360 bp, Zea mays
ctttcacgaattccccagggtacggtccacttcgctcgcaaccttccccagccatggcgaccgcgacgcggaggctgctccccgcgctcctcaggaccctagctccagccggcgcgcgcggcctctccaccgagaaggctgttggcgcagccgccgtcgtcggcagccacaccgctaagtggatgcaggacacaagcaagaagtcgccaatggaactgatcaacgaggtagctccaatcaaggttgatggtcgcattgccgtctgtgaaggggcttcttaaggtgttggacttggcgacccagtcgagtacatctgccttgatctggaggcacctaatgtgtgtaagtactgtgggctcc

SEQ ID NO: 76778 - DNA, 305 bp, Zea mays
acttccacatcaaggcgttcgcggcgggggtcatcctgggctggccacggggttcatccacatcctccccgacgcgttcgagaagctcacgtcggactgcctctccggcgggccgtgggaagacttccccttcgcggggctcggcgccatggtgggcgccatcgggacgctcgtcgtcgagaccgtcgccactggctacttcacgcgcgtccacttcaaggagagcgccgccgccgccctgggcgccgccgccgtcgggcgacgacgagcagcagcaggcagcaggcggggtcggcgccgcacgt

SEQ ID NO: 76779 - DNA, 422 bp, Zea mays
cttagggtttccgcgtctccggccgccgcggtggccaaccagctctctggtggggccgcggccccggctcctgccagggtgacggcgcagcgcagcggcgtctcgctgtccgccgccgccgccggcaaggggaaggagtgctcagcggggtggtgttccagcccttcgaggagatcaagggggagctcgccctcgtgccccagtcccccgacaggtcgctcgcgcgccacaagttcgtcgacgactgcgaggcagccatcaacgagcagatcaatgtggagtacaacgcctcgtatgcgtaccactccctcttcgcctacttcgaccgcgacaacgtggccctcaaaggatttgccaagttcttcaaggaatccagcgacgaggagagggagcacgccgaaaagctcatggagtatcagaac

SEQ ID NO: 76780 - DNA, 392 bp, Zea mays
gcgtcatgcttgccggcggcggcgccatggcccaggaggtgctgctgggcgcaggcgacggcgggctcgtcttcgagcccagccagttcaccgtcaaggccggcgacaccatcaccttcaagagcaacgccggcttcccgcacaacgtcgtgttcgacgaagacgaggtgccgagcggcgtcgacgcctccaagatctcgcaggaggagtacctcaacgcgccaggcgagacctactcggtcaccctcaccgtgccgggcacctacgggttctactgcgagccgcaccaaggagcaggaatggtcggcaagatcacagtcaactaagagctagccatccattccatgcatcccgatctgtatgtactccgcccgtccatggatgatgcatcc

SEQ ID NO: 76781 - DNA, 375 bp, Zea mays
acccacacgtccggcaccttggagctggagcatgtgctggtatcatagctatgtctgctacttacccgatggatatggttaggggaaggatcactgttcagacagacaaatctccctaccagtaccgtggtatgtttcatgcactgggtacagtctaccgtgaagaacgctttcgtgctctatacaaagggtggcttccatctgtaatcggacttgttccatatgttggtctcaactttgctgtatatgagtccctcaaagactggctactccagacaaattcatttggccttgcaaatgactactagctgcacgtagttacaaggcctgggtctggagctgtggctggaaccactggccagaactgttgcagac

SEQ ID NO: 76782 - DNA, 403 bp, Zea mays
cccacgcgtccgcccacgcgtccgcccacgcgtccgcccacgcgtccgcccacgcgtccggggctggctgctatgttcgaggcgcatctgaaggagctcgacgcgccgttccacgaggcacccgacaaggcaggctggttcttgacgacgaacgttgctgccaagcaatggctggagtcgaaggcggcatcagaactagtaactgtgtaaactggttactctggcgcgtacataggattatttttccgtgtaagctacatgtgttctccgatatatgcaggtgaagatgttgagttagcctatctccgaccttactcatccgtatacctatattcaaatttcactctacgatttataatgaaatttaaaatagatcttaaataagaaaaaaataggggcagat

SEQ ID NO: 76783 - DNA, 181 bp, Zea mays
gctgctggtggatgtggtgatcaacagtattattacagagccatgctatgtgaacattactagtagcagtgctcataaaagctacaatcccatgtccttttttttccccagtcatgtaaaacttccaaactgctccatggttcaaaactctgttcttcaatacatcatcaattatcgatta

SEQ ID NO: 76784 - DNA, 404 bp, Zea mays
ctccaggcgtcaggtggtgtttgtggacctgctttgattaaaaggttcaaggaagagataaatgaactgggacttgatgatcaggtggctgtcagtgcatgctcacacgtgggaggtcataagtatgcaggaaatgtcatcattttcagttctgatgccaagggagaagtgactggtcattggtatggttatgttgttcctgatgatgtgcctgttttgctgcataaacatattggacaaggagaagttgtggaccatctatggaggggacagataggtttatctgtggagcagcagaagcgagctctcgagcttcggaacatggtaaatggtggcgaagaatcccttgaagaaaccagaacagatggtgcttctttcagccctgcagcagctggtggatgctg

SEQ ID NO: 76785 - DNA, 360 bp, Zea mays
ccaaggccgggattgccctgaacgaccacttcatcaagctcgtctcttggtacgacaacgagtggggctacagcaaccgcgtcgtcgacctgatccgccacatgttcaagacccagtagagagagatatttctgcctccctatcgtgggtcgtccccaatggcctttggtcgcagaccatctttgctgcttgtctatgctgagaataaatgtgaacggtgcccctggacgctggatccatgctggttttggacacgttgtctttttgtgtttaacttatctgctaccgtcctgtaacgaattcactaagttctagttcttttgtgctttgttaagaatataaacaatgaggtttcaattt

SEQ ID NO: 76786 - DNA, 371 bp, Zea mays
gttaatccactcgtgcattcttctagagcaaaaagacctagacaaaacgttcctccaccttcacttgaatcatctgttctcacaaaagaaggtgcaaccaaggtcgaaatcgattcagctcaaacacaacaccaaaattcggtcttgcaaggtcaggagcagatgaccttgaggaacaacctgactgaaagcgctgattctgattccactgttcagaagccgatgatgtggtccccatcactcaatgggaaagcccacactcattttcagcagagacctgctatggataattggatgccattgggaaggcgtgaaaatgacttcaaggacacccgttctgccttcaaggatgcccgcaccgcctctcaatc

SEQ ID NO: 76787 - DNA, 380 bp, Zea mays
ataatttggaaatgaagaggaaaagaaacgatggtacaaaaggtacagttgttctaaatagcggttctaaagtagagggattgttatgtcttttggaacaggccattcacagtggcagggcacttgttctgagtgaagatgagcttgctgattcagatctggtctatgaaaagtctgttgcttttacaaagtcaattccgcgaagactggtttttgagaatactcgaaggaagtccagtgccaggagaaatgtgccagacaatcatgcaagaactaaaacacatcttgtagaaaataaaatgttgagcagtcctgttgaaaataaatttatcgttaatggaggatctgcaatgcagacaattgaccatgggcaagagttt

SEQ ID NO: 76788 - DNA, 354 bp, Zea mays
  unsure (1)..(354): unsure at all n locations
atcacgacagttcttgttggaatgaacgctttggaacaagtggagatttcattgttcattaagctgtactgcataactagcttcgtaatgcttttccccttctttctacaatgatctgctgcagccttgcatgctgacttaagttcatctggtgcagggtgccactccggtggaccagtatctgttaaaagacccatggagaggggcgaagcactgataaccccaacacctttgctcttcaagtaggggagcagatcaacaatggaggtgtcattgatcccgtantgacaataagatagaatcacgtccatcgagcctggtgctacaaggtccaggacataaaggtagatgctg

SEQ ID NO: 76789 - DNA, 354 bp, Zea mays
agaagatatgggatcatgctgcaggggtggttatcattcaggaggctggtggagtggtcacagatgctggtggccgcccattggacttctcaaggggtgtttacctggaaggtttggatcgaggcataatagcttgttccggagcattgcttcatcaaagaattttaaatgctgttgatgcgagctggaactcatcaacactatgaaccaaacaataaggtcttaggagagaatggcctcatgttggtcatagcatggtaaattggaaaactgatttaagtattcattgtggtgctgttgtgactatggggtaacaccgtaacagtgcagcatataagatagtaatagattgtc

SEQ ID NO: 76790 - DNA, 372 bp, Zea mays
cggacgcgtgggggcggcgctctcccgcgcgctcggcgtcttccccgcgctcgccggccgcctcgtcacgctccacgacgacagcatcgtgatacggtgcggcggcgacgacgccgccgtcgagttctaccacgcggtggcgccgtctctgtcgctcggcgacttcctggtgcccggcgccgacgtgccgacccgtttgacgaacggcctgttccccatggaccggacggtgagctacggcggccacggccgcccgctcacggcgttccagctcaccgtgctcggcgacggcgccgtgttcgtcggcttcgtcgccaaccacgccgtcgtggacggcacctccttctgggacttcttcaacacgttggccgg

SEQ ID NO: 76791 - DNA, 240 bp, Zea mays
gaagagggtatgaaaaatgctttacaatgtggagcagaaaatgattaagaagatgccgacggaaaaccggctttacattttgcatgtggctatgttgaagtgtgcataaaatctccttgaggcgggggccacaattgatgccctagataagaacatgaacactgcgttgcacgatgctgctgggtatggtcggaaggaatgtgtggatcatctgttgaactatggtgctgcagtcacgct

SEQ ID NO: 76792 - DNA, 368 bp, Zea mays
gtcaccaactgggcgctcgtgtccatgaaccacgacacgcagtcgtgcatggaccccaacgtcatggaggccaaggtggtggtcagctcctgcggccacgacgggcccttcggcgccaccggcgtcaagaggctccaggacatcggcatgatcagcgccgtgcccgggatgaaggcgctcgacatgaacgccgccgaggacgagatcgtgcgcctcacgcgcgaggtcgtgcccggcatgatcgtcaccgggatggaggtcgcagagatcgacggcgccccgaggatgggcccgacgttcggcgccatgatgatctccggccagaaggcggcgcacctggcgctgaaggcactgggcaggcccaacgc

SEQ ID NO: 76793 - DNA, 370 bp, Zea mays
cgaaggggctcatcccggactccgtcgcctcctacagcttcgacgaggccacgggcgccttcgagatccacctcgccggcacctgctacgtccacttcggctcccacctcgtctactacgagaggaccataaccggcaagctctccaagggcgccatctcggacctctccggcgtccaggccaagaagctcttcctctgggtctacgtcacggggatggtcgcgcaccccgaccagggcaccatcgagttccaggccggcttcatctcggagtcgctatcggcctcgatgtttgacgaggtgcccacctgcggttccagcgttggcgcgcagctgcgcggcgcggctggggtgatcggcgagcttgggct

SEQ ID NO: 76794 - DNA, 384 bp, Zea mays
cccacgcgtccggcaaccggtccaacactttcacgctcaggcgctcagctctagcaatggctgcctccaccatggcgatctcctccacggcgatggccggtacccccatcaaggtgggctccttcggcgagggccgcatcaccatgcgcaagaccgtgggcaagcccaaggtggcggcgtccggcagcccctggtacggccccgaccgcgtcaagtacctcggccccttctccggcgagcccccgagctacctcaccggcgagttccccggcgactacggctgggacaccgccgggctgtccgccgaccccgagaccttcgccaagaaccgcgagctggaggtgatccactcccgctgggccatgctcggcgcgctcggctgcg

SEQ ID NO: 76795 - DNA, 367 bp, Zea mays
atcaaacgtgcacatgaggattctctgcaaggttcaaaggagttctgcatagaaatacaattgctgtcaagattacatcatcgcaatttggtttctcttgttggctattgtgatgaagaagacgagcagatgctggtttatgagttcatgcccaatggtagcctacgtgatcatctttctgctaagactgaaagacctctgagctttgggcagagggtccatattgcacttggagctgcgaaaggacttctatatctacataccgagggaaatcctcctatatttcatcgtgatgttaacgccagcaatagtcttctagattccaagtttgtagcagaggtggctgactttggtctttcaaagcttg

SEQ ID NO: 76796 - DNA, 400 bp, Zea mays
gtctggtcccccacccctcagcgcgacgaaggtaagatgttcctgcggaggatcctgaccggcgggggcggcctggcggccctgagggcggcgcgcgccgtgaaggagacgacggggatcgtgggccttgaggtggtgcctaacgcgcgagaggttctggtagggctctacgagcgcacgctcaaagagatcaaggccgtccccgaagacgagggttaccgcaaggccgttgaatccttcaccggtcaccgcctccagatctgccaggaggaggaggactggaagcgcatcgaggaccgaatcggatgcgggcaggtcgaggagctcatcgaggaggccgaggacgagctcaagctcatcgctaaaatgattgaatgggatccatggggtgttcccgatg

SEQ ID NO: 76797 - DNA, 403 bp, Zea mays
cggacgcgtgggcggacgcgtgggcggacgcgtgggtttttttttttttttttttgcctttgggcatctttctcctcatcaatatataagacagatctcctgtctgattgtttcaaaaaagtttaatctaaaaacttaagttgatgaaaaaagtgggcaatttccctgtactgtgtactccagcatctacgagcccggattctagtaattcagataagggcgcgggcggtggcggtggcgctggcggcgagcctggacgagccgtagagggtctcctcgaaccggatgatctcgttcttggacccgtaggccacctgggtccgctcgtcgagctcgttgatcaccctgtccagcaccgactgcttgccgtcgctgctgtacccgccggccttctccatcaaga

SEQ ID NO: 76798 - DNA, 359 bp, Zea mays
cccacgcgtccgcgctgcttctctctccctctgctcgctctccccagccgaagcgcccttcttccctggtctcccatggcgtcggtcgctcctccctgagctcgcccctgcgcgctctgctctcttccccacggcgcgccctctccctcttgtttctctgctggccgccgctcctgctcgttcttctggcagccgcgcgcagccagcttctcctccagtcgcgcctgctgcccgctcggcacccatctccctgcggccactctcctttgacacgcgcctgctcccttcgccgcgcgctcctcagctccgcccggtgctcctccatggggctcggcttcttcctcctaaagtcccttcgt

SEQ ID NO: 76799 - DNA, 351 bp, Zea mays
  unsure (1)..(351): unsure at all n locations
gccagaccagtcgccgcggcccgtgcgcttcggtatcctgggctgcgccgccatcgcgcgaaagctggcacgcgccatgctgctcgcgcccggcgcagccgtcgccgccgtcgggagccgctccgaagtgaaggcccgcctcttcgccgccgacaacggcctcgacgtcgccaccacccgcctccacggctcgtacgatgcgctcctcgacgacccggacatcgacgccgtctacatgccgctccccaccagcctccacgtgcgctgggctaccgcagccgccgcacgtggcaagcacgtgctcctagagaagcccacggcgctgtgcgccgccggactcgacnacatcct

SEQ ID NO: 76800 - DNA, 397 bp, Zea mays
aaagaacttgggctctatgccaatgtcagaccttgcaacagcctcccaggttacaagaccagatacgatgatgttaaccttgtaacaattcgtgaaaatactgaaggagaatatagtggtcttgagcatcaggttgtgagaggtgttgtggaaagtttgaaaattattacacgccaagcaagtttgagagtggcagagtatgctttccattatgccaaggccaatggccgggaaagagtctctgcgatccacaaagccaatattatgaggaagacagatggtcttttcctcaagtgttgccgtgaagtgtctgaaaagtaccctgaaattcaatacgaggaggtcatcattgacaattgctgtatgacgcttgtgaagaatcctggtctttttgacg

SEQ ID NO: 76801 - DNA, 255 bp, Zea mays
cccacgcgtccgccgcatgcggcgtgaacggaagaaggcgagagcggagggcgccgctgagcctcagttggtactagctgctgttgatgaaaactctgaggtcagcgcggactgctgataagtttcctgtgtggtgtttctctttttcacagcccttgttacactttttcttccttaattgtaagaccacatgatctataaaggtcatatttacatgtgttgtttagataaatggatatgttctacttgtacgtt

SEQ ID NO: 76802 - DNA, 341 bp, Zea mays
gcttctcctccccctcttatcaagtcctcctcgggttagggttccttagggttttgtggaggggcgatggcggcggctgatgtggagtaccgttgcttcgtcggcggacttgcctgggccaccagcaacgagtcgctggagaatgccttcgcctcctacggcgagatcctcgactccaaggtcatcaccgaccgggagacggggaggtcccgcggcttcggcttcgttaccttctcctccgagaactccatgctcgacgctatcgagaacatgaacggcaaggagctcgacggccgtaacatcaccgttaaccaggcccagtcccgtggcggccgcggcgg

SEQ ID NO: 76803 - DNA, 347 bp, Zea mays
  unsure (1)..(347): unsure at all n locations
cggacgcgtgggcgcgagtgagtgaacaccagccgtattgtcccgactcctgacccctaccgatcctcgcctgctgcagccatggcgacctccgcggcgctctccaccgccgccaatcccacccagctctaccggtcccgcgcttcgctgggcaagccggtgaaggggcttggcctgagcatgggccgcgagcgcgcccagcggagcattgtgtgccaggcggcgagcagcatctccgccgaccgcgtccccgacatggagaagcggaagctgatgaacctcctcctcctcggcgccatctcgttgcccaccgtcggcatggtcgtcncctacggcgccttcttcgt

SEQ ID NO: 76804 - DNA, 364 bp, Zea mays
gtacatacatactaggcagccaggcagccatggcgcccaccgtgatgatggcctcgtcggccaccgccgtcgctccgttccaggggctcaagtccaccgccagcctccccgtcgcccgccgctcctccagaagcctcggcaacgtcagcaacggcggaaggatccggtgcatgcaggtgtggccggcctacggcaacaagaagttcgagacgctgtcgtacctgccgccgctgtcgacggacgacctgctgaagcatgtggactacctgctgcgcaacggctggataccctgcctcgagttcagcaaggtcggcttcgtgtaccgcgagaactccacctccccgtgctactacgacggccgcta

SEQ ID NO: 76805 - DNA, 390 bp, Zea mays
aggtggagggcacaggctcgggattcgtgtgggactccacgggccacattgtcacgaattaccacgtggttgcgaagttagctggagacggatctgcatctcatcgctgcaaggtgtttttggagggttctggtggcaaaagttactcaaaggaagcgaggctaatagggtgtgatccagcatatgatcttgcggttctgaagatagatgctgacagggaccagctgaggcctgctctgattggcacatcacggagtttgcgagttgggcaaagctgctttgccattgggaacccttatggatatgaacacactctaactactggggttattagtggattggggagggaaataccatctcccaatgggagagcgatccgtggggctatac

SEQ ID NO: 76806 - DNA, 382 bp, Zea mays
gagtgccccttcgtgcaccccggcgagaacgcgcgccgccgcaacgcgcgccgcttcacctacagctgcgtcccctgcccggagttccgcaagggcagcgcctgccgcaagggcgacaactgcaaatacgcgcacggcgtcttcgagtgctggctccacccggcgcagtaccggacgcgcctctgcaacgacgaggtctgctgcgcgcgccgcatctgcttcttcgcgcacaagcccgatgagctgcgcgccgtcaacccgtccgcggtctccgtcaggatgcatcccaccgtttcgtcgacgcgctcctcgccgcccaacggactcgacatgggcgccatgctcaacccgggctggtgctcctcaccggccagcacgctca

SEQ ID NO: 76807 - DNA, 348 bp, Zea mays
cggacgcgtgggcggacgcgtgggattcgtgattgggttcttggaacacctgagggtacatttgtttccatgggtgtgtactctgatggttcatacggtgttccttctggactcatttattcattcccagtaacatgcagtggtggtgaatggaaaatcgttcaaggcctcccgattgatgagttctcaaggaagaagatggatgccactgcccaagagctgacggaggagaagacgcttgcttactcatgcctcgagtaaattctaccacacccagagagcaattgccaccccaatgttttgaataaaaaaagaaactccaactcgattcatagattctcactcaga

SEQ ID NO: 76808 - DNA, 399 bp, Zea mays
gtatccagatgatgcaacagatcataaaagagtcggctggggttgagtacctgcagaaggcttttgctgatcgctatggacctcctgagacagcaccagcttctcttcccctaactctgcaatggattttgacatcgaagaacattgcggaagaagaatggagtgaacattcagactgtctttcagtaatgccagcagcagggcaggctcctgctcttgttccggtactccgatctggtcatggagctccagtagggcaaccatctccttctgcaggagacacctctggtcaaccagagtgcaagggtgagaagcttgacaagctaataaaggatggcctgttgcaactcattagtagtgtggagggcttgcaattgcagtcaactcctgaaagttttc

SEQ ID NO: 76809 - DNA, 368 bp, Zea mays
cggacgcgtgggcggacgcgtgggggcaaaggaatcccaatcaggcaagcaaaaggaagaaccagctgctgcggccggagatgtcgtcgcagctgatcgaggagcaccggtcgggcgcggaggtgcacgtcgggcacgagctgtgcgagcgcaagtcgcgcgagttcatggtggagctgggcctccccgacgggctcctcccgctgcccagcctggacgaggtgggctacaaccggtcgacggggttcgtgtggctgcggcaggccgccggcctgacccacaccttcggctccatcggcaagcaggtgtggtacgacagggaggtgacggcgttcgtggagcccgggcggatgcacggcctcgccggg

SEQ ID NO: 76810 - DNA, 377 bp, Zea mays
gtttagcctccaagcaggggcgccgcgcggggtattctgtccgtcgttgagggtagagagtcacttgcaccgggggagcggagatgaagccggttgtggggatcgtggtgtcgaacaagatgcagaagtcggtggtggttgcagtggaccgtctcttccacaacaaggtatacaaccgctacgtcaagcgcacctccaagttcatggcacacgacgatgacgactcctgcaacattggcgaccgggttaggctggatccttctaggcccttgagcagacacaagcactgggttgttgctgaaattctccgcagagctaaggtgtacgttccaccagctgcaacagcgtccagtgaacgtggtagcaaatctcaacaa

SEQ ID NO: 76811 - DNA, 380 bp, Zea mays
gccgtgtaataatggggaacgtagaaatagttcaccctggatctaagcagtgccaacctagtaataagtattttgatagtggagtagacgaccttaaaaatccacggcattacgttgtgtgggatatgaatctgaatagtcatatctattctgagtttgtagtcactgtcaaattgccttctaaaaccaaagattcctttgtatcgcaagaaaactgtcagaattcgtctgatctatcactggtgttgaactctagttcacctgattgtatttcacagaagagttccactgttggagcagcaagagtgcagtaattcagattctgtgatttgactcaataattgacatgattgcattattgagattataacttggagctg

SEQ ID NO: 76812 - DNA, 382 bp, Zea mays
cccacgcgtccgcggacgcgtgggcggacgcgtgggcggacgcgtgggccccgacgacggcgcgcacgggctgtaccggctgtggacgtgccaggactgcgcgggcgacctgggcgagtttcccggcgacgaggctgccgcggccgacggcccttcggccgcgcgcgcggcccgctcgccgacgacgctgtcgcacgtcgtgttcggcatcggcgcgtcggcgcggacgtgggaccagcgccgcgggtacgcggagctgtggtggcgccccggccagatgcgcgggcacgtctggctcgaggagcagcccgcgagcccgtggcccgcggcgacgtgcccgccgtaccgcgtctcggcggacgcgtcccggttcggggaccgc

SEQ ID NO: 76813 - DNA, 387 bp, Zea mays
cccacacgcacggccgcaggcagcagcaccatgtggtcggcagcaacggcggcggcggcgcgcgcggtgtccgtgtccccagtcccggcgccttcgctcctcagcggccggcgcggcgggtcgcggggcggccgggggtcggtgtcggtgcgcagcacggtgtgggacttcgtgggcggcgacctggtgcggccggacctgggcaagtggctggacgacgtggagaagcacaaggcgctggccatctacccgccgcacgagggcggctacgagggccgctacctgaaccgcctccgttaccagggctactacttcctcgacctctccgcgcgggggctcggcgacccggagaccacgctcaccaaggtccaccccgtctgcccgcct

SEQ ID NO: 76814 - DNA, 345 bp, Zea mays
  unsure (1)..(345): unsure at all n locations
cgcatctgcttccagagccccccgccgccgctgcgccctcctctcggtcctgccgtccgtcgaggtaaaaggacagcatggtgagggtcagcgtgctcaatgatgctctcaagtccatgtacaatgctgaaaagatagggaaacgtcaggtcatgatcaggccgtcatccaaggtgatcatcaagttcctgacggtcatgcagcgccatggttacattggcgagttcgagtacgtggatgaccacagagctgggaagatcgtggtggagctgaatggaagactgaataaatgtggtgttattagcccacgttttgatgtangtgttaaggagatcgagggatgga

SEQ ID NO: 76815 - DNA, 388 bp, Zea mays
agcttctgttgttaaatgctctgagctgccacaggtttctctcagagagaaggcctcaaaggtcttgaatatgctgattggggaagagcctactggaaccacagcaacaaaatctgcaatggccacacctgttcagatgcctgatttgatcgatacaggtgatcaagatggtctggcaacaagttctggacaggaaagcaatggacaaaaaaatactgggaaagcatatgtttcttcagttgatgatttgcttggtggtgaacctattgctgatacaagtgtcactgctgatagcaatggaagcgatccatttgcagatgtatcgttccatgaggtagaggctaaggagactaatgatctcttctcaggattgatagtagaagaaaaa

SEQ ID NO: 76816 - DNA, 334 bp, Zea mays
cccacgcgtccggttccccgaccacaccgttcctccgagcccaggatcagccccgcgccaggaggaagtttgttcttttaacaatatgtcgagggaggagaatgtttacatggccaagttggctgagcaggctgaaaggtatgaggagatggttgagtatatggagaaggtggctaagactgtagatgtggaagagctcactgttgaggagcgtaaccttctgtctgttgcatacaagaatgtgattggggctctccgcgcttcatggcgcattgtttcttccattgaacaaaaggaggagtcccgtaagaacgaagagcatgtgaaccttatc

SEQ ID NO: 76817 - DNA, 362 bp, Zea mays
gctcgaggaatggcgtcggtgcaggtctccggcgcgggggtcggtgccgcggccttctctgtgaaggggaaggcctccaccggtgcgctccggcttcgctctacgttgaccttcggcgaggtctgcccggcgcggcgggcgttccgcggcctcgtcgtcagggccgctaccgtcgtcgcccccaagtatacaacacttaagcccttggctgatagagtgcttgtaaagattaactcttccgagaagaagacaactggtggaatcttgctccctacgactgctcagtccagacctcaaggtggcgaggtagttgctgttggagaaggaaggataattggggataagaaagttgatgtcagcat

SEQ ID NO: 76818 - DNA, 379 bp, Zea mays
gcaggaggatccggtgaaccaataccaacaattgtgtatgacgatgaagactacaaggatgtttttgtgtcagaggcttgcttgctcactcgcgacgagaacgagtggtacagggaaccaatctcggccaatgccacgtctggcaaagaaggtttgcaagcctcggttgctgactgatttaagtcaggttctgtatcagttttgtgactattatacagatacaggatttgatcaacgcctcgacatggtaggaaagaacactacggtataggcggggattgttcacaagacaatctggttctggaatggaccattttcagtatagcaactattgatttgagcaacagtcagactaatggttccaggagaaatttatccc

SEQ ID NO: 76819 - DNA, 357 bp, Zea mays
cccacgcgtccgcccacgcgtccgcgcaagcgcaacagaagcatactacgccgctacgcgctgggcggtgccgcacagctatagatagctagcagtgttgcatagaaatggacagcgccagcagcctcgtggacgacaccagcggcagcggcggcggcgcgtgcacggacaagctaagggctttggccgccgccgccgcctccgcctcggggccaccgccggagcgcatgggcagcggagccagcgcggtcgtggacgcggccgagccgggcgccgaggcggactccggctccgccccggcctccgtcgccgccgtcgcggcgggcgtgggcgggaagctgccgtcgtccaggtaca

SEQ ID NO: 76820 - DNA, 373 bp, Zea mays
  unsure (1)..(373): unsure at all n locations
gggaaaaattgatcaaacacgtatgtggaaggtgggtgaaagggtccgttcaaccaggccacaaggtgatcttggcccactgcatcccttcactgctggagtgtatgttgcactaatgatggctcagattgaggtccttangaagaagggccactcttactcagagataattaatgagagcctgatcgagtccgtggactcgttgaacccgttcatgcatgctcgcggtgtggccttcatggtcgataactgctccacaactgctcgtttgggatctangaagtgggcaccacgcttcgattacatcttgacccaacaggcgtttgtgactgttgacaagaaagcaccgatcaaccaagacctcatcagcaac

SEQ ID NO: 76821 - DNA, 370 bp, Zea mays
agcaagcaagcagcgagtacatacatactaggcagccaggcagccatggcgcccaccgtgatgatggcctcgtcggccaccgccgtcgctccgttccaggggctcaagtccaccgccagcctccccgtcgcccgccgctcctccagaagcctcggcaacgtcagcaacggcggaaggatccggtgcatgcaggtgtggccggcctacggcaacaagaagttcgagacgctgtcgtacctgccgccgctgtcgacggacgacctgctgaagcaggtggactacctgctgcgcaacggctggataccctgcctcgagttcagcaaggtcggcttcgtgtaccgcgagaactccacctccccgtgctactacg

SEQ ID NO: 76822 - DNA, 367 bp, Zea mays
ccgaaaccagaggcgggtagggttctagctgcaggcgacggccatggccgcctccgccgccgccccggcgctgcttcgacgcctcttctgcagctctattccagcctcctcctccgtactgcgcgctaccttttgctcctccgccggcttcggctcgtcttctccgtcctccatattcggcgacgccaccgaggtcgccaacgtgccaccgctcaccacgcccaacctcttcgtcagtggcctttcaaggttaacgacagatgagaagctccagggtgcctttgctcctttcgggaggctccttgaagcaaaagtggtgacggatagagtttctgggaggtcaaagggtttcggtttcgtgagatat

SEQ ID NO: 76823 - DNA, 358 bp, Zea mays
gccgccgtcaccgccccttccttcgccgcaccagcgccagcccgcgccgtggtcagaaggaggtccttcaccgtgcgcgcctctctccgcaaggccaccggcaccgccgccgtggcaatggctgccagcgccctgcttgccggcggtgccatggcccaggaggtgctgctgggcgcatgcgacggcgggctcgtcttcgagcccagccagttcaccgtcaaggccggcgacaccatcacattcaagaacaacgccggcttcccgcacaacgtcgtcttcgacgaagacgaggtgccgagcggcgtcgacgccaccaagatctcgcaagaggagtacctcaacgcgccaggcgagacct

SEQ ID NO: 76824 - DNA, 366 bp, Zea mays
agctccagccggtgtacctcctgaatccgaccgtgccctcagcggctcgtcgttgttcgggatgttcgctttgaaggaacgcccgaagtggatgaacatcacctcgcttgacgagctcaagacaaaagtggggcacgtcatcgtgatgattctacttgtgaagatgttcgagaagagcaagatggtgacgatagccacggggctggacctcctcagctactcgatctgcatcttcttgtcgtcagcttctctctacatcctgcacaatcttcacaagggcgaccatgaggagtgacgagagtgaaatgccgaatttgtagcctattcgagagagagttgacggtcttgtccaataatcaatactgg

SEQ ID NO: 76825 - DNA, 427 bp, Zea mays
aggacgcgtgggtgcagtctcgccgctccccttcctcccccgcaggaatccgaatcagtaagtccggcgacctaggtctctcggcttgtccgcagcccgccggtcagtaatggcgcaggatgatccggttgtttctgctcagtggctgcacgagcacctagggatgcctgatgttaaggtaaaaaaaaaacatctagtttgcgtgttcatattcacttcagagacacttcagtaatgcttccttcatcgaagaagaaagttcagagatatacttcttctatcccctgcgttactggttttggatgcttcctggtacatgccggtagagaacagggatccatggaaagaatatcaggtggcacacatccccggtgcgctattcttcgacttagatggcatagttgatcggacaactgatttaccgcac

SEQ ID NO: 76826 - DNA, 372 bp, Zea mays
cccacgcgtccgctgattcagcgctaggcgtggatggagcggcgtcgttcatcttcaccaacgcctgcaagcacgcggtgtgggtgggcgcgctccacggcgccagctcgccgccgctcgcgcggtcgggcttctacctggcgccgtccgccacgtccagcatggacgcgccgtcgtcggggacatggtccggcacgttgtgggcgcgcacgggctgcgtggccgaccccgccaccgggcgcttctcctgcgccacggccgactgcggcacgggcgacgtcgcgtgccaaggccgccggccggcgcctccggtctcgctcgtcgaggtcacgctcgccgcgccgggcagccgcaggccggacttctacgacg

SEQ ID NO: 76827 - DNA, 347 bp, Zea mays
  unsure (1)..(347): unsure at all n locations
caccaggccgtttccgccctcatggactccgccagctactggacggcgttctgggtgttcgccggctgcaacctgacgctcctgctgctggcgtcgtccatcacggcgttcttgtcgccggcggccggcgggtcgggaatcccggaggtcaaggcctacctcaacggcgtcgacgcgcccaacatcttctcgctgcggaccctcgctgtcaaggtgcgccgtgtgtgttccgttcccatcctcctgccctcgccgtcgctttcgcttgctgcagtgcacatgctcncctcagcatttcctgatgccagctgcgcaaatgggttaacatccacactaatataatgtac

SEQ ID NO: 76828 - DNA, 430 bp, Zea mays
ggaagaactttttgcctatgatataaactgggtgatatatgacaagaatgagttgcacgagagaatgaggccttggatttcaaaaaagattattgaatttcttggcgaggaggaatcaactttggtggactatattgtttcctgcaccaaagaccacgttcaggcagaaaagatgctagagctcctacagtcgattttggatgttgaggctgagatgtttgttctcaagatgtggcggatgctgatatttgagattaagaaagtcgaatctggactatcaggaagagcaaagtaatgaagctaagcctgttaccttgtatgacctttgatttacatcactcaactgtggtcatgcttgtaaggtcatactgtactaaacaagcatcagaaaccatttttaatgatgctgattggacggttttgattctac

SEQ ID NO: 76829 - DNA, 385 bp, Zea mays
cccacgcgtccgcccacgcgtccggacgacgtaaacgccttgctgaacaaaggcatggccgcggacagccgcttcctcatgccaattgtgctgagggagtgcggcgagacgtttcgtgggatcgactcgttggttgacgtcggtggtggccatggtggcgccgccgccaccatcgccgccgccttcccccacctcaagtgcagcgtgcttgacctcccgcacgttgtcgccggtgctccgtctgatggcaacgtgcagttcgtcgcaggcaatatgtttgagagtattccacctgcaaccgctgttttcctcaagaaaactctacatgactggggtgacgatgagtgtgtcaagatattgaagaattgcaagcaaagcatatctc

SEQ ID NO: 76830 - DNA, 410 bp, Zea mays
  unsure (1)..(410): unsure at all n locations
gcaggcgccgcgctgctcggcgtcggcgtcggcggcgccagcgcgcagcagggcgtgtggagcatcatcactcgtcccatgttccagagcatgctgagccaccgcggcgacagcgggtgccagggcgccttctacacctacgacgccttcatcgaggccgccagcaagttccccggcttcggcaccaccggcgacgagcagacgcgcaggcgggagctcgccgccttcttcggccagacgtcncacgaaaccaccggtggatgggcgactgctccgggtggaccgtttgcctggggatactgccgggtgaaggaacagaaccgacgggacccacctactatggacgaaggaccatacagctaactcatgagtacanctacaggctcgccgggcaggcgctgaacctgaac

SEQ ID NO: 76831 - DNA, 417 bp, Zea mays
tgtccagatcgcgtgattccgcatcccgttcgcgagcgcgacacacgctgacagctcacggctgaccttcccgacggcctccagctccatcttgattcttgaggcgaagccccggtgcgtaagagtctgccatggccagcgagaataaggtctttgggttcgaggaagtcgccaagcacaacgtcaccaaggactgctggatcatcatcgccggcaaggtgtatgacgtcactccgtttatggatgagcatcctggtggagacgaggttttgctagctgtaactgggaaagatgctacagctgatttcgaagatattggccacagtgattccgcaagggacatgatggagaagtaccacatcgggcagatagatgcgtcaacaatcccagcaaagcgtgctcatgtgcacccccagc

SEQ ID NO: 76832 - DNA, 410 bp, Zea mays
ggacgcggacgcggctcacatcaaacaccccctcctcccccttcagctgtgctcactgccgcaaaaccacacagccacacaggcaaccagcgcccagcgccctttgacatcaccacatccacgctccgttccatggccatgtcgagcagcgccagcaagaagcaagcccaggcccaggcccagaaggccgggcgaaggcccccggcggtgtcgtcggccgcggccgcggacgcggagatgcagagggtgttctcgcgcatcgacgcggacggcgacgggcggatctcgccgtcggagctggcggcggtgtcgcgcgccatctccccgccggcgagctcctcgcacgggcggcgcgaggtggcggccatgatggaggagctggacacggaccgcgacggcttcgtggacct

SEQ ID NO: 76833 - DNA, 420 bp, Zea mays
cccacgcgtccgcggacgcgtgggttgcaataactgtgctgctaggcacccactccccagtcaaggcatatccattccatggatctcgcgcccctgctccttctctcccagctgctgctgcttccggtggtggcggttgtctccggcgagaccgccgcgcacccgggctacacgcacgctgaggaggcatgcagcggtgtgctagaggcagaggcggagaaagcaacggtgctggtgcctgcgccagagcggcgcgaagagttcgacggcgggcggatcgtggacatcagccactactaccgcgaggacatgccggagtgggagtcatcagagggctccggcgagttcctgcagctggcgcggtccatgcgcaacggctccgacatcgctaacttctcggagctccggctcactgcgcac

SEQ ID NO: 76834 - DNA, 316 bp, Zea mays
gggagcgtgcggctgctgctgggcgttctcggcggtggcggcggtggaagggctgaacaagatccggacggggcggctggtgtcgctgtcggagcaggagctggtggactgtgacgtcagcggcgtggaccagggctgcgacggcggcctcatggacaacgccttccagttcgtcgcgcgccgcggcgggctggcctcggagtcgggctacccgtaccagggccgggacgggccctgccgctcgtccgccgccgccgcgcgggccgcgtccatccggggccacgaggacgtgccgcgcaacaacgaggccgcgctc

SEQ ID NO: 76835 - DNA, 346 bp, Zea mays
cactcagctcataggatggacgccgctggtcgaattgaagcgaatcgccagcgaggctgggatcgatgcgcggatcgtcggcaagatggaggcttaccagccactttgctccatcaaggaccgctctgctttgagaatgatagaggatgctgaggagaggggattgatttcgcctggagtcacaacactggtggagccgacgagtggtaacatggggttagggttggtcctcttcgctattcagagaggttacaggctcattgcagtcatgccggctaaatactcgcttgacaagcagatcttgctgaggttcatgggcgcggagctatacttaactgatccgggc

SEQ ID NO: 76836 - DNA, 423 bp, Zea mays
atgaccatctactcaacctagtgctagatgaagcagttgaatatgaaagagagcaagatgacccattgaagctatcagggaaaaccagacagcttggcctcattgtgtgcagaggcacggcagtcatgctggtctcaccgactgatggaactgatgagatcgccaacccttttcttgcggaaggagcataagcttgcagttggtcgattatttagaaccgtgctctcatgtcaccctcagaacgatgtgtcccagtggggaaaagaactctctattctcgtaccggttggtgatgaactctgtaatattcaccgtgcaagtgcaacttaaaacatctgtgatacgagctcttttttttaaaaaaaaaaaaaaaaaaaaaaaaaaaaaaaaaaaaaaaaaaaaaaaaaaaaaaagggcggccgc

SEQ ID NO: 76837 - DNA, 416 bp, Zea mays
  unsure (1)..(416): unsure at all n locations
cggacgcgtgggcggacgcgtggggccgcggagcgtctgcgccggttcgaggtgtaccgccagaacatggagctcatcgaggccacgaaccgccgcgccgagctctcgtaccagctcggcgagaccccgttcaccgacctcaccagcgaggagttcctcgccacacacaccatgtccacgcgcctgcatgcgtccgaggccgcgcggcggcaccgggagctcatcacgacgcacgcaggccccgtcagcgacggcggtcgccagtggaaccggcggaactacacgacggacctcgacgtccccgaaagcgtggactggaggaccaagggcgcggtggcgccggtcaaggaccaaggagcttgtggcggttgttggtcattcgcgacggtggcggcgatcgaanggctgcacaagat

SEQ ID NO: 76838 - DNA, 389 bp, Zea mays
gaggacaacttatgaagccatgtaaaggaattttactttttggcccacctggtacggggaagacaatgctggctaaggctgtggcaactgaggctggtgctaatttcataaacatatcgatgtcaagcatctcttcaaagtggcttggtgaaggagaaaaatttgtgaaagctgtgttttcactggcaagtaaaattgctccaagtgtaatttttgtggacgaggttgatggcatgttgggaaggcgggagaaccctggagaacatgaagccatgcggaagatgaaaaatgagtttatggtgaactgggatggtctgagaacaagggagaaagaacgtgtattagtacttgctgcaactaacaagccatttgatcttgatgaggctgtt

SEQ ID NO: 76839 - DNA, 429 bp, Zea mays
ctcgctgttccttcctcatggccaccgcctgccacctcgccgcgccgctcggcctcgccccgttgccccgcggctgcgcctctgctggcgtcgtggccgtcgtccggtgcgctcggtcgtcaggctccaagatcccgagaggcgttgctgtcagggcgacgtccggcggcgagggcgccacggaggaggtgccggagattgtgaaggctgcgcaggacgcgtgggacaaagttgaggacaagtacgccgtggccaccatcggtgtcgctgccatcgtcgcgctctggacggtagtaggtgccatcaaggccatcgacaagcttcctcttctgcctggtgtccttgagattgttggaattgggtatacagggtggttcacataccgtaacctcgtcttccagccagacagggaagctctgatcggcaaaa

SEQ ID NO: 76840 - DNA, 415 bp, Zea mays
caccactccgcgctagctgaggacggtacagcggcacagaggtgcgacgtacgacgacgacgacgcaggcgccacacatggcatcccagctctccgccgccgtgccccggttccacggcctccggggctacgccgcgcccaggtccgcggtggcagcgctgccgtccgtgagggtgggcaggaagaggtcgtcgtcgcagggcatccgctgcgactacatcggctccgccaccaacctgatcatggtgacgacgacgacgctgatgctgttcgcggggcggttcgggctggcgccgtcggcgaaccgcaaggcgacggcggggctgaagctggaggcgcgcgactccggcctgcagacgggtgaccccgccgggttcaccctcgccgacacgctgggctgcggcgccgtcggcca

SEQ ID NO: 76841 - DNA, 407 bp, Zea mays
acttcccaaaccctaccggcggcgcagcagcatcacaaccaccgcccgaagatggtgaagtttctcaagcccggcaaggccgtaatcctcctccagggcaggttcgccggccggaaggcggtgatcgtgcgcgtgttcgaggagggcacccgcgaccgtccctatgggcactgcctcgtcgccggcctggccaagtaccccaagaaggtgatccgcaaggactccgccaagaagacggccaagaagtcccgcgtcaagtgtttcatcaagctcgtcaatttcactcacctcatgcccacccgctacaccctcgacgtcgatttcaaagacgtcgcctcgggcgggcccgacgcgctctccacccgggacaagaaggtcgaagcctgcaaggccgccaaggcgcgcct

SEQ ID NO: 76842 - DNA, 424 bp, Zea mays
cccacgcgtccgcagggataatgcaccagacgtgaaggccaaatttgtaatcgaagctgctaaccatccaactgatccagaggcagacgagattctcgccaagaagggggtagtagtattacctgatatatatgctaattcaggtggcgtggtcgttagctactttgaatgggtgcagaacattcaaggtttcatgtgggatgaggagaaagttaacgatgaactagaaaagtacatgagcagtgcttttcaacacatgaaagccatgtgcaaatctctggattgcgaccttaggatgggggccttcaccttaggagttaacagggttgctcgtgccacccttttgagaggctgggaggcatgagaccattgaccgcgcattacagattcgacaggcgcattcaataattcgtgtccaacaacg

SEQ ID NO: 76843 - DNA, 394 bp, Zea mays
catcatcatctatctagactagagcaagctaagctcaagctcggctagcattccagaagctgcatctatcagctaccggcctctcgattcatcgcttgcgatcgaatggagaagatgaacgtggttgcgagcaggaagcagcccggcgactggagctgccggtcgtgccagtacgtgaacttctgcaagcgcgacgcgtgccagcgctgcggcgagggcaagctgggcgtggagcgcacggactacgcggcgctgggcggcgactgggacgtgaagcccggcgactggtactgctaccgctgcggcgtgaacaactacgcctcccgcgccagctgcttcaagtgcgccgccgccaagaacgagtccacgggcgccgtcgcgcagggctgggggt

SEQ ID NO: 76844 - DNA, 434 bp, Zea mays
cggacgcgtgggcgacacgacaccaagtcgaggagctcgagggcaccaatcatggccggcgtgaactccagcgtcgtcgggctcaagcccgccgcggcagtgccgcaggccgccgccgcctcatcgccggcgaagcgggtgcagctggccgcgcccgagggccgccgcgccgctctgctcggcctggcggccgtcttcgccgtcacggccaccaccgggtcggccaaggccacgatcttcgatgagtacctcgagaagagcaaggccaacaatgagctgaacgacaagaagaggctggccaccagtggcgccaactttgcgcgcgcctacaccgtggagttcggcagctgccagttcccctacaacttcactgggtgccaggacctcgccaagcataagaaagtccccttcatcagcgacgacctcgagattgg

SEQ ID NO: 76845 - DNA, 427 bp, Zea mays
cccacgcgtccgcgccacccgataataaaaacagagcgccacacgagcgggcgcaacgatgcttcaggttcgcgcgtcctcggccttcctcccctccacctcctccccctccccgccatcctcgtcgcaggcaccggcgccagcgccgttccggctctcggggaagagccagcggcgcggcgggctgatcgcggtgccgcaggcgagccgcgtggctaggcggtccgtgatggcagcggcgggggcagccgcagccgccccggcggcggccaagctcgaggacgccgacgcgctcatcgactctgtggagaccttcatcttcgactgcgacggtgtgatctggaagggcgacaagctgatcgacggcgtgctggagactctcgacctgctccgatcaaagggcaagcggctggtgttcgtgaccaac

SEQ ID NO: 76846 - DNA, 430 bp, Zea mays
cggacgcgtggggtaaaacatgctcatgttttgctcccacctttggagacattgtgtacagtggaggaaacttgtgtccgtgataaagcagttgaatctctgtgccgtattggtgcacaaatgaatgaaactgacattgtcgactggttcattccagtagtaaagaggctagcagctggagagtggtttacagctcgcgtatcgtcctgtggtcttttccacatagcctatccaagtgcgtcggaccaattgaaaacagaattgaggactatctatggtcagctatgtcaggatgacatgcctatggtcagaagagcagcagcatcaaatcttggaaagtttgcagctacagttgaacagaatcatttgaagacagaaataatgtcaatatttgatgatttaacccaagatgatcaagattcagtgcgtc

SEQ ID NO: 76847 - DNA, 425 bp, Zea mays
cccacgcgtccgcaccaccaccccgccggccacactcgtctttctcacgagccacaggcacaggcaggctctcgagctcagtccacccagcgcaggggatggcgtcgtcgttcgccgtggcaacggtcccgtcgctggcggccccggcggccaagaagcggtccggcggcgtcacgtacgtggagggcatgaacgcctacagcggcctcaaggggctcaacaaggtgaacatgctcggggtgcgcaagaccgccgactactccttcgccaaggtcgtggcgtcgctcagccccgcgggcaggaagcggcgcggcggcgcgttcggcgcccagatgaacgccgccgccgagatcttcaggatcgccgccaccatgaacggcctcgtgctcgtcggcgtcgccgtcgggttcgtgctgctccgggtg

SEQ ID NO: 76848 - DNA, 423 bp, Zea mays
cggacgcgtgggcaacacgctggggttcaagagcgacgcgtcgctctactcggccgtcatcactggcgccgtcaacgtcctctccacgctcgtctccgtctactccgtcgaccgcgtcggccgccggatgctgctgctggaggccggcgtgcagatgttcctgtcgcaggtggccatcgccgtcgtgctgggcatcaaggtcaccgaccactccgacaacctgggccacggctgggccatcatggtcgtcgtcatggtctgcaccttcgtctcctccttcgcctggtcctgggggcccctgggctggctcatccccagcgagaccttcccgctggagaccaggtcggcggggcagagcgtcaccgtctgtgtcaacctgctcttcaccttcgtcatcgcgcaggccttcctctccatgctctg

SEQ ID NO: 76849 - DNA, 374 bp, Zea mays
cggacgcgtgggcggacgcgtgggcgcgctcgctttgcttcctcgtcgaggtccaagttcctgcattgatggcgaccgaggtggctgagactcccgcgccgttggcggaggcggtccccgagacccccgcggaggcaccggcggcgcccgccgccgaggcgaagcctaccaaggccaagaaggcctctgcgcccaagaagcgtgccaacccgacccacccgccgtacgccgagatgatctcggaggctgtcacgtcgctcaaggagcggacggggtccagccagtacgcgatcgccaagttcgtcgaggacaagcacaaggacaagctcccgcccaacttccgcaagctcctgctcggccagctcaagaagctc

SEQ ID NO: 76850 - DNA, 392 bp, Zea mays
ccgccttcggcgaggcccgcgtgacgatgcgcaagacggcggggaaggccaagccggcggcggcgtccgggagcccgtggtacggccccgaccgcgtgctgtacctgggcccactgtccggcgagccgccgagctacctgacgggcgagttcccgggcgactacggctgggacaccgcggggctgtcggcggacccggagacgttcgccaagaaccgggagctggaggtgatccactcccgctgggccatgctgggcgcgctcggctgcgtcttcccggagctgctcgcccgcaacggcgtcaagttcggcgaggccgtgtggttcaaggccggctcacagatcttcagcgagggtggactggactacctcgggaacccgagcctcatccac

SEQ ID NO: 76851 - DNA, 405 bp, Zea mays
cgaggacgagaagccgcggcccgagccggtgtcctcctccgagttccagttcgcggcgccacccgagggctacgtcgagcccgcggcgtttgacgagctaccgccggagtccccagaaggagtggcggcggcgtacgaatctctctacgggccggccttcagcggcgagacattgctggggaacaatgtctttgaggtcaaggtggtcgaccccatcgacatggaccgggagcagcgcccgaacgacgatttcaccgagcgcgtcgtgcaggtcaaccgcgtcaccaaggtcgtcaagggagggaggcagctctcctaccgcgcaatcgtcgtcgttggcgacatgaagggccacgttggtgtccgcgtgggaaaggccaatgaggtcacggaagccatcaccaa

SEQ ID NO: 76852 - DNA, 400 bp, Zea mays
aagacacgtgggtaaaacaacattgtgtctacagtataaaccccagtacatagctgctggttccctttatctggctgcaaagcttcacaatatcaagcttcccttgcatggagcgcatgtttggtggcaccaatttgatgttgcaccaaagcctctggaagccgtcattcatcaaatgatggagcttgcggctttgaaaaagttgatgcctgctcgacccaatccggttaagctgaaggaaactttatgtgaagctaaactgagcttatctaatagcccagactctgtgttgaatcaatcaaacttgttaataagcagctcaagtccggatattggcgagcccagtgacaaaatgcaggtggattcctgccaagacttgagaagcaatcccatgggtgaa

SEQ ID NO: 76853 - DNA, 380 bp, Zea mays
ggggtgaagcccgtgcagtcaccgggtccgttcctcgccggtatggagccgagataccaatcggtgtccagggaggacatactcggggagcccctaaccaaggaagaggtctccgaactcgtgaaagggagcctcaaatccaaacggcaactcaatatgggcagggatggtttgacacacaatatgttggagaacattcattcacattggaagaggaaaagagtttgcaagataaagtgcaaaggtgtctgtacaatagatatggataatatctgccatcagctagaggaaaaagttggaggaaaagtaatacaccgccaagggggtgtcatatttctttttcgtggtagaaactacaattacaggacccgcccatgttt

SEQ ID NO: 76854 - DNA, 412 bp, Zea mays
tctggagcccttcttcagcgcagctgctactcagtttatccttggacagcaagttcccttctctctgtggctttctcttgcccctgttgtcatcggtgtttcaatggcatcccttactgagctctcattcaactggactggcttcatcaatgccatgatatcaaacatctcattcacctacaggagcatttattccaagaaagccatgactgacatggatagcaccaacgtgtatgcttacatttcaataattgctctcattgtttgcattccgcctgcagtgatctttgaagggccccggctaatgcagcatggattcagtgatgccattgcaaaagtaggcttgacaaagtttgttagtgacctattcttggttggactgttctaccatctgtacaaccagattgctacg

SEQ ID NO: 76855 - DNA, 377 bp, Zea mays
agaatacaaggaagtttcaaatatttatgatcagatgcaaagagctggtctgaaaccagatgttgtgagctattccctgctcatcaaagcttatgggaaagccagaagggaagaagaggcattggcggtttttgaagagatgcttgatgctggagtcaggccgacacgcaaatcatataacattttgcttgatgcatttgcaatatctggattagtagaggaggctaatacagttttcaaggcaatgagaagacacagggttgagcctgacctttgctcttatacaactatggtcttagcttatgtaaatgcatctgaaatgaatggagctgagaaattctttcgtaggattaaagaggatggtctgaagcccaacg

SEQ ID NO: 76856 - DNA, 365 bp, Zea mays
agggaggaattgtacattgatttaccatgtgcaatacagtttccggtctcaataagatcaatactagtttgttgttacaggcagcaggctggccatgcgtgaatcatgaccgatgcagcgcttcaggttcctttacaacacgcatgcatctagctttccacagcaaacaactggcggcggcggcggcagcagcaggtatgctgatgcaccacgtgctagtggaacttgaggctggtgagcacgttgttgttgacggggtcagcgaggtggtcgagcaggttctggaacgggccgacgccggtgacgagcccctggatgaagtaaccgatgatggcgagcatggcgagcctgccgttcttgatctc

SEQ ID NO: 76857 - DNA, 399 bp, Zea mays
gacaggtcgtgctcatgggcgccgtcgagggctaccgcatcgccggcggcccgctcggcgaggtcgtcgacccgctctatcccggcggcagcttcgacccgctcggcctcgccgacgaccccgaggccttcgctgagctcaaggtgaaggagctcaagaacggccgcctcgccatgttctccatgttcggattcttcgtccaggccatcgtcaccgggaagggcccgctcgagaacctcgctgaccacattgccgaccccgtcaacaacaacgcttgggcctacgccaccaacttcgtccccggcaagtgagggaggcgccgccggtgacctttaggtgtccggatgcatgtgagcgcacgctggttttcggtttgttccatgaggttaactattgttc

SEQ ID NO: 76858 - DNA, 405 bp, Zea mays
ggcgaggcggtgtggttcaaggcgggctcccagatcttcagcgagggcgggctggactacctcggcaacccgagcctggtccacgcgcagagcatcctggccatctgggcgtgccaggtggtgctcatgggcgccgtcgaggggtaccgcgtcgccggcggcccgctcggagaggtggtcgacccgctgtaccctggcggcagcttcgacccgctcgggctcgccgacgacccggaggcgttcgccgagctcaaggtgaaggagattaagaacggccgcctcgctatgttctccatgttcggcttcttcgtgcaggctatcgtcaccggcaagggccccctcgagaacctcgccgaccacatcgccgaccccgtcaacaacaacgcctgggcttacgccaccaac

SEQ ID NO: 76859 - DNA, 390 bp, Zea mays
gctggtcgcaggagcgctactggttggtttcgtaggggggtttggggcggccggatacgtgtacaaggaccagatcaacactttcctcacgcagttctcagggttcattgacggctatggtccagccggatatgctctgttcgtacttgtatatgcaggattggaggttctcgctattcccgcaatacctttaaccatgtcagctggtctattatttggtagtgtgaccggtacaattattgtttcaatcagtggaacactagctgcagcggtggccttccttattgctagatacttcgccagagagagaattcttaaattggttgaaggaaataagaagtttctggcaattgataaagcaataggtgaaaatggattcaaggttgtcac

SEQ ID NO: 76860 - DNA, 394 bp, Zea mays
aaagagttggttgaacggatgggtcttggaaagtcatcctcaaatgttgaacctcctgaatttggtgctgcagctgatggagatgctgaccgcaacatgattctgggtaaaagattctttgtgacaccatcggactctgttgccattatagcggccaatgctgttcaatcaattccttactttgcttctggcctgaagggagttgccaggagcatgccaacatcagctgcccttgatgttgttgcaaagaatttgaatctcaagttctttgaggtgcctactgggtggaaattttttgggaatttgatggatgctggaatgtgctcaatctgtggtgaagaaagctttggcactgggtctgaccacattcgtgagaaagatggcatctgggctg

SEQ ID NO: 76861 - DNA, 402 bp, Zea mays
aacatgttatcaatggaaaaccggttgaaattaagagaacgatccctaagggagctgctcctttgaaagatttcaagacgaagaagatttttgttggtggattaccctcagctctaaaagaagatgaattcaaggaattcttttccaagtttgggaaggttgtggagcatgaaatcatccgtgaccatgcaaccaaacggtcacgtggatttggttttatagtctttgatgcagaaaaagcagtacatgatttattacatacaaagggcaatatgattgatctaaatgggtctcaggtggagatcaagaaggcagaaccaaagaaaccctctaatcaaccacctcgttcacttgatagtgagcctaggggccgtccatatgcagacagttatgatggatttg

SEQ ID NO: 76862 - DNA, 400 bp, Zea mays
cacacgcgtccgcccacgcgtccgaaagcttaaacgagagaactacaaggcactgcctgcatcggttccatgttaatgcttcgcccgatgacgacgacttccgctcgtcgcgtaacatagcgatcagtttgttcaagcggtacaagaatgtcattgaccgaggaggtggagaaaacctaaatgagtttgtcagtgctggagtgaccgcttacgcactagggtgtacagatgaggggcttagaaaggaacttatggatattgaagattctggtctggagattgaaggcttacggtccttggggggcaccagcctgaagttcaaagtccactcctttgagattcgtgagtgcattctgtggctcagtaaagtgttcgtcacaatactgtgcacaccacaact

SEQ ID NO: 76863 - DNA, 423 bp, Zea mays
cttcggcaacgtgatcttcacggcgacgccgctggccaacgccggcacggtgacggccggggtggcagagggcgcgtccgtgatccaggccgcgttggaccggatggacgacgggtactgccggtcagcgctggactacctggagctgcagccggacctgtcggcgctggtccgcggggcgcacacgttccggtgccccaacctggggctcaccagctgggtgcgcctgcccatccacgacgcggacttcgggtgggggcggcccgtgttcatgggccccggcggcatcgcctacgaggggctcgcgttcgtgctccccagcgccaaccgcgacggcagcctgtccgtggccatctcgctgcaggcggagcacatggagaagttccggaagctcatctacgacatctgatctcaaatcccccc

SEQ ID NO: 76864 - DNA, 369 bp, Zea mays
ctggggacaagctcctgtcggattcatgcacctacaaggagctcgagaacggcgtcctgtgggaggtcaagggaaagtgggtcacccaaggtcctgttgatgtggacattggtgccaatccatccgccgagggtggtgaggacgaaagcgttgatgacacagctgtgaaggtggttgatattgttgacacattccgtctacaggagcaacctccttttgacaagaaatcatttgtgtcatacatcaagagatacatcaagaatctcactgctgtgttggagccagataaagcggctgagttcacaaatggtgtcgagggagcaaccaagtttctccttaccaagctgaaggacctccaatttggtgttg

SEQ ID NO: 76865 - DNA, 423 bp, Zea mays
cccacgcgtccgagttagcaagggtcgtgctgtcgacaagctgattcaagcactggccaacaacaacgggaaggcacaggatttcctgatgtgcgtcggcaacgacagatctgacgaggacatgttcgaatgcatcaacggtatggcctccaacgatgtctcatcgaccacagtaccggaggtgtttgcctgttcggtcggccagaagcccagcaaagcaaaatactatgtggacgacaccagcgaagtgatcagattgctcagggatgcaacccgcttctcatcgtcgcagcggagggaggacgtcaacgccagccgcgggcgtgtgaccttcagagacgcactcgattacgtggactaggcaccagcagcaattcttagttactcgaaatgattagctgcggagcttgtaaattccgctgt

SEQ ID NO: 76866 - DNA, 327 bp, Zea mays
gggtcggtccacgcgtccgaccaagcgtccgcgaacgggatatgagctgtcagatatggatatactgtttgctgaggggattacatcctcagatggggtagcatcaactgacttctctttccctcagctgtcgttgggtggactgggtgttgatgacctcgatgcacaagacactttgctaaggtagcagttgatcaggatatacagtagaggtttgcatgggaactgcaaatgggtgcacatgttcgatgacgttaggcttgttagcttctgtgttgctgctagcgactacgatgagtactccgaagatgcaaacggtatcattgt

SEQ ID NO: 76867 - DNA, 370 bp, Zea mays
cccacgcgtccgctgcggcgtagccgtcgcttggacgcggtccagagcggttgcaccgcgctgtccatcgtcaagcagggggacctcatggtcgtcgccaacgtcggcgactcccgagccgtgctgggcaccacgtacggcgatggcaccatcgtggccgtccagctcaccgtcgacctgaagcccaatctgccacaggagaaggagcgtatccggcggtgcaacggccaggtgtactgcctcgccgatgagcccggggtgcaccgcgtgtggcagcccagccgggagtcgccggggctcgccatgtcacgcgcgttcggcgactactgcgtcaaggactgcggcgtcatctcgacgccggaagtgacgc

SEQ ID NO: 76868 - DNA, 247 bp, Zea mays
cacaactaccggtagtgctgcggggatcaattttgcagtaataaaaaatctactatcaacgcggatggtactctgttgtttatagtccctgctgctaaccacccttgttgctggtgctgctggagaggcattgtacctgtccatgcatatatgatatatatatgttgtaacgttgtgaaagcacacaatcttgggtaccaaaaaaaaatcatttaagatcaatattgacaaaataaccgtgcgagag

SEQ ID NO: 76869 - DNA, 415 bp, Zea mays
accacgcgtccgcagattcagatcagatcgtagcagccaaggattccgcgctccgggggtgccatgaagctgaagctcctctctccctgccttctcgtcctcgccttctttgccaccgcggcgtacgcggcgtcggcgtcggcgtcgcgcgcggcggccgtcgtcaggggcgcgggcgccccgtcgcagtcggagttggagtcggacccggagaaccagtgcgtgtacacggtgtacgtgcggacggggtccatctggaagggcggcacggactcgaccatcggcgtgacgctgctgggccccgacggcacgggcatccggatccgggacctggcggggtggggcggcctcatgggcgccggccacgactactacgagcgcgggaacctggacatcctcaaccggcggggggcct

SEQ ID NO: 76870 - DNA, 398 bp, Zea mays
cgcgcttgtttgttcgcgtcttctccctgtagggaactccgttacccggccccggctgtgcgtggcgtcagcacgccccgcgggcaggagggtgaggctgctgagcgtgaggtgcgagcagggagccaagggcggtggcgggctggacgtgtggctgagccgcggggcgatgctgggcttcgtcggagcggtggccgtggagctgaccaccgggaaaggcgtgcttcagaatgtgggattgaccgcgccggtgccgacgctggcgctggcgctcaccggcgcggtcggcgtcctcacggccttcctcatcttccagtccgggacgcgggactgatgggtgaattgtcaaagctcccaaaaggacatgcataaagtctgtcagagtcctgtgccgtgta

SEQ ID NO: 76871 - DNA, 410 bp, Zea mays
accacgcgtccgccagcactctaactcaggggacacgatcgccatggccgccacatcgaccgccgccgccgtgctgtccccgccgtccgtggccgggctccgcctggcgccgtctcccggccgggcgcgcgtgtcgttccgcgcggcgccggcgccggcgcggcggtccgtggcggcgcgcgcggagctgagctcggcgctggtgatcagcctgagcacgggcgtgtcgctcttcctgggccgcttcgtcttcttcaacttccagcgggagaacgtggcgaagcatgtgcccgcgcagaacggcaagacgcacttcgacgccggcgacgagcgcgccaaggagttcgcggccctgctcaagtccaacgaccccgtgggcttcaaactcgtcgaagtcctcccccgggggg

SEQ ID NO: 76872 - DNA, 400 bp, Zea mays
cggcggcccgcccagggtcaggctcaccggcctgggggcgtccatggaggcgctcgaggcgacggggaagcgcctctccgacttcgccgacacgctcggcctgcccttcgagttctgcgccgtcgacgagaaggtcggcaacgttgacccgcagaagctgggcgtcacgcggcgggaggccgtcgccgtccactggctgcaccactcgctttacgacgtgaccggctccgactccaacacgctccggctcatccaaaggctggcccccaaggtggtgacgatggtggagcaggacctgagccagtcggggtcgttcctggcgcgcttcgtggacgccatccactactactcggcgctgttcgactcgctggacgcgagctacggcgaggacagccccgag

SEQ ID NO: 76873 - DNA, 402 bp, Zea mays
caaatcagagagacaggaaaagaaaaaagaattttgatcaaatcaatagaaggaaggatcccttacctgatttgaatttcatcctcctttaaataggatatgctctaagtcttcccatactttcctataatgactgcaacgattttctccattttgcgaattcctattttatttgaagtatattactatcatatacattatttaaatcgatccactttaaataaaatagaaaaaatcgaaagaaaaaaaaaaagaaagagtaaataataaaacaggatattctgtttcataattctgaaatagagttcttttttttagtattactcctcattaggatgtatatattaatcatcctattttaatatatattaatcatcctattttaattaggttctaatccaa

SEQ ID NO: 76874 - DNA, 397 bp, Zea mays
ccccaacgaagtgcgagcgacccacgtccacacgacacgaaccaccaccaccaaccagcagccgcaccacgcacccagcgcaaagcgatggcgtcgctcaccatgatggcgtccttcgccgccgtggcggtggccgcgccctcgcgccgcggcaccttcgccgtggtcaggtccgccaaggtcgaccgctgccaggagcccgccacgctagcagcaaccgaggccaggcccgccgccgacggacgccgcgccgtcatgctcgcggctgctgcggcggccgtggcagccatcggcggcgccggcgccgccatggcgggccccaagaacgggacccccgaggcgaagaagaagtacgcggccatctgcgtcaccatgcccaccgccaaggtctgccaca

SEQ ID NO: 76875 - DNA, 362 bp, Zea mays
ggagatttggactataagagcgagcgagcgagcgagctgggtgccttgaggacgccgtcaagaaaccgcgtggaggggggggagggcgatgagatgagggatgctggccgcggtgatggactacttcagcacctgctggggcccgcggtctcgtgcggggcaccggggcaagggctccgacgccgccggccggcatgacggcctcctctggtacaaggactccgggcatctcgtcaccggggggttctccatggccgtggtgcaggccaaccagctgctcgaggaccagagccaggtggagtctggatcgctctccctggctgactacggcccgcagggcaccttcgtcggcgtctatgatg

SEQ ID NO: 76876 - DNA, 392 bp, Zea mays
ggcaactttgccaaggtttaccatgctcgtaacacggcgacttcggaaagtgtcgcgatcaaagtgattgataaggagaaggttatgaaggttggtctcattgatcaaatccagcgagaaatttctgtgatgaagcttgttaggcatccaaacatcgtacagctctatgaggtcatggccaccaaaaccaaaatatactttgtgctggaacatgttaaaggtggagagctgttcaacaagattcagcgaggaaggctcaaggaagacgcagcgaggaagtacttccagcagttgatctgtgcggtggacttctgccacagcaggggtgtctatcatcgagatttgaagccagaaaatcttttgctcgatgagaatagcaacctgaacgtatc

SEQ ID NO: 76877 - DNA, 422 bp, Zea mays
gctgactttggtctgtctatattgggtcctgcagatagcggtaccccactgtccgagctgccagcagggactcttggctaccttgaccctgagtactaccgtctccactacttgactacaaaatctgatgtctacagcttcggggttgttctcctggagatactaagcggcaggaaagcgatcgacatgcagttcgaggagggaaacattgttgaatgggcagtaccactgatcaaagcaggggacatttttgccatccttgatccagtcttatctcctccctcagaccttgaggcccttaagaagattgcttccgtggcatgtaagtgtgtcagaatgcgaggtaaagatcggccttccatggataaggtgacgacagctctagagcatgcccttgcactgctgatgggcagcccctgcat

SEQ ID NO: 76878 - DNA, 388 bp, Zea mays
acagcacagagtgaggtaagcatccgaaaaaagctgtgatctgatcgacatggccgccgccaccatggctctcacctcccgcgcgctcgtcggcaagccggcgaccagcaccagggacgtcttcggcgaggggcgcatcaccatgcgcaagactgctggcaagcccaagccagcggcgtccggcagcccctggtacggggccgaccgcgtcctgtacctgggcccgctgtccggccagcccccaagctacctgaccggcgagttccccggcgactacggctgggacaccgcggggctgtccgccgacccggagactttcgccaagaaccgcgagctggaggtgatccactgccgctgggccatgctgggcgcgctcgggtgcgtgttc

SEQ ID NO: 76879 - DNA, 377 bp, Zea mays
cccacgcgtccgggggaatggggggacgatgaggaggtggtggcggcgaagaaaccgagcgggaagaccgaagaggagaaggtagcggaggcggcggagatcggctacaaggtgttgggaccgctcgaggctgacgataaacccttcaagccctacgagcccgtcttcgccgtcgtacagatcggctcgcaccaattcaaggtgagcaatggcgactccatcttcacggagaggttgaagttctgtgatgtgaatgacaagttggtcttaaaccgagttctcatgcttggttcacaagctcaaacagttattgggaggccaatactacctgatgctgctgttcatgctgttgtagaagaacatgccttaaattccaa

SEQ ID NO: 76880 - DNA, 379 bp, Zea mays
cccacgcgtccgggagaatcgtcgaatgagagcaattgtttgtctttgccatggttatggagacacatgtaccttttttcttgatggagttgcgaggaagattgcttcagctggatatggagtatttgcactggactaccctggctttggtctttcagaaggacttcatggatatattccaagttttgatacacttgttgatgatgtagctgaacacttctctaaggtcaaaggaaatcctgaatatagaggcctaccgagctttctgtttggccaatctatgggtggagcagttgcattgaaggttcacttcaagcaaccaaatgaatggaatggtgcaatactggtggcaccgatgtgcaagatagcagacgatgtg

SEQ ID NO: 76881 - DNA, 395 bp, Zea mays
cagaaatccatcgacgaacaactgagaagagctgcgcctgcgcctgcgcctgcgggaaagggagaacatggtggggaagaagaggggtgttatctccccgctggaccatctcgctgggctgctggaggtgcgcgtggtgaggggagtggacctcgccatccgcgacctccgatccagcgacccctacgtcgtccttcgcatcggcaaggcgcagaaagtgaagacgcgagtggtcaagaagagcatcaatccggaatggaacgaaaaactcaccctctctattgaagaccctgccgttcctattagactggaagtatttgacaaggacactttcgttgatgatgcaatgggtaacgcggagctggacatccgcccgttagtcgagattgtgaaga

SEQ ID NO: 76882 - DNA, 431 bp, Zea mays
tcgcgggtcgacgcaagcctctacagtgagcccgatcagcatcgaaccagcacatcgcaagacaagcagcagcagccaccactgccatcacatggagtacgccgccgtcggctacggctacgggtacgggtacgacgagcgccaggagccggcggagtccgcggacggcggcggcggcggcgacgacgagtacgcgacggtgctgtcggcgccacccaagcggccggcggggcggaccaagttccgggagacgcggcaccccgtgtaccgcggcgtgcggcggcgcgggcccgcggggcgctgggtgtgcgaggtccgcgagcccaacaagaagtcgcgcatctggctcggcaccttcgccacccccgatgccgccgcgcgcgcgcacgacgtggccgcgctggccctgcggggccgcgccccgtgcctca

SEQ ID NO: 76883 - DNA, 314 bp, Zea mays
acgctgtgcaatgcgtgcggcgtccgctacaagtcgggccggctcctgcccgagtaccgcccggcgtgcagccccaccttcgtgagcagcatccactccaactcccatcgcaaggtcctcgagatgcgccgcaagaaggcgggcgacatggtcgccaccgccgcgccggccgtggcgtcgttctgagctgcactcgctgtcagcaaggacgctggccacccagcggtggctgtacattttttttttcttgccataatggccctgtaccgtacctgaactctcctcccctcactcatcctagtgtggtcgttgta

SEQ ID NO: 76884 - DNA, 393 bp, Zea mays
cccacgcgtccgcacgcatactgcatacacaacacagagcatcagaaggagctgcgatctgatcgacatggctgccgccaccatggctatcacctcccgcgcgctcatcggcaagccggcggctggcacgagggacgtcttcggcgagggccgcatcaccatgcgcaagaccgccgccaagcccaagccggcggcgtccggcagcccctggtacggtgccgaccgcgtcctgtacctgggcccgctgtccggctcgcccccgagctacctgaccggcgagttccccggcgactacgggtgggacaccgcggggctgtcggcggacccggagaccttcgccaagaaccgcgagctggaggtgatccactgccgctgggccatgctcggcgcgct

SEQ ID NO: 76885 - DNA, 381 bp, Zea mays
aaaacaaacttgaggctcttctgcaggttcttgagccaagcttggcaaagggaaacaaagttatggtgttctgtaatactttaaattcaagtcgtgcagtggatcattttttaactgaaaatcatatatccactgttaactatcatggagaggttccagctgaagagagagttgagaacctgaacaagttccgcaatgaagagggggattgtccaacattagtatgcactgatctggcagctagaggcctggacctggatgttgaccatgtcatcatgtttgacttcccatcgaattctattgattaccttcacagaaccgggagaactgcacgcatgggagccaaagggaaagttacaagcattgtggctaagaaagacg

SEQ ID NO: 76886 - DNA, 375 bp, Zea mays
gtccaagcagtccctctcctacctcgatggcacgctgcccggcgactatggcttcgacccgctgggcctctcggacccggagggcaccgggggcttcatcgagcccaagtggctggcctacggcgaggtgatcaacggccgctacgccatgctgggcgcggtgggcgccatcgccccggagatcttcggcacgatgggcatcatcccgccggagaccgcgctgccgtggttcaagacgggcgtcatcccgcccgcgggcacctacaactactggaccgactcctacacgctcttcgtcttcaacatggcgctcatgggcttcgccgagcagcgccgcctccaggactgggtaaagccggggtccatggggaagca

SEQ ID NO: 76887 - DNA, 418 bp, Zea mays
cccacgcgtccgcccacgcgtccggtgacgatgcgcaagacggcggggaaggccaagccggcggcggcgtccgggagcccgtggtacggccccgaccgcgtgctgtacctgggcccactgtccggcgagccgccgagctacctgacgggcgagttcccgggcgactacggctgggacaccgcggggctgtcggcggacccggagacgttcgccaagaaccgggagctggaggtgatccactcccgctgggccatgctgggcgcgctcggctgcgtcttcccggagctgctcgcccgcaacggcgtcaagttcggcgaagccgtgtggttcaaggccggctcccagatcgtcagcgatggtggactggactacctcgggaatccgagcctcagccacgcgcagagcatcctcggcatct

SEQ ID NO: 76888 - DNA, 414 bp, Zea mays
gatcgctcagcacaaagcgtcgtacttggataggagaaaacaattctagacagtcgacagagagagagaaacaaaaaatagagaactgagagatcgaggacaaagggggagaggagatgtctcggggcggtagccacggggagctgggccataggatcgattacgtcttcaaggtggtgctcatcggtgactccgctgtgggcaagtcgcagctgctcgcgcgcttcgcccgcaaccagttcaacctcgactccaaggccaccatcggagtcgagttccagacccgcaccctcaacatcgacgcccgcaacgtcaaggcacagatctgggacaccgcatgccaggaaaggtaccgagcagtaacaagtgcctactacaggggtgcagttggggctatgttagtatatgacataa

SEQ ID NO: 76889 - DNA, 388 bp, Zea mays
cgccaacgcgtccggccttccctacagcaactgcatacatacaacacttccatctgcccgctcgtcttcgatcaattcccaagtcaaataatataacagcaatggtggttcccgtgatcgacttctccaagctggacggcgctgagagggccgaaaccctggcgcagatcgccaatggctgcgacgagtggggattcttccagctcgtgaaccacggcatcccgctggagctgctcgagcgcgtcaagaaggtgtgctccgacagctaccgcctccgggaggccgggttcaaggcgtcggagccggtgcgcacactggaggcgctcgtcgacgcggagcggcgcggtgaggtggtggcgccggtggacgacctggactgggaggacat

SEQ ID NO: 76890 - DNA, 419 bp, Zea mays
cacagccccacagtcgccccttcggacttccctttattccccttcctatataatcccatcgccactgccttcttcttccgcttccaacttccgttccgcaaatcgaaagctcggcgttgccctgcctcgagctcgaaggactttgtccctttacgtcgttgtccagctcctcgcatattgtggcctggtgcagattggagatccgcccggacttggatcgagtcctcctgtctttggacattcattggagtgctccattcattgaggcagcatgcctaagataaagacaagccgtgtcaagtatcctgaaggatgggagcttattgaaccaacaatccgtgagttggatgccaaaatgagagaagctgaaaatgatccacatgatgggaagagaaagtgtgaagctctctggcctattt

SEQ ID NO: 76891 - DNA, 412 bp, Zea mays
cccacgcgtccgcgcgagatctccgatccccgcccaaatcccacgacgccggcggcggccatgggcggcaaggacctgacggaggaccagatcgcctcgatgcgggaggccttctcgctgttcgacacggacggggacggccgcatcgcgccctcggagctgggcgtcctcatgcgctcccttggcgggaaccccacgcaggcgcagctccgggacatcgcggcgcaggagaagctcaccgcacccttcgacttcccgcgcttcctcgacctcatgcgcgcccatctcaagcccgagcccttcgaccgcccgctccgcgacgccttccgtgtcctcgacaaggacgggtccggcaccgtcgccgtcgccgacctccgccacgtcctcacctccatcggcgagaagctcgagg

SEQ ID NO: 76892 - DNA, 397 bp, Zea mays
actcgttggcttcgtacggatgatcctccactccggcaagtatgaaagtggcgatcggctgtgtcctgaacatgagaaggcgattctggaacgtttgcttccataccatccacaatataatgagaaaattgggtgtggtattgactacatcacggtagggttacatccagaattcgaaaactcaaggtgtttattcatacttaggaaggatggcgagcagatcgatttttcgttctggaagtgcgtcaaaggtctcattcggcaaaagtaccccatgtacgcggacagtttcattctcaggcatttccgcaagacacaagactactgaagtagttgctcgtacggctgtttcagtgttatatttttctgtgtaattgattttgtcctgtcccctttc

SEQ ID NO: 76893 - DNA, 385 bp, Zea mays
gcggtggcgataaggaagcaccttgagaggaacaggaaggacaaagactctaaattcaggctcattcttgtggagagcaggatccaccgccttgcccgctactacaagcgcacaaagaagcttccacccacctggaagtatgagtcaaccacagcgagcactctggtggcctaagtgtggtatcctccgacagcttgttctagatatgaatttgtgtaatgcttattatggctcgagccggttaaatggacaacggacctcatctttttttatgtttaccttgagaatcccgtaaaccattttgggtttctgaattgtctgttaaacgtaacatgcatatgttttgaagcctagggtgagcttttacttcaccatcactaaggaa

SEQ ID NO: 76894 - DNA, 393 bp, Zea mays
aaagttcgagcctgagctgccccagtggaagagctccgccatcgccgacctcggcgtgggcaccgagaacaagatcgccatgcacttcgacagggtcttttggcccaacgtcgaggtgctgggaatggtcgggccgacgcccaaagcctgtgggtacttcctgaacctgcacaaagccaccggcaatccggtcctcgtgtacatggccgccggaaggttcgcccaggaggtggagaagctgtcggacaaggaagccgtcggcctggtcgtttctcacctgaagaagatgctcccggatgccactgaaccgacgcagtacctggtgtcgcgatggggctccgaccccaactccctggggtcctactcgtgcgacctggtcgcgaagccggccga

SEQ ID NO: 76895 - DNA, 418 bp, Zea mays
gggtccacgcccgcgtccgcatacaagtccgcccacgcgtccgaggagctgaacgacaggaagaggctggccaccagtggcgccaactttgcgcgcgcctacaccgtggagttcggcagctgccagttcccctacaacttcactgggtgccaggacctcgccaaccagacgagggtccccttcatcagcgacgacctcgagattgagtgcgaggggaatgagaagttcaagtgcggctccaacgttttctggaagtggtgaagcatctagcagcagcgtctgatgggaatggacgagattatcacctgtcatgtcgagccgtaatatgtccacactgcagggaaattaaatcgtcaggtgtaattgtgcccagtctgtttcaatcatctcaacaaccgagtcatgaacctcctgcatt

SEQ ID NO: 76896 - DNA, 414 bp, Zea mays
gcgtcggggagaatcacatgaagtagccagcaaagcaaaggtgagggatgatcatgccaattgcaaactcaatgaggtacaccaaagctctgaatcagagaaagataagcaacttgtaccagataacgcagcaacaaccaatatgtcagatgtacaacgtgaaaattctcatgtacagaacaatcagaagtacgaaattatcaatgtgccttctgattctagggcacttctagttttcattaacaagagaagtggggcacagagtggtgattcactgagacagcgtctgcaaattcttcttaatcctgtgcaagttttcgagttgagcaaacatcaaggtccagatgttggtttagctttatttcggaaggtaacccatttcagagttcttgtatgtggtggagatggcactgc

SEQ ID NO: 76897 - DNA, 421 bp, Zea mays
aacacgcgtccgcccacgcgtccgtggcagacgatgttgatctagaagctatagctaacttgacagaagggtactcgggtagtgatctcaagaatctttgtgttactgctgctcatcgtcctattagggagattcttgaaaaggagaagaaggagagagcttcagcagaaacagaaaataggccattgcctctgtcgcacactagcaatgatgtccgtgcattaagaataagtgatttcatacatgcgcatgaacaggtgtgtgcaagtgtttcctcagattccagtaacatgaacgagcttgtgcaatggaatgatctctatggagaacgcgggtcaaggaaaaagacaacgctaagctacttcatgtagctgatgttgcaagtatatcgggagaaatgccctggcacaaagcagaaatg

SEQ ID NO: 76898 - DNA, 417 bp, Zea mays
gtctctactcctcttcctcctctctctactctccaagttctcttctccgtcgaccgctctacacgtctcttgtcgacctggacaccgaggtggaagaaggaagcagtcagcagatggatccatggatcagcagccagccttctctgagccttgacctgcgcgtcggcctgccgccgctcagcctccaccaccaggcgccggtggccgtcgccttgcccaggcccaagctgctcgtcgaggagaacttcctcctgccgcctccatagaacgaaccagaggtacgcatatatacactacactccgatcctatgtgcgacgcaagcatggcaccaccccacctggactggacggacacggcgggcgtgacgacgagcacagactctaacggactgtccccttgacttgatcccaagtcgc

SEQ ID NO: 76899 - DNA, 418 bp, Zea mays
atctgccaccgacgaacagcaccggttctacggggagtcgaagccgttcgggaacgactcgtacaggtcggccgagacgctgggctacctcacgtccacgcaggcgctggccgacttcgccgtcgtcatcaggggcctgaagcgggacctcggcgccgaggccgctcccgtcgtcgtcttcggcggctcctacggcggaatgctggcttcctggttcaggctcaagtacccccacgtcgccattggtgccctagcttcctccgcgccgatcctgcagttcgaccacataactccgtggagcagcttctacgacgccgtctcgcaggacttcaagtccgagagctccaactgcttcggtgtcatcagggcagcctgggacgtcctggatgagaggggggccacagacaaagggctcctg

SEQ ID NO: 76900 - DNA, 413 bp, Zea mays
aagattctggagctagaagactcgatgaagaagcctggctatgtgccaaacactgttcagaagaggcttgcagaagaggtgacgcgatttgttcatggcgaggagggattggaggaggcattgaaggcaaccgaggccttgagacctggtgctcagacacaattggatgcacaaacaattgaggggatagcagatgatgtgccttcatgctctttagcttatgatcaagtgttcaagtctccacttattgatttggctgtttccacaggtttgctcactagtaagtcagcagttaagcggcttattaagcaaggtggtctgtacttgaataacgtgaggattgatagtgaggataagctggttgaggaaggtgatatagttgatgggaaggtgctcttgttgtctgctggaaa

SEQ ID NO: 76901 - DNA, 339 bp, Zea mays
ggctctccgagtctccggttccctcctctcggcggcggctcaggtccctctccatctcaggcgtagcgcttggcgtctgacctcaacaagcaagacagcaaatggcaagctgcagggttgcgcatgccaccctcaaaggcccgagtgtggtgaacgagatcttcattggactgaccctgggtctgatctcgggaggcatgttgaagatgcaccactggtactatcacaagaagactaggtccttctaagacatgcttgacaacggccaaatcagcgttgtcgtcgatgagtaaagagttcttcccacttattttcagagaactctctccataacatgac

SEQ ID NO: 76902 - DNA, 425 bp, Zea mays
ccggtcctagatttgcgggtccaggcccgcgtccgagtcgctgaacccggacgcgccgctcttcatcccggcggcgctgctgcaggtggaggacttctcgccgcagtggtgggacctcatcaccaccactgcctggttccgcgagcactggtcccgcgagcgcgcccacctggaccagatggccgatcagatcgacgcggccggcctcctccccgacgacgaggacctcttctacgacgaccagctcgagcaagggcccgtcgccgccgcccttaggacagattcggtgcccaaggcgcggaacatgacctccccgaagggcggcggcgacgcctcgcgggggttccgggacaaagccaggaagcccgagaagccgactaagtactccggcagccccaagagcagcgctccccgcgtgatcaaca

SEQ ID NO: 76903 - DNA, 296 bp, Zea mays
aggagaagaggctgcagttcgcgattgccaacgacagctccacttcgctcagcttcatggcagcgctgtatgcttcgcggttcgctgggaatatgatacggatcctgaggagaaacgccacgcgcaaggccaggctgcaggaaagagtgcccgcgagactgctgcagaaaccggctgaacccaacttttccgcagaagagcagtagtatttcgcttctctgacttctcgttttgcagatacagatatgggaaattgtttgcgtgacttgcaagcccgaggatggcatgcccagatt

SEQ ID NO: 76904 - DNA, 415 bp, Zea mays
gataaactgcactgcaggaatggagtacttggcaattcaacactgggcagccttcttcacaagaaacgaatcttagtggttgacgacaatattgtaaatctcaaggttgctgcaggcgctctgaagaaatatggcgcagaagtaacttgtgctgatagcgggaagaaagcaatcacgcaactgaaacctcctcacagttttgatgcttgtttcatggacatacagatgcctgaaatggatggatttgaagccacaaaaaggattatagtgatggaaagagatctaaatgagcaaatagaacgtggagaagccccaccggaatgcgcatggctccggcagtggcgaactccaatattagccatgacagcagatgttatccatgcgacgcacgaacagtgcttaaaatctgaaatgg

SEQ ID NO: 76905 - DNA, 407 bp, Zea mays
gatgccccattcaagcagtggtacctcactcactatggagttgacattggtaggaagaagaaaacccctgctgcaaagaaggataatgctgagggacaagaggttgaggcagcagctgaggaaacgaaaaagagcaaccatgtcacgaggaagcttgagaagcgcaaggagggacgtacccttgacccacacattgaggagcaatttggcagtggacggttgctggcatgcatttcttcccgccctgcacagtgtggccgagctgatgggtacatccttgagggtaaagagcttgagttctacattaagaatctacagaggaagaacggcaacagcgctgtaacttagagcattctcatggattgtcttgcaccgaaatgtgtgtcctgatgagtacaccttttttg

SEQ ID NO: 76906 - DNA, 409 bp, Zea mays
accacgcgtccgagcaagtgctactggaaaggcccctgttaagaaacagtctgctggggagctccgtcttcataaagatattagtgagctcaacctgccgaagaccacatcaatttcttttcccaatggcaaggatgatctgatgaattttgagatcaccatccgacctgatgaaggatattacatgggaggcgctttcgttttcacctttcaagtgtccccatcttatcctcatgatcctccgaaggtcaaatgcaagaccaaggtgtaccatccaaatattgatttggaaggcaatgtctgtctgaacattctgcgtgaagattggaagcctgttctcaacatcaacaccgttatttatggcctgaatcttctttttacgcaaccaaacgacgaggatcctttgaac

SEQ ID NO: 76907 - DNA, 413 bp, Zea mays
attgctggtgctctgtttgggcaactgcgtggccttgcgctggtggtctttgctgccactgcatgtgcttcttcgtgctatttcctgtcgaagatgattgggaagccactggtgttcacactgtggccagataagctcagcttcttccagagacaggttgctaaaagaagagagaagttgttgaattacatgcttttcctcagggtgaccccaacattgccaaataccttcatcaacttagcttcacccatagtagatgtcccctaccatatattcttactgggaactctcattggtcttatcccagctgcttatgtgactgtcagggctggaattgctcttggagagttaacttcgctgagtgacctttacgacacccagtcgataacactgctattcctgatcggtgttgt

SEQ ID NO: 76908 - DNA, 409 bp, Zea mays
cagacgcgtgggagcttttcttgtgcgcagccgcagccgctgcttttcgttcgtcttcatcctacgcgagggcgaaacccacaaaccctctccctcccgtactccggcctacacatccaggggcgatgacgctgggtagctccggcgccggatcgagcgtcgtcgttccccgaaacttcaggctattagaggagctcgagcgtggagagaagggcattggtgatggaacagtgagctatggaatggatgatgccgatgacatctacatgcggtcatggactggtaccatcattggccctcacaatactgtacatgagggtcgcatctaccagctgaagttgttttgtgacaagggctatccggagaagccaccatctgtcagattccactcaagaatcaacatgacatg

SEQ ID NO: 76909 - DNA, 409 bp, Zea mays
ctcgacgtcgaggcggggacatcgggcgccgccgccacgggcggcgcgcgccagctctacccggggatgcaggagagccccgagctgcgctgggcgctcatccgcaagatctacgtcattctctccctccagctgctcctcaccgccgtcgtcgccgcagtcgtcgtcaaggtccgcgccatcccgcacttcttcaccaccaccagcgccggcctcggcctctacatcttcctcatcatcctcccctttatcgtgctgtgcccgctgtacttctaccacgagaagcacccagtcaacctgatcctgctcggcctcttcagcgttgccatcagctttgctgtgggcatgacatgtgccttcaccagtggcaaggtcattctggagtctgcaattctgacaacagtggtcg

SEQ ID NO: 76910 - DNA, 429 bp, Zea mays
ggtccacgcacgcgtccgaatttaacgagagattttggagtaccatcctcaaatgctacaagaatacctacaaggagcagaccacaatcagatgaccttcatgtatccaagtggggtggatcgcttcaggcgccaatttgctcatttggaagaaggtactgcaaagggtgaaaaacacagtccacagctgcgacagaatgtttctttgccaagggaaagagtaattggcaataaacatggagatggcaatacaggtgataagctagcgcatgcctcagtgacggatggcatcagccaaccgagcttgagtgagagaagctttctgaagagtgaaagcatcagtgcttccaactgtatacgtgaaaaaccgaagcatgtcaaagatggagaatctgttttaaagaacgtgggataaacagtccatgaatt

SEQ ID NO: 76911 - DNA, 428 bp, Zea mays
ggtccacgcacgcgtccgatggattccagcagtccagccagaggccagctgctcggggaagacggagtgcgcgtgcacagcatggttctccctggtctcgtctccagcacgtcgatcaacttctctggcgcaggagagatgtacaccttacggcatgacgttgcgaatgttcagtgcctgatgccaggactgatcctggcgatacggaaggtggtgcggttcaagaacttgatttatgggctagagaagttcttgtagtgaacaacagacaaccaatgcaaaacatcgacaggcaacaggcaacgcagatatcatctgacgtcgcaacaaccaaaacgacagagatttggaaaataaaggctgcacagaagacgtctggggttttgtgtgcaccaggctgcgcagagaacgtctgtcattttgtgtgc

SEQ ID NO: 76912 - DNA, 350 bp, Zea mays
aggacgcgtgggcgaacttctcctgtcgtctgcctaccagtagctagctctaatacatagcagccctcgctcgcaaggtactgcactacgatggtcgccacctcctcctcctcctcctccacggtagttgcacttgcggcgcttctcttcttgctccttgtaacgtgtggctcgtgcgcgagaccggcgagctttaacgcctccgactttaccgccgaccccaactgggaggctgcccgggccacctggtacggtgcgcccaccggcgccggccctgatgactactgtggtgcctgtggattcaagaacgtgaacctgccgccgttctcggtcatgacattgtgcgggaa

SEQ ID NO: 76913 - DNA, 424 bp, Zea mays
cggacgcgtggtggacgcggtggagagcgagtggggccagggcgccgacctggccgcgctggagcgcaggctccgcgaggacgcgccgcggcacgccatcaaggccgtggccatcgtgcacaacgagacggccacgggcgtcaccaacgacctggccgccgtgcgcgcgctgctggacaagcacgcgcacccggcgctgctgctggtggacggcgtgtcgtccatctgcgcgctggacttccgcatggacgagtggggcgtggacgtggcgctcacgggctcgcagaaggcgctgtcgatgccgacggggatgggcatcgtgtgcgccagccccatggcgctggaggccaacaagacggccaggtccgtgcgcgtcttcttcggctgaaggactacctcaggttctacgacatgggcacgtact

SEQ ID NO: 76914 - DNA, 423 bp, Zea mays
ggaaggccgcgcaaatacggacctgatggcaccatgaggcaacaacaacaacagcaacaggccgcgtcatcgcagcagcagcagcagcagctcgtcgctacacaaccgaggatatgttctctatcatcgggtcccgacatgctcggcagctccggtatggaggaccccgcgcagaagaagcggcgcggccggccgccgggcaccggcaagaagcaccagccctcgacctcacaaggcaacgcgttcgccggttcggctggaacgaacttcactccgcacatcatcacggcgtctccttcagaggacgtggcggcgaagatcgttgcgttcgccagccagtcgtcaaaggcgatgtgcgtcctctcggcgatgggttccgtctccagggccgtcgtccgccacccggccgacggctctcccatg

SEQ ID NO: 76915 - DNA, 434 bp, Zea mays
ggcatcatccgtctcgtctcgtctcgcctctcctctccttttcccccctccctgcacagcgccgctcaccgtcaccggaccacagcagcgatcgatggctgaggtacacaacgagcggcccgtggggatggtgggcggcgtccgggacgcgccggtgggccgcgagaacgacctcgaggccatcgagctcgcgcgcttcgcggtcgccgagcacaacagcaagaccaacgcgatgctggaattcgagaggctggtgaaggtgaggcaccaggtcgtggccgggaccctgcaccacttcaccgtcgaggtgaaggacgccggcggcggcgaaaagaagctgtacgaggccaaggtgtgggagaaggcgtgggagaacttcaagcagctgcagagcttcgagctcgtcggagacgccgcggtcgcctgaggcgcac

SEQ ID NO: 76916 - DNA, 433 bp, Zea mays
gtacccacgcgtccgatgatgaaaggattccaccgtgttgctgagagtcttgatgatctcattcttgacataccatctgcaaagtctgaatttcagttgttggtatcaaaagccatttctgagggatggttagattcttcctatgtgaactcaggtgtcaacggaagcgttgaagacgatgaacatgagaagctggctaggtacaagagggaggctgtatccataatacacgagtactttttctctgatgatacaacagaggtcatccgtagtgtcaaagagcttggttatccggaatacaatccgatcttcgtcaagaagctcataacaattgctatggaccgcaagaacatggagaaagaaatggcatcggttcttctcccttcattaagcatggagctgttctcgtctgaagacatcgccaagggatttg

SEQ ID NO: 76917 - DNA, 418 bp, Zea mays
gtgaggcaggaactggtccatgcgaatcaaatctttgctcagaatccatcgtggccagtcattgcggtcactggaaaagctatcgaggaaacagctgctgtcatcttggggatcctccatgacaggaagcagaagtgctccatgccacgcatatcaaaacgatactagcactgtgttctatcccttctctactacaccttgtaacgtgtgcatgttttgaataagctttgtatcaaggaccatagccttcatgtaatttttttttgttggaccaccttctaggtggtgccgtttgtatcataaacataacttgaagtttagcgcagcagaaacacatgtatattgcgtttaaaaaaaaaaaaagcatcaaatcaactcacatcagtgaacagagaccagttcacaaaaaaaagggcgg

SEQ ID NO: 76918 - DNA, 395 bp, Zea mays
catactttggttcactgcgtacaagatgaaaaagccgaacaagtacaactatccaattggaaagaggcgcatgcagccagtgggaataatagttttcgcatcagtgatgggcacacttggcttccaagtgctgatcgaatcagggcgccagctcataactcaggagcacgcggatttcaagttcaagcaagagctgtggatggtcattagcatgtcctctgttgcggtcgtgaagttcttcctcatgctctactgcataacgttcaagaatgagatcgtgagggcctacgcccaggaccatttcttcgacgtaatcacaaactcggtcggcctggtctcggcgctgctcgctgtccggttcaaatggtggatggaccctgttggcgccatactga

SEQ ID NO: 76919 - DNA, 295 bp, Zea mays
cccacgcgtccgtgttggcactgtccccttcagtcagacctgcggatcaacggcggtggctccaaatctccaatactactacatatgaacggacaccacttttgtgcgtttctgttgacgggaacctgtgtaattctttcacctttttttccctgtggttgacagacacagacactgtaatatgtttattaaaaacactcatccatatagctgactgtgcacctcgtctctcaattcatcctcatgctctactgcagaacgttcaaaaatgagatcgtgagggcctacgcacaag

SEQ ID NO: 76920 - DNA, 394 bp, Zea mays
ccatccgtttctccgcgatgggcgccggccgtgtctgtcgcggcggcccctcctccgtctcccccgccgcagggcggccgttctcgacgctcgccgcgtcgtcctccgcctccccttcctcggctccttcagagacggcgtccacgtcggtcaccaagacggtgaacggctcccaccacttcaaaatcgcgggctagtctctctccaagggaatcggggtggggaagttcatcgcttccgagtccttcaacgtggggggattcgactgggcgatctacttctaccccgacgggaagagcgccgaggacggcgctgcctacgtctcgctcttcatagccctcgccagcgagggtaccgatgtgcgcgcgctgttcgagctcacgctcgtcgacca

SEQ ID NO: 76921 - DNA, 418 bp, Zea mays
cacacgcgtccgcggacgcgtgggcggacgcgtgggcgaggagccgaccgacgggcgaagcgggagggaggcgatggcggcggcttgggggcagaaggccctgggggctctgccgcagctggtgaagtcgctgcggagtgatcccgtctccggcagcgcacgacacaggcgccttccgtctctcaggaggaccttctcgttgtacgatcagatcaacctcatcgacagcgtcccggaagacgagctccgattccagtcgtatgatgacactggattcaaaattaacaatgtaaaatatgaaggcagtgtattgattgtagagaacaagataatgacatgggcacccaaaacgttctcagagataactcctgaaagtttatcaatcttcagagttgtgcaccctatcccagagatcttt

SEQ ID NO: 76922 - DNA, 424 bp, Zea mays
cggacgcgtgggcggacgcgtgggcggacgcgtgggttttttttttttaacagaaagcacaagtcatctcattatcgacggcaatggtaggttgatgttggactagcactcgatccttagatggatcagaatgcatacgggcgacaaggaatggaagaacatacgtccccacaaaaagtttcatggggcaacaccacaatcgtctgcatttaagcagtaatgccgaatatggagtttcgacttcatttcattttcatcccatggcatttctgggtccagctgcgggctgttgcctcgtacttaggccgatccgtcttggacatgtgagcaatctcagggacaagaggatcgtctgggttgggatcagtaagcagggagcagatagaaagcaaaaccttagagattgtcaaagcagggctccact

SEQ ID NO: 76923 - DNA, 425 bp, Zea mays
cggacgcgtgggcggacgcgtgggcgaatcccgtcttcttcctttcttggccttctccacctcatcgccgagacgagatctctcccacacgaggagggcagcagggaagggagagatgggcgggcgggtggatcacgagtactcctacctgttcaagatggtcctcatcggagacagcggcgtcggcaagtccaatatcgtctctcgcttcacgcgcaaccacttctccctcgactccaagtccaccatcggcgtcgagttcgccaccaagtccctgcagatggacggcaaagcagtaaaggctcagatctgggacacagctgggcaggaaaggtaccgtgcaattacaagtgcttactaccgtggagccgtgggagcactgcttgtgtacgacatcacaaagaggcacagcttcgacaatgttc

SEQ ID NO: 76924 - DNA, 434 bp, Zea mays
cccacgcgtccggcaagcaagcaagcagcgagtacatacatactaggcagccatgcagccatggcgcccaccgtgatgatggcctcgtcggccaccgccgtcgctccgttccaggggctcaagtccaccgccagcctccccatcgcccgccgctcctccagaagcctcggcaacgtcagcaacggcggaaggatccggtgcatgcaggtgtggccggcctacggcaacaagaagttcgagacgctgtcgtacctgccgccgctgtcgacggacgacctgctgaagcaggtggactacctgctgcgcaacggctggataccctgcctcgagttcagcaaggtcggcttcgtgtaccgcgagaactccacctccccgtgctactacgacggccgctactggaccatgtggaagctgcccatgttcggctgcaacga

SEQ ID NO: 76925 - DNA, 385 bp, Zea mays
cggacgcgtgggtgaccacaaaagtgtttggagtgccccagccagggtggtacatggtttattacatcattaatactattcaagagttagtaaccgctctgacccaagagcatccggtggtgctgatgttctgggcggactggaaccagccaagcaaggccacgtactgggatctggccagcgctaaaaaggatgaggccgtattctgccagctggactttgataagtttaaagatgtcgtagagaagttcagagtgaaggctctgccgacgttcctcctgatcaatgagggcgaggagcagcgcagggtcgtcggtgccaaggtcgaggagctcaacatggcattatcacatatcggataatctaagcagctatagcgctcaca

SEQ ID NO: 76926 - DNA, 374 bp, Zea mays
ggcacgcgtgggcgagaagcatgcccacagtattgttagcaaaatgatgatgcatgaagagcttcaggctagctggcaccagccaacagagtgcaccgtgtttcacagcctggatcaaaccaggcttcaggagctactcttccaggttgcagaaaaaatatcggtcctggtggagacaaacgagagggcatacgagttaagaactggtggtactcttgaggggctaccgcccaggcgcaggggcgaagctcaggattcatccaagtggcacgagagctttgtcccatcacagggggcggcacggtggtgggaaccggtttgggtactccgggagaggtgcagcatctggtcaaagtggtgggctccagaggggc

SEQ ID NO: 76927 - DNA, 441 bp, Zea mays
ccaagaccaggaaggaaacaccgccgccgccgcgccttccattccagtactcgcggaggaaaggaacaccagccagcgccatggtcacgtcgaccaccgccgccgtcgtgctgtccccgccgtccgtggccgggcttcgcctggcgccgtctccccgggcgcgcgtggcgttccgcgcggcgcgggcgcagcggtccgtggcggcgcgcgcggagctgagcccgtcgctggtgatcagcctgagcacgggcgtgtcgctcttcctgggccgcttcgtcatcttcaacttccagcgggagaacgtggcgaagcaggtgcccgagcagaaccgcaagacgcacttcgacgccggcgactagcgcgccaaggggttctcgggcctgctcaagtccaacgaccccgtgggcttcaaactcgtcgaggtcctcgcctgggggtcgc

SEQ ID NO: 76928 - DNA, 432 bp, Zea mays
cgctggtgaacaacgggtacgaccccgaggtcatcgacatcaggtcgctgaagccgttcgacctgcacacgatcgggaactcgatcaagaagacccaccgcgtgctgatcgtggaggagtgcatgcggacgggcggcatcggcgccagcctgcggtcggccatcatcgacaacttctgggactacctggacgcccccatcatgtgcctgtcgtcgcaggacgtgccgaccccgtacgccgcgacgctggaggacgccaccgtggtgcagcccgcgcagatcgtggccgccgtcgagcagatctgccaatgatcagtgatatcatggctttgttgagtacctgatctgtggagtcagattaccgtggttttgtttctctgtcgcatcgcgactgtcaccgtgccttagacaagacatgtttttgtattttgca

SEQ ID NO: 76929 - DNA, 436 bp, Zea mays
tccctctccatctccggcgtggcgcttggcgtctgacctcaacacgcaagaaagcaaatggcaggcggcagggttgcgcatgccaccctcaagggcccgagtgtggtgaaggagatcttcattggactgaccctgggtctgatcgcgggaggcatgtggaagatgcaccactggaacgagcagaggaagactaggtccttctatgacatgcttgacaagggccagatcagcgttgtcgtcgaggagtaaagagttcttcccagttattttcaaagaactctctcgagagcatgacaaagtgattgcttgctgtggagatttgtcctggaaataagcacaaccatttgggaacaccagattttgtcgaattttcctttccttttgatgaatatttgagcacgtccatgtcaataccaaacatctggccttttctctc

SEQ ID NO: 76930 - DNA, 384 bp, Zea mays
cccacgcgtccgcgacacgcagtcctgcatggaccccaacgtcatggaggccaaggtcgtggtcagctcctgcggcgacgacaggcccttcggcgccaccggcgtcaagaggctccaagacatcagcatgatgagcgccgtgccggggatgaaggcgctcgacatgaacaccgccgacgacgagatcgtgcgcctcacgcgcgaagtcgttcccggcatgatcatcaccggaatggaggtcgccgagattgacagcacccccaggatgggcccgacgtttggcgccatgatgatctccggctagaaggcggcgctactggcgctcaaggccctgcgcaggcccaacgccgtggaccggaatatgtcaccgccgttgcacgagga

SEQ ID NO: 76931 - DNA, 430 bp, Zea mays
ctcacctccttcgccgttgtctaccagatcatcccatggcgtcggagaagaagcagtcgaacccgatgcgggagatgaaggtccagaagctcgtgctcaacatctccgtcggcgagagcggtgatcgcctcacccgcgccgccaaggtactggagcagctgagtggccagtcaccggtattctccaaggcaaggtacactgtgaggtcgtttgggatccggcgcaatgagaagatcgcatgctatgtgacggtgcggggtgagaaggcaatgcagctgctggagagtggcttgaaggtgaatgagtacgagctgctgaggaggaacttcagtgacactggctgctttggatttggtatccaagagcacattgatcttggcatcaagtatgatccatctactggtatctacggcatggacttctacgtcgt

SEQ ID NO: 76932 - DNA, 436 bp, Zea mays
cccacgcgtccggcaggccgccgacctgatcgcgtctcaatctcagcaagacgacagccgggctgcggtcggcagcgccttcaacgacttctccttccacgcgcccaccatgcccgcgcagaccacgtccttcccttccttcaaggagcagcagcaacagcaagtcgaagcggcgactaagagcgccgtcccgtcgagcaacaaggccagcggcggaagcggcggcagcaccaagcttgaggacgggtacaactggcgcaagtacgggcagaagcaggtgaaggggagcgagaacccgcgcagctactacaagtgcacgtaccacagctgctccatgaagaagaacgtggagcggtccctggccgacgggcgcgtcacgcagatcgtgtacaatggcgcgcacaaccaccccaagccgctgtccacgcgccgcaac

SEQ ID NO: 76933 - DNA, 407 bp, Zea mays
aaccaacaaggcagcaacacaagcaagaaccacacctcctcccttcgcctgtgatcatgtcgtcttgctgcggcggcaagtgcgggtgcggctccagctgctcctgcggcagcggatgcaacggctgcggtatgtaccctgacgtggagaccgccgccaccagcagcgtcaagaccacggtcctcgccgcgccgaccaccaaggccagcgccggcggcttcgaggcggccaccgatggcggcggctgcgactgcaacacctgcaagtgcggcaccagctgcagctgctcctgctgcagctgcaactgagctggcccggcccggcgatggcgcacgagagtcgagaggaggatgacgacgaccaggcgtataaatataatagcggcgtccagtacataagattctgtc

SEQ ID NO: 76934 - DNA, 397 bp, Zea mays
cggacgcgtgggcgccgccgccgcgccttccattccagtactcgcggaggaaaggaacaccagccagcgccatggtcacgtcgacgaccgccgccgccgtgctgtccccgccgtccgtggccgggcttcgcctggcgccgtctccccgggcgcgcgtggcgttccgcgcggcgcgggcgcggcggtccgtggcggcgcgcgcggagctgagcccgtcgctggtgatcagcctgagcacgggcgtgtcgctcttcctgggccgcttcgtcttcttcaacttccagcgggagaacgtggcgaagcaggtgcccgagcagaacggcaagacgcacttcgacgccggcgacgagcgcgccaaggagttctcgggcctgctcaagttcaacgaccccgtggg

SEQ ID NO: 76935 - DNA, 436 bp, Zea mays
cggacgcgtgggcaacgacggagggggaggcggcgacgacgccgtgctgttcaagggttccgccatgacccgccgaggtggcgccgctgcgctctcctacatggcatgctccgtgctgctagtgatgtttaacaaagcagctctttcttcatacaaattcccttgcgcaaatgtcatcacgctccttcagatggttattgttgcgcaccacacctctttccttggcttatttactctacatgcttcgatggaatcggtccgtggagttaacgttcctatgtatacaactctacggcgcacaacagtcgtgtttacaatgacaatggagtatttcctggcaaagcagaggcacaccccacctataataggcagtgtggctttgattgtattcggagcatttgttgctggagctcgagacttgtcatttgatgctcgt

SEQ ID NO: 76936 - DNA, 428 bp, Zea mays
agcgcttatagcttgtcagccatggccaccgccgccgcgtctagcctcctcaagtcctccttcgcgggctcccggctcccggccgccacgcggaccacaccggcgtccctcgtggtggccaccggcccgcgcggcgccggcgcggggcccatctgcgcgtccatgtccatgtcctcttccaacccgccctacgacctgacgtccttccggttcagccccatcaatgagtccatcgtgtcccgcgagatgacgcgtcgctacatgacggacatgatcacctacgccgacaccgacgtcgtcatcgtgggcgccggctccgcggggctgtcctgcgcgtacgagctctccaaggaccccgccgtgagcatcgccatcgtggagcagtcggtgtcgccgggcggcggtgcgtggctgggcgggcagctgtt

SEQ ID NO: 76937 - DNA, 358 bp, Zea mays
ctcccggtgggcgatgctgggcgcgctgggctgcgtgtttccggagatcctggctaagaacggcgtcaagttcggcgaggcggtgtggttcaaggccggcgcgcagatcttctcggagggcgggctggactacctggggaaccccaacctggtgcacgcacagagcatcctggccatctgggcgtgccatgtggtgctcatgggcttcgtcgagggctaccgcgtcggcggcggcccgctcggggaagggctcgacaaggtgtaccccggcggcgccttcgacccgctgggcctcgccgacgacccggacaccgccgccgagctcaaggtgaaggagctcaagaacggccgccttgcc

SEQ ID NO: 76938 - DNA, 482 bp, Zea mays
  unsure (1)..(482): unsure at all n locations
acgcctgccgngtacgttccgaagcctccgggtcgacaacgcgtccgcacacgcgtccggcggaactcagacctctaagaagggtcatctttaatgctttgtacaaccgcaaactggcaagcatgaaagcaggctactcgcacaaaaccgcttcacctttcgcggacatgctggcttttcgcaaggtcaaggcaaggcttggaggtcgtcttcgcttactgatttcaggaggggctccgttgagtaatgagatcgaggagttcatgagagtgaccacctgtgcatacttcatccaaggctatggtttaacagaaacactgggacctagcactgtctgctacatcgacgacatggccctggtcggaagcgctggtgtgcctgccacctacaccgaaattcggctggaagaagtgcccgagatgggttataatccactcggcgttccttcgcgtggtgaaatctgcatccggggaaaatccctc

SEQ ID NO: 76939 - DNA, 407 bp, Zea mays
cagacttctgctgcagcgcctccgccgccgccgccgcatctaacgcagttccctccgccgcagcccgaggcaagatggttctccagaacgacattgatctgctcaacccgccggcagaactcgagaagctcaagcacaagaaaaagagactcgtccagtcgcccaactccttcttcatggatgttaagtgccaggggtgcttcagcataaccactgttttcagccactcccagactgttgttgtgtgccctggctgccaaactgtcctctgccaacctacaggaggaaaggcaaggctcactgagggctgctctttccgcaggaagggagactagagcggatgtggtcttcaagttttgctctatgccagatactagcgtcatgaactgcctttagctaagattttc

SEQ ID NO: 76940 - DNA, 230 bp, Zea mays
cactggtttccacaaaataagattgtcaatagctactacgtacttatgctattctgcatgtgatgtacgagtgtgcatcttcaagaatctttaagttgaatggtcccataataatattgataacaatgtaaattgtatgtcctgtacgtactttggtatcgcgacatctcagtgtgcatcttcaaggatcataagttgaatgttatcattaaggtcagtttggttcagat

SEQ ID NO: 76941 - DNA, 432 bp, Zea mays
gagagagagagagagagagcgcgagcgagcgaagagggcgtgagagaggagggaggccaagccgtacgcgtcgtctcctgctgtttctccccatccctttcctgcctcggcttgcaccttcaaccttacttaaagctctgacctcaaactgaaagggacctgcgaagagttttttttgcggcagtacaatggaggtatttggcaaatctgtgattgctgagcccagcaatgtgattttcttgtccgcgatccttaacacagaacggtcaaaccctagtcacaagtgtgacaagaggtgccagagcgagcgcattttggggaacatgtaccgttgcaaactgactgaaaccactcatatctgtgacaaaaactgtaaccagaggattctatatgacaaccataactcgctctgccgagtgagtgggcagcttt

SEQ ID NO: 76942 - DNA, 434 bp, Zea mays
acaggctacagctcccgtctctccgccgcttgcttggaaaacgaagaaaccctcctccaccaacccaatccagctacatccgtctgggtgaactccagggccaggagcagttcgccgccttcgttcgcatcacctacgcggttcgatccaactggcaggaaggaacgtgatggccaagacgagctcgttcaagctggagcacccccttgagaagaggcagtctgaggctaatcggatcagagagaagtaccctgacagaattccagtgattgttgagaaggctgagaggagtgacattcctgacatcgacaagaaaaagtacctcgtccctgctgatcttacggttggacaattcgtgtatgttgttaggaagagaatcaagctcagtgctgagaaagctatcttcatctttgtgaagaacacccttccaccaa

SEQ ID NO: 76943 - DNA, 433 bp, Zea mays
cggacgcgtggggaagattaccccaacagacctccaactgttcggtttgtttcgaggatgtttcagccaaacatctatgcggatggaagcatctgtttggacatcctacaaaaccagtggggcccgatatacgatgttgcggcaatattgacctctattcagtccctgctgtgtgacccaaacccaaattctcctgctaactctgaagcagccagaatgttcaccgagaacaagcgtgagtacaaccgcacagttcgtgacgttgtggagcatagctggacagccgactaaaactttatccgcttcgccaggcggtgtaaataaagcatctgtctttcctacttggccggtctgttttaccgttagaaatcctcagctatcgttgtgttcttgtggttcagtcccttgatgtactgatgcctgcgggttttcc

SEQ ID NO: 76944 - DNA, 433 bp, Zea mays
  unsure (1)..(433): unsure at all n locations
cacaaacctgctatcagcattggaaagagtgtgaatcattttccattgtgggtgattgaaatatcagacaagcccaggcatagggaatctgaaccagcattcaagttcattggaaatgttcatggtgatgagcctgttggaagagaggttcttatgcatcttgcaaattggctgtgtgataactatctgaaagattcactggcaactctcattgttgagaacatgcaccttcatatacttccgacgatgaaccctgatgggtttgctcttagatggcgtggtaatgcaaacaatattgatctcaacagggattttcctgaccaattcttccccgttaacaacgatattgactacagacagcctgaaactagagccattatgaattgggtaaagcaagaacacttcacggcttctgctancttgcatggggggg

SEQ ID NO: 76945 - DNA, 269 bp, Zea mays
gcagagaactgcatgtacactcccgtctaccgcaaccaccggtagtgctgcggggatcaactttgcagtaataagacatctactatcaacgcggatggtactctgttgtttatagtccctgctgctaaccacccttgttgctggtgctgctggagaggcattgtacctgtccatgcatatatgatatatatacgttgtaacgttgtgaaagcagacaatcttgggtaccaatgtttgttactctttcgctcgatgaagatcctgtaaca

SEQ ID NO: 76946 - DNA, 432 bp, Zea mays
cgggtccactaagcgtccggactaccctagtgggcaaatgtgctcctccagatatgctgcagttgctaacgtacctcgccatgaagcacgacacacgagtgaagcgggttgacactgttaaagcttacagctttggagctctcgactttgtagaggttgacatcgaactagcggaagatatgcggctgagagaggcgcacgccatcggtgaatcgctgcaggagagaatcgacaagttgcctcaagtcgagcgggcgtttgttcatatcgatttcgagagcacgcataagcctgagcacaaagtcagggacaaactgccgtctactgatccctgacagatttccgaatgctcatgcatgtagtacattgttaagagatagtagctaataccccggcgttttcttcgaaggttacgagcaacgattcccttca

SEQ ID NO: 76947 - DNA, 444 bp, Zea mays
aaggtatcaacgtgaagtacttctggggtagcacgctataccacgtggaagaccttcccttccgcctcgaggacatgccgtccaactatggcggcttcagggaggccgtgaaggggttggaggtcagaaaggtgctggaggctcccgaggaggtcaagtgcgtgcccatgaagaatgtgctcgagcccggtgacatccccacgcttgctgagctcgggctcactgcgccaccagccatgtcacaggactcaaaacctgctgttggctctactctcattggtggtgagacagaagctctggagaggttgaagaagtttgctgcagaatgctctatgcagccaaacaaagtagacaaaagcaatacccaagatagcatatatggtgctaatttctcttgcaaaatttctccatggcttgctacaggttgcctctctccacgggtca

SEQ ID NO: 76948 - DNA, 424 bp, Zea mays
caagtcaggatccagagttgttccatacagcggggaacgggatggtgactcggaagagacggctgagactgaggacgcgcccgaagaatttcagtcagctcacaaagatgaggacttgtcgaagatcaggatgcagctcgttcagattgagaatcagcaagccagtttgcttaatcttctccagaaattcatggggagctcccagaatgggatacgttccttggagacaagggtgaacgggctggagatggtgttggacgagatatcccgtgatttggctgcttcctcgggaacgattccgaacagcgagcctgacacaaacgcttgctgcattctgagcccaaagttctggataacgcatgacagacgtacgtacacttccaggtaccctatatcggacgcagcatactactccgaagagagc

SEQ ID NO: 76949 - DNA, 435 bp, Zea mays
cccacgcgtccgcgtcggcggcgtcgtcaccaactgggcgctcgtgtccatgaaccacgacacgcagtcctgcatggaccccaacgtcatggaggccaaggtcgtggtcagctcctgcggccacgacgggcccttcggcgccaccggcgtcaagaggctccaggacatcggcatgatcagcgccgtgccggggatgaaggcgctcgacatgaacaccgccgaggacgagatcgtgcgcctcacgcgcgaggtcgttcccggcatgatcgtcaccggaatggaggtcgccgagattgacggcgcccccaggatgggcccgacgtttggcgccatgatgatctccggccagaaggcggcgcacctggcgctcaaggccctgggcaggcccaacgccgtggacgggaccatgtcgccgccgttgcgcgaggagttgat

SEQ ID NO: 76950 - DNA, 431 bp, Zea mays
catggtataccagaagaatggatgcatgaagctctggctctttatcacgaatactatggagataaacagggcgcactggagaatttgattcagtgtggcaactggaagaaagctcatactattttcgtgacttctgttgctcattctatgtttctgtcatctaaccatcaggaggtctggaggatcacaagtgccttggagaaccacaagtatgaaattgctgactgggaccttggtgccggaatatacatagacttctacgttctgaagaactcaatgcaagaaagaaatgccatggatgattcgggttcactcgaggagatgagtgaatcatgcagaagtttctttggccgattaaacgagtcgttgttagtctggggaagcaaattacctgttgagtcaagggcatgctactcgaagatggtagagga

SEQ ID NO: 76951 - DNA, 437 bp, Zea mays
caggcacgcgtccggcaaagtccatattgattgctgcaagaaaaaaaatgctgagattaatcatcaccatactgtttaagtttccccatgcttcaatgtctcgctggggctgatgacttaggaagatggactcagttgctcgaaggctggaagagaatttatgggatcaaaacatgatcggaccttggaactaaaaactccaaccaagaaaacggaaaccaaatacacaacggggctcatgaactggacgagcaaaagcacatgccatagatgctgtattactgacatactgctctactcgccttgcaaaactacggcctttatcctgcgtctctcgctggcttagagccatttgaagagaatgccaccatgggcagcgaagaagggggcgaagacaagggattcaaccgccataagcttgatgaggatgttgaagg

SEQ ID NO: 76952 - DNA, 426 bp, Zea mays
aactcgctcacgggcaccgaggtcgccaccgtcaccgccgtcgtgcagctcgagtcgcaggacctcgcgcagatcgcgcagcacgtccagaagatgaccggcgccaagaacgtccgcctcgagacgcagctcgaccaggcgctcatcgccggcttcaccgtgcagtacggccgcgacggctccaacttcatcgagatgagcgtccggaagcagatcgaggagatcgcgtccgagttcgagttgcccgccgtcccgctcgaagtctgaggccggcttgaggcgtccatcctcgccctcgaagctataggtcctttttctgctgcctctctccctgctcttcatctgtatcattctctggatcttgaatgcttgagtgaatggtgaataccgcatacctgtatttcaggaatcatatttgattaaatg

SEQ ID NO: 76953 - DNA, 431 bp, Zea mays
cggacgcgtgggcggctcaaagatagcgcgccgtttattgggaaaaatcctaatcgatctacgcaacactcgtgaagaagctatcagtgttgccgaaccaaaatttattgaagacgaagctctattcctaccaacaagagaagcagagcaccagcagaaggttcatgttagaaatgaggatggaagaagatctagctctacgagtgagaagtcattggaccaagaagatgaagatgatagagaaactaaataccgattagatcccaagtatgccaatgtaaggacacctgagcgccatgtccgcactaggctttacttcacatcggaatctcatatacactcattgatgaatgtccttcgttactgcaatttggacgaaagtctacaaggagaggaaagccttgtctgccagagtgctttggaccgtctac

SEQ ID NO: 76954 - DNA, 302 bp, Zea mays
atcaacgccgtgccgctgctccccaagatcctggagctcgttgggctcggctacaccggctggttcgtgtaccgctaccttctcttcaaggaaagcaggaaagagttggccgccgacattgagaccttgaagaaaaaaaatagctggaacagaataaacgctcatggaaagttttagagcgtcctttcttctttggaaagagatctattcgatcggagaaccaatgcaactacttgagtactattattgcccatgtattgtgtgctgtatatcttctgtatacaaaggaaggttcgtttgtt

SEQ ID NO: 76955 - DNA, 414 bp, Zea mays
cttccgttctcaaaccaacctaggcaattcgccgcagcctctcaccctcgcgagtcccgacctcccgcagccgccgcacagatggcacccaaggcggagaagaagccggcggccaagaagcccgcggaggaggagcccgcgacagagaaggtggagaaggctccggcggggaagaagcccaaggccgagaagcgcctcccggcgggcaagtccaaggagggcggcgagggcaagaaggggaaaaagaaggcgaagaagtccgtggagacctacaagatctacatcttcaaggtgctgaagcaggtgcaccccgacatcggcatctcgtccaaggccatgtccatcatgaactccttcatcaacgacatcttcgagaagctcgcggccgagtccgccaagctggcgcgctacaac

SEQ ID NO: 76956 - DNA, 405 bp, Zea mays
atttcaagcgaagtgttatcatttttagtgggacaaagcaatctgcacacaggttaaaaataatatttggtctctctggcatgaaagcagctgaacttcatggcaaccttacacaggcccagcggcttgaggctctggaacttttcaagaaaaaagaagtagattttttgattgcaactgatgtcgctgctcgtgggattgatattgttggtgttcagactgtaataaatttcgcatgcccaagagatgtgaaaacttatcttcatcgtgttggccgcactgcgcgggcaggaagagaaggctatgccgtgacatttgtaaccgatgatgatagatgcctcttgaaagcaattgcaaagaaggctggttcacagctgaaaagtcgcattgttgcagagaaacctg

SEQ ID NO: 76957 - DNA, 435 bp, Zea mays
ggtggccaggtcattcaagttatgcacaagtgattgttcctcccgggcttgttcaggtcccagggtggagtccttatactgcgcaaattggttcttcatcctcggaggaccaacaacggacacctggagctgctcaatactatactggctcacgccaaagtggtactagtataggcgatcaaggaatgttttcatcctaccaagcaggttctgttcctgttggactttatgcagtacagagggagaatttatttccagagagacctgaccaacctgaatgtcagttctatatgaagaccggagactgtaagtttggtgctgtatgcaagttccatcatcccagggagcgaataattcctactcccaattgtgcactgagtccattaggcctacctttgcgcccgggagagccaatatgcagtttctacaatcgct

SEQ ID NO: 76958 - DNA, 433 bp, Zea mays
cccacgcgtccgcccacgcgtccgcagaaaaatctgttggcactgatgacatatgggaaaaagcaacaattgctttgaagaatgcattagatgataagggttgggaatacaaggttgatgaaggtggaggtgctttttatggtccaaaaatcgatctaaaaattgaggatgctcttggaaggaaatggcaatgttccactgtgcaggtggatttcaatttgcctgaacggtttgacattacctatgtcgattcaaactctgagaaaaagcgacccatcatgattcatagagctatccttgggtctttggagcgcttctttggtgtcctgattgaacactatgctggtgattttccactttggcttgccccaacccagacacgtattctacctgtgacagacaatgagttgcaatactgtaacgaggtggcctc

SEQ ID NO: 76959 - DNA, 405 bp, Zea mays
cagacgcgtgggttcgagagcctcactgacaagagcaagctcgatgcgcagccggagctgttcatccacattgtaccacacaaggcttcgaacacgctctccatcatcgacagcggcatcggcatgaccaagtccgaccttgtcaacaacctcggtaccagcgccaggtccgggaccaatgagttcatggaagcccttgctgctggcgctgatgtgtctatgattgggcatttcggtgtcggtttctactctgcctacctcgtcgccgagagggtcgtcgtgaccaccatgcataacgatgacgagcattacgtgtgggaatcgcacgcgggcgggtccttcactgttactcgtgacacgtctggggagcagcttggcatgggtactaagattacacttttcctc

SEQ ID NO: 76960 - DNA, 428 bp, Zea mays
ggttcttcaagcagatcctcaacagcatcctgcacgcgcccatgtccttcttcgacaccacgccgtccggcaggatcctcagcagggcgtcgtcagatcagacgaacgtcgatctcttcctgccgttcttcgtctggatgagcgtatccatgtacatcaccgtgatcagtgtgctgatcgtcacgtgtcaggtggcgtggccgtccgtcattgccataatccctctggtgatactgaacatctggtaccggggctattacttgtcgacatcgagggagctgactcgcctcgagtcgattaccaaggctccagtgatccaccacttctccgagacggttcaaggtgtcatgaccatcaggtgcttcaggaaggaggaaagcttcttgcaggagaacctgaaccgggtgaactcaagcctgaggatggac

SEQ ID NO: 76961 - DNA, 407 bp, Zea mays
cggacgcgtgggcggacgcgtgggcgaccccgaggccttcgccgagctcaaggtgaaggagctcaagaacggccgcctcgccatgttttccatgttcggcttcttcgtccaggccatcgtcaccggcaagggcccgctcgagaacctcgctgaccacatcgctgacccagtcaacaacaacgcatgggcctacgccaccaacttcgtccccggcaactaagctcaacggctatgctatgcaacttcattgtctttcggatcggagagggtgtacgtacgtggattgattgatgctgcgagatgcatgtgtgtcttttgtttcacgttgcattgcataggcaagtcgagatgatgagttggcgttgtacactaagatgaaccatgtttgtgcaatagtggtggttttt

SEQ ID NO: 76962 - DNA, 431 bp, Zea mays
tcagcgtccaaattgtgcgggtgagattggtctttctgctctacagaaagttgttgctgctgttcgaatccttgcttacggtattccggctgatgccgttgacgaatacgtacgtattggggaatctactgctcatgaggcattgaaacacttttgcacggctgtccaaaccgcgtttgctccgtattatctccgtgcagcaaatgcagaagatatcgcacgccttctccaagttggcgagtcacgtgggtttcctggtatgcttggtagtgttgattgcatgcattgggagtggcgtaactgcccaagttcatggaaggggatgtttacagggcgtggtaaacatcctaccatgatcttggaagctgttgcgtcgtatgacctgtggatatggcatgcatattttggtctgccaggtagttgcaacgaca

SEQ ID NO: 76963 - DNA, 429 bp, Zea mays
atccatggggaaccaggtagcaagagagtatgcaggcaatcctcagcacatgacaccaagtattaccatgcaatgcgacacgagctcattgatccccggaggccagttcagtggtggttcctccgtgcagactcaaacttcacggagctccaacatgcttgcgctgcggccaacgcagcagcctcaaaacttggacttctctgggcttggtcagtccacacagccttcagggaccaaccctttcgccgactggtctcggttgcaggagagcagcgtcgatgagtacttgatggatgagataagggcgacgagccacgagctattggagaacgatgagatgcagcatatgctgcggttcctgagcgtgggcggggcgccgaccggcctgaacaacgttgacggctttccttcatacgcgtctcctgcccc

SEQ ID NO: 76964 - DNA, 435 bp, Zea mays
ctgcttctcattctcccgtgcacttccagttcctgcccagctgcagggctgctccaatggccaccttgtccgccatctctgccaacgtcggctactgcaaggcaccaaccctgagctggaagggaagcggagtaccaggccggattgtggtctccatgtccaccacccgaagaggcctcgtctccctaagacgacgatcccctcggtttcgcgtctacgcggcgaatgcggagacggtgagcaaagtgatggacatcgtgaagcagcagctggcgctggcggcggacgtggggctgacggcggagaccaagttcacggacctcggcgccgactcgctggacacggtggagatcgtcatgacgctggaggaggagttcaagatcaccgtcgaggaggacaatgcccagagcatcgccaccatccatgacgccgccg

SEQ ID NO: 76965 - DNA, 449 bp, Zea mays
ggtccacgcacgcgtccgcacacgagtccgcccacgcgtccggaccgcggagcactcggtgaacgccgcgctcggacagtttgagcactgcttcgtcgaccgcggctgcgctgtcaatacccacctcttctccatgattgataacatggatcgacttcttgaggtaataaagcaagcagcacaggaaggggcactggttctatatacccttgctgatccttcaatggctgagtcaactaagaaggcctgcgatttctggggtgttccatcgactgatgttctacggcctactgttgaagcaattgcttctcatatgggtgttgctccatctggaattccacgaagttctcctagtcgacagggtcagttaacagaggattactttcgacggattgatgctatcgattttaccatcaaacaagatgatggggctctgccacagaacctca

SEQ ID NO: 76966 - DNA, 428 bp, Zea mays
gatgctgcctacttgcttgctgtcctcgctgggaacgccagcccctccgctgaggatttgactgccattctggagtcagttggctgtgaagttgacaatgaaaggatggaactcctgctgtcccaactgagcggtaaggacatcaccgagctcattgccgcgggcagggagaagtttgcttcagtcccatgtggtggcggtggtgtcgctgttgcggcagcttcacctgctgctggcggagctgctcctacagctgaggcaaagaaagaatagaaggtggaagagaaggaagaaagcgatgatgatatgggcttcagcctcttcgactaggctgcacagtcatcacagtattgtttcgggcagtgaaaccataggaaaaccagagtcatgtttagattttaaccttgttttatgttggaaagtactgc

SEQ ID NO: 76967 - DNA, 413 bp, Zea mays
cacacgcgtccggctgctgctcctggcctgctacgacctcacggccacctctgtcctgtcccactagactagctgcagctagcgcctctttccctcgccgccgccccctatccgagagcgacgagcatggcgcactccctcgccgcctccttctcgccggccgccgcgcggagccaggtgacaaatgtgatttcaagccggagctcggtttccttccagagccacaggatgacttctgtatccatcggttcaagaccaagttctcttcggttcatgatttgctgttcggctaaaacggcgacagtcgacaaggtctgtactacagtgaaggagcagctggctcttctcgatgggactgctatcactggtgatgcaactgtcggcgaccttggtgctgattcactggctacggt

SEQ ID NO: 76968 - DNA, 403 bp, Zea mays
cccacgcgtccgctagcctaaacttggagagaatgaaaggaatacctgaaccacccaaaccactccctttcttgcgtgctcttgagagttgctaacattttggtaccagagccaacatggatccaccacacgagtacttcacgagggcataagcaaagggcggagtgatggcaccaccgcgagtggaggattccttgtcgtggttgatggctaagatcgacgaaggcaacaaggagacatacaagcggacgcactctatacagtccgccatggagaatttgaagaataccgtcaagagcctagtgactgatgggagtgacttcaagaggtggataccggagatcgaagccaaggtggtggagatgacagaagtgctgaagacactctagctcaagtgaacacg

SEQ ID NO: 76969 - DNA, 411 bp, Zea mays
gactagttctagatcgcgggcggccgctcgcgatcgggtgtcgctgtgaatgacgagtgcatgctcaagttcggcgagctgcagtcgaagaggctgcaccgcttcctaactttcaagatggacgacaagttcaaggagatcgttgtggaccaggtcggggatcgcgctaccagctacgaggacttcacaaacagcctccccgagaatgactgccgatacgcgatctatgatttcgactttgtcactgcagaagatgtccagaagagcaggatcttctatatcctatggtccccatcctccgccaaggtgaagagcaagatgctttatgcaagctcaaaccaaaaattcaagtgggctcaatggcattcaggtggaactgcaggctactgatgcaagtgaaatcagccttga

SEQ ID NO: 76970 - DNA, 426 bp, Zea mays
aagagagagtaccaaattctcaaggagctcagtctgagaatgatcctaacaataccactatatttgttggtgggcttgaccccaatgtcactgaagataccctaaaacaagttttttctccttacggtgaagtcgtccatgttaagatccctgttgggaagagatgtggttttgttcagttcgttaccagaccttctgctgaacaagcgctgctaatgctgcaaggggccttgattggtgcacagaatgttcgactttcatggggtagaagcctgtcgaacaagcaggctcagcctcagcaggaatccaatcaatggggtgcggctgctggtgctggtggctactatgggggctatggacaaggttatgaggcttatggcagtgggtatgcacaaccccaggatcctaacatgtatggttatggcg

SEQ ID NO: 76971 - DNA, 388 bp, Zea mays
catcgactcgtctcgctagtggctgccctactcgtgctgcttgccctcgccgccgtttcctccacgcgcagcgcacaaaaggagtccgcggctgacaacgccgggatgttggcaggcggcatcaaggacgtgccggcgaacgagaacgacctccagctccaggagctcgcgcgcttcgccgtcaatgagcacaaccaaaaggccaatgctcttctggggttcgagaagcttgtgaaggccaagacacaagtggttgctggcacgatgtactatctcactattgaagtgaaggatggcgaagtcaataagctctatgaagctaaggtctgggacaagccaagggagaacttcaagcagctgcaggaattcaggcctgttgaagagggtg

SEQ ID NO: 76972 - DNA, 426 bp, Zea mays
cccacgcatccgaaccagcttcggcgcgtggtacgcgacgagcccgccgctggtcctggagctcttggggtccagccacaggtggaggttggcgtccacgtaccacgaccgctgcgcgttggtcaacgcgaacccgagctcgtgctcctcgccgtccaggaggctgccgaggaagggcgtgagctcgatgtcgtaggtgggcatgttgaaggagccgatgctggtgatggggcgccagatgagcgggttgatgccgccggtgtagatcaccgggaacggccacacggcgcccaccacgtcgccgtcgagcaggacggtgacctcgcggaacggcgcgttctgctcgggcgtgttcatgtaccagaactcgtcagcgtcgtgggaccagacttatacctcgaggaccgcgcgggacgcgttgcgcgg

SEQ ID NO: 76973 - DNA, 373 bp, Zea mays
aggacgcgtgggcggacgcgtgggcggacgcgtgggcggacgcgtgggcggacgcgtgggctgggccacccacctgagcgacccgctccacaccaccatcttcgacacgttcggagggtcctcttaagcccgccattgctccgccccgtccatcgaccggccggaacgtgttcttggattaattaactacgatctctatgatcctggggatggatcaacccgtcgtgcgtggtctcgttttgtgatgagtgggagagagaggatggcaagatcgatcctttgttaatggagatctcgttaattaggagagctaccgctgggacttggtggtttgtaatatatgattcaaccattgatgaatcaatgcattcac

SEQ ID NO: 76974 - DNA, 397 bp, Zea mays
atcatcgcggcccgttacgccggcaccctattgccttatccatcctctgccgacgtcggcgccttcgactcgtatgtcggcgcgagacgatccgcggaagttctctatcaccaatcttttatgggaagtcatagtactgttggccagaatgaggctttatattcatcgaatactatggctaaacgccctaggcttgaaagcagccttcctatatatccacaacgaccggggcaaaaggactgtgccttctatatgagcactggaacctgtaagtatggagagacctgcaaatttgaccatccacaacgggttccagagggtggggttccaaactggaaagaggccccgaatgttgaagattcttatcctgagcgaccaggggaaccagattgtcctt

SEQ ID NO: 76975 - DNA, 406 bp, Zea mays
cagacgcgtgggctgaattcttcaggctgcttagatgattcagggtacgtcccgccatgttcggataattctgaccaagtgaaccgaccaccagcaacctttgtgaaggtttacaaatctggaacctacggaaggtcgcttgatatcaccaggtttagtagctatcacgagctccgtagggaactagggcgcctatttggccttgagggccagttggaagaccctctgagatcaggctggcagcttgtattcgtcgaccgcgaggaggacgtccttctcgtgggcgacgacccttggcaggaattcgcgagcacggtgtcctgcataaagatactctcgccgcaggaggtgcagcagatgggcaagcagggcctggagctcctgagctcggcccccgcggcgcgga

SEQ ID NO: 76976 - DNA, 421 bp, Zea mays
cacacgcgtccgcccacgcgtccgcccacgcgtccgcttaacaataggacctggggatttcttggttcatcatgctattgctctaggtttgcatacaactacattgattttagtaaagggtgctttagatgcacgcggttccaaattaatgccggataaaaaggatttcgggtatagttttccttgcgacggcccagggcgcggcggtacttgtgatatttctgcttgggacgcgttttatttggcagttttctggatgttaaataccattggatgggttactttttattggcattggaaacacattacattatggcagggcaacgtttcacaatttaatgaatcctccacttatttgatgggatggttaagagattacctatggttaaactcttcacaacttattaatggatataatcct

SEQ ID NO: 76977 - DNA, 428 bp, Zea mays
  unsure (1)..(428): unsure at all n locations
ctgatatggtgacctgcgaaaatgtcatggctgcctgtggtcacggtggcctccatggggatgccagagaagttcttgaatatatgaccagagaaggaatggtgcctactgcagatgcctacactggcctggttgaggcccttggccacgcagctatgtatgaggaagcctatgttgctttcaacatgatgactgaaatcggtagcttgccaactcttgagacctacaatgctcttgcatttgcatatgctaggggtgggctcttccaggaggctgaggccatcttttctcggatgagtaacaatgctggcattcagaaaagcaaagactcatttgacgccctcatcgaagcatattgccagggctcccgattggatgatgcagtgaaggcgtacatggagatgcgtanatccaggtttaatccagat

SEQ ID NO: 76978 - DNA, 429 bp, Zea mays
cacaagttgtgcaagggatcctcggacctcacaagtccatgtgtgaatgatgcacatatttagggggagaagtgctacaacttgaccctttgagactaaactttgtgtttgagtatacttgatgtagtctcaaaggtgcattgaaagggaaaggtgaacttggaccatgcaaagacttccactgcactccgatattagtgtactcacctccaagttcatacttatgctctcattgcctttttgctcttaattgacattttggtaacgcaatggggttaaagggccaaaaatgatcctgttttggtgcttaatgccaaagggggagaaattaaggccaaagcaaatggatcaactaccacttgtgaattttgaaaacaaaagagttagaacttttgatttgtccaaaatactcttattgcaaaatttggt

SEQ ID NO: 76979 - DNA, 430 bp, Zea mays
gctccgaaattccaggagatgtctgagaagaacctggatgttgtgttcctgaagctcgactgcaaccaggacaacaagccgcttgcgaaggagctgggcataaaggttgtgccaacgttcaagatcctcaagggtgggaaggtcgtgaaggaggtgaccggcgccaagatcgacgagctagcgcaagccatcgacacagtcaagtcagactgacaaagaaagcaagtgatgcaactagctagtgtagacgatgaatgaatgagtccctggccggcaaggctgctagatacgtacgtacgtacgtactcatcaacaattaatgatggatgatggcaatggcaaatatacagtcaatgattcatatatgcatgcatggactgctatgctagctagcagccctttgtaaatatattgtttaaggaaatgattc

SEQ ID NO: 76980 - DNA, 395 bp, Zea mays
cccacgcgtccgctgatctcaagcctggtcaactaacagatctgaaatcattagctgtcaataacaattcatttgcttatgtcgccgttaagaaatctatccataggtatctcataaaggattctaactatcttacgacagcggtaaataaattcgcgaattatgttaacctttccagttcagagaaagacttgttagaagaaccaacatgtccaaaggttcttggtgatattgttgaatcttgtgttggtgctgtgcttttagattctggcttcaacctgaaccatgtttggaagctaatgctaatgcttcttaaaccaatattgagcttttgtggcatgcacatcgatcctatgagagaactccgagaaacttgtcaatataatggttttgac

SEQ ID NO: 76981 - DNA, 374 bp, Zea mays
cagacgcgtgggctagaattagagtcttatgggcaaggacactattgctgatttactaacctctataagaaacgcagacatgaataaaaaaggaactgttcgagtagtatccacaaatattaccgaaaacattgttaaaatacttctacgacagggttttattgaaagtgttcggaaacatcacgaaagtaacagatatttcttggttttaactttgcgacatcataggagaaagactagaaagggaatatatacaactagaacctttttaaagcgtatcagccgacctggcttacgaatttatgccaactatcactgaattcctaaggttttgggcggaatgggaattgctattctttctatctctccaggta

SEQ ID NO: 76982 - DNA, 431 bp, Zea mays
gatggaaacaaagatattggacttcctgtactgctggtattgaacaagaaagatctcataaaacccggagaaatcgcaaagaaacttgagtggtaccaaaaatttactaatgttgatgatgttataccaataagtgctaaatttggtcatggagtggatgatatcaaggagtggatattgtcaaagctccctctgggtcctgcttactaccccaaggatatagctagcgaacaccctgagagattttttgttggtgaaatagtgagggaaaagatttttgttcagtacaggcaggaaattccttattcatgccaggttaatgttgtcagttacaaaagtcggcctgctgccaaggacttcattcaagttgagatacttgtggagaaagaatcacaaagaggcattatactaaggaaggatggcaaaagcat

SEQ ID NO: 76983 - DNA, 378 bp, Zea mays
acaccaccgagcccatggcggaccagctcaccgacgaccagatcgccgagttcaaggaggccttcagcctcttcgacaaggacggggatggttgcatcacgaccaaggagctgggcactgtcatgcgctcgctggggcaaaatcctacagaggctgagctccaggacatgatcaacgaggtcgatgctgatggcaacggcaccatcgatttcccagagtttctcaaccttatggctcgcaagatgaaggacaccgactctgaggaagagctcaaggaggccttccgtgtgtttgacaaggaccagaacggcttcatctcggccgccgagctccgccatgtcatgacaaatcttggtgagaagctaactgatgaggaag

SEQ ID NO: 76984 - DNA, 385 bp, Zea mays
ggcggtagtgcatgccctcgggagtgggattacgccaggttcagggccatcgcagacaagtgcggggccatgttgctctgtgacatggctcatatcactggtctcgttgctgcgcaggaggctttgaatccttttgaattctctgatgtggttaccactacgacccacaaaagtcttcgagggccaaggtctggtatgattttctacaggaagggcccatagcctccaaaaaaaggccagcctgagggtgctctgtatgactacgaggacaagatcaactttgctgtgttcccgtcactccagggggggcctcacaatcaccaaattgctgctctagctgtagccttgaaacaggctatgtcacctggattcagcgcctatatcc

SEQ ID NO: 76985 - DNA, 431 bp, Zea mays
aattgagatagacaccaaatatgtgccgatcaagcccattggtcgaggagcttatgggatagtttgttcatccattaatcgtgaaacaaatgagaaagtagcaataaagaagatacacaacgttttcgacaaccgtgtggatgcactacggaccttgcgggagctgaaactccttcgccatctccggcatgagaatgtcattgctttgaaggatataatgatgccaatacacaggagaagctttaaggatgtgtacttggtatacgaactcatggatactgatttgcaccagataatcaaatcacctcagggcctttccaatgaccactgccagtattttctttttcagttgctccgaggactcaaatatctccattcagcagaaatactccacagagacctaaagactggaaacctgctggtgaatgcaa

SEQ ID NO: 76986 - DNA, 431 bp, Zea mays
tttgtgtccttgatccatctagtagtgggtgtcgtatactgcctcatcagctggagtgtcggtctccccaagcgagcgcctatcaatggcacgctcctcaagcttctctttccagtcgccctgtgccatggtattggtcacatcactagcaatgtgtccttcgctgctgttgcagtctcatttgctcacactatcaaagctctggagcccttcttcagcgcagcggctactcagtttatccttggacagcaagttcccttctctctgtggctttctcttgcccctgtggtcattggtgtttcaatggcatcccttactgagctttcattcaactggactggcttcatcaatgccatgatatcaaacatctcattcacttacaggagcatttattccaagaaagctatgactgacatggatagcaccaacgt

SEQ ID NO: 76987 - DNA, 425 bp, Zea mays
cacagagagacctacccattggtatactaggaagccttatagcatgtgtgttgttatacgttgctgtatgcttggtcattactggaatggttccatatacattactcggtgaagatgctcctttggctgaggcttttgctgctaagggcctgaaatttattactgtattgattagtattggagctgttgctggacttacaacaacacttcttgttggcttgtatgttcagtcacgtttgtactttggacttggaagggatgggcttttaccttcagtatttgctgaagtacacccaacaaggcatactcctgtacagtctcagatttgggtcggttgtgttgcagcagtcatggcaggcctctttaatgtgcgtgtgctctcacatattctttccgtcggcactctgaccggttattcagttgta

SEQ ID NO: 76988 - DNA, 428 bp, Zea mays
cccacgcgtccggagccatcttggaaactgttcttttggaggccatgtatgaggttccagacgaaaaaacaggaaatgagcgagttgacgctgttgtggtggatgaggaggcgattggttccgttgataggccaggttgtggggctaaaattctccgaggggatggtgcattggaccagtacataacaagaaccaatgtgatgaatttacaggaaactaacgatggtttggccggggagctcgaggaagcgtacatgctgtctagaattgttagcttgtaatttgaaaggctggggaggaagcgtatatgctgagttctgaccaacttcgtacatcgtgtaacatgtctaccccaacacaggccggctactttttgctcacaaaatcacctgtactctgtctccattcctgttaagctctaacgagca

SEQ ID NO: 76989 - DNA, 431 bp, Zea mays
gacgtatcacacggatctcctggacattctgatataccgtctgttgctgctgttgttagttctcgtgaatggcctcttatctcgaaatacagagcatctgtccgcacccaatcaccaaaaatggaaatgattgactcgctgtttaagccacgggaaactgatgacgatggtctgattcgggaatgtctgattgacttctacaccagttcagggaagagaaagcctgaccaagtcatcatcttcagggacggtgttagtgaaagtcagtttaatcaggtgctgaacattgagttgcaacaaatcattgaggcttgcaaatttcttgatgagaaatggaatcccaagttcacattgattattgcccagaagaatcaccacactaaatttttcattcctggaaagccagataatgttccagccggcactgttgt

SEQ ID NO: 76990 - DNA, 404 bp, Zea mays
gttcggagctcagagccttgcgatctctcggctgcgcgcgcgcaagatggctgacccagaattggaagctatcaggaagagaaggatggaagaactaatggcaaaacacggtggcggtggggcaaatcaacaaaatgcaagccaacaaaaagctcaggaagacgcgaaacaggaagctgaggaacgccgacagatgatgcttgctcagatattatcttctgaagccagagaaaggatctcccgcatagccttggtcaaacctgacaaagcaagaggggtggaggatgttctgctgagagctgctcaaactggtggaatatctgaaaaggtgtccgaagaaagacttatctcccttctagagcaaattaacacccacacaagcaagcaaaccaaagttacgattc

SEQ ID NO: 76991 - DNA, 403 bp, Zea mays
gtggtgcagctgcctgccttcagccttccctctctttcgcgacccccccggagccggagcagagatcgccagctctaccggcgcggaggcatggcgggggccggagacaaggtggactacgtcttcaaggtggtgctgatcggagactcggcggtgggcaagtcgcagatcctcgcccgcttcgcccgcaacgagttcagcctcgactccaaggccaccatcggcgtcgagttccagacccgcaccctcgtcatcgaccacaggagcgtcaaggcccagatctgggacaccgccggccaggagaggtacagagccgtgactagtgcttattatagaggcgcactgggagctttgctggtctacgacatcaccagacggcagagcttcgatcacataccccgct

SEQ ID NO: 76992 - DNA, 396 bp, Zea mays
caaattcgacatcgcaagcggccgtgggattttattaacatattatatataactcgaatttcttccattctcatttgacaatgcgactacaacgacgtatattgtgtttgggaaagtccgataaaaaaacgatttggaatctaccttttcatttgctttatcccttataaaaataactcaatcaaaatccaattatctactctacaagaatgaaatgcttgttatgcctaatatacttagtttaacctgtatctgttttaattctgttctttgtccgactagctttttcttcgccaaattacccgaagcttatgccattttcaacccaatcgtggatgttatgcctgtcagacctgtaaacttttttctattaacgtttgtttggcaagctgcagt

SEQ ID NO: 76993 - DNA, 358 bp, Zea mays
cggacgcgtgggcggacgcgtgggttttagtttgggctgccttattttctattgtatcactaaaggcaagcatccgtttggtgagtactatgaaagggatgtgaacattgcaaacaatcgctttgatctctttatggtggactacataccagaagcagtccatcttatatctcatttgttacaaccaaacccagaggcaagaccgacagcagtatatgtcatgcaccatccactcttttggagccctgaattgcgtctttcgtttctaagggataccagtgacagaattgagaaaaccagtgaaactgacctcatgaacacactggaaagcatacgatctttggcgtttggtggaaaa

SEQ ID NO: 76994 - DNA, 406 bp, Zea mays
gtcacctaacaagcacaaccgtctgtacatggaagcgcgccccctggaggagggtcttgctgaggcaattgatgatggccgcattggcccacgtgatgatcctaaggtgcgctcccagatcctctctcaagagtttgggtgggacaaggatcttgccaagaagatttggtgcttcggacctgagaccaccggcccaaacatggttgttgatatgtgcaagggagtgcagtatctcaatgaaatcaaggattctgttgtggctggtttccagtgggcatcgaaggagggtgcactggctgaagagaacatgcgcgggatttgcttcgaggtctgtgatgtcgttcttcatgccgatgctatccacaggggtggtggccaggtcattccaactgccaagagggtcatt

SEQ ID NO: 76995 - DNA, 373 bp, Zea mays
atcttcgcagtgttccagggtctgctgaaagtgttggctgggattgataccaacttcacagttacctcaaaggcatctgatgaggatggtgactttgctgagctatatgtgttcaagtggaccagtttgctcattcctccgaccactgttcttgtcattaacctggtcggaatggtggcaggaatttcttatgccattaacagtggctaccaatcctggggtccgctctttggaaagctgttcttctcgatctgggtgatcctccatctctaccccttcctcaatggtctcatgggaaggcagaaccgcacaccaacaatcgtcattgtctggtccatccttcgtgcatccagctttctctttgctgtgggtg

SEQ ID NO: 76996 - DNA, 347 bp, Zea mays
aacagcgtcaggtcagccgccgccgcgtccgcctcgcccagcgcagcagccgccgcagcacatcgctatctcgatctcaggcatggcggaggtggcgcagcaacaggacacgccgaagctgttcaaccgctggaccttcaatgatgtccaggtgaacgacatctcgctgaacgactacctcgctgtgaacgcgacgaagcacgcgatgtacctgccgcacaccgcggggcgttactccaacaagcggttccgcaaggcgcagtgctcgatcgtcgagcgcgtcacaaactccctcatgatgcacgggtccatcaacggaaagaacgtcatggctgtccgcatcatca

SEQ ID NO: 76997 - DNA, 390 bp, Zea mays
actagttctagatcgcgagcggccgcccgcgatcttaggaacgccgagggtcgccgccggtagaagaacagcttcggaagctggtcggtcgggacggtgcgtcgtcgcggtgtccgcgtcctcgtccccggccacggccgcggtggcgacggaggtgcccggggtgatgaaggcctgggtgtaccacgcgtacggggacgccggcgtgctcaagctcgacgaggccgcggctgtgccggccgtgggcgaggaccaggtgctcgtcaaggtcgtcgccgcggcgctcaaccccgtcgatgccaagcggcggggccgcaaagtccaggccaccgactcccctctcgcgaacgtgccggggtacgacttgtccggcgtcgtcgtcaaggtggg

SEQ ID NO: 76998 - DNA, 418 bp, Zea mays
accggtggcgggttgacatatgcaagggttaagtgctacatatgtcgtgtgattggagatcctcagctgagtataatcgattcggatcgccgtaccttcgcggttatgaagacttggtcacttccctgcaacctaaagtcaggatgtgaacacgatggataaaaatgatgttgtattgatgagatgatgaaattagactagatgcaaacaatgtctattaatattcaatctggcgttaaaatattgaaagtaaggactcactttagtaagctatttctgcaaaagtatctaagttgattcttgctaaagcctctccttgattcctatttatccagcatacccttgagagtcttttccttagtcgggtaagacttgctgagtaattccatactcagggttttattccctgttgtttttc

SEQ ID NO: 76999 - DNA, 419 bp, Zea mays
tgatcctgagatgaagcaacactcgtttctttttgaaattggttacccggaaatcgaagataattgcaagccaaggcaccgtttcatgtcatcatatgaacagaaagtccaaagttgggataagggttatcagtacctactttttgctgcagagccctatgaaattattgcattcaagataccaagtacagagattgataaatcagcgaacaaattcttctcttactgggatcctgacaagaaggaatatctactgcaactgtacttcaagccaagaccgccagaagctaataaaccaccaccagctcctccggggactttgcctaatgggactggggttcctgttgctccaacaaggccaccggcgcaagcccctccacccctgcgacaagttccaccgccccccgcctcatgcagct

SEQ ID NO: 77000 - DNA, 418 bp, Zea mays
agcaggcagcgagtgcaaacaaccgcgagagcgatcagcgatgggctccttcttctcgaccttagtgacgccccctccgcccgccgccgacgacccgaactgcgccgtggtggccgcgcactccaaggccacctacgacgagcagtgggcggcccacaagagcagcagcaagctgatggtgatcgacttctcggcgtcctggtgcgggccctgccgcttcatcgagccggccttcaaggagctggcctcccgcttcaccgatgccatcttcatcaaggtcgacgtcgacgagctcgcggaggtcgcaaggacatggaaggtacaggcgatgccaacgttcgtgctggtcaaggatgggaaggacgtacgccgtgtgattgggggcaagaacgacgagcttgagaggaagatcaggatg

SEQ ID NO: 77001 - DNA, 411 bp, Zea mays
aaggggaagaaggcgtggcgcgccaacatcggcaccgacgacattgacgattttttcgagaagcagacgcgcgatgcccacgcgggcaccgccgccatcccttctcttccttcggactcgctcttctttgtcgacaagcccgccacctccgcatctacttccgccgccggcgcctcggacacaaccaccaaagatattcctgtcaaaaggaagatcgagaagaagagggagaaggttctttatcatgagagtgtactgaagcggaatccgtttgtgcagccaatcccatcttctgtgccgggcaagaaggataagaagataaagaagaagaaattgcaggagacacagggagagaaaagtgttcctatgggaaatggatcggtagttaagaactttgacatctgggctgtg

SEQ ID NO: 77002 - DNA, 419 bp, Zea mays
atgcattggaggagtggatgcaaaagttactttctgacattgacttgtcaagaagtgctcctgttgctgctttttttgagcttgaagctgctgcacgttcatatttccaagaacggaatgggcgtccttctgaacagtctgacaggagcaactggtaatggtgtgcttggagaagctatcttagatcagtccgatgagcttgttagtaatgccttgaatcacaggaaacggaaccttgtattggaacatgatggtaggaatggttcagtagcgtcttataggggagttgtttcagatgaggaccgtgtaactaatcccgggcatgctaggaaagactctgctgaaagtatttggagtgatttgagttctttaagaggaagtgaattatctattccaggggttagtagtttcctttggga

SEQ ID NO: 77003 - DNA, 389 bp, Zea mays
accacgcgtccgcccacgcgtccgcgccgcaccagcgccagcccgcgccgtggtcagaaggaggtccttcaccgtgcgcgcctctctccgcaaggccaccggcaccgccgccgtggcaatggctgccagcgccctgcttgccggcggtgccatggcccacgaggtgctgctgggcgcaggcgacggcgggctcgtcttcgagcccagccagttcaccgtcaaggccggcgacaccatcacattcaagaacaacgccggcttcgcgcacaacgtcgtcttcgacgaagaccaggtgccgagcggggtcgacgccaccaagatctcgcatgaggagtacctcaacgcgccaggcgagacctactccgtcaccctcaccgtgccgggaacct

SEQ ID NO: 77004 - DNA, 412 bp, Zea mays
atagccgcacgcatggcgaaccgaagcgaagccaaaacgcccattccccttcgccctcttcgaccctagcaagaagacggcggcggagatggtgtactacgcgcttttggtgggcgcagagctggacggcctcaccaacctgcagcccagcggcggctgcgacgaccccagcttcccctactacctcaagctcaagtgcgagaactgcggggaggtcaccgccaagtccacctacgtcactctcagcgagcaagtcgacctgcccaagggacatggcaccgctcacctcgtccagaagtgcaagctttgtgggagagatggaacaattgtgatgattcctggtcaggggacgccacttactattgagcagagccaggaagaagagaagacttgtttgatggtgtttgactgc

SEQ ID NO: 77005 - DNA, 380 bp, Zea mays
cccacgcgtccggcaggcggtggaggagtggtaccggcagatgcccatcatcacgcgctcctacctcaccgccgctgtcgtcaccaccgtcggctgcaccctcgaaatcatttcgccgtatcacctgtaccttaacccgaagctcgtggtgcagcactacgagatttggcgcctcgtcaccaacttcctctacttccgcaagatggatttggattttctattccacatgttctttcttgcacgatactgcaagcttctggaggaaaactcatttagaggaagaactgctgactttttttacatgctcttgtttggtgctactgtcctaactggcattgttctgatcggagggatgataccttacatttctgagacatttg

SEQ ID NO: 77006 - DNA, 437 bp, Zea mays
  unsure (1)..(437): unsure at all n locations
ctcgcgagtcgacacaacaccctaaactgactcgtactacttgcacggtagctgccccgtcatcgaaggccagaagtggtccgcgactaaatggatccatgtgaggtcatttgacctcaccgtcaagcagccgggtccctctgatggatgtgaggacgacaatgtcctctgcccccagtgggcggccgtgggcgagtgcgccaagaaccctaactacatggtggggaccaaggaagcacctggcttctgccggaagagctgcaaagtatgcgcagagtaagcaaccattgggatattcttggccggcgccggcggcctgtgggtggcgacgattccgtcgttgacgttgcctgcaagtgccctgtacttgtcnctcctggtgagaggcttgtgcactcgtacgagagcgtttcggtatccaccggcggagagggatt

SEQ ID NO: 77007 - DNA, 425 bp, Zea mays
agccgcgtcccagtgcgaagagaccacgactcagatggccagccgctgggtccggcccgaggtgtacccgctgttcgcggcaacgggcgtggccgtcggcatctgcggatttcagctcttccggaacatcaccggcaacccggaagtcagggtaaacaaggcagggagggcagctggtgtgcttgagaaccatgaggaggggaggcgttacgccatgcatggcctaagaagctttgtgcacgacaagactcctgagatcatgcctgcagttaacaagttcttcactgaccctaagtgaagcatgttgattggcatactactactactacttgctactggggattttacactttgctggcaactcaatatgttggggacatccctgacctctaaaagtacttttgagtgcttggtgatgacctgct

SEQ ID NO: 77008 - DNA, 373 bp, Zea mays
accacgcgtccgcccacgcgtccggcaacgacctcaagttccccaacttcggcatcaagacggccgccaacgccaagatgtggagcgagtccggcacgttcatcgggtacgtggccgtgtccaccgacgaggagacggcgcggctcggccgccgggacatcgccgtggcgtggcgcggcaccatcacccgcctcgagtgggtggccgatctgacggccaaccagatccccctgcgcgagacgggcgtcccctgcccggaccccgacgtgaaggtggagcgagggttcgcggcgctgtacacggacaagggcgccggctgccgcttctgccggtactcggcgcgggagcaggtgctggccgaggtgcgcaagct

SEQ ID NO: 77009 - DNA, 389 bp, Zea mays
tcgcgggtcgacacacgcctctagttgtcgtcatgcaataaatatgatgaggaaccaacctcgaggtggtcacatattcaaccttgatggtgctggttctgatggaaggccaactccaagatttgctgcatatggtgcaacaaagagaagtgttgtgcatcttacgaagtcacttcacgctgaattgcagatgaatgaagtgaataatgtgatggtgcacaatctatcgcctggcatggtcacaacagatcttcttatgtctggtgcaactacaaaacaagcaaaatttttcatcaatatattagctgaacctcctgatgtggttgcagactaacttgttccgaacgtcagagaaatccctaccaggcaatccatgaagccaacctaga

SEQ ID NO: 77010 - DNA, 425 bp, Zea mays
accacgcgtccgtggaattctattaagatattatatgaaagtcgaatttcttccattctcatttgagaatgcgaatacaaggaggtattttgtgtttgggaaagtccgaagaaaaaaggatttggaatctaccttttcttttgctttttcccttataaaaataactcaatcaaaatccaattatctactctacaagaatgaaatgcttgttatgcctaatatacttagtttaacctgtatctgttttaattctgttctttgtccgactagctttttcttcgccaaattacccgaagcttatgccattttcaacccaatcgtggatgttatgcctgtcatacctgtactcttttttctattagcgtttgtttggcaagctgctgtaagttttcgatgaaatctttactattctgcctggcaaattg

SEQ ID NO: 77011 - DNA, 418 bp, Zea mays
  unsure (1)..(418): unsure at all n locations
gggaaactctggttcggatcaccggtggcatgaaggtgaaggctgaccgtgacgagtcgtcaccttacgctgctatgcttgctgctcaagacgtcgcacagcgctgcaaggagcttggcattactgcactgcacattaagcttcgcgccaccggaggcaacaagaccaagacccctggacctggtgcccagtctgccctcagggcgcttgctcgttccgggatgaaaatcggacgcattgaggacgttaccccggtccccactgacagcactcgcagaaagggcggtaggaggggaaggaggctgtangcgtctcgtctgcgtggcatttgccggctcttggccggtggccattatgaagctagccctctctgggtggtgttgctgttctgtgtttgtcaagaccagctttaattttg

SEQ ID NO: 77012 - DNA, 345 bp, Zea mays
cggacgcgtgggcggtgctccccgtgccggtgtggctgctgagcagggcgttcccggagaagaagtggatcgcgctcatcaacgtgcccgtcatctcgtacgggttcgccgggatgccgccggccacgcccaccaacatcgccacctggctggtgacgggcaccatcttcaactacttcgtcttcaggtaccgcaaggggtggtggcagaagtacaactacgtgctctcggcggcgctcgacgccggcaccgccttcatggaggtgctcatctttttcgccctccagaacgcgcaccacgagctcaagtgggtgggcacggaggtggatcactgcccactcgcct

SEQ ID NO: 77013 - DNA, 378 bp, Zea mays
acggtcgcatacaaccacggtcttaagcttcgtctgcaccaacgcatgcatagatcgatcgaactcacgggtcaggctgaacaaaaaatacagtagctaggaataatcgacggatgagttcagagcgagaggccggagtcgtcgtcctcgtcgagcgtggaggtgtagacggtgtagagggaccagatgaggccgaagacgcccagcaggatccaccccagcaggttgttgctgagccccaggctgagcccggtgccctccgtcgacatccgctcgtccaccagcgccagcgcgggcgacgtggtcaccgcgctggtggccacggccagaagcgacgacgatgcgccgttgttgccgtcgcgccgctggctcggccgc

SEQ ID NO: 77014 - DNA, 380 bp, Zea mays
cactcctcgccatcacatagaaccagtgcaagcagaagcagcgcaatggcgagcagcaccatggccctctcctccacagccttcgccggcaaggcagtgaacgtgccgtcgtctctcttcggcgaggcccgcgtgacgatgcgcaagacggcggcgaaggcaaagccggcggcgagctccggcagcccgtggtacggccccgaccgcgtgctctacctgggcccgctgtccggcgcgcccccgagctacctgacgggcgagttcccgggcgactacggctgggacaccgcggggctgtcggcggacccggatacgttcgccaagaaccgggagctggaggtcatccacgcccgctgggccatgctgggcgcgttgggctg

SEQ ID NO: 77015 - DNA, 359 bp, Zea mays
gcctcacctcagatcacctcgccgactagggctgtgtaccgccgtggatcgcgccgtccccgccatggacgtctcacactcgggatcctcagtcgccggcgaggctccgacgacaggagagcaccaggtggggactaccatcgtcagggtctgctaccagggctgcgtcgtcctgcgcgccgaatccatgagcagactggaatgtatgtagccaaccgtgcttcacacaagattactcaactggcagagaacgtgtgattctgtcactctggatctgctgcggatacacatctcatttcggattatgtacgctatttcctcgaccaacacacaatccatcttggccaaccagctaccgt

SEQ ID NO: 77016 - DNA, 363 bp, Zea mays
  unsure (1)..(363): unsure at all n locations
gaaaatatcataagaatccagaggcgactccaggtttgtcggcgatgctgcgagcgggaggcangcggctcctcgccccggggctccgtcggctcggcctgggcacaggcgcctccggcgaggcgggtcctgccgcggcggcggcgggggtgagggcgtaccacgagcgggtggtggaccactacaacaacccgcggaacgtaggttccttcgacaaggacgaccccaacgtctgcactgggttggtctgcgcgccagcctgcggcgacgtcatgaagctgcagatccgcgtcgacgagaactccggcaagatcgtcgacgcctgcttcaagacgtttggctgcggctccgccatagcgtcct

SEQ ID NO: 77017 - DNA, 326 bp, Zea mays
gtccccgtcaacttccaaccccagtgtggaagtgggcagctatgtgaataccaatgatgttttcaaggagcccaatgatgtcttcaaggagcctggcagcaataagcgtttgaggtcaggatgcaatgatgtgcatgtgccaacatctaaagcttctagggaaaaaatgaggatgaacaagctgaatgacaggtttcttgaattggggtctacattagaaccagggaagccagtaaaagctgacaaagctgctatcctaagtgatgctactcgcatggttattcagcttcgttcagaaacacagcagctgaaggaaactaatggta

SEQ ID NO: 77018 - DNA, 414 bp, Zea mays
cccacgcgtccgtcaaaaagcaattaactaaggaggagaagtttgaaaagaggaagcagagacttgctgcaatcggagaggatcttttggcgattgctgctgatcaaccatttcgcttccctgccacatttacatttgtggtcagagcattctcagttctagatggtattgggaaaggccttgatcctaggtttgatattacagagattgctaagccatatgccaaggaattgctaagatttaatgacgctggtgttgaaatagttgtgaaggatgcaaagaagagatgggaaaggcagtcccgtgccttttacaatttgttccgccaacccgatagagttgaaaagctcgcacaaattattgaacgtttggagcaaggtgaactcaagcttcgtgtcaaaacgctgggatcag

SEQ ID NO: 77019 - DNA, 403 bp, Zea mays
cccacgcgtccgctcaaagactatgtctggaagacactaaagagtggaaaggttgttcctgggtttggtcatggagttctgcgtaagaccgacccacggtattcatgtcaaagggagtttgccctgaagcatttgcccaaggatccacttttccaattggtgtccaagttgtatgaagttgtacctcctatcctcactgagctgggcaaggtcaagaacccatggccaaatgttgatgctcacagtggagttttgctgaaccactttggactatctgaagcacggtattacactgtcttgttcggtgtttcaagaagcatggggataggatctcagctcatctgggaccgtgcccttggcctgccacttgagaggccgaagagtgttaccatggagttgctgg

SEQ ID NO: 77020 - DNA, 421 bp, Zea mays
ggctgaggttgcagggtgcctctgttccagaaggagctttgtctctggcgcattggaatccagtgccgcttcagcggcgtgtatctgatttggaggtggcaaatgccgatatggctcagcagtactctgatcttgaagaaaaatattctcaaggtcagactgaactggcccggcggtgctctgatcttgaagaaaaatattctcaaggtcagactgaactggcccgggtttctgcttctctgaacgatgttaacacgctgaactctactctccatgctcagctcaactctgaaaaggaagaaaaacgtgcccttgctacttctcgtgacaaccttgataagctataccgtgacgccagcaactcattgaccatcttggagaggagtcatcgcttcaccagggaggagttagataatcatcg

SEQ ID NO: 77021 - DNA, 416 bp, Zea mays
actagttctagatcggcgagcggccggagtgggagcgcgcccgcgccagcgtgcggggctcggtgcacgtgccgctgttcgtgggggacgacgacatgggccccgtgacgctgctgaagaagtgggtccacttgggctacatcgggctctggaccggccaggccttcaccaagatgaacgagcgcttcgtcgacgacgtcgccgccgccgtcgacggcagcaaggacgccaagcttctcgtcgcttgtggcgaaggcctcaggtcgttgatcgcggtgaggatgctgcacgacgacgggtacaggaacctggcgtggctcgccggcgggttcagcaagtgcgcggacggcgatttcgcagatgtggagggggagagcaagctgcagtacgccaccatcgggggggcgtcctacatc

SEQ ID NO: 77022 - DNA, 422 bp, Zea mays
  unsure (1)..(422): unsure at all n locations
acgcctccagtgtgcgaccacgtcatcaatccgggccactggaccgaggacatgcgcgacgacgcgctggaacctgccgacctcttcagccgccacctcacggtcgtcgacgtcggcggcggcacggggttcaccacgctcggcatcgtcaagcacgtcaacccggagaacgtcacgctgctcgaccagtccccgcaccagctcgacaaggcccggcagaaggaggccctcaatggggtcaccatcatggagggcgacgccgaggacctcccgttccccaccgactccttcgaccgatacatctccgccggcagcatcgagtactggccagacccacagcgggggatcaaggaagcctacnaggtcctgagatttggtgggctagcttgtgtgatcggcccggtctacccgaccttctggct

SEQ ID NO: 77023 - DNA, 409 bp, Zea mays
agcagctcagagcacgcgcagccgcctcgcctcgcctggagctcacgcagccgcctcgcctggagctcgcgcagccgcctctatcctcgcctggagctcgcgctagggttcctctcgcagccgccgctgttgaggtgctacttgcaaaagcgtgtactgaacagctcaaaaggccctgctatatgtgcactgcgtgctcagcctgataagagagagtatgcaatagagatgaagaacagtgtggaaagcacagaaaatcttttcattagagaagcaatggctacagaggttttaattggaaaaaatgacaccattgagggtgtttgcactttcttcagcatggactttatgcaccatctgttgtacttagcaccagaacattcatgagtgtttctgggggcaagctgct

SEQ ID NO: 77024 - DNA, 412 bp, Zea mays
ctcgcgggtcgacacaagcctctaaattaagtacgaaggatgacacacctgagcctctttgccaggtcatgcttcgtgttggtgaccttgagcgttctatcaagttttatgagaaggccctaaggatgaagctcctaaggaagaaggatgtacctgattacaagtataccattgccatgttgggctatgctgatgaggacaagacaactgttctggagctgacgtacaactatggagtcacagaatacagcaagggcaatgcatatgctcacgttgccattggcaccaatgatgtgtacaagagcgccgacgcggttgatctgacgaccaaagaactacgtggcaagattttgcggcaaccatggcctctacctgggatcaacactaagatcgcctcttttgttgatccaga

SEQ ID NO: 77025 - DNA, 415 bp, Zea mays
cgagatcacttcgccgccgccgctttcgagatctccgggtggagcaagcgagcaaaggcagcagccatgtcgctccgcgtgctgaaccctaacgccgaggtgctcaacaagtcggcagcgctgcacatgaacatcaacgccgccaagggcctccaggacgtgctcaagaccaacctcggccccaagggcaccatcaagatgcttgtgggtggagctggtgacctgaagctgacgaaggatgggaacaccctcttgaaggaaatgcaaattcagaacccaactgcaatcatgattgcgaggacggctgtggcacaggatgacacaagtggtgatgggacaacctccactgtgctatttatcggggagcctaagtaacagtctgagcggtgcatcgaatgaaggactcatccaagat

SEQ ID NO: 77026 - DNA, 409 bp, Zea mays
cacacgcgtccgcacatccatccccttcccttcccttccctcgtgcgccgccggctctccagcgcgccgtctctgcccagatccaggacatatgccccgctatgatgatcgctatggcggcacgcgcttgtatgttggcagattggccccccgtactcgttctcgtgatttagaatatctctgcggcagatatggaagaatacgagaagtggagttgaagcgcgactatgcatttactgagttcagtgaacatcgtgatgccgatgaagctcggtaccaactagatggcacggatgtcgatggaagtcgcattgttgttgagtttgctacaggggtcccacgtggtccatgtggctcacgtgaatatatgggaagaggacctccaccaggcacaggtcgttgtttcaag

SEQ ID NO: 77027 - DNA, 388 bp, Zea mays
tatttttttattttttcatttttaagtgtatcaacactattatagggtaacagaaccaagaaacaattggacatgtaacagtagatggtacctcttagccaaatcagttgcaaccagataagtgtatttttgtcgtgaatgtcataaattatgcaaattcacttggcgaaagagtgtcatactacaatttcacaagaacaacccctaaaactcaacacataataacaactacagagcatttcgctttgagtaaacaaggaaaattctcgtggtggatatgatatatccagtttactcaatgattttgttgatgacaccagcaccaacagtcttaccaccctcacggatagcaaacctcataccctgctcacaagcaacaggctggatg

SEQ ID NO: 77028 - DNA, 402 bp, Zea mays
aacacgcgtccgatgtggggaacgaccatggaaagcgagacatcagcaagcaaccagaaccagcaggcgaggcggatcaaatatgcagagcatggagagagatatagctagagcctagagcgagcaccagcaaaccaaacaagcagaccaccttctccacccggccggccttcgtcttcctccgatccccaggccccagccactccccgtacaagccaaagagaccagtaggtaggcaggcagttcatcgtcgatcgagcaagatgtcggactggggccccgtggtgatcgggctggtgctgttcgtgctgctctcgccggggctgctcgtccagctccccggccgccaccacttggtggagttcggcaacctgaagaccagcgccgtctccatcgtcgtcc

SEQ ID NO: 77029 - DNA, 332 bp, Zea mays
cggacgcgtgggcgaggtgacagaactgccgttctttgcaacgaaagtgaggcttgggcgtggtggagccgaggagatcctgccgcttggccctttgaatgatttcgagagagctggtctggaagcggcaaagaaggaactgggcgagagcattcagaagggcatcgctttcatgagcaagtgaagtggtacggagggagatcgtccctgagtcagattccggaccatacgtagtaacgtagatgtaagggtgttgtgatatagtgctcctacctatacttgtaaagccgcggtaaaaagaaggctaattaccctttagcaactgtgaccat

SEQ ID NO: 77030 - DNA, 400 bp, Zea mays
cacacgcgtacgcattcctaaagctagcaaagtccatatggttgctgcacaggttggcgtactccttcgacccaaaggcaaaggtgtttcaagtgaaaaaggggagtgaattttcggatatccacatggagagcgtcgtgaagaacatcatcctacaagaaggtgcggagaggccaaaagtcggcctgatggtgatgcctggtttcctgatcgggaccagcgtcatacagtcccgtgtgtacctttcagatgccaagtgtgctgactgactgaagattgcacaaggagcttgagggggtgcctttgctccttgggagagctaccagcagcataagtttatggtggactgttgtcctgtatgtaatgcgtgagacctgttgcttcaatgccgtgccacgtg

SEQ ID NO: 77031 - DNA, 395 bp, Zea mays
atcacggcgccggcggcggaccccaacgccggcgaggtgtactacaggctgatgtcgcggttcatgtcgaaccagagccggtacacgctggaccggctgctggggaagatgtcgtgcccgctgctgctgctgtggggcgacctggacccgtgggtcggcccggccaaggccgcgcggatccaggagttctacgccgacaccgccgtcgtgcacctgcaggccggccactgcccgcacgacgaggcgccggagcaggccaaccgcgcgctgctcgagtggctcgcggccctcgacgcccgcgctaagtcggccgagcccagcctacagaccgtctgatggatcgagcgcaaggggcttagcgtatgctagtcaaagaatacaatttgggggcctat

SEQ ID NO: 77032 - DNA, 384 bp, Zea mays
catgaactggggcatcaagtgactcttatccgacaagttgctgagaaagtgttcgccaatgtgggcaagactatccggtacaaagttggaacactgattgagatccccagggcagctctggtggctgatgagatagcggagcaggctgaattcttctccttcggaacgaacgacctgacacagatgacctttgggtacagcagggatgatgtgggaaagttcattcccgtctatcttgctcagggcattctccaacatgaccccttcgaggtcctggaccagtggggagtgcgcgagctggtgaagcttgcgacagagaggggccgctcaactacggctaacttgtaggtgcgcatttgtggaaaagacggtggagagccgtcc

SEQ ID NO: 77033 - DNA, 419 bp, Zea mays
caatggtggcgctgctccagttgctgcttccgccccagctgggggtgctgcagctgctgctgcccctgctgcagaggagaagaaggaagagcccaaggaggagtctgatgacgacatgggcttcagcctgttcgactgagaccctcgctacccagccattagcaaattcgcttatgctgtccaagacttatcttacgttatgtctgtaggcttttgttattacaagtactcaagttttgagtttttgagatgtggctatgacaatgtgatgaagaaccctaaaccatcgtattagagtgaaacttgtttctatatagagttccaagtttcttgaacctcaaacttgctctggctgatgctctgatgttttcagtcggtgccttttaatcgaagtcaaccgattttcgaattgtttgctg

SEQ ID NO: 77034 - DNA, 361 bp, Zea mays
cccacgcgtccgaagacgcgtgggcaaccttaatctcttctctatcattacagtgatgtcatttttccttttggcccctgttaccttctttacagaaggtgtcaaaattactcctacatttttgcaatctgctggtctgaatgtaaaccaagtccttacaaggtgtcttttcgctggactgtgtttccatgcataccaacaggtgtcttacatgattttggcgatggtgtctcctgtcactcattctgtgggcaactgtgttaaacgtgttgtggtcattgtaacatcagtgctgttcttcaggacacctgtttctcctatcaactctctcggtactgcgattgcacgtgccggagttttc

SEQ ID NO: 77035 - DNA, 369 bp, Zea mays
cacacgcgtccgggcaaatatgtcatggaagatctacataagattggtgggacaccggcagtcattcattatcttctggagcaaggtcttcttgatggtgattgcatgactgttactgcaaaaactctagctgagaatgccaaaattttccctcctttgtctgaagggcagcaaataattcgaccacttgacaatcctatcaaaccaactggccatattcaaatactttatggcaatcttgcaccagaaggttctgtagcaaaaataactggcaaagagggactatacttctcaggtcctgcattagtttttgagggtgaagagtccatgattacagctatctcagaaaacccagcaaatttcaaggga

SEQ ID NO: 77036 - DNA, 414 bp, Zea mays
  unsure (1)..(414): unsure at all n locations
acgcaagccactccgaggccaagtctacggtttgggaatctgtangaggggagaggggagcgcgctcagggtcacggaggcgaagatgatcgacgtggtgctgaacgaccgcctggggaagaaggtgcgggtgaagtgcaacgaggacgacaccatcggcgacctcaagaagctggtggcggcgcagacggggacgcgccccgagaagatccgcatccagaagtggtacaacatctacaacgaccacatcacgctcaaggactacgagatccacgacgggatggggctccgagctctactacaactacgcgccctgacnccaaccgtgccctgatgtaaggttaatccgaattctgaagtcatgggtgcgcttccagtcgcagcgtctttagctaacaagctcgcatacatata

SEQ ID NO: 77037 - DNA, 403 bp, Zea mays
ggggcgacacacgcctctgtttttcatgtgcagagcagaggaattacatttatacacggtgctgatcaccgctggcgtgatctgcaacaaggatcacaccacctacataccatgcagctagagaggaggatcggccggagctatgtatacgcatcttcgatgatatctacttgaagaagtaggggaggtcgagcacgtagaggagaaagtatgcccagagcacgccggagatgccgccgaagaagaatcccccggtgaacttggcccagccgtcggacgtctgcagcttgtcggcctccttcttcctgccggtgagcgtgagcgagggcgccgtggacgggtccccctcgttgaaggaggcgacgccgtacatggtgaggcagacgctgaggatggcgacgag

SEQ ID NO: 77038 - DNA, 382 bp, Zea mays
tgcccattctacaagtttggttacatgtcagcaaatggtgccattgccgaggctattaagggcgagaactttgttcacataattgatttccaaattgctcaggggagccagtgggttactctgctacaggcccttgctgcaagacctggggggccaccatacattagaatcactggtatagatgactcaaattctgcttatgccagaggaggcgggcttgatatagttgggaggacgttgtgtgatgttgctaattcatgtggtcttccttttgagttcaatgccgttccagctgctagccatgaggttgagcttcagcatcttgctataagacatggggagattattgctgtgaattttgcctatcagctacatcatgttc

SEQ ID NO: 77039 - DNA, 390 bp, Zea mays
ccatcacattcaagaacaacgccggcttcccgcacaacgtcgtcttcgacgaagacgaggtgccgagcggcgtcgacgccaccaagatctcgcaggaggagtacctcaacgcgccaggcgagacctactccgtcaccctcaccgtgccgggaacctacggcttctactgcgagccgcatcaaggagccggaatggtcggcaagatcaccgtcaactaattaagctagctatcgatcgatatccattcatgtattagctgttgcttcctgctttgtactccgccgatctgtccatctctacatgttttcgtcttcacacaacaacctctgctacgactacgtatatatgcatgctacgagctgattgattttaacgagaaaaacaacaaaa

SEQ ID NO: 77040 - DNA, 162 bp, Zea mays
agagatcacgttaaataggagagctaccgctgggacttggtggtttgtaatatatgatccaaccagtgatgaatcaatgcattcacttgtgtacacatatacatttctaccttgcataagaaaaagaaagaaaaacaaaaaaaaaaaaaaaaaaaaaataaa

SEQ ID NO: 77041 - DNA, 388 bp, Zea mays
cccacgcgtccgacagaacatcgtcctcagcggctacgggaaggccgggcggttggacgacatggagcgagtgctctccgacatgctcgacagcgtgtcatgcaaaccggacgtttggaccatgaacatcatcctcagcctcttcgggaaccggggcgaggttgaactgatggagagatggtacgagaagttccgaggctacggggtcgagccggagacccgcacgctgaacatcctgattggcgcctacgggaagcggcggatgtatgacaagatgtccgcagtcatggagcacatgcgcaagctcgcgttcccgtggacgaccgcgacgtacaacaacgtgatcgaagcatttgctgaggccggcgacgccgggaacatggagcac

SEQ ID NO: 77042 - DNA, 387 bp, Zea mays
cattcccccggtccagtggcggacgccctagccaggcaccacaggccacagcctgggctgccccactgccccggtcgccgtcgggcaagcgccgtccaacctgtgcgtcaccgcctccgccttcagtttcgcctccagcaggggcgccgcgtggggtattcggttcgtcgtcgaggagagagagtcacttctgccgagggagcagggatggagccggtcgtggggatcgtggtgtcaaacaagatgcagaagtcggtggtggttgcggtggaccgcctcttccactataagatgtacaaccgctatgtcaagcgcacctctaagttcatggcacacgacgacgctgactcctgcaacattggcgaccgggttgtatggtggggattg

SEQ ID NO: 77043 - DNA, 418 bp, Zea mays
attttcaattgcaccagatgcccctgaaatgttgttgcttgactatcccagtcaccagcgacgccttctaccacttctagcaaaagtatgtctgatgagcagtgctggcaattttatgaaaaatatgtatgtaaagagaactcctgaaatgagcaaagacatacacatttactctagtgctctgaaggcgacactaacttggcagaatatgattacgattcaggagtgtcgcgaggcctgtggaggtcaaggtctgaagactgagaaccgcataggaattttcaaatctgaatttgatgtccagtctacatttgagggtgataacaatgtgctaatgcagcaggtaagcaaagcgctttatgctgaatttttgggtgcacaaaagaagcagcagccattcaaaggattgggtttggga

SEQ ID NO: 77044 - DNA, 401 bp, Zea mays
cccggagcaggtggccgcgtacaccctcaagctcctccaccgccggatccccccctccgtgcccgggatcatgttcctctccggcgggcagtcggaggtggaggcgacgcagaacctcaacgccatgaaccaggggcccaacccgtggcacgtgtccttctcctacgagcgggcgctgcagaacacctgcctcaagacctggggcggccagccggacaaggtcaaggcggcgcaggacgcgctgctgctgcgcgccaaggccaactccctggcgcagctcggcaagtacacctccgacggcgaggccgccgaggccaaagagggaatgttcgtcaagaactacagctactaattaatcgcccggccatcacccggggataccgccgcccctccgagagata

SEQ ID NO: 77045 - DNA, 388 bp, Zea mays
cggacgcgtgggggagtgatcatcaccaatatcattcgctatgttgctggaaacagtgcgctgatttcggctctctcccctgtagcaaatcttgttctgaagagcgtgccccggggggctgcaactacttgttacttggcattgcaccctaatgtcaaaggtgtatctggtaaatacttcgctgattgcaatgaatcaacaccgactgctgtcgcaagagactcagagctggcgaagaggctatggtcgttcagcgaagaacttgtcaagatctatgctgatatgtcacagacgacacaggcaagcgaagaggaggaaaccacggttacgagagacgttttccaagacaagtagcgtaatatatgttgccgcgttttctactttttgt

SEQ ID NO: 77046 - DNA, 416 bp, Zea mays
cggattacatcggcatgctggccactgtgatgaatgctatatttcttcaagcgacgatggagagcatcggaataccgacccgtgtccagactgccttccgtatgtcagaagttgcagaaccatacatacgccgaagagctgtcagacatttagagaaaggaagagttgtcatatttgctgctggaacagggaacccattcttcacgactgatacagctgctgctctccgttgtgccgaaatcaatgcagaggtagtgctgaaagcaacaaatgttgatggtgtgtatgatgcggaccccaggcagaatccaaatgcccgccttctggagactgtgagctatcatgaagttacgacaagagatctctcagtaatggatatgactgctattacactatgccaagaaaacaacattccc

SEQ ID NO: 77047 - DNA, 403 bp, Zea mays
cagtcgaggaggaagaccagtgagcccaatgaggagaacgtcacccttggacccactgtccgtgaaggagagtatgtctttggtgttgctcacatctttgcatccttcaatgacaccttcattcatatcactgatttgtctgggagggaaactctggttcggatgaccggtaccatcctaaaaccttggctgtgcacgacctaggtggcagctgtatatggttttaactgagatgtgctaaacctgaaccctgtatgtggcatgaaggtgaatgctgaccgtgacgagtcgtcaccttacgctgctatgcttgctgctcaagatgtcgcacagcgctgcatggagcttggcattactgcactgcacattaagcttcgtgccaccggaagcaacaagaccaaga

SEQ ID NO: 77048 - DNA, 358 bp, Zea mays
cccacgcgtccgccaggatgcatacgtaaacgccatacggagggcgaagaacttcatctacattgagaatcagtacttccttggaagttcatacggctggaagcccgaaggcatcaagccggaagaaatcggtgctcttcacttgattccgaaggagctctcgctgaagattgtcagcaagattgaagctggggagcggtttactgtttatgttgtggtgccaatgtggcctgagggtgttccagaaagcgcttctgttcaggcaatccttgactggcagaggagaacgatggagatgatgtacactgacatcgcacaagctctcgaagccaacgggattgaagcagacgccaaggac

SEQ ID NO: 77049 - DNA, 418 bp, Zea mays
cgacgagatccagagcaaaacgtacatggaggtgaagggcacgggcacggcgaaccagtgcccgaccatcgacggcggcgtggagtcgttcccgttcaaggccggcaagtaccagatgaagaagctgtgcctggagccgacgtccttcaccgtcaaggcggagggcatcgccaagaacgccccgcccgagttccagaagaccaagctcatgacccgcctcacgtacacgctggacgagatcgagggcccgctcgaggtcggctccgacggcacgctcaagttcgaggagaaggacggcatcgactacgccgccgtcaccgtgcagctcccggggggcgagcgcgtgccgttcctcttcaccgtcaagcagctcgtcgccaccgggaagcccgagagcttcggcggggccttcctcgtg

SEQ ID NO: 77050 - DNA, 409 bp, Zea mays
tacaccaagagaaattcccagttctttggtccgcgtcagagacgcggcggcgatgtctgggcgcggcaagggcggcaagggtctgggcaagggcggcgcgaagcgccaccggaaggtgctccgcgacaacatccagggcatcaccaagccggcgatccggaggctggctaggaagggtggcgtgaagcgcatctcggggctcatctacgaggagacccgcggcgtgctcaagatctttctcgagaacgtcatccgcgacgccgtcacctacaccgagcacgcgcgccgcaagaccgtgaccgccatggacgtcgtctaagcgctcaagcgccagggacgcaccctctacagcttcggaggctaagctaggctcctcttcatagtccgggactggttaagggacatgtct

SEQ ID NO: 77051 - DNA, 412 bp, Zea mays
ttcatgtaggcctctgatatctggtctcagccaagcagtacaaatttcagacaatgcattgtttcaaactctcataaaaagcaagattctcatacgaatggttacattctcataaatgcaaatggaggtttgaatcaaatgagatttgggatatgtgacatggttgctgttgctaagatcctgaaggcaactctggttcatccttcactcgatcatacatcctactgggcagatgacagtgaatttaaggaccttttcaactggaggcacttcattgagtcactgaaagaagacattgatattgttgaaacacttccccctgaatacagtgacattgaacctttggctaaagctccggtatcttggtcgaaggtgcattattacagagatgaaatcgtcccccttctgaaga

SEQ ID NO: 77052 - DNA, 395 bp, Zea mays
aacaaagctaggcctaacttgaaggtgggcatttgtggagaacacggtggagagccttcctctgtggccttcttcgcgaaggctgggctggattacgtttcttgctcccctttcagggttccgattgctaggctagctgcagctcaggtgcttgtctgaggctgcctcctcattggcaaccggattgcctgctgctggtggatgtggtgatcaacagtattattacagagccatgctatgtgaacattactagtagcagtgctcataaaagctacaatcccatgtcctttttttccccagtcaagttaaacttccaaaacggctccatggggtcaaaagctctgttcttcaatacatcaagcaattatcgaataatatacgttgcaaaatttttt

SEQ ID NO: 77053 - DNA, 422 bp, Zea mays
atcgttacctcccttcccatcccccactgctcagcagtcagtcagcactcgccacccacacgcctccgctccgcccacgggtccactccaactctccgatctccaggaatccgcggctgaggcgccggcgatggcggctcccatggtcgacgccgaatacctgcgccaggtcgacagggcgcgccgccacctccgcgccctcatctccaacaagggatgcgccccgatcatgctccgcctcgcatggcatgatgctggaacttatgacctgaagacaaaaactggtggtgcaaatggttcgattagatatgaagaagagtacgactcatggttcaaatgctggtttaaagattgctatcgatctccttgagcctatcaaagcaaagaatccaaagataacatatgcagacctgtatcagctt

SEQ ID NO: 77054 - DNA, 421 bp, Zea mays
acccacgcgtccgccgtcatcatccagcccacctccaagaagaccatcaccgagtacggctcccccgaggagttcctctcgcaggtcgactacttgctcggcaagcaggcctacggcggcaataccgactccgagggcgggttcgagaccgacgccgtggccaccgccaacgtgctggagagctccacccccgtggtggacggcaagcagtactacagcatcaccgtgctgaccaggacggcggacggcgacgatggcggcaagcaccagctcatcagcgccaccgtctccgacggcaagctctacatctgtaaggcgcatgccggcgacaagcggtggttcaagggcgccagcaacggcgtcgagaatgccgccgcctccttcagcgtcgcgtgaccgacgtaactattgtttctttgat

SEQ ID NO: 77055 - DNA, 372 bp, Zea mays
aacgaaggctacagcgtcgagcaggagcacttcaagagggaggagaaggagcataagcacaaggagcgcctcggcgaggtgggcgccctcgcgggcggcgcctttgctctgtacgaggggcaccgtgcgaagaaggacccggcgaacgcgcagaggcacaagatcgaggccggcgtggcaacggcggcggcgctgggcgccggcggctacgcgtaccacgagcaccgcgagcagaaggaggcccactacgagagcaggcagcaggagcacagggtgccgcacgggcacgggcacgggtactcctactactgcgactgaaacgactgatcatcccatcgatcgagatatgcatgcagaactccatatatatac

SEQ ID NO: 77056 - DNA, 389 bp, Zea mays
accacgcgtccgtgcggagttgtgtatgctgcagctaggagacaccgggttccccttcctgaagatcctccgtggtggactgtctttgatgctgatgaagcaggaattcaggaagtttgcagggttcttgctcacctctacagcttgcccaaggcccaatacattccagtatataaagacaacgattcctttactgttaagagaatctctgatctacaggcttcaaaggaaagtccagcaagggctgttgctagcgataagggtacccctgtaccctcaagttctagccaggagaaggatccagtggctaagactatactgaacaaggtgaaagaaaaaagtgatgacgaaggtaaaccattgcccgctgaatttgatgggaaagaaaa

SEQ ID NO: 77057 - DNA, 248 bp, Zea mays
ctcccgggtacgacccacgggcccaattccccgctaacactgatcggatgagcaaggagatcacctcccttgcgccaagcagcatgaagatcaacgtcgtcgcgccacctgacaggaactacagtgtctggatatgaaggtcgatcctaacgctcgctcagcactttccaacagaggtagatatcaaagggggagtagcatggggtctggcccggcaatttgtcacaggaagtgcgtccaggtttcgg

SEQ ID NO: 77058 - DNA, 431 bp, Zea mays
ggtcgacgacgcgtccagtggcaatggcgtcgtccatgctctccgctaccaccgtgccactccagcaggggggcggcctgtccgagttctccgggctcaggagctccgcgtcgctgcccatgcgccggaatgccacctccgacgacttcatgtccgccgtctccttcaggacccacgcggtcggcacgagcggcgggtcgcggcgggcgccgacggaggcgaagctgaaggtggccatcaacgggttcggccgcatcgggcgcaacttcctgcggtgctggcacgggcgcggcgacgcctcgcccctcgacgtcatcgccatcaacgacaccggcggtgtcaagcaggcgtcccacctgctcaagtacgactccacgctcgggcatcttcgacgccgacgtcaagccggtcggtgacaacgccatctccgt

SEQ ID NO: 77059 - DNA, 232 bp, Zea mays
aatcaggtgcttgtctgaggctgcctcctcattggcaaccggattgcctgctgctggtggaagtggtgatcaacagtattattacagagccatgctatgtgaacattactagtagcagtgctcataaaagctacaatcccatgtcctttttttccccagtcatgtaaaacttccaaactgctccatggttcaaaactctgttcttcaatacatcatcaattatcgattatat

SEQ ID NO: 77060 - DNA, 251 bp, Zea mays
gtccaggactcacgggtcgacgcacgcctccaaagtcacttgggctatcggcaaggagtgtgctgacctttggcctaggatcgccagtgcagcaaatgccatcgtttgagagcttgttggaatgtgtttagacttgagtatgatcatctcaattgtgtgttgcaggtgttgtaagggtgctattggacttgatggctccttttatgtttggtcactcaattctgtagtgaacagaaatttctggttgcctc

SEQ ID NO: 77061 - DNA, 414 bp, Zea mays
cccacgcgtccgcccacgcgtccgcccacgcgtccgcggcttcatcatcactccactagccagtcagctactggcctacagctagccgcctcctctcctctcatcccatcccatctcatctccgacaagcgaagcagagcactggcatgagcatggaccgcatggcgcggcgttccgtgtccttgctcctcgctctggctctcctggccgccgcggcgtcggcggactcgtggctgtacgagaagttcacgacggagggcaacgtgcgcgcggactacaacgcgcatgggcagcaggtgacgtctctgatcctgacgcagcagtccggcggcgccttcagctcgcggcagaagtacctgtacggggagttcagcatccagatgaggctgatcccgggcaactccgcgggcaccg

SEQ ID NO: 77062 - DNA, 443 bp, Zea mays
gagtcccgggtcgacgcacaagtccaaaaattcacggatttcacaattgctcattatcttagtgggcccctaagaatagttgattctgaaggggttccagcttcaccaggtgatcttctcgcggtagaaatctgcaaccttggcccacttcctggcgacgagtggggttacaccgcaatacttgaaagggagaatggaggtggattcttaactgaccacttccctagcgcaagaaaagccatctggtatttcgaaggaatctacgcatgctccccgcagataccaggtgttcgttttccaggattgactcatcctggtgttgtgggaactgcaccgtcacttgagctcctaaatatatggaatgaaagagagaaaagtttgtctgagacaagcccggagacgattaaactgtgtgaagttctacaccagaggccccttgctca

SEQ ID NO: 77063 - DNA, 426 bp, Zea mays
aagtccaatccatttctctttctgctgcttgtgatttgttcatgcggtttgtaacgaggacctcacatctggagcatgagaagtttgatgcagcacaatcgcggctaattgagcgaggagaaaaatttggggagatatctttaaaggctcgcaagacaattgcaatgcttagtcaagattttatttatgatgggtgtactatacttgtccatgggtagtccagagtagtactggaagttctaaagcttgctgcatccaatcgcaagctcttccgggtactatgcagagagggcagggcagacagaattggtttaaggatgtcagatgaacttgcagcatgtaaggatcgctgttaagggtcgaattgatgtagctggttgcgtagtccattgatgaagttgacatggggttttgttggcgctgatg

SEQ ID NO: 77064 - DNA, 398 bp, Zea mays
ccgggacaacccacgggcccgaacccttttccgagctcctcagttctcgtcatcgtcctcgcgctcagtgtcatttgcagttcccggcagcagccatggcgtcggtgcagctgtctgggccgcgggtggtggcggctgcgaaaccggctgcgttgggcgggctcctcctgacgccgtcccttgcggtgccaaaggggcggataaccaccgggctcgtggtgagggccgccacggtcgtgtcacctaagtatacatccataaaaccattgggagacagagtacttgtgaagatcaacacctctgaggctaaatctgatggagggattttacttccagtatcagttcatacaagaccacaacgacgggaaattgttgccgttgggtcaagggaaaaattt

SEQ ID NO: 77065 - DNA, 420 bp, Zea mays
agggcgtggagcggtcctcgccgcagtcggagatcaaggcggcgtaccggtcgctgcagaagcggtgccacccggacgtggccggcgccgccggcggccacgacatggccgtcgtcctcaacgaggtgtacgcgctgctctccgacccggacgcgcgcctggcctacgaccaggagcaggcgcgccgctccgagttcgccggctacacgggccgcccgctctactcctcctgggtcggcgccgagtccgagcgccgggcggtgttcgtcgacgaggtgcgctgcgtcggctgcctcaagtgcgcgctccacgcgtcccggaccttcgccgtcgagtccgtctactgccgcgcccgcgccgtcgcgcagtgggccgacgacgaggacaggatcgtcgacgccatcaacacctgccccgtcg

SEQ ID NO: 77066 - DNA, 408 bp, Zea mays
agtgagtcgtactacctgccgcacgtcatctccgaggcgccgccgttccccggcgtgcgccacgtgggcggggacatgttcgcgtccgtgcccgccggcgacgccatcgtcatgaagtggatcctccacgactggagcgacgcgcactgcgccacgctgcgcaagaactgctacgacgcgctgccggaaaatggcaaggtcatcgtcgtcgagtgcgtgctgccggtcaacacggaggccacccccagtgcccatggcgtcttccacgtcgacaggatcatgctcgcgcacaagcccgagcgcaacgagcggtaccagcgcgagttccgctagctcgggtagggcgcccgcttcaccgggttcacggccaccgacgtgtaggcgaacgcctgggccagccgagttcag

SEQ ID NO: 77067 - DNA, 388 bp, Zea mays
acacgcgtccgcccacgcgtccgaaaaaggaaaggaaaggacaaaggagcggcggcgaggtctatggcgtcgacggcggggtacctggcgcggcgggcggcgcagaaggagcgggtgcgcctgctctaccgcacggcgctcaaggacacactcaactgggccgtccaccgccacctcttctaccaggacgcgtcggatctccgggacaagttcgaggccaaccgacacgtggataacctggacgtggtcgataggctcatcgacgatgcggaggctcagtacaggaacttccagcaccccgatccctacattgttccatgggcaccaggcggcactaaattcacaagaaacccccctccacctcaagggatccagatcatctacaatt

SEQ ID NO: 77068 - DNA, 421 bp, Zea mays
accacaagtccgcggacgcgtgggcaaagacgcctcatgatcgtgtccctttgaaggaaatgaaatcagattggcatgcttgcctggacaacaaagttgggttcaagggttttgcagtgccaaaggagcagcaggataaggttgtcaaatttgactttcatgggcagccagcagaaatcaagcatggtagtgttgttatagcatcaataactagctgcacaaacacctcaaatcctagtgttatgcttggtgctggtcttgtagctaagaaagcttgcgagttgggtcttgaggttaaaccatgggtgaagacaagccttgcccctggatcaggagttgtcacaaagtacttgcttcagagtggtcttcaagaatacctcaagcagcaaggattccatatcgttggctatggctgtaccac

SEQ ID NO: 77069 - DNA, 400 bp, Zea mays
gatggaacatgaccaaaacatggcattttctttctgcaagatgaaacgaatggattgtgttcatacaataataatatatataacgggctgtacaggacaacagaatttgctgttttcacccagatctacagacagcgtgactgaagtttggatttcaattcttgctgacggcagtcttgcaaactgggcaaatgttcttctgcgagagccactgcttgatgcagtacacatggtagctatggccacagtctagccttcccatctcttcatttgtttcaaattcctcttggcaaatgctgcattttctttccatttctgttgcgaaccgtaaggaactgaaggatgggtgcttgaacttcctaacgttgcgagtaatctcgtcgtcacgtaaccctggtgt

SEQ ID NO: 77070 - DNA, 378 bp, Zea mays
agccgctgctcgcgatggccggacgcggaggaggtagcaagagtagcctgtacgcggcgctgggcgtggccagcgactgctccgacgccgagctgcgcagcgcctaccgcaagctcgccatgaaatggcacccggacaagtgcgccggcgcagggagctccggcggcggcgcggacgccgccaaggccaggttccagaagatccagggagcgtacgccggtaactaatccgctttccattttgaatcatactcgactctacgcgttacttttgcttgtaggttgggtagctctttttaagagaattgtcatgtatgtacgtacacgtagtcgtcggccaagtatattttgcagcttgcacttatttggtgatgtgggt

SEQ ID NO: 77071 - DNA, 418 bp, Zea mays
actcgttgcccaccgtcggcatggtcgtcccctacggcgccttcttcgtccctgccggctccgggaacgccggcggcgggacctacgcgaaggacaagctgggcaacgacatcacggtggaggcgtggctcaacacgcacggtcccaacgaccgcacgctcgcgcaggggctcaagggtgaccccacgtacctggtggtggagcaggacaagacgctggccacctacgggatcaacgccgtgtgcactcacctcggctgcgtcgtgccgtggaacggcgctgagaacaagttcatctgcccctgccacggatcccagtacaacaaccagggcaaggtggtccctggaccggcgcctctgtcgctgggcctggttcacgccgccgtccacgacggcaaagtcctcctcgtcccgtgggt

SEQ ID NO: 77072 - DNA, 378 bp, Zea mays
tcgcgggacgacgcacggccctaaagactgtcgaaatattcaggaacttgtcaccccatgttcaagcttgcgtgccagatctcctgaacgttgctctaaattgcattgacaatgttagagatactgatgggaccttgcgcgctgtcaaatcaaagatcgcaaaccttgtagcaagcaacataagccggaattggccacaggatttgtatcataaggtggcacagtgcatatgaagtggcttgtgtgttgagttgatcaggaatctggactaatctgtatcagaactctgaagctttcaaacaatatggttgtcatcccatcctgtgtttaatgtgtgtcaaatggtacgatgtttatttttacaaaaagaaatttcca

SEQ ID NO: 77073 - DNA, 401 bp, Zea mays
tcgcgggacgacgcaagcctctaaagtgacgtcgtactaacgcgtgagtgaagtcgcatagttcactcttgcagcgggacgatagagacttcatacaccttaaggttcatacaacgagcaggtgtatgaagtctcatagtacactcttgccgcggtccgatagagagtccacttcacttaggttgatttaatttacgccggatgcagacctaagtcaaggtacgtcctccattgagagactttgggattgttcctacatagatcatgggatgagagggcaatcagaggacatggagccatctgaagatctttccctaacgagacagtatggcgagttagctgatcgttacattaggtgatgatagagccgaatgcagaaaaatgcatgttgggtctttgaa

SEQ ID NO: 77074 - DNA, 426 bp, Zea mays
taaccacgacgtccgtacgtacgtagatcgatccatcgatcgctagctagctgacgaccatggcgtccctctcctctgccgccatcaccgccctttccttcacggccgcgcccgctcgcgcagtggtcagcaggaggtccttcaccgtgcgtgcctctctccgcaaggccactgccaccgccgccgtggccgttgccgccagcgtcctgcttgccggcggcggcgccatggcccacgaggtgctgctgggcgcaggcgacggcgggctcgtcttcgagcccagccagttcaccgtcaaggccggcgacaccatcaccttcaagaacaacgccggcttcccgcacaacgtcgtgttcgacgaagacgaggtgcccagcggcgtcgacgcctccaagatctcgcatgaggggtacctcaacgcgccag

SEQ ID NO: 77075 - DNA, 314 bp, Zea mays
actgtcgtacgacgagccaagaacggtgttcccgggcgaggcgtgcgacgacctcggcggcgagttctgcgaggcgccataccaggccggcgtctcgagggagctggcgcacgcctgagcctgatgcaaattcgcatccatatctgtctagaaccgagttggtctcggtagatcatgttagtcgggtagagatgttcacgccatgtaaggtatgtgtgtagcagtctagcatatgaccaagcaaggccaacggtgtatgtaatgtatacaggcatgtagtagaaaccaggatgaaatggtactggtgtgattca

SEQ ID NO: 77076 - DNA, 356 bp, Zea mays
gactcccgggtcgacgcacgactctaaagcgcgcctcacgaagatggggtcgcacatgaagaagaccatcttcgaggagcagacggccaaggcggtcatgaactggcgcaagacggccaaggataaggtgcggcagcgggaggcggcaggcttcctcgacgtgctgacgagcgccgacaccacgccgagccacagccgcgcgacgtcgccgagccggggcaactcgccggtgcacctgctccacaagtacaggggcacgtcggaggagccgcagagcgcgccggcgtcgccggggcgggagctcggggacatgtacccggtggccgaccaacatcgcctgcaacaggctggacccc

SEQ ID NO: 77077 - DNA, 415 bp, Zea mays
aatctgaggatgtgggcgagctcagccgccaatgcgctcaagctctcggcgggcggcggcggagcccgggctgctgctgccggcccggccttctctatctccaggttcttctccactgttcacgatgggttgaagtacactcagtctcacgaatgggtcaagacgacgggcgacgtcgccaccgttggcatcacggaccatgctcagggccacctgtgagaggtggtgttcgtggagctgccggaacccggcacgaaggtcgccgcgggaggacccttcgggaacgttgagagtgtcaaggccaccagcgacgtcaactccccgatctccggcgaggtcgtctaagtcaatgccaaactgtcaagagacgcccgtgcctgatcagcacaagcccgtacgaggacgggtgggtgat

SEQ ID NO: 77078 - DNA, 394 bp, Zea mays
acgcgtccgagcagaatcatcatacaactcccaaggtccaaagcccacccgtactcatccgcgatccccaaccatggccgtcggcgacgtggagacggcggcgccgctgctgcccccgcgggcctctgccctggcggacgagccctccgcgggcccgcccccagacgaccggctcggcatcggctacctcatcttcttcaccctgggcgccggcttcctgctcccctggaacgccttcatcaccgccttcaattacttcgacttcctcaacccgggggcccccgtcgaccgcgtgttctccatatcctacatggtctccgccttactgcccctgctcgtcatcgtgctcttcttccccaattcgagggcccccattcgggtcaacacgggggtc

SEQ ID NO: 77079 - DNA, 393 bp, Zea mays
agcttgtcacagcgcaaaacacacatgcttttgtcctggatggacgggttcacccggagcgaggcgtcgctggccaacgccgtggcggggcagcccgtggccgtgtccatcgaggccggcggcgacaacttccagcactacaagaagggagtgtacaacgggccctgcgggaccaacctcaaacacggcgtcaccgtcgtcggctacggccaggaggcggccggcggcgacaggtactgaatcgtcaagaactcgtgggggcacgggtggggcgacggcggatacatcatgatgaagaaagacgtcgccggcaagccggaggggctctgcggcatcgccatccgcccggcctatccactaatgtgacatggtggtgtgcaactgttttccgtt

SEQ ID NO: 77080 - DNA, 429 bp, Zea mays
tcaccacgcgtctagatctcggtctcggactacggttgagcgaagtcgtcactgtaatctacggatctgcaattggcggaggcggaggcaacggtggggcaactgatccggtacccgtacgggggcacttcgtgctccaaccttgcccgcatcgctctcaatctcaaaggtgtggattacaagtacaaggcggtgaaccttctcaagggcgagcagtctgatccagaattcgtcaagcttaatcctatgaagttcgtccctgcgttggttgatggcagttctgtaataggtgactcttacgcgataacactgtatttggaggacaagtacccagagcctcctcttctacctcaagaccttcaaaagaaagctttgaatcaccagattgcaagcattgtagcttctggtattcaacctctccataacctc

SEQ ID NO: 77081 - DNA, 415 bp, Zea mays
cccacgagtccgagcgccactgtccagtgcgcgcgtcaagcttgcttagctagccgccatggcctccctcgccgccgtctccgtgaagcccgtggccatcaagggtctcgccggcagctccatctccggaaggaagctcgccgtcgccaggccgtcggcccgctccatccgcaggccccgcgcagccgccgtggtggccaagtacggcgacaagagcgtctactttgacctcgacgacatcggcaacaccaccggacagtgggacctctacggctctgacgcgccctcgccctagaacccgcgacagagcaagttcttcgagacgttcgcggctccgttcaccaggagaggtctgctgctcaagttcctgctgctgggcggcggctcacgtctgggctaagtcagcgccgtcggc

SEQ ID NO: 77082 - DNA, 332 bp, Zea mays
acccacgcgcccgtacgtggtcaacaagcacgccgcgctcttcacgtccacggtcatgagcctgctcctggcgcgccccaacgtcaagctgttcaacgccgtggccgtggaggacctcatcgtcaggggagggcgcgtcggcggcgtcgtcaccaactgggcgctcgtgtcgatgaaccacgacacgcagtcctgcatggaccccaacgtcatggaggccaaggtcgtggtcagctcctggcggccacgacgggcccttcggcgccaccggcgtcaacaggctccaggacatcggtatgatcagcgccgtgcccgggatgaaggcgctcgac

SEQ ID NO: 77083 - DNA, 407 bp, Zea mays
atctaaccccattgaaaaatgaaattggattttcgggagaattttggaataaaagataaataaagaattgaatttgaaaaaaaaaaaaaaaattctttctatttcggattcggattatttcttttttaataggatggatttcatcctctttttggagcaaattttaactcattgtattccatatggaataagaggagaagaaaagcattccacgacccccgaggggccccctcaaaaagggaactattcctaaaatttacttttttttatttatttttattcgttttttgaaccccaacaaaagtggattcaaagttacttcaattatccttttcttttaagttcttcttgtaaagttccatgcttgctgtttggtcaagaaaattagacctaatccaagaaagaag

SEQ ID NO: 77084 - DNA, 403 bp, Zea mays
gggacaacgcacgcgtccgaacctccaccaatatggtgtccccatcagtgctagagatattctttcagatctaaagctcaaagagagtgttaaagcatacagtaactggcctacgtttccacagatatttatcagaggagagttcgttgggggatctgatatcatactcaccatgcaccagaagggtgaactgaaggaactgcttggcgatattgcacaaaaagccgaacaaagtggttcttcatgaaacaagcatcagtatttgtgatgcaaacttcccggactggatgttccttctcagaagattttaggtgatcgtgcattgttgccctgtggcttcggatttgaatacgttctctgttttgttcggttcggttgctgccagttgttgatggaagatcca

SEQ ID NO: 77085 - DNA, 330 bp, Zea mays
cggacacttgggcggaagcgtgggctgccgcgcaacggctggatatcctgcgacgagttcagcaaggtcggcttcgtataccgcgagaactccagctccccgtgccactacgaatgccgctacaggaccatgttgaagctgccgatgttctgctgcatctacgccacccaggtgtcaacggatctgcacgatgccatcaaatcctacccggacgccttccacggcgtcagctgattctacaacatcaagcacacgcacttcgtcagcttcatcacctacaagccccctggcagctgactcatcgctcccggcgtgccgaccacgccggtt

SEQ ID NO: 77086 - DNA, 409 bp, Zea mays
cccacgcgtccgggaatggttaagggctatagcggtgttttccgacttggagaagccacatcaacctgggatgcagattcaccaattatccagagggaaccatgggaacacatcaaagatgaaaatattagaaaggcagcagcatcattcatgggttggcggtgaaaagatgtatgacaaagcaaggaagggtgaaacagtagagctttcaccaagacgtatatcgatataccaatttgatattgagcgcagtttggaagacagacagaatttgatatttcgagttacttgctcaaaaggaacatacattcggtccctatgtgcggacttgggtaaagcacttggaagctgtgctcatttaactgccttgcggagagactcgataggtgaatactcggtcaatgatgct

SEQ ID NO: 77087 - DNA, 405 bp, Zea mays
gtgggcacagaggtccgacagggtgttcttgacaatagagctgcccgacgccaaggatgtgaagcttaacttgaagcctgaaggccatttcaacttctcagctaagggctcagatgacttgccctatgagtttgacattgagctgtttgatgctgtgaatgtggaggagagcaaagcagctgttgccccaaggaccatatgctacctgataaagaaagctaagagcgggtggtggccaaggctgctgaagcaggagggcaagccacctgtgttcttgaaggttgactgggacaaatggcaggacgatgatgatgaagatgctggatttaataactttggtgatatggacttctcgaaactggacataagaggtgctgatgacgacgatattggggatgatgaaga

SEQ ID NO: 77088 - DNA, 417 bp, Zea mays
ggagcataaccacacggagcgcctcggcgaggtgggcgccctcgcgggcggcgcctttgctctgtaccaggggcaccgtgcgaagaaggacccggcgaacgcgcagaggcacaagatccaggccggcgtggcaacggcggcggcgctgggcgccggcggctacgcgtaccacgagcaccgcgagcagaaggaggcccactacgagagcaggcagcaggagcacagggtgccgcacgggcacgggcacggctactcctactactgcgactgaaacgactgatcatcccatcgatcgagatatgcatgcagaactcgatatatatacggcccctagcgccgtacacgtgcgtgcgtgtaagtaaataagagcaaacgtcgtcacgtgtgtgttgctcgatcactactccatcgatctac

SEQ ID NO: 77089 - DNA, 420 bp, Zea mays
cgggctctgggagaggcgacgctctcgggtgcaagtgcctcttcgggctcggggtgccggagctcgccgtcatcgccggcgtcgccgcgctcgtgttcgggcccaagcagctccccgagatcggccgcagcctcggcaagaccgtcaagagcttccaggaggcggctaaggagttcgaaagtgaactgaagaaagagcctggggaaggtggcgatcagcccccacctgcaacccccacggcaacgggggtaggtggcgcggagaaggggcttgaggcatcaagtagcaaggagagcacgtgaggatctatcaagtgttgttagtgttgttggtgtaaaattgtattctggtcttctggagttagcatcaagttcatgtcctttttaaccacgtcgcgggttcaggccattgtagcgatat

SEQ ID NO: 77090 - DNA, 420 bp, Zea mays
accacgcgtccgcgcaagcactccacactgctgtgcagaacgagagccacaccatcagtagttagagcgaccaatagatgagttcctccccgtcctttggtctcctggctgtagcagcattactcctagcactgagcttagcacaacatggctccctcgccgcaaccgtcggccccagggtcatcgtcgtcggcgccggcatgtctgggatctcggcggcgaagaggctgtcggcggccgggataaccgacctgctgattctggaagcgacggatcacatcggcgggcggatgcacaagacgaacttcgccggcatcaacgtcgagttaggcgccaactgggtggagggcgtgaacggcggcaagatgaagcccatctggcccatcgtcaactccaccctcaagctccgcaacttccgct

SEQ ID NO: 77091 - DNA, 323 bp, Zea mays
aatgaagctttccttggagaacatccttatggcataccggagagccaagacacgggcaattctgctggactacgatggcacgctgatgccacaggcgattaacaagagcccgtccactgaatctgtgcggatcctgaacagcttgtgccgagacaaggacaatgtggtgtacctatgcaacgggtatgaccggcgcacccttcatgagtggttcccttgtgagaaccgtggcatagccgctgagcatggctacttcctgaggtgtaagagggacccggaatggaagacctgtgtcgctgccacagactgcagctggaagcaga

SEQ ID NO: 77092 - DNA, 422 bp, Zea mays
cccacgcgtccgattggatattacgagccactggtttcaaatgtacagttctttcttgtcaggtaagactagccacaaggatgtaaaacacacaggcaattggcttctgaaattatattatgggtacaggccattcatggccttctgctgtgtttcttgtgaggttttatatattttcctgtttctctttgctgatgaggagtcaacaagcttgcttagtgtatgcaaaggcatcctgaaccaaagtcccgtcgttatcttggtgtttgtttccactctagttggctgggcagtgaagcaagccaccaacgtcatccagatgaaaactgctgcggacgcatgcgtggtgtatgatctgaagcgcagcaaatgaagcatgaaggcagcttcacggtttagtatcgacatatccaagggaaaac

SEQ ID NO: 77093 - DNA, 417 bp, Zea mays
aggttctgagttcgtgggcgagagggaagagatggcggcgtcggacgttgagtaccgttgcttcgttggcggcctcgcctgggccaccgacgaccactccctcaacaacgccttcagcacctacggcgaggtcctcgagtcgaagatcatcctggatcgggagacgcagaggtcccgcggcttcggcttcgtcaccttctccacggaggacgcgatgcgcagcgccatcgaaggcatgaacggcaatgagctcgacgggcgcaacatcaccgttaacgagggccagtcgcgctgcggacgtggatgccgcggtggcggatacggtggcgggcgccgtgatggaggcggctacggcggtggcggtggatgctacggcggtggtcgttgaggctacggcggcggtgggggatacggtgg

SEQ ID NO: 77094 - DNA, 417 bp, Zea mays
gagataatggttcctcttgttggaacaccacaggaactggggcatcaagtgagtcttatccgccaagttgctgagaaagtgttcgccaatgtgggcaagactatcgggtacaaagttggaacaatgattgagatccccagggcagctctggtggctgatgagatagcggagcaggctgaattcttctccttcggaacgaacgacctgacgcagatgacctttgggtacagcacggatgatgtggggaagttcattcccgtctatcttgctcagggcatcctccaacatgaccccttcgaggtcctggaccagaggggagtgggcgagctggtgaagtttgctacagagaggggccgcaaagctatgcctaacttgaacgtgggcatttgtggagaacacggtggagagccttcctct

SEQ ID NO: 77095 - DNA, 418 bp, Zea mays
gcggcagcttcgaccccctcggcctggccgacgaccccgaggccttcgccgagctcaaggtgaaggagctcaagaacggccgcctcgccatgttttccatgttcggcttcttcgtccaggccatcgtcaccggcaagggcccgctcgagaacctcgctgaccacatcgctgacccagtcaacaacaacgcatgggcctacgccaccaacttcgtccccggcaactaagctcaacggctatgctatgcaacttcattgtctttcggatcggagagggtgtacgtacgtggattgattgatgctgcgagatgcatgtgtgtcttttgtttcacgttgcattgcataggcaagtcgagatgatgagttggcgttgtacactaagatgaaccatgtttgtgcaatagtggtggtttttgttt

SEQ ID NO: 77096 - DNA, 405 bp, Zea mays
aacacatgtccgaccacgcgtccggtttgacatagtttgtcagtgacctattcctggttggactgttctaacaacagtataaccagattgctacaaacaccttggcgcgagtggctcttctgacacatgcagtctgcaatgtgtagaaacgtgttcttgtcatcagattctcaatcatttgcttttggcaacagacttaacatacattgtggcattggcacctcgattgtcataactgatgtcgctacgtcctccttacattaacgctaagattgacgacgacacaaggaacaagagcgcattactgctgtgaatacaaatctcgagaccttccatggacagaatatcgtctactatcacgacctacgtctatagcttgtattgttctcaccttgaatcagtcag

SEQ ID NO: 77097 - DNA, 420 bp, Zea mays
ggttccgtccccgatccgatccgccgagtgcacaccacctttccccactccgatcgaatcgatggccgccgagggcgagaagaagatgataaccctcaaaagctccgatggcgaggagttcgaggtggaagaggcggtggcgatggagtcgcagaccatccgccacatgatcgacgatgactgcgccgacaacggcatcactcgtcctaacgtcaactccaagatcctatccaacgtaatcgagtactgcatcacgcacgtacatgccgccgcagccgcagccgccgcctctaatgccggttccgacgacgtgggtgccgcctccgccaacagcaccgccgcctccggtgaagacctcaggaactgggatgctgacttcgtcaaggtcgaccaggccacgcttttcgacctcatcttggg

SEQ ID NO: 77098 - DNA, 396 bp, Zea mays
aaggacgcgtgggtgtttacttaactgccgttctgtcaaagatacaagaaggggggtggttgccgctggctttctcatcactgtttctctgcataatgtacacatggaactacggaagtgtactgaagtaccagagcgagatgcgcggcaagatatccctggacttcattcttgatctgggagccacacttggcaccgtaagagttccaggcattggactcgtgtacaacgagctggtccagggaatcccatcgatctttggccagctattagtcacacttccagcgatgcactctacaattgtctttgtttgcataaagtatgttcctgtcccttatgtccctcttgaagaaaggttcttgttccgaagggttgggcacaacgactaccacatgt

SEQ ID NO: 77099 - DNA, 421 bp, Zea mays
accacgcatccgcccacgcgtccgtggcttgggaaccgtcaaattcgttgcaattgggcaacgaaaggtgctaatgctggtgaagagaaacagattctggacactaaggttgacctgtcaaatggttcatcagaatctggaaaagagaatccaaatgaatatggtcctgaaaataaccctcagtttactactgtttatgttggcaatcttcctcacgaggctaccatgaatgatgtgcacctgtttttccattcactgggggctggttcaattgaggaagtccgtgtaactcgtgataaaggctttggctttgtgaggtacagcacccatgaggaggctgcattggcaattcagatgggtaatggccaacttattggcgggaggcagataaagtgttcctggggaagcaagccgactccac

SEQ ID NO: 77100 - DNA, 419 bp, Zea mays
acacagttcacaaaggtgggggcgaaaacatccatttgttcggtatgggttaccactcatttccttgacagtgtttggtgcagtgggacttgctcaccttatacagggcagcaaagacgtgaccaaggtaaaggaggatatggaatgggaggttgtacagacaacacaagctctaagtcgaacacggccagtggaacgagcctataagcctaagaaactctctctagaggacgaactgaaagctttgcaccagaaggttgacataaacagctacgactacaagcccatcccaagacccagtgagaaataagtgtagatgaagaccgtttgctagtgcgtcgagtggatgtttgtatcttgatacttacgtcgtcacgtcttgtcacaagttttgtatgaatgtaccgagctgattcaag

SEQ ID NO: 77101 - DNA, 401 bp, Zea mays
tctcgggtcgacgcatacgtccgagatgatgcgccacacgcgtcgagcactcttaactcatgggacacgatcgccatggccgccacatcgaccgccgccgccgtactgtgccgaccgtcagtggccgggctccgccaggcgccgactcccgaacggacgcgcgtgtcgatccgcgcggcacctgcaccggcacggcggtccgtggcggcacacgcggagctcagcacggcactagcaatcatccagagacaaggcgtgtcgctcttcctgtgccgatgcgtcgcacttcaacatccagtcggagaacatggcgaagcaggtgcccgcgcacaacggcaggacacacgtcgagtccgatgacgagcgcgccaaggagttcgccgcactgcacaagtccaacg

SEQ ID NO: 77102 - DNA, 380 bp, Zea mays
acactagctcgccccctcgttcgccgcctctcctgctcctaccgcagctctccctcaggtttagtgttcgcaatggcggccttcaacaagcttggtggccttctaaggcacagtgctctggtgagcggtatcactggtggctcttctcctgcagtgttcaatgctgcacggctcatgtctacgaagctagttattggtggtcttgactggggtgttgatgacgtgaaactaacagaagcatttagcaactttggagaggttactgaagcgagggtgatcacagacagggagactgggatgtcaagacgctttggccttgtgagacactccgatagtgatgctgcgaaagaagcgatttctgcagatggatggccaggaaa

SEQ ID NO: 77103 - DNA, 430 bp, Zea mays
tacacacacgttctggcatcgagcaggagcacttcaagagggaggagaaggagcataagcacaacgagcgcctcggcgaggtgggcgccctcgcgggcggcgcctttgctctgtacgaggggcaccgtgcgaagaaggacccggcgaacgcgcagaggcacaagatcgaggccggcgtggcaacggcggcggcgctgggcgccggcggctacgcgtaccacgagcaccgcgagcagaacgaggcccactacgagatcaggcagcaggagcacagggtgccgcacgggcacgggcacgggcacggctactcctactactgcgactgaaacgactgatcatcccatcgatcgagatatgcatgcagaactcgatatatatacggcccctaacgccgtacacgtgcgtgcgtgtaagttcataagagcaaacg

SEQ ID NO: 77104 - DNA, 380 bp, Zea mays
gacacaacacaggtacttaaaatttaaggagatatcattgtcgattacacacgataatttgtctgctaaaaaatataggaaacagtacttgtagatgataaaaaaaaaagccaaaacttgcagcagtttgacaaaaacagcagctctagtcgtcgaagaggctgaagcccatttcctcgtccgactcctcttcaggctccgcagccttctcttcttccttgggagcagctgcagcgccagagtccccagcagcaaccggggcggcaacagcaaacttgcttgggtccttgaggtactccttgatcttgtcagcatgtgggtacgagtagtctgtctcgacagcaacagcaagcacattcttgctagttctaagatcgcga

SEQ ID NO: 77105 - DNA, 421 bp, Zea mays
aagcaggcatgaatctcatccatcatcgagagtgtccagaagtgcagcacatatcgaggatattaactcgagaggaggtgaagcatcccggaatggagatcctgatgctttggcaacaatgaacgcaactgcagaagctcttgaagcaaaagaaaagcaaaagccatcgtttgaattgtctggaaagcttgctgaggagaccaacagagttgcaggtgtaaatctattatattcagaacccccagaggctcgaaagtcagagattagatggaggctctatgtatttaaagatggtgaaccactgaatgaaccactgtatgttcatcggatgacctgctacctttttggcagagaaaggaaagttgcagatgtcaccacagatcatccctcctgcagcaagcaacatgcagttcttcaatac

SEQ ID NO: 77106 - DNA, 417 bp, Zea mays
agaacatctatgttgacaacaagaaatttaactctttcaagaagattgcaagatccatgggatacggcgaggatgatctccctctagtatcatttcagtctgtctccaaaggatactatggagagtgtggtaaaagaggaggttacatggagattactggcttcagtgctccggtaagagagcagatctacaaggtagcttcagtgaacctgtgctccaatatcactggtcaaatccttgcgagcctcgtcatgaatccaccaaacgttggggacgaatcatatgcttcctacaaggcacagaaagatggaatccttcagtctttagctcgccgtgcaaaggcactggaagatgcattcaacacgcttgagggattttcatgtaacaacgctgaaagagcaatgtaccttttccctc

SEQ ID NO: 77107 - DNA, 428 bp, Zea mays
cgggtccacgcatacgtccgaccacatgtccgcaaatttccactggtacaattgtcaaaggttaatcctagctgtatggatcgcgatcagcggctagccttttggattaacttatacaatgctttgataatgcatgcgtatttggcatacggagtacctcgaaatgacatcaagcttttttctctgatgcaaaaggcttgttacacagttggcggccagtccttcagcgcagcagaaatagagtttgtgattcgaaagatgaagactccagttcatcggacccaactttctttgatgtcgactctgaataagttcaagattactgacgatcacaagaagtactcaatcgatgaattcgaaccccttcttttgttcggacttagctgtggaatgttctcttctcctgctgtacacatattctccgctgc

SEQ ID NO: 77108 - DNA, 419 bp, Zea mays
gctagcgcttatagcttgtcagccatggccaccgccgccgcgtctagcctcctcaagtcctccttcgcgggctcccggctcccggccgccacgcggaccacaccggcgtccctcgtggtggccaccggcccgcgcggcgccggcgcggggcccatctgcgcgtccatgtccatgtcctcctccaacccgccctacgagctgacgtccttccggttcagccccatcaaggagtccatcgtgtcccgcgagatgacccgtcgctacatgacggacatgatcacctacgccgacaccgacgtcgtcatcgtgggcgccggctccgcggggctgtcctgcgcgtacgagctctccaaggaccccgccgtgagcatcgccatcgtggagcagtcggtgtccccggggcggggcgcgtggctggg

SEQ ID NO: 77109 - DNA, 421 bp, Zea mays
aaatatatgacagacaaacaaactagtacagaaaaaaaaaacccgagagaagcaaaagtcactttcgaaggtttagttacggaagccctacccaacggaatgttccgcgttcgcctagagaatgacacgatcatcctgggctatatttcaggaaagatccggtctagttctatacgaatactgatgggggatagggtcaaaattgcaataagtcgttatgattccagcaaaggtcgtataatttatagacttccccataaggattcgaagcgtaccgcagactcgaaggatactgatgatttgaaggataccaaagattcagaggattaggtttttctggggtaataacttccaagtttcaaaatttaggtgcagagacttattttttccaaaggaatagattcatagtttaagaaaggaa

SEQ ID NO: 77110 - DNA, 412 bp, Zea mays
cactcctctcgtccgcgcttgtttgttcgcgtcttctccctgtagggaactccgttacccggccccggctgtgcgtggcgtcagcacgccccgcgggcaggagggtgaggctgctgagcgtgaggtgcgagcagggagccaagggcggtggcgggctggacgtgtggctgagccgcggggcgatgctgggcttcgtcggagcggtggccgtggagctgaccaccgggaaaggcgtgcttcagaatgtgggattgaccgcgccggtgccgacgctggcgctggcgctcaccggcgcggtcggcgtcctcacggccttcctcatcttccagtccgggacgccggactgatgggtgaattgtcaaagctcccacaaggacatgcataaagtctgtcagagtcttgtgctgtgtat

SEQ ID NO: 77111 - DNA, 423 bp, Zea mays
cgcgcgggtcgacgcatccctctacacgtgagtcgtgctagagcggaaaagcgtggacgagcctggggagccgccgggcgtggtcctaagcgcagccagatcggggtgggtgcccgtggctccggggaagctctgtcagcttcctccgtgacgagcagctgcgtgcggagtgggacatcctcagcaacggaggcccgatgcaagagatgggcaagatcgccaaggggcaggagcacgggaactcggtgtccctcctcagagcgagtgccatgagtgccaaccagagcagcatgctgatcctccaggagacttgcactgatgcatcaggctcgatggtcgtgtatgcgccagtggacatcccggggatgcagctcgtcatgaacggcggggactcgacctacgttgctctgctgccgtctgggt

SEQ ID NO: 77112 - DNA, 412 bp, Zea mays
gaaacttccaaattggatgcagttgccttgagccgtgcacttgagggcaaactgaattctccattatggcacgttcgcatgaaggctatttgtgtgttaaaagccattgtaaggaaacaggatactgatccttactctatcatcgcttcatatttcactgagaacacagcttctgttgttaaatgctctgagctgacacaggtttctctcagatagaaagcctcaaaggtcttgaatatgctgattggggaacaacctaccggaaccgcagcaacataagctgcgatgcccacacctgttcagatgcctgatttgatccatacaggtgatcaagatgatctggcaacaagttctggacatgcatgcattgaacagaattctgggaacagtgcatatgtttcctcagttgatg

SEQ ID NO: 77113 - DNA, 382 bp, Zea mays
aatccgccctttcggcctctccacactcattgtcggcttcgacccctacaccgacaagccagcgctgtaccagaccgatccttctggtaccttctctgcttggaaggcgaatgccacgggaaggaactccaactctatgcgtgagtttctggagaagaactacaaggagacctccggcaaggagaccatcaagcttgctattcgtgcacttctagaggttgttgaaagtggtgggaagaacatcgaggttgcagtgatgacaaagaaggatggtctccgggaacttgaggaagctgagattgatgaatatgttgctgagatagaggcagagaacgctgcagctgaggctgcaaagaagggtggtcctagggacacctagtcc

SEQ ID NO: 77114 - DNA, 348 bp, Zea mays
accacgcttccgcccaagcgtctgtggtgcgcaagccggcgcacactgttcatggacgagctgggcgtggcgtacgacaacgccaatgactacgtggtcatcaagcacgccgcgctcttcacgtccacggtcatgagcctgctcctggtgcgccccaaagtcaagctgttcatcacagtggccgtggacgacctcagcgtcaggggagggcgcgtctgccgcgtcatcagcaactgggcgctcgtgtcgatgatccacgacacgcagtcctgcatggaccccaacgtcatcggcgccagagtcgtggtcagctcctgctgccacgatcgacccttccgctccaccgga

SEQ ID NO: 77115 - DNA, 362 bp, Zea mays
gaagaaaagaagagactgaacgccgcgagttcacgtgacgatggagaacgccgcctccgccatcgctaagccgtcgctgtccaagaagccctcgccgtcgttccgcctccggaacggcagcctcaacgcactgcgcctgcgccgcgtgttcgacctcttcgaccgcaacggcgacggcgagatcagcctcgacgagatggcctcggcgctcgacgcgctcggcctcggcgccgaccgctccggcctggaggccgcggttggcgggtacatcccggccggcgccgcggggctccgcttcgacgacttcgagtccctcgaccgcgcgctcggggacgcgctgttcggccccatgccggtggctg

SEQ ID NO: 77116 - DNA, 373 bp, Zea mays
aggacacgtgggcggacgcgtggggatggattcacatttggagggaaactactcaacagatgaggcaaccacattggttgacctggcctcccagtgcctacagtatgagcctagggatcgggccaacactaaaaagctggtttccgtactcgagcccttgcaaataaaatcagaggtaccatcctacgagatgcttggcattccaaaacatgaggaagaagcgcctccccctccacaaccgcaacgccctctctctcccatgggtgaagcctgttctaggacggatctgacagctatccatcaaattccaatgaacacgcattacagggacgatgaatggagcatcgagctatcgttccaggaatggacgcag

SEQ ID NO: 77117 - DNA, 396 bp, Zea mays
aacacgcgtccggacaccaagcaatgatggagaagtaatacgagtgactgtcccaccattgacatctgatcgcagaaaggaattatcaaagacagtagctaaattagctgaagatggcaaggttgctataaggaacataagaagagatgcaatcaaagcttatgataaactagagaaggaaaagaagctttctgaggacaatgtgaaagatttatcagctgatttacaaaaagtcacagatgagtacatgaaaaagatcgaatccatccagaagcagaaggaacaggaactgatgaaaatttagacctcaagctgactgtatggctggtgaggagtaaccgcctccgtgaagcatggaccccggcatatgttggtgtttctgaagcaatttgtttg

SEQ ID NO: 77118 - DNA, 397 bp, Zea mays
atcactgcacgttgccggctgcccccgcggccccggccagtccatcccctcgctcgctccccaactccagcaggcagatcagatacatccatccattcgcggaccggaaggaaaggaagggttgaactatgagcgccgtggcggtttcgtcgtcgctgaacccggacgcgccgctcttcatcccggcggcgctgctgcaggtggaggacttctcgccgcagtggtgggacctcatcaccaccactgcctggttccgcgaccactggtcccgcgagcgcgcccacctggacgagatggccgagcagatcgacgccgccggcctcctccccgacgacgaggacctcttctacgacgaccagctcgagcagggccccgtcgccgccgcccttaagacaga

SEQ ID NO: 77119 - DNA, 424 bp, Zea mays
cagttagaggactttgccaatcacaatgcctttgatttgcttgaaaaatatagcaagagccatcttgttttcaatgatgatatccagggcacagcatcagtggtccttgcaggtttgttagcagcactcaagatggttggtgggaccctggcagagcagacgtatttgttccttggtgctggggaagctggaactggtattgcagaacttattgctcttgagatttcgaaacagacgaatgctccaattgaagagtgccgcaagaaggtttggctggtggactcaaaaggtttgattgttgactctcgtaaaggctcccttcagccattcaagaaaccttgggcgcatgagcacgagcccttgaaaaccttgtatgatgctgttcagtccatcaaacctacagttctgatcgggacatctggag

SEQ ID NO: 77120 - DNA, 435 bp, Zea mays
gtccgaccaggacgtacgtacgtacgtagatcgatccatcgatcgctagctagctgacgaccatggcgtccctctcctctgccgccatcaccgccccttccttcacgggcgcgcccgctcgcgcagtggtcagcaagaggtccttcaccgtgcgtgcctctctccgcaaggccactgccaccgccgccgtggccgttgccgccagcgtcctgcttgccggcggcggcgccatggcccaggaagtggtgctgggcgcaggcgacggcgggctcgtcttcgagcccagccagttcatcgtcaaagccggtgacaccatcatcttcacgaacaacgcccggcttcccgcacagcgtcgtgttcgacgaagacgatgtgccgagcggcgtcgacgcgtccaagatctcgcaggaggagtacctccacgcgccaggcgag

SEQ ID NO: 77121 - DNA, 375 bp, Zea mays
accacacgtccgctcggccatggtggtgcgcaagccggcgcacctgttcctggacgagctgggcgtggcgtacgacgaggccgaggactacgtggtcatcaagcacgccgcgctcttcacgtccacggtcatgagcctgctcctggcgcgccccaacgtcaagctgttcaacgccgtggccgtggaggacctcatcgtcaggggagggcgcgtcggcggcgtcgtcaccaactgggcgctcgtgtccatgaaccacgacacgcagtcctggcatggaccccaacgtcatggaggccaaggtcgtggtcagctcctgcggccacgacgggcccttcggcgccaccggcgtcaagaggctccaggacatcggcatga

SEQ ID NO: 77122 - DNA, 399 bp, Zea mays
attttgttttccctctcccgttcatctctctcctctttggccttcctttccttgcgacgacgactgggacgagcgccccccgcgcttctgcaggcgagcaccccgccaccagtcggagatgaacgcgtccaggaaatccagccatctctccagcaaggacagtgcagagaccgcgagggatatcatcaccacgtccggccaaatccaacccctcaaaatcccggacgctgttgctgcgctcgcacaggctgctgcaaaggcaaatggtgagaccgagaaatatcttccagggtggccgttgttctcgcctcctaaggtgcagttggacaagtgtaccaagtgctccagagaattctgttctgcaatcagcttccggaggcacacacgtgttcatcgtag

SEQ ID NO: 77123 - DNA, 356 bp, Zea mays
ccacgagtccgcggacgcgtgggcggacgcgtgggcgaaaccgaaagcacccgcaccaatctctgcgtctcttcgtcttcggctgcgcggcggcggcagcagcggacgaggttgaggagatgctgtccggcgacatccccccgagccagaccatctacctcaacaacctcaacgagaaggtcaagaaagaacaattgaagagatcgctttatgccttgtgctcacagtatggaaggatactggatgtggtggccctgaaaacacaaaaactgatagggcaagcatgggtggcgtttagcgaaattacagctgctaccaatgctttccgtggattgcaagattttgatttctacggc

SEQ ID NO: 77124 - DNA, 397 bp, Zea mays
gggaagaagggagcggccgggcgcaaggtcggcaggccaaggaagaagtcggtgtcgaagtccgtgaacgccgggctccagttccccgtcggccgcatcgggcgctacttgaagaagggccgctacgcgcagcgtgtcggcaccggcgcccccgtctacctcgccgctgtcctcgaatacctcgccgctgaggttctggagctcgctggtaatgctgccagggacaacaagaagactcgcattattccgcgccacgtgcttctggcgatccggaacgacgacgagcttgggaagctgttgggcggcgtgaccatcgctcacggcggtgtgccccccaatatcaaccctgttctgctgcccaagaacaccgcggagaacgcgtccagtggcggggagc

SEQ ID NO: 77125 - DNA, 408 bp, Zea mays
aggacgcgtgggcggacgcgtgggtgttggcagtccaaggtatctttcggggattcaaggatacaaagactccggtgttttatataggtttgggcaatctttctgctgtagcccttcttcctctacttatatatggctttaagcttggcataactggtgctgcaatttctacagttgtgtcccagtacattattacagttcttcttatttggtctctaagtaaaagagctgttttgcttcctccgcgaatagatcaattagagtttggtggatatctaaaatctggtggaatgctgttgggaagaactctttcaattctgctaactatgaccattggtacatcaatggctgctcggcaaggcccaacaacgatggctgctcatcagatttgtttgcaagtatggcttg

SEQ ID NO: 77126 - DNA, 407 bp, Zea mays
aaccactccgcgctagctgaggacggtacagcggcacagaggtgcgacgtacgacgacgacgacgcaggcgccacacatggcatcccagctctccgccgccgtgccccggttccacggcctccggggctacgccgcgcccaggtccgcggtggcagcgctgccgtccgtgagggtgggcaggaagaggtcctcgtcgcatggcatccgctgctactacatctgctccgccaccagcctgatcatggtgacgacgacgacgctgatgctgttcgcgggggcgtttcggctggcgccgtcggcgaatcccagtgcgacggcggggctgaagctggcggcgctctactcgcggctgcagacgggtgacgccgccgggttcaagctcgccgacacgctggcctgcggggcc

SEQ ID NO: 77127 - DNA, 350 bp, Zea mays
agcctcgttccgcacccggcgtgcctacttctactgggtgacccgggagcaggggtccttcgagtggttccgcggcgtgatggacgaggtggcggacacggacaggaagggcgtcatcgagctgcacaagtactgcaccagcgtgtacgaggaaggggacgcccggtccgcgctcatcgccatgctccagtcgctcaaccacgccaagcacggcgtcgacgtggtgtccggcacccgcggtcaagacccacttcgccagacccaactggcgcaacgtctacaagcgcatcgcgctcaaccaccagaaccagcgcgtccgagtgttccactgcggcgccccggtgctgaac

SEQ ID NO: 77128 - DNA, 406 bp, Zea mays
accacgcgtccgcggacgcgtgggagcgcattcgcgattttggccgcctccgccgccgtccgggaagatggcgggtctgggaaaggcgatgtacgcggtggggttctggatccgggagactggccaggccctcgaccgcctgggctgccgcctgcagggcaagtacttcttccacgagcagatttcaaggcatcgcaccatcatgaatatctttgacaaaacccctcatgtgcataaagacgcatttgttgctccaagtgcatcccttattggtgatgttcaagtcgggtcaggagcttccatttggtatgggtgcgtcctaagaggggatgcaaacatcatacaaattggatctgggaccaatatacaagacaattctcttatacatgtggctaaatctaatcta

SEQ ID NO: 77129 - DNA, 62 bp, Zea mays
accctccggttccggttcgggttcgtgatgttctccggggttcggtttcgtgggtgggcgga

SEQ ID NO: 77130 - DNA, 343 bp, Zea mays
tagcatgtctccaaccactatcctcattgagaattgagaggcagactctagttggaatacaagacttgcttgatcagcccaatccagctgatcctgcccaaactgatggttatcacctattcatccaggatccaacagaatataagcgacgtgttcgtctgcaggccaagcaatatcctgctctggtcggaggatgttggcataccacagatccatgatccatcctgcacatccgcagactagttccaaatgtgaaaattagggtctcaaattggatttgacgggacataggttgtcgggaggattgtccaggtgtaaccggaaccttctatgatgtgtacga

SEQ ID NO: 77131 - DNA, 378 bp, Zea mays
aattcctctgggtggtgcgagctcctctcggcgacaacccggagagggagttcggcgacaaggctgacccggacctgcaggcgctcctgcccgaagggttcctggagaggaccagagggcgcggccttgtcgtcaagctatgggcgccgcacgtggcggtgctccggcacaaggcgacgggcgcgttcgtgacgcactgtgggtggaactctgtgctggagggggtcatggccggcgtgcccatgctctgctggccgttgtatgcggagcagaagatgaacaaggtgctcatggtggaggagctacggatcggcgtggagcttgctgggtggcaccagcatgggttggtgaaggccgagaaactggaggccaagggtg

SEQ ID NO: 77132 - DNA, 446 bp, Zea mays
gtcgacccggcccgtccgagaacagaaaggaaacaccgccgccgccgcgccttccattccagtactcgcggaggaaaggaacaccagccagcgccatggtcacgtcgacgaccgccgccgccgtgctgtccccgccgtccgtggccgggcttcgcctggcgccgtctccccgggcgcgcgtggcgttccgcgcggcgcgggcgcggcggtccgtggcggcgcgcgcggagctgagcccgtcgctggtgatcagcctgagcacgggcgtgtcgctcttcctgcgccgcttcgtcttcgtcaacttccagcgggagaacgtggcgaagcacgtgcccgagcagaacggcaagacgcacttcgacgccggcgacgagcgcgccaaggagttctcgggcctgctcaagtccaacgaccccgtgggcttcaacctcgttcgagtcctcgcc

SEQ ID NO: 77133 - DNA, 430 bp, Zea mays
agcccgtgcaacctcatatcatcccctgccacgcacctccgtccgccgcgccatggaatcgaggaggagggccgtgcccaccgtgacggcggttgcggtggcgacgctgctgctgctgctgatgtcgtcgggcgtgggcggcgacttcgcggcggaccgggcggagtgctcggagcagctggcggggctggcgacgtgcctgacgtacgtgcaggagcaggcgacggcgacggcgccgacgcccgactgctgcgcgggcctgaaggcggtgctgcagagcagccgcaagtgcctgtgcgtgctggtcaaggaccgggacgaccccaacctacgcctcaagctcaacgtcgacaaggcgctcggcctccccgccgtctgccacgcgcccgccaacatctccgactgccccaagctgctggacctgccgggc

SEQ ID NO: 77134 - DNA, 362 bp, Zea mays
agctgttcaacgccgtggccgtggaggacctcatcgtcaggggagggcgcgtcggcggcgtcgtcaccaactgggcgctcgtgtccatgaaccacgacacgcagtcctgcatggaccccaacgtcatggaggccaaggtcgtggtcagctcctgcggccacgacgggcccttcggcgccaccggcgtcaagaggctccaggacatcggcatgatcagcgccgtgccggggatgaaggcgctcgacatgaacaccgccgaggacgagatcgtgcccctcacgcgcgaggtcgttcccggcatgatcgtcaccgggatggagggtcccgagattgacggcgcccccaggatgggcccgacgttt

SEQ ID NO: 77135 - DNA, 405 bp, Zea mays
gatccgaagctcaatcaattcactcaaacctcttccccaaatcttcgattagattctcgttgacaagaagactagaaccgaacctgaccatgtcgctgatccgccgcagcaacgtgttcgatcccttctccctcgacctctgggacccctttgagggcttccccttcggctccggcagcagcagcagtctcttcccctcgttcccgcggaccagctcggagaccgcggccttcgctggcgcgcggatcgactggaaggagactccagaggcgcacgtgttcaaggccgacgtaccggggctgaagaaggaggaagtcaaggtggatgtccaggacggcaacgtcgttcagatcagcggcgaacgcaacaaggagcaagaggagaagacggacaactggcaccgcg

SEQ ID NO: 77136 - DNA, 382 bp, Zea mays
gtcaattgggaaagatgcttcaggcaacgagctgcttcttgatgttggcctttggttatctcagaagataaatgaacatttcaagaaaaacaagatgaccattaatctgaagtacatagatccaacgtacatgatacttgccatcccaagcaatgcttctgataacgtctattgcacactgctggctcacagcgtggtccatggagccatggctggatatactggttttaccattggccaagtgaatggtcggcactgctacatcccattctataggataacagagaagcagaacagagtttcgataaccgacaggatgtgggcaaggcttctctcgtcgacgaaccagccaagcctcctttgcaacaaagtcgtcgaggag

SEQ ID NO: 77137 - DNA, 366 bp, Zea mays
acttcagacgggtcagtggaatctttatgcccaaaatcctgattcgagtaatcatttatttggtaccactcaaggagcgggaactgccattctgacccttcttgggggattccatccacaaacacaaagtttgtggctgaccgatattgctcatcatcatttagctattgcatttatttttctcattgccggtcatatgtatcgaactaacttcggaattgggcacagtatcaaagatcttttagaagcacatactcctccggggggtcgattaggacgtgggcataaaggcctttatgatacaatccaataattcgattcattttcaattatgccttgctctaacttccttacgggttattactt

SEQ ID NO: 77138 - DNA, 264 bp, Zea mays
tcgcgggtcgacgcacgcctctaaagagtatctgatcatatatgtattccaatacggaatgaggattttcaatgcgggatataaaaacatatctctctgtagcacccgtgctaagtactctatggtttggggctttaccacgtttattgatacaaatcaatcgtttattcccagatgctttgtcattcccttttttttaattcgagttattcctatgccagagatagaattcttcctgagatcacgaacatttcccctttttga

SEQ ID NO: 77139 - DNA, 408 bp, Zea mays
agacactgcggccgggcgatggcgagcgtggagggcaagagggagacggtgctggtcaccggcgccagcggcttcatcggatcgaccctcgtcggcctcctcctcgaccgcggctacaacgtccatgccagcgtcctcaaccccgatgacaaggcggagacggagcacctggtcgccctgggcgccggcgccggcgaaggccggctgcgcgtcttcccgggcgacctcctcgacggcgccgcgctcatggccgccgcgcggggctgctcgggcgtgttccacctcgccagcccctgcaccgtccaccccgtgagcgacccgcaggggcagatggtggtgccgggggtggaaggcacgctcaacgtcctggcgcgccgccaagggagcccgcaccgtgcggcgggtggt

SEQ ID NO: 77140 - DNA, 295 bp, Zea mays
acgcgtccggaagctataagtgctacagaggggttgatacaaaggaatggaagtgattgacacgggaactcctctcagtgttccagtcggtggagctactctcggaccaagttttaacgttcgtggggagcctagtgacaatttgggtcctgtggatagtaatgcaacatttcgtattcatagatatgcgcctgcctttaacgaattagatacgacattatctatctttgaaacacgtattaagggggtcgatcttttaactcctaacgacgtggacgaaaaatcagactgtttg

SEQ ID NO: 77141 - DNA, 250 bp, Zea mays
tgggttccaaactcagggcttcccatggttgccatccacagtaaatggcacacatgggttctgttgcatcacttgcgatgtcagtcactataaacgaggatgaggaggaagatggggataccgggagtgatcaacaaccgaaaggcaggaagctgtgggggcttgtcgtctgccatcatacaagcccgaggttcgtccctttcccactaaggtatgcttgcgagtttctcttgcaagtatttggcagaca

SEQ ID NO: 77142 - DNA, 417 bp, Zea mays
agactcgccgctgacgaagacgatgaagggtgcggtgacaggactcgccgcggggaccatctggggcaccgtcgtcgccacctggtacgacgtgccccgtgtggagcgccacgtcgcgctccctggccttatccggacgctcaagatgtgcggcacctacggggccaccttcgccaccatcgggggcctctacatcggcgtcgagcagctcgtgcagagccagcgcaagaagcgcgacttcgtcaacggggccgtcggcgcgttcgttgccggagcctctgtctgcggctacagaggaaagagtattcagtcagccctcatcggaggctcctgtctggctttcacatctgctgtgctggacattggcggcaatacgaccagagttgacaacggcaaagagtactatgcctacacaac

SEQ ID NO: 77143 - DNA, 425 bp, Zea mays
gcagcagcacacagccccatcccaatcctagtcgatcttcttcccctcctcaagccggttccttcgtccacacgaccgcgcgctcggaaaactccgcggagggcgaaggaggcgaaccaagggcgacgtatccgccgccggagaaggtagccctcgatccgccgtctcccgcgattcgtttgtcttgcgacagctgggcgaccgtcgtcgccgccgcccttctccaggtgcccaggtcttcgccggtccctttgccgcctccttgccgccgacgagcaccagccaggaagaaaagaagctgaaccatggggaagagaaagtcagctgctaagccacctcctaagaagcggatggacaagcttgacactgtcttttcctgcccattctgcaaccacgggagtagtgttgagtgccgaattgacatg

SEQ ID NO: 77144 - DNA, 413 bp, Zea mays
aactccaagtaaatgcaagttcttcatgtggctcgtggcccacgatcgctgctggacagcagaccgactagcaaaaagaggactgcctcaccctcaattttgtatactttgtgatcaagaggaagaaacgataaaccacttgctggtttcctgcgttttctctcgggctgtctggtttcagatgatgaaatctgttgggttgcagcatcttgctcctaaccctgcgtgctcctcctttgaagattggtgggaaggggttgctgcattttctgctggtctagtaaacacagggctgcacaagggcttgaattctttgatcattattggtgcttgggccatctggaatcaccgcaatagctgtgtttttaatggtgtgcagcctagtcaaagcatggtcatcaattgggtcaagg

SEQ ID NO: 77145 - DNA, 362 bp, Zea mays
aggacgcatgggcgcggggctgaccccgtgcaaggagtccaaggcgttcgcgaagcgcgagaagaactcgatcaagaagctcaccgcgtcgctgaagaagtacgcgcccgacagcgcccccgcgctcgccatcaacgccaccatcgagaagaccaagcgccggttcgagaactacggcaagttcgggctgctgtgcggcgccgacggcctgccgcacctcatcgtcagcggcgaccagctgcactggggcgagttcgtcaccccgggcctgctcttcctccacatcgccggctggatcgggtgggtcggcaggagctacctcatcgccatcagcggcgagaagaagcccgccatgagggaga

SEQ ID NO: 77146 - DNA, 148 bp, Zea mays
cgtacgtagtgcaacgactgtcgattcgttgggtgaggaacatatatgtgaatgcaaactccgggctacatacatgtgtaatgtgtaatacatatatatacaaaactgccgaggcgccgacaatactttaataactgggccttttaat

SEQ ID NO: 77147 - DNA, 417 bp, Zea mays
accacgcgtccgcccacgcgtccggtttgacaaagtttgtcagtgacctattcttggttggactgttctaccatctgtataaccagattgctacaaacaccttggagcgagtggctcctctgacacatgctgtcggcaatgtgttgaaacgtgtttttgtcatcggtttctcaatcattgtttttggcaacaaaattagcacacaaactggaattggcacgtccattgccatagctggtgttgctatgtactcttacattaaggctaagattgaagaggagaaaaggaaaaagagcgcatgactgctgtgaataatattatcgagaccttcctcggacacaacatcgtcgacaatcacgacctacttctatatcgtgttttgttttcatcttgagtcagtcggtccaatgtttggtc

SEQ ID NO: 77148 - DNA, 209 bp, Zea mays
agccttgaaattctttgcatctgtccgtcttgagatacggctcattgggaagataaaatctgccaacggagatgaagatgttggtgtgaaggttcgtgtcagagtgcagaacagtaaagtatctagggcctacaagcaagctgaatttgaaatcagttttggggagggtgttagtaaattggggtgcgttcttgattgtgctgaactga

SEQ ID NO: 77149 - DNA, 288 bp, Zea mays
acaggataagtctaagctcacggggttggccttcggtcctagttatcagcctgccccttcaacaaaaggaaagccatccaagttgcataaaaggaaacatcagattggttctctgtactttgagatgaagtcaaaggagatggagcttgcggagaggcgttctaagggcattcttacgaaagcagaagctcaagcaaaatatggctggtgaggagggatgtaaccgaactcacgatacatgtgtgggaaccgtagaattgagatgcgtgaaattttgttgcacatttt

SEQ ID NO: 77150 - DNA, 364 bp, Zea mays
aatccgtaccaaaacttacttggatggagcaatacttaaagaggaaatggagcggtctgctgatgtgctgtctgctggtctattagaagttgcaaatccttctctctcaagtagattcttcctaaagcagcattggactgatggataagatgatgtaaaagactctattaagcacaggcccttgtgggaatcttacatgcccaaaaataataaaggaaggagaggaactggaaagaagaaacatggaagtctgtacagaacttatgggagcagagtgatcccagtttttgtattatcactgggcggtgtcgatgctgaacttctcatggaagaggagattcttgtttggacaagtaaagatgtt

SEQ ID NO: 77151 - DNA, 378 bp, Zea mays
aaccacgcgtccgcccacgcgtccgggatcgaggtgctcgtgatcggctacatcgagttccagcgcaacgccgagctcgacccggagaagaggctgtaccccggcggctcctacttcgacccgctcggcctggcggccgaccctgagaagaaggagcggctgcagctggcggagatcaagcacgcgcggctcgccatggtcgccttcctcggcttcgccgtgcaggccgccgccaccggcaaggggccgctcaacaactgggccacccacctgagcgacccgctccacaccaccatcttcgacacgttcggagggtcctcttaagcccgccattgctccgccccgtccatcgagcggccggaacgtgttcttggatta

SEQ ID NO: 77152 - DNA, 356 bp, Zea mays
aggacgcgtgggctgcagttgctcgttggggtgccaccactgctgatattctcaggtgccagtgctgtatttggtgcatatgcacttccaaggtttgttcagctcacagtgacgtcttactacgcggcatcaactggctcgcagtatgctgtttcacagatcacacggcagatcgaaagagctcattttccagaatcagcccaggaatctgagtgagttggttggcattcagtctgttctattgggggtgcaatgtacatggtatagaaagacgtttagtgctgcttttgccgtgttgcagtacagtattaagtttactgtgtttcagacagcacccagtgaataaaagttatatt

SEQ ID NO: 77153 - DNA, 403 bp, Zea mays
acgcccgccgcccggtggtccacgtcccctgtgctcttcctcctgctgctgctcgcggcggccacggcgacgacgacgacgacgaccactacagcaaagcatgagcatccgtcgccgacgccgtggccggagcgtttccacgcggtgctgttcacgaacctgaccaactacacggaagcctccacgggcccgccgctgcgcgtgacggacctctactacgactggccgcggcggcggaacctgaacctggtgcggcaccagctgtcggtcgacccgctgtacgacgtggagtggaacaacggcaccggcttctacttcgactccaatgcgtgccgcgtggagcagttccccgtgggcgtgctgccgccgtggtggctctccggcggcggcgccgagtacgtgg

SEQ ID NO: 77154 - DNA, 321 bp, Zea mays
acgagctacaggatggcgacattatcaacatcgacgttactgtctacttaaacggataccatggggacacctcgaggacgtacctgtgcggagaagtcgacgacgcaactaaacaactcctgaagggcactgaaaagtgcatgatgcgcggcatatcagcctgcacgcacggcgccaatttcaaggaaatctgccaaagaataaatgagcacgcggagaaatatgggtacggcatcgaccccttcctgggggacggggttgggaggatgttccactgccagcccatcatatgggatagctaccattacgagccccggttca

SEQ ID NO: 77155 - DNA, 424 bp, Zea mays
ggcagcaaagagctgtctgtactggtagacaggtcaattggaggttccagtataaaggatggacaaatagagctaatgctacacaggaggctactccatgatgatgggaaaggcgtcgccgaggcgctaaatgaaacagtctgtctcgataagcaatgtgaaggactcattatacaaggaaaatactatgtcaaaatagacccacaaggagaacgagctcggtggcgtcggacatttggccaggaaatatactcccctctccttcttgctttcacagagcaggatggaggcaactgggcgaattcacatgttgcaaaattctctgcgatggattcaacttacagcttgcctgataatgttgcaatgcttacccttcaggagcttgaagatggaagtgttctccttcggtttgctcatctatatg

SEQ ID NO: 77156 - DNA, 405 bp, Zea mays
aggacgcgtggggcggaggaggcggcggcggcggtggctgcttcaagtgcggcgagcctggccacatggccagggactgctccagcggcggcggcggctacggcggtggcggcggcggtggtggtggcggctgctacaactgcggccaggccggccacatggccagggactgcccaagcggtggcggcggtggcggagggaggttcggcggcggcgggggtggaggcgaccgctcctgctacaactgcggcgaggccggccacatcgcccgcgactgtcccacgtgaggtgtgtccgcgtccgtccagccagccagatcggatcggatcgctccaccacctgctggtctgatggcgccgcccccttctagatctcgcttaaaagaacatcgccctctccctgtgt

SEQ ID NO: 77157 - DNA, 405 bp, Zea mays
  unsure (1)..(405): unsure at all n locations
gacaacctgatcaggttcagcattggagtggaggattttgaggaccttaagaatgatcttgttcaggccctcgagaagatataagctccaatccatttgcattaataaagttatgaggtgatggttgtctggatcttgtagagatttgtgatgatacatgagctgttgactgcgattaagttctcttgtgcttattttattctttgaattcaataagctgtggttgctgcatcttgcatgtagtgttggacttaattttacttgtcaaattacaatagtttggtcccatgtacttgtgtccgcgcctccgcggttgtgcccctagtgtttttgtgtcatttgctgtgtantgtgagattaaggcacgatgtccttaatcaccataataaatccatgccttaaatg

SEQ ID NO: 77158 - DNA, 284 bp, Zea mays
agcgtgggaggagcttagagccaagttggaagagaaagagtggatctcgcagaagcagatgatcatccttctcaaccaggccaccgatatcatcaacctctggcagcagggtggtgggaacctgtcgacatgagtccctccccgccctgttctttcaaccgtgcaaagcttgcgttttgttggtttcactacaggctctctctgttgttaatgttaaaagtatggtacatggccttgtagatcggttcaaactgttctcaggtatggccttttccatggaaaaa

SEQ ID NO: 77159 - DNA, 417 bp, Zea mays
gataggtgtaaacacagctatatactcgccctcgggagcatcatctggtgttgggttttccattccggtcgatacagttgggggcattgtggaccaacttataaggtttggcaaggtgacaaggcctattttgggagtaaaatttgcccccgatcaatctgtggagcagcttggattaagtggagtgcttgtcctggatgctcctccaaacggaccagccggcaaagcgggtctgcagccaaccaaacgagatccctatggtcggcttatcctgggtgacataattacctctgtgaatggcacaaaggtgacaaacggaagcgacctgtaccggatactggatcagtgtaaagtcggggaaacggtgaccgtggaagtcctgcgtggcgatcataaggagaagatccccgtggtcct

SEQ ID NO: 77160 - DNA, 297 bp, Zea mays
aacacgcatccgcctttgtgggctgcttcagccgtgttgatgcacaagtgggaggagacgcggcgaccgaagccaaacctgtggctccagacaccgtgggctcaacagcggtggttgcgcttgtctgctcatcgcatgtcatcgttgccaactgtggcgctttccgtggaccataaaccaaacacggaagatgagtatgcaaggattgaggcccacggtggcaacgtcatcaattgggaatggctatcgagtcccccgtgttctcgccatgtcccggtcaattggggacagatacct

SEQ ID NO: 77161 - DNA, 392 bp, Zea mays
aagacgcgtgggaccaccgactcagcgagcgagagcagcacacactgcacgcagctagctaggagcagcagcagcggcggcgatggcggcctccatgatctcctcgtcagctctggcggtggcgcctcagggcctgccgcccctcggccgccgcgcctcctccttcgccgtcgtctgctccaagaagaagatcaagaccgacaagccctacgggattgggggtggcctgaccgtcgacgtcgacgccaacgggagaaagggcaaaggcaaaggcgtgtaccagttcgtcgacaagtacggcgcgaacgtcgacggatacagcccaatctacaacgaggatgactggtctcccaccggcgacgtctacgtctgtggaaccactgggcttctga

SEQ ID NO: 77162 - DNA, 383 bp, Zea mays
ctcctcctcggcgccatctcgttgcccaccgtcggcatggtcgtcccctacggcgccttcttcgtccctgccggctccgggaacgccggcggcgggacctacgcgaaggacatgctgggcaacgacatcacggtggaggcgtggctcaacacgcacggtctcaacgaccgcacgctcgcgcaggggctcaagggtgaccccacgtacctggtggtggagcaggacaagacgctggccacctacgggatcaacgccgtgtgcactcacctcggctgcgtcgtgccgtggaacggttctgagaacaagttcatctgcccctgcgactgatcccagtacaacaaccagggcactgtggtccgtggaccgggcgcctctgtcgctgg

SEQ ID NO: 77163 - DNA, 406 bp, Zea mays
ggcgaggacgcccgcgccgccgccggaggtagcagtccggggtgcggtggatcaagcgatcccggagggagcggcgtcttctcacccggcttcggtttcgccgactcggatcttctcgcgcccgagcaggacaccatggatggaggcagttggtggtacgggaacgtccgcacgccgaacccagtcatgtcgcaggcggcgtccatatccgctagccccgggctaaccacctcagccaatcatgctcttgaaagcgagtcagactccgacagcgaatcactgtatgatgtagagggagttccatacgagcgaggtaacacatccattgagacgaagcgaataagaaggatggtgtccaatagggagtctgcgcggcggtctaggaagaggaaacaggcacagttgt

SEQ ID NO: 77164 - DNA, 407 bp, Zea mays
ccggcgctgaaaaaaccataccaccaaacaagtgccagcgccctctcacagtcgccgcaatggggagcaacttcatcatgatcaagcctgaccgggtccaaaggggcctcattggtgagatcatcagcccttttgagaaaaaaggcttctacctcaaggccctgaagcttgtcaacgtggagaggtcgtttgccgagaagcactaaaccgatctcgcctccaaacccttcttccaaggccacgttgactacatcatctctggccctgtggtggccatggtctgggatggcaagaacgtcttcacaactggccccaagatcattggcgccactaaacccctggcttctgagcccggcaccatccgtggcgactttgctgtcgacattggcacgaatttcattcatgga

SEQ ID NO: 77165 - DNA, 461 bp, Zea mays
cccacgcgtccgctctagtcctctcgcatccgcagcttccccagccagctagggtttgcagatgacgaccgcggcgcgccccacctgggcgccggccaagggcggcaacgagcaggggggcacccgcatcttcggcccctcccagaagttctcctcccgcgacctcgccgcgcacacctccctcaagccaagaaaagacggtcaacagacccaagaggagttacagaagaggaatctcagggaggaacttgaggaacgtgagcgcaagcactactcttccaaggataagtcctatgccgaagaaagagaccggcggaaaagctctagccatctactcttagaaggttcaaagagagagacagaggataagatagttccacgagaaatcgatgctgatgactccgaagtggagcctaaaagcgatgacgagaacgatgaagatgatgatgacgacgacactg

SEQ ID NO: 77166 - DNA, 488 bp, Zea mays
cccacgcgtccgggcgaccgctacgctactgagctcctccttcgccatgcccgccgccgcccgtagggcctcctccccttcctccgcctcattgagcttcgccacgtcgcagctcgccggcctctccctctccgccggcgttgcaactccaaccgccgtcgccctcctccccaagaggcagcagctccagcccactgtcgcgcggcgtgtgtgcccgttcacggacaagaagacgaaccgggcgaacaaggtgtcgttttccaaccacaagacgaagaagcagcagttcgtgaacctgcagtacaagaagctgtggtgggaggccggcaagcgcttcgtcaagctgcgcctttccaccaaggccctcaagaccatcgagaagcacgggctcgaagccgttgcgcgcaaaggcggcatcgacctcaacaagaagtgagcaagaagtgagcccatccgaagagcaaccaaactaatgttgggggggaact

SEQ ID NO: 77167 - DNA, 325 bp, Zea mays
cccacgcgtccgcgtacgtacgtagatcgatccatcgatcgctagctagctgacgaccatggcgtccctctcctctgccgccatcaccgccccttccttcacggccgcgcccgctcgcgcagtggtcagcaggaggtccttcaccgtgcgtgcctctctccgcaaggccactgccaccgccgccgtggccgttgccgccagcgtcctgcttgccggcggcggcgccatgggccaggaggtgctgctgggcgcaggcgacggcgggctcgtcttcgagcccagccagttcacggtcaaggccggcgacaccatcagcttcaagaac

SEQ ID NO: 77168 - DNA, 329 bp, Zea mays
cacgctacggctaatgcggccggtgccggcgcccctcccccagtgccgacgccgtggccggagcagttccacgcggtggtcttcaccaatctcaccgatagcggcggccggctgcagctgatcgacctgtactacgactggcccaggggccgcaacctcaacctcatccgggaccagctctccagcgacccgctctacgacgtcgagtggaccaacggcacctcctacttcttcgactccgggtcctgccgcaccatgcgtttccccgtggggatcctgccgcctgactggctcgccgccggcgccgtctatctcggtcgcgagcacgt

SEQ ID NO: 77169 - DNA, 476 bp, Zea mays
gatatgtgcaagggagtgcagtatctcaatgaaatcaaggattctgttgtggctggtttccagtgggcatcgaaggagggtgcactggctgaagagaacatgcgcgggatttgcttcgaggtctgtgatgtcgttcttcatgctgatgctatccacaggggtggtggccaggtcattccaactgccaggagggtcatttatgcttctcagctcacagccaagccaaggctgctggaaccagtttacctggtggagatccaggccccagaaaatgcactgggtggcatatacggtgttctgaaccagaagagaggacatgtattcgaggagatgcaaaggcctggtaccccgctctacaacatcaaggctttcctccctgtcatcgagtcctttgggttctcaagccagctgagggctgcaacctctggtcaggcgtcccccagtgtgtttttaccactgggacatgatgggctcgg

SEQ ID NO: 77170 - DNA, 365 bp, Zea mays
aaatgctgcagtgcagggtgttcgcctacgccgacacgcagcgctacaggctgggaccaaactacctgatgctgcccgtcaacgcgccgcgctgcgcgcaccacagcaaccacgacgacggcgccatgaacttcatgcaccgcgacgaggaggtggactactacgcgtccaggcacgcgccgctgcggcaagcggcgccgcccacgccactgccgcccaggccggtcgcggggaggagggagaaggcaaccatacgcatgcccaacgacttcaagcagccaggggagaggtaccgctcctgggacgccgaccgacaggaccgattcgtgaggcgattcgccgactcgctcggacacccaaaggtc

SEQ ID NO: 77171 - DNA, 422 bp, Zea mays
  unsure (1)..(422): unsure at all n locations
acgattagttaacatggtggttaaccgtattatgaaagacggaaaaaaatcattggcttatcaaattctctatcgagccgtgaaaaagattcaacaaaagacagaaacaaatccactattggttttacgtcaagcaatacgtagagtaactcccaatataggagtaaaaacaagacgtaataaaaaaggatcgacgcggaaagttccgattgaaataggatctaaacaaggaagagcacttgccattcgttggttattagaagcatcccaaaagcgtccgggtcgaaatatggctttcaaattaagttccgaattagtagatgctgccaaagggagtgggggtgccatacgcaaaaaggaagcgactcatagaatggcagaggcaaatanagctcttgcacattttcggtaaaccatgaaca

SEQ ID NO: 77172 - DNA, 352 bp, Zea mays
cagacgcgtgggcggacgcgtgggttcttacccaatggaggagcagcattcacgattccggcagtggcaatggcagtggcgcctcttctccctcctctcatcccagccggagctgctcccgccgccgcggccggccaaccatgtcaggtgggaggagaccgccgccgcgcagctcttctccgcaagcctcgcgggagtgctcaaggaggacatcagggtggcggtggaagacgccaggtacctcgtcatccgcaccgagctggacgccggcaccggcaccggtggtgccgtcgcggacgcgaggagcttcgagcggaagtttcggctgccggggatggtggacgtggagcgg

SEQ ID NO: 77173 - DNA, 396 bp, Zea mays
agctcaccgcggtttggctttctcccctcttccgcaccgcttctcgctccggattccggattccctctgctcgttccctaacgaaggtagccatggcggggagaggtaaggcgatcggctcaggcgccgccaagaaggccacgtccaggagctccaaggctggcctccagttccccgtgggaaggatcgccaggttcctcaaggccggcaggtatgccgagagagtcggcgccggggcccctgtcgatctcactgccgtgctcgagtatcttgctgctgaggttcttgaactggccgggaatgccggacgtgacaaccagaagacccgcatcgtatcgcgccacatccagctcgccgtccgcaagcgacgaataagctctcgcgccttgctggggc

SEQ ID NO: 77174 - DNA, 371 bp, Zea mays
  unsure (1)..(371): unsure at all n locations
acgcgtccggctaagctctacagctcgagtattgcttgctcaccagaagaaacaatgcagtgcaccaacaatggccgccgcctcctcgtcctcggtcctcctgctgctcctggccgccgccttggctggcatgagcgccattttggctaacttcatcatcagcaacaactgccggttcaccgtgtggctcgccgccactccggtgggcgggggcacacacctcaggatgggcgggacgtggaccttcaacgtgccggctgggaccatctccggccgcatgtggggccgcaccggctgctccgtcaacggcaagagcgggagctgccatacaggcgactgcngcagctcgctggactgcacgctgtcggggc

SEQ ID NO: 77175 - DNA, 415 bp, Zea mays
  unsure (1)..(415): unsure at all n locations
acgcatactgcatacacaacacagagcatcagaaggagctgcgatctgatcgacatggctgccgccaccatggctatcacctcccgcgcgctcatcggcaagccggcggctggcacgagggacgtcttcggcgagggccgcatcaccatgcgcaagaccgccgccaagcccaagccggcggcgtccggcagcccctggtacggtgccgaccgcgtcctgtacctgggcccgctgtccggctcgcccccgagctacctgaccggcgagttccccggcgactacgggtgggacaccgcggggctgtcggcggacccggagaccttcgccaagaaccgcgagctggaggtgatccactgccgctgggccatgctcggcgcgctcgggtgcgtgttcncggagctgctcgcccgcaacg

SEQ ID NO: 77176 - DNA, 421 bp, Zea mays
ctaattttggtttgagttttgtttgaattatttcaagtaaattctttttacccttttctggttaatttatttcaaagcacacattcttagtttagttttttttgtttctgacagatctctttcgatacacgttttaactacaatgcctatgtgaatatgcacccgtttcctattccgtttctagaattttcgcaggccgagaatgacttgcagccttggattgctagagacgacgaacaaggccagacgatgtggagagtcaaccaacgtatagtgaagcttatagcggagctcatgacgaaccatgacagccctgaagccttggtgatactcgctagtgcctctgaacttctacttcgtgctactgatggaatgcttgttgacggtgaagcttgtactttgccacagcttgagcttctcg

SEQ ID NO: 77177 - DNA, 406 bp, Zea mays
ctgcgcctcgacatttcttctcgctctgctcctccgcctccgcctgatccatccaagacagggatcgccatgtcggactccgaggagcaccacttcgaatcgaaggccgacgctggggcatccaatgacctacccgcagcaagctggaatcgtccgtaagaacggcttcatcgtcatcaagaaccgtccctgcaaagttgtggaggtttctacctccaagactggtaagcatggccacgccagatgccactttgtcgccatagacatattcaatgggaaaaagcttgaagatattgttccttcatcacacaactgtgacattccgcatgtgaaccgtactgagtatcagctgattgatatttctgaggatggatttgtgagcctccttacttcagatgggaacact

SEQ ID NO: 77178 - DNA, 406 bp, Zea mays
gtccttcacattgctgctatgaggagggaacctaaaatcattgtctctcttttgaccaagggagctcggccatcagacctcacatttgatgacagaaaagcagtgcagatctccaaacgacttacaaagcatggggattactttgggcctactgaggacggaaagccttctcctaaagatagattatgtattgaggtactagagcaagctgaaagaagggacccgcaacttggagaagcatcggtttctcttgcgatagaaggagactctgcgcgtgggaggctactctaccttgaaaaccgagttgctttagcaagaatactgtttcctatggaggcaagggtagcaatggacattgctcaagtcgatggaacactggaattcacccttgtttctagtgtgaatc

SEQ ID NO: 77179 - DNA, 386 bp, Zea mays
ctgacacacctcagaagcaagttcggttcttaacactgtcaggtgataaaaagctgttgactccgcaacctcggctaaggacaggatttttctcagttatggactctcaaatgatacctgttgggtgcatccctgaagcatgcacttctgttggtgcagctaaatatgggaggccaattggtttagatgagagccttaaggtggatttgattgtgattgggtcagtggcagttgatccaagttcaggagcacggttagggaagggagagggatttgcagagcttgaatatggaatgcttcgctatatgggagctatagatgattcaaccatgatagtaactactggttgccatgggctgagccagcccacaggtgatgacagcagc

SEQ ID NO: 77180 - DNA, 389 bp, Zea mays
cccacgcgtccgggccgttagccaggaatcccggcaacaatgacttccctttcctccgccgtggcactgccgtcctcgtgccgggcccggccggcggggggaagccggagggcgcggatggtggtgacgcgcgcggcggcgtcgagcccgaagctgccgaacgggcggcggctgcgggtggcggtggtgggaggcggccccgccggtggcgccgcggcggaggcgctggccaatggcggcgtggatacagtgctgatcgagcggaagatggacaactgcaagccctgcggcggcgctatcccgctgtgcatggtgtcggagttcgacctgccgctcgacctcgtggaccgcaaggtgaggaagatgaagatgatttcgccgtccaacgt

SEQ ID NO: 77181 - DNA, 412 bp, Zea mays
gcaggaggccctactcttgccttgaatgagtgccagattttggtacagcagaaaccccagggagattcacgactgctggcctctaatctgtgcaggaagaagcgacctcgcagatcacgagatgggcctacgtcagtggcagctgtcatccagcggtgggctgagcgcaacaagcatttggagtatgaggaatctgaggaggcaaagcgaccaagaaaagcacctgcaaagggttcaaagaagggctgtatgaagggaaaaggggggcctgacaatactcaatgtggataccgtggagtgaggcagcgtacttgggggaagtgggttgctgaaataagagagccaaatcgtgtcgacagactctggctgggtaccttcccaaccgcggaggatgcagctagggcctatgatg

SEQ ID NO: 77182 - DNA, 408 bp, Zea mays
cccacgcgtccgccgccgtctagctgacatggctgacactcagttcattgcgaccacattccggccagagattgctaaagtggctgataagatatatgccgtgagacacaagaatagggtgagcaacatcgacgtggtgtccaaggaggaggccctggacatcatcgagcgtgatcagacgtacaatgctagctgacgctgctgctgctgtgtattgattgatctgcaggcagatgctaacgcagacaggatagttcttgttgtgttatggatattctggcctattgttgtagctgtgtatatgtgtgatgcagttacgtaactattggaccagcttgtttggcgcatcaacgttgtgaatgtatcagctaccaccttggcttggtaccagctttaattacatttggg

SEQ ID NO: 77183 - DNA, 393 bp, Zea mays
gagaggagtgggagacccgcgagaggctgccgtgtagggaccgtagactcagcgactgcgaaggagggataaggggatggccgggatcggaccgatcaggcaggactgggagccggtcgttgtgcggaagaaggcacccaccgccgccgccaagaaggatgagaaggccgtcaacgccgcgcgccgcgccggtgcggagatcgataccatgaagaagtacaacgctggtacgaacaaggcggcatccagcggtacatccctcaacaccaagcgcctcgacgacgacaccgaaaacctcgcccatgagcgagttccaagtgatctgaagaagaatctcatgcaagcaaggctcgataagaagctgacacaggcacaacttgctcagatgataaa

SEQ ID NO: 77184 - DNA, 408 bp, Zea mays
cccacgcgtccggcggtggcttcctcgctttcttctgcttccagaagaaggcgtgactttcgctctatggacagagataaaaaaaatgtcggaggttgacgatggacaagattaccgggttatcaaatttttttagtgataagcaattttttggcacaaatttaaagaaataactcagtttgtctagaatataattgtatctagacatttaagaaatgaaaacaacacatgagtcagccaaacgaggaatggaggaaagaaattagtgtaaagcaactccaataattatctaaaaagagcatgctaaaatcatatttaataagttgctaaatagctacgggagtaaaaaataagaaaaattctctgttgagggtaatgcttcgtagccgaagatcctagaaagaacac

SEQ ID NO: 77185 - DNA, 427 bp, Zea mays
cggacgcgtgggccttatataccttcggaaggtgaaggttggttaagcttttatgaacttctggaggccattgtcgatcagccaccaccttctgcacctgcagatcagttctctccagaattctgctcatttatctcctcttgcatacagaaagatccggctcagaggatgtctgcttcagaactcttgaatcacccttttttgaagaagttcgaggataaggacttaaacctggggattcttgtggagaacctggaacctccaatgaatatacccgaatagcctgtcgtttttagtgatgaagcctttgttgtgccttcagggtttggcctcgaagcctcttggcatctgctcctcaactgcagcctcgctacctgaatatgctataacatcattgtatgattcaagccccttatctgagcataag

SEQ ID NO: 77186 - DNA, 409 bp, Zea mays
gttgcccagactcggagggagttggtgcctctgtgtctctgtgtgtgtggagatggaccccaagttccccccacccccaccgctaaacaaaacggagcccaccaccgcgacgaccaccaccacctcgaccgcgcagcagcagcagcagcagctggatcctaaggactaccagcagcagcagcagcagccggcgcagcacctgcaaatccatatccaccagtcgtagcaggacggaggcggcggagggaaggagcagcagcagctgcaggtggtggcgcagcccggggagaggaggcagcaggcgctcgcgcccaagcggagctccaacaaggaccgacacaccaaggtcgacggcatgggccggcggatccggatgcccgcgctctgcgccgcgcggatcttccagctc

SEQ ID NO: 77187 - DNA, 393 bp, Zea mays
ctgtcctggcatgtgccaatcctaccgaatcacgttacaacccaaggctttctgtaattgacaacattcacttagccccaactctactttcaagattcgacctaatttatcttatcttggacaaggcggatgagcaaactgataggcgcctggcatagcatattgtttcgttgcattttgagaatccaaatttagaggagctcgaggtgttggatctgcagacactagtttcctacataagctatgcaaggaagtatattcagccacagttaactgatgaagttgcagaggagttaactcgtggctatgttgagatgaggaaaagagggaatagccctgggagcagaaagaaggtcataactgcatctgctagacaaatatagagtttgattc

SEQ ID NO: 77188 - DNA, 410 bp, Zea mays
acaccaccgcgaaaccccagcagccgcatcgatggcgcctaaggcggagaagaagccggctgcgaagaagccagcggaggaggagcccgctgccgcgaaagccccggcggggaagaagcccaaggccgagaagcgcctcccggcggccaagtcgtccggcaaagaaggcggcgacaagaagggtaagaagaaggcgaagaagtcggtggagacctacaagatctacatcttcaaggtgctgaagcaggtccacccggacatcggcatctcttccaaggccatgtccatcatgaactccttcatcaacgacatcttcgagaagctcgccggcgaggctgccaagcttgcgcgctacaacaagaagcgcaccatcacctctcgggagattcaacctctgtccccttgtcctg

SEQ ID NO: 77189 - DNA, 410 bp, Zea mays
cacaccaccatccacgcactagtacgtagtaagcgagcttagctactgatcgtcgtcaagcactcgagctcgatctctcgaagcggctagctgctagctgctagcagccaattaatggcgaagccttcgcaggtgctggtgtcggcgctcgccgcctgggcggtggtcctgctgctgctgtgcgccgccgcgccgcggggcgccgacgcagccacggcgtgcgacgccgcgcagctgaccccgtgcgcgggcgccatcatcgggagctcgccgcccaccgcggcgtgctgcagcatgctcagggagcagcagccgtgcctgtgcacgtacgcgcgcgaccccaagctgcagcgctacgtcagctcgcccaatggcaagaacgccatggccgcgtgcaatgtgcccgtgcc

SEQ ID NO: 77190 - DNA, 423 bp, Zea mays
gtcgccctctcacagccgcgcgcgcttcgctacatccgccagcgccgagcccaaggaagcagatcttcagtctaaaatcaccaataacgtgtattttgacataagcattgggaaccctgtggggaagaatgttgggaggattgtcatccgcttgtatggggatgatgttccacaaacagcagagaactttcgtgctctttgcactggagagaaatggtttggatacaacggatccagtttccaccgtgtcatcagcgactttatgatccagggcggagattttgacaaaggcaatggtaccggtgggaaaagcatatatggacgcactttcatagatgagaacttcaaattggttcacactggacctggagtggtcagcatggctaatgctggaccgaaaccaacggcagccagtttttcatt

SEQ ID NO: 77191 - DNA, 426 bp, Zea mays
cgactcgcttctcgccctcagcgacgacctcgtcaagtccaatgttttcgtggagggcgtgtcacacaagatccggaggcagatcgaggacctcgagcgcgccggaggggtcgagagtgggaccctcaccgtcgatggcgttcctgtcgacacctacctcaccaggttcgtgtgggatgagggcaaataccccacaatgtctccgctcaaggagattgttggcagcatccagtcacaggttgccaagattgaggatgatatgaaggtgcgagcagcggaatataataatgtaaggagccagcttagtgcaatcaacagaaagcaaagtgggagcttagcggttcgtgatctttccaatctggtaaaaccggaggatatgatcacctcggaacatcttgtgacacttcttgcaatcgttcccaagta

SEQ ID NO: 77192 - DNA, 427 bp, Zea mays
  unsure (1)..(427): unsure at all n locations
ggcgagggacaccgtctctggccggatcgtcgctcttaaaaaggtccgcttcgataacctcgagccagaaagcgtcaagtttatggcccgggaaatactgatcctaaggagactcgaccaccccaacatcatcaaattagagggcttggtcacctccaggatgtcatgcagcctttaccttgtcttcgagtacatggagcatgatcttgctggtcttgcggcaagttgtgatgtcaagttcacgttgcctcagataaaatgttacatacagcagctgttgtcagggcttgagcattgtcatgacaataatgtattgcaccgggatatcaaggggtcaaacttgttgttggataataatgggattcttaagattgcggattttgggctggcaacattctttgatccacgacatanacgaccaatgacg

SEQ ID NO: 77193 - DNA, 408 bp, Zea mays
ccaaggccgatgccaagctggcggtgaagagcaagggggcggagaagcccgccaagggcaggaaagggaaggccggcaaggaccccaacaagcctaagagggctcccagcgctttcttcgtgttcatggaggaatttcgcaaggagttcaaggagaagaaccctaagaacaagtctgtcgctgcggtggggaaagctgctggcgacaggtggaaatccctgagcgagtcggacaaggctccctatgtagccaaggctaacaagctcaagctcgagtacaacaaggccatcgctgcctacaacaatggcgagagcactgcagctaagaaggctcctgccaaggatgaagaggatgaatatgaagacgagtctgacaagtccaagtctgaggtcaatgacgaggatgatg

SEQ ID NO: 77194 - DNA, 430 bp, Zea mays
cccacgcgtccgcccacgcgtccggtctcctcgtttaaacgggcgaactcaagattgcaacagggtcgtccgccgccaccaattgctagcgcaatcctagccctagcccagcgccccctccggccctccctgcttcgtgcttggtagcgatggcgtcgttttctgaagcgcccccggggaacccaactgctggcgagaagatcttcaagaccaagtgcgcgcagtgccacaccgtcgacaagggcgccggccacaagcaaggtcctaatttgaatggtctgtttgggaggcagtctggtacaacacctggctactcttactcttcggctaacaagaacatggctgtgatttgggaggagaacactttgtatgactacttgcttaatcccaagaagtacattcctggaaccaagatggtattccctggact

SEQ ID NO: 77195 - DNA, 408 bp, Zea mays
cgacggccgctactggaccatgtggaagctgcccatgttcggctgcaccgacgccacgcaggtacaaggagctgcaggaggccatcgccgcgtacccggacgccttccaccgcgtcatcggcttcgacaacgtcaggcagacgcagtgcgtcagcttcatcgcctacaagccccccggcagcgagtagagaccgtggctagatcgacccatggccatgcctctgcctgttgatcggatcaccttcttgcattggttcctctctctctctccctccttttttttccctttatctcatcatttcttttctcctgcatgcaatggttccttttgcttccaacaattctcctgctgatgtatccagcatggcatcatccatctacaattacgtacgtagtgcaacgactgtc

SEQ ID NO: 77196 - DNA, 396 bp, Zea mays
cggacgcgtgggccggcaacgagcacccaaagatggtggtccttcaaccagatcggttcctgagcgagctgacgagcatgtacgagcggagcacggagaagggctccgtctgggtcaccatgaagcgatcaactctcaagggcaaggcacagttgcggaagatggagaataaggggcaggaggtagagcacaggtgcctcgtccgcgcctccaatggcaagaagaacatctccacctcggtttctctaaaggagtacacaaagtttcaagcttcatacgcaacagttcttaaggcccatatgcatgctctgaagaaaagggagaggaaagacatgaagaagactgcagatgctgagaatgcaattgagaccgcacccaagaagcagaagaaagcat

SEQ ID NO: 77197 - DNA, 413 bp, Zea mays
cccacgcgtccgcccacgcgtccgcccacgcgtccggcagccgcgccgctcccggcgctggcggagcagatggagaaggccgcactgtttgacttcaacctgacgctcccggcgatcgcgaccgagttcctgctgctcatggtggcgctggacaagctctacttcacgccgctaggcaagttcatggatgagcgggacgccaagatccgcggtgagctcggcgatgtcaagggcgcctccgaggaggtgaagcagctggaggaccaggcggcggccatcatgaaggcggcgcgcgccgagatcgcggcggcgcttaacaagatgaagaaggagaccaccgcggagctggaggccaagctggacgagggacgcagccgtgtggaggccgagctcgtagaggcgctcgccaacct

SEQ ID NO: 77198 - DNA, 416 bp, Zea mays
cccacgcgttctggcaccggttggcgcgcacgttgcggtagtagctgaggtcgaaggtgtaggggctgcgcgggtccatctccaccatggtggtgtcgtcggcgagccccggctcgcacatctcccgcagctgcgccgcgtacgccttgttcagcgacgggtcctgccccacgtggccgctgtagttgtacagccggtccgacgcgaacgtggtgcactgcgccctcccgatcgtgtggcttcctgcactgcatgcagtcagggattgttccgtgtgtaccaccgtcgtcgatcgatcagtcgtctagctactttgcttgcaggacgtacgtacgtacgtagttggacagctcattggttgtattgtacctgacaacacgacgacgtccttccagcccaaccccttgaagctgaag

SEQ ID NO: 77199 - DNA, 407 bp, Zea mays
cctcttctctgccccaggccagaatcaagggagggtgaagcaccgccgccgtctccgctgccgcacaaagacgagaggaagaggttcccggcgcctccaccaccatgtcgtcgatgatgaacgcgctggcgaactggctggcgaacccgcgccgcaacccgctggcgcgcctccacatgcacgccgtctcctcgcgcctcaggaaatacggactgaggtacgacgacctctacgacccctacttcgatctggacatcaaggaggcgctcggtaggctgcctatggaggtggtcgacgcccgcatccagcgcctcaagcgtgccatggacctccccatgaagcaccagtacctcccggaggacctccaggcacagcaggttccattcagaggatatttgggtgacatg

SEQ ID NO: 77200 - DNA, 427 bp, Zea mays
cttccaccgcgtcatcggcttcgacaacatcaagcagacgcagtgcgtcagcttcatcgcctacaagcccccgggcagcgactagatcgcgcccgccggccgccccccgccggctagctagctagctagctcctgcgtgagctagtagctagtgccatgcgtcgtctctgtcgttcggttttgcttcgggtcaccgtgtaccctttgcttgcttggtttcttctttcctttgttccttttattttcatcatttccccggccatgggtcctttgctttccatcagttctctgctggatgtgatgtatccattgttgcaatcatggccttgcattggctacctctatacgtgctacatggctactgcaacgcctatatatacttggggtgaggaacatgtgaatgcaagctccggctatcatatacatg

SEQ ID NO: 77201 - DNA, 413 bp, Zea mays
  unsure (1)..(413): unsure at all n locations
acaccaccgcgaaaccccagcagccgcatcgatggcgcctaaggcggagaagaagccggctgcgaagaagccagcggaggaggagcccgctgccgcgaaggccccggtggggaataagcccatggcctagaagcgcctctcggcggtcaagtcgtccggcaaagaaagcggcgacaagaagggtaagaagaacgtgaacaagtcggtggagacctacaagatctacatcttcgacgtgctgaagcacgtccacccggacatcggcatctcttccaaggccatgtccatcatgaactccttcatcatcgacatcttcgagaagctcgccggcgacgctgccaagcttgcgcgctacaacaagaagcccagcatcacctctcgggagattcanacctctgtccgccttgtccttc

SEQ ID NO: 77202 - DNA, 424 bp, Zea mays
cgcacttccgctacaccatggagatcaacgcgctggccagggaggcgctcatcaacgccgacggcatcatcgaggagtccttctggccgggcaagtacgccgtcgagcttagctccgtggcgtacggcgcgacgtggcagttcgacacggaggcgctgcccaacgacctcgtcaagcgcgggctggccgtgcgcggggaggacggggagctggagctcaccatcaaggactacccctacgcccacgacgggctcctggtctgggactccatcaagcagtgggcgtccgagtacgtcaacgtctactacaagtccgacgaggccgtggccgccgaccccgagctgagggcgttctgggacgaggtgcgcaacgtggggcacggcgacaagaaggacgagccgtggtggcccgtgctggacacccg

SEQ ID NO: 77203 - DNA, 431 bp, Zea mays
ctcgcgggtcgacacaagcctctacagtgactcgtaggaatatgaaactaatatatatgaaaacagatcctcccctaaaagaattgaaggccctgatggaagaaatcttcagctccagttcagaagtcagttggctcttccaatcttcactggtggaaaagttgaaggtgagcagggagcagctatacatgttgtgctgttggatgcaaacactggatgtgttgttacttcaggacccgagtcatttgcaaaattggatatccttgtgcttgagggtgactttagtaaagaggaagatgaggattggacagaagaagagtttgaaagtaatattgtcaaggagcgtgaagggaagaggcctcttttgacaggcgacctgcaagtgactcttaaagaatgtgttgggaccataagggagcttacattcactg

SEQ ID NO: 77204 - DNA, 406 bp, Zea mays
ggagtatggcctcggcacaggagaaatggaaagaggaatgatgcccaaagatacaactcggcgatttgaaaattgagttgccatttcacttactatcgccgattgcgattggaggtgcggcagctggaatagctagcactttggtgtgtcatcctcttgaggttcttaaggatcgcatgactgtcaaccgtgaggcttatcctagtattgccattgccttcagcaagatctaccgaactgatggcattggtggcctttatgctggcctctgcccaacgttggttggcatgcttccatatagcacatgctactatttcatgtacgagaccatcaagactaactactgccgtgcgcacaagatgaaatctttgagccgtcctgagctgctggttatcggcgctctttc

SEQ ID NO: 77205 - DNA, 419 bp, Zea mays
gcgtgcgagataactcattggtgagagacataagccaaatgccgcaaagcagctatgggattgaaggattgtcacatataacagttgctggtgcgctcaatcatgggatgaaagaagtggaagtgtggcttcagacaataagtccaggtcaaaggacgccaatccacaggcattcctgtgaagaagttttcactgtcctcaaagggaagggtacgctcttgatgggatcaagctcactaaactacccacggcatccacaggaaattcctttctttcagaataccacattttcaatccctgtaaatgatccacaccaggtttggaattctgacgagcacgaagatttgcaagttcttgtgatcatatcgagaccgcctgctaagatatttttatatgatgattggagcatgcctcataca

SEQ ID NO: 77206 - DNA, 407 bp, Zea mays
ggagtatggcctcggcacaagagaaatggaaagaggaaggatgcccaaagatacaactcggcgatttgaaaattgagttgccatttcacttactatcgccgattgcgattggaggtgcggcagctggaatagctagcactttggtgtgtcatcctcttgaggttcttaaggatcgcatgactgtcaaccgtgaggcttatcctagtattgccattgccttcagcaagatctaccgaactgatggcattggtggcctttatgctggcctctgcccaacgttggttggcatgcttccatatagcacatgctactatttcatgtacgagaccatcaagactaactactgccgtgcgcacaaaaagaaatctttgagccgtcctgagctgctggttatcggggctctttca

SEQ ID NO: 77207 - DNA, 391 bp, Zea mays
cccacgcgtccgcgtccatggggtaaacttccggaaaatgttccttgtcatccaaaacttgcagacttcgctaattgtatgaagaagaagggtcgtggtatgtccatttttgtctcgataattgatggtgattatcatgaactagctgaggatgcaaagactgcctgccgccaactagatgcttatattgactacaaacgctgtgagggtgttgcagagatcattgtagctcctaatatgtctgatggtttccgtaccattgtgcagacaatgggcctaggaaacttaaaaccaagtattgttgtgatgcggtaccctgagatctggcgacgtgagaatttgacacagatagcgtcaacatttgtcagcataatagatgagtgcattattg

SEQ ID NO: 77208 - DNA, 372 bp, Zea mays
acgcggaaccggcgagcgcctggcgcgtgccggctacgccgtctacggcctggactacgagggccacggccgctccgacgggctgcacggctacgtgccggatttcgacgcgctggtgctggactgcgacgagtacttcacctcagtggtggcggcggcggcgcagtcgcagtccaaggacgcccagcaacttccccggttcctgctccgggagtccatgggcggcgccctggctctcctcctccaccgccggcgccccgagtactggagcggcgccctgctggtggcgcccatgtgcaagatcgccgacgacatgcggcctcacccgctggtggtcaacatcctcagggccatgagcaccatcatcccgac

SEQ ID NO: 77209 - DNA, 380 bp, Zea mays
tgagaaatctgtgggttcctccttccagcttgtgtttgcaccaattgatgagcattttccggatgatgctccattgatttcctctggctttcgtgtcataccacttgatatgaaaacagatggtgtatcctctggtaggacgctagatttggcatctagtcttgatgtgggttctgctgcaccccaagcctcaggggatgcacctccagatgactgtaatttgagatctgtgctgacaatcgcctttcaattcccttatgagatgcaccttcaggacagtgttgctactatggcccgtcaatatgtgcgtagtgttgtttctgctgtgcaaagggtgtcgatggctatatctccctcccaatctggtctaaatgctgggc

SEQ ID NO: 77210 - DNA, 407 bp, Zea mays
aaaaaaattaccaatttgacccttagccccggtgttatatttggttatttactaaaatccccttttgggggagaaggatggattgttagtgtggatgatttagaagatataattgggggacatgtatggttgggttccatttgtgtacttggcggaatttggcatatcttaaccaaaccctttgcatgggctcgccgtgcatttgtatggtctggcgaagcttacttgtcttatagtttaggtgctttatctgtttttggttttatcgcttgttgttttgtctggttcaatagtacggcttatccaagtgagttttacgggcccactggaccagaagcttctcaagctcaagcatttacttttctagttagacaccagcgtcttggagctaatgtagggtctgccca

SEQ ID NO: 77211 - DNA, 389 bp, Zea mays
agcgcagcagctcccgcggctgctggcgacggcggcggcggcggtagcagccgcgccgctcccggcgctggcggagcagatggagaaggccgcactgtttgacttcaacctgacgctcccggcgatcgcgaccgagttcctgctgctcatggtggcgctggacaagctctacttcacgccgctaggcaagttcatggatgagcgggacgccaagatccgcggtgagctcggcgatgtcaagggcgcctccgaggaggtgaagcagctggaggaccaggcggcggccatcatgaaggcggcgcgcgccgagatcgcggcggcgcttaacaagatgaagaaggagaccaccgcggagctggaggccaagctggacgatggacgcagccgtg

SEQ ID NO: 77212 - DNA, 414 bp, Zea mays
aacctacaggataggttctgtattacagggcaatccgactctactagtaccaataggcagcatacgggagaaaagcactacaccacgaaataggaatcaacaagagaaaaactttgttagaaattagccctttcctgattggtatcagggttgggaagaatggttgggataacaaagaaccatcaggtttgtactttggatacccttataaccatcaaaggtcgttgaaatggctaattcctctaaataggaggcgttgagaacaaagaaattcttggagctatcgttttcctctagcattaatataattcattggtgttaagaaaaacctcttgggggaaggttggcaagagatttcttggaaaaattacagcccccttcggtccataatgagatgggactaattcgattttt

SEQ ID NO: 77213 - DNA, 372 bp, Zea mays
atcgccatcacataaaaccagtgcaagcagaagcagcgcaatggcgagcagcaccatggccctctcctccacagccttcgccggcaaggcagtgaacgtgccgtcgtctctcttcggcgaggcccgcgtgacgatgcgcaagacggcggcgaaggcaaagccggcggcgagctccggcagcccgtggtacgggcccgaccgcgtgctctagctgggcccgctgtccggggcgcccccgagctacctgacgggcgagttcccgggcgactacggctgggaaaccgcggggctgtcggggggaccggggacgttcgccaagaaaccggagctggaggtcaaccagtcccgctgggccatgctggggccgttggg

SEQ ID NO: 77214 - DNA, 381 bp, Zea mays
gctagcgcttatagcttgtcagccatggccaccgccgccgcgtctagcctcctcaagtcctccttcgcgggctcccggctcccggccgccacgcggaccacaccggcgtccctcgtggtggccaccggcccgcgcggcgccggcgcggggcccatctgcgcgtccatgtccatgtcctcctccaacccgccctacgacctgacgtccttccggttcagccccatcaaggagtccatcgtgtcccgcgagatgacccgtcgctacatgacggacatgatcacctacgccgacaccgacgtcgtcatcgtgggcgccggctccgcggggctgtcctgcgcgtacgagctctccaaggaccccgccgtgagcatcgccatcgtg

SEQ ID NO: 77215 - DNA, 362 bp, Zea mays
accacgcgtccgcccacgcgtccgaaggtccttgattacaagactcaacaaagcagactctttccgttgctggcttcagcatatgcatttagatttgtgggtgactggctgaagtggctatacatggatgtcactcagaaactggaagctaaagactactcaacactgcaagaagcccatgcctgtactgctggtttgaaggctgtgacaacatctgcaacagctgatgccattgaagaatgtagaaagctctgtggcggacatggttacctgaacagcagtgggcttcctgaattgtttgctgtctatgttcctgcttgcacttatgaacgagacaatattgttctgcttttgcaggttgc

SEQ ID NO: 77216 - DNA, 405 bp, Zea mays
ttttcccaactgctgcagatgattgaaggatgccttccttattatgataagaaaaatgatgaaattgagaaggcacataattctaaagaaaggcctccttttcgagctcctccaaagcattatgcacatgggttaagagagtaagcactcattgtttcccctgtatagtactccctccgttttttttatttgtcacgttttagtttaaaaataaactatcggacgacaaatatttaagaacagaggtagtagcaaacactcttgtgtcttgctatgcatttcaaacttttagcaaacaactttctgcaagtaatgctcaatttaactacttgtatttgtgaaaattaacgtgttgtatttcctccacataccattattgttagtgattttccctttggtaatttc

SEQ ID NO: 77217 - DNA, 414 bp, Zea mays
atgacatccctgattggtgctttgtcgagatttatggaaaagaagggaaaaagtacttctcagagtctccttcagtagacgatctttgtcaattccaccagaagtcaccaatttcacatattgcaaaggtcaagacaccaacactctttcttcttggagcgcaagatctcagagttcctgtttctaatggcctgcagtatgcaagggctttgaaggagaggggaatcgaaacgaaaactattatcttcccagaagatatccatggaattgacaagcctcagtctgatttcgaaagcttcgtcaacataggggtttggttcaagaagcacatgggcaaataaacattagtgcttcccattacattcatgatttactttttcattgttactaaatgcctgtaactgggtcaaagta

SEQ ID NO: 77218 - DNA, 225 bp, Zea mays
tgccagttcccctacaacttcactgggtgccaagacctcgccaagcagaagaaagtccccttcatcagcgacgacctccagattgagtgccaagggaacggagaagttcaagtgcggcgccaacgttttctggaaatggtgaaacagctagcaacaccgtctgatgggaatggatgagatcatcacctgtcctgtcgaccccagatatgtccaaactgcagggaa

SEQ ID NO: 77219 - DNA, 411 bp, Zea mays
  unsure (1)..(411): unsure at all n locations
accacgcgtccgcgcgtcggcggcgtcgtcaccaactgggcgctcgtgtccatgaaccacgacacgcagtcctgcatggaccccaacgtcatggagggcaaagtcgtggtcagctcctgcgggcacgacgggcccttcggcgccaccggcgtcaagaggctccaggacatcggcatgatcagcgccgtgccggggatgaaggcgctcgacatgaacaccgccgaggacgagatcgtgcgcctcacgcgcgaggtcgttcccggcatgatcgtcaccggaatggaggtcgccgagattgactgcgcccccaggatgggcccgacgtttggcgccatgatgatctccggccagaacgcngcgcacctggcgctcaaggccctgggcaagcccaacgccgtggaccggaccatg

SEQ ID NO: 77220 - DNA, 331 bp, Zea mays
accacgcgtccgcccacgcgtccggaaggggaacccgaacccgcggagctactacaagtgcaccacggcggggtgcccggtgcggaagcacgtggagcgcgcgtcccacgacacgcgcgccgtgatcaccacgtacgagggcaagcacaaccacgacgtgcccgtgggccgcggcgccgccagccgagctgctgctgctgcggcggcgggttccggggccttgatggccaccggcggcggccagctcggctatcagcagcagcagcagcagcagccatacaccctggagatgctgagcagcggatcgtacggcggcggccgcggcgggtac

SEQ ID NO: 77221 - DNA, 338 bp, Zea mays
aggacgcgtgggctcagtaacaacaatggttctgagcttgataatacctcttttaacaatgggcatggtatggccctggactggaccagcagcatcagcgactcttgccccttatttggttggactggttgtacagtttgcatttgaacagtatgcacggcatcggaaatcaccttcttgggcagtgattcctaatatcttcaagtttgtgatctgatcaatcgtacctgatatttgggaactgggacttgggattggctatcagtgtatcaagtacttctggagtctactgggagcattttgaggaatcatgggcagtaactaagactgggaaatgt

SEQ ID NO: 77222 - DNA, 384 bp, Zea mays
cccgcaccggttcggcgacggcagtgggcaaccggcgcccgggcgtggggctcaaaccggcggtggacgcaatcgtcgccgggctgcgcgccgccggctccaacccacgccggacgctgttcctggacgacagccagaggaacatcgccgcggggaaagcgctcggcctccgcaccgccctggttggcaagagggcgaggagcaaggaagcggactacgcggtggagaacatcggcgcgctccggcgggccatcccggagatctggggcgaggccgctgaacgctcctccgacaagctgccggtgccggccgtgagcgtggtgaggtcgacgacgtccgacctggactccatcatcatccagcccacgtccatccacgcctaat

SEQ ID NO: 77223 - DNA, 390 bp, Zea mays
gcaaccggtccagcactttcacgctcagctccagcaatggctgcctccaccatggcgatctcctccacggcgatggccggcacccccatcaaggtgggctccttcggcgagggccgcatcaccatgcgcaagaccgtgggcaagcccaaggtggcggcgtccggcagcccctggtacggccccgaccgcgtcaagtacctcggccccttctccggcgagcccccgagctacctcaccggcgagttccccggcgactacggctgggacaccgccgggctgtccgccgaccccgagaccttcgccaagaaccgcgagctggaggtgatccactcccgctgggccatgctcggcgcgctcggctgcgtcttccccgagctgctctcccgcaac

SEQ ID NO: 77224 - DNA, 390 bp, Zea mays
aaccatctaccagcgactcatcgagcgagagcagcacacacgcagctagctaggagcagcagcagagcagcggcgatggcggcctccatgatctcctcgtcagctctggcggtggcgcctcagggcctgccgcccctcggccgccgcgcctcctccttcgccgtcgtctgctccaagaagaagatcaagaccgataagccctacgggattgggggtggcctgaccgtcgacgtcgacgccaacgggagagagggcaagggcaagggcgtgtaccagttcgtcgacaagtacggcccgaacgtcgacggatacagcccaatctacaacgaggatgagtggtctcccaccggggacgtcgacgtcggtggggacactgggcttctgatccgg

SEQ ID NO: 77225 - DNA, 414 bp, Zea mays
aaacacgcgtccggtcaagcttgcttagctagccgccatggcctccctcgccgccgtctccgtgaagcccgtggccatcaagggtctcgccggcagctccatctccggaaggaagctcgccgtcgccaggccgtcggcccgctccatccgcaggccccgcgcagccgccgtggtggccaagtacggcgacaagagcgtctactttgacctcgacgacatcggcaacaccaccggacagtgggacctctacggctctgacgcgccctcgccctacaacccgctacagagcaagttcttcgagacgttcgcggctccgttcaccaatagaggtctgctgctcaagttcctgctgctgggcggcggctcacttctggcctacgtcagcgcgtcggcgtctaccggacttcctgccga

SEQ ID NO: 77226 - DNA, 433 bp, Zea mays
ggtccacgcacgcgtccgaatggcattgtcatccgcaacccatccagagcgaatccagctaacccttcaattgagcttggacctgagttcaagaaggttgccaatttccttgctcggttcaagtccatccccagcatagttgagcttgacagcttgaaggtttctggtgatgtctggtttggctctggaattacactcaagggcaatgtgacaattatcgccaagcctggagtgaagttggagattccagatggagacgtacttgagaacaaggatgtcaatgggcctgaggatctttaagcaatgtctgtcatcaccagtttttcccaaggacatgtcacaggaactgccgagcctaatcactcctactgagctctatatttttgtaattttcatgtgcattccgattccgctgcgagggtcatgtgagccc

SEQ ID NO: 77227 - DNA, 188 bp, Zea mays
aacctcatatcatcgtggaccacttaatatatggttacagcagatgcaagcggatgaaccaagatgcacgtagacacacctacgtacatgagcacaacgactgacgccaagcttgcaaagagagatagcatcctggccagttcggtgtctctctctctcacacacactacacaagacttacgcccggc

SEQ ID NO: 77228 - DNA, 354 bp, Zea mays
acgcaggacatcatcaacctcaagccactcatcgacaagaaggcgtggccgtacgtccagaacgacctccgcctccgggcctcctacctgcgctacgacctcaacaccgtcatcgcttccacgcccaaggaggagaagcatagcctcaaggatctcaccggcaagctcttcagcactatccacgatcttgaccatgccgcagagatcaggatcaccccggaggccgaaaaatacgtcggagcagccatagatgcgctcggcgacgtcctcgccaatctaccctagatggaagctaaaagatcggttaacgatggccacctaatttcgggacttgtgtttgttcatatggggccg

SEQ ID NO: 77229 - DNA, 391 bp, Zea mays
tacacacacgtctggcaggctctagcttcaaagaggaaggagcttgctgaatttaaagggaaattagaaaacgcaagaattgaagccaatttagtaagagttgttgtagaatcactcagctcagagcttgatagggagaaagcttcacttgctacattgcagcagactgagggtatggcatgcatcacagttgcttctcgagaagctgagctcgacaggacagagcaagagatagaattggtacataagaaagaagcagaaactcgggaaatgatggcggagcttccaaggatgttgcagcaagcagcccaggaggcagacgatgccaagatggcagctcatttgggacaggaagaactgagaaaggccagggaagaagctgagcgaacta

SEQ ID NO: 77230 - DNA, 398 bp, Zea mays
agatcggcttgccccgtcgatttcgccaacccctcgacccgatcgactccattgatcgtacctcgtcgtccggttgtcgatggccaggacatctttcaaaatggagcacgatctcgagaaaaggcagtccgaatctgccaggatcagggataagtatcccgacagaattcctgtgattgttgagaaagctggcaaaactgatgtccccgagattgataagaagaagtaccttgtccctgctgatctcactgtcggccagtttgtctatgtggtgaggaagagaatcaagctgagcccagagaaggccatctttgtcgttgtgaagaacaccttggcaacaactggctctttgatgtctgcaatctaagacgagaacaaggacgaggatggcttccttt

SEQ ID NO: 77231 - DNA, 437 bp, Zea mays
tcgcgggtcgacacacgcctctagagtgactcctaggaggagagagagaagtgggagacccgcgagaggctgccgtgtagggactagggaccgtagagtaagcgacagcgaaggagggagagggggatggccgggatcgggccgatcagacaggactgggagccggtggttgtgcggaagaaggcacccaccgccgctgccaagaaggatgagaaggccgtcaacgccgcgcgccgctccggcgcggagatcgagaccatgaagaactacaacgctggtatgaacaaggcggcgtccagcggcacatccctcaacaccaagcgcctcgacgaatgacacagagaacctcgcccatgagcgagttcaagtgacctgaagaaacatctcatgcaagcaaggctcgatcatgaagttggcccaggcacatcttgctcaga

SEQ ID NO: 77232 - DNA, 355 bp, Zea mays
atacaatctcagtagaggctccgtagctggcattcttacacttgatacagtggcagactatcttccgagaaggggacccctgaagcagagaaggacaggtattgcgtatatagcaaacgtcgcggtgcggaaggaggagcgacggaaagggatcgcgaagatgttggtccaagaagcagaggctcgggcaaggagctggggatgccggtcgatggcactgcactgcgacgtaaacaacgtggccgcgctacgcctgtacagaaaccaaggcttcaagtgcatacgagtgccggaaggagctaaatggcccgaacccaagatagctaaaggagcggagtacaccttcatgatgaag

SEQ ID NO: 77233 - DNA, 407 bp, Zea mays
agagacgcttcttggtcaaatttagaccttgatcctggactattcgcacttcttggcgcggaatctttcctcggtggaacaatgaggatgactgtgtcagtctgcgtgatacttctggagctcaccaatgacctccttatgctcccgttagtcatgctcgttcttctgatatcaaagaccatagccgacagctttaacacatgggtttatgatcagattgtggtgatgaaaggcttgccattcctggaagctcatgccgaaccatacatgacgcacttggttgctagcgatgttgtgtctgggccactgatctccttttcaggcgtccatagagtggggaatatcgttcaggcgttgaggatcacaggccacaacggatttcaagtggtcgatgagccacctctatc

SEQ ID NO: 77234 - DNA, 406 bp, Zea mays
gcttggctagataggattaattagttcttggttattgattggtgaagtcttgtagttgcatatggttgttcattttctttcttaacacttgctttagacttgaatgaattaagaagggggaaacacttttgtgggtgtaaataatttagttcaagcaataggtaatccaacgatcatgatgcttgttatggtttagtagtagcttatctatgcttttgtgctcgcttttacctgtggttgcatatcaagtattattaaaatgccttgttgtctaaatatgatatattgtgttgggggccttcggcttccgaaggtcctcaaaaacatgatttaacaatgtttctggagtataatgtgtgaacaggtatcttcggacttgaatcagaaagggagaagctcacaagat

SEQ ID NO: 77235 - DNA, 369 bp, Zea mays
acgggtttctaggactgattgcatgctcagtaccactgctacattccccaaaatcagctgctcctggcctctaaggtttaagcgcaatgatgttgttgtaagagcaatatcggaagagtgtggcccgcaggggcttcccattgatctcagaggtaaaagggcattcattgctggagttgctgatgataatggctatggatgggcaattgcgaaggcacttgctgcggctggtgctgaaattcttgtgggtacatgggtgccggcacttaacatatttgagacaagtctgaggcgtggaaagtttgctgaatcacggaatctgccagatggatctcttatggatattgtgaaactctagccacgtgatgc

SEQ ID NO: 77236 - DNA, 391 bp, Zea mays
  unsure (1)..(391): unsure at all n locations
ctcgttgttcaacacaatcctctataataagtcctattacggcaagcaaccacgggcggagctcggagcgtcctcctcctcccgtctataaattcccctccttttcttcctccatatataagggccatcagatccaagaagagggaagagcaccaatgatcttcggcgcccgttcaggatccacatcttcccgagcgaattcatggttgacctcttcctccttctgaccggcgggggggggcttggggatggcgggtgantctcaccaatcaaattttcatgtccgatctctacattcagatcccaactgccttcgatcccttcgatgacgccaatgcttgggactctggtgcagcaccagggtcaaacgactagcttcaaattcgcatcc

SEQ ID NO: 77237 - DNA, 400 bp, Zea mays
caacaccatttcagcatcatttcctgggcttggttccttagttagtgatcttcacaggtccttaattaaacaatatgggacttctttaagtctagaacacaagagggttcctgcaaatgcggctagcactcaattttctgaagcattggcccaagcatggtctgagtttaatattgacagtgctgtaattatgatgattgttcagccagaagagagaaatatgtatgatcaatactggctttccaaacatttgcaagactcacatggcataacaactataaggaaaaccttatcgcaggtggaagcggaaggccaggttctcccagatggaactcttcttgtacgtggccagaaagttgctgtaatgtattttagagctggctatgcaccaaatgattac

SEQ ID NO: 77238 - DNA, 435 bp, Zea mays
ctcgcgggtcaacacacgcctctacactgtttccaatatccttcgcgccgtcgcgctccaggagaagcccggcctcgtcatcctcggcaagcaggcaattgatgatgactgcaaccaaactggacaaatgttacctggattgctcaagtaggcacaaggaacctttgcctcgaaggttacattggacacagaaaaacaaaatgctactgttgagcgagaagttgatggtggaattgaaaccatctgccttgatctgccagcagtgatcaccacggatttaagacttagccagccaacatatgcaactttgcccaacataatcaaggcaaaatccaaagttactaagaaagtcgccgctgaagaccttggagtagatattacattagacattgaggtgattgacgtcaatgaatcaccacaccgaaaatcaggggt

SEQ ID NO: 77239 - DNA, 302 bp, Zea mays
taacgaggccttcgccgagctcaaggtcaaggagctcaagaacggccgcctcgccatgttctccatgttcggattcttcgtccaggccatcgtcaccgggaagggcccgctcgagaaactcgctgaccacattgcggaccccgtcaacaacaacgcttgggcctacgccaccaacttcgtccccggcaagtgagggatgcgccgccggtgacctttaggtgtccggatgcatgtgagcgcacgctggttttcggtttgtgccatgatgtacactattgttcaatcgacagggaatacttgtg

SEQ ID NO: 77240 - DNA, 418 bp, Zea mays
gggtcgacacaagcctccataacgcggcatctaagctatccgttgagacaattgagaaaatgatggaagatccagctgtgcagaagatggtgtatccctacttgcctgaagagatgcggaacccaaattcatttaagtggatgctgcagaatccaatgtaccgccaacaactacaggatatgctaaataacatgggcgcaactcctgatcaatgggataaccgcatgcttgatcaccttaagaacttcgaccttagcagtccagaagtgcggcagcagtttgcgcaagttggcatgactcctgaggaagtagtatcgaaaataatggcaaacccagatgtagctgttgcattccagaatccaaaaatacagacagccatcatggactgctcgcagaaccctcttaacattgtaaaata

SEQ ID NO: 77241 - DNA, 208 bp, Zea mays
ctccaacgtaaagtgagtcatatcaccgaccacctcgctgaccctgtcaataacaacgcctgggcctacgctaccaacttcgtccccggaaagtgatcgagggcatagacatagctgtatccgtgtagcgtagacatacgtgctcggagtatgtcctgcaggagatgtagcagtatttgtggtgaacggaccataggctcagagattg

SEQ ID NO: 77242 - DNA, 392 bp, Zea mays
aacacacgtccgcgcctcgtatgcataccactccctcttcgcctatttcgaccgcgacaacgtggctctcaaaggatttgccaagttcttcaaggaatccagcgacgaggagagggagcacgctgaaaagctcatggagtaccagaacaaacgtggaggcagggtgaggctccaatcgattgtgacgcctttaaccgagtttgaccaccctgagaaaggagatgctctgtacgctatggagctggctctggccctggaaaagctggtcaatgaaaagctgcacaacctgcatggtgtggcaacaaggtgcaatgatcctcagctgacagacttcatcgagagtgagttcctcgaggagcaggtggaagccataaacaagatctccaagtatg

SEQ ID NO: 77243 - DNA, 430 bp, Zea mays
  unsure (1)..(430): unsure at all n locations
gccaggttgtgttcactgctgaggatgctgaagcatggcattcccaagggaaagctgctattctggtaagggcagagaccagccctgaggacgttggtggcatgcacgcagctgtggggattcttacagagaggggtggcatgacttcccacgctgctgtggtcgcacgtgggtgggggaaatgctgcgtctcgggatgctcaggcattcgcgtaaacgatgcggagaagctcgtgacgatcggaggccatgtgctgcgcgaaggtgagtggctgtcgctgaatgggtcgactggtgaggtgatccttgggaagcagccgctttccccaccagcccttagtggtgatctgggaactttcatggcctgggtggatgatgttagaaagctcaaggtcctggctaacgccgnataccctgatgatgcattgac

SEQ ID NO: 77244 - DNA, 436 bp, Zea mays
aggacgcgtgggccggcgatcgcgaccgagttcctgctgctcatggtggcgctggacaagctctacttcacgccgctaggcaagttcatggatgagcgggacgccaagatccgcggtgagctcggcgatgtcaagggcgcctccgaggaggtgaagcagctggaggaccaggcggcggccatcatgaaggcggcgcgcgccgagatcgcggcggcgcttaacaagatgaagaaggagaccaccgcggagctggaggccaagctggacgagggacgcagccgtgtggaggccgagctcgtagaggcgctcgccaacctcgaggcgcagaaggaggaggctgtcaaggcgctcgacgcccagatcgcctcgctcagtgatgagatcgtcaagaaggtgctcccatccgcgtgatgaaaccaaaccggccctgccttat

SEQ ID NO: 77245 - DNA, 225 bp, Zea mays
taaagtcactcgggcggacgcgtgggcgccttcaagttcgccatcgacaaggacgtcaggaacttccaggtcctcaaagagatgtacaacgagtggccattcttcagggtcaccctggacctgctggagatggttttcactagaggatagttcggcactggcagattgttcgaccatatgcctgtcgaggcatttgacataccctggaggatgccgctcacggac

SEQ ID NO: 77246 - DNA, 427 bp, Zea mays
acggtcgcttgggcggacgcgtggggcaagtcgcatcgcacgtacggtctcaggcgcatcggcctcgccgctgcacaacgccggagacgagacgacggcggctgcgggatgacggtcttccacttcctcaactgcgccttcctcaccttcggccctcacgtcgtctactactccgccacgcccctgtcagagtatgatacaatcggcacttctataaaagcagctgctgtttatcttggaactgcgcttgtaaagcttgtttgcttggcaacattgctcaaagtacctgagaatgatagctttgacccctatcaggagttaatgaaagtttttattggattcatagatgtagctggactgtattttgctttgacccagctgacccacagaaacatctctcagaatcataagttccaggctgttggtc

SEQ ID NO: 77247 - DNA, 424 bp, Zea mays
gggtcgaggccgcgtccgcgtacacgtagtggactgagcttgtgcgacaccgcccgactgtaggtcaagacaacgagccccaaaaagtactgtgttcggccaaacaacggcatggtggcgccccggtccaaagctgacgttgttgtcacaatgcaagcgcagcgggacgcgccaccggacatgcattgcaaggacaaattccttgtgcagagcgccatcgtggccaaggagaccatgccgaaggaagtcactggagacatgtttaccaaagattcaggcaatatagtggatgaagtgaagttgaaggtagtttatacagcgccatcgtcctctcaaagcgagggatttgaggatggtaatctcggcagtttgagttatcaagaggaaacaaaagaacccaaagaatcaggaaaaataatctctg

SEQ ID NO: 77248 - DNA, 384 bp, Zea mays
aaaaaatccagcgggacatggcagagcgtgggcacagccttgaaagcatcaaggccagtatcgaggccaggaaaccagattttgatgcctttattgatccgcaaaagcagtatgctgatgctgtgattgaagttctgccgacccagttgattcccgacgacaacgaaggaaaggtgctgcgtgttaagctcatcatgaaagaaggggtgaagaacttcaacccggtttatctctttgacgaaggatcgaccatcagctgggtgccttgtggaagaaagctcacatgctcttaccctggcatcaaattttcctatggcccggacacttacttcggaaacgaggtatctgttctggagatggatgggcaattcgacagactagatg

SEQ ID NO: 77249 - DNA, 401 bp, Zea mays
gaggcggtcaacaccgcctgtcatgcaatcaaccgtctctatcttcataagatctacagaaagactgcttatgagcttctcactggaaattaagaactaccttgtgaagccataaagaaacttgcaataggtgaagtgagacctcaagaaaaggatgatgaggaaggaactttctggatgaccaataaggttgttgatgtaggtgcaaaggtggtgagtgacaaagtctccacccaagcaaacccatcaacctcaagtcatccaagccatgaagaaaatcatcaaaggatgccaacagtggtagaagatgaacacaaaagcattgacggtgaagtgtctcttgatcaagtgaattatgacgaggagcaaatccaaagacaaccataagtgcctcatccaag

SEQ ID NO: 77250 - DNA, 427 bp, Zea mays
aggacgcgtgggcggacgcgtgggcggacgcgtgggtttttttttttttttttttttttttacggtcgcatacaaccacggtcttaagcttcgtctgcaccaacgcatgcatagatcgatcgaactcacgggtcaggctgaacaaaaatacagtcgtagctaggaataatcgacggatgagttcagagcgagaggccggagtcgtcgtcctcgtcgagcgtggaggtgtagacggtgtagagggaccagatgaggccgaagacgcccagcaggatccaccccagcaggttgttgctgagccccaggctgagcccggtgccctccgtcgacatccgctcgtccaccagcgccagcgcgggcgacgtggtcaccgcgctggtggccacggccagaagctaacaacaagcgccgttgttgccgtcccgcc

SEQ ID NO: 77251 - DNA, 334 bp, Zea mays
aaatcaatgggaagacagctctgattgctcatttccagaactctagtttgatgaatgaggacaaacgttgccgccccatactcttccactcagatggtcctaatgcatgagatcaggaacctttccctatgggtacaaacatccgagccaggtctgggagatcgcggacttcctctggtgaagaaaatcaccatgatatccagacagtcttgaccaacggtgacacttcttccaatggagctgagacttcaggtcccaccatggacactgagtagctgaactgcagcttgttgcgttgctgaccacaaagggccaaactataactttttgcaaa

SEQ ID NO: 77252 - DNA, 415 bp, Zea mays
gagcacctgctccttggactgcttcgtgagggtgaacgtgtggcggctcgtgtgcttgagagtctcggagctgaccccagcaatatccgtacacaagttattcgaatgattggtgagaccacagaagctgttggtgctggatttggcggcggcagcagtggtaataagatgccaactcttgacgagtatggaactaatttaacaggattagcagaggagggaaaattagatcctgttgttggaaggcagccacaaattgagcgtgtggtacaaattttacgcagacgaaccaagaacaatccctgcctgattggagagcctgctgttggaaaaactgcaattgctgaaggacttgctcagcgcatttctacaggcgatgtacctgaaacaatagaagggaagaaggtcataaccc

SEQ ID NO: 77253 - DNA, 428 bp, Zea mays
cttttgcaccacaaggtcgaggatgtcttgcaactgcggatcaagctgcggctgcggctcaagctgcaagtgcggcaagaagtaccctgacctggaggagacgagcaccgccgcgcaggccaccgtcgtcctcggcgtggccccggagaagaaggccgcgcccgagttcgtcgaggccgcggcggagtccggcgaggccgcccacggctgcagctgcggtggcaactgcaagtgcgacccctgcaactgctgatcacatcgatcgacgaccatggatatgattattatctatctagcttgtggtggtggttgaacaataataagcgaggccgagctggctgccatacataggtattgtgtggtgtgtgtgagagagagagaaacagagttcttcagtttgctatctctctctgcatgtttggcgtcag

SEQ ID NO: 77254 - DNA, 382 bp, Zea mays
atctgacccgcttttctccatctccacttggtccctctctcgcatggcggcggcggcatcggcgtcgacgccgcagggggtggcggagcggcggggcatcccggcggcggccttcgtcgaggacgtcgaggcctacctccggcaggccgggctcgacgttaactccgccctcgccttcctccaggaaaggttgcaacagtacaaaatactggagatgaagcttctagcacaacaacgagaccttcaggcaaagattcctgatatagagaagtgtttggatattgtttcaacattacaagctaaaaaggatttgggtgaggcacttataactgattttgaattatccgaggggatatactcctgttggaaaatcgaggatact

SEQ ID NO: 77255 - DNA, 420 bp, Zea mays
agacgctccagcagtccagcactcggagctcgcgcgcccgacggcccaccatgatcatccccaagaagaaccgcaatgagatctgcaagtacctcttcaaggagggcgtgctgtatgccaagaaggactacaacctggcgaagcacccacagattgatgtgcccaacctccaggtgatcaagctcatgcagagcttcaagtccaaggagtatgtcagagagaccttctcctggcagtactactactggtacctcaccaacgatggcattgagcacctacgcaactacctgaacctcccgtctgagatcgtgcctgccacgctcaagaagtctgccaggccactgggccgtccatttggctctggccctcctggtgaccgcccaacgggccctggtcgttttgaagacagaccaaggtttg

SEQ ID NO: 77256 - DNA, 391 bp, Zea mays
atgccccagccgaacctgctatcaggacagctgcggccccggctgcgccacccaaggacacagaaaggcagctgtctaaaaaggagttgaaaaagaaggaactagcagaacttgatgcagtattggctgagctgggactctctgcaaattctagcagcactgcacaggatgctgagaagaaaggtaccaaccaaattggtgatgcagagaaaaaggaagatgctcctgctcctcccgagagcaaggcctccaagaagaagaaaaagaaggacaagagttcaaaggagggaaaagaaacacaagaagcacttgatgggtcagaggagactgccagtgcaggacctgatgaagatacttctgctgtggatgtgaaggagcgcttgaagaagat

SEQ ID NO: 77257 - DNA, 431 bp, Zea mays
agcgcactactcctcggatagccacggcagcagcagcagccatggcttgctccgcgcaccttgtgtcccagagcctctactcgtcccaccgcgccagcccgggcgggcctaggaatctccgttcccagggccgaccgccggcgcgggcgtctccctctgcgaggcctggctcaagggtcagtggctgccggggtgtcagcctgagagtcgccgcgtcgttcgagcagggaaggaggcaagtggaggtctcttatgacccacaagcgaggtttaaccagatagcagaccaaattgacaaggatgctgggatgacacggcttaacctattctcaccttgcaaaattaatgtgttcttgaggataacgggcaagagaccagatgggttccatgacctggcttctctatttcatgtcataagtttgggtgatact

SEQ ID NO: 77258 - DNA, 389 bp, Zea mays
agacggcaagaacgagcaccagttctacctgtggttcgacccggccgccgacttccacacctacaccatcatctggaatcacaagaacgtcatcttcaaagtggacgacctcttcgtgcggtgcttcaagcggtacccggacctggcgtacccgggcgggaagcccatgtctgtgcacaccacgctgtgggacggcagctactgggccacgcagcacgggaaagtgaacgtggactggtccgccgcgcccttcgccgtctcctaccgcggctactccgccgacgcctgcgtgcccgaccgcgacggccgcccgctctcctgccccgccggcaccgaaccgctggatgagccgccagctcgaacccgccgagtggtgcaccgtcgcctgg

SEQ ID NO: 77259 - DNA, 369 bp, Zea mays
atcaaaattgttccccaaaaaagatgtagtgaacacattgaagaagatgtttatagggcaagcagtctatggaccaattattaactcagttttcttctcatacaatgcacgattacaacgcgacactgttgctgagattattgcaagattgaagagggatctaattcccaccatcaaaagcgggcttttatactggccaacttgtgatttcattactttcaagtttgttccagttcatttacagccgctagtgagcaattcattctcatttctgtggaccatctacataacatatatggccagcttaaagaaatcagatgtggacgtggaccccagtacctaagtgttgtcgagtgactcaacatggct

SEQ ID NO: 77260 - DNA, 367 bp, Zea mays
accacgcgtccggcatttccccttccccgcaccgcaccgcacccaacccccgtcggagagagagatggcatcggtggcggagatgcagcccctcgcgccggcggggtaccgccgcgcgccggagatgaaggagaaggtggaggcgtcggtggtggacctggaggccgggaccggggagacgctgtacccggggatctcgcgcggggagagcgccctccgatggggcttcgtccgcaaggtctacggcatcctcgctgcgcagctgctcctcaccagcgccgtctccggcctcaccgttctccaccccaccctcaacgccaggctctccgaatccccgggccttccgctcgtgctccgccgttcctgc

SEQ ID NO: 77261 - DNA, 301 bp, Zea mays
aggacgcgtggggcgactacggctgggacaccgcggggctgtcggcggacccggagacgttcgccaagaaccgggagctggaggtgatccactcccgctgggccatgctgggcgcgctcggctgcgtcttcccggagctgctcgcccgcaacggcgtcaagttcggcgaggccgtgtggttcaaggccggctcccagatcttcagcgagggtggactggactacctcgggaacccgagcctcatccacgcgcagagcatcctcgccatctgggcctgccaagtcgtgcccatgggcgccgt

SEQ ID NO: 77262 - DNA, 395 bp, Zea mays
cccacgcgtccgcccacgcgtccgtcgacgaacaactgagaagagctgcgcctgcgcctgcgcctgcgggaaagggagaacatggtggggaagaagaggggtgttatctccccgctggaccatctcgctgggctgctggaggtgcgcgtggtgaggggagtggacctcgccatccgcgacctccgatccagcgacccctacgtcgtccttcgcatcggcaaggcgcagaaagtgaagacgcgagtggtcaagaagagcatcaatccggaatggaacgaaaaactcaccctctctattgaagaccctgccgttcctattagactggaagtatttgacaaggacactttcgttgatgatgcaatgggtaacgcggagctggacatccgcccgttagt

SEQ ID NO: 77263 - DNA, 393 bp, Zea mays
gctatttaagcaagcatacaaatcttcagtagacgctagtgagtatctagatcgctaccagatgtacaagcttcttaagggtccgtatgacaaggagggagcgtgcattattgttactgcagtatctaacggtgttacttctgagctgtgggcagagaaggtctttggcatgtatacaagttgggcacggaagcaacgttacaaggttggattgattgagaagatattttcaactagtggccatatccaatctgcaacaatggagattgaatcagagtacatgttcggcaccctttctggagaaaaagggatgcatcaaatgatatactcctccattgaaaattccgacattgatcacgcattatcagctagagtcgacaaaattcccctgtt

SEQ ID NO: 77264 - DNA, 370 bp, Zea mays
cgggtcaacccacggatcaagtgagatccgccgcttgggcggacgcatgggccgaggcccatggcgccgagaacgtcagagagagcgatgacatcggcggccgcggggctcgcgcgtggcgccggcccgcactacagacgcgtcaggaagcggccgtggggccggtacgccgcggagatccgcgacccggccaagaagagccgcgtgtggctcggcacgttcgacacgcccgaggacgccgcgcgggcctacgacgccgccgcgcgcgagtaccgcggcgccaacgccaagaccaacttctccttcccttcgtgcctgccgctcgccgccgcggacgtggccggcggctgccgggacgggaacagcagca

SEQ ID NO: 77265 - DNA, 347 bp, Zea mays
accaccatcgaccttcaagtctcgctacgtagcagtgcaataaaaaaagcagccgcaatggcgagcagcaccatggccctctcctccacggccttcgccggcaaggccgtgaacgtgccgtcgtcgtccgccttcggcgaggcccgcgtgacgatgcgcaagacggcggggaaggccaagccggcggcggcgtccgggagcccgtggtacggccccgaccgcgtgctgtacctgggcccactgtccggcgagccgccgagctacctgacgggcgagttcccgggcgactacggctgggacaccgccgggctgttagcggacgcggagaagttcgccaagaaccgggg

SEQ ID NO: 77266 - DNA, 377 bp, Zea mays
atccggctacctgacgggcgagttcccgggcgactacggctgggacaccgcggggctgtcggcggacccggagacgttcgccaagaaccgggagctggacgtgatccactcccgctgggccatgctgggcgcgctcggctgcgtcttccccgagctgctcgcccgcaacggcgtcaagttcggcgaggccgtgtggttcaaggccggctcccagatcttcagcgagggcgggctggactacctcgggaacccgagcctcatccacgcgcatagcatccttgctatctgggcctgccaggtcgtgctcatgggcgccgttgagggctatcgcatcgccggcggcccgctccggtgatgtcgtcgactccgctctaacc

SEQ ID NO: 77267 - DNA, 333 bp, Zea mays
ccttcaatgaaatgcggagccccattagcggcaggggggttgctgttccctcagctctctcagcattcaccggtgcaggtgctgaagaacttctcccatgttcgcaatcttcaggtagagctcccctccggagatgttgcagtcgaggagggggttctgctgaagtggcgggctgaatatggcagcacacttcagagctgcgtgatcctgggtggaaccttggttgatcgcaaggccgctggcagtgggcatgagccatcaccgggtgacaagggaagcatgccagaatctttctataccaatggtgggctgaaactccgtgtcgtatggact

SEQ ID NO: 77268 - DNA, 387 bp, Zea mays
caaattcagcaaacaagcaaaaggcacgaccaccaccgccggccgggaagcaagctcataccctaatcgccgtccgccggcgacgccagcacgatggcccgctacgaccgcgccatcatcgttttctcccccgacggccacctcttccaggtggggtacgctctcgaggccgtccgcaagggcaacaccgccgtgggcgtccgccgcacggacaccgtcctcctcggcgttcgagaacaagtccacacccaagctccaggactccaagtccgtgcccaagatcccgtgcctagacactcacatacctctggcgtgcgcggggctgaacgctgacgcgcgcgtgctcatcaaacgcgcgcggggtccagtgccagagccaccgactca

SEQ ID NO: 77269 - DNA, 401 bp, Zea mays
aggatcagccatgcctgcgcttctagtgaacaccgtctcggtctctcccgccgcctcaaggctaggctcctcgcggcccgccatggcacggcgagcagcaagcgctcgccacggccacaggtgccgagccgaagcatccggtagctcgtgggtgtcggactacgacctgtacgagctgctgggcgtggagcggtcctcgccgcagtcggagatcaatgcggcgtatcggtcgctgcagaagcggtgccacccggacgtggccggcgccgccggcggccatgacatggccgtcgtcctcaacgaggtgtacgcgctgctctccgacccggacgcgcgtctggcctacgaccatgatcaggcgcgccgctccgagttcgccggttacacggggccgccgctct

SEQ ID NO: 77270 - DNA, 91 bp, Zea mays
cactcttgttgtcaagtccaagtggaaaatcttggcatattatacatattgtaataataaacatcgtacaatctgcatgctgttttgtaat

SEQ ID NO: 77271 - DNA, 417 bp, Zea mays
ggatggcggtgagctgaatggtgaggcaggttcagtggtgggaactgcagatggaattgttactgaaacatccaaggtcccattcctgatgctcggtcttgacctgccacctccacctcttttcaaagacgccatggagaaaaatatcattccacaggtaccattgtttaacatactgaagaagttcgatggtgagacagttacagaggttgtccgaccttccattgccccaatgaggtaccgactcactacactgccgaagtatctgatccttcatatgcgaaggtttaccaaaaataacttttttgtcgagaaaaaccctactcgagttaattttcctgtgaagaacttggagttgaaggactacattccattacctaagccgacagagaatcataaactacgttcaaagtatga

SEQ ID NO: 77272 - DNA, 419 bp, Zea mays
cttgcactgatagcttgctccaggacgtacgtacgtacgtagatcgatccatcgatcgctagctagctgacgaccatggcgtccctctcctctgccgccatcaccgccccttccttcacggccgcgcccgctcgcgcagtggtcagcaggaggtccttcaccgtgcgtgcctctctccgcaaggccactgccaccgccgccgtggccgttgccgccagcgtcctgcttgccgggggcggcgccatggcccaggaggtgctgctgggcgcaagcgactgcgggctcgtcttcgagcccagccagttcaccgtcaaggccggcgacaccatcaccttcaagaacaacgccgggttcccgcacaacgtcgtgttccacgaagacgaggtgccgagcggtgtcgaggcctccaagatctcgca

SEQ ID NO: 77273 - DNA, 416 bp, Zea mays
catctcaacaatccgaagatctccgtaccgttgaccaacaccaaccggccggcgcacgctcctcctgcgcccaccatggccggcagcgacgccgaccgcgagaagagctgctgctgcagctgctgcacgccgctcatctccctgggcgtcgtcgtgctcatgtactgggccatcttccagccgcaccagatacgcgccagggtggactacgcggagctgtccagcctcagcgtctccaacgcttcatccggctcctccccctcccccgtcacggtgtcctaccacgtggccgtgaacctgagcctctacaagcccagcaagcgcgtcggcatctactacgacaccctggacgccgcgctccggtaccgcggcgccgtgctgagcccggccgccagcgcggcgtcgcccgccgagtt

SEQ ID NO: 77274 - DNA, 407 bp, Zea mays
aatgtatgcaagatgaaaccgttctcaagaattttcaagacgaaggtgaatacatcatacacaagagaggggtaaagttcagttatacaagacttcttcatctagtttctttaagtacaacagaccacttccattccttcctcctacaccaaaagccatgtttcccacgtacgacgactgcccaactcgccagcagcgatgtgcaagcacaggtgcagcagctagtagtagccgatgtccttgtcgtcgacgacgaggtctccgttgatgagctcgcggtaggccgcgacgggccagatgaaccccctggggaggaggcgggtggcgagctcgacgtcgatgatgatctccctcatggcgggcttcttctcgccgctgacggcgatgaggtagctcctgccgagcca

SEQ ID NO: 77275 - DNA, 416 bp, Zea mays
aacaaacgcaacctgcagccatggcacagaagctcgcgccaccgacggcggcggccgtcgtcgtcctgctggcgctcgccttgtcggccgccgcgcagaactgcgggtgcgcgtcgggcctgtgctgcagccggttccggtactgcgggacgggcgaggactactgcggcgccgggtgccagtcgggcccctgcgacgtgccggagaccaacaacgcgtccgtggccagcatcgtgacgccggccttcttcgacgcgctcctcgcgcaggccgccgcctcgtgcgaggccaacggcttctacacccgcgacgccttcctcgccgccgccggctactacccggcgttcggccgcaccggcaccgtcgacgactccaagcgcgagatcgccgccttcttcgggaacgccaaccacgag

SEQ ID NO: 77276 - DNA, 410 bp, Zea mays
cgccggccgactcgagcagcgccccagcagcctctgctccgctgcctctggcgaccgccggagcccgaggaggaggaggagggaagatctcgctcgatccaaggaggtgagtacaagatggtgagctcctcgtcgccggtggtcaacgtgtacccgctcgccaactacacgttcggcaccaaggagcccaagatggagaaggacacctccgtcgccgaccgcctcgcccgtatgaaggtcaactacatgaaagaaggaatgcgtacaagtgttgaagcaatcctattggtgcaagagcacaaccatcctcacatactgctcctgcaaatcggtaatacattctgcaaacttcctggtggacggttgaagcctggagaaaatgaaatcgagggttttgaaaagaaattatg

SEQ ID NO: 77277 - DNA, 407 bp, Zea mays
gaaatatcaaacctgtatttctactctgtagatattcaagcaaatgttattaaagggtattcattacagaaatcatgtgatctcaattttggtgatgactactgcttcagtacgaaggagttatggtccatcatctttccttctgattctgaaaggattgttatctctgaaacgcgaaatatgaatgaggttgttcatacccaagctaagacaattggtgatcatgatgtgatgtacaagtacttgtcaaagaatttagtttttgttgctactttgtctcctaaagctgctggtgatattggatctgtgctaactgaagaagcttcacttgttgcatatcttattgatgcagtcactggacgcatacttcatcgtgtaactcatcatggtgcacaaggcccctgtac

SEQ ID NO: 77278 - DNA, 411 bp, Zea mays
cttttgacagtcatgaggcggaggtgtttcaggttgaatggaatccaaatttggccactgtattagcttcatctgccgcagacaagagagtgatgatatgggatattaataggattggcgatgagcagtcagaggaagacgcagacgacggaccaccggagctgctgttcgttcatggaggccacacagacaagatatcagagctgtcgtggaatcctagcgagaaatgggccattgccagcgtgtctgaagacaacatcctgcagatatgggagatggcagagagcatatactgtgatgacctctccatgcaggttaactgactcgtgcctcgaagcataaaggtgagttacctgaccaatgatgcaagcgtatctggaggggttatatacctgtatgatttgagagatt

SEQ ID NO: 77279 - DNA, 247 bp, Zea mays
aggacacgtgggcttcgttcgtctcgtttgttgttgcccatctgtgtttttgattgcaaagtcgctctgtgtcagttgttagtgctgtgttcatcctcggctccagcagacccatgcatcaaccagcatggactgtggatcgatggatgctgttactcctgtcaggatttgttctaagttaatcctaaggaaaaaatggtgcttcttggtgctgcaaaaaaagagatcatagaaaccagtcagaacc

SEQ ID NO: 77280 - DNA, 429 bp, Zea mays
  unsure (1)..(429): unsure at all n locations
gtcgagnccgcgtccgattggattgcgcaccaatgaagatctttatactggagctctttttctattatttctttctacgctatccttaatagggggttggttacatctacaacccaaatggaagccaagcctttcgtggttcaaaaacgccgaatctcgtctgaatcatcatttgtcaggacttttcggagtaagttctttggcttggacaggacatttagttcatgttgctattcccggatccaggggggagtacgttcgatggaataatttccttaaatgtattaccctatccccagggggttgggtccccttctgacgggtcagtggaatctttatgcccaaaatcctgattccagtaatcaattatttggtaccactcaaggagcgggaactgccattctaacccttcttgggggattcaatcca

SEQ ID NO: 77281 - DNA, 385 bp, Zea mays
agaccatcccatgcagatgcaacctatgacttcaagtatggagttagagctgtgcagggaggtggaaggtcatcagccagagaaaccattggcagggtggctgcaggagctcttgcaaagaaaattctaaagctcaaatcacgagtggagatcttggcatttgtttctaaagtgcaccaagtcgtacttccagaagatgcagttgattatgagactgtaaccttggaacatatagagagcaacatccttagatgtcctgatccagaatatgcagagaagatgattgctgccattgataccgtacgagttagaggagattcaattggtggggtcgtcacatgcattggaagaaatgttcctcgtggtcgtggatcccctgtttttg

SEQ ID NO: 77282 - DNA, 410 bp, Zea mays
accacgcgtccgctggggttgtcttgccacggtctacctgtgatgttgttgttacgatgcaagcacagcgggaagccccgcctgacatgcagtgcaaggataagttcctagtccaaagcgtcgttgcccctgctggtataactgtgaaggatgtcactggggatatgtttacgaaggagtctgggtataagatggaagaggtcaaattgcgagtgacctatgttgctcctccacagccaccctctccagttccagaggaatctgaagaaggttctccacctaaggcttctgaatcagaaaacggagatggaccttctggaggattcaccaaagcactaagagagcgcattgagcctcaagacaaatctacagaggctggagctttggtttccaagttgactgaaaagaag

SEQ ID NO: 77283 - DNA, 417 bp, Zea mays
acaacgacatcacggtggaggcgtggctcaacacgcacggtcccaacgaccgcacgctcgcgcaggggctcaagggtgaccccacgtacctggtggtggagcaggacaagacgctggccacctacgggatcaacgccgtgtgcactcacctcggctgcgtcgtgccgtggaacggcgctgagaacaagttcatctgcccctgccacggatcccagtacaacaaccagggcaaggtggtccgtggaccggcgcctctgtcgctggccctggttcacgccgacgtcgacgacggcaaggtcctcttcgtcccgtgggtggagaccgacttcaggaccggcgaggacccatggtggaaggcatgaggatgatccggaaccagcggtgctcagtgctcacacatgagacctatgtatgcct

SEQ ID NO: 77284 - DNA, 302 bp, Zea mays
catcgcgtccgcggacgcgtgggcggacccgtggccgacgcgttggccagagcattgggccgtcaacaatggacgaggccgaggatgccatgaagcagctcgaggaggtcggcgccaaggtgtccagcgtttgacactaggtatactgacccctttttttttcctccttttttttttaaatttcgttctttgatctttgccccccaacctttggtgtatccccattgccctttataaggaattgcggtttgccgagaaagaatgacccgctaacgaggcgtcacaagatacgtgtaaacaaa

SEQ ID NO: 77285 - DNA, 365 bp, Zea mays
gaccacgcgtccgagaggataggcactggagagtccggcttgcaataattgagtacatcccattgctggcgagtcagttaggtgttgggttttttgatgacaagctgggggcactctgcatgcaatggttggaagataatgtcgtctcaatcagagatgctgccgccatcaacttgcatcgccttgcggaagaattcggtccaaagtgggcaatgcatcatagaattcctcaggtgctgaggaagatcagcagtccgtactatttgtaacgcatgacgattctgcaggctatctccttgctatctcccgtcatgggttgcagagattacttgtcaaaaactgcttccagttatcattaattcttc

SEQ ID NO: 77286 - DNA, 171 bp, Zea mays
gggtcgaggccgcgtccggtgagatggcacaagccatggcgtccatgaccggcctctcgcagggcgttctgcccagcaagcgcgccgccaatagggccaaaacgggcgccgtcgtcaaggcgtccgcctaggcgcaagcgcaagcgggccgccgcgccgtgctcgggctgg

SEQ ID NO: 77287 - DNA, 405 bp, Zea mays
aggacacgtgggcggacgcgtgggaagagaacccaaaaccacggcactgatatttgcatcgggtaaaatggtatgtactggagctaagagcgagcagcaatctaagcttgcagcaagaaagtatgctcgtattattcagaaacttgggtttccagctaaattcaaggactttaagattcagaatattgttggctcttgtgatgtagagtttccaattaggcttgagggccttgcctattctcatggtgccttctcaagttacgaaccagaactctttcctgggcttatctatcggatgaaacaaccaaagattgttcttttaatttttgtttcaggcaagattgttttgactggagcaaaagtgagagaggagacctacactgccttcgaaaacatctatcctgt

SEQ ID NO: 77288 - DNA, 403 bp, Zea mays
aggcgactccaggtttgtcggcgatgctgcgagcgggaggcaggcggctcctcgccccggggctccgtcggctcggcctgagcacaggcgcctccggcgaggcgggtcctgccgcggcggcggcgggggtgagggcgtaccacgagcgggtggtggaccactacaacaacccgcggaacgtaggttccttcgacaaggacgaccccaacgtccgcactgggttggtcagcgcgccagcctgcggggacgtcatgaagctgcagatccgcgtcgacgaaaactccggcaagatcgtcgacgcctgcttcaagacttttggctgcagctccgccataacgtcctcgtccgtcgctactgaatgggtgaacggaaaaccaatggatgaagttttgacaatcaagaa

SEQ ID NO: 77289 - DNA, 394 bp, Zea mays
tgaagccttctgaattgacagaggaacagcggcaacttctttcatctaatgttctctgtcaggaccagctgaaaaagattttacatgacactgatcttgaaagcattgaacagtgctatatggagatgaacacagtagagttcaaccttgagcaagctctgaatacggttctgatgcaaggcattcctttgggcaaggaaaaacggatttcaattgaacgtaattggcctgtggaagtatcatgcatgtacctttacggggacaatttaaggcttcagcaggtcctagcagactatctagcatgcgcccttcaattcacacaaactgctgaaggacctatcgtgctccaggtcaagtcgaagaaggaaaaaattggatctggcatgcagattgc

SEQ ID NO: 77290 - DNA, 183 bp, Zea mays
gcctccgcggctcgctccgccgcctcgccatggactacgtcgacgtcgtctactgccaccgccccgacgcgtccacgcccgtcgaggagacggtgcgcgccatgaactgggtcatcgaccagggctgggccttctactggggcacctccgattggtccgcgcaccaattaaccgaggcctggg

SEQ ID NO: 77291 - DNA, 412 bp, Zea mays
cggacgcgtgggatctatcatccgcgcgcggggtctgagagcagagcggcagggcgccatggcggcatcggtggcgctgagcagcgggcaccggatgccggcggtggggctgggcgtgtggcggatggagaatgcggacatccgcggcctcatccacacagcgctccgcgtcggctaccgccacctggactgcgccgctgactaccagaacgaagctgaagttggtgacgcgctcgcagaggcattccagaccggactcgtcaatcgggaggacctgttcatcacaaccaagctgtggaactcagaccatgggcatgtgcttgaagcctgcaaggacagcctgaagaagctgcagctagactatctcgacctccacctcatccagttcccagtagccactcggcacaacgga

SEQ ID NO: 77292 - DNA, 407 bp, Zea mays
acccacgcgtccgaatttcggcatatcggcgcacctggttggcagcttgggtggacatgggcaaagaaggaggttatatggtcaatggttggggctcagaccactgaacagggcgactgctcaaagttcaagagcagcctaccccattgctgcaacaaagatccaacaattgtcgatttacttccaggcactccatacaacatgcaaattgccaattgctgcaaggcaggacttgtaaatacctttaaccacgactcagcaaatgctgcttcctccttccagatcagtgttggtcttgctggaactaccaataaaactgttaaggtgccaaggaacttcactcttaagactccacgccctgggtacacatgtgggcatgccattgttggcacggctacaactttttt

SEQ ID NO: 77293 - DNA, 414 bp, Zea mays
cccacgcgtccgcccacgcgtccggaacaagaggatctccaagggaaagaagggtggcaagaaaaagaccgtcgaccctttctctaagaaggattggtatgacatcaaggcaccgtcggtgttcagtgtgcgcaacatcgggaagactctcgtatccaggacacagggtaccaggattgcttctgagggtctgaagcacagagtctttgaggtttgcctagctgatcttcagggcgacgaggatcaagcttacaggaaaatcaggctccgtgctgaagatgtgcagggcaggaatgtgctcacaaacttttggggtatgaattttaccactgataaattgaggtccctaatgaagaagtggcagacattaatcgaagcccatgttgatgtcaagacaaccgacaactacatgtt

SEQ ID NO: 77294 - DNA, 422 bp, Zea mays
gcaagtacaacatggagatgtcctccaaggcgtacaaagcctggaacttcacggaccttgctcttcccaacgatctcatcaagagaggtctggcgaaaggagatccaaagaagccagagacgctggagctggcgataaaggactacccgtacgcggtggacgggctcgacatgtgggcggcgatcaagaagtgggtggctgactactgcgccatctactacgccgacgacggcgcggtggcgagggacagcgagctgcaggggtggtggagcgaggtcaggaacgtggggcacggcgacctggcggacgcgccgtggtggccggcgatggactgcgtcgccgacctcgtggagacctgcgccaccgtcgtctggctgagctcggcgtaccacgcgtccatcagcttcgggcagtacgactac

SEQ ID NO: 77295 - DNA, 416 bp, Zea mays
agaatccgcagtactatgaaatttctgccaagagcaactacaattttgagaaacctttcctgtacctcgcaaggaagctggctggtgatccgaaccttcactttgttgaagctgttgctcttaagcctcgggaagttaccatcgacatggctatgcagcagcagcatgaagctgagcttgctgcatcagctgcacaacctcttcctgatgacgatgatgatctgattgagtagagaggatcatgattcttgaacttgagcaagagttgtgccatgcgtgttttaaattgttctacggtgaactcatgagttctcattgtctggatcatctttttctccttgggtgtgttgcatcttttgagtgtggcaatggatggtactcctcgccatgaatttgctgggtactttaaacattgc

SEQ ID NO: 77296 - DNA, 419 bp, Zea mays
attcggtggcgcccgcccggagctcggatgccgcggcgtcggcgtcgtggatcgacaggaagctgcttgttgatccaaagatgctgttcgttggggacaagattggggagggagctcatggcaaggtctacaaggggaagtacggtgatcaaattgtagcgataaaggttcttaaccgtggcagcacccctgaagaaaaagcaacacttgaagcccgtttcatccgagaagtaaatatgatgtgtaaagtgaaacatgagaatcttgtcaagtttattggagcttgcaaagaaccattgatggtgatcgttagtgagctactaccagggatgtcactgaaaagttacctgcatagcatacggcctagccaattagatacacacactgcaataacctatgcactggacatagctcatgca

SEQ ID NO: 77297 - DNA, 329 bp, Zea mays
accacgcgtccgcggacgcgtgggcgcacgctcaactcaaacccccgtccctaacgcagaagaccggcggcagcggcgggggtgtgtgtgtgtggactggactgtaaccaattgccagcaatccagtcatccatccatccatccgccccgctgacggcgggaatggcccggctcgtgctctccgagtgctgcagcctcgcgccgctccgcggcctggtcgccgggcggggcgccattgcggcgccatcacgccccgcgctctccgctgcgccgcgccgtcgtcgcacgtccacctccatccaccgctactgggcgctccgcgtctccgc

SEQ ID NO: 77298 - DNA, 259 bp, Zea mays
ctcttcgaccggccgcagcccaactcccccaccgtctacgactggctctacagcgacgagaccaggagcaaccaccgctagatcgggcgagatggatggacagtgaagaggccatgtttgctggtccttgtggttatctaaaacgcacgcatgctctattatagctagtcatcactatatatatacttgtgtttgtgtattgttgttcttgttctgctggtgtctccgccgtttaatttgacctagttctagatcgcga

SEQ ID NO: 77299 - DNA, 410 bp, Zea mays
cgccgcaccagcgccagcccgcgccgtggtcagaaggaggtccttcaccgtgcgcgcctctctccgcaaggccaccggcaccgccgccgtggcaatggctgccagcgccctgcttgccggcggtgccatggcccaggaggtgctgctgggcgcatgcgacagcgggctcgtcttcgagcccagccagttcaccgtcaaggccggcgacaccatcacattcaagaacaacgccggcttctcgcacaacttcttcttctacgaacacgaggtgccgagcggcgtcgacgccaccaaggatctcgcatgaggacttactcaacgcgccaggcgagacctactccgtcaccctcaccgtgccgggaacctacggcttctactgcgagccgcatcaaggagcccgaatggtcggc

SEQ ID NO: 77300 - DNA, 419 bp, Zea mays
accacgcgtccgcccacgcgtccgcgcccgcgtcgacttcctagggttcgaggaacgtccgtccgtccgtccggggaaggagcacgagggaggcggagatgatcgaggtggtgctcaacgaccgcctggggaagaaggtgcgggtcaagtgcaacgaggacgacaccatcggcgacctcaagaagctggtggcggcgcagacggggacgcgccccgagaagatccgcatccagaagtggtacaacatctacaacgaccacatcaccctcaaggactacgaggtccacgacggcatgggcctcgagctctactacaactgagccgccgcccctccctccctctcgtcaggttggtctgaattctgaagtcatgggtgcaattcgcttcgcggtgatctctaagctcatcacatatataaa

SEQ ID NO: 77301 - DNA, 277 bp, Zea mays
cacgcgtccgcacacgcgtcaggcctttggattgggattggagcgtcttgcgatggtccttttcgacattccacatattcgactattctggtcgaatgataaacggttcacatcccagttctcagaaggcaagcttggtgtcaagttcaagccattttcaaagtttcctccttgttacaaacatatgagtttctggatcaatgatgcatttacagtaaacaacttatgtgaggttgtcagatgaatattcggggatattgttgaggaggtaaaactt

SEQ ID NO: 77302 - DNA, 375 bp, Zea mays
cccacgcgtccgcacggcacgacgcagccgagaacaagttcatctgcccatgccacggatcccagtacaacaaccagggcaaggtggtccgtggaccggcgcctctgtcgctggccctggttcacgccgacgtcgacgacggcaaggtcctcttcgtcccgtgggtggagaccgacttcaggaccggcgaggacccgtggtggaaggcatgaggatgatccgaaaccagcggtgctcagtgctcacacatgagacctacgtatgcctccgttccttgtgatgaggaaatatgcctgcgttcggtctcccttggcgttgttcctacaaattcacttgccttctgtctccccctccatatacacactgttgtaaaac

SEQ ID NO: 77303 - DNA, 289 bp, Zea mays
acggaagttccaggccccgttgcagctgggagtggttttatactcgctgatgacatcaagtcttaggtgcttccattgatcaatgactcagggaaatatggagggatcatgatgtggttcaagtactatgatgatcaagatggctacaattcttgagtgaagagtgatgtttaagttgttgtctgtggtgtgtgacaatatctgtgtgttacttgtgtgtatgtgagaaattatgtgactctggagtctggatagtgcaataagtattactcaagtatatgatgtgaaa

SEQ ID NO: 77304 - DNA, 424 bp, Zea mays
acgagcgagagcagcacacactgcacgcagctagctaggagcagcagcagcggcggcgatggcggcctccatgatctcctcgtcagctctggcggtggcgcctcagggcctgccgcccctcggccgccgcgcctcctccttcgccgtcgtctgctccaagaagaagatcaagaccgacaagccctacgggattgggggtggcctgaccgtcgacgtcgacgccaacgggagaaagggcaagggcaagggcgtgtaccagttcgtcgacaagtacggcgcgaacgtcgacggatacagcccaatctacaacgaggatgactggtctcccaccggcgacgtctacgtcggtggaaccactgggcttctgatctgggccgtcaccctcgctgggatcctcggcggcggcgccctcctcgtctacaac

SEQ ID NO: 77305 - DNA, 388 bp, Zea mays
ctcgcggatccacgcaagcctctaaactgattcttaatataccattacggcaagtactgcttcgcctggggctgctgcgcgctcgagggcgccacctgctgcgacgatcactacagctgctgcccccatgactaccccatctgcaacgtcaggcatggaacctgcctcatgggcaaggacagcccattgtcactgtcagtgaaggctacgatgcgaaccctggccaagccgcactgggctttctccggcaacacagctgacgggatgaagagcagcgcatgagaaaacgcagcgtggcattaggtcgtcagcaacctgtgtggtccattagagcccctgcgtgggaaatggtcacctggccccctgattgacgacggaagcatggctc

SEQ ID NO: 77306 - DNA, 303 bp, Zea mays
cactttctttaggatttttttttctatgggtatcctgattgtaaaaggcatccagtcgctttgagaccaacaatatttgatcgccttccagaattcagaacctgcggctaattcaccacgccatttgcaagctgctttgataatttcagtaccttcacgagcaagatctcgcccttcgttacgagcttgtacacaggcgtcgaacgccacacgattagctgctgcaccaggtgcatttccccaaggatgtccgaaagttccgccaccaaattgtaatacggaatcatctccaaagatttcggt

SEQ ID NO: 77307 - DNA, 430 bp, Zea mays
cagacgcgtgggctcctatggcatctactcacgcaagcagtcctattcctgattccttgctcggcttgcgtggcccatggattcgatgtcatatcatgtgttgtttgctcacccgcctggtcgcagttcgtgtcggatggcgtgttcttcgcggagctgaatgagatgctcgcggaggacggctactccggcgtcgaggtccgcgtcacccccatgtgcatcgagatcatcatccgtgccacccgcgcccagaacatactcgcgagaagggccggaggatcagagagctggcttctgtgattcagaagcgctttaacttatcagagggtggcgttgagctctacgcagagaagctgaacaaccgcgggctctgcgacattgcccaggccgagtcgctccgctacaagcttctcggtgaactcgccgtgag

SEQ ID NO: 77308 - DNA, 392 bp, Zea mays
cacgcaggccagcggcggctacaaggtggccatccttggcgcggcgggaggggtcgggcagccgctgtccctgctggccaagatgtccccgctcgtctcggcgctgcacctgtacgacatcgccgccgacgtggagggcgtggccgccgacctgagccactgcaacaccccggcgcgggtctccggcttcacgggcgaagacgagctcgcggggtgcctgtcgggcgcggacgtcgtggtggtcgccgccggcgtgccgcggaagcccggcatgacgcgggaggacgaccggttcggcgccaacgcgggcgtggtgcgggagctcgtggcggcggtggcggaccacgcgccgccgggcgcgctggtgcacgtgatcagcgacgccgtggact

SEQ ID NO: 77309 - DNA, 425 bp, Zea mays
aagatgagaatggtgatgaggcgccatcgaaaaaggcccaaatggttgtccaagttgaggctgtccgggtgcaaaaggagcttgcagcgactgagattgatggttattgtgaaggcgaactaatcaaggttacactttctggaaaccagcaacctattagagttgaaatcacagaagctgcgatggagttgggtgctgaaaaactttccgggttggtcaacgatgcttacaaggatgcacaccaacggagcgtccaggccatgaaagagacgatggctgacttggcgcagaccctgggaatgcctgcggccctcggcatggtctccaattgatccgcaattcgggaaagctttcaattctcccttttcctcaattttgtatgccagccgtgtgaattctaagcaaaacccctccgcgacctctca

SEQ ID NO: 77310 - DNA, 419 bp, Zea mays
cggacgcgtgggcggacgcgtgggcggacgcgtgggctgctgcgcttccaacaccatggacggcgggggatccggcaatgcctccggcggcagcggcggcgcatcgacgtgctgctactacgcgctcctcggcatccgcaagaacgcctccgccaccgacatacgcgccgcttaccggaggctcgcgatgaagtggcacccggaccggtgggccagcgaccccggcgcggccggcgaggccaatcagcggttccagcggatccaggaggcatactccgttctgtcggacaaggggaagaaggccatgtacgacgccgggctcttcgaccccctcgacgacgacgaccaggatttctccgacttcatgcaggagatgctggtgatgatggatagcgtgaaaaacgagaagccggacacgc

SEQ ID NO: 77311 - DNA, 379 bp, Zea mays
ggtcgccctaaccacgcggctactacaagtgcagcacggtgcgcggctgccccgcccggaagcatgtggagcgcgaccccgccgacccgtcgatgctgatcgtcacctacgagggcgagcaccgccacagccccgcctccggccaggacccgccgccgccgtcgctcgcgccgctgccggagctgcccagccattgatttggcttcctgcctgctctgtcctgtcaattactagtagctgttgtcataagttataaaatcaaaatcgccagttcagttttagcagctccgttttccgagttttttctcttctgtcgttcgcgttagcagctttgtgaaaggattacgaaagtgttagcatcagacttggagaagggaaa

SEQ ID NO: 77312 - DNA, 444 bp, Zea mays
aacattttgaagcaagaactatttgcagattatgtctctatatggcctaccaaattccaaaacaaaactaatggaatcacgcctcgaagatggctccggttttgtaaccctgagttgagtgaaatagtcacaaaatggctaaagtcagatcagtggacaagtaatcttgatctgctcactggacttcgcaaatttgcagatgatgaaaagcttcatgctgagtgggcagcagccaagttatcttgcaagaagcgcctggccaaacatgtgttggatgtgacaggtgttacgattgatccaactagcctttttgatatacagattaagcgcatacatgagtacaagagacagctcctaaacatattgggagctgtttacagatacaaaaaattaaagggaatgagtgcagaagagaagcagaaggtcacaccgcgcactgtcatg

SEQ ID NO: 77313 - DNA, 396 bp, Zea mays
ggaggcgtggctcaacgcacggtcccaacgaccgcacgctcgcgcacgggctcacaggtgaccccacgtacctggtggtggagcaggacaagacgctggccacctacgggatcaacgccgtgtgcactcacctcggctgcgtcgtgccgtggaacggcgccgagaacaagttcatctgcccatgccacggatcccagtacaacaaccagtgcaaggtggtccgtggaccggcgcctctgtcgctggccctggttcacgccgacgtcgactacggcaaggtcgtcttcgtcccgtgggtggagaccgacatcacgaccggcgacgagccgtcgtggaaggcatgacgatgatccgaaaccagcggtgctcactggtcacagatgagacctacgtatg

SEQ ID NO: 77314 - DNA, 439 bp, Zea mays
  unsure (1)..(439): unsure at all n locations
aacacgcgtccgcggacgcgtgggcggacgcgtgggctcgccgcctcactccctctgaggtcgcagatccgtccggttagacgaagccgcccgcacccatggcctccggtgagctcgcctgcacctacgccgccctcatcctcagcgacgacggcatcgccatcaccgccgagaagatcgccaccatcgtgaaggcggccaacatcaaggtcgagtcctactggccggcgctcttcgctaagctcctggagaagcgcagcgttgaggatctaatcctctccgtgggatctggtggtggcgctgctccagttgctgcttccgccccagctgggggtgctgcagctgctgctgcccctgctgcagaggagaagaaggaagagcccaaggaggagtctgatgacgacatgggcttcagcctgttcgacntgagacctcgcta

SEQ ID NO: 77315 - DNA, 415 bp, Zea mays
ggcccggctcgatctaatactactactagctggtacacatactagccagcctgccagccagcttgccatggcgcccaccgtgatgatggcctcgtcggcaaccgccgtcgccccgttccagggtctcaagtccgccgccagcctccccgtcgcccgccgcagcaccaggagcctcggcaacgtcagcaacggcggaaggatccggtgcatgcaggtgtggccggcctacggcaacaagaagttcgagacgctgtcgtacctgccgccgctgtcgacggacgacctgctgaagcaggtggactacctgctgcgcaacggctggataccctgcctcgagttcagcaagctcgggttcgtgtaccgcgagaactccagctccccgtgcgactacgacgggcgctactggaccaggtgg

SEQ ID NO: 77316 - DNA, 434 bp, Zea mays
ccacccacgcgtccgcaaagcccaaagccgagaagccgccgccgatcgggcccaagaggggcgccaaggtgaagatcctgaggcgggagtcctactggtacaacgggatcggcaacgtcgtcaccgtcgatcaggatcctaacacccgttacccggtggtggtgcggttcaacaaggtgaactacgccggcgtgtctaccaacaactacgccttggacgagatcctcgaggtgaaatgagtgaggccagtctggtcaaggaccccatgctcctgtgtgatttgtagttgtgaagtgaggctgctgcctagctgctacgttagctgctagcgtcacaacatcaatcttgtaatagcttaatctccacaatcatcatgtaatttattgcatgcttcattcaccgtggactcaataatctctcttgctctaaaatcg

SEQ ID NO: 77317 - DNA, 438 bp, Zea mays
  unsure (1)..(438): unsure at all n locations
aactggttggattgcacagcttggtgggctacaatgtcgtaacttcccggcgacgcaatgttggcaaggtgcgtggtttcacatttgacatcagctcaggtgctatggagtctctcgagcttgactcttttgggctttcgattgtcccttctagcttggtaagcacgtactgtttatttgtcgaagacgtgctggatatagtctctgatacagtcgtggtgcatgaagacgccgtctcacgggttcaacggttaacacagggcattttgggcactcaaaacatccacgggcctggtggtgagattgacgagtacggtagatttggggggaggggaagggggaggaggaggagagcanatggccagggaaagtccggtggccgagaactccgcagcgaaccgaagcatccggaggatgaatgggagcttgcgatggact

SEQ ID NO: 77318 - DNA, 92 bp, Zea mays
cccacgcgtccgcagacgcgtggggcacgggcgggctgctccgcaaggcgcaggtggaggagttctacgtcatcacgtggacgtcccccaag

SEQ ID NO: 77319 - DNA, 413 bp, Zea mays
ggctcgattaaccacgagtctcagctcaactctgtacaatgatgaaacaaatgacaacactttcggggcgctaaggcctcctttggattaaaagataattcatgtgtttttgaaccatttcctgtgaaattcatataccatccccataaaattcctacattcgaaaggaagcctaaaactcggctgagccaggaactcggggaaatgggatggcgtctctgatgttgtctattccagtagcaaactgtacaagccgctcaaatccaagaccgaaaccggcgtggggaactgatccatatcgccgtaggtccagataccaccagtagctctccttgttcagattttgctcgtctagtcgggcttcaaggtaatcaagacgctcttccctctggcttcccccaataagctcacca

SEQ ID NO: 77320 - DNA, 472 bp, Zea mays
ctcgcggatcgacgcaagcctctacagtcactcgtgcgaagacgaagagagcagaagcgaagagcagcggcgcaaaggaaagggagccatgctcgcctcgccggcgctcgccggcgcccactccttcgcggcgtccgtgtatggaaacatcctcgtcccctcgcctcccgtccccgcgccggcacgtcgcgcggcgctgtccgtcgtcgccaaggtcaaggtggccactccccaggacgaccgcatcgcccgccacgtccgcctccgcaagaaggtaagtggcaccactgagaggccgaggttgagtgttttccgctcaaacaaacatctgtacgctcaagtcatcgacgacacaaagcaatgtactctggcttcagcttcaaccatgcacaaatctctctccaaggaatttgaatactcagctgggccaacgatcgagatagcacagaagatcggtgaggtgattgccaag

SEQ ID NO: 77321 - DNA, 420 bp, Zea mays
gtcgaggggccacaaggacgaccccgtggtgatctggctcacgggcgggcccggctgcagcagcgagctcgcgctcttctacgagaacggccccttcaacatagcggacaacttgtcgctcgtctggaatgattttggttgggacaaggcatcaaatcttatctatgtcgaccagcccactggaactgggtttagttacagctcggattcgcgtgacactcgccacaacgaagctactattagcaatgatctatatgatttcctgcaggccttttttgctgagcacccaaagtatgctaaaaatgatttcttcataactggggaatcatatgctgggcattacattcctgcctttgcaagtcgtgtgcaccagggaaacaagaacaatgagggcattcacattaactttaaaggttttgc

SEQ ID NO: 77322 - DNA, 431 bp, Zea mays
aaaacgcgctggagcggtacgacgaagcggcgttctcgcaggtggcgtcgacagcgcgcggcgccgccctggccgccttcacgtacctgcgcatgaacaagacgctctttgacggcgacaactggcggcagttcgtgtccttcgtcagggccatggccgacggcggcgcgagaccagcactgccacggtgcgacacggggcactcggacctgtacgtcgggttcctcgacgccgccaagaagagcaaggcgccggaggctgagggcgccgccaccgccgcggcattgtaggtggatgctcatgcctgtgcgtgcacacagacacatgcgccgtgctgttgtataacgtgcaccggagaacgggaactgtatgtatagattcagggccttgcaggttgcagagttttatacgctgtaatcgagcaggtcggt

SEQ ID NO: 77323 - DNA, 419 bp, Zea mays
cagacgcgtgggcgctaacttgtaatctgcaggatctaagcaaagacttgatttagttatggacggattggtaggcctcttgaaagttcgcgtggtccggggtatcaaccttgcctaccgcgacgcaagaggcagcgatccgtatgtcgtcctacggcttggcaagaagaaactgaagacaagcgtgaagaagagatccgtgaaccccatatggcaagaggagctaactctgaccgtcacagatcccagccaaccactgaagctggtgagtgagcagcaagcagaacgatcctgtttgtgattcattattctagactgtttgctacaggaggtgttcgacaaggacaccttcagcagagacgaccccatgggagacgcggaggtggacgtggcgccactgatggaggcggtgagcatga

SEQ ID NO: 77324 - DNA, 123 bp, Zea mays
gtcgccaattcacgggttacaccacgcgtccggggtcagagaacttctacagtgcctttgaggctgagcttgcagatgccatccctgtggtcaagacctctattggtggcactagaataatag

SEQ ID NO: 77325 - DNA, 90 bp, Zea mays
ggaggcgtgtccgcgcacctgttcgccgtgttccagggtatcctcaagatgattgccgggctggacaccaacttcacggtcacggcaaag

SEQ ID NO: 77326 - DNA, 393 bp, Zea mays
gtggggaaccatgcatggggcgttgacaactcgactctggagaacctattcagtgagcaaggacaggtgctggatgctaaggtcatctacgacagggatagcggcaggtcaagggggtttggtttcgtcacctatggctctgccgaggaggtcaacaatgccatatcaaaccttgatggcatagacttggatggtagacagatccgagtcacggttgcagaatcaaagcccaggcgtgaattttgagattttgttaaggtggtttacaggtcaatagcgtgtgttcacaagttctagtttggagcgtctagtctttcttccgtatgagtaacaaaaagatgctgataatgagagactgggagtgaaactgctgtccacaggaagatatttttc

SEQ ID NO: 77327 - DNA, 384 bp, Zea mays
gtactgatgttaatgtctaaatttgaaggactgatatcgcagtcatctctggagaggcgatctgcatctaagtattacatattcttgttcttcaatgtatttttggggagcgtaattgcaggatctgctctggagcagcttaaaacttatctccatacatcagcaaacgacataccaaggatcattggtgactccatcccaatgaaggcgacttttttcataacatatgtgatggttgatggttggactggaatagctggtgaaatattgagactgaagccgcttatattcttccatctgaagaactttttcttggtcaaaaccgaaaatgacagagaagaagctatggaccctggcagtatctgcttttactcaactgaaact

SEQ ID NO: 77328 - DNA, 384 bp, Zea mays
accgcacgacacgacaccaagtcgaggagctcgagagggcaccaataatggccggcgtgaactccagcgtcgtcgggctcaagcccgccgcggcagtgccgcaggccgccgccgcctcatcgccggcgaagcgggtgcagctggccgcgcccgagggccgccgcgccgctctgctcggcctggcggccgtcttcgccgtcacggccaccaccgggtcggccaaggccacgatcttcgatgagtacctcgagaagagcaatgccaacaaggagctgaacgacaagaagaggctgggcaccagtggagccaactttgcgcgcgcctacaccgtggagttcggcacctgccagttcccctacagcttcactgggtgccaggacctcg

SEQ ID NO: 77329 - DNA, 429 bp, Zea mays
agcacaaacgcgcacgctcatacgcaaaccacacaacccatggaagcgtcccttgccgccgccgccgtcggcttgttccctccaccgcgaatccgcatccgaatcaccaaatcgagtcccctcccacgccctcggtgcctccaatccggaccctccaagatctggacctccggttcgcgggcatgcctggtcgcggcctccgcgtccacaccgccggcgccgggaggcggcctctactcggcggcgacgtacgagctgaccccggaaaacgtagaccgcgtcctggacgacgtccggccgtacctcatctctgacgggggcaacgtcaccgtcgttgccgtcgaggacggtgtcatctccctcaagctcgaaggagcttgcggcagctgccccagctcgacgacgacgatgaatatgggcatcgagcgt

SEQ ID NO: 77330 - DNA, 114 bp, Zea mays
tccgggttaaaccacgcgtccgcacacgcgtccggtagccgccaccatgagccgctcggggcagcctccggatctcaagaagtacatggacaagaagcttcagattaagctgaa

SEQ ID NO: 77331 - DNA, 272 bp, Zea mays
tttcttgctcccctttcagggttccgattgctaggctagctgcagctcaggtgcttgtctgaggctgcctcctcattggcaaccggattgcctgctgctggtggatgtggtgatcaacagtattattacagagccatgctatgtgaacattactagtagcagtgctcataaaagctacaatcccatgtcctttttttccccagtcatgtaaaacttccaaactgctccatggttcaaaactctgttcttcaatacatcatcaattatcgatt

SEQ ID NO: 77332 - DNA, 424 bp, Zea mays
tcgacacacgcctccgggatatgtcaaagtaattctagcaacaaatcgtattgagagtcttgatccagccttgcttcgcccaggtcgaattgacagaaagattgaattccctttacctgatgtcaagactaggcggcgcatcttccagatacacacatcgaaaatgacactggctgatgatgtaaacctagaagagtttattatgtcaaaagatgagttttcaggtgctgacatcaaggccatttgtactgaagctggcttgcttgctttgagagagcggcggatgaaggtgacgcatgcagacttcaagaaggccaaagaaaaggttatgttcaagaataaagaaagggtgccggagggcttatatatgtgagactcatcagcagcgctattaggtcttagtgagagaactggcgtttgtaat

SEQ ID NO: 77333 - DNA, 414 bp, Zea mays
accacgcgtccgcccacgcgtccgggcatcatctctttctacggcggccactgctgcagcgatttcatttacagctggaactcactggaagaggaagaagacacctcgaagcaaacctgcgacagccagggtaacctcgtgctaactgggccatcaatggccacctcggcagaaagtccaattgccttcaccttctacctccatgatggcagcccgcaagccggagaagccgctgaggacgacgaggacatcgggaggataatctgcgactgcatcggcgacgacttctccaactacaacagggccatagtcgagactgtccaaatgggctatggcctcgctgaagtgatctatgccgtgctgaacaacggggtccaaggccgggtcgctgtcaaacttgctcgcctgccggtg

SEQ ID NO: 77334 - DNA, 437 bp, Zea mays
ctcgtgggtcgacacaagcctctataatgagtcatattagcttgatgttggctcatcattgtgatcgctatgtaatacagcgaggggtgggacagtacattggtgaaagccttgagaagacacttgctaggtcaaggtgtcccaagggtcgtctgctgtactacttccccaaatcgtttagcaaacaggacgaagtttcgtcatggtgtggatggcatactgactatggatttttgacaggacttacatgtggcttgttcacgagaaaatcagaggaggtcccctgtcctgatattggaactgggctgtatgttcggactcgtgataatcaagtcgtcaaggtcacacttgtggatgatgagttggtctaccaaattggggagactgctgaaatactatcaagagggcatctatgtgcaaccccacactgtgtgaag

SEQ ID NO: 77335 - DNA, 81 bp, Zea mays
aacgcttatatcttgtcagccatggcgaccgccgccacgtctaacctcctcaagtcctccttcgcgggctctcggctcccg

SEQ ID NO: 77336 - DNA, 413 bp, Zea mays
ctgctaaaaggcatttgacacagcgcattgaaaagttggacgataaattggatcagcagaaggctctatctggacaaataagagatgatgtcactgatgcacgtctgaagcttgagaatattggttcagaaatcaagaacatcaaagaattggtttggggtctggatgggaaaattgattcaatggaagctaaacaggacttctcatgtgctggtgtgatgtacctctgccaattcatggagcaaaatggtggaaagcttccggatcgcctggaatgctccaaaatgacgacaaaacgttttggaggccaaaagttcttacagggattgcaactggcaatagaatcagggaattgtggcaatgacaccattgatatgctgttgaaagatgctgattcctctgatagaataaac

SEQ ID NO: 77337 - DNA, 393 bp, Zea mays
gtcgccgccatgcttccggcgagatggacgtggtgaaggcggcgcagttgtcggggcggacgctggaacgggtagtggtgcatcccttggtgctgctcagcatcgtcgaccactacaaccgcgtcgcccgcgacacccgcaagcgcgtcgtcggcgtcctcctcggcacctcatcccgcgggtccgtcgatgtcaccaactcctacgccgtgccgtttgaggaggatgacaaggatcctaggatctggttccttgaccacaattaccacgagtcaatgttctccatgttcaagaggattaatgccaaggagcatgttgttggctggtacagcactggcccagagctaacggagaacgacttggatgtccatgcattattcaacagttatgttc

SEQ ID NO: 77338 - DNA, 447 bp, Zea mays
actcgcgagtcgacacacgcctctacagtcactcgtgcgatcggcgtgccgcgtgcgtgaggtgatcggagcatcccgtcccgaggaggaagacaaccggcgacgcggggggaacatggggaagacgccggtgcggatgaaggcggtcgtgtacgcgctgtcgcccttccagcagaaggtaatgccggggctgtggaaggacatcaccaccaagatccaccacaaggtcaccgagaactggatctccgccacgctcctcctcacccccgtcgtcggcacctaccaatacgccatgtggtacaaggagcacgagaagctttcccacagatattaaatgcgctgcccttgacagacagcactcggagttttcatgatgggtttcataatcctcccatgatgattttacacttgtttgatcaatttcagttcaacgccttttccacgttc

SEQ ID NO: 77339 - DNA, 435 bp, Zea mays
ctcgcgggtcgacacaagcctctagactgactcctattacgatgcctttgtagcgctgctgcctcgccgcgtcgtcgcgggtccccgatttccgcttgctgctgcgcttccaacaccatggacggcgggggatccggcaatgcctccggcggcagcggcggcgcatcgacgtgctgctactacgcgctcctcggcatccgcaagaacgcctccgccaccgacatacgcgccgcttaccggaggctcgcgatgaagtggcacccggaccggtgggccagcgaccccggcgcggccggcgaggccaatcagcggttccagcggatccaggaggcatactccgttctgtcggacaaggggaagaaggccatgtacgacgccgggctcttcgaccccctcgacgacgacgaccaggatttccccgacttcatgcaggag

SEQ ID NO: 77340 - DNA, 412 bp, Zea mays
aggacgactgccgcgccgactaccgcaacgtcatggccgctgccgtgcgcggcgactacgacacgtgcggcctgtacgccgaccagctgaagcggcggtccgcggagctgttcaaggagggtgtccttggcctggagcacctcgccgcggtggacgccttctgcgagctcgtcgcccgcggcatgggcgcgcccgagccgccgcgcacctaccacatcaacctgtccgtgttcacctccctgccggacatgtgggccatcgggcagcagttccccatcatcccgatccagcggctgcaggagcggcccgccgtcgacggcgtgctctcggacctcacctgcgacagcgacggcaaggtgagcgagttcatcggcgggagggacagcctgccggctgcacgagctgcccaccc

SEQ ID NO: 77341 - DNA, 411 bp, Zea mays
acccgccctacgacctgacgtccttccggttcagccccatcaaggagtccatcgtgtcccgcgagatgacccgtcgctacatgacggacatgatcacctacgccgacaccgacgtcgtcatcgtgggcgccggctccgcggggctgtcctgcgcgtacgagctctccaaggaccccgccgtgagcatcgccatcgtggagcagtcggtgtcgccgggcggcggcgcgtggctgggcgggcagctgttctcggccatggtggtgcgcaagccggcgcacctgttcctggacgagctgggcgtggcgtacgacgaggccgaggactacgtggtcatcaagcacgccgcgctcttcacgtccacggtcatgagcctgctcctggcgcgccccaacgtgaagctgttcaacgccg

SEQ ID NO: 77342 - DNA, 379 bp, Zea mays
caattcgattctggagacttctcaaaagtcgtggaatacatcaacaaaattgtgctggttttttctccaggttgcttaaaggcaaagcttctcaaggctaaagcattgctagcactgaaagactactcaagtgttatttcagagaccggattcattctaaaggaagatgaagacaatttggatgcactgctattacgtggtcgtgcctactattaccttgctgatcatgatgtggcctccaggcactaccagaaagggcttcgtcttgatccagagcattccgaattgaagaaagcatatttcgggttaaaaaatcttttgaagaagagcaagagtgcagaagataatgctgccaacggtaagctacgtgtgtctgttg

SEQ ID NO: 77343 - DNA, 414 bp, Zea mays
gcatcctcaaggagctgaaggacctgcagaaagacccccccacatcatgcagtgcaggtcctgctggtgaggacatgtttcattggcaagcaacaattatgggaccacctgacagtccctatgctggtggtgttttcttagtgaacattcatttcccgccagattaccccttcaaacctccaaaggtttctttcaagacaaaggtcttccatcctaatatcaacagcaatggaagtatatgccttgacattctcaaagagcagtggagccctgctttgacaatttctaaggtcctgctctccatctgctccctgctgaccgaccccaacccggacgaccctcttgtcccggagattgcccacatgtacaagacggaccggccgaagtacgagtcgacggcccgcagctggacgc

SEQ ID NO: 77344 - DNA, 415 bp, Zea mays
aaataatgttcggaaagttatcgtggtttcatccacagctgctgtccattttaatccgagttggccccaaggtataatccaagacgagagttgctggtcagataaatttttttgcactaagagtgaggaatggtacattgctgccaagacaattgctgaatatacagcactggagtatggagagaagaatgggctactcgttgttacagtttgcccttgtgtcgttttaggtcgactcctgcagcctctaatcaacaccacgagtgaagtattcgtctacattataaaaggaggtcctagaacgatgagtaacatcacctggaacagcgttgatgtccgttatgtaaccgatgctttgcttttggtatatgggaaagtggaagcatctgggagagtcattttgggcagcaaatcg

SEQ ID NO: 77345 - DNA, 81 bp, Zea mays
cagacgcgtgggggcctcaacaaggtcgccgggaaggtcttcaggatcggccatctcggcaacctcaacgagctgcaactt

SEQ ID NO: 77346 - DNA, 322 bp, Zea mays
gaggcgaacgacaagccagcggcggcgtccgggagcccgtggtacggccccgaccgcgtgctgtacctgggcccactgtccggcgagccaccgagctacctgacgggcgagttcccgggcgactacggctgggacaccgcggggctgtctgcggacccggagacgttcgccaagaaccgggagctggaggtgatccactcccgctgggccaagctgggcgcgctcgggtgcctcttccccgagctgctcgcccgcaacggcgtcaagttccggcaagccgtgtggttcaaaggccgctcccagattttcaaccaggggcggc

SEQ ID NO: 77347 - DNA, 417 bp, Zea mays
aacacgcgtcagcttgagcgtgtcaatgaagtcaggcagtctgccggtttgcaacagctcgaggaggatatcgcttcgcttgagaacaagtccagtgatagttccttatgggatgatccttccaaggcacaggggatacttgtttctctgacagaggtcaaagacaaagtgaagcttctcaacgatttcaagttacagattgaagaagcagagactattgtgaagcttacagaagaattagattctatagatactggtcttcttgaggaggcctcaaagattataaaggcattaaataaggcattagacaactttgagatgacacagcttctttctggaccatatgataaggaaggtgctgtaattaatatttctgctggcgctggtggcactgacgctcaggattgggctgacatg

SEQ ID NO: 77348 - DNA, 415 bp, Zea mays
attgcagatcgtgtatgagctgttcttgaggttcattcagtctcccgagacagacgcgaagctggccaagagatacattgaccacggattcattatcaggcttcttgatctctttgactcggaggatcctagggagagggagtacctgaagacgatccttcacaggatatacggcaagttcatggtgcatcgccccttcatcaggaaggcgatcaacaatatcttctaccggtttatattcgagacggagaagcataatggtatcgcagagctgttacagattctggggagtataattaatggctttgctttgccgctcaaggaagagcacaaattgtttctagtccgagcgctgattccgctccacaaaccaaaatgtgttgccatgtaccatcagcaactgtcctactgcgtc

SEQ ID NO: 77349 - DNA, 422 bp, Zea mays
agcacgaccacactacccacccacctccactactgaccgattcccagaaagctcgatctagcgcgcgcggctgcagagtgcagacgacgacgtacaccatggcgcggcggtccctggccctgctgctcgcgtcgtcgctcgccctcatgtcggccgccgtcgcatcggcggactcgtggctctacgacaagttcaacacggacggcaccgtccgcacccagtacgacgcgtcggggcaggaggtggcgatgctcagcctggaccgcagctccggcgccggcttcaactccaaggagcagtacctgtacggcgagttcagcgtccagatgaagctcatccccggcaactccgccggcaccgtctcgtgcttctacctctcgtcgggcgacggcgacgggcacgacgagatcgacattgagttc

SEQ ID NO: 77350 - DNA, 426 bp, Zea mays
cgccctcctcgtgcgaacgctgccgctcggggctcagcagctccgcggtgggcgcgcttccggcggtccggttcggcgacggtgacgtcgacgtgggccgcgccaccgagtgcgcggtgtgcctgggcgccttcgacgccgccgagctgctccgcgtcctgcccgcctgccgccacgccttccacgccgagtgcatcgacacctggctgctggcgcactccacgtgccccgtctgccgccgccgcgtcaccgggggccacgtggacgactccgagccggaggactcggcggcgacgcggcagcacggccggcgctcggcggacgacgcggaggtacaagtggttgtgcaccgcgcgtgggaccagcggtagtccaccgaaggcttggtgggccgggccgcgtacctcgaggccgccaggcatcgga

SEQ ID NO: 77351 - DNA, 100 bp, Zea mays
gttggtcctcacaattctctagactgagtcataggacccgttgagaacctcgccgaccacctcgctgaccctgtcaacaacaacgcctgggcctacgcta

SEQ ID NO: 77352 - DNA, 418 bp, Zea mays
cacacgcgtcagcccacgcgtccggtgttgtggcaacacatcgtcgtgatatagccatacattacaagattactgggataacctcacttcccttgaatagtttaacgtatctattcagttttaattgatattctttttcttaattcatgctgcactgttttttaatggcacatgtttaaatattcatgtttgtttatataggtttaatcaagatggggcaagtgtttcagttgtccaatactttaaacaccaatataattacagtttgaaacacattaactggccatgccttcaatctggcaatgatagcaggccgacttatttaccaatggaggtttgcagtatacttgacggtcaacgctattctaggaagctaaatgagcgccaagtcacaagcatcctgaagatggcatgtgag

SEQ ID NO: 77353 - DNA, 439 bp, Zea mays
ctcgcgagtccacacaagcctctagagggactcatatcaccacaaacagaaactaaagcaagtgttggatttaaagctggtgttaaggattataaattgacttactacaccccggagtacgaaaccaaggatactgatatcttggcagcattccgagtaactcctcagctcggggttccgcctgaagaagcaggagctgcagtagctgcggaatcttctactggtacatggacaactgtttggactgatggacttaccagtcttgatcgttacaaaggacgatgctatcacatcgagcccgttcctggggacccagatcaatatatctgttatgtagcttatccattagacctatttgaagagggttctgttactaacatgtttacgtccattgtgggtaacgtatttggtttcaaagccttacgcgctcaacgtttgg

SEQ ID NO: 77354 - DNA, 411 bp, Zea mays
atccaacaatggaagttctattgtagtgatgtcaaaaggcacaccatatacacagcaatcttataaagtcagtgattcctttccatttaagtggataaacaagaaatggaaagaaggttttcatgtgactgcaatggcaacatcaggcaatcgatgggctatagtcatgtcccgcagtgctggattttctgagcaggttgtggagttggacttcttgtacccgagcgagggcatccatagacgctgggacaatggcttccgtattactgcaatggctgccacgatggatcagtctgcgctgatcctaagcaagccaaggcgtcgcccaagagacgagacacaagagactctgcggactacacagtttcccagtcaacatgtcaaggacaagtgggccaagaatctctacct

SEQ ID NO: 77355 - DNA, 381 bp, Zea mays
atgtggtgttcctagtcatgtgcttgactataaccctgttcttcgccaaggaagtgccctacagaggaaaccagaacctccccacaaaggcaaacggcgaggtcgagactgaaccttccggcccactcgctgtgctcaagggcttcaagaacttgcccacggggatgccgtccgtgctcctcgtaactggactcacctggctctcttggttcccgttcatcctctacgacaccgactggatgggccgtgagatctaccacggcgaccccaagggtagcaacgctcagatctcggcgttcgacgaaggcgtcagagttggctcgttcgggctgctgttcaaatccttcgttcgttaagagtcctcagctgcaatacatcact

SEQ ID NO: 77356 - DNA, 411 bp, Zea mays
cagacgcgtgggctcatccgtcgccccacggaagtttcggcggcgccggcgtgctcgtgatctcaaccaaggcgtgtctccgctccggtcacccgtcactccacgcaaacatgtcgaggaggaagaccagggagcccaaggaggagaacgtcacccttggacccactgtccgtgaaggagagtatgtctttggtgtcgctcacatctttgcatccttcaatgacaccttcattcatatcactgatttgtctgggagggaaactctggttcggatcaccggtggcatgaaggtgaaggctgaccgtgacgagtcgtcaccttacgctgctatgcttgctgctcaagacgtcgcacagcgctgcaaggagcttggcattactgcactgcacattaagcttcgtgccaccggag

SEQ ID NO: 77357 - DNA, 230 bp, Zea mays
aaggtgcttagcattggcaaaagtagcagagtcacttgagcttccctgtaagtactgctctttagggtgcccagagatcgtcccatactagagcaagataaatcacgaagcacagtgcagcttcaggccatatacctgcccctatgctggttctgaatgtgctgtggctggtgatattccattccgtgttgcacatttgacggatgatcacaaagtcgatatgcacagcg

SEQ ID NO: 77358 - DNA, 415 bp, Zea mays
cagcgccactgtccagtgcgcgcgtcaagcttgcttagctagccgccatggcctccctcgccgccgtctccgtgaagcccgtggccatcaagggtctcgccggcagctccatctccggaaggaagctcgccgtcgccaggccgtcggcccgctccatccgcaggccccgcgcagccgccgtggtggccaagtacggcgacaagagcgtctactttgacctcgacgacatcggcaacaccaccggacagtgggacctctacggctctgacgcgccctcgccctacaacccgctacagagcaagttcttcgagacgttcgcggctccgttcaccaagagaggtctgctgctcaagttcctgctgctgggcggcggctcacttctgggctacgtcagcgcgtccgcgtcaccggacct

SEQ ID NO: 77359 - DNA, 186 bp, Zea mays
tgctgtatcacggttgagccgtcatacccgttgatggagggcgccactccgccgaaccctggcgccagcccgccgtccccgactccggcgcccgccgtgtggcataactactactcgtgccctgacaggaacatctgctgccgcatttacgattacggtagctactgcttcgcctgaggctgtcgc

SEQ ID NO: 77360 - DNA, 401 bp, Zea mays
gctgttcgaagatcgagtttttatgtatgcctccacgaactcggccaaattcctagcattgctgatcgtggttccgtgggtgatagattttctagtgcacgactatgccatgatgccctttttagagaggtatgtccagaaggtgccgcttgcagctgagttacttgatgtgaggcgcagccagaagctgcagatggttaaggacctgaacatcgagaaggcaagataccgtcttgaagtagagatcggcaaatctcccccgctctctgatgaggaggtctggtttgagctgcgggaaaaagcgctcgagttgagggacgattggaggctagaaaaccgacaagcttttgcaaatgtatggtccgacatggtttatggggttgttctattcctgcttctct

SEQ ID NO: 77361 - DNA, 406 bp, Zea mays
cggacgcgtggggcgattcacaaggccaatattatgaggaagacagatggtcttttcctcaagtgttgccgtgaagtggctgagacgtaccctgaaattcaatacgaggaggtcattattgacaattgttgtatgacgcttgtgaagaatcctggtctttttgatgtattagtgatgccaaacctctatggtgacattattagcgatctatgtgctggtttgattgggggcttgggcctaacacccagttgcaatattggtgaaggtggcatttgtctagcataagctgttcatggttctgctcctgatattgctggcaagaaccttgcgaacccgactgctcttaagctgagtgctgtcatgatgttgcgccacttgcaattcaacgacaaagcaaaccggattc

SEQ ID NO: 77362 - DNA, 358 bp, Zea mays
atctgaaggagaaagggagagagacactcgtcccccgtaccgtggcggaggcagacgtggtggttacaggaatgttgagtttggtgatgactctgagaggccaccacggagaaactatgagcgccacagcgggactggccatggctatgagatgaagcgtgatggcgcagggcgagggaactggggcactgccactgatgaacttattgcccacgatgcataggactctccgaagatggaggaggctgctcctgttgctgacaaacaaggtgagcagaatgatgccccagcagcagatgagaacaaagataacaaggatgctactgcaaatgaggaagaagagaaggaagaggacaag

SEQ ID NO: 77363 - DNA, 406 bp, Zea mays
  unsure (1)..(406): unsure at all n locations
aggcagcacactcagctatccagcaaaagagatcgagaggcaggagtcatggccaccgtcagcgccgccgtggtgaccaccatcgttgcccgcgccgcgatcgccaggcccaatgctctagggctgcctgcgctgagggcgaggagcgagagggtgcggtgcagctacgccaaggacgcggccccagtcagcaccaagggcgcaggcgcgtcgctgctcgccgcagcgggcgcggtgaccgcgtcggcggggcccgcgctggcgctcgtggacgagcgcatgtccacggagggcaccgggctgagcctcgggctcagcaacaacctgctggggtggatcctcctgggggtcttcggcctcatctggtcnctctacaccatctacacctctgacctcgacgaggacg

SEQ ID NO: 77364 - DNA, 421 bp, Zea mays
cccacgcgtccgcccacgcgtccggtcttcacactcctcgccatcacataaaaccagtgcaagcagaagcagcgcaatggcgagcagcaccatggccctctcctccacagccttcgccggcaaggcagtgaacgtgccgtcgtctctcttcggcgaggcccgcgtgacgatgcgcaagacggcggcgaaggcaaagccggcggcgagctccggcagcccgtggtacggccccgaccgcgtgctctacctgggcccgctgtccggcgcgcccccgagctacctgacgggcgagttcccgggcgactacggctgggacaccgcggggctgtcggcggacccggagacgttcgccaagaaccgggagctggaggtcatccactcccgctgggccatgctgggcccgttgggctgcgtgttcccg

SEQ ID NO: 77365 - DNA, 408 bp, Zea mays
cccacgcgtccggcaaacatcttgatcatgtgaatatgcttggacttagcaagaccacacttagattacgatacctaatcaattggttggtgacctcattactgcagctccggttgcctgattcaggggatggcgagggggtaccccttgtttatatatatggtccaaagatcaaatatgaccgtggagcagcagttgcattcaatataaaggactgcaacactggaacctccctgataaatcctgaaactgtacagaaactggcagaaaaagaaggcctctccttgggcgtcgggttcctaagtcatatacgcctcatagacaaccagaaacatggtgcggttgatgtggggttaagttcttccttgccagcggcaaatggccgtcgtgaaaagaaaaatagcaaga

SEQ ID NO: 77366 - DNA, 419 bp, Zea mays
cgccgcaccagcgccagcccgcgccgtggtcagaatgaggtccttcaccgtgcgcgcctctctccgcaaggccaccggcaccgccgccgtggcaatggctgccagcgccctgcttgccggcggtgccatggcccaggaggtgctgctgggcgcaggcgacggcgggctcgtcttcgagcccagccagttcaccgtcaacgccggcgacaccatcacattcaggaacaacgccggcttcccgcacaacgtcgtcttcgacgaagacgaggtgccgagcggcgtcgacgctaccaagatctcgcaggaggagtacctcaacgcgccaggccacacctactccgtcagcctcaccgtgccgggaacctacggcttctactgggagccgcatcaaggagccggcatgggcggaaagatcaccg

SEQ ID NO: 77367 - DNA, 365 bp, Zea mays
cagacgcgtgggctagcctcacctaccctatacacagccactactgttgatcgattgagtttgaacccaccaggatcaggcttacgattacagcatgtcggcgtccccggagttgtacaggcccgcggaagcgccggccttctcgccgtcctgcgccacgcagccgctcgtgttcgccggcgacgactactgctgcaggacgccgacgggcagcgggatctgctacctgagggagcccagcacgtgcccgcccgcgccccggaatccgccgccgccgccgcccacgtgcaggaagcgcctcttccaagcggggggtcagcaagttgcctaagcggggcccgtccctgttgtgagaatcggcctcg

SEQ ID NO: 77368 - DNA, 378 bp, Zea mays
ggagtactcacatgtgtgtaagtatgcgtgctccgaggaagtccccgagctccaggacatgggtggcccagtcgaaggtggtttcagcgttgcgttcgaccccctcgacggctccagcattgtcgacaccaacttcaccgtgggaaccatcttcggagtctggcccggcgacaagctgaccggagtgaccggcggcgaccaggtcgctgccgcgatgggcatctacggccctcgcacgacctacattgtcgccctcaaggactgccctgggacgcacgagttcctcctcctcgacgaaggtaaatggcagcatgtgaaggacaccacgaccatcggggaagggaagatgttctctcctggtaatctgatggcgacatt

SEQ ID NO: 77369 - DNA, 417 bp, Zea mays
ggcggtagtgcatgccctcgggagtgggattacgccaggttcagggccatcgcacacaagtgcggggccatgttgctctgtgacatggctcatatcagtggtctcgttgctgcgcaggaggctttgaatccttttgaattctctgatgtggttaccactacgacccagaaaagtcttcgagggccaaggtctggtatgattttctacatgaagggcccaaagcctccaaaaaaaggccagcctgagggtgctctgtatgactacgaggacaagatcaactttgctgtgttcccgtcactccagggggggcctcacaatcaccaaattgctgctctagctgtagccttgaaacacgccatgtcacctggattcatggcctatatccagcaagtcaaggcaaacatagtttcacttggt

SEQ ID NO: 77370 - DNA, 379 bp, Zea mays
cccacgcgtccggctacgtagcagtgcaataaaaaaagcagccgcaatggcgagcagcaccatggccctctcctccacggccttcgccggcaaggccgtgaacgtgccgtcgtcgtccgccttcggcgaggcccgcgtgacgatgcgcaagacggcggcgaaggccaagccagcggcggcgtccgggagcccgtggtacggccccgaccgcgtgctgtacctgggcccactgtccggcgagccaccgagctacctgacgggcgagttcccgggcgactacggctgggacaccgcggggctgtcggcggacccggagacgttcgccaagaaccgggagctggaggtgatccactcccgctgggccatgctgggcgcgctc

SEQ ID NO: 77371 - DNA, 367 bp, Zea mays
cccacacgtccggctcgatctactactactactagctggcacacatactagccagcctgccagccagcttgccatggcgcccaccgtgatgatggcctcgtcggcaaccgccgtcgccccgttccagcgtctcaagtctgccgccagcctctccgtcgcccgccgcagcaccaggagcctcggcaacgtcagcaacggcggaaggatccggtgcatgcaggtgttgccggcctacagcaacaagaacttcgagacgctgtcgtgcctgccgccgctgtcgacggacgacctgctgaagcaagtgggctacctgctgcgcaacggctggatagcctgcctcgagttcagcaacctcgggttcctgtag

SEQ ID NO: 77372 - DNA, 383 bp, Zea mays
cgcgagtgagtgaacaccagccgtattgtcgcgaccccgaccgatcctcgcctgctgcagccatggcgacctccgcggcgctctccaccgccgccaatcccacccagctctaccggtcccgcgctttgctgggcaagccggtgaaggggcttggcctgagcatgggccgcgagcgcgcccagcggagcattgtgtgccaggcggcgagcagcatctccgccgaccgcgtccccgacatggtgaagcggaagctgatgaacctcctcctcctcggcgccatctcgttgcccaccgtcggcatggtcgtcccctacggcgccttcttcgtccctgccggctccgggaacgccggcggcgggacctacgcgaaggacaagctgggc

SEQ ID NO: 77373 - DNA, 413 bp, Zea mays
tggcgtcgtccatgctctccgctaccaccgtgccactccagcaggggggcggcctgtccgagttctccgggctcaggagctccgcgtcgctgcccatgcgccggaatgccacctccgacgacttcatgtccgccgtctccttcaggacccacgcggtcggcacgagcggcgggtcgcggcgggcgccgacggaggcgaagctgaaggtggccatcaacgggttcggccgcatcgggcgcaacttcctgcggtgctggcacgggcgcggcgacgcctcgcccctcgacgtcatcgccatcaacgacaccggcggtgtcaagcaggcgtcccacctgctcaagtacgactccacgctcggcatcttcgacgccgacgtcaagcccgtcggcgacaacgccatctccgtcgaccgc

SEQ ID NO: 77374 - DNA, 415 bp, Zea mays
cggacgcgtgggcttgctctgatagcttgctccaggacgtacgtacgtacgtagatcgatccatcgatcgctagctagctgacgaccatggcgtccctctcctctgccgccatcaccgccccttccttcacggccgcgcccgctcgcgcagtggtcagcaggaggtccttcaccgtgcgtgcctctctccgcaaggccactgccaccgccgccgtggccgttgccgccagcgtcctgcttgccggcggcggcgccatggcccaggaggtgctgctgggcgcaggcgacggcgggctcgtcttcgagcccagccagttcaccgtcaaggccggcgacaccatcaccttcaagaacaacgccggcttcccgcacaacgtcgtgttcgacgaagacgaggtgccgagcggcgtcgacg

SEQ ID NO: 77375 - DNA, 374 bp, Zea mays
ggagaatgcacgggcagctgcccagcaggaagggtttgaggtaaagaggaaaggggataaggagtttgttgcaaacattcggctggagatgaactacatgccctgagaagttcaagttatcacagccgcttatggaggtgcttggggtggaggtggacactcgtgcacgggtgattgctgccctctggcagtatattaaagcaaagaagcttcagaacccaaatgatccttccttcttcatgtgtgaccctcaattgaagaaggtgtttggggaggacaagctcaagtttgcaatgttgtcacagaagatatctcagcatctgtctgccccaccacccatcaatttggggcacaagattaagctgtcagggaac

SEQ ID NO: 77376 - DNA, 422 bp, Zea mays
gctagcgcttatagcttgtcagccatggccaccgccgccgcgtctagcctcctcaagtcctccttcgcgggctcccggctcccggccgccacgcggaccacaccggcgtccctcgtggtggccaccggcccgcgcggcgccggcgcggggcccatctgcgcgtccatgtccatgtcctcctccaacccgccctacgacctgacgtccttccggttcagccccatcaaggagtccatcgtgtcccgcgagatgacccgtcgctacatgacggacatgatcacctacgccgacaccgacgtcgtcatcgtgggcgccggctccgcggggctgtcctgcgcgtacgagctctccaaggaccccgccgtgagcatcgccatcgtggagcagtcggtgtcgccgggcggcggcgcgtggctgggcgg

SEQ ID NO: 77377 - DNA, 351 bp, Zea mays
gcgacatgacggcaataaaagcagatgacatcttgagcacgctacagagcctggacctaatccagtaccgcaaagggcagcacgtcatctgcgctgacccgaaggtcctcgaccgccacctcaaggcggcggggcggggcggcctggacgtcgacgttagcaagctcatatggactccctacaaggagcaaggctaaaaggcgaactgctccgtgtctcagatttagactcgctgaccgatgcgatgcagtccctgtacatagcatctccccacagctcacttgacttgacttgactcgtgtaccgtgaaactctacttgtaactttgaacatccacatcgttgtctcctc

SEQ ID NO: 77378 - DNA, 381 bp, Zea mays
aaaatcacgtctcctccacccgcactccattggcgccgctcccctcccctcgccgccgccggagatctgatccgatccgatccgatccgtttgtgcttgtgctgcagcaggagtgagaagtaaaaaaatatggctgccctgccactggccaccgccgaagtatgcgacgctaaccctcacctgatcatgaacggcgagctccgcgcgctccagccaatcttccagatctacggacggcgccaggtcttcgccggccccatcgtcacgctcaaggtctacgaggacaacgtcctggtccgcgagttcctcgaggagaaaggccacggtagggtcctcgtggtcgacggcggcggcagcatgcgctgcgccatccttggcggc

SEQ ID NO: 77379 - DNA, 397 bp, Zea mays
cccacgcgtccgcccacgcgtccgagcatctccgccgaccgcgtccccgacatggagaagcggaagctgatgaacctcctcctcctcggcgccatctcgttgcccaccgtcggcatggtcgtcccctacggcgccttcttcgtccctgccggctccgggaacgccggcggcgggacctacgcgaaggacaaactgggcaacgacatcacggtggaggcgtggctcaacacgcacggtcccaacgaccgcacgctcgcgcaggggctcaagggtgaccccacgtacctggtggtggagcaggacaagacgctggccacctacgggattaacgccgtgtgcactcacctcggctgcgtcgtgccgtgggacggcgctgagaaaaagttcatctgcccct

SEQ ID NO: 77380 - DNA, 387 bp, Zea mays
gttcgctcgctcgctcgctcgtttgctcttatcccccttgctttgctcgttcgttcgattggagctagccgctgcgtggattcctcggctcgccgtccggatctggcctcgctgagctgcagctgccgcgaatcccgactcgattcggccgcgctcggatctcgccggactagcggggaccgaggcctctcgattcgcctcggggccgagatggatcatgtggtcggaggcaagttcaagctcggcaagaagatcgggagcgggtcgttcggggagctcttcctagctgtgaacgtgcagaccggagaggaggtcgccgtcaagctgggaaatgtcaagacgaagcacccgcagcttcactacgagtccaagctatacatgcttctc

SEQ ID NO: 77381 - DNA, 401 bp, Zea mays
caggccatggccttggaaactcttgaaatccggcctgatactttcattctgttagatgttccagatgaactccttgttgaaagggtggttggaaggcggcttgatcctgtaacagggaaaatatatcatttgaagtattctccgccagagaatgaagaaatcgcttcaaggcttacacaaagatttgacgatacagaagaaaaggttaagttgaggctggagacttattaccaaaatatcgagtccttgctatcaacatatgagaacattattgtcaaagtgcaaggagatgccacagtggatgctgtctttgctaagatcgacgagctgctgggttctatcctggagaagaaaaatgaaatggtttccagcacatgagcaaggtaaaaatgattgggtgc

SEQ ID NO: 77382 - DNA, 403 bp, Zea mays
cgaagtgcgagcgacccacgtccacacgacacgaaccaccaccaccaaccagcagccgcaccacgcacccagcgcaaagcgatggcgtcgctcaccatgatggcgtccttcgccgccgtggcggtggccgcgccctcgcgccgcggcaccttcgccgtggtcaggtccgccaaggtcgaccgctgccaggagcccgccacgctagcagcaaccgaggccaggcccgccgccgacggacgccgcgccgtcatgctcgcggctgctgcggcggccgtggcagccatcggcggcgccggcgccgccatggcgggccccaagaacgggacccccgaggcgaagaagaagtacgcggccatctgcgtcaccatgcccaccgccaaggtctgccacaactgagcacgcc

SEQ ID NO: 77383 - DNA, 412 bp, Zea mays
atgtacacaccaagttcaatatcaacatgacttttgcaggagaaccggcgtgtgctagctactgacgagtggcttagggttcaagggtgtgaggatgtatatgctcttggtgattgtgcaacgattgctcaaagaaaagttatggaagatgttgcttccatattccgagtagcagacaaggataactctggcactttaaccgtgaagaaaataaaagatgtccttggggacatatatgagagatacccacaagtggaattgtatcttaaatccaaccaaatgaagagcttccacgagctacttaaagactcagatggtaactccaaggagttgaaagaactgaacatcgaacagttcaaaaaggcccttgctcaagtggactctcaagtcaagatgctcccagcaacggctc

SEQ ID NO: 77384 - DNA, 403 bp, Zea mays
cgagaagagtcgaggaaaaatctcgcattcgcaaaccaagcaaatggaggcatgagctccgccgcctccccgtctctcgccgatctcccccaaaccctagcctcgacctgaccgccagcgggcccgcaggccggagaaggagtcggagtcgcccccacccacccaccctctgccgcgggcggggagcgggcggcggacgagatgccgtcgcacggggatctggaccggcagatcgcgcagctgcgcgactgcaagtacctgcccgaggcggaggtcaaggtgctctgcgagcaggccaaggccatcctcatggaggaatggaacgtgcagcccgtgcgctgccccgtcaccgtctgcggcgacatccacggccagttctatgacctcatcgagctctttcgca

SEQ ID NO: 77385 - DNA, 325 bp, Zea mays
atgtacgcggtggggttctggatccgggagactggccaggccctcgaccgcctgggctgccgcctgcagggcaagtacttcttccacgagcagatttcaaggcatcgcaccatcatgaatatcgttgacaaaacccctcatgtgcataaagacgcatttgttgctccaagtgcatcccttattggtgatgttcaagtcgggtcaggagcttccatttggtatgggtgcgtcttaagaggggatgcagacatcatacacattggatctgggaccactatacaagacaattctcttacacatgtgggcaaatctaatctaagtggga

SEQ ID NO: 77386 - DNA, 374 bp, Zea mays
actcctcgccatcacataaaaccagtgcaagcagaagcagcgcaatggcgagcagcaccatggccctctcctccacagccttcgccggcaaggcagtgaacgtgccgtcgtctctcttcggcgaggcccgcgtgacgatgcgcaagacggcggcgaaggcaaagccggcggcgagctccggcagcccgtggtacggccccgaccgcgtgctctacctgggcccgctgtccggcgcgcccccgagctacctgacgggcgagttcccgggcgactacggctgggacaccgcggggctgtcggcggacccggagacgttcgccaagaaccgggagctggaagtcatccactcccgctggggcatgctgggcgccttg

SEQ ID NO: 77387 - DNA, 366 bp, Zea mays
agcgcttggcgagtcggatctcccgtacaccgtgcgtgtcgacccggccaccggcgaggtgaccacgcacggccggtgcgacttcggcggccgtctcttcatgggcatgaccgctcacccgaagaaagaccccgtcactggcgaggtctttgcgttccggtacggccccgtgccgccgttcgtcacctacttccggttcgacccggccgggaacaagggccctgacgtgcccatattctcagtgcggcagccgtcgttcctgcatgacttcgccgtcacggagaggtacgctatcttcccggagatacagatcgtcatgcagcccatgggcatggtgacgggcggcgcgcccgttgggtctgacgc

SEQ ID NO: 77388 - DNA, 335 bp, Zea mays
aaacaccagtgtggtataacatggtgaaacaaggtctcatcagcgaccctgttttctctttctggtttaaccgacatgctgatgaaggagaacgtggtgaaattgtgtttggtggaatggattctagccactacaagggcgatcacacgtttgtcccagtcactcggaagggatactggcagttcaacatgggtgatgtcctggttgatggaaagtccacctgggttttgtgccggtggctgtccagccatcgcagattctggaacttccttgcttgctggccccacaaccataattactgaaatcaatgaaaagattggtgctgctggtgtagt

SEQ ID NO: 77389 - DNA, 389 bp, Zea mays
acccacgcgtccggtgtcgtgtagtgtgtagtcgcagcagctagcgcccggccggccagtcgagtgagtccatcctccatcgccatccaatggccgccaccgccctgagcatgagcatcctccgcgcgccgccgccctgcttctcgtccccactcaggctcagggtcgcggttgccaagccgctggcggcccccatgcggcgccagctgctgcgcgcgcaggccacctacaacgtgaagctgatcacgccggacggggaggtggagctgcaggtgcccgacgacgtctacatcctggacttcgccgaggaggaaggcatcgacctgcccttctcctgccgtgcggggtcctgctcctcctgcgccggcaaggtcgtctctgggtccgtc

SEQ ID NO: 77390 - DNA, 159 bp, Zea mays
acggacgcgtgggcggacgcgtgggcgctgggaaacatcctaggctattcctctggctccacaaacaactggcacaagtggtttccgttccttatgacaaacgcctgctgtgaaccctgcgcacacccgaaaggcgcgtttccggtggctgtggtgttc

SEQ ID NO: 77391 - DNA, 388 bp, Zea mays
ccacggtactccagccgctaccctgcgattccgccagtacgccaccaccaccgagcctggactaccgccgccgcccttcgccgatatcttcagcggcgaacagcgcccaccagatcccgcccctgcgatggagtccgtggtgaacccgaaggcatacccgctggctgatgcgcagctgacgatgggtatcctcgatatcatccagcaggccgccaactacaaacagcttaagaagggagcgaatgaagcgacgaagaccctgaataggggcatatcggagtttgtagtgatggcggcggacacagagcctctcgagatcctgctccacctccccttgttagctgaggataagaacgtgccatatgtggtttgttcaatcgaagcaagc

SEQ ID NO: 77392 - DNA, 373 bp, Zea mays
agatgatctacaaaatggagttgctggggctgttccagttccacctgatgagggtggcaaagaagaggttatcaattcattggttgccaatgttgaatcaatgattaaagcagaccggaagatcacatcattgaaacaacttcagggtcatatttggaggattggatttcaaaagaaagagctacagggagttgtctttgaggatgttcctgtggcgctaaagaactggcatgctactggcataaaggtctacatatactcaagtggaagtagagaagcacaaaggcttctatttggcaatacaacatacggtgacctgcgaaagttcctgtgtgggtactttgataccacaactggcaacataacagaaaca

SEQ ID NO: 77393 - DNA, 388 bp, Zea mays
cccaaccaagcccgcacgacacgacaccaagtcgaggagctcgagagggcaccaataatggccggcgtgaactccagcgtcgtcgggctcaagcccgccgcggcagtgccgcaggccgccgccgcctcatcgccggcgaagcgggtgcagctggccgcgcccgagggccgccgcgccgctctgctcggcctggcggccgtcttcgccgtcacggccaccaccgggtcggccaaggccacgatcttcgatgagtacctcgagaagagcaaggccaacaaggagctgaacgacaagaagaggctggccaccagtggagccaactttgcgcgcgcctacaccgtggagttcggcagctgccagttcccctaaaacttcactgggtgccagg

SEQ ID NO: 77394 - DNA, 367 bp, Zea mays
acccacgcgtccgcccacgcgtccgcccacgcgtccggagatggcacaagccatggcgtccatgaccggcctctcgcacggcgttctgcccagcaggcgcgccgccaacagggccaggacggccgccgtcgtcagggcgtccgccgaggcgcaggcgcaggcgggccgccgcgccgtgctcgggctggtggccactggcatcgtcggcggcgccttgtcgcaggcggtgcacgccgagaccgtcaagaccatcaagatcggagccccgccgccgccctccggtggactccccgggactctgaactctgaccaggcgagggacttcgacctccccttgaaggagcggttctacctgcagccgctgccg

SEQ ID NO: 77395 - DNA, 355 bp, Zea mays
actggaacagcttctggtggatgagggaattaactgcgagatagtccgatcagtgcttatggagcgtgcaaactgcccttatctagcagcacaaacagcgaccgaaatggaagcattttcgagaacagaaacatttcaaaaaatcgttgaagcgtattcaaggccaacaaggatcatccgtggaaaagaaattgagtctgctttggaggttgacccacacgtatttgagaaagatgaagagaaagttttgtggagcgcctacttggacgttgctgataagatccatcctggtgttgatattaacacctttgtggatgcctctcttatcctgatacaacccctagaagatttcttc

SEQ ID NO: 77396 - DNA, 373 bp, Zea mays
cccacgcgtccgcccacgcgtccgcccacgcgtccgcggacgcgtgggctgcggctacagtggtggcggcggcggctactgtggtggtggcggcggctacggcggtggcaaccgtggcggcggctacggcaactcccacgggaactggaggaactgagcggtggggcccgcgcggccaagttatcctgttcgctaccgtgttgtttaccctagtccagagtgtttatcttcgttcgtctcgtgtttgttgttgcccatctgtgtttttgattgaaggtcgctctgtgtcagttgttactgctgtgttcatcctcggctccagcacacccatgcatcaaccagcatggactgcggatcaatgggtgctgttacc

SEQ ID NO: 77397 - DNA, 390 bp, Zea mays
aattgcattttggaagaaggcgaacctgatattccttttcttcctgctccggaagctcatactgcctttctactccttcacgctgttctgcatcatcctcccgatgacgatgttcgtgccggaggccgagctccccgactgggtggtgtgctacgtcccggccctgatgtccctgctgaacatcctgccgtcccccaagtcgttccccttcatcatcccgtacctgctcttcgagaacaccatgtccgtgaccaagttcaacgcgatgatctccgggctattccagctggggagcgcgtacgagtgggtggtgaccaagaagtcgggccgctcgtcggagggcgacctcatcgcgctggccccgcccaaggagcccgtgaagcttcacgc

SEQ ID NO: 77398 - DNA, 336 bp, Zea mays
gccaaaccctagccgccgagtgccgcccaccgcccgcccgccctccgccgcgcgtcggacggtgccgagggaagaggcaccatgaggttggagaagtgctggttctgctcctctaccatctaccccggccatggaatccagttcgtccgcaacgacgccaaggtcttccgcttttgccggtcaaagtgccatacaaacttcaagatgaagaggaaccctcgtaaggttaagtggacaaaagcatacacgcatttgcatggcaacgacatgacccaggatacaacctttgagtttgagatgaacaggaacaggccggagcgctacgaccgcaattta

SEQ ID NO: 77399 - DNA, 389 bp, Zea mays
gtctattccattccaggaagagtacgcggagggcgaagaggttgggaggctgccatgcgagcaccggtaccatgtgtgctgcataggccactggcttgggcagaagaactggtgtccagtatgcaaagcgtctgccgtgccttccaagggctgaagcattggggatgctggaaaccccgttccggattacaaaccatccttgcttttgtctacgtacattgttcttttccctatatgcattagatatagatcatgtctagatgtatgacgctagaacagcttgcgatttgggaggaagctaagagagtaatagttagctggttaataatagttcatagctaatatttgccagataactattacttgggtacctaatagctgtgcccttc

SEQ ID NO: 77400 - DNA, 312 bp, Zea mays
cttgctctgatagcttgctccaggacgtacgtacgtacgtagatcgatccatcgatcgctagctagctgacgaccatggcgtccctctcctctgccgccatcaccgccccttccttcacggccgcgcccgctcgcgcagtggtcagcaggaggtccttcaccgtgcgtgcctctctccgcaaggccactgccaccgccgccgtggccgttgccgccagcgtcctgcttgccggcggcggcgccatggcccaggaggtgctgctgggcgcatgcgacggcgggctcctcttcgagcccagccagttcaccgtc

SEQ ID NO: 77401 - DNA, 377 bp, Zea mays
acccacgcgtccggacgcgtgggcggacgcgtgggccgtgtgatgcagctggcgtcggagcgtgcggtggttgtgttcacgctgagcagctgctgcatgtgccacacggtgacgcagctgatggcggacctgagcgtgaacgcgctggtgcacgagctggacagcgaccccaggggcaaggacatggagcgcgcgctgctcaagatgctgggagggagggcgcccgctgtccccgccgtcttcatcggcggcaagctcgtcggcggcaccaacaatgtcatgtcgctccacctcggcggagagctcgtgcccatgctcatgaacgctggcgccctctgggtctagacaccagggcatcgcgcgcgcgcgtactcgtc

SEQ ID NO: 77402 - DNA, 357 bp, Zea mays
ccaaatttgaggataagcacatcaagtgatgttacaggagtagaaatcgcaggtgccctgaagaacgttcttgcaatagctgcaggtatagtggaaggcatgagtctcgggaacaactgtatggctgcccttgttgcccaaggctgttcagagatacggtggttggcgacgaagatgggagcaaagccaaccactctttctggcttgtctgggtccggtgacatcatgctcacatgcttcgtcaacctttcgcggaatagaacagtgggactacgcctcggttctggtgaaaagcttgacagaatcatgggttctatgaatcaggttgctgaaggcgtatcaactgctggggctgtc

SEQ ID NO: 77403 - DNA, 381 bp, Zea mays
  unsure (1)..(381): unsure at all n locations
acngacacgtgggctttacagaatgtgtcaaaattactcctacatttttgcaatctgctggtctgaatgtaaaccaagtccttacaaggtgtcttttcgctggactgtgtttccatgcataccaacaggtgtcttacatgattttggcgatggtgtctcctgtcactcattctgtgggcaactgtgttaaacgtgttgtggtcattgtaacatcagtgctgttcttcacgacacctgtttctcctatcaactccctcggtactgcgattgcacttgccggagttttcctgtactcacagctcaagcgacttaagcccaagccgaagaccgcttaaatagggattgtaattctcatctctttgtgttaatggagttaaacac

SEQ ID NO: 77404 - DNA, 342 bp, Zea mays
acgtccgggcaggacaacttcttgccccggacggctactcctcttgaagacattttcaagtcgatcctctgcttgccttgcctcctaggtttgcgatgtttgacggatacatgtgtacctgaagacgctatgcttaacgattcaaggaggctttatgcaccaggccggatttatcacatagtccaaagaagaacgtgcatgtgcggcagatatccaccggtagtcaaaacagctgtgccggtggatggtacatttgagcacatagttctttcctgcaatgccaaagcggaccatgccattatttggattgagagggaggcccataacgctttggatctgatg

SEQ ID NO: 77405 - DNA, 269 bp, Zea mays
gcctccagtttggtcagtatcgtgcaatttgatcttgtggcacttccgccaactgtcaccatgcagaacgaggagggtaagactgtggacctctatgtccccaggaagtgctcgggcacaaacaagatcatcactgccaaggaccatgcctctgtccagatgaacattggccacatggatgcgaatggcctgtatgagcggcacttcacaacgtttgggcactctgggtgttgtcaaggcgcagggcgactcacacaacaccttggaca

SEQ ID NO: 77406 - DNA, 202 bp, Zea mays
cggagacagcctggaggagttcctgaccaaggcgacgccggacaagaacctcatcaggctgctcatctgcatgggggacgccagggggacgatcgcagtcaaagtccgcgcagcgtcctgcggcgagagcgcctgtgtcaagtccttcggcgacgagcagctggccgtcgacaggcgcgctaacaggctgctctttgaggct

SEQ ID NO: 77407 - DNA, 330 bp, Zea mays
aacagggtcaagcttctccataagaaacaatggaaggatgagatccgcacgttgaaggagatgaagaagagggggaaaactgatcgggatcattatggctatgctaatatcgctggtcggaacgatcaggatcctcctccagagaatgtatcagttcccttgcctgacatggtgcgtcccccttcatttgagtatcacaatcccacatacccgtgccgctttttggagtgcacctcaactgtcctatcaacgcctattttggatgcgcatggatgggatcatgactgtggttatgatggagtgagccttgaagagacactggctatcctt

SEQ ID NO: 77408 - DNA, 340 bp, Zea mays
acccacgcgtccgacccaatctcccctagaccagaaaaattcccagttctttggtccgcgtcagagaggcggcggcgatgtctgggcgctgggagggcggcgaaggtctgggcaagggcggcgcgaagcgccagcggaaggtggtccgcgacaacatccagggcatcaccaagccggcgatggggaggctggctaggaggggtggcgtgaagcgcatcgcggggctcatctacgacgagacccgcggcgtgctcaagatctgttctcagaacgtcatccgcgacgccgtcacctacaccgagcacgcgcgccgcaagaagggtgacgccatggacgtcgt

SEQ ID NO: 77409 - DNA, 319 bp, Zea mays
aagctgttctcggccatggtggtgcgcaggccggcgcacctgttcctggacgagctgggcgtgggctacgacgaggccgaggagctacgtggggggcaagcaggcggcgctgttcaggtcggccgggatgaggcggcgcctggcgcggggcaacgtgaagctgttcaacgccgtggcggtggaggacctgatcgtgcggcaggggcgcgtcggcggcgtgggcacgaactggggcgctcggtgtccatgaaccactgacacgcaagtcgtacatggaccccaacgtcatggagggcgcaggtggtggtcagctcctgcg

SEQ ID NO: 77410 - DNA, 324 bp, Zea mays
acccacgcgtccgcccacgcgtccgcccacgcgtccggtcacttccgcacttctgcaagagagaagggtcaggttcatccagcgacgcgctggatgcggtagattgctactcctaggacgagcctttgcgcgagcagctgtacagctacatgaagcagcagcaatctctgaatcaggactccgttggtcccagaggagaaggctcggtcgaggtggaggtgccctcgcctggccttgatgaggccaagattgcggagacgatgaaaggagagctccagaatttgaggggaaccggcggtcccgctcattcatgcggcagcatcc

SEQ ID NO: 77411 - DNA, 292 bp, Zea mays
ccaccgaaagaaatcattcgcaagattgaggaacctgcaaaacctctacgatttggtgtccacacgaacaactacaacttgacgctagagaaagtaaaaccagggaggaagggaaacctgaatgttgctacggagatactacaggttgcgccctcccttcataaggtacaagtccggaaagcaaaaggcgacactctggaattccaaaagttctacaagaacctttccaagaccttaaaggaccttttccggaaatctcaagacctgcaaatgcgaccggcttcttaacatc

SEQ ID NO: 77412 - DNA, 176 bp, Zea mays
acatggatactgcttgccatagaagtttgaagattgtacatttgagtggctctactggccccaaccccgtgagccattcaatgatgaaaccattgaatacagcagatcactcgatgctgaggaaggcatcacgcttctcaagatccatgggtgggaactgcctccacggtgtgctc

SEQ ID NO: 77413 - DNA, 198 bp, Zea mays
acgcgtccaggcaaaagatggatctcttcacaagaggagacaagctctggcatttatttatgagaagcatatcgtccatgccttgtttgctgaggttgcagacaggtatggagaccgagaaaggggcggcacaaggatcatgccgacgttcccaaggcggggagataatgcacctatggcgtacattgagcgtgttta

SEQ ID NO: 77414 - DNA, 337 bp, Zea mays
agcggacgcgtggggcagcaagaatgaaagaagctagcgcttatagcttgtcagccatggccaccgccgccgcgtctagcctcctcgggtcctccgtcgggtgctcccggctcccagccgccacgcagacgacacccacggccctcgtggtggccatcggcccgcgcggcgctggcgcggagcccatctgcgcgtccatgtccatgtcctcggcgagggcgccctacgaccggacgtccgtccggttcagccccatcaaggagtccatcgtgtcccgcgagatgacccgtcgctacatgaccgacattatcacctacggcgacaccgacgtcgtcat

SEQ ID NO: 77415 - DNA, 293 bp, Zea mays
catcggcaagcacatcttcgtctgcgccagtattgacgggaagctgtgtatgcgggcgtatacgcccacgagcatggtggacgagatcgggcacttccggctcctcgtcaagcggcagggcaagagcgagcatcccaggttccccaacggttggctcatgacccagtacctcgaggcgcgtcccgtcggctcggagatcgacgtcaaaggcgcgcgtgtccacgtggagtccagccgtcgcggcagcttcgtcattaacgccaagcagcgccatgccagccgcctcgccatga

SEQ ID NO: 77416 - DNA, 323 bp, Zea mays
tccgcccacgcgtccggacctaaagccggaaaacttgttacttgattcaaagtataatgtaaaacttgcggattttggtctgagcaatgtcatgcatgatggccattttctgaagactagctgtgggagtccgaactatgctgctccagaggtaatatctgggaaactatatgctggacctgaggtcgatgtatggaattgtggggtgattctttatgctcttctttgtggaactcctccatttgatgatgagaatattcccaatctgttcaaaaaaattaagggaggtatctacacacttccaagtcatttgtctgctttgg

SEQ ID NO: 77417 - DNA, 377 bp, Zea mays
acccacgcgtccgcccacgcgtccgtgactgacatggatagcaccaacgtgtatgcttacatctcaataatcgctctaattgtttgcattccacctgcattgatctttgaagggcccaagctaatgcagcatggatttagtgatgccattgcaaaagtaggtttgacaaagtttgtcagtgacctattcttggttggactgttctaccatctgtataaccagattgctacaaacaccttggagcgagtggctcctctgacacatgctgtcggcaatgtgttgaaacgtgtttttgtcatcggtttctcaatcattgtttttggcaacaaaattagcacacaaactggaattggcacgtccattgccctagctggtgt

SEQ ID NO: 77418 - DNA, 325 bp, Zea mays
cgatctacgactactactagctggtacacatactagccagcctgccaaccagcttgccatggcgcccaccgtgatgatggcctcgtcggcaaccgccgtcgccccgttccagggtctcaagtccgccgccagcctccccgtcgcccgccgcagcaccaggagcctcggcaacgtcagcaaccgcgggaggatccggtgcatgcaggtgtggccggcctacggcaacaagaagttctagacgccgtcgtacctgccggccgctgtccacgggcgaactgctgaagcaagtggactacctgctgcacaacggctgggtaccccgcct

SEQ ID NO: 77419 - DNA, 368 bp, Zea mays
cgtccacccacacgtctgcccacgcgtccgcccacgcgtccggcaccgtcaggaacccagatgacccgaagaacgcgcacctcaaggcgctggacggcgccgccgagcggctgatcctctgcaaggccgatctgctggactacgacgccatctgccgcgccgtgcagggctgctagggcgtcttccacaccgcctcccccgtcaccgacgacccggagcaaatggtggagccggcggtgcgcggcaccgagtacgtgatcaacgcggcggcggaggccggcaccgtgcggccggtggtgttcacgtcgtccatcggcgccgtgaccatggaccccaagcgcggggccgacctcctggtcgacgagtcc

SEQ ID NO: 77420 - DNA, 395 bp, Zea mays
acccacacgtcaacggacgcgtgggatcgaaaacagaggattttaagtactattcgaaattcgggagaattgcgtaaagggacccttgaacaactcgaaaaagctcgtattcgattacagaaagtcgaactggaagcagatgagtatcgaatgaatggatactctgaaatagaacgagaaaaagaaaatttgattaatgctacttctattagtttggaacaattagaacagtctaaaaacgaaaccctttattttgaaaaacaaagggcgatgaatcaggtccgacaacgggttttccaacaagctgtacaaggagctctaggaactctgaatagttgtttgaataacgagttacatttccgtaccattcgtgctaatattggcattctcggggc

SEQ ID NO: 77421 - DNA, 390 bp, Zea mays
acccacgcgtccgcggacgcgtgggctttggttgtgtatatgggtttgtcaacacttccatcacttgctccaaagttaatgaagcacggcctgccaccagatacccctgctgttgcagtagagcgcgggactacaccccaacaacgaacggtgttcgcctcgttgaaggatcttgtggatgaagtcaagtcagccgatctagtttctccaactctaataattattgggaaagtggtatccttgtcacccttctgggttgagtcatctgaacatgatgcactgaaagttcagagctcgtaagcaactgacgccagatgacaacagattttcttggtttttagtgactggccaatacttgagaaatgcacgatcccacgatctggaagcaca

SEQ ID NO: 77422 - DNA, 369 bp, Zea mays
aacctctggtcgaccttggatgcagatgtcgtggtgatcttgcaaaaccacatcgcacatgcattgatttttggtttcgtactacaggttcaaacaagtgtgagatatgccagcaggttgctgtcaatatcgcccctccagaaacgcaatcaagtacaagttattgggtttggagggttgattccacttatggaatgggacgaggaggacgagaaaggggatggttcagcccactttgggttgcatttgcaattctgattggtggtctcgtattggatgtgcggagacccgtttctcttggtgtttccgcacgtcctgtccgtagactaagtggggttctaatagttcacggattcggcagcgcccttc

SEQ ID NO: 77423 - DNA, 368 bp, Zea mays
acccgtcgtggtttacttctaccccgccgacgagacgcccggatgcacaaagcaggcgtgcgcgttcagggactcgtacgagaagttcaagaaggccggggcggaggtgatcggcatcagcggcgacgacgcggcgtcgcacaaggcgttcgcgcagaagtaccggctgccgttcacgctgctgagcgacgaggggaaccgcgtgcgcaaggagtggggcgtcccctcggacctgttcgggacgctgccggggcgccagacgtacgtgctggacaagcagggcgtcgtgcagtacgtctacaacaaccagttccagcccgagaagcacatcggccgagacgctcaaggatcctgcagaccctctgaat

SEQ ID NO: 77424 - DNA, 348 bp, Zea mays
ccgggccggcccacgcgtccacacaatgcattgtaggttataaaccaccaaccctatgatagcaaagcagatgtgttcagctttgccattgttctctgggagctgataacgtccaagatcccatatgataccatgacccctctccaagcggctgtaggtgtgagacaggggttgcgcccaggacttccgaacaagacgcacccaaagctgttggacttgatgcagagatgttgggaagcagatccatccgaccggcctgctttctcgggcattttagccgaactggaggatcttttggcacaagctcagggaacatcgggaaagacagtccaagatccatcaaactcg

SEQ ID NO: 77425 - DNA, 327 bp, Zea mays
ccgggccggcccacgcgtccacaaggtttatgttggtaatcttgcgaagactgtaacaaccgaagttcttaaaaacttcttctccgaaaaggggaatatcctcagtgcaacagtctcccacattccggggacctccaagtcaaaggggtatggctttgtcacattctcttctgacgaagaagttgaagctgctgttgcgactttcaataacgcggaattggaaggacaactcattcctgtgaatagagcttagattatcacaaatttgcaggggcacccgatgatggggaatatcttggcgaagacatgtcgtaagaggggatgttt

SEQ ID NO: 77426 - DNA, 346 bp, Zea mays
ccgtaatcctcctctagggcaggttcgccggccggaacgcgcgtgatcgtgcgcgtgttcgcgatggcatccgcgaccgtcgttatgggcactgcctcctcgccggtctggacaagtaccccaggacggtgattcgcaaggactccaccaagaacacagcgaagtactcccgcgtcaagtgtttcatcaagctcgtcaatttcactcatctcatgcgcacccgccacaccctcggcgtcaatttcaaagacgtcgcctcgggcgggcccgacacgctctccacacgggacaagatggtcgaagcctgcaaggcctccaatgttcgcctcgatgagacgttcaagac

SEQ ID NO: 77427 - DNA, 365 bp, Zea mays
gcgtccaatttacattatggtttgctggcggctacaggggagatcttaaaagctggcgaaggcagtgattacagcgactgtatgttggaggggcatcttgggaaatacaattacggtggtaatacatttgaagcatcaggctcaccttctggtgctagttattccaagtgcagggctcttgcagttagagctcttaaagttgatgagccagcatgcacacacatgaaatgcacatttggtggtgtgtggaatggtggtggtggagatggacaaaacaatctttttgtggcctcctttttcttcgatagggctgccgaggctggttttgtggacccaaaagcatcagtttctaaggttaaaccttc

SEQ ID NO: 77428 - DNA, 371 bp, Zea mays
acacgtccaaagtatgtcggaaagaagcacggtgacatggaattccatgatcttcgggctggcgaattccggtcactgccaagaagccatcggtctcttcaaccggatgctgtgcgacggagcaaggccggatcacctgacgttcaccgccgctctgacggtttgcagctacgccggcatggtggagctcgggaagggcctgtaccgcgccatgcacgaagaacacggcatcgagccgaggctggagcattgcgcatgcatggtgcatttgcttggccgacccggctggctcgccgagggcttatgacttcatcaaaggccatgccccctggagcctgactgccgtcctttggggggcgtttgcggggggc

SEQ ID NO: 77429 - DNA, 404 bp, Zea mays
aacccacgcgtccgaggccgccggcctcctccgctgcggcaagagctgccggcttcgctggatgaactacctccgcccggacctcaagcgcggcaacttcacggacgacgacgacgaggtcatcatcaagctccacgccctgctcggcaacaagtaagcactcagtctcagttcgccgcccgcccgccggtaccattatttccctcctcctcgactcaatcattttcccatcgtcggccggcccgtcgcgcgcaggtggtcgctcatcgcggggcagctgccggggcgcacggacaacgagatcaagaactactggaacacgcacatcaagcgcaagctgctgacccgcggcatcgacccgcaaacgcaccgccggctgagcgccggcggcggccctcaccgcc

SEQ ID NO: 77430 - DNA, 355 bp, Zea mays
acccacgcgtccgcccacgcgtccgcggacgcgtgggttttagagatcacattacctcataaaattgctctggctttctataagattttatcgcaccaaaggtgccagtgatgtacaatgtgctaggctagtacactatccagatggccctttctcctagagaatcctaccattctagtcgtcgatctcctttacagcgtcctttgcgagcctcgttacataagcggcagcaatggctgtaaacaataatccaacgcccagtgtccatagctgttcgtttcctcccaaaccaatttccgactcatcttggattaaagctcgcccgaatgcaccggcactgacgtaagcccatgaa

SEQ ID NO: 77431 - DNA, 330 bp, Zea mays
ccgggccggcccacgcgtcaacccaagcgtccgctctcttgctcgcactcgcggagatcgaagagaagcgcaggaggccccagcactagcgccgccccgccgccgcatcagacatggcgctggccgctcgcctcgtctcgcgctcccgtcagctatattcggttcaagccactttggggaatggaggtgtcactcaagttcgctcctttgccaaggatgcagctccagctgaccgtcctcctgtcagtggggatgatctcctgaagggcatattctttgaggtaaagaagaagtttgagacagctcttggggttcttaacaaggaaaaga

SEQ ID NO: 77432 - DNA, 338 bp, Zea mays
cccgggccgaatgatacatcgactcaccatatcacaggcagctcgagagagagagagagagaaagatgtcgtggttcgggcaccatcaccacacccagccggctcccccggcgtcaggccccaaccaggtgttcaagatcttctgccgcgccaacgagaactactgcctgaccgtccgcgacggcaccgtcgtgctggccccggtcaaccccaaggacgaccaccagcactggtacaaggacatgcgcttcagcacccgggtcaaggacgaggaaggcatgccggcgttcgcgctcgtcaagaaagccaccgggctcgcaatcaagcactcccgcggc

SEQ ID NO: 77433 - DNA, 401 bp, Zea mays
agcgactcagcgagcgagagcagcacacactgcacgcagctagctaggagcagcagcagcggcggcgatggcggcctccatgatctcctcgtcagctctggcggtggcgcctcagggcctgccgcccctcggccgccgcgcctcctccttcgccgtcgtctgctccaagaagaagatcaagaccgacaagccctacgggattgggggtggcctgaccgtcgacgtcgacgccaacgggagaaagggcaagggcaagggcgtgtaccagttcgtcgacaagtacggcgcgaacgtcgacggatacagcccaatctacaacgaggatcactggtctcccaccggcgacgtctacgtcggtggaatcactgggcttctgatctgggccggtcacctcgctggga

SEQ ID NO: 77434 - DNA, 278 bp, Zea mays
agcgaggagttcgtgattgcgtccaaggacgacgaggtcgtggacgcctgagcgagcatccacgcgccagcatgcaagcagcgtcttatctgggccggcgccatcacggggtttcttcttttaatctgggactttgttgctgttggacgaatgaattcccttcgatcggttagctttaatctgtctcgttagtgtgtcgtgttcgtgtagcaccatgccacacaccagccgtgtgctctgtcacgtgggggccactcctggggtctcctgctgctgtc

SEQ ID NO: 77435 - DNA, 348 bp, Zea mays
aagaggaggagctccagaaggagaacatcaagaacgccgcctcctccaccggcaacatcacgttgagcgtcaccaagagcaacccggagaccggcgaggtcatcggcgtcttcgagagcgtgcagccgtccgacaccgacctcggggccaaggcgcccaaggatgtcaagatccagggggtctggtacgctcagctcgagtgattcgagtgtctaactgctaggtgtccgaccgccgtcatggatcttgggaaggtgtatgtataccatggaaaactttggagagcagaggaggaatcgtgtatgtaatgtacttgttaatgcaaattcgggctgtcgcgtttttaaa

SEQ ID NO: 77436 - DNA, 403 bp, Zea mays
ggaaaggccatggaggtcacggaggccatcaccaaggccgccatgaacggccggcgcaaccttgtcacagtgccgctaactaagtactccacattcccgcacagagctgatgctgactatggagcagccaatgtgatgttgacgcctgcttgccctgaatctggtgttattgctggtggagctgtgagggttgtgttggagatggctggtgttgaaaatgctctgggcaagcagctgcgcagcaagaaccccctgaacaacgcccgagccactatcagggcgacgcagatgatgaagcagttcaaggatgtcgctgaggaggtggtattccaatggaggagctgtggaaatgataaaaacaattcgaaaccaagggccccccttttgtagcattaattctcct

SEQ ID NO: 77437 - DNA, 403 bp, Zea mays
gtcatgtgttgttcggagcgggcagcagcacacagccccatcccaatcctagtcgatcttcttcccctcctcaaggaagaaaagaagctgaaccatggggaagagaaagtcagctgctaagccacctcctaagaagcggatggacaagcttgacactgtcttttcctgcccattctgcaaccacgggagtagtgttgagtgccgaattgacatgaagaatctgattggcgaagcatcttgtagaatctgtcaggaaaacttcagcacaactgttaatgcactcactgagcctattgatatatatagtgaatggattgatgagtgtgagcgtgtcaacactgttgaaggcgacgatgatgcgtgagcttgccccatgtgatgaaactgttaccctacaatcgta

SEQ ID NO: 77438 - DNA, 385 bp, Zea mays
ctccgacaagcgaagcagagcactggcatgagcatggaccgcatggcgcggcgttccgtgtccttgctcctcgctctggctctcctggccgccgcggcgtcggcggactcgtggctgtacgagaagttcacgacggagggcaacgtgcgcgcggactacaacgcgcaggggcagcaggtgacgtctctgatcctgacgcagcagtccggcggcgccttcagctcgcggcagaagtacctgtacggggagttcagcatccagatgaggctgatcccgggcaactccgcgggcaccgtgacctccttctacctgtcgtcgggcgacgggcccgggcacgacgagattgacatggggttcatgggcaaccccagccggcagcccgtgg

SEQ ID NO: 77439 - DNA, 353 bp, Zea mays
tcccgggccgactcatacgtcaacggacgcgtgggtgacgactgcaatcaggcctcaaattaatgccttcctggaagggtttaatgaactcattccacgggagctgatatctatcttcaacgacaaagagcttgaacttctgattagcggtcttccagatattgacttggacgatttgaaagcagatacagaatattctggctacagcatagcctctccagtcatccagtggttctgggaaatcgttcaggggttcaggaaggaagacaaagcccggttcctccagttcgtcactggcacttcaaaggtagcgttgggaggttttattgcacttcaagggatctctgggccac

SEQ ID NO: 77440 - DNA, 377 bp, Zea mays
acccacgcgtccggatctacgcggcgagcgccagttccttacactcaacgccctcaacgagttcgatcccaaggtcactggtgttgactggaggaagaagcttgagacccagcggggtgctgtgcttgccactgagctcaagaacaatgccaacaagcttgcacgctggactgcccaggcgctgcttgccggcgcagacatgatgaagttgggttatgtgtcacggctgcacccacgcgaccagtacaaccattccattctcagtgtgatcgggtacaagccaagggatttcgctgcacagatcaatctcaacaccgcaaatatgtgggggatcgtgaagtctattgtggatgtctgcatgaagcctggagaaggga

SEQ ID NO: 77441 - DNA, 362 bp, Zea mays
acgaaggtggggacctagactgtggtcaggtgcacgcgtattcaagcaggcgctcttgcttttcgtccacaacaagttctccatgtgccctgggcacgcgacacatgttcggggtggtgggcattaccgtcacctccctcacgtcccgtgccgccgcggccgaggtctgcttcctcgccttccgcaacgagcagtccgcggggtacgccgccgcctacgacttcctgacgggctccccgggcgccctcctcatcgtctccggcccaagatacatccacgggctcgccggcctctcccacgccaccgccaacgcctggtcgctccccatgagctccggattctgcgaccaggctgacgccggc

SEQ ID NO: 77442 - DNA, 222 bp, Zea mays
cgcgtcagcccgagcgtccgcacccggccgtggcggaggccgcagtggtggggcggcccgacgagtactggggcgagatgccgtgcgcattcgtgacgctcagggagggcgcggccggcagcgttcgcgccgatgaggtggtggggttctgccaagcgcgcctgccgcggtacatggcgccccggaccgtggtgttcctgggccaatctgccgaatacagcc

SEQ ID NO: 77443 - DNA, 280 bp, Zea mays
attcatcaatggcaagagtggacgtcgaaatggaccttcgcttataagaacgctgaacatgttgttgaatccaatgcagatatttgagctaagtgcttctcaggcacctgaagttggattacaactattccacaatgtgaaacacttcagaatccttgtttgtggtggggatggaactgtagcatgggttcttgatgctattgacaagcagaactacgagtctcctccccctggtcgccattcctcctctcgggaactggaaatgaccgtaccacgtgtt

SEQ ID NO: 77444 - DNA, 410 bp, Zea mays
aggggagtcgtggataccaaatacaagcccagagggcgttcaccttttggttttagtggtgagaaccaagacggctttaccgagttgaacagaggaccaaggtctggtggtttcaagcaccaaaaacaattcggtcctactgtaactattgctgtgaagggccaagccctcccttcagtggggaaacagaacagtgctcttccagacaaaggccaatttaaccaggaagggtttcctttaacctacaaggatgcaaagttctttgttatcaaatcatatagtgaggatgatgtgcacaagagtataaaatacaatgtgtgggctagcactcctaatggaaataagaagctggatgctgggtaccgagaggctcacgagagatccaatgactgccccgtgttcattgtttt

SEQ ID NO: 77445 - DNA, 357 bp, Zea mays
cgcgtccacgcaagtcgacactcgacaggctcggtttccgccctcctctcccaccgccgcgcaccgagaagatggggaagcggtggatcccgctggaggccaacccggacgtcctgaaccagttcatatgggggctgggagtccacgaggaggatgtgcagttctgcgacgtctacggccttgacgatgagctgctcgctatggtgccccagcccgttctcgccgtcctcttcctctacgcgctcacctcgctggacgaggagaaagaagaatcaagtgtttctgctgccacatcgacctcagcaggcaacgaattgagcaagaaagtatacgttacgaagcagactgttgggaatg

SEQ ID NO: 77446 - DNA, 388 bp, Zea mays
aagggttggaatttgggaacagtgtttactggattagctttggcaatgagtacgctgaaaagaaattccctgcatccagaccgtttggtatcaagtacaagtttcacttagaggatgctgttgattgcccagaatgggttgttccattccatctcttcaaattattggcagaggagtatgatctcgagctggttctgatgaagaactttcatgaatttgtacacgagtacttgcaaaaaccagagttcgccgagctgatgcggaggctgggtgccctcggtgatggaaggcaggaccaaagtacactgtcacaagatgagtgggaggtttcctatctctatctcgcgtttgtcctgcggaagcgaggccaaccgcctacccaacgaag

SEQ ID NO: 77447 - DNA, 385 bp, Zea mays
acggacgcgtgggttttttttttttttttggagatgctgtgtaagttgattcatattggaccaagagactgcccaagacagtgaacacaacaattcttccttgccgattgaaccctggtacggtaagtaatttacatcatggtacaaactggaaccagtgcgcgctcacgtgcatccgaacacctagatatccgcagcggtggccggtgggcggtggcgcctccaccccctcacttgccgggcacaaagttggtggcataggcccatgcgttgttgttgacggggtcggcgaggtggtcggcgaggttctcgagcgggcccttgccggtgacgatggcctggacgaagaacccgaacatggagaacatggccaagcgggcgttcc

SEQ ID NO: 77448 - DNA, 321 bp, Zea mays
agccagaggagttgttgatcgaggtgagtgaggttgaaaagcacaccatcgtcatggacggcggatactacggcggtcgcgatcagcgctacagcggcgggtactacggcggcggtggcatcgcaacgccggggtacgctccggcggtcccgtacgggatgtcgcaggtgaacatcgagggcaacgggtgcgggcgggcgctgccgccgcagccgaccgtgaaggtgtactgccgcgccaaccccaactacgccatgagcgtccgcgacgggaacgtggtgctggccccggccagacccaccgactagtaccagcactgga

SEQ ID NO: 77449 - DNA, 357 bp, Zea mays
aaaagccgtcggttctactcccggaaggtgtcgccaaaggtctcctccagcacctacaacatagcgcaggtttcatatgagctgaatgtcttgggtactcggggccctaggcggatgaactgtgttatgcactccatccctacctcgtgccttgaggctggtggcagtgttcccagccagctggacagcatccttgctcgctccactgatgagtcatttggcagcatttccttctccaaatcatctgttgtggaacggtctatgcgtttcagcagctcaagattctccgacatctcaatgatcagcagccgcaggattggagacacggcatccggagacaatgatgagtgcaaggag

SEQ ID NO: 77450 - DNA, 374 bp, Zea mays
acccacgcgtccgcggacgcgtgggtcctcacgagcgattgcggcggcggaagtaagaggcgatggggcactccaacgtgtggaactcgcaccccaagaactacgggcccggatcccgcgtctgccgggtctgtgcgaaccctcatggactgatcaggaagtacgggctgatgtgctgcaggcagtgcttccgcagcaacgccaaggacattggcttcatcaagtaccgctgaagtcagctgggcgggctatctgaatgccatctcttggacagtgtagtagaggcgatgccacaattttaattactgtcatttagatgttcccttcagaactctgctatttaagtccgccatgtttgtgatggagaacttaag

SEQ ID NO: 77451 - DNA, 378 bp, Zea mays
acggacgcgtgggtgactgcttccttgaaaccaaaggttgccatcattcgtgaggaagggagcaatggggacagggaaatggctgctgcattccacgctgctggatttgaaccatgggatattacaatgtcagacctcttggctgggaagtcttctctcaaggagttccgtgggattgcatttgttggtggtttcagctatgcagatgtgctggattcagcgaaaggctgggctgcatcaatcaggtttaaccaacccctcattcagcaattccaggacttctaccataggccagacacgtttagccttggagtgtgcaatggttgtcagcttatggctcttcttggctgggtgccaggatcaggtgttggaggttct

SEQ ID NO: 77452 - DNA, 376 bp, Zea mays
agctccacatcaacgccgtcgcacgccagatcatcgtcggctcgggtgaccagaggaaggacggcagcgtcttccgtggcatagacgaggtcacctacttccccagcaagtacaacatggagatgtcctccaaggcgtacaaagcctggaacttcacggaccttgctcttcccaacgatctcatcaagagaggtctggcgaaaggagatccaaagaagccagagacgctggagctggcgataaaggactacccgtacgcggtggacgggctcgacatgtgggcggcgatcaagaagtgggtggctgactactgcgccatctactacgccgacgacggcgccgtggcgaaggacagcgagctgcaagggttgtggag

SEQ ID NO: 77453 - DNA, 363 bp, Zea mays
gtcatgtcgaagcgaggtacgggaggttcggctgggaacaagttccgcatgtcactgggtctaccggtggcggccacggtgaactgcgcggacaacacgggcgccaagaacctctacatcatctccgtcaagggcatcaagggccgcctcaaccgcctcccgtccgcctgtgtcggcgacatggtcatggccaccgtaaagaacggaaagcccgacctcaggaagaaagtgatgcccgccgtcatcgtccgccagcgcaagccgtggcgtcgcaaggacggtgtctacatgtacttcgaagataatgccggagtgattgtgaatcccaagggtgagatgaaaggttctgcaatcactggacct

SEQ ID NO: 77454 - DNA, 378 bp, Zea mays
aggcgagcaagaacaatagcagcatagggtcacctggaccaggacgtactagaaagatctttgttgggggtctggcttcaaatgttaccgaggtcgaattcagaaggtactttgagcaattcggtgtgataaccgatgtggtggtgatgtatgaccacaatacgcagaggcccaggggctttggtttcatcacatatgactcagaagacgcagtggataaggcactgcacaagaacttccatgagctcaatggtaaaatggttgaggtcaagagggctgtaccaaaggagcagtctcctggacctattgcacgttcacctgcacgggggcagaactatgctatgagcagggttcataacttcgaacatggttttacca

SEQ ID NO: 77455 - DNA, 357 bp, Zea mays
gtccaactcgtgcttcacgcactgtcagacccactcgagccactggtgacattcgcccacctccccgaggctcggtaatcagactgttgcagacgctgttggggactggtactttggtagaagacgggtagtgaagcaggtcgactgcgagtacccttgcaaccccacgtgtagcattcagtatgtgtgagctggcttctccttcgtgaccgccattgcaccgagctgaggttcatgggagtccttgtttcctccactcccgtacttgaggtgtccttggttacaaatcagttttattttaatccagagaacgatacctgaatgttaccgacaatacgtacaaggtgtgtgtaaacc

SEQ ID NO: 77456 - DNA, 424 bp, Zea mays
ggcatctatagcaaccggtccaacactttcacgctcaggcgctcagctctagcagtggctgcctccaccatggcgatctcctccacggcgatggccggtacccccatcaaggtgggctccttcggcgagggccgcatcaccatgcgcaagaccgtgggcaagcccaaggtggcggcgtccggcagcccctggtacggccccgaccgcgtcaagtacctcggccccttctccggcgagcccccgagctacctcaccggcgagttccccggcgactacggctgggacaccgccgggctgtccgccgaccccgagaccttcgccaagaaccgcgagctggaggtgatccactcccgctgggccatgctcggcgcgctcggctgcgttctccccgagctgcgctcccgcaaaggggtctaatttgggg

SEQ ID NO: 77457 - DNA, 399 bp, Zea mays
agcgtcacattataactgatgatcagttgtttagaccagttttggatccccaaggatgggaccatgatattgggttcgatgccatcaattttgaagcatctcaagagttgaaaaagaatgtctctgcggcaattacaggacagatgagaaaggacaaggaagacatgtatatccattcagaatgttcagtaagttacaatgctcagagaggctgctccttgatggggggtatggatatgcagacggcaagcaaagatttggtctgtactgttcatggggatgccaagttccacaatctgccttggaacagtagtggaggtggcatttctgttactaagtttggcaacaagtactttgctggggctaagttagaagactccgttaccattgggagacgag

SEQ ID NO: 77458 - DNA, 320 bp, Zea mays
cactttcgacgccaacaacaacgtgtccgtcatcatccagcccacctccaagaagacatcacgagtacgctccccgaggagttcctctcgcaggtcgactacttgctcggcaagcatgcctactgcggcaagaccgactccgatggcgggttcgagaccgacgccgtggccaccgccaacgtgctggagagctccacccccgtggtggacggcaagcagtactacagcatcaccgtgctgaccaggacggcggacggcgaccatggcggcaagcaccagctcatcaccgccatcgtctccgaccgcaagctctacatctg

SEQ ID NO: 77459 - DNA, 389 bp, Zea mays
acccacgcgtccgcgttcaccttccggtgatcaaataccatggaaattttgtgaacagttccaagacaatgtatttccaagtctctcaggagctcgtatagtgcgaattgctgtccatcctagcgccttgaggcttgggtatggctcagctgccattggccttctatctcggtactatgaagggcaaatgagaagattatttgatgacgatgaggaggaaacggaagagcctgatgtgaagattactgaagctgcagagaaggcttcactgctagaagagaccataaaacctagggcaaatcttccaccactccttgttcatcttcatgaacgtcgtcctgagaagctccattatcttggtgtatcttttggacctgaccaagagcttt

SEQ ID NO: 77460 - DNA, 418 bp, Zea mays
ccgggccgacccaagcgtcagagctactacaaatgtacaaacccgggctgttcagtgcgcaagcatgtggaaagagcatcgcacgatctgaaatcagtcatcacaacgtatgagggaaagcacaaccatgaagttccagcagccagaaatagtgggcaaggcagttccagcgctccatctgcatcacaagctggtggttctcaccgtaggcaagaacctgcacaggccagctttgctcacttcggtacggcttctttcagctcgttcggtctcccaccgagtggtcagttgggaccaacaactggcaatttcggcttcgggatggttcccccaggcatgacgattccagtgccctctctaggatcgcttgcccctgtaaagatggttggaaattcatcagctatgcacgggtagcaag

SEQ ID NO: 77461 - DNA, 345 bp, Zea mays
acccaagcgtccgcacccggccgtggcggaggccgcagtggtggggcggcccgacgagtactggggcgagatgccgtgcgcattcgtgacgctcagggagggcgcggccggcagcgtgcgcgccgaggaggtggtggcgttctgccaggcgcgcctgccgcggtacatggcgccccggacggtggtgttcgtggccgagctgcccaagacagccacggggaaggtgcagaagttcgcgctccgggagcaaggcatggccatgggcagcatctccagctccgagcagcatgatggggcagggacgaggagcaagctctgatctgaactcgcatgcccacatggatg

SEQ ID NO: 77462 - DNA, 372 bp, Zea mays
agcagcctcatccccttgcccacttctacagcccctctgctgcagcaagaaggaaagaagctagcgcttatagcttgtcagccatggccaccgccgccgcgtctagcctcctcaagtcctccttcgcgggctcccggctcccggccgccacgcggaccacaccggcgtccctcgtggtggccaccggcccgcgcggcgccggcgcggggcccatctgcgcgtccatgtccatgtcctcctccaacccgccctacgacctgacgtccttccggttcagccccatcaaggagtccatcgtgtcccgcgagatgacccgtcgctacatgacgggcatgatcacctacgccgacaccgacgtcgtcatcgttggcg

SEQ ID NO: 77463 - DNA, 310 bp, Zea mays
cgtcagagaacagtccggcggcgtcacgtacgtggagggcatgaacgcctacagcggcctcaaggggctcaacaaggtgaacatgctcggggtgcgcaagaccgccgactactccttcgccaaggtcgtggcgtcgctcagccccgcgggcaggaagcggcgcggcggcgcgttcggcgcccagatgaacgccgccgccgagatcttcaggatcgccgccaccatgaacggcctcgtgctcgtcggcgtcgccgtcgggttcgtgctgctccgggtggaggccgccgtcgaggagtccgagtacggtgcc

SEQ ID NO: 77464 - DNA, 394 bp, Zea mays
ccgggccgacccaaacgtccacggacgcgtgggcggacgcgtgggcggacgcgtggggaatgccaggtggggaaccgattggaaaggccaagctcaaaaatggtttttatttaggcttactggaaatgatgatgagattaaccttaatggtgatggatctgagaagccagagtttggtgaatggacatggatgactccccaggaagttattgaaaaggcagttgatttcaagaaacctgtatatgaggaagcattgaaacactttgccccctacctacagtcagatcccgccgcttcatcatagaagattcgaccaatttgcatacattatcttttttttttagttggaaactaccctgctgtatctggacccccaataatttgacacgacgca

SEQ ID NO: 77465 - DNA, 394 bp, Zea mays
aggccgtcacggccaccaccgggtcggccaaggccacgatcttcgatgagtacctcgagaagagcaaggccaacaaggagctgaacgacaagaagaggctggccaccagtggagccaactttgcgcgcgcctacaccgtggagttcggcagctgccagttcccctacaacttcactgggtgccaggacctcgccaagcagaagaaagtccccttcatcagcgacgacctcgagattgagtgcgaggggaaggagaagttcaagtgcggctcaaacgttttctgggaaatggtgaagcaagctagcagcagcgtctgatgggaatggaggagatcatcacctgtcttgtcgaccctagatatgtccaaactgcagggaaattaaatcttcaagtg

SEQ ID NO: 77466 - DNA, 233 bp, Zea mays
cggtctaggctacggaccgtccagttctaaatcgcgagcggccgcccttttttttttattctgaaggtcactctgtgtcagttgttaaagctgtgtacaccctcggctccagcagacccatgcatcaaccagcatggactgtggatccaggggtgctgttaccaccgtcaggctttattctaagttaaatcccaatgaaaaaaattgtgcttcttggtgctgcaaatcaaaac

SEQ ID NO: 77467 - DNA, 383 bp, Zea mays
aatcgacaagcacgcgcggacggcgctggccttcgtgacgctcaagcacgacggggagcgcgagttcatgttctacaggaacccgagcgcggacatgctgctgacggaggcggagctggacctgggcctggtgcggcgcgccagggtgttccactacggctccatctcgctcatctccgagccgtgccgctcggcgcacatggccgccatgcgcgcagccaaggcggcgggcgtgctctgctcctacgaccccaacgtgcgcctcccgctctggccgtcgcccgacgccgcacgcgagggcatcctcagcatctggaaggaggccgacttcatcaaggtcagcgacgacgaggtggccttcctcacgcgcggggacgccaacg

SEQ ID NO: 77468 - DNA, 351 bp, Zea mays
agcccacgcgtccgcccacgcgtccgcttaggcccaaaatatgctgataaactgggaccaggctttcaggagtactgcaagacatacccagaaaattattgcttagcccagcttatctattggtatagccagaattcagaacctgaatctagattaacaagagctagaaaaggttgcatgtcgttgccagatgtctcatccttctatgtgaagtctgcaaagccatcacaagagcgagcttatggaaacagaactgtgagattcatgttatcgcgcatggaaaaacaggcacaaagaccatggccaaaggataggatatgggtgttcacgagtgatccgagattctttggt

SEQ ID NO: 77469 - DNA, 357 bp, Zea mays
agctttgatcacacacaggaagttgagatcagaaaaatgcaggctgccgctactgccgccgggttctcggccgtgctgcccgccaagggcaggccggcggcgaggagcagggtggtggcccgtgtccccgccacaaggaggagcgtccgtgtagctgccgtcgtcgcgaccgaggccgcgcagatcgactacagctcaagcgtctcggtgttcccgatggaggcctgcgacctgcttggtggcgacgcgtgcaacgggcccatgttcccggaggccaagcccgcctcggcggcggcggcggcgagcaggagtgtggtcggggtggacagggactacctgtcctacgacgagccaaag

SEQ ID NO: 77470 - DNA, 370 bp, Zea mays
aggaaacctctcaaaccctagccgcctcctgcaagtttcagagctcaggaatctgcgccatggcgagtgagacggagaccttcgcatttcaggctgagatcaaccagctgctctcactcatcatcaacaccttctactccaacaaggagatcttcctccgcgagcttatctccaactcttccgatgcgctggacaagatcaggttcgagagtctcactgacaagagcaagctcgatgcgcagcctgagcttttcatccaccttgtcccagacaaggccacgaacacgctctccatcatcgacagcggcatcggcatgaccaagtccgaccttgtcaacaacctcgggtacatcgccaggtccgggaccaa

SEQ ID NO: 77471 - DNA, 329 bp, Zea mays
agaactgtaagacgtatagtgatggcagcagccgcaaagcatctgaccccggtagctctggagcttggtgggaaatcccctgttatcctggattcaaatgttgatctccatgttgctgcaaagaggattgttgttggcaaatggggatgcaacaacggccaagcatgcattgctccagattacatcataacgacaaaatcatttgcaccggagctggtggcctctttcaaaagagttttggaaaggttctatggggaggatcctctggaatcagcagacttgtctcgtattgtgaattcgaagcagttcaaaagatttgacaaatttga

SEQ ID NO: 77472 - DNA, 175 bp, Zea mays
gatggatcaacccgtcgtgcgtggtctcgttttgtgatgagtgggagagagaggatgacaagatcgatcctttgttaatggagatctcgttaattaggagagctaccgctgggacttggtggtttgtaatatatgatccaaccagtgatgaatcaatgcattcacttgtgtacac

SEQ ID NO: 77473 - DNA, 391 bp, Zea mays
acagacgcgtgagcggacgcgtgggccgccccactggtggcgcaaagcaaagcaggatggtgctggttgcgctgtatcagattgtgagagagagcttccagctctactctgatatctgcgaggtgctggcggtgctgctggacaggttctttgacatggagtatgcggagtgcgtgaaggcttttgaggcatatgctagtgctgcaaagcagattgatgagctctctgcattctattcatggtgtaaagatactggagttgcaaggtcatctgagtacccagaagtgcaacgtgtcactgataaattgctggggacgctagaagagttcatgacggaccgggcaaagaggcctaagagcccaccacgggagcctgaacctgagcctgttaa

SEQ ID NO: 77474 - DNA, 360 bp, Zea mays
cttctacgcgctgatcaagtccaacgagacgttcctcatcaccatcaacgcggccggctgcgtgatcgagaccgtctacgtggtcatgtacttcgtctacgcgaccaagaagggcaggatgttcaccgccaaaatcatgctcctcctcaacgtcggcgccttcgggtccatcctcctcctcacccttctcctcttcaagggtgacaagcgcgtcgtcatgcttggctggatctgcgtcggcttctccgtcagcgtcttcgtcgcgccgctcagcatcatgaggcgggtgatccagaccaagagcgtggagtacatgcccttctccctctccctctcgctcagcctcagcgccgtcgtctg

SEQ ID NO: 77475 - DNA, 328 bp, Zea mays
agcggacgcgtggggttccaaggagctgaacctggcccaccctacacaactggtgaacatctagttgagaatgcaggaaaaatggttctactagataaattgctgcccaagctaaaggagcgtgattccagagtcctaattttttcacagatgaccaggcttttggatatcttggaagattatcttacgtatagaggttatcagtattgtcgaattgacggaaatacaggtggagaagatcgtgatgcatccattgaagccttcaataagccaggaagtgaaaagtttgttttcttactttcaactatggcaggtggccttggtatca

SEQ ID NO: 77476 - DNA, 271 bp, Zea mays
ctcaactcaaagaatattcatccatacaaatatgctggagagaacgttgatgtgcaaggtcttaatatgttcaaaggtaaagtcagtgtagcagatatgatagttatctcgccttctgaagtaacatcatcaaaatatgatggaactctgaaatactgggaaagttccattacccttgtcgacattcttaaaaatgagatccgtgatgggcagtttagcttcaggggcaaacgggttctaaagcttggatgtggatatcgcctctctggga

SEQ ID NO: 77477 - DNA, 398 bp, Zea mays
agcgcggcgcgtcgggttcgaggtcgtcatcggggacccgcccttcaacgtcgacgtcggggagttcgccaaggaggtgaacgccgtggacgtgctggtgggcgtgcacggcgccgggctcaccaactcgctgttcctccccacgggcgccgtcttcatccagatcaacccgtacggcaagatggagcacatcggggaggtggacttcggcatccccgccgtggacatggggctcaagtacatcgcctactccgccggcgtcgaggagaccaccctggtggacacgctggggcgcgaccacccggccgtcaaggacccggagtccatccaccggagtgggtgggggaaagtggccgagtactacctcggcaagcacgacgtccggctccacctccaac

SEQ ID NO: 77478 - DNA, 315 bp, Zea mays
aaagagtttgtgcaaactcggtcggagtggtgaggcgagggcattagtggacgacatgatgaagaagggcacaaagccaaattgggtgacctacaaccatctgatttatggattctgtaaggacggggatttggacgaagcaaagcgtctgtacaaggagatgggaagaaaggggcttgttggggatagcgatttctattttatgcttatttattacctttgtaacggtgatgatttggacactgcccttggactatacaatgaaatagcagctaagaattgggtgccatgcctctcaaccatgaaaatgcctgt

SEQ ID NO: 77479 - DNA, 304 bp, Zea mays
tactcgagaagctcaagcacaagaaaaagagactcgtccagtcgcccaactccttcttcatggatgttaagtgccaggggtgcttcagcataacgactgttttcagccactcccagactgttgttgtgtgccctggctgccaaactgtcctctgccaacccacatgaggaaaggcaaggctcactgagggctgctctttccgcaggaagggagactagaccggatgtggtcgtcaagttttgctctatgccacatactaacgtcatgaactgcctttagctaacattttccagaacttgttctc

SEQ ID NO: 77480 - DNA, 405 bp, Zea mays
acggacgcgtgggctaccaggaggccctcggcgggctgcacaacctcttcggcgggccgagcgtggtgcgcgtgtcccagtgcgacgggtcccactgcttcgccgtgacgcgcgccgccgcgggcccgtcctgcgccgacgtgctccgcgcgatgcagcacgagcccgaggtgatgtgcgaggtgctgaagcagaggaccgacggcgccacggccgccgccctcgcccgggccttcggcgcaatgccgtacctggtgttcgaccccgaggccgccgtgatgtccggcggcgagagcagcgactcggagcggtcgggcgccggcgccgccgaggaggaagacgatgaggagtgggagttcatgcgcgggctcaccgtccgatgacgtgcccggccgcccggccccg

SEQ ID NO: 77481 - DNA, 427 bp, Zea mays
aaccgcgtgtacaacgagggcatgaagaaccactcggtgatcatcaccaagaagctgctggacttctacacgggcttcgagggcgtgtcgacgctggtggacgtgggcggcggcgtgggcgccacgctgcacgccatcacgtctcgccacccgcacatctccggggtcaacttcgacctgccgcacgtcatctccgaggcgccgccgttccccggcgtgcgccacgtgggcggggacatgttcgcgtccgtgcccgccggcgacgccatcctcatgaagtggatcctccacgactggagcgacgcgcactgcgccacgctgctcaagaactgctacgacgcgctgccggaaaatggcaaggtcatcgtcgtcgagtgcgtgctgccggtcaacaacgagggcaaccccaaagggcaaggggtccttc

SEQ ID NO: 77482 - DNA, 232 bp, Zea mays
aggagagaaccggcacagccgccgcagtccgcagatgtcgatcgtggtggcatcggaggtcgcgaccgctctcgcgagccgcggcgcggtcgtcgccctcgagtccaccatcatctgccacggtatgccgtacccgaagaatctccagatggccatggaggtggaggccatcatcagggataacggggctatccctgcaaccagagccgtcgtggacggagtccctcacgtc

SEQ ID NO: 77483 - DNA, 261 bp, Zea mays
acccgcccgtccaaccagtccagatagatctttcccccgtcctccctcgccttcgcctcgtcggcatgagatttccagtaccaacgccggtcgacacctaccctccttccctctcgcgctatggcccatactgttgtgctcaaggttggcatgtcctgtgatggctgtgttggagctgtcaaacgggtcctgggcaagattgaaggcgtcgagtcctacgacgtagacatcatggcaaacaatgtcaccgtgcatggcaat

SEQ ID NO: 77484 - DNA, 311 bp, Zea mays
acccacgcgtccgcccacgcgtccggcaggataccatcgccgacgtggtgctgtcgccggaggagatggagatgtacgtcgacttgcaccccttcaccaatacgtcgccgtacacggtggtcgagaccatgtctctggccaaggcgctcgtgctcttccgggaggtcggcctgcgccacctcctcgtcgtgcccaaggcctgcgataggtcgccggtggtcggcatcttgacgaggcatgacttcatgccagagcacattctggagctgcaccctgtccttctgaggagcacgtggcacatgctccggtgg

SEQ ID NO: 77485 - DNA, 327 bp, Zea mays
cgtcgagccgccggcttcatcagctccggctcgagggaccgtcgacaccaagacactgtacgccggcgacatcatggtgttcccccagggcctgcgccactggcagtacagcgccggcaccggcgctgccgtggggctcgtcgccttcagcagccccaaccccggcctgcagatcaccgactgtgcgctctttgccaacaacctcccgtccgccgtcgtggagaaggtcggcttcttggacgacgcgcaggtgaagaagctcaggagtgggcgcggcggcggcggttagcgtgtttttcgagacaatacagtgcaggctgggtatgc

SEQ ID NO: 77486 - DNA, 336 bp, Zea mays
cacgcgtccgcccacgcgtccggtgcgtgcgcgtggacttcaatgagcccgtgtggttcaaggccggcgcgcagatcttctcggagggcgggggggactacgtgggcaaccccaacctggtgcacgcgcagagcatcctggccgtgctcggcttccaggtcatcctcatgggcggcgtcgagggcttccgcatcaacggccgcgacggcgtcggcgaggggaagaacctctaccccggcggccagtacttcgacgcgcggggcctcgcggacgaccgcgtgaccttcgccgagctcaaggtcaacgagattaagaacggccgcctcgccatgttct

SEQ ID NO: 77487 - DNA, 405 bp, Zea mays
acggacgcgtgggcggacgcgtgggctaatctcaggtttggggggaaaaggcctcgcgggtcgcaaaccgctctctgttgatttgggatttgggaggcgctcgagttttcaggtaaaccatagtttagtgacccatggctcgtactaagcaaactgctcgcaagtccactggagggaaggctcctaggaagcaacttgccaccaaggctgcccgtaagtctgcacccacaactgggggagtaaagaagcctcatcgttaccgccctggaactgttgctcttcgtgaaatccgcaagtatcagaagagcactgacctgctcataaggaagcttccgttccaaaggcttgtcagggagattgcccaggatttcaagactgatcttcgtttccagagccatgcggtgc

SEQ ID NO: 77488 - DNA, 312 bp, Zea mays
aacggacgcgtgggtttttttttttttgtataatttacaccatatttcactgataatgtctacaaggaccaaagcatgcatgcaaatacgtacactactggtacaatctctgagcccatgctcccttcttcacaaatactggtacatctcctgcagtagatatacgaatacgtacgtctacggtacatgcatacaagtacgtatacgccttcgctcacttgccggggacgaagttcgtaccgtacgctcacgcgttgttgttgacagggtcaccgatgtcgtcggcgaggttctcaacgggacccttgccgg

SEQ ID NO: 77489 - DNA, 373 bp, Zea mays
gggtgggagcatacagctacatcaacccgcggttgctgacggcgatgaaggttctgggccggggtggcatcgaggacatcaagtacgtcggcagggccccgtcggctgctaccgcgacgggcttctactcggtgcacgtgcaggagcagacggagctggtgcagaaggcgctgcagcgcgacgccctcaactaccctttctgaaagaaacgaggcccctgtagattcgtggcattggggaccttttgaatttgatatagtaccagtatagagagaacatgccgtagagtttatctgtgcagccatttggtgaaataattgtttcgactctgcagtaccgcatgagacagaccggttgtagtttgggaaaactc

SEQ ID NO: 77490 - DNA, 374 bp, Zea mays
tgccggtcaatgggtcgcgggtccgagcaggcgggaaggcacgcgtccgcccacgcgtccggctgcgacccgctcggcctcgccgacgaccccgaggccttcgctgagctcaaggtgaaggagctcaagaacgggcgcctcgccatgttctccatgttcggattctgcgtccaggccatcgtcaccgggaagggcccgctcgagaacctcgctgaccacattgccgaccccgtcaacaacaacgcttgggcctacgccaccaacttcgtccccggcaagtgagggaggcgccgccggtgacctttaggtgtccggatgcaggtgagcgcacgctggttttcggtttgtaccatgatgtaaactaatgttcaatc

SEQ ID NO: 77491 - DNA, 306 bp, Zea mays
gcagagcatcctggccatctgggcggggcaggtggtgctcatgggcgccgtcgaggggtaccgcgtcgccggcggcccgctcggagaggtgggggacccgcggtaccctggcggcagcttcgacctgctcgggctcgccgacgacccggaggcgttcgccgagctcaaggtgagggacattaagaacgggcgcctcgctatgttctccatgttcggcttcggcgtgcaggctatcgtcaccggcaacggccggcgcgagaagctcggcgagcacatcggcggcgccgtcaataacaacgcctgggc

SEQ ID NO: 77492 - DNA, 426 bp, Zea mays
agcagcgagcgagagcagcacacacgcagctagctaggagcagcagcagagcagcggcgatggcggcctccatgatctcctcgtcagctctggcggtggcgcctcagggcctgccgcccctcggccgccgcgcctcctccttcgccgtcgtctgctccaagaagaagatcaagaccgacaagccctacgggattgggggtggcctgaccgtcgacgtcgacgccaacgggagaaagggcaagggcaagggcgtgtaccagttcgtcgacaagtacggcgcgaacgtcgacggatacagcccaatctacaacgaggatgactggtctcccaccggcgacgtctacgtcggtggaaccactgggcttctgatctgggccgtcaccctcgctgggatcctcggcggcggcgccctcctcgtctacaaca

SEQ ID NO: 77493 - DNA, 407 bp, Zea mays
ggcaagaaggtgattgaccgcggtgagtttgttgatgagcccaagccacaacgttcagaacactgtgtatctctacttgccgagctcgacacattcagcaaccaacaagtccagtcaccttcaccatcaaatatgaaagagcttgccaagaggacactgaaagcataccttaatgtccggcgaggcgtcgagcagctgatgagcaagtacactgtgaaagcatgtgggtactgctctgaggtccatgttggtccgtggggccacaatgtgaagctctgtggggctttcaagcaccagtggcgggatggcaagcatggatggcaggacgcggtggttgatgaggtcatcccgcccaactacgtgtggcatgtccctgaacccagtggctctcctctcagatcctctct

SEQ ID NO: 77494 - DNA, 91 bp, Zea mays
accactattgcacaaacatggttcatcttagtggtggtttttgtttcctgctggttaattgttgatatccattaatttgtttttcttctat

SEQ ID NO: 77495 - DNA, 420 bp, Zea mays
cccacgcgtccgcccacgcgtccgcccacgcgtccgctgagactatccaatatgaaaaagatcgcaatgcaggttttctatcaccatttgggtactcaacacctacagtaacatcagcagtagatgctatatgttcaatggagtggtattggctcttggcatcaaaatcccaagtatgcatcgaggggaaatattctataagaatttggagatggaagggttatcttgtacagtacacctttcttggcaacgaaggtccacctgttcttcttgtgcatggttttggagctttcctggagcattttcgtgacaatatacacaagattgctgctacgggccaccgagtttgggcaattactcttgttggctttgggaaatcagagaaaccaaatgtcaactattcagaacttttctggtccg

SEQ ID NO: 77496 - DNA, 324 bp, Zea mays
tgttgagaaatacgaaagtggaatgtgggtcgagtcttagtcggatatttcatatctcttctcttcttgtccaaacagatggaagaggagatgatttgtgctgaccggaaaatccatatctctcgtagccatttagagcatacggatcgatttataagaatcgaatgttgggtttttatgttattttgtgatagaatggaaagaattctagacagaaggggttgggaattatgcctacatcacgtattggtggagggttcagtgattggacggtcgcagattgtaccaatattttacttcaaataattccgacaagctccgggg

SEQ ID NO: 77497 - DNA, 413 bp, Zea mays
agcgaaaccgcagccgtgacggatccagccgaaccccctcgcagtcgcagccccctcacgccacgcgacatgggcaagatcaggatgcccgtgccgtccctgttccgccgccgctcctccaagccgccgccgccgcagccgcagcagcaggcgcctgccgcgggcgacggcgacggcagcgggtccccggagcgggcgacggcggaggaggagatggcgcgcgtgttccgcaagttcgacgcgaacggcgacgggcggatctcgcggtcggagctggcggcgctgttcgagagcctgggccacggcgcgtcggacgacgaggtggcgcgcatgatggccgaggcggacgcggacggcgacggcttcatcagcctgcccgagttcgcggccctcaacgccacggtggccggcga

SEQ ID NO: 77498 - DNA, 382 bp, Zea mays
cccacgcgtccgcggacgcgtggggccctcggcctcagcgagggagggccgctgttcgggttcaccaagtcgaacgagctgttcgtggggcggatggcgcagctgggcgtggccttctccatcatcggcgagatcatcacggggaagggcgcgctggcgcagctcaacatcgagacgggggtgcccatcaacgagatagagccgctcgtcatcttcaacgtcctcttcttcttcatcgccgccatcaaccccggcaatggcaggttcatcatcggcgaggaagaggaataggctgctggctgctgctgctggcctcggacatgagtcgtgtgcgtttacttttacctgtgactgtgcgtctcggtgcgcgcgcgtaagtgct

SEQ ID NO: 77499 - DNA, 245 bp, Zea mays
caagtcggcggataaggacggggggaagaacgcgcccatctcacggtcctcccgcgcgggcctccagtttcctgttggacgaatccacggtcagcggaagcaaaggactcaggcaaatgggggcgttggtgccaatgcagccgtctactctgccgccatcctggagtaggggactgccgaggttctggagctggctgggaacgcgagcaaggatggtgaggtgaagcgtatcacccctcgccacc

SEQ ID NO: 77500 - DNA, 309 bp, Zea mays
acgcgtgggcagctgttcgcggcggcgagcgcggcgcggggcggcgggtaccgcgccccggaggcggtggacacgcggggggtgacgtagagggcggacgtgtactccctgggcgtgctgctgctggagctcctgacgggcaagtccccctcgcacgcgtcgctggagggcgaggggacgctggacctgccccgctgggtgcagtccgtggtgcgggaggggtggaccgccgaggtgttcgacgtcgaactggtgggcgggggcgcggaggcggaggaggagatggtggcgctgctgcatgtggccatg

SEQ ID NO: 77501 - DNA, 425 bp, Zea mays
cggacgcgtgggcatgcaggctgctgagtgaaaatgggagtggcaggtcacaacgatccattgttaggtgaaacgacatgtgggtctttgctgcagcaacttcagctgatatgggatgaggttggcgaaagtgatgaagatcgtgacaagatgttacttcagctagagcaagagtgcttagatgtttataggagaaaggttgatcaggcttctagctccaggtcatgtctcctccaacagctttccaactccaaatcggaactgactagactcctttctgcattaggagagtcatctatttctggtgctcctgacaagacatctggtacaatcaaggagcaactagcagctatatcaccatctttagagacactccgcaggaaaaaagagagtacggtgaaagagtttgctcatgtacaacttca

SEQ ID NO: 77502 - DNA, 180 bp, Zea mays
gtctgttttccctaaggatagagtgatttcctgcctctttatattcactcttgttgtcaagtccaagtggaaaatcttggcatatgggacatattgtaataataagcatcgtacaatctagatgctgttttgtaataattaattaatatcccagcccattggatggaggtgtttaccaac

SEQ ID NO: 77503 - DNA, 350 bp, Zea mays
gcgtccggcagcgtcagctggatcctaaggactaccaggagcagacggcgcagcaccaggagcagcagcagcaccaccatcacccccacctgcaaatccaaatcgaccagccgccgccgccgccgcaggacgggggcggcggagtgaaggagcagcagcagctgctgcaggtggtggcgcagccccgggatcggaggcagcaggcgctcgcccccaagcggagctccaacaaggaccgccacaccaaggtcgacggcaggggccgccggatccggatgccggcgctctgcgccgcgcggatcttccagctcacgcgggagctcggccacaagtccgacggcgagactgtg

SEQ ID NO: 77504 - DNA, 235 bp, Zea mays
aatagattggatctatccggccggggttgagaagagttttagtattttttttgataaataataaaaggtgcacgatctcgaccgagtagggctgaaggacttcagaaatcatatggaagaactgtagcatttcgcgattcattggtaaatttactttgattctctagagagggataatgtgagaccattaacacggttacagctaaactgcttgaaggccgggcaaaatagggta

SEQ ID NO: 77505 - DNA, 420 bp, Zea mays
acccacgcgtccgcattattcatggagatgatccttgtcttctacctgatggcactgatgcatatgcgctagcgaagaaggtcgggcgttacaagcaaatcaagcgaacagaaggtgtctcgagcactgacatagttgggaggatattgctaacattcaggcagaaagatgctgacactgatttaagtgttgtcgttgctgagaagtctggagagaaatcaaatgatgaagtgaaaagtcagctatctcatttccttccaacttctcgccggatcatgcagttttcaaatgggcaggctccttcgccaggtgctcgtgttgtctatgtagatggcacatttgatcttttccacgctggccatgttgagttcctcaggagtgccagacaacttggtgactttcttcctgtgggtatctatg

SEQ ID NO: 77506 - DNA, 236 bp, Zea mays
caacgacctccacgccggggcgtgtgcgattggcggtagcacccagtacacggtgaacaaccagattgtcaacgccaccctgaggcacgtgtccgacaaccccatcaacgtgcagctctcggtgatgtacaacaaggaggtcaacccccgcgtgcccatcatcgtcaccagggactacttctccacgctgtacgcaccgctcatccacgacagcctgatggagaagttctactggg

SEQ ID NO: 77507 - DNA, 401 bp, Zea mays
aaccggatctgagccagcagctgagaagaggatgagcgccgtggccgccatggcgacgtcgtcgctgaaccccaacgcgccgctcttcatcccggcggcgtaccggcaggtggaggaattctcgcccgagtggtatgagctcgtcaacaccaccgcctggttccgggaccactggttccgccagcaccagcaccacgaggccgccttcgccgccgccgccgacgccgagctcgacgtcgccgcgctcctccccgacgactccgtcgacctcctcgacaccgacgacctcatctacgcgcctgacgtccaccaccctcaacaacgccaagccggcgctgctgcccggggtactacctctgacatgctcaacgtgcgctgagcctcaggctccccccggggcc

SEQ ID NO: 77508 - DNA, 403 bp, Zea mays
agctttgaatatgttgggtctggcgaagcgaattggtgcaaggtttttgttgactagcacaagtgaagtttatggtgatccgcttgagcatccacagaaggagtcatactgggggcacgttaatcctataggtgttaggagctgttacgatgaggggaagagaacagcagagactttaactatggactatcatcgtggtggtggtgttgaggtgcgtattgcccgtattttcaatacatatggtcctcgtatgtgcctcgacgatggtcgtgtggtcagcaattttgttgcacaggcactgcgaaggcaaccgatgacagtctatggtgacggaaaacaaactcgaagtttccaatatgttgctgatctggttgctggactgatggctctaatggagagtgat

SEQ ID NO: 77509 - DNA, 426 bp, Zea mays
agcggacgcgtgggttgtggatgaggtcaaagacaaaagtggccaacagatggatgtgctctcatggaagcaggaaggtgtcaaaaaccttcctttgcaggagaatggatgggactgcggcatgtttatgctcaaatacattgacttctacagcagagatatggacctcattttcggacagaagcaaatgcattacttccgcaggaggacagcgaaggaaatactgagtttgagagctgaataaaccttggaggacatcataagtcattttggctatgttcagaattgttggaatatgtacttaacaaatgggtgcagcggcttaaaggtatagcactgagtgcaaggaatttggaaattctccagttgcacaacggcaccaagcgatggccaagcaaccggtttgaattttgcatgagcacagtg

SEQ ID NO: 77510 - DNA, 337 bp, Zea mays
  unsure (1)..(337): unsure at all n locations
ccgagctcatcggcgagatggccaaggggtccgagctgcgggcgcacgtcgtcaacttcctcaacgtcgtcgtcgacgagttgggcgcgtcgagggtgccggagatcgtcgtcgagttcgagaacgtgtacaactcgctcacgggcaccgaggtcgccaccgtcacctccgtcggggagctcgagtcgcaggacctcgcgcagatcgcgcagcacgtccaggagatgaccggcgccaagaacgtccgcctcaagagggagggcgacgangcggtcagcggcggcgtcaccgtgcagtacggccgcgaccgctcgaacttcagcgacatgagcgtccg

SEQ ID NO: 77511 - DNA, 244 bp, Zea mays
cgtcgagtccattgccatagctggtgttgctaggtgctcttacattcgggctaagattgaagaggagaaaaggaaaaagagcgcatgactgctgtggagaagattatcgagaccttcctcggacacaacatcgtgcacaatcacgacctacttctatatcttgttttgttttcatcttggggcaatccgtccattgtttgttcccagtctggtgattaaaagtccgcagattctgtttgtggaa

SEQ ID NO: 77512 - DNA, 139 bp, Zea mays
aggacggctgcgctcagtcactttgacaggttcatcgtcatgctggcaatgatcaaaaggggggctgctatcaggcaagaactcgccacgctgaagaatgcgtccacagggtaaatcccttctggtggatggcatgtta

SEQ ID NO: 77513 - DNA, 436 bp, Zea mays
cgagtgagtgaacaccagccgtattgtcccgaccccgaccgatcctcgcctgctgcagccatggcgacctccgcggcgctctccaccgccgccaatcccacccagctctaccggtcccgcgctttgctgggcaagccggtgaaggggcttggcctgagcatgggccgcgagcgcgcccagcggagcattgtgtgccaggcggcgagcagcatctccgccgaccgcgtccccgacatggagaagcggaagctgatgaacctcctcctcctcggcgccatctcgttgcccaccgtcggcatggtcgtcccctacggcgccttcttcgtccctgccggctccgggaacgccggcggcgggacctacgcgaaggacaagctgggcaacgacatcaccggttgacgcgtggctcaacaagcacggtcccaacgaacgcaag

SEQ ID NO: 77514 - DNA, 389 bp, Zea mays
aggcaaccgttcagcgcccttcttggggatgctcctagtgttgacgtcaagaagaatgtgattgtggccattacctctgataagggactctgtggtggtattaattcaacatcagtgaaagttagcagggcccttcacaaattgacatctggtccagaaaaagaaaccaagtatgttatattaggagaaaagggcaaagttcagctgttgcgtgactcaaaggacagcattgaaatgactgcaactgaactgcagaagaaccctatcaactacacacaggttgccgtgctcgccgatgacatattgaaaaatgtggaatatgatgctctgagggttattttcaacaagttccaatctgtcatatcgtttaagcccacaatgggaacaat

SEQ ID NO: 77515 - DNA, 400 bp, Zea mays
cccacgcgtccggtcgtcttcgtcttcctcgggatccacgtctacatctccgcgctgtggcacctcgccagcgtcatctccgtgctcgagccgctctgcggactcgccgccatggccaagagcaaggatctgctccagggccgcaccggcaccgcagccacgcttgtcgtctcctacttcgcggtctgcggcgtcacctccgtgctgttccgtgccgccgtcgttaaggggcgcgccgaggaggggagcttcggtctggccttgcccgggcggctgcttgtcggcgccgtgctgctgtgcgttcttgtctgtgtcaatttgctgggactgctcgtgcagagcgtcttctactacgcctgcaaggccttccacaaccagcagattgacccggctggcgttg

SEQ ID NO: 77516 - DNA, 433 bp, Zea mays
acagctcatgcaccctggacggctcgaagctcgtggtctcaggtggctgcgccgagtccggcgtcctcctcagcgacaccttcctcctcgacctcaccaaggagaagcctgcgtggagggagatccctacgtcctggtcgcccccgtcccgcctcggccacaccacgtccgtctacggcgcgaccaagctgttcatgttcggtgggctggcgaagagcggctcgctccggctgcgctccagcgacgcctacacggtggacgtcagcgaggacagcccgcagtggaggcagttggccacgacgaccgggttcccgaacatcagtccgccgccgaggctcgaccacgtcgcggtgagcctgccctgtggacggatcatcatattcgggggctccaacggcgggggctcaaatcccccggggcagctgttcccgga

SEQ ID NO: 77517 - DNA, 382 bp, Zea mays
ggagctcgcctccaacctctccacctacaaagagcagctacgcgaggtcaagaagcttatcaaggagaagaaggatgatgctggaatttctgaatatattgatatggagaaagagcttcaagatgtcataacgttaaccgaagagattttggcaactgcaaagcaaactgagagtgcccagaatgttgcaggtctatcaccgccaagctattcagctggagtgcagtctgagggactggatgacctttcacattcccataagtttgccgttggtactagagttcaagctgtgtggagtgaagatggagaatggtataatgcaaccgttgaagctttgacaccaaatggatactatgtagcctacgatgggtggggaaacagt

SEQ ID NO: 77518 - DNA, 363 bp, Zea mays
gccctgctcaccgccatcgaccgcgaggcggtgtacgggtactacgacgacccctgcagcgccaactcgcccctgatgaagaagatccgggccgtgctggtggaccacgccctcgccagcggcgaggccgagaaggacgccagcgcgtccgtgttctccaagatcaacaggttcgaggaggagctgcgcgaggcgctgcccagggagatggaggccgcccgcgtggccttcgagaccggcgccgcgccgatcgccaacaggatcaaggagagccggtcgtacccgctgtaccgcttcatccgccaggacctcggcgccgtgtacctgaccggcgagaagctcaagtcccccggcgaggagtgc

SEQ ID NO: 77519 - DNA, 357 bp, Zea mays
gcgacatgtcggccacatggcggaagctcgacgaggaggtcgcggccacgccgatgcctgacatctaccagaagcacatggtgtggatcctgtgcaacgactgcagcgcgacctcgagcgtgcggttccacgtgctggggcacaagtgccccgcgtgcagctcgtacaacacccgggagacgagggctgtgtgccccaggatctgaggcgaaccagaggctatgtcaaaatgccagggagatgccgtccaacgactggtggagatcatctgtccgcaggacgttgctgcgcttaaggttaaaggctagcgcgagaccaagcctggttgtccagtcttgactctggtgctgtccaggc

SEQ ID NO: 77520 - DNA, 329 bp, Zea mays
acagcgcgcgactgacatgtcgatgctcaccagcatactgggccgcaagcatcagcagccgccgccgccgccgcagcagcagcagcagcagcagaagggcggcggcgcgcgcactggcaccggcgccggcgccggcacggaggcggcggcagtggagccggtgagcatcgacatcgcggagcaggggccgctagtggacgccatcacgctggcggcgttcgcggcgccggcgctaggcctgccgccgttcgcgacggccagcatggactggaaggagacgccgacggcgcacgtgttcatggccgacctccccgggctgcgccgcgacg

SEQ ID NO: 77521 - DNA, 369 bp, Zea mays
ctcctcgccatcacataaaaccagtgcaagcagaagcagcgcaatggcgagcagcaccatggccctctcctccacagccttcgccggcaaggcagtgaacgtgccgtcgtctctcttcggcgaggcccgcgtgacgatgcgcaagacggcggcgaaggcaaagccggcggcgagctccggcagcccgtggtacggccccgaccgcgtgctctacctgggcccgctgtccggcgcgcccccgagctacctgacgggcgagttcccgggcgactacggctgggataccgcggggctgtcggcggacccggagacgttcgccaagaaccgggagctggaggtcatccactcccgctgggccatgctgggcgc

SEQ ID NO: 77522 - DNA, 386 bp, Zea mays
acggacgcgtgggcggtgagcatcgccccgcgctggcaagggtgcaccctgtcccagaacgcgtgctggtcgcggttgctgcacaccgtggcgttgggcaggcagtccgcctcggcgccgaacctcccgcccccgcagcacgcgtcggcgacgtccgtgtaccccgacgcccccgggtcgtcgaaggtggccatcgacaggccgtagtagtcggcgagcgagtaggtgaagcccggcaggcgggaggcgaggctggcgagcaggaccgcgagggcgtcgtccaggcccgacgcgagctcgttcaggccgtccaagcacgcgcccgtcttcgtcccgccggacagccgcgccacggggacgcagccgagcagccccacgttgatgat

SEQ ID NO: 77523 - DNA, 367 bp, Zea mays
agatccaggccagaatcgcgcagctgaagagagagctttctcagacggactcgacgtatgactctgagaagttggcagagagaattgcaaagctttctggtggagttgctgtggttaaggttggagcatcgaccgaggcagagctagaggaccgcaagctccgcatagaggacgcgaagaatgcgacttttgcagcaatagaggaaggtattgttccaggaggcggtgcagcatatgttcatctatcgacattcgtaccggctatcaaggagacgttggatgatcctgaggagcgcctaggtgctgatatcattcagaaggctttggtggcacctgcagcgctgatagcccagaaggctgcggtgga

SEQ ID NO: 77524 - DNA, 391 bp, Zea mays
acgcccacgcgtccggttctagatcgcgagcggccgcccttttttttttttttttttttttagctaactctcttttttttcactctttactgtaatagtacacctcttgtccaaagaatcacagttcgttacatcggaagcagcatccgacttcgatcattcgaaagaattataccctcactcgcatacatgataatacttcgccaccttacattcttgaattgacggaacccagtcacacacacacacaccaatcagaggtctcaggaggctggccaggtcttcaggcacagcccgcctgagaaaaatgaagaatacgctacgttctatagtctgtgtcaatcagatttttgtgcagaggtgttcgttttcgagtcagtttggtagtaca

SEQ ID NO: 77525 - DNA, 385 bp, Zea mays
acagctccccccgcaaaaaccctagctttacctccccacaagcgcctccaagatgaagctcgtcaggttcttgatgaagctgaacaacgaaacggtgaccatcgagcttaagaacggcaccgtcgtacacggaaccattaccggtgttgacatcagcatgaatactcatctgaagactgtgaagctgacactaaaagggaaaaatcctgttacccttgatcaccttagtgtgaggggaaacaacatccgctattatatccttcctgacagcctaaacctggagactttgctggttgaggaaacaccaagggtcaagcctaagaagcctacttctgggaagcccttgggccgtgggcgtggccgtggtcctgggcgccgtcggggt

SEQ ID NO: 77526 - DNA, 376 bp, Zea mays
acccacgcgtccgcggacgcgtgggtcccaaagatagtaagttcttttttctttcttatggaaaaaggtctttttccaggattctatagaaatttcatatatgaaagaaacgaaaccgagatagttacctttcagaaaattcgaacgaaggatataggtctatctatgcttcattcttctgaaggtgggagaaaagatcaaactgattattgatcaaaattagggtttgaaacttaggtaattaacttcttctgcttaacccaagaagaaattggattgatttttgagaaatcgaattcagttaagataggggaaattaagatagcaatttctgagccgtatgaggtaagaaactctcaagtacggttctaaggaa

SEQ ID NO: 77527 - DNA, 346 bp, Zea mays
acccaagcgtccgcaatttgctgtctgaactgtagcagctctgttcatgtggatcactggtattattaacaggccaaagatttctggagcacagcttgtagccatcctacctctggctattgttcatactatgggcaatctcttcaccaagatgagccttgggaaagttgcagtgtcatttacgcacaccatcaaggctatggagcctttcttttctgttattctttctgcaattttccttggcgagctacctactatttgggtagtatcttctcttcttccaattgttggtggtgttgcattggcatctcttactgacgcatcctttatctgggccggcttttgg

SEQ ID NO: 77528 - DNA, 396 bp, Zea mays
cgtcggcttctccgtcagcgtcttcgtcgcgccgctcagcatcatgaggcgggtgatccagaccaagagcgtggagtacatgcccttctccctctccctctcgctcaccctcagcgccgtcgtctggttcctctacggcctcctcatcaaggacaaatacgtcgcgcttccaaacatccttggcttcaccttcggcgtggtccagatggtgctgtacgtggtgtacatgaacaagacgccgctgccggttgccgacggcaaggctgccggcaagcttccctcagctgcagatgagcacgtcgtcgtcaacgtcaccaagctcagcccgggccgactcccaccagtaacacagatggcggcggttcccaccaagagctgcgctacagaagcagccgc

SEQ ID NO: 77529 - DNA, 364 bp, Zea mays
gcaaccagataagtgtacttttgtcgtgaatgtcataaattatgcaaattcacttggcgaaagagtgtcatactacaatttcacaagaacaacccctaaaactcaacacataataacaactacagagcatttcgctttgagtaaacaaggaaaattctcgtggtggatatgatatatccagtttactcaatgattttgttgatgacaccagcaccaacagtcttaccaccctcacggatagcaaacctcataccctgctcacaagcaacaggctggatgagctgaacaaccatcttgatacggtcaccaggcatgcacatcttcgcctcctcaactttggcagtcataatcacagtcacagtcc

SEQ ID NO: 77530 - DNA, 348 bp, Zea mays
aattcaaggctcgacgacgcgtacgagcggaacggcatccagagcccgtcctaccggtgcctggccgcaggcatcatcaactggcaagcggacgtcgagaggtgcatagagtgggaagcccacagccgccgcgccactgggctgacgctcgccttcctcagtgccgcagcgaaggagctcggctgccctctcccgtcatgacaaggccattcctggatctgacatcggcttccaattgacggtcagtgctggcacagctgctgcagggtccgcgagtaggacggctccaatctctccatcacgttgtattatctggtgtttccataatgccgatttgatttcaatttg

SEQ ID NO: 77531 - DNA, 385 bp, Zea mays
aagcatctggtaggcttctagagtatgaggttgggggtccccgtgtttgcgtgcagactgcatacggagtagaagttgaggtggaaaataacccatatgatcctagcttaatggttttcatggactacagagattgtttcaaagaggaattctcacacattgaacaagaaaatcccactttcctgtatgctatgcccatgtcatccacacgagttttctttgaggaaacatgcttagcttctaaagatgctatgtcttttgatctacttaagaagaggctgatgtatcggttgaacgcgatgggaattcgtatcctgaaagtttatgaggaggaatggtcctacattcctgttggagggtccttaccacacacagatcagaaaaa

SEQ ID NO: 77532 - DNA, 381 bp, Zea mays
aggaggaagcctctttttgtgaagaacggtgcaattgttgtttgccgcattcaggtgaataacttgatatgcatagagaagttctctgatttccctcagcttggaaggtttacacttagaactgaaggaaagacggtagctgtaggcaaagttgttgatattccgcctgctggtagcccaacattctgagcttaagtcaattttgaacaggatggataatcatgaagcagtgcgttcgcttaagatacttttttttgggaagtgagattagttgttgaggttagattttttttcagtccatcttgagaatggtctatgcctttatggtttaggctagcaagtcttagattggttgcataaaattacatctctggttacatg

SEQ ID NO: 77533 - DNA, 378 bp, Zea mays
agcatagcacttgttccagctagctatgagagagagctttgtttaggcggcggcaagatgaacaggaagccaggagactgggactgcagggcgtgccagcacctcaacttcagccgtcgggatgcatgccagcgctgcagtgaaccacgtggagttggtgatcgtagcggcggtggtggcgacttgggtgggcgtggtggttcctccttcggcggtggctttggtgctggctctgatgtccgccctggtgactggtactgctcctgcggcgcacacaacttcgccagccgctccaactgcttcaagtgctctgcctacaaggaagacgctgccggcgcctttgatagtgacatgttacgctcacgcggctaagccggc

SEQ ID NO: 77534 - DNA, 385 bp, Zea mays
agcggacacgtgggcgcgctacaagtcagggcagtcaagtacttataagaagaacggaaaacctgctgccattcaatatggaaccggtgcaattgctggttttttcagtgaggatagcgttaaattaggtgatctggatgtgaatgattaggaatttattgaagctacaaaggagccaggccttaccttcatggttgcaaaatttgatggcattcttgggctaggctttcaggaaatatctgttgggaatgcaacacctgtgtggtataacatggtaaaacaaggtctcatcagtgaccctgttttctctttctggtttaaccgacatgctggtgaaggagaaggtggtgaaattgtgtttggtggaatggattctagtcactac

SEQ ID NO: 77535 - DNA, 395 bp, Zea mays
acgcccacgacgtccgcccacgcgtccgggaaggtcatcgacctcatctgcacgctcgtcttctcggtggtggtgctgttcaccacgatccggatgctgcgcagcatcctcgaagtgttgatggagagcacgccccgcgagatcgacgccaccaggctggagagcgggctctgcgggatggagggcgtggtggccgtccacgagctgcacatctgggccatcacggtgggcaaggtgctgctggcgtgccatgtgaccatccccaaggatgcggacgctgatgagatccttgacaaggtgatcgggtacatcaagacggagtacaacatcagccatgtgaccatccaggtcgagcgcgagtagggagctctgtctttggctgctgtcttgggcaa

SEQ ID NO: 77536 - DNA, 379 bp, Zea mays
cccacgcgtccgagcgactcagcgagcgagagcagcacacactgcacgcagctagctaggagcagcagcagcggcggcgatggcggcctccatgatctcctcgtcagctctggcggtggcgcctcagggcctgccgcccctcggccgccgcgcctcctccttcgccgtcgtctgctccaagaagaagatcaagaccgacaagccctacgggattgggggtggcctgaccgtcgacgtcgacgccaacgggagaaagggcaagggcaagggcgtgtaccagttcgtcgacaagtacggcgcgaacgtcgacggatacagcccaatctacaacgaggatgactggtctcccaccggcgacgtctacgtccgtggaaccact

SEQ ID NO: 77537 - DNA, 398 bp, Zea mays
cagccctgaggtctctgaatctacaaggatcatctatggaggttcagtaactgctgcgaactgcaaagagctggcagcacagcctgatgtcgatggtttccttgtgggcggtgcttctttgaagcccgagttcatcgacatcatcaacgccgccgccgtgtgaagtccgctgaagatgttccaacccttcaccctgttgcggtgatgtgctgaagacagatcagactacttttttgtttaaccgtgcagtgctatgtaagctactaactttgcgctggtgcggatgctgatttccctccccctagctttttgtgaggctactctacagcttgattcagcttgctaataatgtttgcctctggacatagcgatagtggtgtttgtgtagcccttttttt

SEQ ID NO: 77538 - DNA, 374 bp, Zea mays
agacggcaacgtcttcgtcgcggctaccgcggtggtggcgtgcacgggcgccggcgcgctggcgcgcgggagggaggtgcaccggtgggtggagcagagcgggatccagatggacgagaagctggccaccgcggtggtggacatgtactgcaagtgcggctgcgtcgaggaggcgtggcgtgtgttcgaggccctcccgctcgctgccaaggggctcacgacgtggaactgcatgatcggcgggttcgcggtgcacgggcgggggcaggacgctctgaagctgttcggacggatggagagggagggcgtggcgccggacgacgtcacgctggtgaacgtgctcactgcttgcgcgcacgcggggatgctcagcg

SEQ ID NO: 77539 - DNA, 391 bp, Zea mays
agaccgcattgccggcgggccgctcggcgaggtcgtcgacccgctgtaccctggcggcagcttcgaccccctcggcctggccgacgaccccgaggccttcgccgagctcaaggtgaaggagctcaagaacggccgcctcgccatgttttccatgttcggcttcttcgtccaggccatcgtcaccggcaagggcccgctcgagaacctcgctgaccacatcgctgacccagtcaacaacaacgcatgggcctacgccaccaacttcgtccccggcaactaagctcaacggctatgctatgcaacttcattgtctttcggatcggagagggtgtacgtacctggattgattgatgctgcgagatgcatgtgtgtcctttggtttcaacttgca

SEQ ID NO: 77540 - DNA, 409 bp, Zea mays
aattcatggctcgacggacgcgtccggcgcagcctaaaggcggaggccaacggcgagtggctcccgggccttccctcccccgcctacctcgacggcagcctgccgggtgacaatggcttcgacccgttgggcctggcggaggacccggagaacctgaggtggtacgtgcacgcggagctggtgaacgggcggtgggcgatgctgggcgtggccgggatgctgatcccggaggtgctgaccaaggccgggctgatcaacgcgccgcagtggtacgacgccggcaagtcggagtacttcgcgtcgtcgtccacgctgttcgtgatcgaattcatcctgtttcactacgtggagatccggcggtggcacgacatcaagaaccccgggagcgtcaaccagggaccccatcttc

SEQ ID NO: 77541 - DNA, 405 bp, Zea mays
cgacgacgcgtacgcagcgactcagcgagcgagagcagcacacacgcagctagctaggagcagcagcagagcagcggcgatggcggcctccatgatctcctcgtcagctctggcggtggcgcctcagggcctgccgcccctcggccgccgcgcctcctccttcgccgtcgtctgctccaagaagaagatcaagaccgacaagccctacgggattgggggtggcctgaccgtcgacgtcgacgccaacgggagaaagggcaagggcaagggcgtgtaccagttcgtcgacaagtacggcgcgaacgtcgacggatacagcccaatctacaacgaggatgactggtctcccaccggcgacgtctacgtcggtggaaccactgggcttctgatctgggccgtcaccct

SEQ ID NO: 77542 - DNA, 395 bp, Zea mays
acgcgcctcatcaacgccgagatcaacaagcagctcaaccaggcggagttcgacgccctgctacaggagttcaagacagactacaaccagacccacttcgtgcgcaaccccgagttcaaggccgccgccgacaggatggagggcccgctccgccagatcttcgtagagttcctcgagcgctcctgcaccgccgagttctccggcttcctcctctacaaggagctcggccgcaggctcaagaaaaccaacccggtcgtggcggagatcttctcgctcatgtcaagggacgaggcgcgccatgctgggttcttgaacaaggggctgtctgacttcaacttggcgctggacctggggttcctgaccaacgctatgaagtacaccttcttcaagcccaa

SEQ ID NO: 77543 - DNA, 351 bp, Zea mays
acccacgcgtccgtgtaaaggaatatattttgaaggctggttgtaacgtggacaagtcttcattccattcactgatggaagggatactgaaaaaagctggtgtggaaaaatcaatcgagtttgctgaaaacatagcatctacgggaattctgctgaatgatttctttttatgcccattgattagacacctctgcaagcacaagaaagctcttgaagcgcatcaactattcaataagtttaaaggtcttggagtttcactaaaaactggttcttataattctcttatccgtggccttgtggatgaaaacctgattgatatcgctgaagacttgttcactgaaatgaaaagac

SEQ ID NO: 77544 - DNA, 398 bp, Zea mays
acaggtgaagcttgctgttgtggtgaaggttatgggcaggaccgggtccaggggtcaggtgacccaggtcagagtgaagttcttggatgaccagaaccgtctcatcatgaggaacgtcaagggccctgttcgtgagggtgacatcctcaccctgctcgagtctgagcgggaggccaggaggctgcgctgaagccctggtggccttggatgtaattctgttaattttgttctatgtttgtcgaacttgccgtgtcccttgcaacatctgctttgagatttactgagcctggattgcagttttattttatgttcctgctggaaagtacacttgccgaaacatagttatcattggttatctataatagctcaatcgacgcgtgcaatctgaaagctttgtt

SEQ ID NO: 77545 - DNA, 382 bp, Zea mays
accatggcgacctccgcggcgctctcgaccgccgcgaagcccacccagctctgccggtcccgcgctgcgctgggcaagccagtgaaggggcttggcctggggatggggcgggagcgcgcaagccagcggagcatcacgtgccaggcggcgagcagcatccccgccgaccgcgtccccgacatggagaagcggaagctgatgaacctcctcctcctgggcgccatatcgctgcccaccgtcggcatggtcgtcccctacggcgccttcttcgtccccgccggctccgggaacggccgcggcgggacctacgccaaggacaagctgggcaacgacatcacggtggacgagttgctcaacacgcacgggtcccaacgaccgcacg

SEQ ID NO: 77546 - DNA, 369 bp, Zea mays
acgagtctcgtccacccgtcatcctcctagctcctctactcgccagtcgccatgggcaagattaagatcggaatcaacggcttcggaaggatcggcaggctcgtggccagggtcgccctccagagcgaggatgtcgagctcgtcgccgtcaacgaccccttcatcaccacggactacatgacctacatgttcaagtacgacaccgtccacggccactggaagcacagcgacatcacactcaaggactccaagacccttctcttcggtgacaagccggtcaccgtctttggcatcaggaaccctgaggaaatcccgtggggtgaggctggcgccgagtatgtcgtggagtccaccggcgtcttcactgac

SEQ ID NO: 77547 - DNA, 384 bp, Zea mays
gtctatctatccttctatccccattcccatcccgagacaggagaaggcaaggatgctgctcctgagctcccccttcgtgtccgtgtcgccgccgccgccgccgctcagctcccatggcgctcgcccggcgctgcggatcgaggcggccaggcagctgacggggcgggtggtgacgaccaaggcggacaagacggtcggggtggaggtggtgcgcctggctccacaccccaagtacaagcgccgggagcgcatcaagaagaagtaccaggcgcacgaccccgacaaccagttcaaggtcggcgacgtcgtcgagctccaaccctcccgtcccatctccaagaccaagcacttcctcgccatcccgctcccgccccgcgacactcg

SEQ ID NO: 77548 - DNA, 396 bp, Zea mays
acccacgcgtccgtgtatattaggcccttacttatgggaagtggggctgttcttggtcttgcacctgctcctgagtatacattcattatatttgtctctcctgttggaaactactttaaggaaggtttagcaccaataaatttgatagttgaagacaagttccatcgtgctactcctggtggtactgggggtgtgaagaccataggaaattatgcttcggtgttgatggcacagaaaattgcaaaggaaaagggttattctgatgtcctctacttggacgctgttcacaagaagtaccttgaagaagtttcttcatgcaatgtttttgttgtcaaggacaatgttatttctaccccagcactaaaatgaacaatattacctggtatcacaaggaaa

SEQ ID NO: 77549 - DNA, 377 bp, Zea mays
gaagagagcagaagcgaagagcagcggcgcaaaggaaagggagccatgctcgcctcgccggcgctcgccggcgcccactccttcgcggcgtccgtgtatggaaacatcctcgtcccctcgcctcccgtccccgcgccggcacgtcgcgcggcgctgtccgtcgtcgccaaggtcaaggtggccactccccaggacgaccgcatcgcccgccacgtccgcctccgcaagaaggtaagtggcaccactgagaggccgaggttgagtgttttccgctcaaacaaacatctgtacgctcaagtcatcgacgacacaaagcaatgtactctggcttcagcttcaaccatgcacaaatctctctccaaggaatttgaatactc

SEQ ID NO: 77550 - DNA, 383 bp, Zea mays
acgccgagctcgacccggagaagaggctgtaccccggcggctcctacttcgacccgctcggcctggcggccgaccctgagaagaaggagcggctgcagctggcggagatcaagcacgcgcggctcgccatggtcgccttcctcggcttcgccgtgcaggccgccgccaccggcaaggggccgctcaacaactgggccacccacctgagcgacccgctccacaccaccatcttcgacacgttcggagggtcctcttaagcccgccattgctccgccccgtccatcgaccggccggaacgtgttcttggattaattaactacgatctctatgagcctggggatggatcaacccgtcgtgcgtggtctcgttttgtgatgagttgg

SEQ ID NO: 77551 - DNA, 385 bp, Zea mays
gaagagggaaaaatcgaaatgaaataaataaagaataaagccaaaaaaataagtcgaagatagaagagcccagattcaaaatgaagaaatggaaactcgaaaaggatccttctgattctcaaagaatgaggggcaaggggattgataccgagaaagatttcttcttattataagacgtgatttgatccgcatatgtttggtaaaagaacaatcttctcctttaatcataaatggaaagtgttcaattagaacatgaaaacgtgactcaattggtcttagttagtcttcgggacggagtggaagaagggcggagactctcgaacgaggaaaaggatcccttcgaaagaattgaacgaggagccgtatgaagttaaaatcccaagtt

SEQ ID NO: 77552 - DNA, 390 bp, Zea mays
agcccacacatccgggtttatggcatgataagtgacagcgtgaagaaagaactaaaccctttgcttgaattgtgtatacaggatccacaaacttctcagtcaagtattgcaaaaggtaatcttaatggcatgggtcaacagaaccaactcacacattggctgggcatagtgaaaatcctcactagctacttggatgtactaagggaaaatcacgttccctcaattctggtgcataaacttttcactcaaatgttctcacttattgatgttcaattatttaaccgattacttttgcggcgtgagtgctgttcttttagtaacggggaatatatcagagctggactagctgaactaaaacattggtccgacaatgctacaagagagtttgca

SEQ ID NO: 77553 - DNA, 393 bp, Zea mays
aggatcgatctgcccttaacaatgcctggaaatcatggatggaagaacacatagcggccacgggcaaggcgccaccagggaacgttgcaggaaaccacacctgggttggtggtgccccccagcggcccccagacctgcgtctgacgcctggacgccacgtccagctgacggttccgctggagcagctgatagaccggctggtgaaggagaacagggtggtggccttcatcaaaggatcaaggagcgctcctcagtgcgggttctcgcagagggtggtgggtatcctggaagcgcacgccgcggatttcgtgaccgtcgatgtgctcgacgaggagcacaaccacgggctgagagaaaccctcaaggcttacagcagctggccgacgttccctc

SEQ ID NO: 77554 - DNA, 369 bp, Zea mays
aagggagatcgacgtgaatctcatcatcactgactactgcatgccaggcatgacaggatacgatctgctcaagagagtgaaggggtcctcctcgctcaaggacattcctgtggtgatcatgtcgtctgagaatgtgcctgcccggatcagcaggtgcttgcaagacggcgcggaggagttcttcctgaagcccgtgaagctggccgacatgaagaagctcaagtcgcacctgctgaaacggaagcagcccaaggaggcgcaggcgcaggcgcagcagggacaggcggtggagctggagcctgagcagcagctggacccgcgcgcgcagccggggcacgacgcggaggaaaccgcggcagagccgccgcc

SEQ ID NO: 77555 - DNA, 110 bp, Zea mays
acgcgtccaggcgacttcgtcgaccgcgagggcgcggggaagcacatccaggcgggggccaagaaggtgctcatcacggcgcccggcaagggcgacatccccacctacgt

SEQ ID NO: 77556 - DNA, 380 bp, Zea mays
acccacgcgtccgcgccgcaccagcgccagcccgcgccgtggtcagaaggaggtccttcaccgtgcgcgcctctctccgcaaggccaccggcaccgccgccgtggcaatggctgccagcgccctgcttgccggcggtgccatggcccaggaggtgctgctgggcgcaggcgacggcgggctcgtcttcgagcccagccagttcaccgtcaaggccggcgacaccatcacattcaagaacaacgccggcttcccgcacaacgtcgtcttcgacgaagacgaggtgccgagcggcgtcgacgccaccaagatctcgcaggaggagtacctcaacgcgccaggcgagacctactccgtcaccctcaccgtgccgggaacctac

SEQ ID NO: 77557 - DNA, 357 bp, Zea mays
gcaagcagcgagtacatacatactatgcagccaggcagccatggcgcccaccgtgatgatggcctcgtcggccaccgccgtcgctccgttccaggggctcaagtccaccgccagcctccccgtcgcccgccgctcctccagaagcctcggcaacgtcagcaacggcggaaggatccggtgcatgcaggtgtggccggcctacggcaacaagaagttcgagacgctgtcgtacctgccgccgctgtcgacggacgacctgctgaagcaggtggactacctgccgcgcaacggctggataccctgcctcgagttcagcaaggtcggcttcgtgtaccgcgagaactccaactccccgtg

SEQ ID NO: 77558 - DNA, 336 bp, Zea mays
agcggacgcgtggggtggcgaccgccgtggtggccttggtgctgctggcggcggcggcgacctcggaggcggccatcagctgcgggcaggtggcgtcggccatcgcgccctgcatctcctacgcgcgcggccagggctcggggccctccgccggctgctgcagcggcgtcaggagcctcaacaacgccgcccgcaccaccgccgaccgccgcgccgcctgcaactgcctcaagaacgccgccgccggcgtcagcggcctcaacgccggcaacgccgccagcatcccctccaagtgcggcgtcagcatcccctacaccatcagcacctccaacgact

SEQ ID NO: 77559 - DNA, 325 bp, Zea mays
acgtgatgcagcactgattttcatggttgcagttggcccaacaatggttgttatagcttcaatgttcattgtaagacctgttggaggccacagacaagtgcgaccttctgatggcacaagtttcacatttgtatacagtgtctgcttgctgttagcctcttatcttatgggcgtcatgttattggaagaccttgttgacttaagccagtcagtgactgtcgtgttgaccgtgattctaatcatgtttctattagttccaatagtcattccagttctactcagcttcttttcggatgatgacgagactttgtatgcactattgttg

SEQ ID NO: 77560 - DNA, 382 bp, Zea mays
atcattgacaaggagggagtgattcagcactctaccattaataaccttgccattggtcgcagtgtggacgagaccatgaggacccttcaggcattgcagtacgtccaggagaacccagacgaggtctgcccggccggttggaagccaggggagaggtccatgaagcccgaccccaagggaagcaaagagtacttcgcggccgtctagactcgccgtctttgacaagctttgctacgtttttgtcatggtgcccgctaagccccccggcagtaggttggagttttgcggagctcgcgtttttacaaatctcggtgctctgaacccgacgtagtaccccctttggcggtgtgcaccccgattgagtgcggttctttgccacctt

SEQ ID NO: 77561 - DNA, 388 bp, Zea mays
ttacgcgccacgcgtccgtgagtatgagctcaatcttccaagttcaaacaagggacttgatgttggaagggtgtattttgtgatcctcgagatgtcccctgttacatatattgattcgagtgctgttcaagctcttaaagacttgcaccaagaatacaaagcacgccatattcagattgccatagctaacccgaaccggcaagtgtaccttctgttgtcaagatcgggcatcattgacttggtaggagctgggtggtgctttgtgcgagtgcatgacgccgtgcaagtgtgcctacagcacgtgcagaattcatcttcaaatgcgttgaagctacccgtgcaggcatcaggcgtgttgaccgattctgtttcgactcctaaaccagag

SEQ ID NO: 77562 - DNA, 333 bp, Zea mays
acgcccacgcgtccgtcccgttcccgatcctcatcacctcaaccccgcgccgccccctccccaccaccctcgccatggtcagcgccgccgcctcgccgccgccgtccgggaagccgacgcaggacgagctgaagcgcttggcggcgcaccgcgcggtggagctcgtggagcccggcatgacgctgggcctgggcacgggctccacggcggcgcacgcgctggaccgcctgggcgacctcctccgcgcgggcgcgctgccgggggtggccggcgtgccgacctcgctcaagacggatgcgcaagcggcgcgcgtcggcatcccgctgctcccgc

SEQ ID NO: 77563 - DNA, 353 bp, Zea mays
acgcccacgcgtccgaaccatctaccagcgactcagcgagcgagagcagcacacactgcacgcagctagctaggagcagcagcagcggcggcgatggcggcctccatgatctcctcgtcagctctggcggtggcgcctcagggcctgccgcccctcggccgccgcgcctcctccttcgccgtcgtctgctccaagaagaagatcaagaccgacaagccctacgggattgggggtggcctgaccgtcgacgtcgacgccaacgggagaaagggcaagggcaagggcgtgtaccagttcgtcgacaagtacggcgcgaacgtcgacggatacagcccaatctacaacgaggatga

SEQ ID NO: 77564 - DNA, 359 bp, Zea mays
acgcatcatgacattaatggagggtgatgtgatattaacaggtactcctgagggtgtgggtcctgtcagagtaggtcagaagattacagctggtataactgacctaattgatgttgagttcgatgttcagaggcgaaatcggtcattttccacatgatgcaataagcaagaaagtaatggtgaatacaaagtggcagtactcgtcctcgaccttgaatcgcattactggacctgcagccattgcagatagctcttgagcctttccttgatttaatttacctgggttttgagagactatctatgaatatgctaactcgttcgtgaagtatctttttgtcccaaaaaaaaacaaacaaaaa

SEQ ID NO: 77565 - DNA, 299 bp, Zea mays
aggaggtcatgtggggttgaactgagccgagacacctacaacaccctgatagctgcgtacggacggtgtggctccaggactaatgccttcaagatgtacaacgagatgaccagcgctggattcaccccctgcatcaccacgtacaacgcgttgctgaacgtgctgtcgcggcagggcgactggtccaccgcccagtcgatcgtaagcaaaatgaggaccaaggggttcaagccgaacgagcagtcgtattcgctgctgctccagtgctacgctaaggggggcaacctggcagggatcac

SEQ ID NO: 77566 - DNA, 361 bp, Zea mays
aattcaaggctcgacggacgcgtaaggcgtgcgtggacgcgctcaacggcctcgtgcacgccgtcatcgggaccaaggccagcgacacctgctgcccgctgctctccggcgtggccgacctcgacgccgcgctctgcctctgcaccaccatcaaggccaaggcgctcagcgtcagcctcgtgctccccgtcgccatctcggtgctcgttaacgagtgcggcaagcatgtgccctccagcttccagtgcccgtaatcacatcagctgcatatatgtgctactatgatgtatcaccaccactaatctatatccgcatgcatgcatcaatgcatgggtgattaacggtttaatacccgtccaag

SEQ ID NO: 77567 - DNA, 325 bp, Zea mays
acggggccgccacgcaactcctccgcgggagcctccctcctgcccgcttcgccgctgccgtctcgcctctcacatacagcagcagccgccaactctgcagtacccccatcgccaacgattcctccgccgcaggaccgtgggacgaggccgagacggagatcctccgcgacgtcgagcccatcgtgaatatcgtcaaggacatcatccactcccgcaggtataaaaatggtgaatttttaagcccagatgatgaaaaggttgtaagagaaaagcttctttctcatcatcctcgtgcagaagaaaagattggttgtgggcttgatgg

SEQ ID NO: 77568 - DNA, 385 bp, Zea mays
acgaagaagctagcgcttatagcttgtcagccatggccaccgccgccgcgtctagcctcctcaagtcctccttcgcgggctcccggctcccggccgccacgcggaccacaccggcgtccctcgtggtggccaccggcccgcgcggcgccggcgcggggcccatctgcgcgtccatgtccatgtcctcccccaacccgccctacgacctgacgtccttccggttcagccccatcaaggagtccatcgtgtcccgcgagatgacccgtcgctacatgacggacatgatcacctacgccgacaccgacgtcgtcatcgtgggcgccggctccgccgggctgtcctgcgccttacagctccccaaagaaccccgccttgagcatcgcca

SEQ ID NO: 77569 - DNA, 385 bp, Zea mays
acgatgagctcaagctcaaggagatcaagaacggcaggctcgccatgctcgccatcctcggttacttcatccaggggctcgtcaccggcgttggcccgttccagaacctgctcgaccacctcgccgaccccgtcaacaacaacgtgctcaccagcctcaagttccactagaacgttggtgcatcagcatacctgctgccgccgccgccagttgtttgctgtggaaagctagatgcatgcgtgttgtaaaggaacctgaagcgttgcatcggtcatgattcatgcatggccagcctgctgcctgtaacaacaaactagtattgatcttattgagaccgaaaaaaacagaagggggtatgcgcaccggcagaaaaaaagggcggccg

SEQ ID NO: 77570 - DNA, 311 bp, Zea mays
agcccacgagtccgcccacgcgtccgcacactcctcgccatcacataaaaccagtgcaagcagaagcagcgcaatggcgagcagcaccatggccctctcctccacagccttcgccggcaaggcagtgaacgtgccgtcgtctctcttcggcgatgcccgcgtgacgatgcgcaagacggcggcgaaggcaaagccggcggcgagctccggcagcccgtggtacggccccgaccgcgtgctctacctgggcccgctgtccggcgcgcccccgatctagctgacgggcgagttcccgggcgactaccgctggg

SEQ ID NO: 77571 - DNA, 314 bp, Zea mays
acgcttctcctcgctcctcgccaccgtggaggcggagctggccaagggcggcaaggccgagttcaacaagctcaacgacgtcacctccttcgacttcatcggcgaggcctacttcggcgtgcgcccctcggcgaccgagctcggcaagggcgggccgagcaaggcggccaagtggctcatctggcagctccacccgctggtcacgctcggcctccccatggtcctggaggagccgctgctccacacgttccacctcccgcctttcctcgtcaagggcgactacagggcgctgtacaagtacttctccacggtgg

SEQ ID NO: 77572 - DNA, 338 bp, Zea mays
acgggcgactttgtcattaaaaaggtgttactgaatgatgatgcaaattatggttacaatgctgccaagaactgctatgaggacttgatggctgctggaatactggacgcaacaaaggttgtgaggtgttgcattgagcatgctgctgtagttgctaagtcctttctcacctctgatgtggtgattgttgaggcaaaagaaggcaaacctattcgaataagacccccaatgcctcctaggcacttaattcccccaatgcctgcttcaatttcaggtattcgagtgtagcagtcgtcctttccaccaagaatcagcctcaacacaacaagactacgggg

SEQ ID NO: 77573 - DNA, 347 bp, Zea mays
acgcccacgcgtccgcccacgcgtccgcccttgcccacttctacagcccctctgctgcagcaagaaggaaagaagctagcgcttatagcttgtcagccatggccaccgccgccgcgtctagcctcctcaagtcctccttcgcgggctcccggctcccggccgccacgcggaccacaccggcgtccctcgtggtggccaccggcccgcgcggcgccggcgcggggcccatctgcgcgtccatgtccatgtcctcctccaacccgccctacgacctgacgtccttccggttcagctccatcaaggagtccatcgtgtcccgcgagatgacccgtctctagatgacggac

SEQ ID NO: 77574 - DNA, 383 bp, Zea mays
acgcggacgcgtgggcggacgcgtgggttccagaagcgcaagactctaaaggccgtcgccttcccattcttcctcgccgcgggggtcgcctgagatcacataaacaatggtgaaggctgttgctgtgcttggtagcagcgatggtgtcaagggcaccatctttttcacccaagagggagatggccctaccgctgtcaccggaagtgtctctggcctcaagcctggcctccatgggttccatgtacatgcacttggtgacaccaccaatggatgcatgtcaactggaccacactacaatcctgcgagcaaggagcatggggcaccagaagatgagaaccgccatgctggtgatcttggaaacgtgacagctggagcagatggtg

SEQ ID NO: 77575 - DNA, 375 bp, Zea mays
agcaagctattgctgatcacttcaagatggcgctggactgcttcttcgctgtatggtttgttgtgggaaatgtgtgggtgtttggtggacattcttccgcccatgacgcacccaacctgtacaggttgtgcatagccttcctcactttcagctgcattggctatgcgatgcccttcatcctctgcgcgctgatatgctgctgcttaccctgcataatctccctgatgggcttccgggaagatctggacgaaaacagaggtgctacttcggatgcgatcaacgccctgggcacatacaggttcatgtcaaagaagcctcgtaacggggaggcaaaccaaagttgccgtggagtcctttgccctggaacggaaaagg

SEQ ID NO: 77576 - DNA, 337 bp, Zea mays
aattcaaggctcgaccgacccgtaagctccgaactagacagcctgggagaggagtcctacaaggacagcactctgatcatgcagctcctgcgtgacaacttgaccctatggacttccgacaccaacgaggacgccggagatgagatcaaggaagcagctgctgcccccaaagaatccgcccccgagggccagtaagacggatccgatctcccgacctgatgcgtgtctgctgatgtcagggagtttaccaagactgtgccgttcttgatttctgatagcttatcttctagtacacctcgtgttgttctcttcgtcacggcgccggtgactgttcgcc

SEQ ID NO: 77577 - DNA, 349 bp, Zea mays
acggcgagcgagagcagcacacactgcacgcagctagctaggagcagcagcagcggcggcgatggcggcctccatgatctcctcgtcagctctggcggtggcgcctcagggcctgccgcccctcggccgccgcgcctcctccttcgccgtcgtctgctccaagaagaagatcaagaccgacaagccctacgggattgggggtggcctgaccgtcgacgtcgacgccaacgggagaaagggcaagggcaagggcgtgtaccagttcgtcgacggatacagcccaatctacaacgaggatgactggtctcccatcggcgacgtctacgtcggttgaaacaatgggcctctg

SEQ ID NO: 77578 - DNA, 329 bp, Zea mays
acggaagtttgagtcaggtgtacaccgtgttcagcgtgttcccttgacagaggctatgggtcgtgttcatacgtcaacagcaactgtagctattatgccagaggctgatgaagttgatgtggttattgatccgaaagatattgagcttaaaacagcacgatctggtggagctggagggcagaatgttaacaaggtggagacggctgttgatcgtattcacaagccgacaggaatacggatattctgtacggaagagagatcacagctacagaacagagagcgggcatttcaattgttgagaacaacactttacgagataaaattaaggg

SEQ ID NO: 77579 - DNA, 235 bp, Zea mays
tagatagataataagcgaggccgagctggctgccatacataggtattgtgtggtgtgtgtgagagagagagaaacagagttcttcagtttgctatctctctctgcatgtttggcgtcagtctttgtgctcatgtacgtacgtgtgtctacctgcatgttggttgatccgattgcatctgctgtaaccatatattaattggtccacgatgatatgatttgatactatatatatact

SEQ ID NO: 77580 - DNA, 386 bp, Zea mays
acgcggacgcgtgggccgcttcttctccgtcgcgccggcgccggtcggggcgaaagggctccgagcggcggcctccgccgttgaggtgggcggcgtaaagatcgcgcgcgaggatgttgtgaaagaagatgacctaacaaacaacgtgccagacactatctttgcgaagattggcctgcagctgcacaggagggataaccatccccttgggattctgaagaacacaatttatgattactttgacaagaacttcactggacagtttgacaagtttgatgacctttgcccccttgtttctgtcaagcagaattttgatgatgtcttggtcccttctgatcatgtaagccggagttacaatgacacatattatgttgatgatcaaacag

SEQ ID NO: 77581 - DNA, 370 bp, Zea mays
aattcaaggctcgaccgacccgtccgcggacgagtggggcatgttcttggcgggaaaagttgaagaaacacccagacctctgaaggatgtcatacttctttcatatgagatcatccacaaaaaggatcctgctgcagttcaacgaataaaacagaaggaagtatatgaacaacaaaaggaacttattttactcggggaacgtgttgtgcttgtgacacttggttttgatttgaatgtgaaccatccttacaagcccttggttgaagcaataaaaatattcaaggttgctcaaaatgcacttgctcaagttgcctggaattttgtcaatgatgggctccgcacttcactttgcctgcaatttaaaccgcac

SEQ ID NO: 77582 - DNA, 339 bp, Zea mays
acgctcacctccccaaccgtttgcctccgtctcgcgtgacttcattcccagcggccggcggcgacctccacgtggtgccattcgccggcaacgagcacccgcccaccaggatccaggtttgtgctgcgagagcgcctatccattcaccatgattaatttcgtgctcctgatcagccgccagggcaaggtgaggctcaccaagtggtattctccttacacccagaaagagaggaccaaggtcattcgcgaactcagtggactcattcttacacgagggcccaaactctgcaattttgttgagtggagaggttacaaggtcctataccggaggtttgccag

SEQ ID NO: 77583 - DNA, 368 bp, Zea mays
  unsure (1)..(368): unsure at all n locations
tacgcggcgntagtacggtatggcattcccggctcgaaacacgcgtacgcccacgcgtccgcaacttcgccagcttcgtccggcagctcaacacctacgggttcaggaaggtggacacggaccggtgggagttcgcgcacgagtcgttcctgcggggccaggcgcgcctgctgccgctggtcgtgcgcaagaggaagaaggcgggcgccggcgccggcgccggcggccgggagctgtgcgaggccggggaggaggtgcgcgggaccatccgggccgtgcagcgcctgcgggagcagcagcgcggggtggaggacgagctgcgggccatggaccgccgcctgcgcgccgccgagagccggccggcccag

SEQ ID NO: 77584 - DNA, 339 bp, Zea mays
ggacaactgggcactggtgataacctctcaaggaactttccttttgaagtggcatactttaatgcaacacatattgagaagcttgcttttggtatgcgccattctcttgtactactgaaagacaattcagtgtatggatttggctcagcaagacgaggacaagttggtaaatgtgcttctaggatccaaaaatcatataatgttcctagactgattgatggttttccaaattgtaagatagtaaatatatatgccaatggcgatcacagtgctgcattggacgaatctggtcatctgtatgtctggggaagagcattaattggacaacatgatgatgat

SEQ ID NO: 77585 - DNA, 361 bp, Zea mays
acggagagaagtagctagaggtagcaccagcaaaccaaataagcagaccaccttctccacccggctggcctggccggccttcgtcttcctccgatccccaggccccagccactccccgtacaagccaaaaagaccagtaggtaggcaggcagttcatcgtcgatcgagcaagatgtcggactggggccccgtggtgatcgggctggtgctgttcgtgctgctctcgccggggctgctcgtccagctccccggccgccaccacttggtggagttcggcaacctgaagaccagcgccgtctccatcctcgtccactccatcatctacttcgcgctcatcaacctcctcggcaacggcaaccgg

SEQ ID NO: 77586 - DNA, 390 bp, Zea mays
aagcattgttgagcaggctgccgtgagagatgtgcaggaggcctgtgtacatgatggatatgttctacccaaattgtatgcaaaggttcatcactgtgtctcatgcgcaatccatgcgcacattgtccgggtccgctctcgtgagaacaggaggaaccgtgagcccccgcagcgcttcagacgccgggatgatggcccaaggcctggtcagggcccgccgcgcccaggcggtgcagctcctgcagctgcacctgctgctgctcctcgtacctaagttctggaattagtttcggggcttagttttgtgaaacattacctgttttgagaaaccattgttactgtatccccttgatgttcaacgtttttagtaaaatttgtggttctgaaaaa

SEQ ID NO: 77587 - DNA, 386 bp, Zea mays
ttccggctcgaaccacgcgtacgcacgcatactgcatacacaacgcagagcatcagaagcagctgcgatctgatcgacatggctgccgccaccatggctatcacctcccgcgcgctcgtcggcaagccggcggctggcacgagggacgtcttcggcgagggccgcatcaccatgcgcaagaccgccgccaagcccaagccggcggcgtccggcagcccatggtacggtgccgaccgcgtcctgtacctgggcccgctgtccggctcgcccccgagctacctgaccggcgagttccccggcgactacgggtgggacaccgcggggctgtcggcggacccggagaccttcgccaagaaccgcgagctgggagtgattcaatggccgct

SEQ ID NO: 77588 - DNA, 386 bp, Zea mays
cgccgtctcgcacaggctcgttgttcctcttatccgcggaggaagaaccttggcccgacaccatgctcccaatggccgtccaccccaccaccacgccggccttgtccccgcgcgcccgcgtctcgccgcacaggcctcccatctcctccctggcggacccctcgtcctccccctgccatcgcatcgtcagtttcaaaagcaggaggctgccacttcgctctctccacatcgccgctgccgctgccgccggggcagaggaagaagaggcgcaactaggtggaagtgtgaacgcggtcgacgaggaggaagcggagaataaggtggtggtgcccgagagacaggacccgatgctggtactcaagttcatctggatggagaacaacatc

SEQ ID NO: 77589 - DNA, 386 bp, Zea mays
acgggcttcggcgcctccgtcgcgcactggcgcaggaacattggggtgttgtctgaatcctataccgtctacgcgatcgatttgctggggtttggcgcgtcggacaagcctcctgggttttcttacacgatggagacatgggccgagctgatactggatttcttggaggaggtggtcaggaggcccacggtgcttgtcgggaactcggttggaagcctcgcgtgcgtcattgctgcatcagagtccagcagagaagccgtccgggggcttgtcctgctgaactgcgccggtggcatgaacaacaaggcgatcgtcgatgactggcggatcaagctgctcctgccactgctctggctgatcgacttcctgctgaaacagcggccgat

SEQ ID NO: 77590 - DNA, 349 bp, Zea mays
agcaggcactgaggaaggagcccttgacggtttatggtgatggaaagcaaaccaggagtttccaatatgtttctgatctggttgagggtctgatgaagctgatggaaggcgagcatgtggggccattcaacctgggtaaccctggcgagttcaccatgcttgagcttgccaaggttgtccaggacaccatcgaccccaacgcacggatcgagttccgcaagaacacccaggacgacccgcacaagcgcaagcccgacatcagccgcgccaaggagttccttgggtgggagccgaagatccccctgcgtgagggccttcccctcatggtctccgactttcgcaagcgcat

SEQ ID NO: 77591 - DNA, 392 bp, Zea mays
acgcccacgcgtccggcaagcccatcacggtcgtctccagcagggacccgctcaagctcccatggggtgagctcggcattgacatcgtcatcgagggcaccggagtcttcgtcgacggccccggcgccggcaagcacatccaggccggcgcgaagaaggtgatcatcacggctcccgccaagggcgccgacatcccgacctatgtcgtcggcgtcaacgagggcgactacgaccacagcgtcgccgacatcatcagcaacgcgtcctgcacgaccaactgcctcgcgccattcgtcaagatcttggacgaggagttcggaatcgtgaaggggaccatgacgacgacgcactcgtacaccggcgaacagaggctgctggacgcgtcccaccgc

SEQ ID NO: 77592 - DNA, 348 bp, Zea mays
acgcgaagccacaggtcgaaggcggcggcggcgatggggagcgacacggagacggagaagaaggcctcggtggcgctgatgtccatcgcgaaacccctcgctggaaagaagctctgcaagcggaccctcaagctcgtgcgacgagcctccgaggcgaagtgcctcaagcgcggagtcaaagaggtagtcaagagcattcgccgcgggaacaaaggattgtgtgtgatcgctggaaatatttctcctattgatgtgattacacatgttccgatactatgtgaggaagctaatgttccttacgtatatgttccatcaaaagaggatcttgcgaccgcaagaaccactaag

SEQ ID NO: 77593 - DNA, 343 bp, Zea mays
acgcccacgcgtccgcccacgcgtccgcgagaccttcctcggacacaacatcgtcgacaatattattcttcagcgcagcggctactcagtttatccttggacagcaagttcccttctctctgtggctttctcttgcccctgtggtcattggtgtttcaatggcatcccttactgagctttcattcaactggactggcttcatcaatgccatgatatcaaacatctcattcacttacaggagcatttattccaagaaagctatgactgacatggatagcaccaacgtgtatgcttacatctcaataatcgctctaattgtttgcattccacctgcattgatctt

SEQ ID NO: 77594 - DNA, 383 bp, Zea mays
acgtggggagagtgtggacaacgtggtggatacttcgaaatgacaaatcttcctccaaagacagtagatgagatctacaaggttgcatcaatagtactgagtccgaatgttcccgggcaaatctttatgggagtgatggttaaccctcctaaacctggagatatctcataccccagttcactgccgaaagcaagtccatcctcgaatctttgaggaggagagcgcgcatgatgacagacggtttcaacagctgccgaaatgtggtgtgcaatttcacagaaggagctatgtactctttcccccaaatacagctgccagcaagagccatcgaggcggcaaagagagccggcaaagcagcagacgttttctactgcctcaagctc

SEQ ID NO: 77595 - DNA, 391 bp, Zea mays
acgcggacgcgtgggcgaccacgtcatcaatccgggccactggaccgaggacatgcgcgacgacgcgctggaacctgccgacctcttcagccgccacctcacggtcgtcgacgtcggcggcggcacggggttcaccacgctcggcatcgtcaagcacgtcaacccggagaacgtcacgctgctcgaccagtccccgcaccagctcgacaaggcccggcagaaggaggccctcaagggggtcaccatcatggagggcgacgccgaggacctcccgttccccaccgactccttcgaccgatacatctccgccggcagcatcgagtactggccagacccacagcgggggatcaaggaagcctacagggtcctgagatttggtgggctagcttgt

SEQ ID NO: 77596 - DNA, 388 bp, Zea mays
acggccaggagcttcttcaaaagttgagggagaagaacatcgattttgctgctcacagcaaccaggaggactctggttctcttctgttcaaccttattggaaatttggcattcccgcttatccttatcggtggtctgtttttactttcaagaagggcacagggtggcctcggtggacccaatggtcctggctttccccttggttttggtcaatctagggccaagtttcagatggaacccaacactggtgttacatttgatgatgttgctggtgtcgatgaagcgaagcaagacttcatggaagtggttgagttcttgaagaaacccgaaaggttcactgctgttggtgctcgcattcctaagggtgttctgcttgtcggtcctcctgg

SEQ ID NO: 77597 - DNA, 382 bp, Zea mays
cacgcgtccacccaagcgtccgcccacgcgtccgcccacgcgtccgcccacgcgtccgggccaagatccaggacaaggaaggtatcccgccggaccagcagcgactaatcttcgcggggaagcagctcgaagacggccgcaccttggccgactacaacatccagaaggagtccacccttcaccttgttcttcgccttcgcggtggcatcattgaaccttccctccaggcgctcgcccgcaagtacaaccaggacaagatgatctgccgcaagtgctatgcacggctgcaccccagggctgttaactgccgcaagaagaagtgtggccacagcaaccagatttgtatataagcaagatggtgcgagtcagctttagctgaggg

SEQ ID NO: 77598 - DNA, 295 bp, Zea mays
ccacgcagtcacggtcgcgtgagtcgtccgcccacgcgtccgcccacgcgtccgggccaagatccaggacaaggaaggtatcccgccggaccatcagtgactaatcttcgcggggaagcagctcgaagacggccgcaccttggccgactacaacatccagaaggagtccacccttcagcttgttcttcgccttcgcggtggcatcattgaaccttccctccaggcgctcgcccgcaagtacaaccaggacaagatgatctgccgcacgtgctatgcacggctgcaccccagggct

SEQ ID NO: 77599 - DNA, 371 bp, Zea mays
acggacgcgtgggtggtgccactgcttcacacacatatgtcctggagaccaaaacacagggcaggttccagggttcaccagctatcattacataccgtgttcccacaaagacagctcttcaggaggcatactcaactcccatcttcccactggatattctcgctgagagacctccagagaagaagtttgaatgggctaagaggcttgtgatgaaatacgggtcacttgtgtctgttgtctcttttgttggactgtttatctaccttgtcgcgagcccgtcgaagagcagctcaaaggcaagcaagaagagacgctgatctacttataggtcgcagttgacggtgtagctggtggttttgcctggaggaact

SEQ ID NO: 77600 - DNA, 353 bp, Zea mays
acccacgcgtccgccagggcacagcatcagtggtccttgcaggtttgttagcagcactcaagatggttggtgggaccctggcagagcagacttatttgttccttggtgctggggaggctggaactggtattgcagaacttattgctcttgagatttcgaaacagacgaatgctccaattgaagagtgccgcaagaaggtttggctggtggactcaaagggtttgattgttgactctcgtaaaggctcccttcagccattcaagaaaccttgggcgcatgagcacgagcccttgaaaaccttgtatgatgctgttcagtccatcaaacctacagttctgatcgggacatctgga

SEQ ID NO: 77601 - DNA, 409 bp, Zea mays
acaaaggacaggatgtatctcttcccaagagcaaatatgaagaggatgtgttcattaataatcacacgagcgtgtggggttcatggtggaaagatcatcaatggggctacaagtgctgcaagcagactatcaagaatagttactgtactggcttggctggaatagaagctgccgaggcatcagcagatctaatgaaagccaatatggctcgcaaggaggctgcagaagatgagcctgtacagcatgaagagaagcgattagccacttggggaaccgatgtgcctcaggatcttgttcttaacgagaagaagctccaggaatctctaaagaaggaaactgcgaggatgaaagatgacaaagacgaaaggaagacgaagtataacgtgaagtttaacgattaggttactgc

SEQ ID NO: 77602 - DNA, 314 bp, Zea mays
gcgtccacacaagacaggatgtatctcttcccaagagcaaatatgaaaaggatgtgttcattaataatcacacgagcgtgtggggttcatggtggaaagatcatcaatggggctacaagtgctgcaagcagactatcaagaatagttactgtactggcttggctggaatagaagctgccgaggcatcagcagatctaatgaaggccaatatggctctcaaggaggctgcagaagatgagcctgtacagcatgaagagaagcgattagccacttggggaaccgatgtgcctcaggatcctgttcttaacgagaag

SEQ ID NO: 77603 - DNA, 337 bp, Zea mays
aggtgatagttaacaccttccctgcaactgcctcatgtcatacccaaacgtttaaatgtttgggtgatatgatgcctgcacaattatgggacacaacaatggatcctgacatgcggctgttgaagcaacttacggttgaagatgctgccgaggccaattttgtgttcccctcacttatgggcacccgggttgatctattgcacgacctgatccacaccgctgctatcatgatcatcatacatcatcttgacatttgcatgcatcacgtactgccgtccattctctgtaccacatacattgtcagccatctgctgcatttcttgctactcgatcacga

SEQ ID NO: 77604 - DNA, 387 bp, Zea mays
acccacgcgtccgcggacgcgtgggggggcgatggccgcggcaaggtagtggacggcgggcgcgggctggacctgacgctggaccgcacgtccggctccgggttccagtccaagagcgagtacctgttcggcaagatcgacatgcagatcaagctggtgccaggcaactccgtggcacggtcaccaccttctacctgtcgtcccagggcgacgcgcacgacgagatcgacttcgagttcctgggcaacgtgagcggggagccctacacgctgcacaccaacgtgttcacgcgcggacagggccagcgggagcagcagttccgcctctggttcgaccctaccactgccttccacacctactccatcctgtggaacccgcagcacgtga

SEQ ID NO: 77605 - DNA, 338 bp, Zea mays
acaggttcatggttttgggcctgcgcacgcaaccgctactgataatgctaattttgtggcggcttcgaccgtggttgctgaaaatgattcggatgattccatgtctaagttttttgagtctgatgattctgggagttcggttgtgtggacggaggagtcttcggatgaggacttggattattttgcggccttggatgtggctgcggcggaggcttctccgcgtgtgatggatgctgaagttcttcctggtccgagtgctgggcgtatgcggcgaagggaggtggcgaagcgtagagtgagtgaggtggagagtggtcatcttcgtgtggatggggctg

SEQ ID NO: 77606 - DNA, 421 bp, Zea mays
gcgtccacccaaaacctcgactcgcttcgcgtcggctcctacatcgacgtcaagggcccgcttggccacgtggagtacaccggccgcggcagcttcgtcatcaacggcaagcaacgccatgcgagccgcctcgccatgatctgcggcggaagtgggatgacgcccatgtaccagatcatccaggcggtgctgcgcgagcagccggaggaccacactgagatgcacctcgtgtacgccaaccggacggaggacgacatcctcctccgcgacgagctcgaccggtgggcggccgagtacccggacaagctcaacgtgtggtacgtcatcgaccatgtaaagctcccggatgaggggtggaactacagcattgggttcgtcacggacgccgtcctgcgggagcaccgttcccgaaggtggggaa

SEQ ID NO: 77607 - DNA, 385 bp, Zea mays
agggcacgccgacgacccggaggcgttcgcggagctcaaggtcaaggagatcaagaacggccgcctcgccatgttctccatgttcggcttcttcgtgcaggccatcgtcaccggcaagggtcccgttgagaacctcgccgaccacctcgctgaccctgtcaacaacaacgcctgggcctacgctaccaacttcgtccccggcaagtgagcgagggcatatacatacttgtatgcgtgtaccgtagacatacgtattcgtatatgtactgcaggagatgtaccagtatttgtgaagcagggagcatgggctcagagattgtaccagtagtgtacgtatttgcatgcatgctttggtccttgtggacattatcaatgaaatatgctg

SEQ ID NO: 77608 - DNA, 349 bp, Zea mays
aatttcttatagcattgtctgggagatagcaaaactgtggatgaaaggctgcaaggttatcatccttgacatcccgctgctgtttgagacaaagatggatagatggacgaatccaatcattgttctctgggttgatccaaaagtccagattgagaggctcatttcaagagatggatgctctgaaggacaagctcagaataggatcaatgcacagcttgcactagactggaagaaatcagaagcagacatagtgattgacaattctggttccctggatgacaccaaacagcaattccaagaagtgttgatgaaagtctcggagcccttgacatggaaggaacgcttgaga

SEQ ID NO: 77609 - DNA, 397 bp, Zea mays
ggtatacaggagtgctctgcccatggagaaggcggggcaacaacgccatgttatcggcggcggcggcaagaaggcgcccgcgctggggctgcagaagcagaactcgtggtcgccggacatcgagcgcgacgaggcgtgggagcgccggcgcaggggcatgcgccgcgggggcacggcgctgcgccgcgcccgcagcgtcacggacgacgacctcgacgagctccgcggctgcatcgacctgggcttcggcttcgagccggcgcacgccgccgcgtgcgcgtgcgcctgcgcctgcgccgggaggaaccgcctcctggagacgctgcccgcgctcgacctctactacgccgtccacggcggggccgcggaggcgccgccgtgctcgtgcggcgccgcc

SEQ ID NO: 77610 - DNA, 177 bp, Zea mays
aggttgtaaacttttatgaggggcatgattgtaattcctcacaggctgtgtcctgtgcctataaatagtgaacagtattcctttactgttcatgcattcctgtaattgcaaacgcatcactcgggaattattttttgtcaaggcaaaggtataaatgtacctaaatattatgttttc

SEQ ID NO: 77611 - DNA, 341 bp, Zea mays
agttcagggagctggtgaacgacctcgcgatgcaggtggtagcgtgtccgcaggtcgactacgtctcggtggacgacatcccggagagcgtcgtcggcaaggagaaggagatcgagatgcagagggaggacctgcagtcgaagcccgagagcatcagggagaagatcgtggaagggcggatcgcgaagaggctcggcgtgatggccctcctggagcagccctacatcaaggacgacagcaagacggtgaaggatctcgtgaaggagacggtcgcctcactcggggagaacattaaggtgcggaggtttgtccggtacaccctgggcgagaactgatcggtg

SEQ ID NO: 77612 - DNA, 418 bp, Zea mays
gcgtccacccacacgtccgccatgccgaagatgcttaatgatggagctgttgagtatgaggatggtacacctgcaactgaagcccagatgggtaaggatgtcgtatcattcctttcgtgggcagctgagcctgagatggaagagagaaagctgatgggagtgaaatggatctttctactatcactagcgcttctccaagctgcctactaccgccgcatgaggtggtcagtcctgaagtcccgaaagctggtcctggatgtcgtcaactgaggactatcattaccctttttttattgaaatatgttgagccgttaaggagcattcaaaataatgagttggtggtgtacaattttgccactggggctaggttccatgcctagaaattaatttgttttctttactctgctgagctgcaaaa

SEQ ID NO: 77613 - DNA, 403 bp, Zea mays
  unsure (1)..(403): unsure at all n locations
acgcaacctccaaagccactcccaaacccccgcttccagaaccttctcgaagctccccgccgcctcctccactcgcaccgatggcgaaggaaccaatgcgcgtgctcgtcactggcgccgcaggacaaattggatatgccctggttcccatgattgctaggggtgttatgcttggtgcagaccagcctgttattctgcacatgcttgacattccgccagcagctgaagcccttaatggtgttaagatggagttggttgatgctgcgtttcctcttctgaagggagttgttgctacaactgatgttgtggaagcctgcactggggtcaatgtggccgtcatggttggtggattccccaggaaggagggaatgganaggaaagatgttatgtcgaaaaatgtttc

SEQ ID NO: 77614 - DNA, 390 bp, Zea mays
accaacaaccagcagccgcaccacgcacccagcgcaaagcgatggcgtcgctcaccatgatggcgtccttcgccgccgtggcggtggccgcgccctcgcgccgcggcaccttcgccgtggtcaggtccgccaaggtcgaccgctgccaggagcccgccacgctagcagcaaccgaggccaggcccgccgccgacggacgccgcgccgtcatgctcgcggctgctgcggcggccgtggcagccatcggcggcgccggcgccgccatggcgggccccaagaacgggacccccgaggcgaagaagaagtacgcggccatctgcgtcaccatgcccaccgccaaggtctgccaaaactgagcacgcccgcgttgcatgcaactgcagggccggg

SEQ ID NO: 77615 - DNA, 398 bp, Zea mays
  unsure (1)..(398): unsure at all n locations
cgcgtccaagcgactcagcgagcgagagcagcacacactgcacgcagctagctaggagcagcagcagcggcggcgatggcggcctccatgatctcctcgtcagctctggcggtggcgcctcagggcctgccgcccctcggccgccgcgcctcctccttcgccgtcgtctgctccaagaagaagatcaagaccgacaagccctacgggattgggggtggcctgaccgtcgacgtcgacgccaacgggagaaagggcaagggcaagggcgtgtaccagttcgtcgacaagtacggcgcgaacgtcgacggatacagcccaatctacaacgaggatgactggtctcccaccggcgacgtctacgtcngtggaancactgggcttctgatctgggccgtcac

SEQ ID NO: 77616 - DNA, 357 bp, Zea mays
acctgatcctaccgcagctctccctcaggtttagtgttcgcaatggcggccttcaacaagcttggtggccttctaaggcacagtgctctggtgagcggtatcactggtggctcttctcctgcagtgttcaatgctgcacggctcatgtctaccaagctatttattggtggtcttgactggggtgttgatgacgtgaaactaagagaagcatttagcagctttggagaggttactgaagcgagggtgatcacagacagggagactgggaggtcaagaggctttggctttgtgaactactccgacagtgatgctgccaaggaagctatttctgcaatggatggcaaggaaattgatggg

SEQ ID NO: 77617 - DNA, 385 bp, Zea mays
acgcgtcaacctaatcctaccgcagctctccctcaggtttagtgttcgcaatggcggccttcaacaagcttggtggccttctaaggcacagtgctctggtgagcggtatcactggtggctcttctcctgcagtgttcaatgctgcacggctcatgtctaccaagctatttattggtggtcttgactggggtgttgatgacgtgaaactaagacaagcatttaacagctttggagaggttactgaagcgacggtgattacagatagggagactggcaagttcacatgctttggctctgcagcctaatctttcagtgttacagtccaggcaacaattgctctatgctgctgctgctgctgaatacctgaaatttggtgttgttcgtt

SEQ ID NO: 77618 - DNA, 381 bp, Zea mays
acccacgcgtccgcgctgaatgggtcgactggtgaggtgatccttggaaagcagccgctttccccaccagcccttagtggcgatctgggaactttcatggcctgggtggatgatgttagaaagctcaaggtcctggctaacgccgatacccctgatgatgcattgactgcgcgaaacaatggggcacaaggaattggattatgccggacagagcacatgttctttgcttcagacgagaggattaaggctgtcaggcagatgattatggctcccacgcttgagctgaggcagcaggcgctcgaccgtctcttgccgtatcagaggtctgacttcgaaggcattttccgtgctatggatggactcccggtgaccatccgactc

SEQ ID NO: 77619 - DNA, 384 bp, Zea mays
aggatgaacaaactcactaggaagcttgcaagaattccagatgaagtgcggactgaaatagagccatacttttttgagcattctgctattgttgacgaagacaaccgcaagcttccaaaactgccagagggacaaagcacgtctgtagctaaatatgtgaggacaggcctgactcctcgttgggctgatcttgatataaatcagcatgtcaataatgttaaatacattgcgtggattcttgagagtgcacccatctctattcttgagaatcatgagctggcgagcattgtgctggattacaaaagggagtgtggccgggatagtgtgctgcaatcacacacctctgtgcacacggattgcaacagtgagtctggagaaacaacc

SEQ ID NO: 77620 - DNA, 363 bp, Zea mays
actccaggacgtacgtacgtacgtagatcgatccatcgatcgctagctagctgacgaccatggcgtccctctcctctgccgccatcaccgccccttccttcacggccgcgcccgctcgcgcagtggtcagcaggaggtccttcaccgtgcgtgcctctctccgcaaggccactgccaccgccgccgtggccgttgccgccagcgtcctgcttgccggcggcggcgccatggcccaggaggtgctgctgggcgcaggcgacggcgggctcgtcttcgagcccagccagttcaccgtcaaggccggcgacaccatcaccttcaagaacaacgccggcttcccgcacaacgtcgtgttcgacgaag

SEQ ID NO: 77621 - DNA, 352 bp, Zea mays
  unsure (1)..(352): unsure at all n locations
cgcgtccagaaaatgttgaacctgctgagatcgangaagcagccagcaggagtaccttgattaatcagatagttgtgatcggccaggatcaacggcgtcttggtgccataattgttcccaacaatgatgaagttctggcagaagcaaaaaggaagtccatccttggtgaggatggcgagctagcgaaagataaggtcatgaacatgctatatgatgaattgagaacctggaccgcgcactgctccttccgtgtcgggccaattttggttgtcgacgaaccgttcacgattgacaatggtctgatgacacccaccatgaaaataagaagggacaaagtgacagacaagtacag

SEQ ID NO: 77622 - DNA, 416 bp, Zea mays
gcgtccaggtaatgttgaagctgctgagatggaggaatcagccagcaggagtaccttgattaatcagatacttgtgatcggccaggatcaacggcgtcttggtgccaaaattgttcccaagaatgatgaacttctggcagaagcaaaaaggaagtccatccttggtgatgatggcgagctagcgaaagataaggtcatgaacatgctatatgatgaattgagaacctgtaccgcgcactgctccttccgtgtcaggccaattttggttgtctacaaaccgttcacgattgacaatggtcctgattgacacccattatgaaaataagaatggacatagtgacagacatatacaggagggagatctaagccttgttcaagtcacacgcggagcgcgtgcgcacccatcaaagttccct

SEQ ID NO: 77623 - DNA, 377 bp, Zea mays
acggacgcgtgggcggacgcgtgggttgacagatggaagatcacaataaaggacagtgactgcagcatgctctacatcttgcaagaacagtgactgcagcatgctctacatcttgcaaaactgttcttgacagatggaagatcacaataaaggacaaccaagggaaacttatgagaccaccaaaatttatgaacaactactttggggttggctgtgatgcaaaggttgccttagatatacacaacctgagggaagagaaccctgaacggttttatagccagtttatgaacaaggtgctgtatgcaagagagggagcaaagaacataatggataacacatttgattgttttccttgggatgtcaagcttgagatagat

SEQ ID NO: 77624 - DNA, 403 bp, Zea mays
acccaagcgtccgagccaccatcgaccttcaagtctcgctacgtagcagtgcaataaaaaaagcagccgcaatggcgagcagcaccatggccctctcctccacggccttcgccggcaaggccgtgaacgtgccgtcgtcgtccgccttcggcgaggcccgcgtgacgatgcgcaagacggcggggaaggccaagccggcggcggcgtccgggagcccgtggtacggccccgaccgcgtgctgtacctgggcccactgtccggcgagccgccgagctacctgacgggcgagttcccgggcgactacggctgggacaccgcggggctgtcggcggacccggagacgttcgccaagaaccgggagctggaggtgatccactcccgctgggccatgctgggcgcgct

SEQ ID NO: 77625 - DNA, 390 bp, Zea mays
cgtcaaggatactgtcccagagagatgcccacaagcttcaaggggcacacagtgcaaatcacaaggcgggtcgactaggagctgcaagaaggtccacaagcaaggaatggcgctgggcaggtccgtggaccttaccaagttcaacggctacacggagctggtggcggagctggacgagatgttcgacttcaacggcgagctgaaaggctgtagcaaggagtggatggtcgtgtacaccgactacgaaggcgacatgatgctggtcggggacgacccctggaatgagttctgcagcatggtgcacaagatcttcgtgtacacgagggaagaggtccagcgcatgaacccgggcgccctgaactcgaggccggaagacagcgggctcgccaa

SEQ ID NO: 77626 - DNA, 350 bp, Zea mays
agagaagtgcaaggaagcaggcggccaccatggtgaagggacgcacgggacagcgcgtcaggctctacgtccggggcaccatcctcggatacaagaggtccaagtcgaaccagtacgagaccacgtcgctcgttcagatcgagggggtgaacaccaaggaggacgtcgcgtggtacgctggcaagcgcatggcgtacatctacaaggctaagaccaagagcagcgagacccgctacaggtgcatctggggcaaggtcacccgcccgcacggcaactcgggcgtcgtccgcgccaagttcaagtccaacctcccgcctgagtccatggggcgcaaggtcagagtgttcatg

SEQ ID NO: 77627 - DNA, 373 bp, Zea mays
gtggacaaggtggagctgctctactccaagttcgtgtcgctggtgcgctccgaccccatcatccagacgctgctccccatgtcgcccaagggcgagatctgcgacgtcaacggcgtctgcgtggacgccaccgaggacgagctcttccgcctcaccaccaaggaggggaagctcaccgtggagcgcgagaaggtgaagatcgagacgcagcccttctcccccgtggtgcagttcgagcaggaccccgtgcagatcctggacgcgctgctcccgctctacctcaacagccagatcctccgtgccctgcaggagtcgctcgccagcgagctcgccgcccggatgagcgccatgagcagcgccaccgacaaagcca

SEQ ID NO: 77628 - DNA, 374 bp, Zea mays
acggacgcgtgggcggacgcgtgggtcagaatgaagcaagtgttgctgggacacgctacaacgtgcctctgatcaattcacttgttttttatgttggcatccaagctgtgcaacaactgcaactgaacaaggctaatccgtctgcatcagtaccagattaaccatatatctccgatggacattttccagattggaacagctaccgatatattcaggagtcttataacaagtttggatacagagggccgctaccttctgttgaatgcaatcgctaaccaactgcgctatccaaatagccatacacactactactccttcatcactctgtatctattttccgaggctacccaagaaattacccaggagcaaatcac

SEQ ID NO: 77629 - DNA, 359 bp, Zea mays
acgcgtccgccagcgtccggaagaataggaagttcactgagactgttgagcttcagattagtctgaagaattatgatccacaaaaggacaagcgtttcagtggctctgttaagttgcctcacatccctcgtccaaagatgaaggtgtgcatgcttggtgatgcccagcacgttgaggaggctgagaagatgggacttgactacatggatgttgaggccctcaagaaaatgaacaagaacaagaagcttgttaagaagcttgccaagaagtaccatgcttttttggcatcagagaccatcatcaagcaaattccccgtctccttggtcctggtctcaacaaggcatgcaagttccccact

SEQ ID NO: 77630 - DNA, 372 bp, Zea mays
acccacgcgtccggtgaacaccagccgtattgtcccgaccccgaccgatcctcgcctgctgcagccatggcgacctccgcggcgctctccaccgccgccaatcccacccagctctaccggtcccgcgctttgctgggcaagccggtgaaggggcttggcctgagcatgggccgcgagcgcgcccagcggagcattgtgtgccaggcggcgagcagcatctccgccgaccgcgtccccgacatggagaagcggaagctgatgaacctcctcctcctcggcgccatctcgttgcccactgtcggcatggtcgtcccctacggcgccttcttcgtccctgccggctccgggaacgcccgcggcgggacctacgcc

SEQ ID NO: 77631 - DNA, 365 bp, Zea mays
cgcgcaacacgggtgtgccggctactttcaccggccgcaagtccagtatttgcttgatccttgacgagcgggagagagagagagaggaagacgagaggcagcgaaggaaacagtagttcttcagttaggcaggagggcacaggaggaggaagatggcgtcgaagaggatccagaaggagctcaaggatcttcagaaggaccctcccacctcgtgcagtgcaggtcctgttggtgaagatatattccactggcaggcaacaataatgggtccatctgatagcccatattctggtggagttttcctagttacaatccattttcctcccgattatcctttcaaaccaccaaaggtggcattcccgcac

SEQ ID NO: 77632 - DNA, 356 bp, Zea mays
acggacgcgtgggcggacgcgtgggttcgccgcaccagcgccagcccgcgccgtggtcagaaggaggtccttcaccgtgcgcgcctctctccgcaaggccaccggcaccgccgccgtggcaatggctgccagcgccctgcttgccggcggtgccatggcccaggaggtgctgctgggcgcaggcgacggcgggctcgtcttcgagcccagccagttcaccgtcaaggccggcgacaccatcacattcaagaacaacgccggcttcccgcacaacgtcgtcttcgacgaagacgaggtgccgagcggcgtcgacgccaccaagatctcgcaggaggagtacctcaacgcgccaggcc

SEQ ID NO: 77633 - DNA, 366 bp, Zea mays
gcgtccaccctagcgtccgaaggcaggacaaatgacatctgggcaagttgttttagttacagcagctgctggtggaacaggacagttcgcagttcagctggcgagattagcaggcaacaaggttgttgccacatgtggaggtgaaagtaaagctgaacttctggcttccttaggagttgatcgtgttatcaattacagaaatgaacgagtcaaagatgttctgaagaaagagtttccaagaggtgtagatatcatatatgaatctgtatgtggggaaatgtttgacttgtgcgtgaacgcacttgcagtccatgggcatctcactgtaactggtatgatctcccagtaccaaggagaggatggctg

SEQ ID NO: 77634 - DNA, 307 bp, Zea mays
cactgggagcaacgatcggccgttcggcgcgaccggtgtcaagaggcgccaagacatcgggatgatcagcgccgtgcccgggactaaggctctcgacatgaacaccgccgacgacgatatcgtgcgcctcacgcgcgacgtcgttcccggcatgatcgtcaccggaatggaggtcgccgagattgacggcgcccccaggatgggcccgacatttggcgccatgatgatctccggccagaaggcggcgcacctggcgctcaaagccctgcgcaggcccaacgccgtggacgggaccatgtcgccgccg

SEQ ID NO: 77635 - DNA, 363 bp, Zea mays
agcatgccactattgaagaaatcgaagcggagacatccctcatcgaagaccaagctaaagaagagatggagaaagcactctaaacagtccaagccaacttcaacactgtgaggacaggacgtgcaaacccggccatgcttgaccggattgaggttgagtactacggaactccagtaaacttgaagagcatttcacagataagcactccagatgcaacttctcgtcttattcaaccatatgactaagtcaagccacaagcttattgagaatactatagttgctgcaaatcctggtgtgacaccaagcaatgatggacaagtaatacgagtgactgtcccatcattgacatctgatcgcagaaat

SEQ ID NO: 77636 - DNA, 408 bp, Zea mays
acgcgtccacccaagcgtccggacccatcactctctgctcgcgcactctcacctgcccgcgccgtattcgaccgccgccaagatgaacaaggagaggctcatgaagatggccggcgccgtccgcaccggcggcaagggcaccatgcgcaggaagaagaaggctgtacacaagacggtcaccacggacgacaagaggctgcagggcactctcaagagagtaggggtcaacaccatccctgcaatcgaggaggtgaacatattcaaggacgatctcgtcatccagttcttgaaccccaaagtgcaagcttccatcgcggcaaacacatgggtggtcagtggatctccacagacgaaaaagctacaggatgttctccctggtatcatttaacagcttggccctgacaacat

SEQ ID NO: 77637 - DNA, 369 bp, Zea mays
  unsure (1)..(369): unsure at all n locations
gtaccgagaagtctttaggtggggtcaaagatggtgtcgctgaagttgcanaagcgccttgccgcgagctacctcaagtgtgggaaaggcaaggtgtggcttgacccaaatgaagttagtgagatctccatggcaaactcccgccagaatatccggaagttggttaaggatgggtttatcatcaagaagcctcataagatccactctagatcccgtgcaagaagggcacatgacgccaagcaaaagggacgccactcaggatatggtaagcgtangggtaccagggatgctaggctacccaccaaggttctgtggatgaagaggatgcgtgtgctgaggcgccttctccgcaagtatcgtgagggcaag

SEQ ID NO: 77638 - DNA, 441 bp, Zea mays
cgggccggcccacgcgtccacccaagcgtccgcaaccatctaccagcgactcagcgagcgagagcagcacacacgcagctagctaggagcagcagcagagcagcggcgatggcggcctccatgatctcctcgtcagctctggcggtggcgcctcagggcctgccgcccctcggccgccgcgcctcctccttcgccgtcgtctgctccaagaagaagatcaagaccgacatgccctacgggattgggggtggcctgaccgtcgacgtcgacgccaacgggagaaagggcaagggcaagggcgtgtaccagttcgtcgacaagtacggcgcgaacgtcgacggatacagcccaatctacaacgaggatgactggtctcccaccggcgacgtctacgtcggtggaaccactgggcttctgatctgggccgtcatcctcgctggg

SEQ ID NO: 77639 - DNA, 398 bp, Zea mays
acgcgtccacggacgcgtgggctccctctcctctgccgccgtcaccgccccttccttcgccgcaccagcgccagcccgcgccgtggtcagaaggaggtccttcaccgtgcgcgcctctctccgcaaggccaccggcaccgccgccgtggcaatggctgccagcgccctgcttgccggcggtgccatggcccaggaggtgctgctgggcgcaggcgacggcgggctcgtcttcgagcccagccagttcaccgtcaaggccggcgacaccatcacattcaagaacaacgccggcttcccgcacaacgtcgtcttcgacgaagacgaggtgccgagcggcgtcgacgccaccaagatctcgcaggaggagtacctcaacgcgccaggcgagacctactccg

SEQ ID NO: 77640 - DNA, 308 bp, Zea mays
agggtcaacattcggtggcatcactacaaagataagcaacgtcagcagccagcttccaacaattaaccacgtcctctcatcgatcagaaggaagaaatccatggataccatcattctttcgctcgttgcatctgtctgcacgtttctcatcttcatctactggctgtcgaagtaggtttaccagagcaaagatattacgtacagtgttgtaagcttgggaccacactaccagtaccggtagtccggtacagatagtcttcattggtgtttgtacaatattattggttgattgaatgctgttacgatta

SEQ ID NO: 77641 - DNA, 406 bp, Zea mays
agtaccactcgagtgtgaagcgaggtgatattgttggcatatgtggttatccaggaaaaagcaaccgtggggagcttagcctgttcccgaagaaatttgtcgtgctctctccatgtcttcatatgatgcctcgacagaaaggtgaaggaagttcggtgcctgtatcgtggactccaggaatgggtaggaatatcgaaaattatgttttgagggatcaggaaactcggtatcgtcagagatatcttgatataatggtaaaccatgaagtgaggcatatcttcaagacacgatctaaagttgtctcatttatccggaagtttcttgatgaccgcgaatttttggaggtggagactccgatgatgaacatgattgctggtggagcagctgcaaggccttttattacaca

SEQ ID NO: 77642 - DNA, 301 bp, Zea mays
agcccacgcgtccgcggatcccagtacaacaaccatggcaatgtggtccgttggacggcgcctctgtcgctggccctggttaaccccaacttcaacgacggcaaggtcctcttcgtcccgtgggtggagaccgacttcaggaccggcgaggacccgtggtggaaggcatgaggatgatccgaaaccagcggtgctcattgctcacacatgagacctacgtatgcctccgttccttgtgatgaggaaatatgcttgcgttcgttctccttgggcgttgtcccaacaaattcacttgctttcg

SEQ ID NO: 77643 - DNA, 415 bp, Zea mays
gcgtccaaaggaggaggtggagaccaaggtcacggcctggcagacggccgaggtcgccaagatcaacaaccgcttcaagagggaggatgtggtcatcaacggctgggagaccgatcaggtggagaaggcctccgcgtggctcaagaagatcgagaggaagctggacgagcaacgcgccaaggcgctggagaagacgcagaacgacatcgccaaggcgcggcgcaaggcggaggacaagcgggcgtcggcggatgccaagcggggcctcaagctggccaaggtgctggagctcgccaacttcatgaaggccgtcggcagggtgcccaccaagcgctccttcttctagccagccgactaccgctaccacctccgtctctccctgcctgcgtgtgatcgatgtacgctcgccgctgca

SEQ ID NO: 77644 - DNA, 407 bp, Zea mays
cacgcgtccacccaagcttctggtcggaggtggaggcaaccccaaaacctcaaggccatgaacaatgggccaaacccttggaacttttccttctccaagccccggcccctgcaaaacacctgcctcaagacctgtggccggcagccggacaaagtcaaagcagcgcaggacacgctgctgctgcgcgccaaggccaactccctggcgcagctcggcaagtacacctccgacggcgaggccgccgaggccaaggagggaatgttcgtcaagaactacagctactaattaatcacccggccatcatccgggataccgccgcccctccgagagatacgtgtgtactgatcatggttaagcacgtactccgatccattcccatcccatgaagccatgataatgatgatatg

SEQ ID NO: 77645 - DNA, 404 bp, Zea mays
acaagccccgcgtgcccatcatcgtcaccggcaacgacttctccacgctgtacgcgccgctcatccgcgacggccgcatggagaagttctactgggcgcccacccgcgaggaccgcatctgcgtctgcacgggcatcttccgcaccgacggcgtcgactaggagcacgtcgtccatctggtcgacaccttccctggccagtccatcgacttcttcggcgcgctgcgtgcccgggtctacgacgacgaggtccgacggtgggtgagcgagaccggcgtcgagaacatcgccaggaagctcgtcaactccaaggagggcccgcccacgttcgagcagcccaagataacgatcgagaagctcttggagtacggacacatgctggtggctgagcaggagaacctcaag

SEQ ID NO: 77646 - DNA, 406 bp, Zea mays
agcaccatgaggctctccaggaggcccttcctggtgacaatgttggcttcaatgttaagaatgttgctgtgaaggatctgaagcgtgggtatgtggcctccaactccaaggatgaccctgccaaggaggctgctagcttcacgtcccaggtcatcatcatgaaccaccctgggcagattggcaacggctatgccccagtgctggactgccacacctcgcacattgctgtcaagtttgcggagctcattaccaagattgataggcggtctggcaaagagcttgagaaggagcccaaattcctcaagaatggtgatgctggtatggtgaagatggttcccactaagcccatggtagtggagaccttttctgaatatcctcctcttggtcgctttgctgtccgtgacat

SEQ ID NO: 77647 - DNA, 411 bp, Zea mays
acgcgtccacaccaacgttgatgatgctcttctcagtggaggtcagaaacaacgtgttgctattgccagggcccttctgagggacccatctatcttactgcttgatgaagccactagtgcgcttgatgctgagagtgaacattatgtcaagagcgtcatcacaaaagttagtcgagattcaaaggctaaaagaactgtggtaatcatagcacacaggctatctacaattcaaacagctgatagaattattgtgatggaaaatggtaatattgtggaggatggtaaacacattgatcttattgagaagggtggtctatattcaagattagccaggcgacaaaatgacgatctcaagtagccctggatcacagaatgtggtttagtgcacgccttctttttaaatggaatggc

SEQ ID NO: 77648 - DNA, 428 bp, Zea mays
acgcgtccagtacatgtgttgtgttgtgctgtgctgcgagaagaaggagaagaggaggaagaagagcaggtgctgagaagcctgccggcgcgcgttacgacaagcatatatgggggagatcaccaatgtcatggagtaccaggccatcgcgaagcagaagcttccgaagatggcctacgactactacgcgtccggcgccgaggacgagtggacgctgcaggagaacagggaggccttctccaggatcttgttccgtccgcgcatactgatcgacgtgtccaagatcgacatgaccaccaccgtgctggggttcaagatctccatgcccatcatggtcgcccccactgctatgcagaagatggctcacccagatggggagaacgccactgcgcgcgcggcggctgcggcaggcaccataatgacactgt

SEQ ID NO: 77649 - DNA, 419 bp, Zea mays
acgcgtccagacgaacaactgagaagagctgcgcctgcgcctgcgcctgcgggaaagggaaaacatggtggggaaaaaaaggggtgttatctccccgctggaccatctcgctgggctgctggaggtgcgcgtggtgaggggagtggacctcgccatccgcgacctccgatccagcgacccctacgtcgtccttcgcatcggcaaggcgcagaaagtgaagacgcgagtggtcaagaagagcatcaatccggaatggaacgaaaaactcaccctctctattgaagaccctgccgttcctattagactggaagtatttgacaaggacactttcgttgatgatgcaatgggtaacgcggagctggacatccgcccgttagtcgagattgtgaagatgaagctccagggtgtcgctgacaaaa

SEQ ID NO: 77650 - DNA, 420 bp, Zea mays
acccacgagtccacgacacgacaccaagtcgaggagctcgagggcaccaatcatggccggcgtgaactccagcgtcgtcgggctcaagcccgccgcggcagtgccgcaggccgccgccgcctcatcgccggcgaagcgggtgcagctggccgcgcccgagggccgccgcgccgctctgctcggcctggcggccgtcttcgccgtcacggccaccaccgggtcggccaaggccacgatcttcgatgagtacctcgagaagagcaaggccaacaaggagctgaacgacaagaagaggctggccaccagtggcgccaactttgcgcgcgcctacaccgtggagttcggcagctgccagttcccctacaacttcactgggtgccaggacctcgccaagcagaagaaagtccccttcatcagcga

SEQ ID NO: 77651 - DNA, 362 bp, Zea mays
agataaaacaggatattctgtttcataattctgaaatagagttcttttttttagtattactcctcattaggatgtatatattaatcatcctattttaatatatattaatcatcctattttaattaggttctaatccaattagtagtaagtattttcttttttatttaatagtctctgactatcattaaataaagggtagagcaattcttttttctagagattctagagaaagtgagacaaagtgaagcgaaagagttttctttgtataagaattaggtctatatcatatctaaatagaagggaaatcaaaaagaagggaagtggggattacattggatgaatccttaaggaagacatatcac

SEQ ID NO: 77652 - DNA, 406 bp, Zea mays
cggacgcgtgggttttctgtgaaaacaaggctgatgtcgactacatccatgagtaccttcttctaaagggagtggaggctgttgctatccatggaggaaaagatcaagaggagagacagaacgcaattgactccttcaagactggtaggaaggatgttctagtggctactgatgttgcatcgaagggtcttgattttcctgacattcagcatgtcattaactatgacatgcccgccgaaatagagaactatgtccaccgaatcggtcgaactggtcgatgtgggaagactggcatagcaactaccttcatcaacaagaaccaaactgagaccacgcttctcgatctcaagcatctgctgaaggaggcaaagcagaggattccaccggtgttggcggagctcaacga

SEQ ID NO: 77653 - DNA, 87 bp, Zea mays
agcttctatcaagccgaaggtacaaatgtaattcgatattgttcatatttgttcatgataatataataaaactatcttaatgatgtc

SEQ ID NO: 77654 - DNA, 432 bp, Zea mays
cgcgtccattgcaagcaagtcagggagttgctgctgccaattccttctccatgtgcttcgcacaagatggccatggtagaatcaattttggggacactggaagctcagatcagcaggaaaccccgttaaacatgtataaacaaaatccatactacaacataagcatcactggtgctacgtggggagtaaatccattcacaccaagttcaacgctattgttgactctggcacctctttcacagctctgtctgatccgatgtacactcaaatcactagcagcttcaactcacaagtccaggataagccaagccagcttgactcttctctgccctttgaattttgctactctataagtccaaaggcttctaccaatcctccgaacataagcttcacggcggaaggtggaagcgtgtttcctgtcaatgatccaat

SEQ ID NO: 77655 - DNA, 408 bp, Zea mays
acgcgtccaacccagccaagcccgcacgacacgacaccaagtcgaggagctcgagagggcaccaataatggccggcgtgaactccagcgtcgtcgggctcaagcccgccgcggcagtgccgcaggccgccgccgcctcatcgccggcgaagcgggtgcagctggccgcgcccgatggccgccgcgccgctctgctcggcctggcggccgtcttcgccgtcacggccaccaccgggtcggccaaggccacgatcttcgatgagtacctcaagtgcggctccaacgttttctggaagtggtgaagcagctagcagcagcgtctgatgggaatggaggagatcatcacctgtcttgtcgaccctagatatgtccaaactgcagggaaattaaatcttcatgtgtaattgtg

SEQ ID NO: 77656 - DNA, 431 bp, Zea mays
cacgcgtccacggaagcgtggggggaacccaccatatgtcatgatgtgattgatgtaggctggtccacattagcagatctaactgttgacgaagggaaacttcttggctgctcatataaccaaaattgtgtcggtgtgtgggttgtggatttgatgagaaatgagccttatgttgatagtagtgctggatcacacttaaatggaagtataaataggccaattcaatcagatgatagcatgtcatcagtgtttgggaggctatcgatttccagaagcccagccaatgaaattggatcggatactctgcttggatgctcaatgtctggttcaaaagaaagtcctgtctcaacttctgcatcaatgaggggattgtcaaagccacctggaaaaggggacctccggctctcaagatctatttctacacctcttct

SEQ ID NO: 77657 - DNA, 435 bp, Zea mays
acccacgagtccacttctagattgtccaagtcgcgtggattctctccattgtaattatggggatcaatatttatttcttctgcaatagcttcataagttggcttgtgcacagtgaactcccaaggatagtcaatgttataattagcacccttgtcttccctttcatggcggcatatattgcagctttaatctacttggctttcagaaaagttaatgctgctggcatattcccttccgtgtcagcttccactgggactgaagtagaagcatggaggcaagatggcaacattgatgatattggtgtacattgatatgtttgaaacacagtatataaatatactctttcattaaaaaaatattttgttcatacaccacacattagggaagacgtcaaaccattattgaaagatgtatatagttatacatatagtttta

SEQ ID NO: 77658 - DNA, 406 bp, Zea mays
cgggccgacccacgcatccacggacgcgtgggcgcaagaccacctcaccagcctcctcgtccccgatctcctcccacccgcatccaagggtttccttctcgaccgtgcggaacgagccagagaacaggtatggcggcggcgcggcacctcagatccggcctccccctcctccgcgcccacctcgcatcctccgaatccgcggccgtcgctcaggtttcgaggggcttcgcgtcgcaggccgccaagcccaccgggaaggagatcaaggttccaaaggctctgtttggcggcacaggcaactatgccagtgcactgttcctcacagcagctaaatctaatgcattggacaaagttgaatctgagattaaagctattgtagaggcttccaagaagagcccgttgtttt

SEQ ID NO: 77659 - DNA, 288 bp, Zea mays
acccacacgtcaacccacgcgtccggaaggaaacaccgccgccgccgcgccttccattccagtactcgcggaggaaaggaacaccagccagcgccatggtcgcgtcgacgaccgccgccgcggtgctgtccccgccgtccgtggccgggcttcgcctggcgccgtctccccgggcgcgcgtggcgttccgcgcggcgcgggcgccgcggtccgtggtggcgcgcgcggagctgagcccgtcgctggatgatggacctgagcacgggcatggcgctcttcctgggccgc

SEQ ID NO: 77660 - DNA, 404 bp, Zea mays
  unsure (1)..(404): unsure at all n locations
agctgttccaaatgcctacaccttagcaatcaacggcaaaaaaaccattcattgtcgttcacacaagccttgtggagctgcttactccaagggaattgcaggctgttttggctcatgagctgggtcacctcaagtgcgatcatggtgtttggctcacttttgccaatatactcacaatgggagcatacactgtccctggttttggcatggttgctggcttcctggaagagcagctatacagatggctacgagctgcagagctgacttgtgacagggcagctcttcttgtggtgcaagatccgaaggtagtcatctctgttctgatgaaattggccggaggatgcncatctcttgccgacaagctaaatgtggatgccttcctggagcaagctcgttcgtacgac

SEQ ID NO: 77661 - DNA, 409 bp, Zea mays
cacgcgtcaaatttagaactctctctagaagcttcctcggtctcccggttcaccgccgccccgtaccatactcctcttcgcgccgtagaaatggcgctgccgaatcagcagggcgtggattaccccagcttcaagctcgtcatcgttggcgacggtggaactggtaaaaccacatttgtgaaaaggcatcttactggcgagtttgagaagaaatatgagcccaccattggtgttgaagttcaccctctggattttagcactaactgtggcaaaattcgcttttattgctgggacactgctgggcaagaaaagttcggtggccttagggatggctactacattcatggtcagtgtgccatcattatgtttgatgtcacttctaggctgacatacaagaatgtcccgacat

SEQ ID NO: 77662 - DNA, 359 bp, Zea mays
tgctgtcgcagtaaagaatcgtcaacaagggcgttctaaatatggggccaaaaagccaaaaaaataagtgattcgtttttagcccttataaaaagaaaacggattcttgaacctctttcacgctcatgtcacgtcgaggtactgcagaaaaaagaaccgcaaaatccgatgcaatttttcgtaatcgattagttaacatggtggttaaccgtattatgaaagacggaaaaaaatcattggcttatcaaattctctatcgagccgtgaaaaagattcaacaaaagacagaaacaaatccactattggttttacgtcaagcaatacgtagagtaactcccaataaaggagtaaaaacaaga

SEQ ID NO: 77663 - DNA, 251 bp, Zea mays
cccggccgacccacacgtccacccacgcgtccgcgcggagccgtcgtggctggcggagcccatggtgaaggcggcgttcgagaagttcggcggcaggatgaaggacatcgaggggttcatcgacgagtgcagggccaacctggacctcaagaaccgctgcggcgccgggatcgtgtcgtacgagctgctcaagcgcttctccaagcccggactcaacgggaggggcatcctcagcagcatctcggcctgtt

SEQ ID NO: 77664 - DNA, 232 bp, Zea mays
aagcaaccgcaatggcgagcagcaagttggtcctctcctccacggctttcgccggcaaggccgtgaaggtgctgtcgtcgtctgccttcggggacgcccgtttgactatgtgcaattcggcggcgaacgctaaggcggcggcggcgtcagggagctcgtcgtacgggaccgaacgaatgatgtagttgcggtcattgatgggccatctgacgtcctagctgtcgggcgactt

SEQ ID NO: 77665 - DNA, 416 bp, Zea mays
acggacgcgtgggcggacgcgtgggtcagatcggaggcgagcgccaccaccggccggaggaagaggacgacacgatgctgcgggttgcggggagaaggctctcgtcttccctctcctggcgccccgccgcggcggtagccagaggtcccctcgccggcgctggcgtccccgaccgggacgacgactcggctcgcggacggagccagccgcggttctccatcgactcccccttctttgtcgcttccaggggtttctcttctactgaaacagttgtcccaaggaaccaagacgccggcctagctgacctcccagcaactgtggctgctgtgaagaatcctaaccctaaggtggtttatgatgagtacaaccatgaaagatatcctcctggagattccagcaagcgtgcctttgcatac

SEQ ID NO: 77666 - DNA, 409 bp, Zea mays
agggagatagtggatgctaaaaattacacttttttcactggaaagtgggaggcatcaccagatgatgatataagacattggtccaagttcccatcatttacgcctcttctgggtcagattgagacagatggtggcaagtctctggactttagcaactatccttatatatttatgagatggaaagagcaatattttgtcaacgttggagtcgactgtgggttaaccatcgctggtttctactacgtctgcttttcttgtagcgatggctccattaatggattttattatgatccaaatagcagtccatttcagaagctcgagctgaagtgtaccaatgagaaaaaatccgggttcaccttttcatcctacgagctgcagtgacaggacagatgccctcgacagacaactt

SEQ ID NO: 77667 - DNA, 432 bp, Zea mays
agagcattcatattatatgaagaagaaatcgcggattcaaaggctcaaatcactgcaattcacctgataattgggacccttcagcggatgaatatatttggggtggaaaatagagacacactcactcacaagacaacagggtactcagcaaaacttctcaagaagcctgatcaatgccgagcagtttatgcgtgttcacatcttttctgggctgatgaccaagatgggataatggatggtgaaagggttctgctttgtttgaaacgtgccttgagaatcgcaaatgctgctcaacagatggctagtgctacaaggggaagcagtggatccgtaactctatttattgagattttgaacaagtacttgtacttctttgagaaaggaattccgcagatcacaaataccgtgattcaagatttgattgaattgatt

SEQ ID NO: 77668 - DNA, 426 bp, Zea mays
acccacgagtcaagggatgtcataggggatcgtgggctacaagttgttgcagagacctgcaagaaattgcagaggctcagagtagagagaggagatgatgatcaaggaggtcttgaggatgaacaaggtaggatttcacaggttggggtgatggctatagcccaaggctgccctgagttgacatactgggcaatatatgtatcggacattacaaatgcagctctagaagcggttggtacatgcagcagaaatcttaatgatttccgccttgtccttcttgatagagaagcacatataactgagttgccactggacaatggggttcgtgctttgcttagaggttgcaccaaactcaggaggtttgcattttatgtgagacctggggtcctatctgatgttggtcttggctatgttggagaatttagc

SEQ ID NO: 77669 - DNA, 412 bp, Zea mays
aacccacgcgtccgcccacgcgtccgatcagacaacaagatgtgcttcgattgtaacgccaagaacccgacgtgggcgtccgtcacctacggtgtcttcctctgcatcgactgctcggcggtgcaccgcagcctcggcgtccacgtctccttcgtcaggtcaacaaatttggattcatggactccagaacagctgaaaatgatggtctatggaggaaacaaccgtgcacaagccttctttaagcagcatggttggacagatggtggaaaaattgaagcaaagtatacttcaagagcagctgacttgtaccggcagttgcttgctaaagaggtcgctaaaagcgccactgaagatggcaacaatagttggccatcttcaccagttgcagcttcccaagcttcggattaaactg

SEQ ID NO: 77670 - DNA, 402 bp, Zea mays
tctcaatcttcatatgatattttcagatggttctgtgtggaggctgggagctcttctagtcctaaagtgcttttaattcacggcttgccatcgcaggcatactcttaccgcaatgtgatgcctgtactggcggacaaatatcatgccattgcttttgattggctcgggtttggattttctgataagcctcaaccaaaatatggttttgactatacacttgatgagtatacttcatccttggaatttctagtcaatgctgttgctcctgataagctctctattgttgttcagggctactttgctccggttgcagtcaaatatgctagtgaacaccaagacaaattgaatcatcttgtactagtgaatccaccaataaccgataaacatttgaaccttccatcc

SEQ ID NO: 77671 - DNA, 405 bp, Zea mays
agcggacgcgtgggggacgtcatcgccgctgccgagctcgcggactacgggcccgtgcgagggaccatggtcattcgcccctacggatacgccatctgggaggccatccaggattatttgaatgtcaaattcaaggagacagggcacagcaacatgtacttccctcagttcattccatactcatttatagagaaggaagctagtcatgttgaagggtttagcccggagcttgcattggtcaccattggaggaggaaaagaactagaggaaaagcttgtggtaagaccaacaagtgagaccattgtaaaccacatgttcaccaaatggattcagagctatcgtgatcttcctctcatgataaaccagtgggctaacgtgacaagatgggaaatgcggactaaacca

SEQ ID NO: 77672 - DNA, 401 bp, Zea mays
acccacacgtcagcggacgcgtgggtggcaagattgctgacgtttggtcatgtggtgtaaccctctatgtaatggttgttggcgcatatccttttgaagatccagaagagcctaagaacttccgcaagacaattcagcgtatcttgaatgttcagtacgcaattccagacaacgtgaacatatctccagagtgcaggcatctaatttcgaggatttttgttggcgatcctgctacgcgaataacaatccctgaaatccggaatcatagttggttcctgaagaaccttcctgctgatctgatggatgatgatagcatgagcaaccaatatgaggagcctgaccagccaatgcagaccatggatcagataatgcagattttaacagagggccacataccaact

SEQ ID NO: 77673 - DNA, 209 bp, Zea mays
acgcgtccagttaaagatcgcgagcggccgccctttttttttttttttgaaggtcgctctgtgtcagttgttagtgctgtgttcatcctcggctccagcagacccatgcatcaaccagcatggactgcggatcgatgggtgctgttacccccgtcaggctttattctaagttaaatcctaaggaaaaaaatggtgcttcttggtgctgc

SEQ ID NO: 77674 - DNA, 410 bp, Zea mays
aacccacgcgtccgctgctgaagccgtccatggtgacgcccggcgcggaggccaaggacagggccaccccggagcaggtggccgcgtacaccctcaagctcctccaccgccggatccccccctccgtgcccgggatcatgttcctctccggcgggcagtcggatgtggacgcgacgcagaacctcaacgccatgaaccaggggcccaacccgtggcacgtgtccttctcctacgcgcgggcgctgcagaacacctgcctcaagacctggggcggccagccggacaaggtcaaggcagcgcaagacgcgctgctgctgcgcgccaaggccaactccctggcgcagctcggcaagtacacctccgacggcgaggccgccgaagccaatgagggaatgttcgtcaagaactac

SEQ ID NO: 77675 - DNA, 398 bp, Zea mays
aacccagcattaaatctctgaaatttgggaggtttcttggatgtggattcctgctgctcgctagggttgtcgcggtgacgttctgcgtcacgctggcggcgtccctggccgctcgctatggacccaccgtcatggcaggcttccagatctgctgccagctctggctggccacgtctcttctcgccgatggattggccgtggcgggacaggcggtgcttgcaagcgcgttcgccaagaacgacagcaagaaggtcgctgccgcgacatctcgtgtgttgcagctgagcattgtcctaggcatgggtctcaccgtcgtgctgggacttgctatgaggttcggggctggcattttcacaagtgacgtgcccgtgatccaagtcattcacagaggcatcccg

SEQ ID NO: 77676 - DNA, 427 bp, Zea mays
cgtccagagcaagtcagctacctccatcaaccagaccagaccaggaccaatggccctgcgcctaccaatctcatcgtcccacgggctggcctccacgccggcgccaatctccacgacgacgtgccggccggccgtcttggcgacggccgcggcccagaagaggagcctgctgctggcgacggcctccgagacgaggggagtcgcgccggtgaggtccagcgggatcgagacgagcacggtgggtctgggatgtgaggccgtcaccgggcaggtcacggaggtcaacaaggacaccttctggcccatcgtcgaggccgccggcgacaaggtcgtcgtcctcgacatgtacaccgaatggtgcgggccttgcaaagtgatggctccgaaattccaggagatgtctgagaagaacctggatgttgtgttc

SEQ ID NO: 77677 - DNA, 381 bp, Zea mays
acccacgcgtcaacgggcccctgtgggaagcagcaccatggccctctcctccacggccttcgccggcaaggccgtgaacgtgccgtcgtcgtccgccttcggcgaggcccgcgtgacgaggcgcaagacggcggcgaaagcctaatcaggagcagtgtccggaatcccatagtatcgacacgggcgcctgctgtacctgaggtcactgtctgagctagtcgctttggcgacgcagtcgggctacttcacaggcgactcctattgggacacaaacgggctgatcgctgtgatctgggaggtcaccactcagcgggagcaggaggttatccattcccgctgggccatgctgggcgcgctcggctgcctcttcccggaactgct

SEQ ID NO: 77678 - DNA, 411 bp, Zea mays
acccaagcgtcaacggaccccaatggcgagcatcacgatggccctctcctccaccgccgtcggctcagatctctgcgtgcgggctagcgatggcgtcgttctcggaggctcccccagggaacccgaaggcgggcgagaagatcttcaagaccaagtgcgcgcagtgccacacagtcgagaagggcgccggccacaagcaaggtccaaacttgaatggtctttttgggaggcagtcgggtaccaccacaggctactcctattccgcgggaaacaaaaacaaggctgtgatctgggacgagaacactctgtatgactacctgcttaaccctaagaagtacattcctggaaccaagatggtcttccctgggctgaaaaagccgcatgaacgtgctgatttcattgcgtatctga

SEQ ID NO: 77679 - DNA, 389 bp, Zea mays
aggagctgctggttctggtaggctcggacatggccgtcaatctagcatcctgggattttctctgacctcaactgaatatactccaagattgatcaaaaactttgatggtatcaagattaaaaagatagctgcaggaatgttgcactcagcttgcattgatgaaaaagggatttggaagaccgaacgaagaattcagaccaaatattgttgaagagataccattttcagaagaagttgcttgtggaggttaccatacttgtgttgtaacagatagcggtgatctgtattcttggggttcaaatgaaaatggctgccttggtctgggaggtacggatatggtccgctctccggaaattttgaaaagttctctatttaaacttcctgtatct

SEQ ID NO: 77680 - DNA, 407 bp, Zea mays
cccacgcgtccgcggacgcgtgggctccaccttcctcgccgcctcactccctctgaggtcgcagatccgtccggttagacgaagccgcccgcacccatggcctccggtgagctcgcctgcacctacgccgccctcatcctcagcgacgacggcatcgccatcaccgccgagaagatcgccaccatcgtgaaggcggccaacatcaaggtcgagtcctactggccggcgctcttcgctaagctcctggagaagcgcagcgttgaggatctaatcctctccgtgggatctggtggtggcgctgctccagttgctgcttccgccccagctgggggtgctgcagctgctgctgcccctgctgcagaggagaagaacgaagagcccaatgacgagtctgatgacgacatggg

SEQ ID NO: 77681 - DNA, 407 bp, Zea mays
ctaaaaccatctgcttcagccttcagctagccccaagtttagtcggccgatcgatcactgaagtagtaatggcctccgccaacagctggaccctcgagatcgcgtcgccggtggccccgcagcgcctgttccgcgccgccgtgatggactggcacaccctggcgcccaaggtcgcctcccacgtcgtcgccagcgcgcagcccgtggagggcgacggcggcgttggcagcgtcaggcagttcaacttcacctcagtcatgccgttcagcttcatgaaggagcgtctcgagttcctcgacgcggacaagtgcgagtgcaagaacacgctcatcgagggaggcgggatccgcgtcgccatccaaaacgggaacttgcaaaatcaggggtggaccccgcggccggcggcg

SEQ ID NO: 77682 - DNA, 413 bp, Zea mays
agatcatcagaatcctcaccactaggagcaaacctcagctgattgctacattcaatcattacaatgatgcatttggccaccgaatcaacaaggatctgaaggctgacccccaggacgagtacctcagaacgctgcgggcgatcatccggtgcttcagttgccctgacaggtactttgagaaggtggctaggcaggccatagcggggctaggcacagatgagaactccctgaccagggtcatcaccacccgcgctgaggtggacctcaaactgattaaggaggcgtaccagaagaggaacagcgtgccgctggagcgggccgtcgcgggggacacctccggcgactacgaaaacaagctcctcgcgctccttggggcaggattgatgagccgtactggtgcgctggtgcctttc

SEQ ID NO: 77683 - DNA, 362 bp, Zea mays
gctggaggtgtacaacagcatcatcgtcgagtcggggcgggcggggctaccggtgcggatgttctcgtcgggccgctctgccggtggccctaagattgcagccacgacgtgggcggaggcagtgagcgtcttcatcatggcggcgggcaacctggcgtgggacgtgttcaccacggagcacgaggtggaggccatcctcaagggcagcctcaacctcctggcggggctaggcggctttgccgtggaggccgtcgtcggcgcggctgtcaccaaggcggtcgcaaacgtcggcgccggcgtctttgcttgctctctcgccggcttcgtcgtgggcgccatagccgggctgattttcgtccggg

SEQ ID NO: 77684 - DNA, 369 bp, Zea mays
acgtctctcagatcgggaggcgaaaccaaggcatacatatacatatttgtagtggtaccatcataacaagtaaagatggtgaagttcacggctgaagagctccgtgccatcatggacaaaaagaacaacattcgtaatatgtctgttattgctcatgtggaccatggcaagtctacacttacagattcccttgtggcagctgctgggattattgcccaggaagttgctggtgatgttcgcatgactgatactcgtgcagatgaagccgagcgtggcatcacaatcaaatctactggtatctctctttattatgagatgactgatgagtcactgaagaactacaagggtgagagggatggtaaccaatac

SEQ ID NO: 77685 - DNA, 360 bp, Zea mays
gcgattcgagttaaaaaagaacatacacaatcatatcaccaggccagggcacgcacaagcgagctgatctgcagcattatttggctgattttttaatcattgacggcgggcgaacatatggcggatgactcgttcgacctccccagcgctagcgaggaggaggtgatgggaggcctggatgaggacgaggccatgaaggacctcgagaccgggatggacgatgaggactatttgccaccgacgatgaaggttggggaggagaaggagatcgggaacgaggggctcaagaagaagcttgtcaaggagggcgaggggtgggatcgccccgagcttggagacgaggtggaagtgcattacact

SEQ ID NO: 77686 - DNA, 366 bp, Zea mays
acgaaacatagctacctactactcaagtatccatccttattgtaagtgctcttataagctactactagttacaagctggtttatatttaactacaagtagcaacgatttgtcttagtatatatggttcataatacatatatattggaactgagataatatatgcaggagtacagtgttgatccatggactcggaaggagttgtagcagcaaaggtggcagatgagactactaaaccggcaatccaagaagacggcgccgagagcaaggccgggatgactgatctgctgatgctgaccgacaagtcgcagctgcaggcgctggcgatgctgctgcggaacaacgaggagctcatgatgagccaggcg

SEQ ID NO: 77687 - DNA, 363 bp, Zea mays
atcgctcatcaatcgccagaggagttgttgatcgaggtgagtgaggttgaaaagcacaccatcgtcatggacggcggatactacggcggtcgcgatcagcgctacagcggcgggtactacggcggcggtggcatcgcaacgccggggtacgctccggcggtcccgtacgggatgtcgcaggtgaacatcgagggcaacgggtgcgggcgggcgctgccgccgcagccgaccgtgaaggtgtactgccgcgccaaccccaactacgccatgagcgtccgcgacgggaaggtggtgctggcgccggcgaaccccaaggacgagtaccagcactggatcaaggacatgcggtggagcacgagcatc

SEQ ID NO: 77688 - DNA, 416 bp, Zea mays
aggggcggagcagaacagcctggtgatcaagggcgagggcgagaaggaggatagcgaggacgaggccgccccgcctccgagatacagcggtcgcatcgagctcgcgccagaggtttacaggatggacaagatcaaggcggagatgaagaacggcgtgctcaaggtggtcgtgccgaaggtgaaggagcagcagcgcaaggacgtgttccaagtcaacgtcgagtagatgtttccaaatagaagcaagtgccggtacgggatggaggattggaggggcactgccaaactaggattcctctctctcaatctgatctggattctggaatcagatttctcttctttcaattttctccgtcaacctccaacaattatgaattaagcaacgtcgcttcagttttcgtgtcaaggccggtgga

SEQ ID NO: 77689 - DNA, 416 bp, Zea mays
aggtcactattgctgtgaaagggcagagccttccttctggtgaaagcaaggatgatagtgccgtgcctgatagagcacagttcaatagagacgatttccctgttcagtatgatgctgcaaagttctttgtcattaaatcgtacagtgaggatgacatccacaagagtgtaaaatacaatgtgtgggcaagcacaaccaatggaaacaagaagctcgatgctgcttatcaagaagctcagtcgaagggttctgcgtgccctatattcttgtttttttcagtgaatacaagtgggcagtttgttggtgttgctgaaatgacaggggctgtcgattttgagaaaaccctggggtattgggaacaagaccagttgaaatggttccttctctgttaagtggcacattgtcaaggacgtgcc

SEQ ID NO: 77690 - DNA, 367 bp, Zea mays
aggtagctgtagactgtagttctgttcctccccactcactcctgcgcttcctcgccgcgcggttccttctccctgatcctcctttggcttcgcggttcatggcgatgtggagggccgccgctaggcagctggtcgaccgggcgctcggctcaagggccgcgcacacgtctacaggcagcaaaaagatagtcggggtgttctacaaggccggggagtatgccgacaagaaccccaacttcgtcggctgcgtcgagggtgcactcggcatccgcggctggctcgagtcgcagggccatcagtacattgtcaccgatgacaaggaaggccccaactgtgaactggagaagcacatttaagacatgcatgt

SEQ ID NO: 77691 - DNA, 371 bp, Zea mays
gagcctggaggggcggtacgacgtggtggtgtgcctggacgtgctcatccactacccgcgggaggaggcgcgcgccatgatccgccacctcgcgtcgctggcggacaagcggctgctcatcagcttcgcgcccaggacgctctacttcgacttcctcaagcgcgtgggcgagctgttcccgggcccgtcaaaggccacgcgcgcctacctgcacgccgaggccgacatcgaggacgcgctccgccaggccggctggcgcgtcgctaaccgcggcttcatctccacgcagttctacttcgccaagctcttcgacgccgtgcccgtcggctcctcgacgtagccgtgtaggccgcccgccgtgtgcctgtgtg

SEQ ID NO: 77692 - DNA, 372 bp, Zea mays
ggaaagctccgacaagctcctggggagttgcctactcttaatgattgggagaaccatctaacaacaatttttcctgaggttaggttaaagagataccttgagatgagaggtgctgatggtggcccatggaggagattgtgtgcgctgcctgcattttgggttgggctgctgtacgatgaggaatcattacaaagcattttagacatgacttttgactggacacaggaggaaagagagatgctaagacataaggtaccgttgactggtctgaagacaccatttcgcgatggatatgttagagatttagccgaggaagttctaaaactggccaagaatggattggaaagaagaggatacaaggaggtccgtttc

SEQ ID NO: 77693 - DNA, 412 bp, Zea mays
agctgctctcgtccctagaaataaagcagctcctccgcggggcggcgaactactacccatcgccaaaaccctagccccgatccggtcgaggagcactacttcttggcatggcgggcacccctagccaggcaagcctcctgctccagaagcagctcaaggatcttgcgaagaaccccgtggatgggttctccgcagggcttgtagacgatagcaacgtcttcgagtggcaggtcaccatcatcggcccgcccgacaccctatatgatggaggctacttcaatgcaataatgaccttcccccagaactatcccaacagcccgccatcagtaagatttacttctgggatgtggcaatcgaatggttacccggatgggcttgtttgcatttctattcttcatccacctggtgaaga

SEQ ID NO: 77694 - DNA, 405 bp, Zea mays
agctctcagaaggcactagcacgcaaaaaccccacgagagagacgaatcttccgaatctctcggtggcgatggcgctctccgaccgctcccgcgagtcgctcctcccgagcttcctctacgcctcctcggcgcgctctttcgctgccacaggagccgccgcgcgcctccctgtctcctccccagcgcctgccacggctggagcaggaggcggcgtgccgttctcgatccaggcgcccaaggagaagatcgagatgtactcgccggccttctatgccgcctgcactgccggaggaatcgccagctgcgggctcacccacatggccgtcacgcctctcgacctcgtcaagtgcaatatgcaaaatgacccaacgaaattccaggattatctcatcgggatttggtat

SEQ ID NO: 77695 - DNA, 414 bp, Zea mays
cgacgagggcggggaggaagacgacgaaggcgaggatgagcggatgacgggtacctcaagggcgtcgtcaccgacgtcatccacgaccccggccgtggcgcgccgctcgccaaggtcactttccgccacccattcaggtacaagcaccagaaggagctctttgtcgcagccgagggcatgtacacgggccagttcgtctactgcggtcgccgcgccaccctctccatcggcaacgtgctgcccctccgcgggatccctgagggtgccgtcgtctgcaacgtcgagcaccacgtcggtgaccgcggtgtcttcgccagggcctctggggactacgccattgtgattaagcaaaagccttggacacgggacatcgaggattaagctgccctctggcgccaagaagattgtccccag

SEQ ID NO: 77696 - DNA, 340 bp, Zea mays
gctagttgcaagagattatgatatgaatagccctaacccatttgacaaatctgacattgtcagcattgttcctgtatgcaagcatgtggtctactcatctattgatggtcgaaacttactggaatcatcgaagatggcattggataaaggaaaattagatgatgctgtgagctatggaacaaaggcattgtccaaaattatagctgtttgtggtccataccatcgactgacggctaatgcatacagccttcttgctgtggtgctttatcatactggagattttaatcaggcaactgtatatcaacagaaggcacttgatatcaatgaaagggagcttggt

SEQ ID NO: 77697 - DNA, 355 bp, Zea mays
aggtgtggccgtcgtctcccgttcggaacgccaagccccccctccggcgaaatggcccccaagcgaggtggcagggcgccggtgccggccaagaagaagacggataaagtgacgaaccctctattcgagaagaggccgaagcagttcggcatcggcggcgcgttgccgcccaagaaggacctgcaccggttcgtcaagtggcccaaggtcgtgcgtatccagcggcagcgccgcatcctcaagcagcgcctcaaggtaccaccggcgctcaaccagttcacccgcaccctcgacaagaacctcgctacgaacctgtttaagatgcttctcaagtaccggcctgaagacaaggctg

SEQ ID NO: 77698 - DNA, 368 bp, Zea mays
atggaactggtaaaaccacatttgtgaaaaggcatcttactggcgagtttgagaagaaatatgagcccaccattggtgttgaagttcaccctctggattttagcactaactgtggcaaaattcgcttttattgctgggacactgctgggcaagaaaagttcggtggccttagggatggctactacattcatggtcagtgtgccatcattatgtttgatgtcacttctaggctgacatacaagaatgttccgacatggcacagggacctgtgcagggtctgtgagaacatccccattgttctttgtggtaacaaggttgatgtcaagaacaggcaagtcaaggccaagcaagttacattccaacggaag

SEQ ID NO: 77699 - DNA, 346 bp, Zea mays
  unsure (1)..(346): unsure at all n locations
agattaaaccttccgtacccatatccacctgctgctccgaccttccagtcttctccgtangggcttcgctccatagatttcgccgcaaggggcaacggcacacccaccaactgacctgacccacgagggatccgcagatgaagatcattccggtcccttgcctggatgacaactatgcctacttaatcgtggacgagagcaccaagaaggcagcggccgttgaccctgtggaaccggagaaggttctcaaggcggccggcgaggtcggcgcctacgtcgactgcgttctcaccacccatcaccactgggatcatgctggtggcaatgagaagatgaggctgcaggt

SEQ ID NO: 77700 - DNA, 324 bp, Zea mays
aatcctccttccccgatccagtcccgcagcaacgccgagggagagcgaggagagacagatacagatcgcgcgctcagatgtcgtcggactcctcgtcgtgggcgcgcgccctggtgcagatctcgccctacaccttctccgccatcggcatcgccgtctccatcggcgtctcggtcctcggcgcggcatggggtatcttcatcacggggagcagcctcatcggggccgccatcaaggcgcccaggatcacatctaagaacctcatcagtgtcatcttctgtgaggctgttgcaatttatggtgtaattgtggcaatcatcctcc

SEQ ID NO: 77701 - DNA, 365 bp, Zea mays
gtcatctccaagtgcgtgcgccggccgccccctatcccgccggccctgtgtgtgttccccgctaccagccatggcgtcgccgttctccgtgccttcgctgatcatggaggaggaagggcggttcgaggcggaggtggcggaggtggagtcgtggtggggcacggagcggttccggctcaccaagcgcccctacaccgcccgcgacgtggtcctcctccggggcacgctccggcagagctacgcgtcgggggagatggccaagaagctgtggcgcacgctcaaggcgcaccaggccggcggcaccgcctcccgcaccttcggcgcgctcgaccccgtccaggtcaccatgatggccaagcacctgg

SEQ ID NO: 77702 - DNA, 377 bp, Zea mays
ccacaacagcgaaggagaaagcagaccaacctagccacccagggagaaagaggccaaaagggaggggagagtgtcgtcatggcttccattgtcgcttccaggagggccgttcctctagttcgcgctctggagaagctcatcgcagcgtcctccgctcccgggactggctccgccctcaggccggtggcagtcgccggcggcctccgcggctacaacaccggcgctccgctccgacgctacgagggggccgagtcggaagacgatagcgtccgcgagtacgatgggcggcacggcggccgggactacgctgtgcccagcctgttctcagatattttccgtgattcgcttactgcgccgcacagcatttggccgccctg

SEQ ID NO: 77703 - DNA, 371 bp, Zea mays
cctagagcagccaagaaaagcacatacccgagtcgccgaaacaacaacaatcccaatcccccctcgtcactcaaaactcgaccaacaatgtcgctgattcgccgtggaagcgcattcgaccccttctcccttgacctctgggaccccttccagggctttcccttcggctctggaagcagcagcagcagcagcctgttcccctcgttcggaggcaccaccagctctgagacggccgccttcgccggcgctcgcgtcgactggaaggagacgccggaggcgcacgtgttcaagaccgacgtgccggggctgaagaaggaggaggtgaaggtggagctggaggacggcaacgtgctccaaattagccgggaacg

SEQ ID NO: 77704 - DNA, 341 bp, Zea mays
ggaaatgggtcgatgatttcttccaaaatgaatatttgctaaattacatcattgcgacttacataaaacctcaggtttccattcttagtggaattgtcatgggtggaggagctggtgtttcaatacatggaagatttcgagttgccactgataacacgatttttgcaatgccagaaacagctctaggcctctttccagatgtaggggcctcttattttctatctcggctaccagggttctatggagaatatgttggtctaactggtgccagattggatggtgcggaaatgcttgcctgtggcctggcaactcattttgtcccgtcaaagaggttgccattg

SEQ ID NO: 77705 - DNA, 342 bp, Zea mays
ctctgccccaggccagaatcaagggagggtgaagcaccgccgctgaccgctgtccccggctccccgccgccgcacaaagacgagaggaagaggttcccggcggcgccacgactatgtcgtcgatgatgaacgcgctggcgaactggctggcgaacccgcgccgcaacccgctggcgcgcctccacatgcacgccgtctcctcgcgcctcaggaaatacggactgaggtacgacgacctctacgacccctacttcgatctggacatcaaggaagcgctcggtacgctgcctagggaggtggtcgacgcccgcatccagcgcctcaagcgtgccatggacctct

SEQ ID NO: 77706 - DNA, 363 bp, Zea mays
atcttgttcaggacatggatggagttacccatgtgatatctggagtgttggttgtattcttgttgagctttgcacgggtgaggcgttattccagactcacgaaaacttggaacatctggctatgatggagagagttcttggacctttgccgtaccatatgcttaagagggcagatcggcactctgacaaatacatcagaaaaggacgcctgaattggcctgagggttgcacctcgcgggagagcatgaaagctgtgatgaaattgtccaggcttcagaatctggtgatgcaaaatgtggaccaggctgcgggagatttcattggtcttttgcaagggctcctgaagtatgacccaacaagccg

SEQ ID NO: 77707 - DNA, 348 bp, Zea mays
caaagcgatactagctagtccctaccaaagcatacttcctgaaacactcttgcaatccactgagttctgtttgttgagacgcatagagctagagtcgacaatgtcgctcgtgaggcgcagcaacgtgttcgaccccttctccatggacctctgggaccccttcgacaccatgttccgctccatcgtcccgtcggcgacctccaccaactccgagactgccgccttcgccagcgcccgcatcgactggaaggagacgcccgaggcgcacgtgttcaaggccgacctccccggcgtcaagaaggaagaggtcaaggtcgaggtcgagggacggaacatgctggtcatcag

SEQ ID NO: 77708 - DNA, 335 bp, Zea mays
gcttcgaggaaggaaaaccctaccgctgtgggagtagcctccggcgatggctgcggcggcgatcctgccggagctggcgacgcaggtgctcatcccggtcgcggcggccgtgggcatcgcgttcgcggtggtgcagtgggtgctggtctccaaggtgcgggtcacccccgagcgccgcgcggacggcggggccgtgaagagcgggcccagcgactacctcatcgaggaggaggagggactcaacgaccacaacgtcgtcgtcaagtgcgccgagatccagaccgccatctctgaaggagctacatctttccttttcactgagtacaagtatgttg

SEQ ID NO: 77709 - DNA, 414 bp, Zea mays
ccaatttgcaggagaactggagaatagtagatttcttctctcaccacccagagagcctacacatgttcaccttcctctttgacgatgttggcatcccactcaactacaggcacatggagggctttggtgtcaatacctacaccttgatcaacagggatggaaagcctcaccttgtgaaattccattggaagcctacttgtggtgtgaaatgcttgctcgacaatgaagctgtgactgttggaggcacctgccacagccatgcgacgaaggatctatatgattccatcgcagctgggaattaccctgaatggaagctctacatccagactattgatcttgaccatgaagataagtttgacctttgacccccctcaggtcaccagaacctggcctgaggatatcatcccgctgcag

SEQ ID NO: 77710 - DNA, 246 bp, Zea mays
ttaatacccagctggggatctccagccacacgacatatgtagcacttaacccttgcatatgtctaccattcccacgggtcctccactacgtgaaccggtccgcgccacccgagagtacggtactccaccatccagccacatgccaggtgggtacacgccactcccgccatctctccactcccagtgcgcgattgtcttttcacatatggagtagccgggttcaggctttcccatgacgaggtatgt

SEQ ID NO: 77711 - DNA, 192 bp, Zea mays
atagggttccttacggttttgtggaggggcgatggcggcggctgatgtggagtagcgttgcttcgtcggcgggcttgcctgggccaccagcggggagtcgcgtgagaatgccttcgcctcctacggctagatcctcgactccaaggtcatcaccgatcgggacacggcgacgtctcgcggcttcggcttcgt

SEQ ID NO: 77712 - DNA, 337 bp, Zea mays
ctcgaatcgatccccaccatggcgtcgcagggatcctccgtcttcgccgcactcgagcaggccccggaggaccccatcctcggagtgaccgttgcctacaacaaggatcccagccccgtgaaggtcaacctcggggtcggcgcctaccggaccgaggaagggaagcccctagtgctgaacgtggtcaggcgcgccgagcaaatgttgatcaataatccgtcacgtgtcaaggagtacctaccaatcaccggtctggctgaattcaataagctgagcgctaagcttatctttggcgctgacagccctgctattcaggagaatagggttgctaccgtgc

SEQ ID NO: 77713 - DNA, 325 bp, Zea mays
cccacgcgtccgcggacgcgtggggaacttcttcaagctgccggccaccgacgccaagcccaaggccgccaagcccaaggcacccaaggccgcgcccaagcccaagccctcgccgaaggcgaaggccaagaccgctgcgaagcccaaggcggcgtcgcccaagcccaaggccaaggccaaggccaaggccaaggccaagcctgtcgctcctgccgccgcgtcgcccaagccccgcgggcgccctcccaaggtcgccaagacctccgccaagggctcccccgccaaggcagccaagaaggccggtgctcctgccaagaaggggaag

SEQ ID NO: 77714 - DNA, 343 bp, Zea mays
gttagattcatggcaagggagatacagatattaagaagacttgatcatccaaatgtcatgaaactggaaggtttgattacttcccgactatcatgcagcctttatctagtatttgaatacatggagcacgatcttgctggactttgctcctccccggacatcagattcactgaagcacagctcaagtgctacatgaaccagttactgtcaggactggagcattgtcattcacgccgtgtggttcatcgtgatatgaagggcgctaatctcctcgtgaataacgaaggggttctaaagatagctgattttggacttgcaaatttctttgatcccaacaaaaagc

SEQ ID NO: 77715 - DNA, 351 bp, Zea mays
gcgttcctcaacatgaagaacgattacaaggatggaacgttctcacaggtcgtgtccaacgccctcgacatgaagctcagggacgacctcgatacgctcacgaagatcaggaaccaccgtggtctgcgtcactactggggcctccgtgtccgtggacatcacaccaagaccactggcaggcctggaaaaactgttggtgtctccaagaagcgataagctacatatctatcgacaaatctcagatgtactagtgttggttcatgttcaaactgtcttgactaacggtttctgttgggacagtttcctgaaattatgttttgccctagggtaatcttgcagttatggaacctt

SEQ ID NO: 77716 - DNA, 377 bp, Zea mays
ccgcagcgaacgagaaagcagaccaacctagccacccagggagaaaggccaaaagggaggggagagtgtcgtcatgggttccattgtcgcttccaggatggccgttcctctagttcgcgctctggagaagctcatcgcaacgtcctccgcgcccgggactggctccgccctcaggccggttgcagtcgccggcggcctccgtggctacaacaccggcgctccgctccgacgctacgatggggccgagtccgaagacgatagcgtccgcgagtacgatgggcggcacggcggccgggactacgccgtgcccagcctgttctcagatattttccgtgatccgcttagtgcgccgcacagcattggccgcctggtgaaac

SEQ ID NO: 77717 - DNA, 356 bp, Zea mays
ccccaatttcgtccctttcacaccggagaacgggcgagcagagccgcgcaaagcagaacgcggaagcaagaggaggcgatcgactactcgaccagccctctccgctcttgtctccgatggcggctcgcgtcctcgcggccctcgcccttgccctcgccctcgccctcgtcgccgtacccgctcccacgcgggcgtccaacgacgagggggacgcgctctacgcgctgcggcagcggctgtcggaccccaacggcgtgctgcagagctgggatcccacgctcgtcaccccctgcacctggttccacatctcctgcgaccaggtcggccgcgtcgtccgcctggacttgggcaactcc

SEQ ID NO: 77718 - DNA, 409 bp, Zea mays
aggtggccggacggtggtggcatcgccaattcaactccgcatctgaatcggcactcggcagcgcgccagctccatagtgtaggaggaggagatggcgctcacaagaatcggtcttgctggccttgcggtcatggggcagaaccttgccctcaacattgcagagaaagggttccccatctctgtgtacaacaggacaacctccaaggtggacgagaccgtgcagcgtgccaaggcagaaggaaaccttcccgtctacggcttccatgaccccgcgtcctttgtgaactccattcagaagccacgggtggtgatcatgctcgtcaaggccggcgcgccagttgaccagaccatcgcgacgctcgcagctcacttggagcagggcgactgcatcatcgaatgggggaacgag

SEQ ID NO: 77719 - DNA, 395 bp, Zea mays
cgaccctggatctccaaccccgattttccccagcagaagcaaacccgagcaaattgagcgcttgaagcttcacccggcgaagcagaatcgaatcggagccgcacgccacgccgcgatggggatcctcctccggtccctcctcgtcgcctcgctcgtcctcagttcgctcgtcttgcacgtcgcagcggctaaaactatagatccttacaaggttctaggagttgacaagaatgctagccaacgggatattcagaaagcctttcacaaactttctctaaaataccaccctgacaagaataaaggaaagggcgcacaggaaaaatttgaagaaataaacaatgcatatgagatcctatctgatgaagagaagaggaaaaactatgacctctacgggg

SEQ ID NO: 77720 - DNA, 392 bp, Zea mays
attaattattgaggacacaggtgtcggaatacaactgcaagcacaaaatcgggtttttacaccgtttatgcaggctgacagttcaacttcaaggaattatggcggtactggcatcggtttaagcatcagcaagtgtctagctgaacttatgggtgggcagataagtttcaccagccatccttctgttggaagcacgttcactttctcagccacactgaagcactcatacaaagatatttcgggtgattcaagtaggagcttgacagaggcactaccaactgcttttaagggaatgaacgccatcttggtagatgggagacctgtacgtagtgctgttacaagatatcacctcaagaggttgggaatacttcttcaagttgtgaacaatatga

SEQ ID NO: 77721 - DNA, 386 bp, Zea mays
ccggcgaggccgccaagctcgcgcggtacaacaagaagcccaccatcacctcccgcgagatccagacctccgtgcgcctcgtcctcccaggagagctcgccaaacatgccgtctccgagggaaccaaggccgtcaccaagttcaccagcaattgagcagcctgcagcgtccacggatttgttaggtctccccttcttacaagggttcttcgtcgtgtcctctacccctccccgcctatgtatgtgctgtgaaatcgttgatgttctcgtcgggtgaacaaaggccagtagctagcttgcctgcttcataaatcgtgccggattgtaatgggcctcttagatttgacgcccctaatttgggaaagagttgtaccggtggcttcccgg

SEQ ID NO: 77722 - DNA, 92 bp, Zea mays
aaaaactacagtacgcatatgatgcgtacgtacgtgtgtatagtttgtgctcaataaaaaaaaaaaagaaaaaaaacaacgaaagagagaac

SEQ ID NO: 77723 - DNA, 353 bp, Zea mays
ataaggctatatcaatcatggcgaaacctgaattccctgagttgatagattttaatccaatccatgcaactgacgtccaactaccttcaggtggtacatttgtgatcgcccattgtttggccgagtccaagaaagcagagacagctgcaataaattataataaccgcgttttggagtgtcgcttatcagcgattgttcttgccatcaaacttgggatggataggaaaaaagctatctcctccgttacaaccctctccgatgttgaggggctatgtgtttcttttgctgggagagaaggttcatctgatcctgcagtagctgtgaagaaacttctgcatgaggacccatataca

SEQ ID NO: 77724 - DNA, 346 bp, Zea mays
ggacatgccgcggaccagggaagggttctaccgcttcagggggtccgtggcggcggccgtggtccggggccgcgccttcgcgccgcacgccgacgtgctgtggatggagaggtccagccccaacgtggccgactgcaccgccttcgccgagggcgtcaaggcggcgtgccccgaggcgatgctcgcctacaacctctcgccgtccttcaactgggacgcgtctgggatgacggacgccgagatggccgccttcatcccgagcgtcgcgcgcctcggctacgtctggcagttcatcacgctcgccgggttccacgccgacgcgctcgtcaccgacacgttcgcgcgg

SEQ ID NO: 77725 - DNA, 341 bp, Zea mays
tggaaagcttcaagacgttgaagattggctatatgaagatggtgaggatgagacacagggagtctatatttctaaactggaagatcttaagaagattggtgacccaattgaggcacggtacaaggagtcgacagaaaggggttcctctgtagatcaactggtctactgcatcaacagtttcagagaggctgctttgtccagtgaccaaaagtttggccatatcgacatatctgagaaacagaaggtcatcaatgagtgctctgaagtagagaactggttgagagagaggaagcagcagcaggacgccctagctaagcaaaccgatcctgtgctgctcgtat

SEQ ID NO: 77726 - DNA, 327 bp, Zea mays
  unsure (1)..(327): unsure at all n locations
ctgtcaacggttgggcggtcatcaagttcgtcgccgacaacccaggtgtgtggctcatgcattgccatctggacgtgcacatcacctgnggcctggcaatggctttcctagtggaggacggctatggcgaactgcagtcgctggagccgcccccagttgatcttcccatgtgctagtggaggacggatatttgtgttgaggaagaaagcctggtcacgttgtatgttaattgttactcttttttggtggaggggggcgtgttcgtgatcttaaattcttaggggacttaattttccagcttgttggtttgaaatttcctctgtaaat

SEQ ID NO: 77727 - DNA, 424 bp, Zea mays
  unsure (1)..(424): unsure at all n locations
gcattaaggactgtgataaggctgtcgagagaggaagggaactgcatgctgatttcaagatgatctcaagggcacttaccagaaaaggaactgctcttgccaaacttgctaaatcatcgcaagactatgatgctgccattgagattttccagaaggcgttaactgagcaccggaacccagatacactgaaaaaactaaatgatgcagaacgagcaaagaaggagctggagcaacaagagtactatgacccaagaattgctgacgaggagcgagaaaaaggtaatgagttctttaagcagcagaaatatccagaagcagtgaaacattacaccgaagctctcaggagaaaccccaaggaccccagggtatacagcaatagggctgcctgttacaccaagctangggcccttcctgaaggtctgaa

SEQ ID NO: 77728 - DNA, 320 bp, Zea mays
aaaagcaacaatgcagcagcacaagcaagaaccacacctcctcgcttcgcctgtgatcatgtcgtcatgctgcggcggcaagtgcgggtgcggctccagctgctcctgcggcagcggatgcaacggctgcggtatgtaccctgacgtggagaccgccgccaccagcagcgtcaagaccacggtcctcgccgcgccgaccaccaaggccagcgccggcggcttcgacgcggccaccgacggcggcggctgcgactgcaacacctgcaagtgcggcaccagctgccgctgctcctgctgcagctgcaactgaactggcccgg

SEQ ID NO: 77729 - DNA, 310 bp, Zea mays
gtcacccctcctcgtccgtcgcctcacaaggcgaccagcgggcggaccctccgcggcgcaaccatggggctcttcactgtgacgaagaaggccaccacgcccttcgacggccagaagcccggcacctccggcctccgcaagaaggttactgtattccagcagccccattatctgcagaactttgtccaatcaacattcaatgcccttcctgtggatcaagtaagaggtgcaacaattgttgtctctggtgatggccgctatttctcaaaagatgctgttcagatcatcacaaaaatggctgctgccaatg

SEQ ID NO: 77730 - DNA, 416 bp, Zea mays
gggtcgacgcccgcgtccgaagcaagcgtacatgcgcggcaagagggtgctcgagatcaaccccaggcaccccatcatcaaggagctccgcgacaaggtcgcccaggacaacgagagcgaggagctgaagcacacggcgaggctggtgtaccagacggccctgatggagagcgggttcaacctccccgaccccaacgagttcgcgtccagcatctacaagtcggtgcagaagggcctggacctgagccccgacgcgaccgtggaggatgagaacgaggccgaggagcagccggaggtggagaaggagccggagccggagccgtcgtcctacgacaaggacgagctttaggctttcggatttgttttcaagtctagctagctcccgctttactaggaatgtgaatcagttacggcct

SEQ ID NO: 77731 - DNA, 427 bp, Zea mays
acaccttctcaaaaaaatcccccattttcttcgaggcgaggagagcgtgaaagacagggcaccggcagcgacgatgtcggggcgcggcaagggcggcaaaggtctgggcaagggcggagcaaagcgccaccgtaaggtgctccgtgacaacatccagggcatcaccaagcccgcgatccgtaggctggctcggaggggcggcgtgaagcgcatttcggggcttatctacgaggagacccgcggcgtcctcaagatcttcctcgagaacgtcatccgcgacgccgtcacctacaccgagcacgcacgccgcaagactgttaccgccatggacgtcgtctacgcgctcaagcgccagggccgaaccctctacggcttcggaggctaagctggatgcctcttccccttgctgtcctggatgcccgtttgt

SEQ ID NO: 77732 - DNA, 332 bp, Zea mays
agcacaggtacggccaccaccaccggccaggaagcaagctcaaaccctaaccgccggcgacgccagcacgatggcccgctacgaccgcgcgatcaccgtcttctcccccgacggccacctcttccaggtcgagtacgccctggaggccgtccgcaagggcaacgccgccgtcggcgtccgcggcacggacaccgtcgtcctcggtgtggagaagaagtcaacccccaagctccaggactccaggtccgtgcgcaagatcgcgtgcctggacacccacatcgctctggcatgcgcggggctgaacgcggacgcacgcgtgctcatcaaccgcg

SEQ ID NO: 77733 - DNA, 405 bp, Zea mays
acgcaacgtccccgctcctttgccggcgtcgcgcccaggcgcgggccctcccagcaagtcgcctccctccgcctacccgcgtcgccgtgcagccccccgccgcgccggtcgcgacgcgcatcggctcctttgacaaggtgctggaggcgctgatcggcgggaccgacttctccgaggaggatgcggaggcgacgctgaagctgctgctggacgagaaggaccaggcgcgcatctccgccttcctcgtcctcctcagggccaagggcgagaccttcgaagagatcgtggggcttgcgaaggcgatgttgagctgctgcatccgagtcgatggtccggatgacgccgtcgacattgtcggggacaggcggcgacggggcagacaccgtcaacatctccaccgggtcc

SEQ ID NO: 77734 - DNA, 393 bp, Zea mays
gtcttggtagacatggagcagatccagtactccgagaagtacttcgacgacacctatgaatacaggcacgtcgtcctcccgcccgaggtcgccaagctcctccccaggaacatccttctctccgagaagcagtggcggttggtgggtgtgcagcagagccgcgggtgggtgcactacgcgatgcaccggccggagccgcacatcatgctgttccgccgcccgatcaactagcagcagcagcaggaggaagcggctgccgcgcatgtgctgcccaagtgaagcctctgctggcgaccacgaatgttaacaacccctagccctcttttcatctctagaaggggcgtcgctgttgtgttgattaatccctctggctgttggttgggaacttgggat

SEQ ID NO: 77735 - DNA, 415 bp, Zea mays
attcagggtatctctgcagttggtgcattttttgagctgcttagtcaacccagcttaagtgtgcagcacccagaagaaaacaagcaggttgctccagctgagctatgcccaatcctgaagaggctttacagaatactgataaaaagggagctcccagcaagggacattcttcaagccctgagggacgaaacgatgaatgatcctcgggaaaggattgagatggcacaaagccatgcattctaccgcccgtctctccttggaaaaccatgatctagttagtcttgtagattagtagaatataaacggacgctgtgctgcaagtttctccactgtgcttgctgtccttgtgtccgagctacatggggatggggctttgtcagttgtccaattctttgtgcttcctcattgccatggt

SEQ ID NO: 77736 - DNA, 449 bp, Zea mays
cggtccagattacgggtcaccaccgtcgaggggagtcagccattgatgaaagtatctgccctggcaattgcatagcctgcaatgaccatgttgcacttacgcaccctgaccttgacaaggagactgaggagttcattgcagatgtgcttggggtcgaggtgtttacgcagactattgctggaaatatccttgtggggagttactgcgccttctctaacaggggtggtttggttcatccccatacatccgttgaagaccttgacgagctctccacgctcctccaagttcctcttgtcgcaagaactgtgaacagaggaagcgaggtcattgctgcaggcatgacagtgaacgactggactgccttttgtggctcggacacgacagccaccgagctctcagtcatcgaaagcgtcttcaagctgagagaagggcagcccactgcgattgtg

SEQ ID NO: 77737 - DNA, 428 bp, Zea mays
  unsure (1)..(428): unsure at all n locations
acgccgtcttccgccgtctcaaggccaagcccgagaacaagatgtgcttcgactgcaacgccaagaaccccacctgggcctccgtcacctacggcatcttcctctgcctcgactgctccgccgcccaccgcagcctcggggtccacatcaccttcgtcaggtcaacgaacctcgactcatggactccagaccagctgaagatgatggcattcggaggcaacaaccgggcacatgctttcttcaagcagcatggatggaccgatggcgggaaggtcgaggcaaaatacacatcaagagccgctgaactttacaggcagatgcttaccaaggaggtcgctaagagcgccacgaccgataatgccctgccatcgtcacctgtcgcatctgaggcttcnaagccgccatccgatgacttccctgaattcaaa

SEQ ID NO: 77738 - DNA, 341 bp, Zea mays
acacaattcacacagcgaaccgagaaaccaacacagcaacaagcaaagcagcgatccgacatccgagagatggacgcggtgatgttcgggctggagactcccctgatggcggcgctgcagcacctgctggacgtgcccgacggcgacgccggcgcgggcggcgacaacaagacgggcagcggcggcagcgccacgcgcacctacgtccgcgacgcgcgcgccatggcggccaccccggccgacgtgaaggagctgcccggcgcgtacgcgttcgtggtggacatgccggggctgggcacgggcgacatccgggtgcaggtggaggacgagcgggtgctggt

SEQ ID NO: 77739 - DNA, 349 bp, Zea mays
gtggcaatgggaggtacgatcatttaacgaggcggttgaaatgatatcggcatcaaggtgtacgggatggactggactggtcatggtggaagtgatggtctacatggatatgtgcaatctcttgaccacgctgtcaatgacttgaaaatgtacctcaagaaagtatcagccgagaaccctggtcttccatgcttctgcttcggccattcgacgggtgggggtatcattctgaaggctgcacttgatccagacgtagaaacgctcatcagcggtgttgtcctgacatcaccagctgtccgtgttcagcctgcccacccaatcatagcggccatggcaccgatttttgccc

SEQ ID NO: 77740 - DNA, 414 bp, Zea mays
ggacgacatggagcgagtgctctccgacatgctcgacagcgtgtcatgcaaaccggacgtttggaccatgaacatcatcctcagcctcttcgggaaccggggcgaggttgaactgatggagagatggtacgagaagttccgaggctacggggtcgagccggagacccgcacgctgaacatcctgattggcgcctacgggaagcggcggatgtatgacaagatgtccgcagtcatggagcacatgcgcaagctcgcgttcccgtggacgaccgcgacgtacaacaacgtgatcgaagcatttgctgaggccggcgacgccgggaacatggagcacgcgttcaaccagatgcgttccgagggcatgaggccggacactaagaccttctgctgcctgatcgacgggttcagcagggc

SEQ ID NO: 77741 - DNA, 369 bp, Zea mays
  unsure (1)..(369): unsure at all n locations
tactgtcctcacatatcactaacccaaggagtgcaagaaacttttcattgttcacctatccgaaagagagtattttgctgttccaaggaatctgaaactgcttgctgttccactgtttgaactctacgacaatgttcagaggtacnggcctgtcatctctaccatcccgcagcagctttctaggttccagttcaacatggttagctcttagggtgatgatacaagaaaaccaatgtggccaaagcagctcttcggttgctgagctagctgatcaacgtaccctgactgattttatttcattgtgctggatttttttatatagactactactatctagacatgcatttctgattgtattgttgttgaatt

SEQ ID NO: 77742 - DNA, 396 bp, Zea mays
gtttgaagcagaagaaggctcacctcatggagatccaggtcaacggtggcactatagcagacaaggtggactatggttacaagttctttgagaaggaggtccctgttgatgctgtgttccagaaggacgagatgatcgacatcatcggagttaccaagggcaagggttatgaaggcgtggtcactcgctggggtgttacccggcttccccgcaagacccacaggggcctccgcaaggttgcctgtatcggtgcatggcatcctgctaaggtgtcgtacactgttgctcgtgctggtcagaacggataccatcaccgcactgagatgaacaacaacgtttacaagattggcaaagccggacaggaaagccatgacgcctcaactgagtttgacagac

SEQ ID NO: 77743 - DNA, 422 bp, Zea mays
cgcaccgacgccgtcgccgccacgctcatccagaccaacgtcgacgcgcgcgaccaccagttcatagtcggcgccaccaacccgggcctcaggggccagagcctcgcggccgtgctgtcggccggcatgtcggcgggcaagagcggcagggagctccaggccatcgaggacgagtggctggccgcggcgcggctcaagaccttctccgagtgcgtcagggacgccatcgcgggcctcggcgtcgcgggccaggagaagcagcgcaggctccaggagtgggaccgcgccaccggcggctacgacaggtgcgtgtccaacgaccaggcgcgcgacatcgccgccagcctcggcgtcacgtccgtgttctgggactgggacctgccgcggaccaaggaagggttctacggcttcagggggtccgt

SEQ ID NO: 77744 - DNA, 378 bp, Zea mays
cggcgccgcttccgatcgggttcgctgtgttcatggtgcacctggcgacgatcccgatcactggcaccggtatcaacccggcgaggagcctcggcgccgccgtcgtgtacaacaacagcaaagcctggagcgaccaggtatttacacacattgtccacgattgcagcactcactcatttgttggttgctaatttgctgttgctgcatgcagtggatcttctgggtgggcccgttcatcggagcggcgatcgcagcgctataccaccagatcgtcctccgcgccagcgccagggggtacggctccttccggagcaacgcctaggaccatctcgtcggcgggctattcagctcttcctcctccgcagtttaaggtgaacg

SEQ ID NO: 77745 - DNA, 429 bp, Zea mays
gtccgacgtcccaccggcccccgctctcgttttcccccgccggaacaagcacgctcaagcgctgcgcaacggattggccctgctaacgttcgccccgggcaagggcaaggccccaacgcccaacgcaaggtaagttagccaattgggcaactggcggctttctccccaagaaaaacaacaagcaaaaacttcggcaacctcaaccctcgaatcgttccccaccatggcgtcgcagggatcctccgtcttcgccgcactcgagcaggccccggaggaccccatcctcggagtgaccgttgcctacaacaaggatcccagccccgtgaaggtcaacctcggggtcggcgcctaccggaccgaggaagggaagcccctagtgctgaacgtggtcaggcgcgccgagcaaatgttgatcaataatccgtcacg

SEQ ID NO: 77746 - DNA, 425 bp, Zea mays
agcgacttcgctccgcttccgccgatcggcttgccccgtcgatttcgccaacccctcgacccgatcgactccattgatcgtacctcgtcgtccggttgtcgatggccaggacatctttcaaaatggagcacgacctcgagaaaaggcagtccgaatctgccaggatcagggataagtatcccgacagaattcctgtgattgttgagaaagctggcaaaactgatgtccccgagattgataagaagaagtaccttgtccctgctgatctcactgtcggccagtttgtctatgtggtgaggaagagaatcaagctgagcccagagaaggccatctttgtctttgtgaagaacaccttgccaccaactgcctctttgatgtctgcaatctacgaagagaacaaggacgaggatggcttcctttacatg

SEQ ID NO: 77747 - DNA, 413 bp, Zea mays
ctcttttccccaaggcaaccaaaccatctcgattctcgactcgtggggaagtttcgctctcgccggcgtcgacggcctagggttcgaggaacgtccgtccgtccgtccggggaaggagcggtagggaggcggagatgatcgaggtggtgctcaacgaccgcctggggaagaaggtgcgggtcaagtgcaacgaggacgacaccatcggcgacctcaagaagctggtggcggcgcagacggggacgcgccccgagaagatccgcatccagaagtggtacaacatctacaaggaccacatcaccctcaaggactacgaggtccacgacggcatgggcctcgagctctactacaactgagccgccgcccctctctccctctcgtcaggttggtctgaattctgaagtcatgggtgc

SEQ ID NO: 77748 - DNA, 371 bp, Zea mays
cttgtgatgcacgctggatctctgccgccgcagcgttcaagttcgcgccgtcgcacgacgtgacggaggtgagcaaggccggctacgacgcctgctccggcagcaaccccgtgaagtcctacaccggcggcagcgcctccgtgaagctgtcggccccagggaagcgctacttcatctgcagcgtgcccggccactgcgccgcgggtatgaagctggaggtcaccgtcgccgccgccgcggtcaccgccgcgccggcccccgccaagacgaccaagccccggcaccagaggagcgtctccccgaccccggcccctgccgcggctccggctgcgccgtccaccgacgaaatgcccaacgtgtcctcccccaac

SEQ ID NO: 77749 - DNA, 409 bp, Zea mays
gcaagatcaagctgctgttgagtcacatagaaaggctgctgccgcagcagctgctggtaaattcaaagaggaaattgtgccagttcatacaaagattgttgatccaaaaactggtgaggaaaagaagatcgtagtctctgcagatgatggaatccgagtggatacttctcttgcagtcctgtcaaaactcaaaccagcattttcaaaggatggcagcactactgctgggaatgcaagccaagtgagtgatggtgctggggccgtcttgctaatgagacgggatgttgctatgaagaagggtcttccagttcttggtgtctttaggacctttgccgctgttggagttgatccaactgttaagggtaatgggtcctgccgttgcaatccctgcagcagtgaaagctgctgg

SEQ ID NO: 77750 - DNA, 315 bp, Zea mays
tcgagacattcgtcacctcagggaagctggcatgtcaaccttcattctcactgctgaacttgctgctgctccttcagcagttggacgatgaggacaaactgcaacaagtgtcaaatgctctctcagagttcattcggaaagccacggtggtttgcggagaatgagaaatgttggagcggcgtgtaggatcaccgaatgcatagtacggctccatacttctgctctgtttctgcctgtaactcaactgtgaaaagttttaaactttcagaaagaaaaaccgtgagaggtgcaggttcaagttaatatgaataataa

SEQ ID NO: 77751 - DNA, 415 bp, Zea mays
  unsure (1)..(415): unsure at all n locations
acccacgcgtccacccacgcgtccgcggatgcgtgggccgcgaccacccggcctgcgtcgcgcagccagacctcgccgccgccgccgccgcgtcctgccgcctcgcgctcgccctcaagggcctcccgcccgtcttccacgaactggagtgggacctcgtcatggtcgacgcgcccacggggtggacgccgcaggcgcccggacggatggccgccatctacaccgccggcatggcggcgcgcgcgcgcaggcccggggacggacccaccgacgtcttcgtgcacgacgtcgatcgacccgtcgaggacaacttctccaaggcgttcctgtgcgagggatacctcgccgagcaagtcggccggatcaggcacttcgtcatcccgtcncaccgctagaatgaccgcacaccattctg

SEQ ID NO: 77752 - DNA, 118 bp, Zea mays
acgcgtcggacaattgtttaacatgaaagagcacatttgacagatacatctcagtatgtggaccatacagcttattgtgtagcgaagtacgactgtactggatgaagtgacgcagggt

SEQ ID NO: 77753 - DNA, 315 bp, Zea mays
agatccaccacaacagcgaaggagaaagcagaccaacctagccacccagggagaaagaggccaaaagggaggggagagtgtcgtcatggcttccattgtcgcttccaggagggccgttcctctagttcgcgctctggagaagctcatcgcagcgtcctccgctcccgggactggctccgccctcaggccggtggcagtcgccggcggcctccgcggctacaacaccggcgctccgctccgacgctacgagggggccgagtcggaagacgatagcgtccgcgagtacgatgggcggcacggcggccgggactacgc

SEQ ID NO: 77754 - DNA, 317 bp, Zea mays
acggacgcgtgggcgacccacgcgtccggcgaaggagaaagcagaccaacctatccacgcagtgagaaagaggccaaaagggaggggagagtgtcgtcatggcttccattgtcgcttccaggagggccgttcctctagttcgcgctctggagaagctcatcgcagcgtcctccgctcccgggactggctccgccctcaggccggtggcagtcgccggcggcctccgcggctacaacaccggcgctccgctccgacgctacgagggggccgagtcggaagacgatagcgtccgcgagtacgatgggcggcacggcggc

SEQ ID NO: 77755 - DNA, 337 bp, Zea mays
cacgcgtcgaccaaggtcgcctccaacgtcgtcgccagcgcgcagcccgtggagggcgacggcggcgttggcagcgtcaggcagttcaacttcacctcagtcatgccgttcagcttcatgaaggagcgtctcgagttcctcgacgcggacaagtgcgagtgcaagaacacgctcatcgagggaggcggcatcggcgtcgccatcgaaacggcgacgtcgcacatcaaggtggagcccgcggccggcggcgggagcgtggtgaaggtcgaatccacttacaagctgctgccgggcgtggaggtgaaggacgagatcgccaaggccaaggagtccgtca

SEQ ID NO: 77756 - DNA, 323 bp, Zea mays
gcacactcctcctggggaccaacccggtgcacaagagcgtgccggtgcttctccacgccgggcgcgccataaacgagtcccaggtcatcctgcagtacatcgacgaggtgtgggcggggacggggccggacgtgctgccggccgacccctactagcgcgcggtggcgcggttctggggcgcgtacatcgacgacaaggtggagtcagcgtggctggggatgctgttcaggtgcgcgaacgatgaggagagggcggcggctgtggcgcgcgcccgcgaggcgctcgacgcgctggaaggcgcgttccgggactgctccagcggg

SEQ ID NO: 77757 - DNA, 327 bp, Zea mays
gaaagcaacaaggcagcagcacaagcaagaaccacacctcctcccttcgcctgtgatcatgtcgtcttgctgcggcggcaagtgcgggtgcggctccagctgctcctgcggcagcggatgcaacggctgcggtatgtaccctgacgtggagaccgccgccaccagcagcgtcaagaccacggtcctcgccgcgccgaccaccaaggccagcgccggcggcttcgaggcggccaccgagggcggcggctgcgactgcaacacctgcaagtgcggcaccagctgcggctgctcctgctgcagctgcaactgagctggcccggcccggcg

SEQ ID NO: 77758 - DNA, 286 bp, Zea mays
actgaacatccgtgaagctcatgtcttctcaacgactgatggcttttgtttggatgtatttgttgttgatgactgggatacaaaggaaacagatactttgctacagattctcaaggagacagcggcacgaaatcatgcctcattatcaaacccaaccaattctgcagcctcagaaagagtactggaactacaagagaagattggtgattcaaatattgacaggaatttcattgatattatatatggattagctggttcatatttttaatgctacaatgttattgct

SEQ ID NO: 77759 - DNA, 204 bp, Zea mays
aattgttaaaattggtcaagatcggatcggaaagaagagggcacaaggatgttggtttccttagagaggtcgacgaagtagtgagaacaggattgacgcctgcggagaggctgctgaacctgtacgagaccaagtggtaacgcaacgtcgaccatgttttcgagcatttgttatactgattactgacgatgacgccgccgaatc

SEQ ID NO: 77760 - DNA, 414 bp, Zea mays
agtcacgccaatcagcaccagccaccgtggcgatgacggaggaggcggaggcgaaggcgaagggcaacgcggcgttcgcggccggccgtttcgaggaggctgtccagcacttcagcgacgccatcgcgctcgcgcccgacaaccacgtcctctactccaaccgctcggcggcgtacgcgtcgctctggcgctacgcggaggcgctagatgacgccaagcggaccgtggcgctgaagccggactgggccaagggctactcccgcctcggcgccgcgcaccttggcctcggtgacgcgcccaaggccgtcgaggcctacgagaaagggcttgcgctcgagccgtccaatgaggcgctcaaatccggcctcgcacaggcgcgccagtccgcatcggcgccgagacgtccggtgggct

SEQ ID NO: 77761 - DNA, 355 bp, Zea mays
cgccggccgccccctaatcccgccggccctgtgtgtgttccgcgctaccagccatggcgtcgccgttctccgtgccttcgctgatcatggaggaggaagggcggttcgaggcggaggtggcggaggtggagtcctggtggggcacggagcggttccggctcaccaagcgcccctacaccgcccgcgacgtggtcctcctccggggcacgctccggcagagctacgcgtcgggggagatggccaagaagctgtggcgcacgctcaacgcgcgcatgtcgctgccccgcgccgagcgcacgcgggcgccgtacgtcgagctcctcaagcccagcatcgccgatcgcgatcacggctt

SEQ ID NO: 77762 - DNA, 407 bp, Zea mays
cgtttgcctcttctccctcttgccggtcccgaataaagagcagcagcgcaagaggtcggtagagcgagaagaaggcaatggcggccgagagcttccttttcacctcggagtccgtgaacgaggggcaccccgacaagctgtgcgaccaggtgtcggacgccgtgcttgacgcatgcctcgcgcaggaccccgacagcaaggtggcctgcgagacctgcaccaagaccaacatggtgatggtgttcggcgagatcacgaccaaggcgaccgtggactacgagaagatcgtgcgcgacacctgccgcgagatcgggttcacctccgacgacgtgggcctcgacgccgaccgctgcaaggtgctggtgaacatcgagcagcagtcccccgacatcgcgcagggcgtgcac

SEQ ID NO: 77763 - DNA, 351 bp, Zea mays
tcgcgggccgaaccacgcgtcgaccacaggctgttccacttaggcctgaagaaatacggcaagggggactggaggaacatatcgcgcaactacgtccagacgcggacgcccacgcaggtggccagccacgcgcagaagtacttcatcaggctcaactccggcggcaaggacaagaggaggtccagcatccacgacatcaccacggtgaacctgacggacgacgagcgggcgccctcgccgtcgcggtcctctctgatcaccaccaccaccagccagccaaacgcgccggctccggccgcagtggtgataggcggccccttctcgtcgtcgtcggcggcggcggccgaggcc

SEQ ID NO: 77764 - DNA, 332 bp, Zea mays
acgcgtcgacaacaggctgttccaattaggcctgaagaaatacggcaagggggactggaggaacatatcgcgcaactacgtccagacgcggacgcccacgcaggtggccagccacgcgcagaagtacttcatcaggctcaactccggcggcaaggacaagaggaggtccagcatccacgacatcaccacggtgaacctgacggacgacgagcgggcgccctcgccgtcgcggtcctctctgatcaccaccaccaccagccatccaaacgcgccggctccggccgcagtggtgatacgcggtcccttctcgtcctcgtcggcggcggtggccg

SEQ ID NO: 77765 - DNA, 313 bp, Zea mays
actagatcgcgagcggccgcctttttttttttttttttagtacgatcgaacttgtcctcgtcacttgataaaaccatttacacaaaaccatatcttacagagaccaggaaccaaaatcgagaaatatcacggaacaaaaaagcagaatccttcttgcgagccgcagctatttgcagcaagacttcccattcccactaacggctgcccctgcccctgccaatcatgtcgttgtagtgcttgagcgactcctgccgctgcagccgcatctccatgttgaacttgtggatgaacgcctccacgcggcggttcagct

SEQ ID NO: 77766 - DNA, 316 bp, Zea mays
acatcccccttgcaagtatagtctcggcggctctagaagacgatgggcaaggacgacgtgatcgagagcggcgctggcggcggcgagttcgctgccaaggactacacggaccctcccccggcgccgctgatcgacgcggctgagctggggtcctggtcgctgtaccgcgccgtgatcgccgagttcatcgccacgctgctgttcctgtacatcacggtggccaccgtgatcgggtacaagcaccagacggacgcgtcggcgtcgggtgccgacgcggcgtgcggcggcgtgggggtgctgggcatcgcctgggcct

SEQ ID NO: 77767 - DNA, 371 bp, Zea mays
gcaatccactgagttctgtttgttgagacgcatagagctagctgctagcgtcgacaatgtcgctcgtgaggcgcagcaacgtgttcgaccccttctcgatggacctctgggatcccttcgacaccatgttccgctccatcgtcccgtcggcgacctccaccaactccgagactgccgccttcgccagcgcccgcatcgactggaaggagacgcccgaggcgcacgtcttcaaggccgacctccccggcgtcaagaaggaggaggtcaaggtcgaggtcgaagacggcaacgtgctggtcatcagcggccagcgcagcagggagaaggaggacaaggacgacaagtggcaccgcgtcgagcgcagcagtggc

SEQ ID NO: 77768 - DNA, 391 bp, Zea mays
cccacgactcagggacagccactgcaactcctcccaaatcctcccacccggtttagccggctccgctgccaccgccgcgactccacctctgtcgccaccatggtcaagtccaaggccatcagggtccacgagctgggcggccccgaggtgctgcggtgggaggaggtggaggtcggggagcccggtgaaggggagatccgcatcaggaccaccgccgtcggcgtcaacttcatcgacatctactttcggaagggggtctacgccgcgcccaccatgcccttcaccccaggaatggaagccgttggcgtcgtcaccgctgttgggcctggcctcactggcaggaaggtgggcgatgttgttgcatatgccggcaaccccatgggctcctatg

SEQ ID NO: 77769 - DNA, 340 bp, Zea mays
ccgggccgatcacgcgtcggcctatctctgaaactactgctatttttgcaggtgttgatgtcaccaacgagcccattcgagttttgcctactgtgcactacaatatgggcggtattccaacaaactaccatggggaggtactggatatcaacggtgataatccagatgctgttgttcctgatctaatggctgctggtgaagcagcctgtgcatctgttcatggtgcgaatatgctacgctcaaattcgcttcttgacatacttgtttttggcagagcttgtgcaaacagggtagcaaatatttctaaaccacgtgagaagcagaaacctctggaaaaaga

SEQ ID NO: 77770 - DNA, 326 bp, Zea mays
ggccctagtcctctgtaacttctccctccgccgccactcccctcccattcaccgccaccgccaattccataccgtcctccgccacctctgctgagagcgagaagagatggcaggcaagggtgatgggccggcaatcggcatcgatctcggcacgacgtactcttgcgtcggcgtctggcagcacgaccgtgtcgagatcatcgccaacgaccagggtaaccgcaccacaccctcgtacgtcgccttcaccgactccgagcgcctcatcggagatgcggccaataaccaggtcgccatgaaccccatcaacaccgtctttgatgcca

SEQ ID NO: 77771 - DNA, 312 bp, Zea mays
acccacgcgtccgcccacgcgtccgcccacgcgtccgtgaagaacaaggttttctccattgatctcgtttcagatgaaccttcagtgattgcttgtgatatggctcatactccattggagccatcctctatagatgttgcaatattttgtctttctttgatgggaatcaactatccaagttatttagaggaagcaaatagggttctcaaaccaagtggttggcttgttattgctgaagtgcgaagtaggctagacccgagcaacggaggtgctgatcctgaaaagttttctaaagccattatccagcttggc

SEQ ID NO: 77772 - DNA, 314 bp, Zea mays
accacgcgtccgcccaagcacgtccggttcctccccgcgtcaagctcggcatccagggattcgaggtgtccaagctggggttcgggtgcatggggctgacgggcgcgtacaactccccgctggacgacgaggccggcatcgccgtcatcgcgcacgctttcagccgcggagtcaccttgttcgacacctccgacgtatacgggcccctcaccaacgaaatcctcctcggcaaggcgctgaagcagctgccgcgggagcaggtgcaggtggccaccaagttcgggatacggcatgacgagagcggcacgcggacc

SEQ ID NO: 77773 - DNA, 316 bp, Zea mays
acgccactccccaaccgtcccatgacgcaggctcagcactagcagccatgccgcacctcgtcctgcttctcttcctcggcctcggcgggctcctgcccgcggcgtcggccgccgacgagcagttcgtgttcgacggcttcaagggcgcgaacctcagcctcgacgggatggccacggtcacgccggacgggctgctcatgctcaccaacggcaccagccagctcaagggccacgccttctacccggcgccgctgcggttccacggggcgcccgacggcacggcggcagcgatggagtccttctccacggccttcgt

SEQ ID NO: 77774 - DNA, 402 bp, Zea mays
agcttcctgctgagctcaaaccccttccgcctccccatcaaccattccatccgccgccgccgccgcctgcgcatgatgaatgtggataagctcaacaagatggctggcgctgtatgcaccggacggaacggcagcatgcgcatgaagaagaaggcagttcacaagaccacgatcacagatgataagcggcttcagatcaccttgaaaaggatcagggggaacaccattcctggtaacgatgaggtcaacatcttcataggacgatgttgttatccagtttcagaacccgaaagtgcatgcatccattcctgcaaatacataggtggttagtggagtaccccagacaaaaagtctgcaagaccttctgccatcagttatcaaccaactgggccttgataacct

SEQ ID NO: 77775 - DNA, 229 bp, Zea mays
gcatacactccgttcactctgctatttctctagattccgtctacgcctacaacttttgggtcctctcttctttccacgatatcgtttctagtggcttcggacacaatcgaaggtccggctattgggattgaactctgaaccaactaatcttgcgtcggactgtgacatcactgccggattgagatcatcgccacctatcatgggaatggcatcagtctgtcatatgtcc

SEQ ID NO: 77776 - DNA, 344 bp, Zea mays
cccgggccgaaacacgcgtccaacgcagtggaagaagcatatcgaggagtcgattgcggtgacggaggtccattcggagcagttgtcgtctgtaatgacgaagtagtagtcagctgccataacatggttctgaagcacactgaccctactgcgcatgctgaagtaactgcaattagagaggcttgcaaaaagcttgggaaaattgagctctcagactgcgaaatttacgcgtcctgcgagccatgcccaatgtgctttggtgcagttcatctctcccgaatcaagaggctggtttatggggccaaggcagaggctgccatcgccattggatttgatgacttcat

SEQ ID NO: 77777 - DNA, 317 bp, Zea mays
accccgctccgcctccactcctcgcgccgctgccgcatctcctctacaggtaagaaggagagaaagagggcgaaatggtgaagcacaacaacgtcatccccaacgggcacttcaagaagcactggcagaactatgtcaagacatggttcaaccagcccgcccgcaagcagaggcgccgcatcgcacgtcaaaagaaggctgtgaagatattcccacgaccaactgctggccctcttcgtcccattgttcaatgccagactctcaagtacaacatgaagtcaagggctgggagaggctttacccttgaggagttgaag

SEQ ID NO: 77778 - DNA, 315 bp, Zea mays
ctccaccgtcgtccgccgccgccgaaggacggaaggagaagagggtacggccgtctcctcgcccccatggcccacgagaagaagctgtccaacccgatgcgggagatcaaggtgcagaagctcgtcctcaatatctccgtcggggagagcggcgaccgtctcacccgcgccgcaaaggtgctcgagcagctcagcggccagacccccgtcttctccaaggcgaggtacacggtgcggtcgttcggcatccggcgtaacgagaagatcgcctgctacgtcacggtgaggggcgagaaggccatgcagctgcttgag

SEQ ID NO: 77779 - DNA, 370 bp, Zea mays
agcgtgcttcctgctccgcttctctacgggtgggcatgccatgggcagcttcgggctgacaggcgtgtccgtgtgggaggcgctggtgctggagatcgtgatgaccttctggctggtgtacatcgtgtacgccactgcggtgtaagcgaagaggggcagcctgggcaacatcgcccccattgccatcggcttcatcgttcgggcaaacgtccaggatgggccgcaccctcgacggcgcgtccagtgaataccgccgtgtcgttcggcctcgccctcgtcagctggcagtgcggctaccaatgggtgtaatgagtcgggcgtctcatcggatgcggacactccggcgttatctacgagctgctcttcatct

SEQ ID NO: 77780 - DNA, 400 bp, Zea mays
ctactactcaagtatccatccttattgagtacagtgttgatccatggactcggaaggagttgtagcagcaaaggtggcagatgagactactaaaccggcaatccaagaagacggcgccgagagcaaggccgggatgactgatctgctgatgctgaccgacaagtcgcagctgcaggcgctggcgatgctgctgcggaacaacgaggagctcatgatgagccaggcgatcaagtcggagacggagcgcattgagtacctcaagacggtgagcgactgctacacgcggacgatgaagctcctcgacgattccatggcggccaggaccacgtacgagcgttcgggcggaatgaggagcctcgtcgcccgggacatggacgactacgtcgtctacggcctcaac

SEQ ID NO: 77781 - DNA, 409 bp, Zea mays
agacagacggtggccggacaggtttcttcaactcgatcaccctgaagcccggcgacttctgtggcgaggagctcctcggatgggcgctcgtccccaagcccaccgtcaacctgccactgtccacccggacggtgaaggcggttctcgaggtcgaggcgttcgctctccaggccgacgacctgaggttcgtcgccagccagttcaggcgcctccacagtaggaagctgcagcacacgttccggtactactcccaccactggaggacctgggccgcgtgcttcatccagcacgcctggcgccgcctgaggaggaggaagatggccaaggacctgagtctgagggagtcgttctcgtccacgggaccgtacgaaggcgatggcgacgacgcctcctcccctgaacagagtat

SEQ ID NO: 77782 - DNA, 329 bp, Zea mays
cgtccaacataaggaccactcaaagttcaaaagaaagggtgaagatctcttttatgagcacaccctgtctctgaccgaagctctatgtgggttccaatttgttcttacacatctggacaacaggcagcttctgatcaaatcaaaccccggcgaagttgttaaacctgacgaattcaaggcgagaaacgactaggggatgcctatttaccagatgcccttcatgaacgggaagctctacattcatttcacagtggagttccccgactcgctggcgccagagcagtgcaaggctctcgagtcggtacttccgccaaagccttcgtccaagc

SEQ ID NO: 77783 - DNA, 338 bp, Zea mays
gatgtttaccagaatgcccgtgcatgccttaggttgcgtgtggcgtgtgagaagcttaagaagatgctgagcgccaacccagaggccccactgaacattgagtgcttgatggatgagaaagatgtgagagggtttattaagagagaggagtttgaacacatcagtgcacctgtgctggtacgtgtcaaaggacccttggagaaggccttggctgaagctggcttgacaactgaaaatgtgcactttgttgaggttgtcggatctggttctcgtgttccagccataatcaagataatcactgatttttttgggaaggagccgagacgaaccatgaatgc

SEQ ID NO: 77784 - DNA, 348 bp, Zea mays
acgcgtcggaccacgcgtccgcccaagcgtccgcccacgcgtccggttatgaagagtggcaagtacactctcggctacaagaccgtcctcaggactctcaggaactctaagtcgaagctagtgatcatcgctaacaactgcccgccccttcgtaagtctgaaattgagtactatgctatgctggccaaggtcactgtccaccacttccatggaaacaatgtcgaccttggaactgcctgtggtaaatactttcgggtctgctgcctcagcattattgatcctggtgattctgatatcatcaagactacaccgggtgagcagtaaagaagcccctgcagtagggggatc

SEQ ID NO: 77785 - DNA, 343 bp, Zea mays
agcccccgctgtacaggagcgtcagggcccgagacttcatcgcaaagttcaacaccataggactcgatggccgcgcgctcgaccacttcaggctctagctacctggctacgtttcagattcgtcctttcatttgctttggtctctaattaataattccaaataataagcccgcggatggacctctgtctgtctgtctgtaatttagtttccaagtttaggtagtgtttggttactagggactaatttttagtccctctattttattccactttagtttataaattgcaaaatatggaaactataactctattttagtttccatatttgacaatttagttacta

SEQ ID NO: 77786 - DNA, 334 bp, Zea mays
aacacgcgtccgacggtactccagccgctaccctgcgattccgccagtacgccaccaccaccgagcctggactaccgccgccgcccttcgccgatatcttcagcggcgaacagcgcccaccagatcccgcccctgcgatggagtccgtggtgaacccgaaggcatacccgctggctgatgcgcagctgacgatgggtatcctcgatatcatccagcaggccgccaactacaaacagcttaagaagggagcgaatgaagcgacgaagaccctgaataggggcatatcggagtttgtagtgttggcggcggacacagagcctctcgagatcctgct

SEQ ID NO: 77787 - DNA, 335 bp, Zea mays
agggagagaggacgttcatttccgcgtcgtctccgcccgcagccggcagccccaccacccaccacatggccgccatgccgggtggggcccacggcgccggcgccgcggacccgatgcaggtggaccagccgctcccccctgccgccgcaggcacagcacacgcccccgccgacgccaagcatgctggttctatgattgaagggagtgatccggtcacaggccatataatctcgacaaccattggagggaagaatggagagcctaaaaggactatcagctacatggcagagagagttgtgggaactggatcatttggaatcgtcttccaggcaaaa

SEQ ID NO: 77788 - DNA, 309 bp, Zea mays
aaagcagcgatccgaagctcaatcaattcactcaaacctcttccccaaatcttcgattagattctcgttgacaagaagactagaaccgaacctgaccatgtcgctgatccgccgcagcaacgtgttcgatcccttctccctcgacctctgggacccctttgagggcttccccttcggctccggcaacagcagcagtctcttcccctcgttcccgcggaccagctcggagaccgcggccttcgctggcgcgcggatcgactggaaggagactccagaggcgcacgtgttcaaggccgacgtaccggggct

SEQ ID NO: 77789 - DNA, 377 bp, Zea mays
caactccgccctctcgcaatcatcgccgacgaggacaccgtcactggcttcttgatggccggcgttggcaatgttgatctgcgcaagaaaaccaattacctcctcgtcgacaacaagacgacagttaaacaaatcgaggacgcgttcaaagaatttactgcaagggaggatattgctattgtgctcatcagtcagtatattgccaacatgataagatttctggtggatagctacaacaagccagtccctgctattctggagatcccatccaaggaccatccatatgatccagcgcacgactcggtgctgtctcgagtgaagtatctcttctctgcggaatcggtggcgtctgataggcgatgaaggcatccttgtgt

SEQ ID NO: 77790 - DNA, 287 bp, Zea mays
ggaggaggcggagggggatgccatgggcaaggacgtcgtggtccagagcggcgcgggcggcggggatttcgccgccaaggagtacactgacccgccgccggcgccgctggtggacgctgcagagctgggttcgtggtctctgtaccgcgcggtgatcgcggagttcatcgcgacgctgctgttcctgtacgtgacggtggcgacagtgatcgggtacaagcaccagacggacgcttctgcgtctgcgtcgggggccggggccgacgccgcgtgccggcgcgtgggcg

SEQ ID NO: 77791 - DNA, 340 bp, Zea mays
accacgcgtccgatgcaccatgcggtttaccgtgttggggatctggaccgcacaatcaagtactacacggaatgctttgggatgaaactgctgaggaaaagggatgttcctgatgagaagtacaccaatgccttccttggctttgggccagagaacaccaactttgcagttgaattgacatacaactatggcgttgacaagtatgacattggaacgggctttgggcatttcgcaattgctaatgatgatgtgtacaagttagctgagaatatcaaatccaagggtggtaagatcacccgcgaacctggtcctgtcaagggaggatccactgttattgcct

SEQ ID NO: 77792 - DNA, 366 bp, Zea mays
ccgggccacatcgatccaaccccagccacgcctcggagacaggccgacagcccacgagcgagatccaacccaagttccgacgccgcgggcgagaccgatcagatccacctcagccgtctcggatggcgtcagcatcgacggcggtgcggatgctccccgacggcggcgctgacgacgaggagcggtggctcgccgagggcatcgccggcgtccagcagaacgccttctacatgcaccgcgccctcgattccaacaacctcaaggacgcactcaagtactcggcgcagatgctctccgaactgcgcacctcgcgactatcgccgcacaagtactacgagctgtacatgagggcgtttgatgagatga

SEQ ID NO: 77793 - DNA, 379 bp, Zea mays
acgcgtccacccaagcgtccgcccacgcgtccgatcacaattcacacagcgaaccgtgaatccaacacagcaacatgcagagcagcgatccgacatccgatagatggacgcggtgatgttcgggctggagactcccctgatggcggcgctgcagcacctgctggacgtgcccgacggcgacgccggcgcgggcggcgacaacaagaccggcagcggcggcagcgccacgcgcacctacgtccgcgacgcgcgcgccatggcggccacaccggccgacgtgaaagagctgcccagcgcgtacgcattcgtggtggacatgccggggctgggcacgggcgacatccgggtgcacgtggaagaccatcgggtgctggtggtc

SEQ ID NO: 77794 - DNA, 357 bp, Zea mays
gtacccgcaagaagtcctttcggggcggtgatcacgccaagaaaccctcaagtacatgtccaagtaccagggacttgagatcacgcaggtggactgcgcacgggaggcaatgaggctgatccacgcggaagacaagaacctcaaggccgaggactcagcgtgggagctgaagaagaattcggcaacggcgtgagcaccatggtcctcgtctacaacgccaccggggccagcctgagcctggtggacgacgggaaagactggatgggctccgtctacagctcgccgatcccggacaccttccacaacgggcagtggatcgccatcctccacgtcaagcccggctcgctggcgcagggc

SEQ ID NO: 77795 - DNA, 340 bp, Zea mays
accttttcttgtgcgcagccgcagccgctgcttttcgttcgtcttcatcctacgcgagggcaaaacccacaaaccctctccctcccgtactccggcctacacatccaggggcgatgacgctgggtagctccggcgccggatcgagcgtcgtcgttccccgaaacttcaggctattagaggagctcgagcgtggagagaagggcattggtgatggaacagtgagctatggaatggatgatgccgatgacatctacatgcggtcatggactggtaccatcattggccctcacaatactgtacatgagggtcgcatctaccagctgaagttgttttgtgacaa

SEQ ID NO: 77796 - DNA, 347 bp, Zea mays
ggactccagggtctgaaaaaggagttcagctataacaagatcctcaaggatctgaagaaggaattctgctgcaatggtactgtagttcaggacccagagctaggccaggtcattcagctccaaggtgaccagcgcaagaatgttgctactttcctagttcaggctgggattgcgaagaaagagaacatcaagattcacgggttctaagggacctgtaaatgcttgtgccctatattgtgtgcctcaacatattggggagcttgaagcatcgacagttgctagtcattgcttacttatataagaacataagtagtatttgctattgtcaagtgtgccttgcttgatgc

SEQ ID NO: 77797 - DNA, 360 bp, Zea mays
cgcgggtcgcaccacgcgtcggcccatcagctcacaggccggcagccgatcgatcgagctccgcggtcgctagcacagccggccactgcgcacgacggtgctggtaggttgcatgcacttgcaggatggcgcatgtcgctaagacgcttcgccttgtggccctggtggtcgtgtcggcagtggagctgtgccgcgccatcgacttctacgagcgggacctgacatcggactacgcgctgtgggacctgtacgagcggtggcacacgcaacaccgggtgcaccggaaccacggcgacaatgggcgccggttcgggagcttcaaggagaacgcgcgcttcatccacgcgcacaacaagcgcg

SEQ ID NO: 77798 - DNA, 328 bp, Zea mays
atacaatttagaagcgcccctcctcctctcccccatccgtacccaatctaatcgacacccggccgagatgggccgcaagttcttcgttggtggcaactggaaatgcctggaagagcccgcgttcttcttccaatgcgcctgtgcttccaggctccagcccagagcaaatcgtaaaagcccttcataagtttcgtgatgcatgttgtctgtaggagcagaggagttcgatatccaacttttggagacccattctcgtttgctgcacgaattaaccttacgtttcttgtcatggagctcggggcttgctcaatctgagcataggttggag

SEQ ID NO: 77799 - DNA, 333 bp, Zea mays
attcttcgtaagccttcaaaccgacgaatttgagcaactgcacccagagcgcgatccattgccggggaagaagcaacttgttgcgagcctcctctatggcgagctccgaccatggttccaccaccgcccccaaggacgtgccgggcagctacggcctgccgctggtgggcgccgtgcgcgaccgcctcgacttctactacttccaggggcaggacaagtacttcgagtcccgcgtggagcgctacggctccaccgtggtgcgcatgaacgtgccgccgggccccttcatggcgcgcgacccgcgggtggtggcggtcctggacgccaagagct

SEQ ID NO: 77800 - DNA, 335 bp, Zea mays
aggcaggtcggaccccgcaaatcgccccccaaaccaaccgggccggccgacacaagcagcatcccgtcggcggcgatggacctggcgtcgagcgacctcgcggcgctgggcgcggcggagctgatccgcgtctcggcgtcgatcccgcgcgcggctccgcgcaccttcgcgctgctcaccgcctgcctcgtcttcccgctctccttcgccgtgctcgcgcactccctcttcacccaccccatcctgctccgcatccggggcgccgcccactcggggttcgcgccgtggctcggcctcttcgcgtaccagttcatctacctcatcgtcctcttcac

SEQ ID NO: 77801 - DNA, 392 bp, Zea mays
  unsure (1)..(392): unsure at all n locations
acccacgctnccacaccagngctcgcttcgaggagctcaatatggacttgttccggaattgcatggaacctgtggaaaagtgcttgcgcgacgccaagatggacaaaagcagcgtgcacgacgtcgtgctcgtcggtggctccacccgcatccccaaggtgcagcagctgctgcaggacttcttcaacggaaaggaattgtgcaagagcatcaaccccgacgaggctgtggcgtacggcgccgctgtccaggctgccatcctcagcggcgagggcaacgaaaaggtacaagatctgctcctgctcgacgtcacgccactgtctctcggcctggagactgcaggtggcgtcatgacggtgctgatcccgaggaacaccaccatcccgaccaag

SEQ ID NO: 77802 - DNA, 388 bp, Zea mays
gggcggacgcttgggcgagcgctatcatgaccggcggcacgctcaggttcatcggctctggcgcagcaccgctcggcaaggacgtgatggagggagtggccaagattttccagaagctgtgattgcccagggttacggaatgactgaaacttgtgggatcatatctttagagtacccagaaaaaggacaaattcgtcaatttggttcaactggagcacttgtctcaggagttgaagcaaaaattgttgatgtagaaacattgatatgtctgccaccaaatcaactaggagaaatttgtgttcgaggaccgaacataatgcaagggtatttcaacaatgtgcaagctactgaatttacaatcaagcaagggtggttgcatactggtgat

SEQ ID NO: 77803 - DNA, 334 bp, Zea mays
tctccacctcaaatctctatcatgtctgcagcacatgtgtcacgctctttacgagtacaaatagcataaaatgattcttcaagtcttttaactggtctcaacagtgaaaagttttagagatgggttgttgttgggtctaactcaagatggagatagttttagcaaattctaatttttggtatcatggcaacaccaagtaatgatactagtaggatccaacaggtgattgggacggtgacactggaacttaaaaataagggtattgacatcaaaaatagtaaaatactagtgattttttttgcagccagagaagcacaagtcaaggatagttatg

SEQ ID NO: 77804 - DNA, 345 bp, Zea mays
ggacttctgcttactcacatgagttgccacgatatggtctcgaagttggtctgaccaactatgcagctgcctactgcactggccttctgttggctcgccgtgtgctcaagacccgtggtttagataaggaatatgagggcaatgttgaggccactggtgaggacttctctgttgagccagctgatgagaggaggcctttccgtgctctcttggatgttggccttattaggactacaactgggaaccgtgtctttggtgccctcaagggagctttggatggtggcctggatattcctcacagcgagaagaggtttgctggtttcaagaaggatgacaagcagctgg

SEQ ID NO: 77805 - DNA, 335 bp, Zea mays
acccacgcgtccgcggagcgtaaggcgaaggagtagcagcagcaggcggcgccgagtagcggctccccatctcgagcttgccaccatggctagaggattgaagaagcatttgaagaggctcaatgcccccaagcattggatgctggacaagcttggcggagcttttgctcccaagccatcttctggacctcacaagtctagggagtgcctgccactgatcctcatcatcaggaacaggctcaagtatgctcttacataccgtgaggtcatttccatcctgatgcaacgccatgtacttgttgatggcaaggtcaggacagacaagacctaccctg

SEQ ID NO: 77806 - DNA, 407 bp, Zea mays
acggacgcgtgggtgctgctaagtatttgatggaggactgtctttgtgtatgcttcctgcaggtgaaatgtgatctgtagtgatgctgtccccgaagttcagcaagcatacacaaagacagtcctgctgctaagtatttgatggagcgtggtgtggaccggaaggacttcaactcatatggtagccgtcgtggtaatgatgaagtaatggcaaggggaacgtttgcaaacattacgatcgtgaacaagtttttgaacggagaagttggacccaagaccattcatgttcctactggggagaagctttctgtttttgatgcggccatgagatacaaatctgatggccatgctactataatcctcgctggtgctgagtatggaagcggcagttctcgtgattgggctgct

SEQ ID NO: 77807 - DNA, 348 bp, Zea mays
ggaccggagcacgacgcacgcagagccgcagagatccgtcacactgcaagttttgaaaactgaactgtaagatggcatcagcagagctttcccgtgaggaaaatgtgtacatggcgaagctcgccgagcaggcagagaggtacgacgaaatggttgagttcatggagaaggtagcgaaaactgttgactcggaggagctcactgtggaggagcgcaacctcctgtctgttgcatacaagaacgtcattggagcccgccgtgcctcatggcgcatcatctcctccatcgagcagaaggaggagggtcgaggcaatgaggaccgtgtaacactcatcaaggactaccgtg

SEQ ID NO: 77808 - DNA, 358 bp, Zea mays
cgcgggccgtaccacgcgtcggcccttcttcttcttactcctcctcctagcacagctagcgcctgctccccttcgcctgtgatcatgtcttgcagcagcggcaagtgcgactgtggctccagctgctcctgtggcagctcatgcaactgcatgtcgcctaacgtggagaccgccgccgccagcaacatcaataccacggtcctcgccgcgccgagcatcactgccagcgccggcggcttcgaggcggccaccgagggcggcggctgcgactgcagcacctgcaactgcggcaccaactgcggctgctcctgctgcagctgcaactgaccctgtcatgcgatggcgcacgatagtctag

SEQ ID NO: 77809 - DNA, 332 bp, Zea mays
aatcgctaacgactcacacaaatcgaatctggaaattcttcccccaatccgtcccaaactcgcctcctcacggccgccgccgccgccgccgccgccgctgctcggtaatccctcatcctccccacctgtccgctcgtcagcgtcatgtccggcaccaccccgacccctacacctacaccgacgccgctaccgccgccgccgccgccgccgccagccgctcgccccgcacggtacgacttcctcaactccaagccaccgcccaactacgtcgcggggctcggccgtggcgccaccggcttcaccacccgctcggatatcggaccggcccgcgc

SEQ ID NO: 77810 - DNA, 335 bp, Zea mays
acaccattcctcctccggatttcgcagtcagcggtggtgaaggtagcgggcgcggaggaagatggggctcgcgttcgggaagctcttcagccggctcttcgccaagaaggagatgcggattcttatggtcggtctcgacgccgccggtaaaaccaccatcctctacaagctcaagctcggcgagatcgtcacaaccatccccaccatcggtttcaatgttgaaactgttgagtacaagaacattagcttcacggtctgggatgtcgggggtcaggacaagatcagacctctctggaggcattacttccagaacacacagggtcttatctttgttg

SEQ ID NO: 77811 - DNA, 336 bp, Zea mays
acaccagggctcgcttcgaggagctcaatatggacttgttccggaagtgcatggaacctgtggagaagtgcttgcgcgacgccaagatggacaagagcagcgtgcacgacgtcgtgctcgtcggtggctccacccgcatccccaaggtgcagcagctgctgcaggacttcttcaacggaaaggaattgtgcaagagcatcaaccccgacgaggctgtggcgtacggcgccgctgtccaggctgccatcctcagcggcgagggcaacgaaaaggtacaagatctgctcctgctcgacgtcacgccactgtctctcggcctggagactgcaggtggcg

SEQ ID NO: 77812 - DNA, 368 bp, Zea mays
gcctgccacaccaggaatcccgtttaatttatttatgctcaccaatttaagggcagaacttacggacctcaagctcttggttactcctgatcttctctaggcgactaggcacaattgccctctggcaaaatgccatcagtttatctttacatccctaacattatcgggtattttaggatcatcataaatttcattgcatttgcggtttgctattccaacaaggctctctttgctatcctgtacttcatcagctttgtccttgatggtgtggatggttggtttgcaaggaagttcaatcaagcatcaacctttggagctgtgttagacatggttacagatagggttagcactgcttgtttgttggccct

SEQ ID NO: 77813 - DNA, 316 bp, Zea mays
cacctcagggaagctggcatgtcaaccttcattctcactgctgaacttgctgctgctccttcagcagttggacgatgaggacaaactgcaacaagtgtcaaatgctctctcagagttcattcggaaagccacggtggtttgcggagaatgagaaatgttggagcggcgtgtaggatcaccgaatgcatagtacggctccatacttctgctctgtttctgcctgtaactcaactgtgaaaagttttaaactttcagaaagaaaaaccgtgagaggtgcaggttcaagttaatatgaataataaagtgtttttttatt

SEQ ID NO: 77814 - DNA, 363 bp, Zea mays
ccgggccgaacacgcgtccgaccaagagaagcagcaaccgttgctgctgccgcgtccacagaatggggggtttcgtgaagacccataagaccaatgcgtatttcaaacgtttccaagtgaaattcaagagaaggcgggctggcaagacagactacagggccaggataaggctgattaaccaagacaaaaacaagtacaacacacccaaatacagatttgttgtgcgatttaccaacatggacatcactgcacaaatcatatctgctactatagcgggtgatatggatcttgcttctgcctactctcatgagttgccacgatatggtcttgaagttggtctgaccaactatgcagctgcctact

SEQ ID NO: 77815 - DNA, 342 bp, Zea mays
actccctccacgtcgtctcggtcttcctctcctgtaatcccgtgacacgggtggctgcgacggcgaatcagatccctacccgtggcgttggtcgtgaattggcgccgtctccccctgccagccggattccctgctttgttctcaggcagcattttgttcactagtgtggtagctttgttgattggagtgcgcaatgggaggctgtgcgggaaaggtacgtcgtgatgacgaagaaaagcttgattttaaagggtggaatgttcatattataacaagcaatgagggctgggaccagaagattgcagaagcaaacagagatgggaaaactgttgttgcaaattt

SEQ ID NO: 77816 - DNA, 331 bp, Zea mays
agaccggcggtcccttcggtactatgaagtgcccggcggaactggctcacggcgccaacgcggggctggacatcgcggtgcggctgctcgagcccatcaaggaggagttccccaccctctcctatgccgatttctaccagcttgccggagttgtggccgtcgaggtcaccggtgggcctgagatccccttccaccccggcagggaggacaagcctcagccgccacctgagggccgtcttcctgatgccaccaagggttctgaccacctgaggcaagtctttggcaagcagatgggtttgagtgatcaggacattgttgccctctctggtgg

SEQ ID NO: 77817 - DNA, 338 bp, Zea mays
aacatccatgaacatgaatgcaatggtccagtaatcttgaaggttaactcctgctgtagtcgggacctttcagagaaagtcattggagtttgctttgtagcacaagatttgaccaggcagaagatgattatggataagtatactaggatacaaggagactatgttgccatagtaaagaaccccactgagctcatccctcccatatttatgattaatgatcttggttcctgcttagagtggaataaagctatgcagaagattaccggtataaagagggaagatgcgataaacaaattgttaattggggaggtcttcacgcttcatgattaatggctgta

SEQ ID NO: 77818 - DNA, 344 bp, Zea mays
acagacccagcagctattgtggtcgtccctcagccgcgtcgcaccgcatcgcattctacgattcgaagctctctctgctcgcagccatggcgaagaattacccaaccgtgagcgccgagtacagcgaggccgtcgagaaggccaggcgcaagctccgcgccctcatcgccgagaagagctgcgcgcccctcatgctccgcctcgcgtggcactccgcggggacgttcgacgtgtcgtcgaggaccggcggtcccttcggtactatgaagtgcccggcggaactggctcacggcgccaacgcggggctggacatcgcggtgcggctgctcgagcccatcaaggag

SEQ ID NO: 77819 - DNA, 382 bp, Zea mays
cacacaccctgcacgacgcatccgacctcgccatgtcaggcgcgcgacgggtctacagaacaacggcgggacctgcgtggccatcgccggcgctgattactgtgtcgtcgctgcggacacccgcctctctgtaggatacagtatcctcacgcgtgatcactccaagatctgcgacctggctgacaaatgtgtactggcatcttctggctttcaaggtgatattaaggctctgcagaagaacctagctgccagagaattgctgtaccaacaccagcataataaaaggatgagctgccccgccatggcacagctcctctccaataccctgtactacaagcgattcttcccatattacgccttcaatgtgctcggtgggcttgac

SEQ ID NO: 77820 - DNA, 342 bp, Zea mays
accacaacagcgaaggagaaagcagaccaacctagccacccagggagaaagaggccaaaagggaggggagagtgtcgtcatggcttccattgtcgcttccaggagggccgttcctctagttcgcgctctggagaagctcatcgcagcgtcctccgctcccgggactggctccgccctcaggccggtggcagtcgccggcggcctccgcggctacaacaccggcgctccgctccgacgctacgaaggggccgagtcggaagacgatagcgtccgcgagtacgatgggcggcactgcggccgggactacgctgtgcccagcctgttctcatgtagtcgtcatct

SEQ ID NO: 77821 - DNA, 320 bp, Zea mays
ccgggccgaaccacgcgtccgaaaccatggggcaccagcaggcgcagcacggcaaggacgacaccgaggagctgcttgcagcccaccggcagctgtggtgccatgccctgggctacgtcaagtccatggcgctcaagtgcgccctggacctgcgcatccccgacaccatcgaccgctgcggcgggagcgccaccctgggcgagctgctcgccgccagcgagatcccggcgtccaaccacgactacctccggcgggtcatgcgcacgctgacagccatgcgcatcttcgcggccagccacgaccccgccaaggccgacgac

SEQ ID NO: 77822 - DNA, 334 bp, Zea mays
accacttgctcgccttcgccccttctgtctcccttcgtccgtagcagaccaggaacgcccaaggcgctagcgtctccaagatggtgctgcaaaacgacattgacttactcaatccaccggcagagcttgagaagctaaagcacaagaagaagcggctagtccagtcccccaactccttcttcatggatgtcaagtgccagggctgtttcagcataaccactgtgttcagccactcccagactgtggttgtgtgcccaggctgccaaactgttctgtgccaacctaccggtgggaaggccaggctcaccgaggggtgctccttccgtcgcaaggg

SEQ ID NO: 77823 - DNA, 390 bp, Zea mays
atcctccgtggtgttgccaaccctctgggcataaaggtgagtcgacaacaatgaatccccagtgagttggtgaagctgattgatattctgaacccttcaaacaaacctggaaggatcaccataattacaaggatgggggcagagaacatgagggtgaagttgcctcatctcatccgtgctgttcgcaatgctggactgattgtcacatggattactgatcctatgcatggaaacaccatcaaggccccttgtggcctgaagactcgtccatttgactccattctggctgaagtgcgtgccttcttcgatgtgcatgaccaagaatgaagccaccctgggggcgtccaccttgaaatgactgggcagaacgtgaccgagtgcatcggtgga

SEQ ID NO: 77824 - DNA, 301 bp, Zea mays
cacgcgtccgtatagctgtctgcctgcggtgtttgactatgcttaggacgctctggtgtactaaattcaatctatatgcgcatgatgtcagatgaacgcttaagatctgatgcaactgctgttctcattgatcgcccttctggacaaatcttgtcagcactgactggtcactcgaagaaggttacaagcgtagaatttgtaggcgactctgatcttgttttgaatgggtctgctcacaagagagtccgtatctggcggcatcctgtggatgggaattatccctgtgggtataccttgaatg

SEQ ID NO: 77825 - DNA, 443 bp, Zea mays
acgcgtccgtaaaaaacttataataagcttgagtagggacaatgcaattcttctatttgatagggagacataacatgagagaataattgaagagggtagtacaattacttcattttctctatcagaagatggtgatttcctgcttgtaaatcttgtaagtgaagagattcatttgtggaacataagaaatgatcctgttcgagtcaaccgatacaatggccataagcacagccggtttgtgataaggtcttgttttggcggatctgagcaggcgttcattgctagtgggagtgaagattcacaggtctacatatggcatagagccactggtgatctcattgagactctcgctggtcactcgggcacagtcaactgcgtaagttggaatcctgtgaatccccacatgctcgcatcagcgagcgacgatcacacagttcgtatat

SEQ ID NO: 77826 - DNA, 447 bp, Zea mays
ggtccacccacgcatccggagatgtgttcactgccacagtactagatgtagagaaatgcaaagaactaaagatgggttcctacttgggagttgctgcagcttctgctaaccctcctcacttcatccatttgtgctacaaacccactgatgggaacgtcaagagaaagctggctattgttgggaagggtttaacttttgacagtggtggctacaacattaagaccgggccaggctgcagcatcgagctgatgaaatttgacatgggaggctctgcagctgtatttggtgcagctaaagctttgggacaaatcaagcctcctggagtagaggttcactttatagtcgctgcctgtgaaaatatgatcagtggcacaggcatgaggcctggtgacattgtaactgcttccaatgggaagacaattgaggtaaataacactgacgcagaag

SEQ ID NO: 77827 - DNA, 441 bp, Zea mays
ccacgcgaccgcaaccccctcctcgccgctcgccgttgaagaggtaggcccacgggccggcgagaatggaggcggcgacgatggcgtggacggcggcggtggtcggggcggggctggtgtactggttcgtctgggtgatgggcgcagcggaggtgaagggcaagcgggcggtggatctcaagatgggatccatcacgcgggacaaggtgcatgacaagtacacgcagtactggtccttcttccgccgccccaacgagacagccaccacagctgcgtctgctgagaatgtgccggccttcgtcgacaccttctacaacctcgtgaccgacatctacgactgggggtggggccagtccttccacttctcaccgtctctcgccggccgctctcaccgcgacgccacgcgcgtccacgatgagcgcgtcgccgacctcctcggcg

SEQ ID NO: 77828 - DNA, 379 bp, Zea mays
acagccaagaaaagcacatacccgagtcgccgaaacaacaacaatcccaatcccccctcgtcactcaaaactcgagcaacaatgtcgctgattcgccgtggaagcgcattcgaccccttctccctcgacctctgggaccccttccagggctttcccttcggctctggaagcagcagcagcagcagcctgttcccctcgttcggaggcaccaccaccagctcggagacggccgccttcgccggcgctcgcgtcgactggaatgagacgccggaggcgcacgtgttcaagaccgacgtgccggggctgaagaaggatgaggtgaaggtggagctggaggacggcaacgtgctccagattagcggccagcgcagcagggagc

SEQ ID NO: 77829 - DNA, 274 bp, Zea mays
cctacagtgagcaggagatcattataactctcaacagacggagcacagcgcagctacttgccacattcagtagctacaaggatcagttcactcatgcaatcaacaacgatctgcaagctgaccccacagaggagtttcgctcatcactgcgggcaatcatcccgtgcttcacctgcccagacagatacttcgataaagtcagtcaacaggctcttggaggcatgggcactgaatacgatgacgtcaccatggtcgtaactacgcacaccgacgt

SEQ ID NO: 77830 - DNA, 371 bp, Zea mays
caacctcacaccacaaacgctcatccagtgctcttttcttctagccgccgccgcaaacgcgtgccaacgctctgcgctcccatcctcccgttcgttgaaggtccttctcaacatggcctccaagacggataagttccgcctccaggcggagatcaacaagctgctatcgcgcatcatcaacagcttctactcaacaatgagatcttccttaaggagctcatttcacactcctctgatggcatggataatatcaggttcgacagtttgacggacatgagcaagctggatgccgacccggagctgttcatctacatcgtctctgacaagagcaacaatattctgacaatcattgacattggcattggtatgac

SEQ ID NO: 77831 - DNA, 426 bp, Zea mays
ccacgcgtacgcacactgcgacccggagttaacgtctcagctgaagcgcgcggcgcggtcgaccgtgtcggcaatgccggggcgcaccgtggcggccggcgagacgcccgtgctgatgagcggcgcagggcacgacgcgatggcgatggccaggctcaccaagatcgggatgctgttcgtgcggtgccgcggcggcatcagccactcgccggaggagtcggtgatggacaacgacgtgtgggccgcggggctcgcgctgttcaacttcatcgaccagaacgcggtgtcagaagaactggatgccgggcagaacgtggtggctgtggcgctggcggtggcagagtcgtgatggttcggtggcgattcttttcagtgggagtaggcctgtagcctgcaactgtacataagacttgttattacattgca

SEQ ID NO: 77832 - DNA, 428 bp, Zea mays
  unsure (1)..(428): unsure at all n locations
gacgaggaggaggacggcgtcgatgacctggacaacgagttcaactgggacggccatgactcgcagtctgtggccgagtccatgctctacggccacatgagctacggccgtggaggtgaccctaatggcgcgccacaagctttccagctcaaccccaatgttccactcctcaccaacgggcagatggtggatgacatcccaccggagcagcacgcgctggtgccttctttcatgggtggtgggggaaagaggatacatccccttccttatgcggatcccagcttacctgtgcaacccaggtctatggacccatccaaggatcttgctgcatatgggtatggtagtgttgcttgganggaacggatggagaattggaagcagagacaagagaggatgcaccagacggggaatgattgtggtggtgatga

SEQ ID NO: 77833 - DNA, 421 bp, Zea mays
gactcgctcgtggctgccctgctcatactgcttgccctcgccgtatcgtccacccgcaacgcacaggacgattccatggccgacaacaccgggacgttggcgggcggcatcaaggacgtgccggggaacgagaacgaccttcacctccacgaactcgcccgcttcgccgtcgatgagcacaacacgaaggccaatgctcttctggggttcgagaagcttgtgaacgccaagacacaagtggttgctggcaccatgtactatctcactattgaagtgaatgatggccaagtgaagaagctctacgaagctaacgtctgggacaagccatgggagaacttcaatgagctgcaggaattcaagcctgttgaagacggtgctagcgcctaacgatctctccttctccatgtgccagcctgaggct

SEQ ID NO: 77834 - DNA, 457 bp, Zea mays
ccggggccacccacgcatccgcagaaactctgtatagtcttggatatgaaaaaagtggagcagttctggaggaggaatcagggattattttacataaccctatggtgaaacttttcagagaacaggtgattgatggaaattgggataatgcggtggttaccatgaatacaattggccttcaagatgaaaacatcttgaaatctgcggcatttttgatattggagcaaaaattctttgaacttctaaaaaatgacaatgtcatgggtgctatgaagactttacgatgtgagatcacaccccttggtgttaatagaaaaagagtgcatgaactgtcgacttgtatgatttcttgttcttcacagcagttgttccttggtttttcaaagcttggaattgattcttctagttcacggttgaagcttctagaggaattgcagaaggtgcttcctccagctgt

SEQ ID NO: 77835 - DNA, 445 bp, Zea mays
cccacgcatccggaaatctatatggtttcttccatttgatcagagtctcgagagcaatgatgcaactgaccgggctaaaatatttttccatggatggatcatgcggcctctaacagaaggtgtatattcagacatcatgagggaagatgttggtgataggcttccagatttcactgaaacatatgccgcacttgtccatggttcatattatcttcttggtctcagactattacgtcactcattacgcccattagaatcatacgattgtgccttcggacgtatacactgccttgatggactcacgcataactctcacatcaaattatgtatctggtcattctcctggtccaccgttcattgcacctagttactagttcccaaaaagcatttactacgtaatggattacttcagaatcacttacggtgaccctttaatatatgtcac

SEQ ID NO: 77836 - DNA, 431 bp, Zea mays
acacgcatccggagtgtttgtccatacgcattggtctgaatactgtagctactagcgcgagtgccactgtgccgcagctgcctgctcgccattactgcaagctgtgttcaatcaaagcttaattaggctccctctacatctgatccagctaagtagctagccagcactacagaagggcgtggcaagaatcaggagagagatagcaggggggctagctagctgagctcgtgcgacgaagaatggccggaattggcaggaacatggtggcgccgctcctggtgctcaacctcatcatgtacatcatcgtcatcggcttcgcgagctggaacctgaaccacttcatcaacgggcagaccaactaccccggcgtggccggcaacggcgcgacgttctacttcctggtgttcgccatcctggccggcgtggtgggc

SEQ ID NO: 77837 - DNA, 440 bp, Zea mays
gtccgggataattcaaagccttgtcccaaatgcaaacggcctattgaaaaaaatcagggatgcatgcacatcacatgcactccaccatgcaaatttgagttctgctggctatgtcttggtccatggtcagagcatggagagaggactggtggattttatgcttgtaaccgctatgagtcagcaaggcaagaaggagcgtatgatgaatctgaaaggagaagagaaatggcaaagaactcccttgagagatacacacattattatgaacgatgggcagccaatcagtcgtcgaggcaaaaggcactgggggaccttcaaagcctacagaatgacaagcttgaaaggttaagtgacatacaaagtcaacctgagtcacagctgaagttcattgtagaggcatggttacagattgttgaatgcagaagggtattgaactggac

SEQ ID NO: 77838 - DNA, 407 bp, Zea mays
gaggcggcgcgggcggacaaggagcaggcggaggaggagttgtgccaagccacaatgggtatctcgcgtgactcgatgcacaagcgccgagccaccggtggaaagcagaaggcctggaggaagaagcgaaagtatgagcttggtcgccagccagccaacaccaagttgtcaagcaataagacagtgaggagggtccgtgttcgtggaggtaatgtgaaatggagggctcttcgccttgatactggtaactactcatggggaagtgaagctgttacccgcaagacccgtatcctcgacgtggtctacaatgcatcaaacaatgagcttgtgaggacacaaacccttgtgaagagtgccattgtgcaagttgatgctgccccattcaagcagtggtacctcactcacta

SEQ ID NO: 77839 - DNA, 406 bp, Zea mays
gcgtccgcaatctcaggtgggcacacgatcggggtgacgcactgcgacaagttcgtgcggcggctgtacccgttcaaaggcgccgccgccggcacgccgatgaacctctacttcctgcggcagatgccgcggacgtgcccgctgaactacggcgcgtctgcgttcgcgatgctggacgccgtgacgccccgcgcgttcgacaacggctactaccggacgctgcagcagatgaagggcctgctggcctccgaccaggtgctcttcgctgaccgccgctcccgcgccaccgtcaaccgcttcgccgccaaccataccgccttcttcgacgccttcgccaacgccatggccaagctcggccgcatgtgcgtcaataccgccgccgacggcgaggtccgccgggtatgca

SEQ ID NO: 77840 - DNA, 440 bp, Zea mays
cacacgcgtccgccacgcgtccgcctgcctccaggctccaacaacccgggagggcgccgtccgcccccgcctccgggagcgatgatgatcgcgcgacgcctgctccgacccaatgcccccgcccaggcaaccagcttattgaagcatgtaactggcaccgcaagtttgcaaggcaatgcggatagcttgttggatggtacagtcagacattttggctcagcaccgtctgcccagcctgaagaaaatgggttcaagggccacggcatgctggcgccttttacagctggctggcagagcaatgatttgcaccctctgatcattgagagatctgagggttcctatgtctatgacattaatgggaacaagtatctggactctcttgcaggattatggtgcacagctttaggtggtagcgagcctcgattactcaaagcagctac

SEQ ID NO: 77841 - DNA, 410 bp, Zea mays
gtccgcaatttcaccttcgatcgcgcagccgctgccgccgccgctactcgccgcacctcgcttcatttcgtgtcgccaagatttgactcgcactaacaccgcaggtattgttggcaaatatggaaccaggtatggtgctctcttgcgtcagcagatcaggacgatggaggtatctcatcattccaagtacctttgcgagttctgtgggaagtttgctgtgaagatgaaagcagttggaatttgggggtgcaaggactgtgggaatgtcaaagctggtggtgcttacaccatgaacactgctactgcagtcaccttcatgagcacgatatgccgcctgagggatcacacctaagcatgacgatagctctttatagtactggggtttcatgtagttgctcttgtcaggcatg

SEQ ID NO: 77842 - DNA, 231 bp, Zea mays
gtgctcatttggagccacctgactaaattttagtcccgttagatcaaatgtttgaatactagttagaatttttaaatatagtataattacaaaattaattacgcagataaagactaaagataaggactaaacggtaagatgagtcaattaggcctgattagtctattattcgtccatgtgatgctacaataaacatttgccaaccatggagtcattaggcttaatgaattt

SEQ ID NO: 77843 - DNA, 349 bp, Zea mays
ttcgccgggccacccacgcgaccggagaaaagcatatatggacgcactttcaaagatgagaacttcaaattggttcacactggacctggagtggtcagcatggctaatgctggaccgaacaccaacggcagccagtttttcatttgcactgtcaagacgccttggttggatggaaggcatgtcgtgtttggccaggtcgtggaagggatggatattgtaaggctgatcgagtcacaggagactgacagaggtgaccgtccgaagaagaaagtagtcatcagcgagtgcggggagcttccagtggtctaagcgttactcatctgttgtccgtttcacttctgacggatga

SEQ ID NO: 77844 - DNA, 442 bp, Zea mays
gggccacccacgcgaccggagatccgaagctcaatcaattcactcaaacctcttccccaaatcttcgattagattctcgttgacaagaagactagaaccgaacctgaccatgtcgctgatccgccgcagcaacgtgttcgatcccttctccctcgacctctgggacccctttgagggcttccccttcggctccggcaacagcagcagtctcttcccctcgttcccgcggaccagctcggagaccgcggccttcgctggcgcgcggatcgactggaaggagactccagaggcgcacgtgttcaaggccgacgtaccggggctgaagaaggaggaggtcaaggtggaggtcgaggacggcaacgtccttcagattagcggcgagcgcaacaaggagcaggaggagaagacggacacctggcaccgcgtggagcggagcagcggg

SEQ ID NO: 77845 - DNA, 421 bp, Zea mays
gccgtgaagcgcatcaaggacgtgactctgtctgaacctgagttccgtgaacgcatttctgagattggcgagcttcagcacgagttcattgtgccactccgtgcttactactacagcaaagatgaaaagctacttgtttacgacttcatgcccaaggggagcctgtctgcagtcctgcacggcaacataacttctggcaagacaccccttaactgggatttaaggtcaagcattgctctagctgcagcccgtggtgttgagtacatccactcaacgagctcaacggcttcccacggtaacatcaagtcatccaatgtcctcctgggcgaatcgtatcaagcacacgtatcagacaatggccttaccgctcttgttggtccatcgtcttcaccgtctcgcgccactggataccgtgcacccg

SEQ ID NO: 77846 - DNA, 435 bp, Zea mays
caggctcgcgtcgacggagacgaagtcctcttcggtaaactcccccgcctctgtttttactgataataattcttcgacgcggttgattattgttatgaaattaaataacgtacgagatctagatccagatctaggagcagtaatctctggatttttttttcaatttttttttttaaaaaaatgaaccttatccctgttgtgttgaacactcggatttctgtgctgaactgtcctaagaactcaatagctgtcgtgtcgtgtaagaaccgcaatctcgcgttgcagagtctcgtgcgatcaaccggtacatcgccagcaagtacgcgtcagagggcacggacctgctccccgcgacggcgtctgcggcaaagctggaagtgtggctagaggtggagtcgcatcacttctacgcgaacgcgtccccggcgggtgttc

SEQ ID NO: 77847 - DNA, 423 bp, Zea mays
cacgcgtccgcaccaattcgctgtcccaggagggcttattggtgtgggaacaaccatggacccaactctaacgcgtgctgataggctggttggccaggttcttggtgaagttggttcactacctgatgtttatgtagagcttgagatcaatttcttcctactccggaggctgttgggtgtgaggacgaaaggtacagagaaggcagggaaggtgtcgaagctcaccaagggcgagatcctcatgcttaacatatgatccatgtccacaggcgcccgtgtactcgccgttaagaacgatcttgccaagctacagctcaccgcgcctgtctgcacgagccgaggagagaaggttgctctgagccgtcgtgttgagaagcattggcgtctcatcggatggggccagatccaggccggtacaacact

SEQ ID NO: 77848 - DNA, 444 bp, Zea mays
ccacgcatccgcagacgcgtgggcgggcccatcagcttccagctgcagtggttccagcaggtcacctccgccgtgtgcgggcaggactgcaagagctacctggccaactcgctgttcgtgttcggcgagttcgggggcaacgactacaacgccatgctgttcggcaactacaacgcggaccaggccagcacgtacacgccgcagatcgtgagcgccatcgcggccggcgtggagaagctgctggccatgggcgccacggacgtggtggtgccgggggtgctccccatcggctgcttccccatctacctcaccgtctacggcacctccaacagcgccgactacgacgcgctcggctgcctcaagaagttcaacgacctctccaccaaccacaacgcccagctgcaggcccagatctccgccctccaggccaagtacaagtcggcg

SEQ ID NO: 77849 - DNA, 419 bp, Zea mays
aaccgaatcacttcactctctctaatcaaaaagcttttaacctcagccgttaaatctttctccgatcatgccgaccagaaacatcgccattggtggagtccaagaagaggtctatcaccccaacgcacttatggcggcgctcgctgagtttatctcgactttgatcttcgtcttcgccggctcaggctccggaattgctttcaataagatcactgacaatggagcaaccactccttccggcctcgtcgacgctgccttagctcatgccttcggtctctttgtcgctgtctctgtaggcgctaacatttccggtggacacgttaaccctgccgttaccttctgtgtcttactcggtggtaacatcactctcctccgtggtattctctactggattgctcagcttcttggctccgtcgccg

SEQ ID NO: 77850 - DNA, 469 bp, Zea mays
  unsure (1)..(469): unsure at all n locations
cccggggccacccacgcatccggacagaagctcaaatactgatctcactgatccagtatggctatggcaaatgcaggcgcgccgagggtctcggcggcccagctggtgactctcgggctatcactcctctgcgctgtcgccggcccggccgccgcgcagaactgcggctgccagccaaacgtatgctgcagcaagtttggctactgcggcacgaccgacgagtactgcggcgacgggtgccagtcgggcccgtgccgctcgggcggcggcggcagcagtggcggcggtggtgcgaacgtggctagcgtcgtcaccggctccttcttcaacggcatcaagagccaggcccggagcgggtgcgatggcaagaacttctacacccggagcgcgttcctgagcgccgtcaatgcgtanccaggcttcgcccatggcgggtcgcaggtgcanggcangcgcgagatcgccgcct

SEQ ID NO: 77851 - DNA, 358 bp, Zea mays
acgcgtacgcacacgcgtccgcgcgcccacttcttatactgccagcgtctgctccctctcgcggaggcctcgctctggttggaaggtttggagaaactccccggctcgaggagatcgtgacattgagaggacgatgggagggcgcgcgctcctcctcctcctcctggtctcggcgttggtctttcagatccacgcctccgacccgctgctgtacgagccgttcgatgaggactttgaggggagatgggtcgtctccaagaacgatgaataccaacgtgtgtggaagcatgccaagagtgatggtcatgaggactatggcctccttgttagtgagaacgcaaggaaatacgccataatc

SEQ ID NO: 77852 - DNA, 438 bp, Zea mays
cacgaatccgcatctactgacctgtgacctccgcatttccaaacagcccgagcgagctagagctagcagagcggcaggcacctccctcctcaaggaacatggcccgcacgcagcagttggcagtagtggcgaccgccgtggtggccttggtgctgctggcggcggcggcgacctcggaggcggccatcagctgcgggcaggtggcgtcggccatcgcgccctgcatctcctacgcgcgcggccagggctcggggccctccgccggctgctgcagcggcgtcaggagcctcaacaacgccgcccgcaccaccgccgaccgccgcgccgcctgcaactgcctcaagaacgccgccgccggcgtcagcggcctcaacgccggcaacgccgccagcatcccctccaagtgcggcgtcagcatcccctacacgatcagcacct

SEQ ID NO: 77853 - DNA, 417 bp, Zea mays
  unsure (1)..(417): unsure at all n locations
gaaggacagggtgatgataactattattagttgtttaaactttaaactgtaacatctgataattaggttcaaccgttggtgaacttagatagaaaatagatgtacatgtttgcaatggccctgaaattttgtgaatgcatcattagaatatcaaaagtctatactacttaacatttgcttgtgttttctacagttagagtatcttgaggagcgccggctgaaggatctgatcaagaagcactcagagttcatcagctacccaatctctctctggatcgagaagaccactgagaaaaatatctgatgatgatgacgaggaagataagaaggacgaagangggcaagttgaggatgttgatgagaaggaagaaaaggaaaagaagaagaagaagatcaaggaggtttctcatgattggc

SEQ ID NO: 77854 - DNA, 394 bp, Zea mays
agttctagatcgcgagcggccgcccttttttttttttttttttttttttttttttttaacagcagaaattatcaatacattggactagagctcaatcgcttttagaaaacagtgtactaatcaggactgaaaacatggcataacgctctgaacttgagacgactaaccaaaaaaagtgtactcatcaggacacacatttcggtgcaagacaatccatgagaatgctctaagctacagggctcttcgccttgatactggtagctactcatggggaagtcaagctgttactcgcatgacccgtatcctcgacgtggtcgacaatgcatcaaacactgaacctgtgaggtgacagagccttgtgaagagtgccattgtgcaagttgagtcggcccca

SEQ ID NO: 77855 - DNA, 439 bp, Zea mays
ccacgcaaccgaaccaatctagaagctcccctctccctccctccctctctctctctctcttcgccgtccgaagctccgcacccaatctaatcgacacctcaccgagatgggccgcaagttcttcgtcggtggcaactggaaatgcaatggaaccacagatcaggtcgagaagattgtcaaaaccctgaatgaaggacaggttcccccttcagatgttgtcgaggtcgttgtcagccctccttatgtcttccttcctgtggtcaagagccagctgcgccaagagttccatgttgctgctcagaactgctgggtgaagaagggaggtgctttcactggtgaagtcagtgctgagatgctcgtcaaccttggtgttccctgggtcattcttggacactctgaaaggagagctctgctgggagaatcaaatgaatttgttgga

SEQ ID NO: 77856 - DNA, 362 bp, Zea mays
gtttcagatctcatcaaccttaacctctcagactccactgacagaatcattgctgaatacatatgcgttggtggttctggaatggacatgagaagcaaagccaggactctacctggaccagtgactgacccttcgcagctaccaaagtggaactatgatggttcatgcacaggccaagctcctgatgaagacagtgaagtcatcttatactctcaagccatattcaaggatcctttccgtataggaaacaacattcttgtcatgtgcgatgcgtacactcccgcgggtgaaccaatcccgactaacaaaagacacgctgctggtaatgtctttagcaaccctgatgttgcagctgaagttcc

SEQ ID NO: 77857 - DNA, 424 bp, Zea mays
acgcatccgcatccctcggtcccttccatcgacggaaggagaacagggtacggccgtctcctcgcccccatggcccacgagaagaagctgtccaacccgatgcgggagatcaaggtgcagaagctcgtcctcaatatctccgtcggggagagcggcgaccgtctcacccgcgccgcaaaggtgctcgagcagctcagcggccagacccccgtcttctccaaggcgaggtacacggtgcggtcgttcggcatccggcgtaacgagaagatcgcctgctacgtcacggtgaggggcgagaaggccatgcagctgcttgagagcggcctcaaggtcaaggagtacgagctgctcaagaggaacttcagcgacaccgggtgctttggtttcggcatccaggagcacatcgaccttggtatcaagtacg

SEQ ID NO: 77858 - DNA, 447 bp, Zea mays
  unsure (1)..(447): unsure at all n locations
gtccgcagcctccaaagccactcccaaacccccgcttccagaaccttctcgaagctccccgccgcctcctcaactcgcaccgatggcgaaagaacaatgcgcgtgctcgtcactggcgccgcaggacanattggatatgccctggttcccatgattgctangggtgttatgcttggtgcagaccagcctgttattctgcacatgcttgacattccgccagcagctgaagcccttaatggtgttaagatggagttggttgatgctgcgtttcctcttctgaagggagttgttgctacaactgatgttgtggaagcctgcactggggtcaatgtggccgtcatggttggtggattccccaggaagganggaatggaaaggaaagatgttatgtcgaaaaatgtttcaatctacanatcccaagcatctngccttgaagcccatgcagct

SEQ ID NO: 77859 - DNA, 404 bp, Zea mays
  unsure (1)..(404): unsure at all n locations
tgggcgacaaaggtttgaaaaggttgtggtgcctaaccttttggtggacccaccttgctgccttgtcactggtgagtatggctggacagccaacatggagatgatcatgaatgcgcatgccctganggactctagcatgtcngggtacatgtcgagcaaaaagactatggaaatcaacccggagaacccaatcatggatgagctccgtaagcgcgccgaggctgacaagaatgacaagtcagtcaatgatcttgtgatgttgctgttcgagacagctctcctgacctccggcttcagcctggatgaccccaacacctttggcacccggatccatcgcatgctaaagctcggtctgagcatcgatgaggacgagtctgctgangccgaagctgagatgcctccgc

SEQ ID NO: 77860 - DNA, 369 bp, Zea mays
gtccgacatatcatcgccgctgcgccgtctcctccgctcccgtcttcgggaaacatggcgtcccacattgttggataccctcgcatgggccccaagatggagctcaagtttgcacttgagtctttctgggatgggaagagcaccgctgaagatctggataacgttgctaccgacctcaaggccagtatctggaagcagatggctgatgctgggatcaagtacatccccagcaagaccttctcgtactatgaccaggtccttgacaccagtgccatgcacggcgctgtccccgaaagctactcatggactggacgacagattgggtttgacacctacttctccaaggccaatggacaacccactgtccct

SEQ ID NO: 77861 - DNA, 452 bp, Zea mays
gtccgcgactccaccgccgctcccgctccgccccagcgcatcgcccgccgccacagcgtatcgcgacctcatctatcaccttcagctttcaatcatgggggacgtcgatgtcgaaccggatgttgccgccagagctcccaggaagaggacgttccgcaagtacagctaccgcggcgtcaacctagatgcgcttctcgacatgtccactgacgacctcgtctagctcttccccgcgcgcgccaggagaaggttccagatgggtctgaagaggaagcccatggcgctcatcaagaaactgcgcacagcgaaaaaagatgctcctgctggtgagaagcctgagccagtcaagacacatctccgtaacatgatcattgtccctgagatgattgtgagcattgttggtgtctacaacggcagagacttcaaccaggttgagatcaagcctgagatga

SEQ ID NO: 77862 - DNA, 464 bp, Zea mays
ttccggggccacccacgcgtccggaagtttatttccaaggagggtaatggtgagctacctctggagggaacaatacctgatatgacttcccttactgagtattatgtaagcttacaaaagatttaccaagctaaggcagaatttgactgtcttgccctggagcatcatgtaaaggaaatcttgaaacagattggtagagatccggattctatttcaagagcatatatcaaaacattttgtaaaaattctaggaaactaaggatttgtagatatcgtagtttcaaggaggaatttagctccccgattgtctctgagattcagaggtatttcagcgatgaagactgcagttacgcaatgaacttctacattctactacgggctgtcgatcgattggctgccaattatagccgattacctggaatcttcgacagtgagattgacgaagatatccctaggctgaagac

SEQ ID NO: 77863 - DNA, 380 bp, Zea mays
  unsure (1)..(380): unsure at all n locations
tgcatccggaaaaaatggcaaagtcaaaaaaccacacggcgcaaaaccagtcgttcaaggcgcacaagaacggcattaagaaaccaaagcgccaccgccagacctccaccaaggggatggaccccaagttcctgatgaacctgaggtattctangaagggcaacaaaaagagtggtgaggctgaagctgaggagtangaaggaaagcatggctttgtttcctctgtttttagctcagttccacctttaggacctgnggttttgctaaagatggaacttaagtggtgttactgtatgatggcaaggaccttttgctgccgaaggttatgttttgaagttcatgctaccttttaaagtacggattaccttgtgcctatgttc

SEQ ID NO: 77864 - DNA, 438 bp, Zea mays
cacagcacaagcagctcgagagagagagagagagaaagatgtcgtggttccgggcacaccaccacaaccaggcggctcccccggggtcgggccccaaccaggtgttcatgatcttctgccgcgccaacgagaactactgcctggccgtccgcgacggcgccgtcgtgctggccccggtcaaccccaaggacgaccaccagcactggtacaaggacatgcgcttcagcacccgggtcaaggacgaggaaggcatgccggcgttcgcgctcgtcaacaaggccacggggctcgcaatcaagcactccctcgggcagtcccacccggtcaagctcgcgcctttcagcccggaccaggaggacgcgtcggtgctgtggacggagagcaaggacgtgggcaagggcttccgctgcatccgcatggtcaacaaaacccgcctca

SEQ ID NO: 77865 - DNA, 449 bp, Zea mays
  unsure (1)..(449): unsure at all n locations
gtccgcaaagataatganagttgcagatttcatcaacgaaattcgtcaggctggcagaaatggagaactttcaagtgagactttcatattcttcaacaagcagatcaaaggaaacaagagggagatcatacagcttggtgtaccgttatttcaacctaccacagaggatgctaattgtcacacagaaccaatcccccttgtcctgcatgctgtcattgaccaccttgttctttggcgtttaataccagaaagcaggaaaccaaatagtgtcgtcatcaacttcttcgatgaggatgaacattcgcagccctacttcaagcctccccatcttgacaaccccatttgcactcttctgctgtctgaaaccacgatggcatttggcaagtcacttgtcactgacagcaacggtaactacaaaggacctctcacactttcactaaagcaagggt

SEQ ID NO: 77866 - DNA, 435 bp, Zea mays
acccgtccgacagcaacagccaagtgcaagtgatcgagctcccccctcctcatcagtcgctaggcacagcgcacttgcaggatggcgcaggtctctaagacgcttctccttgtggccctggtgttcgtgtcgtcggcggcggtggagctgtgccgcgcgatcgacttcgacgagcgggacctggcgtcggacgaggcgctgtgggacctgtacgagcggtggcagacgcaccaccgggtgcaccggcaccacggcgagaagggccggcggttcgggacgttcaaggagaacgtgcgcttcatccacgcgcacaacaagcgcggcgaccggccctaccgcctccgcctgaaccggttcggcgacatggggcgggaggagttccggtccacgttcgccgactctcgcatcaacgaactccggcggcaagattccccg

SEQ ID NO: 77867 - DNA, 406 bp, Zea mays
  unsure (1)..(406): unsure at all n locations
aggcggagaatattcaaggcaacaaccacaatagaacttagcatttgatccaatcttctccttaaggcaaaattcaagggtgctattggcgttgaatattccgagcaggctgagaagcagattgagatgtacacaaagcaagggttctccagcctccccatttgcatggcgaagacgcagtactcgttctcacacgtcncgtccatgaagggcgccccgaccggctttgttctgccgataagagacgtgagggccagcatcggcgctgggttcatctacccgctcgtgggcaccatgagcacgatgcctggccttcccaccagaccctgcttctaccagatcgacgtcgacactgccaccgggaaggtcatggggctgtcatgaattgaagttcctgatggtatca

SEQ ID NO: 77868 - DNA, 334 bp, Zea mays
ccacgcaaccgcagaagaaaattgaaaaattgaggcagctattatcaggagttttcagtgagcttacaaactttgatgagccaattcgttcaccattagcaccaactcttctcctaacaggagttgtgcctcaagaatcgtctatatttaagagtgccttgaaccctttgcgcctgacatttaaaacagcaaatggcggaacatccaagattatttacaaaaagggtgatgacctccggcaagatcagttggttattcaaacggtttctttgatggaccgactactcaaattagaaaatctagatttgcaccttactccataccgagttcctgc

SEQ ID NO: 77869 - DNA, 462 bp, Zea mays
cccacgcatccgcaaaagatcattgaaaaattgaggcagctattatcaggagttttcagtgagcttacaaactttgatgagccaattcgttcaccattagcaccaactcttctcctaacaggagttgtgcctcaagaatcgtctatatttaagagtgccttgaaccctttgcgcctgacatttaaaacagcaaatggcggaacatccaagattatttacaaaaagggtgatgacctccggcaagatcagttggttattcaaacggtttctttgatggaccgactactcaaattagaaaatctagatttgcaccttactccataccgagttcttgcaactggacaagatgaagggatgcttgaatttattagttccagttctcttgcacagattctatcagaacatcgcagtattacaagttacctacagaagtttcatcctgatgaggatgggccttttggt

SEQ ID NO: 77870 - DNA, 420 bp, Zea mays
cactgagcaggatcgacgacgccgtggctcggattctgcgcgtcaagttcaccatgggcgtgttcgagaaccccatgccggaccccagcctcgcggaccagctggggaatcacgagcacacggacttggcgcgggaggcggtgcgcaagtcgctggtgctcctcaagaacggcaagccgggcgacgcgccgctgctgcacctgcccaagaaggccgccatgatcctggtcgcatggagccacgccgacaacctgaggtatcagtgcggcgggtggacgatcgagtggcagggcgacacagggcgcaccaccgtcggcaccacggtcctggacgccgtgaacgctgccgtggacccgtcgatcgatgtggtgttcgcggagagccccgacgccgacttcgtcaggagcggcggcttctcgt

SEQ ID NO: 77871 - DNA, 370 bp, Zea mays
aaagtggatgcagttctccgttgccgattctcggaatcggtttctcgattgatgcctgaaatttcatcatgattagcgtttatgggtgatttcaacgatgagggggttcccaagggctatgctttccctctcacgatgcctactgttactctgattgagtgaagatttgcaaccttcactcacaggtcagctgctgcacatccgtggcatttcgtgtagattgttccataagcgcctactgttttcaactgtgtagttgtcattatcaagagtagtacggttaagtatgagctacacacagacagtagacttaattgggctgatcacgttctctattcaaccattatttacccccaaagctacggtttca

SEQ ID NO: 77872 - DNA, 425 bp, Zea mays
  unsure (1)..(425): unsure at all n locations
cccgtccgcacacgcaaccgtccgtatttccgtcacaactcacaacccgagcccccaaaacccgaagcagcaggacctcccctgaccttgctccgcctccgatcaaagaaaaggaagatgagctactacggccagcagccccccgtcggcgtcccgccgcagcaaggctacccggggaaggacngctacccgccagcggggtacccgccggccggctaccccccgccggcgcaaggctacccgccgcaaggctacccgcagcaaggttacccacagcagggctacccgccgcagtacgcgcagccgcctccacagcagcagcagagcagcgggccttccttcatggaaggatgcttggctgccctctgctgctgctgcctcctggacgcctgcttctgacggaaccatccgtgccgggtccaaca

SEQ ID NO: 77873 - DNA, 452 bp, Zea mays
  unsure (1)..(452): unsure at all n locations
caacaacatgtcaggactcaagaggctcncctcctccctcgccgccggaaaagccccccgtcctccccaacccgggttcaattccccgttccctggtgccgtggtaaccgaacgccccgggcaaggggttccaaccggggctcaacggaatccccaaaacggcattaacccatgggcaaggaggcaacaaccctggggggtttaaggtggctgcagatgcagagcgcgtccgatctcgatcttaagccccagttgcangaattgattcgggaacaacaggatcgcttanagaagctcaagtcagagcatggaaagaaccagcttggaaacataactgtggatatggtccttggtggaatgagaaggatgactggaatgctttgggaaacatccctacttgattcagangaaggtattcgttttaagggcctctcaattccagaatggcaaaa

SEQ ID NO: 77874 - DNA, 439 bp, Zea mays
  unsure (1)..(439): unsure at all n locations
gtccggaaaagtacaagtgatcgagctcccccctcctcatcagtcgctaggcacagcgcacttgcaggatggcgcaggtctctaagacgcttctccttgtggccctggtgttcgtgtcgtcngcggcngtggagctgtgccgcgcgatcgacttcgacgagcgggacctggcgtcngacgaagcgctgtgggacctgtacgagcggtggcagacgcaccaccgggtgcaccggcaccacggcgagaagggccggcggttcgggacgttcaaggagaacgtgcgcttcatccacgcgcacaacaagcgcggcgaccggccctaccgcctccgcctgaaccggttcggcgacatggggcgggaggagttccggtccacgttcgccgactcccgcatcaacgacctccggcggcaggattcccccgcggcgccgggcggggc

SEQ ID NO: 77875 - DNA, 387 bp, Zea mays
catcgtctccgccgcagcgatgccgtcgcacaagaccttccggatcaagaagaagctggcgaagaagatgcgccagaaccgccccatcccctactggatccgcatgcgcacggacaacaccatcaggtacaacgccaagcgcaggcactggcgccgcaccaagctcggcttctgagcgcgcggatcggccggctcctgcgtcggaattctagggtctctacctttcctttggttttatcgatgtctcttgtgtttctgtaagctagcaaacagttccagaaagcttttgttaagattttgatgacgctaagaggattgatgctactatgctgtactcaggattccatgctgcattgcgatgctaaattaaagaacctctgttacctt

SEQ ID NO: 77876 - DNA, 448 bp, Zea mays
ccacgcgtccgcagacgcgtggggtcggcgtcaagccgtctcccgtcgtcgcggcattctcctcccggggccccaacactgtgacgtcgagcgtcctgaagccggacatcatcgcgcccggcgtgaacatcctggcggcgtggtcggggtccgtcggcccgtcggggctccccggcgacggccgccgcgtcggcttcaacatcatctccggcacgtccatgtcgtgcccgcacgtgagcgggctcgccgcgctgctccgcgcggcgcacccggagtggagcccggcagccatccggtcggcgctgatgacgacggcgtacaacgagtaccccggcggcggcaacggcatcctggacgtggccacggggcggccggccacgccgctggacgtgggcgccggccacgtcgaccccgcgaatgccgtcgacccggggctggtgtacgacat

SEQ ID NO: 77877 - DNA, 452 bp, Zea mays
gtccgcaaaagaaaattgaaaaattgaggcacctattatcaggagtttccagtgaccttacaaactttgatgagccaattcgttcacaattagcacaaattcttctcctaacagaagttgtgcctcaagaatcgtctatatttaagagtgccttgaaccctttgcgcctgacatttaaaacagcaaatggcggaacatccaagattatttacaaaaagggtgatgacctccggcaagatcagttggttattcaaacggtttctttgatggaccgactactcaaattagaaaatctagatttgcaccttactccataccgagttcttgcaactggacaagatgaagggatgcttgaatttattagttccagttctcttgcacagattctatcagaacatcgcagtattacaagttacctacagaagttccatcctgatgaggatggtcctttt

SEQ ID NO: 77878 - DNA, 412 bp, Zea mays
gtccgcaagcaaatgtcaaccgactcaaccaacctcccttcgaaagcaattaggtcacaattcacaatccaaaaccttttgaaccaggtaaaatgggcaaggaggtggatttgtcaatcctaaaggtcggcggcttccgttaccttgactacgcggaccctccgccggcaccgctgatcgacatcgacgagctcggcaagtggtccctgtaccgcgccgtgatcgccgagttcgtggccacgctgctgttcctgtacatcacggtggccacggtgatcgggtacaagcaccagacggacgcgtcggcgtcggggcccgacgcggcgtgcggcggcgtgggcatcctgggcatcgcgtgggcgttcggcggcatgatcttcatcctcgtctactgcaccgccggcatctcggg

SEQ ID NO: 77879 - DNA, 418 bp, Zea mays
  unsure (1)..(418): unsure at all n locations
ggggccacccacgcaaccgcattcttcgatttcgatctcaccgaggccgacggagcagacgactaggagtccactattcccgagaagaatccaggagaggagaggagctaagcagcagctgctgtagctgcgtttggtggatcgaatcggtcgtcgtctggtgctgtgtttttgctactgaggagagggagggatctgagggaggggggtgatgtcgtcgtcctcttcctcgtcggtggtatacgaggggtggatgatccgttacggtcggcgcaagatcggtaggtccttcgtccacacccgctacttcgtgctggagccacggatgctgtcctactacaagcgcaagccgcagcacaaggccgacaaggtcgggggaaagctccccatcaagtcncttcacatcgatggcaactgc

SEQ ID NO: 77880 - DNA, 461 bp, Zea mays
ccacgcaaccggagacaccttccgtggtagagtgtgtgaatgccccactttcaatggcgtacaatttaaaggcgatggctacagcaattgtgaacctgctggaccaggaaaatgcttgataaaccatggaggatgttggcatgaaactcgcaacggaaaaacattctctgcttgccaggaatctggagatgggaaatgcctgtgcccagctggtttccgaggggacggcgttaaaaaatgtgaagacattgatgagtgcaaggagaaaaaagcttgtcagtgtcctgaatgcaactgcaaagatacatggggtggctatgactgcacttgcagtggtgaccttttgtacatcagagagcatgacacctgcataagcaagacagcagttcaggctaaagcagcatgggctgcagtgtggggtatcttgatagttgttgctgttgttgcaacggaaattattt

SEQ ID NO: 77881 - DNA, 438 bp, Zea mays
ccacgcgatccgcagtgagcaggatcgacgacgccgtgactcggattctgcgcgtcaagttcaccatgggcctgttcgagaaccccatgccggaccccagcctcgcggaccagctggggaagcaggagcacagggacctggcgcgggaggcggtgcgcaagtcgctggtgctcctcaagaacggcaagccgggcgacgcgccgctgctgcccctgcccaagaaggccgccaggatcctggtcgcagggagccacgccgacaacctggggtaccagtgcggcgggtggacgatcgagtggcagggcgacacggggcgcaccaccgtcggcaccacggtcctggacgccgtgaaggcggccgtggacccgtcgacggaggtggtgttcgcggagagccccgacgccgagttcgtcaggagcggcggcttctcgtacgcga

SEQ ID NO: 77882 - DNA, 415 bp, Zea mays
  unsure (1)..(415): unsure at all n locations
aggcggcgccaaggaccggaatccaacccattgcttgcaacaatggcaagggaattgaaaaaccacttgaaaaggctcaatgcgccaaaccattggatgctcaacaaccttggcggaccttttgcccccaagccatcttctggacctcacaagtccaaggagtgccttcctctgatcctcatcatcangaacaagctcaagtatgctctgaactaccgtgaggtcatttctatcctgatgcaacgccatgtacttgttgatggcaaggtcaggactgacaagacctaccctgctgggttcatggatgtcatttccatccctaagacaatggagaactacaggctgctttatgacaccaagggccgcttccgtcttcacccaatcaaggatgangatgccaagttcaagctctgca

SEQ ID NO: 77883 - DNA, 445 bp, Zea mays
  unsure (1)..(445): unsure at all n locations
gtccggaatcatatccccatctcccagatccaattccgcagttctccctcctcggccgcaatggcgctctctgtggagaagacctcgtctggacgggagtacaaggtcaaggatctctcgcangcggacttcggccgcctcgagattgagctggccgaggtcgaaatgcccggcctcatggcgtgccgcgccgagttcggcccgtccaagcccttcgccggcgctaggatctcggggtctctccacatgaccatccagaccgccgtcctcatcgagaccctcaccgcgctcggcgccgaggtccgctggtgctcctgcaacatcttctccacgcaggaccacgccgccgccgccatcgcgcgcgactcggccgccgtgttcgcctggaagggggagaacctcgangagtactggtggtgcaccgagcgctgcctcgactggggcc

SEQ ID NO: 77884 - DNA, 426 bp, Zea mays
gtccggactagaacagccaagaaaagcatatacccgagtcgccgaaacaacaacaatcccaatcccccctcgtcactcaaaactcgaccaacaatgtcgctgattcgccgtggaagcgcattcgaccccttctcccttgacctctgggaccccttccaaggctttcccttcggctctggaagcatcagcagcagcagcctgttcccctcgttcggaggcaccaacagctctgagacaggcgccttctccggcgctcgcgtcgactggaacgagacgccggaggcgcacatgttcaagaccgacttgccggggctgaagaaggaggaggtgaaggtggagctggaggacggcaacatgctccagatcagcggcgagcgcatcaaggagcacgaggagaaaacggacacctggcaccgcgtggagcgc

SEQ ID NO: 77885 - DNA, 456 bp, Zea mays
aaccgcacgtttcaaatccatccatcctcgtttcctccgtcccgcagcatctcaaccccatggccaagatcaagatcgggatcaatgggttcggcaggatcggaaggctggtggccagggtggccctgcagagtgacgatgtcgagctcgtcgccgtgaacgaccccttcatcagcaccgactacatgacctacatgttcaagtacgacactgtgcacggacagtggaagcaccatgaagtcaaggtgaaggactccaaaacccttctctttggtgagaaggatgttgctgtgtttggctgcaggaaccctgaggagatcccgtggggttcggttggtgctgaataggttgttgagtccactggtgttttcactgacaaggagaaggctgcagctcacttgaagggtggtgccaagaaggttgtcatctctgctcctagcaaggatgcccccatgt

SEQ ID NO: 77886 - DNA, 462 bp, Zea mays
ccacgcatccgtacgagtccagggggcaggggcaccattaccgagtagtttaattagtgctagttgtattaccattgttagtgacttaattaccctcacgcgaagcaccttacctctgctagtcctcctacgtctcttctcttcgcttaatcttgtactactgctctgttataatcagcgggaaggaggaagatgacggtgacgccacggatcacggtgagcgacgggcggctgacggtgcgcggccgtacggtgctcaccggcgtgccggacaacgtgtcggcggcgcacgcggtcggggcggggctcgtcgacggtgccttcgtcggcgctcacgccggcgaggccaagagccaccacgtcttcaccttcggcacgctccgggactgccggttcctgtgcctgttccggttcaagctgtggtggatgacgcaccggatgggcgtctccggccgcgacgtc

SEQ ID NO: 77887 - DNA, 460 bp, Zea mays
ccacgcatccggaaccccgcgcgtgccgcttctcacctgtgcacctcgccgactcctcggatttgtcatattcgcctgaggtgggctcagtcgctgagagtggccacggtgaggaatgacgatgaagacggggccgcggaccgcgtgccgcacctgccgtggatgcggtaccccgtcgatatcgacaccttctctggctgccccgtcacacagctcccccgcctcgacccgaggttagagaggtttttgatgatattgctcctatggtgggcttgtcagtaggttcagcagttggtcaatcatcaatagcagatgaagtttctagtcttgtcccgaagcccaaacaagagttttacccaactattgacgaagaatatgtccaaatggaaccacagactaaaattgatatattggtggcaacccctgaaagactaatggatcacattaacatgacaaatgg

SEQ ID NO: 77888 - DNA, 398 bp, Zea mays
  unsure (1)..(398): unsure at all n locations
cgcgtccgaaaccctgaagcacagccttccccacacaagaacttcgctgacgacgttgccttcctgaatccgctcttcngtggcctcaagtccggtggcaatgcntatgtgattggtgactctgcgaagcccgggcagaagtggcacgtctactacgccgctgagcaccctgaggagcctgttgttactctagagatgtgcatgactgggctggacaagaagaaagcttctgtcttcttcaagaccactgctgatggttactcgctgtgcgccaaggagatgaccaagctctctggtatctcggacatcatcccaaaaatggagatctgtgacttcgacttcgagccctgtggctactccatgaatgctgttcatggccctgctttgtcgaccattca

SEQ ID NO: 77889 - DNA, 403 bp, Zea mays
  unsure (1)..(403): unsure at all n locations
cacgcgtccgcaaatccaaagcgaagatcgcgatcagagcaagagcaagcaacgcgcaccgaaatcttccaatccacaagactcgctacttcgcagttggcagactcgcccgcagcgagccgctagcaaccaagcagaaatgtcgctggtgaggcgcggcagcgtgttcgacccattctccgtggacctcttcgaccccttcgacagcgtgttccgctccatcgtgccgtcgtcgtcgtcggcggcggcagcctccgagaccgccgccttcgccagcgcccgcatcgactggaaggagacgcccgaggcgcacgtgttcaatgccgacctccccggcgtgaataaggangaagtgaaggtggatgtggaggacggcaacgtgctgctcatcagcaggcagcgc

SEQ ID NO: 77890 - DNA, 451 bp, Zea mays
caagcaattgtcaaccgactctatctagctctcttcgcaagccagtaggtcaccactcaccactcaaaagcttgtgaagcaggtgagatgggcaaggaggtggatgtgtccactctagaggtcggcggcgtccgtgaccgtgactacgcggaccctccgccggcaccgctgatcgacatcgacgagctcggcaagtggtccctgtaccgcgccgtgatcgccgagttcgtggccacgctgctgttcctgtacatcacggtggccacggtgatcgggtacaagcaccagacggacgcgtcggcgtcggggcccgacgcggcgtgcggcggcgtgggcatcctgggcatcgcgtgggcgttcggcggcatgatcttcatcctcgtctactgcaccgccggcatctcgggcggccacatcaacccggccgtcacgttcggcctcttcctggcgc

SEQ ID NO: 77891 - DNA, 447 bp, Zea mays
tgttaatatccttcaggaaggccactgggcagaagccattgagaataatattctacagggacggtgttagtgaaggccagttctatcaagttctcctttacgagttagatgccatccgtaaggcatgcgcatccctagaaccaaattaccagcctcctgtaacatttgtggtggttcaaaaacgtcatcatacgagactatttacaaacaatcacaaagacagaagtagcatggacaagagtggaaatattttgccaggaactgttgttgattctaagatatgccacccaacagagtttgatttctacctctgtagtcatgctggaatccagggaacaagtaggcccgctcactaccatgtcctctgggatgagaacaatttcacagcagacgaaatgcaaacactgacaaacaacctttgctacacttatgcccggtgcacacgct

SEQ ID NO: 77892 - DNA, 429 bp, Zea mays
cacgcgtccggacatatatcacgatccactcgagcacaatcccaaggaaaggtaaggaactatgccccccggcttggttccggcaaaggccggcccggtcccggccaaaacaaaggggccggttcccttaacaatcaactgcaccaagcaactggaggacaaaatcatgaaggtcgcctcgctcgagaaagttcctgcatgagcgcatcaatgtcgcctgcggcaatgctggcaacctcggtgactccgtcaccatctctcgcgacaagaccaaggtcaccgtcacctctgactgacccttctccaataagtacctgaagtacttgaccaataagtacttgaagaagcacaacgtgcgggattggctacgcgtggttgctgccaacaatgaccgaaatgtctatcagctccgctacttcaacattgctg

SEQ ID NO: 77893 - DNA, 385 bp, Zea mays
  unsure (1)..(385): unsure at all n locations
cacgcaaccgcacaactccaccaccccgccgagctcggctgggctttgccgtggntttcgcntntcttgtgttggccttgttgtttctcgtggggtgtgtttcgggctttccggttctgtcgggcgggttgtcctcgctggcggcctcctgggcgggttctttgcctgttttgctctgggttggctggtcgccgtcggtgctggtcttgcctcttgccccgttggttctgtccgctggcggttggtgttgccttctggtgcggctgtcgngtgggtgggctccttggccgtgttcctgcggctcctttgccgggccggccccgggtccctgttcgcgggtgctggtgctcngtttcttcgtgccgttgctggggctggtgtgctt

SEQ ID NO: 77894 - DNA, 412 bp, Zea mays
aagacactcaaatctgatggtattgctgggctttaccgtggatttaacatatcttgtgttggaattattgtttatcgtggcctgtatttcggactttacgattctatcaagccagttgtcctcactggcagcctccaggacaacttctttgccagttttgctctgggttggctgatcaccaacggtgctggtcttgcatcttaccccattgatactgtccgcagaaggatgatgatgacttctggtgaggctgtcaagtacaagagctcattggacgcattccagcagatccttaagaaggaaggccccaagtccctgttcaagggtgctggtgctaacattcttcgtgccattgctggcgctggtgtgctttctggctacgaccagctccagatcctcttcttcggaaaga

SEQ ID NO: 77895 - DNA, 525 bp, Zea mays
  unsure (1)..(525): unsure at all n locations
ggggggtggggttgactgtcatgttcgcgtggcggtacaaagtcgaaattgnccgggccacccacgcaaccgcatcgcgaccgccaaagcccgcgactttcagcctacggaggccacatctggccgcgcgggccgccgctggcaacgcacccacgtccccggtccgcgaggtcgtcactgagctcgacgcggtcgccggcttcagcgagatcgtgccggacaccgtcgtgttcgatgatttcgagaggttcgcacccacggcggccacagtgagctcgtcgctgctgcttgggatcactgggctcccagacactaagttcaagagtgcgatagatactgcactggcagatggtgagtgcaacgcactggagaaggctgatgacatgatgtcctgttacctcaccaaggctcttgcatatgttggcgctgaactggctcatcaagtccctgggagagtttcgacggaaatagatgctcggttagcttatgacacccagggcataatccacagggtacatgaactgt

SEQ ID NO: 77896 - DNA, 439 bp, Zea mays
acccgtccgaaaccgtcacctgccatcaggcggtggtgaacaatctggatgacgcgcacgagcagatcgacacggccattgccacggcactgacggagagcaagcccgtgtacctcagcatcagctgcaacctccctgggctgcctcatcctaccttcagccgcgacccagtgcccttcttcctcacccccaggacgagcaacaagatggggctagaggctgcagtggaggcaactgtcgaattcctgaacaaggcggtgaagccagtccttgtcgccggccccaaactgcgtgtggcaaaggcatgaaaggcatttgtcgatatggtagatgccagtggctatgcctatgccgtgatgccatcggccaagggtcttgtgccagagactcacccccacttcatcggcacctactggggcgccgtcagcaccgccttctg

SEQ ID NO: 77897 - DNA, 409 bp, Zea mays
ccgggtccacccacgaatcgcgaacggttggcttctcctccccctccggttcgggttcgggttcgtgaggttctccggggttcggtttcgtgggtgggcggatcgagatggcggcgtcggatgttgagtaccgctgcttcgtcggcggcctcgcctgggccacggacgaccactccctccacaacgccttcagcacctacggcgaggtcctcgagtccaagatcatcctcgatcgggagacgcagaggtcccgcggcttcggcttcgtcaacttctccacggatgatgcaataccgaacgccatcgacggcatgaacggcaaggagctggacggccgcaacatcaccgtcaacgaggcccagtcccgcagcggccgtggaagcagcagtcggtgctacggtggtggccg

SEQ ID NO: 77898 - DNA, 360 bp, Zea mays
gtcgtattatcaagtgcagctgataaagtgccatcggcgcccccttggccgaacccttgggcgaacccttggcccaagggaaaatttccggggccgttccacggtgttcacggaggtcctggccaacagggtgaaaaaggttgtggcctcggaccccttgttgaaccccccttgcagcctgttgacggccgattacggctggacggccaacatggagaggatcatgaaggcacaggcgctcagggactcgagcatgtctgggtacatgtcctccaagaagaccatggcgatcaacccggagaacgccttcatggacgatctgcgcaagcgcgcttcggcctacaagaacgacaagtctgt

SEQ ID NO: 77899 - DNA, 389 bp, Zea mays
agatggcatcaagtactacagagacctcatcaacttgttgctagaaaacggcatagagccatatgtaacaattttccactgggatgtacctcaagcactagaagagaagtacggcggcttcctagataagagtcataagagcattgtcgaagattacacatactttgctaaggtgtgctttgataacttcggcgacaaggtgaagaattggttgacctttaatgagccccagacatttacttccttttcctacggaactggggtctttgcaccaggtcggtgctcatctggactagactgtgcctacccaactgggaattcactcgtcgagccttacactgctggccataacattctcctagcccacgctgaggctgttgatctttaca

SEQ ID NO: 77900 - DNA, 369 bp, Zea mays
agtcttgtttgttgccggtggcgagacgtcggcgacggccatgcactgggcaatgacggagctgatacggaatcctcgggcgatgctgaaggcgcaggccgaggtccggtctgcgctcgcggggcatagcacggtgacggaggccggcctcaccgacctacactacctgcggctagtcatcaaggagacgctccggctgcacccgccggtgccggtgctgctccgggagtgccttatcgcacgcgaggtgctcggctaccacgtcccgcggggcgccatggtgctggtgaacgcgtgggcgatcggcagggacccggcgcactgggacgcgccggaggatttcgcgccggagaggttccaggagcttga

SEQ ID NO: 77901 - DNA, 384 bp, Zea mays
atgccaaggctatggagaaggttggcaaagagggtgtgatcactattgcggatggcaacaccctttataatgagcttgaagttgtggagggtatgaaacttgacagaggttacatctctccgtacttcattaccaactcaaaagcccagaaatgtgaactggaagacccattgatcttaattcatgacaagaaagtgacaaatatgcatgctgtggttaaggttttagaaatggctctaaagaaacaaaggcctctactgattgttgcagaagatgtggaaagtgaagcattaggtactctgattattaacaagcttcgtgcaggcatcaaggtctgtgctgtcaaagctcctggttttggggaaaacaggaaggcaaacttac

SEQ ID NO: 77902 - DNA, 384 bp, Zea mays
actgcttggtcgagatcacttcgccgccgccgctttcgagatctccgggtggagcaagcgaggaaaggcagcagccatgtcgctccgcgtgctgaaccctaacgccgaggtgctcaacaagtcggcagcgctgcacatgaacatcaacgccgccaagggcctccaggacgtgctcaagaccaacctcggccccaagggcaccatcaagatgcttgtgggtggagctggtgacctgaagctgacgaaggatgggaacaccctcttgaaggaaatgcagattcagaacccaactgcaatcatgattgcgaggacggctgtggcacaggatgacacaagtggtgatggcacaacctccactgtgctatttatcggggagctaatgaa

SEQ ID NO: 77903 - DNA, 388 bp, Zea mays
ccaaatgcaagtgatcgagctcccccctcctcatcagtcgctaggcacagcgcacttgcaggatggcgcaggtctctaagacgcttctccttgtggccctggtgttcgtgtcgtcggcggcggtggagctgtgccgcgcgatcgacttcgacgagcgggacctggcgtcggacgaggcgctgtgggacctgtacgagcggtggcagacgcaccaccgggtgcaccggcaccacggcgagaagggccggcggttcgggacgttcaaggagaacgtgcgcttcatccacgcgcacaacaagcgcggcgaccggccctaccgcctccgcctgaaccggttcggcgacatggggcgggaggagttccggtccacgttcgccgactcccgcat

SEQ ID NO: 77904 - DNA, 380 bp, Zea mays
aaatctcagtcacctgcgccgccgcttcgttcgtgtggaggggagaagagaggaaatggcggcgaccgagggcgtgctcctggggatgggcaaccccctcctcgacatctccgccgtcgtcgatgacgccttcctgacaaagtatgacatcaagctgaacaatgctattctcgctgaggagaagcacttgcctatgtatgacgagttggctagcaagagcaatgttgaatatattgccggaggagccacccagaactctatcagggttgcccaatggatgcttcaaactcctggtgcaacaagttacatgggatgcattggaaaggacaagtttggtgacgaaatgaagaaaaacgctcaagctgcatgagttactgctc

SEQ ID NO: 77905 - DNA, 384 bp, Zea mays
tgagtcgtattaaacaaaacattggtgaaagggctgcatctgaatggcttttcataattccttggggccttcataagtcacttaattatatagcgaagaagtacaataatccaacaatttatgttactgagaatggcatggatgaagaggacgatcaatccgcaacgcttgaccaggtcctaaacgacacgacgagggtcggttacttcaaacggtacctcaattcagttgcgcacgcgatcaaggacggagctgatgtccgcgggtactttgcgtggtcgttcctggacaacttcgagtgggcaatgggctacaccaagaggttcggcatagtctacgtggactacaagaacgggctgtccatgcacccgaaagcatcggcgc

SEQ ID NO: 77906 - DNA, 383 bp, Zea mays
gagtcgtatacgatcagagcaggagcaggcaacgcgcaccgaaatcttccaatccacaagactcgctacttcgcagttggcagactcgcccgcagcgagccgctagcaaccaagcagaaatgtcgctggtgaggcgcggcagcgtgttcgacccattctccgtggacctcttcgaccccttcgacagcgtgttccgctccatcgtgccgtcgtcgtcgtcggcggcgggggcctccgagaccgccgccttcgccagcgcccgcatcgactggaaggagacgcccgaggcgcacgtgttcaaggccgacctccccggcgtgaagaaggatgaggtgaaggtggaggtggaggacggcaacgtgctgctcatcagcgggcagcgc

SEQ ID NO: 77907 - DNA, 382 bp, Zea mays
aaggtgtccaacctctgctccgaattcctcaccgcaggcaccgacacgacgtccaccgcgctgcagtggatcatggccgagctggtgaagaacccggacgcgcaggagaagctctacagcgagatcagggcaacgtgcggcgacgaccaagcggaggtcggcgaggaggacacgcacaggatgccgtacctcaaggccgtcgtgctcgagggactgcgccggcacccccctgcgcacttcgtgctgtcgcacaaggcggcggaggacacggaggtgggcgggtacctgatccccaagggcgcgacggtgaacttcacggtggcggagatgggctgggacgagcgggagtgggacaggcccatggagttcgtgccggagcgat

SEQ ID NO: 77908 - DNA, 386 bp, Zea mays
cttaatcccactaccacccatctcgtcgtccgccgattcgatccggttcttccaacccaggggcagtgatggcgacgaagaggagcgtgggcaccctcggcgaggcggatctgaaggggaagaaggtgttcgtgcgcgccgacctcaacgtcccgctcgacgatgcccagaagatcaccgacgacacccgcatccgcgcctccgtccccaccatcaagttcctcctcgagaagggcgccaaggtcatcctcgccagccacctgggtcgtccaaaaggtgtcaccccaaagtacagcttgaagcctcttgttccacgcttgtctgagctccttggagttgaagtcgtgatggccaatgattgcattggtgaagaagttgagaagttg

SEQ ID NO: 77909 - DNA, 380 bp, Zea mays
agatcgatcggtgcttttaatctctgaccaagcgatcgtgctcaccatcaaccaccgcgctcatgagtatcagccggccggacccgagcacgaccaggcggtggcatggggaggccgccgtgctgcgacaaggtgggagtgacgaaagggccgtggacccccgaggaggacttcatgctcgtctcctatgtcgaggagcacggccccgggaactggcgcgccgtgccgacgaacaccgggctgatgcgctgcagcaagagctgcacgttgcggtggacaaactacctccggccgggaatcaagcgcggcaactttaccgaccaggaggagaagctcatcatccacctccaggctctccttggcaaccggtgggcggcgat

SEQ ID NO: 77910 - DNA, 382 bp, Zea mays
atttgaggtcctctgtgcacggcctgccttgaaccctactcttccaaaagaggaagttagcttggcggagtgggcgttgcactgccagaagaagggcgttcttgatcagattgttgacccctacctgaagggaaagatagctccacaatgcttcaagaagtttgctgagacagccgagaagtgtgtttctgatcagagtattgaccgcccttcgatgggcgatgtgctctggaacttggagtttgcccttcagatgcaggagagcgcggaagagagcggaagcctcggttgtgggatgtcggacgagggcactccccttgtgatggtcgggaagaaggatccaaatgacccgtcgatcgaatcgagcaccaccaccacaacc

SEQ ID NO: 77911 - DNA, 356 bp, Zea mays
ttatggaacagccaacggttcgtcagctataattcaccggacatgtccggtgtgcaccggactgtccggtgtgactccagcgcaacggctatcccgcgccaacggctacctgcatacgcattaaatgcgccgcagcgcgcgcacatgtcaggtttgcccacactggcgcaccggacaatgaacaggagctgtccggtgcgccaccggacatcaagggtgggccacaagtcagaactccaacggtcagattccaacggcactgatgacatggcacgggcaccggacatgtccggtgtgcaccggactgtccggtgcaccatcgaacagactggctccccaactgccacatttggtgg

SEQ ID NO: 77912 - DNA, 385 bp, Zea mays
gtagagacggagaggggagacccggtcactaccaatgccaagaacaagaaaccagagaggacagtcgtcaatccaatccgagtctcctccaaaaacccatcaatctgcaggaacgagagcagcaggagagcatcctaggaaaaaagttaggaccaactgaccgagcaaaaaaggtagcatctctgtatcaccaaggcaccgccgatcacagaccaaatccctcccccctctggtccatcccacacgtagagcagccggtatttcttcaatccgtgcttgcgcttttttttttctttgtaaagatttcgtttccctcccttttaactgttgccgagaagtttcgacaagagtggtgtgagtgttgaagagctcctcaacatgatgg

SEQ ID NO: 77913 - DNA, 375 bp, Zea mays
atacagaacaatctggcacaatcttagctgacgaatgttgggattgcaacgagaaacatcctcgatgtacaagagaacgtcatcgagagattatgctccgatgatcgacgtcgaacagagctcaggtcttttagacaatgatgtggacaatgaaatggaaactacaaatccttcatggaagtgttctcttccgcatgttctagtggctacaatttcgtcgtttctatttggttaccatttaggagttgttaatgaacctcttgaaagcatttcgtctgatcttggttttagtggtgatacattagctgaaggtttggtggttagtgtatgtcctggtggtgcatttctcggatctttaatcagtgggggagttgc

SEQ ID NO: 77914 - DNA, 322 bp, Zea mays
ctacaccctgatgtgagtcgtagttaaagccaagtgcaagtgatcgagctcccccctcctcatcagtcgctaggcacagcgcacttgcaggatggcgcaggtctctaagacgcttctccttgtggccctggtgttcgtgtcgtcggcgggggtggagctgtgccgcgcgatcgacttcgacgagcgggacctggcgtcggacgaggcgctgtgggacctgtacgagcggtggcagacgcaccaccgggtgcaccggcaccacggcgagaagggccggccgttcgggacgttcaatgagaacgtgcgcttcatccaggcgcag

SEQ ID NO: 77915 - DNA, 395 bp, Zea mays
aaattaagttgctaggtcctttgaaccagcaactgaagcttcctcgtctcatcatcgagaccagtaagcaacatggcggctaatctcaagtgggctcctgttctagccctcctcgtcgtcgttgctgccatggttggcaccaccagcgccggcaacatcgcagtgtactggggccagaacggcaacgaaggcagcctggcggacgcctgcaactccgggctctacgcctacgtcaacatcgcgttcctcacaaccttcggcaacggacagaccccagttctcaacctcgccggacactgcgaccccggctccggcagctgcaccggccagagcagcgacatccagacctgccagtcgctgggcatcaaggtgctcctctccatcggcggcgccag

SEQ ID NO: 77916 - DNA, 412 bp, Zea mays
tacaggcctctagattgagtcatattagccagaaggtggagttctgctcctatagaatgttagattctacaaggaggaagagaagaacgaacctgagtttgctaagaagctagcatctgttgctgacctttatgtcaatgatgcttttggcacggcacacagagctcatgcttcaaccgaaggagttaccaagtatttgaagcctgctgttgctggcttcctcatgcagaaggaacttgactaccttgttggagctgttgccaacccaaagaagccatttgccgctattgttggtggatccaaggtctcaagtaagattggtgtcattgagtcgttgctggcgaaggtcgatatcctcatccttggtggtggtatgatctacacattttacaaggcacaaggatattctgtt

SEQ ID NO: 77917 - DNA, 404 bp, Zea mays
cacacgtccggatatattgatgcgtgttatcgcccaaaatcttcctcctgagtccaccacggtcgagaaggtcatgactcagagtcctgaatgtgccacagtggacaccccaattcttgatgctcttcacacaatgcatgatgggaaatttttacatttgcctgtcctggacagggatggaaatgttgtgactgttgttgatgttcttcacataactcatgctgcaattgctacggttggaaacagcggggcagctggatccgaggcaacatctgccatgatgcagaggttctgggattcagcaatgtccattggacctattgatgatgacgatgactcgagaagtgaagggtcgactagagtggtatctgaggcaacagatataggaagaccagccttctttc

SEQ ID NO: 77918 - DNA, 408 bp, Zea mays
acaaaactctagagtgagtcctactaaaggaagcagtacaaattcaaaaagtggttcaagggtgaaggataattctgagcaaggacagggtaatgatgctaggagtaaatgtactcaaagctctgtcgttgagcccacacaaccatcttcagggtctgttgtgcttaaccctatgatgccattttggcctgtgccccctcccatggctggcccagcaactactctgaatatgggagtggattactggggtactcctgcttctgtacccatgcatggtaaagttattgcagcaccgacatcagctccttcgtcaaattcacgtgatattgttctcagtgatccgactatacaggatgggagagaactgaagagacataaacggaagcaatcaaatagggaatcagctcg

SEQ ID NO: 77919 - DNA, 381 bp, Zea mays
agatcgagctcccccctcctcatcagtcgctaggcacagcgcacttgcaggatggcgcaggtctctaagacgcttctccttgtggccctggtgttcgtgtcgtcggcggcggtggagctgtgccgcgcgatcgacgtcgacgagcgggacctggcgtcggacgaggcgctgtgggacctgtacgagcggtggcagacgcaccaccgggtgcaccggcaccacggtgagaagggccggcggttcgggacgttcaaggagaacgtgcgcttcatccacgcgcacaacaagcgcggcgaccggccctaccgcctccgcctgaaccggttcggcgacatggggcgggaggagttccggtccacgttcggcgactcccgcatcaac

SEQ ID NO: 77920 - DNA, 334 bp, Zea mays
aaccggaggagttgtcacagcaaaggtggcagatgagactactaaaccggcaatccaaggagacggcaccgagagcaaggccgggatgagtgatctgctgatgctgaccgacaagtcgcagctgcaggcgctggcgatgctgctgcggaacaacgaggagctcatgatgagccaggcgattaagtcggagacggaacgcattgagtacctcaagacggtgagcgactgctacacgcggacgatgaagctcctccacgattccatggcggccaggaccacgtacgatcgttcaggcagattgatgatccacgtcacccgggacatggacgactac

SEQ ID NO: 77921 - DNA, 390 bp, Zea mays
  unsure (1)..(390): unsure at all n locations
atcctcctcttcctcctcctancacagctagcgcctgctccccttcgtctgtgatcatgtcttgcagcagcggcaagtgcaactgcggctccagctgctcctgcggcagctcatgcaactgcatgtcccctgacgtggagaccgccgccgccagcagcatcaagaccatggtcctcgctgcgccgaccaccaaggccagcgccggcggcttcgaggcggccaccgagggcggcggctgcgactgcaacacctgcaactgcggcaccagctgcggctgctcctgctgcagctgcaactgagccggcccgcccggcccggcgatggcgcacgagagtcgagaggacgacgacgacgaggcgtataaatataatagcagcgtctaaataagat

SEQ ID NO: 77922 - DNA, 392 bp, Zea mays
aaactactacgtcaaccgcggcttcgaggaggtcacgggctaccgcgccgaggaggtcctcggcaggaactgccgatttctgcagtgcagagggccattcgctcgaaggaggcaccccctagttgatgctgcactggtttcagagattcgaagatgcatagacaatggcattgagttccgtggtgatttactaaatttcagaaaagatggatctccagtgatgaacagattgcatctgacccctatttatggagatgatgaaaccataacccattatatgggcattcaattcttcactgatgctaatgttgatttgggaccattgccctgttcaatgacaaaggaaccagtgaggtcaacacggtttgctctagataacacatttcgaccca

SEQ ID NO: 77923 - DNA, 408 bp, Zea mays
acaaaactctacactgagtcgtagtatcagccaagtgcaagtgatcgagctcccccctcctcatcagtcgctaggcacagcgcacttgcaggatggcgcaggtctctaagacgcttctccttgtggccctggtgttcgtgtcgtcggcggcggtggagctgtgccgcgcgatcgacttcgacgagcgggacctggcgtcggacgaggcgctgtgggacctgtacgagcggtggcagacgcaccaccgggtgcaccggcaccacggcgagaagggccggcggttcgggacgttcaaggagaacgtgcgcttcatccacgcgcacaacaagcgcggcgaccggccctaccgcctccgcctgaaccggttcggcgacatggggcgggaggagttccggtccacgttcgccg

SEQ ID NO: 77924 - DNA, 377 bp, Zea mays
  unsure (1)..(377): unsure at all n locations
ttaaactgnatgagatattcacatggtggcaccggattccaaagcacatgaatttcctgaagcatttctgggagggtgatgaggacgaagtgaaggcgaagaagactcggctgttcggcgccaacccaccgatcctctacgttctccactacttggggcggaagccatggctgtgcttccgggactacgattgcaactggaacgtcgagatcttgcgggaattcgcgagtgacgttgcgcatgcccgctggtggaaggtgcacaacaagatgccgaagaagcttcagagctattgcctcctgaggtcaatgctgaaggctgggctggagtgggagcggcggcaggccgagaaggcgaacttcaccgacgggcattgg

SEQ ID NO: 77925 - DNA, 385 bp, Zea mays
tacaagactctagactgggtcctagtagcggcgaggccaccatgagcactctcaagttctgccgggaatgcaacaacatgctgtacccgcgggaggacaaggagacgcgcaccctcctgtacgcgtgccaaacgtgcgagcatgaagagattgccactgatacttgtgtgtacaaaacggttatccgcaagcctggtggtgagcccaaggatgtcctgaaggatgcagcaactgatcctagcctgcctcgcaccagaagcgtcagatgttacaactgcaaccatccagaagctgccttttttcaagcccctactaaaggagaataagccatgacgctgtacctcaactgctgcaacccaagctgcgggcacaggttgagggactg

SEQ ID NO: 77926 - DNA, 389 bp, Zea mays
atcatcatcaggttctccgttccactccatggtcttccctgctgtgcccctcctcgccgctctgctcctggtcgccgccacgcggctgtgggactacgtcttcgtgcgcctcgtatggcggccgtacgccatcaccaaggggttcatagagcaagggatccatggaccctcctacaggttcttcaagggctgcaacgaggagatcaggagcatgaatgagaagaccgacggtctcgtgctggacgtcggcgaccacaagtacctcccgcggatcgcgccgcactacctcgaatggagggctcagtacggagaaccatttctatattggtacggggcacaagcccgaatttgcatatttgactacgaactagcaaggcaaatcctttcga

SEQ ID NO: 77927 - DNA, 416 bp, Zea mays
tacaagcccctatactgagtcatatcaacgacaggtacaacgattttgtgacacctgaggagaaggaagggttgattggaaagcttcaggaggttgaagattggctatatgaagatggtgaggatgagacaaagggagtctatatttctaaactggaagatcttaagaagattggtgacccaattgaggcacggtacaaggagtcgacagaaaggggttcctctgtagatcaactggtctactgcatcaacagtttcagagaggctgctttgtccagtgaccaaaagtttggccatatcgacatatctgagaaacagaaggtcatcaatgagtgctctgaagtagagaactggttgagagagaggaagcagcagcaggacgccctacctaagcacaccgatcctgtgctgctcgta

SEQ ID NO: 77928 - DNA, 384 bp, Zea mays
agagaaagcagaccaacctagccacccagggagaaagaggccaaaagggaggggagagtgtcgtcatggcttccattgtcgcttccaggagggccgttcctctagttcgcgctctggagaagctcatcgcagcgtcctccgctcccgggactggctccgccctcaggccggtggcagtcgccggcggcctccgcggctacaacaccggcgctccgctccgacgctacgagggggccgagtcggaagacgatagcgtccgcgagtacgatgggcggcacggcggccgggactacgctgtgcccagcctgttctcagatattttccgtgatccgcttagtgcgccgcacagcattggccgcctgctgaaccttgtggacgacttgg

SEQ ID NO: 77929 - DNA, 364 bp, Zea mays
acttcttcatcgacctcctcctcctagcacagctagcgccagctcaccttcggctgggatcacgtcgtgcagcagaggtaagtgcgactgtcgcaccagctgctcctgcggtagctcatgcatctgcatgtcccctaacgtggagaccgccgccgccagcagcatcaacatcaccgtcgtcgccgcgccgaccagcaagggtagcgccggcggcttcgaagccgccaccgacggcggcggctgcgactgcaacacctgcaactgcggcaccagctgcggctgctcctgctgcagctgcaactggaccggtcatgccatggcgcacgagagtctagaggacgaagatgagtcttacaaatataat

SEQ ID NO: 77930 - DNA, 356 bp, Zea mays
ttacaacaccctgatgtgagtcgtattaaatccactgtctccgggtggtgtccgcattggcgcgccagcaatgacctcgaggggtctactggagaaggatttcgagcagattggggagttcctccaccaggcagtgagcatctgcctgaacaggcagaaggagtacggcaagctcctcaaggacttcaacaagggcctggtgaacaacaaggacatcgagaacctcgatgtccaggtggagaactttgccgacaccgtcgacatgcctgggttcacgcttgagagcatgaacgacaacgagtatacatgccccccatgcaccgcaaggtcctcctgtaccgacatccttccttgtg

SEQ ID NO: 77931 - DNA, 379 bp, Zea mays
actccctcgcgtccgccgcggcaccggtactacgagtgcttcgctaccagccagccagcacactctatgagtcgccatcttccactccaccgaggcagctccaagccatggccatggagaaggccgcctccttcctctcctccctcttaagcggtggcggcggggagccggcggggactgtgaaatctatcttcatataccctatcaagtcctgcatgggtcttgccgtgtcacaggcgcccatcacctccactgggttccggtgggatcggcagtgggtggtggtgaacgccaaatggcgagcatacacccagagggtggagcccaagcttgctctggtccacgtggagttgccgccggaggccttcgctgagaactg

SEQ ID NO: 77932 - DNA, 409 bp, Zea mays
ccctataatgagtcatattacctcgcgcccccgctcgcttcacttctctaggtgcgcaccgatcagaagagatggcggtgccgctgctgacgaagaagatcgtgaagaagcgggtcaagcagttcaagaggccccacctcgaccgctacaagtgccttaagccaagctggcgcaggccaaagggtattgattcccgtgtcaggaggaagttcaagggatgcaccttgatgcccaacattggttatggttctgacaagtcgaccaggcactacctccccagcaagttcaagaagtttgtggtccacaacgtttctgagctggagttgctcatgatgcacaacaggacctactgcgctgaaattgctcacaacgtgtccaccaagaagcgcaaggagatcgtggagcgtgc

SEQ ID NO: 77933 - DNA, 382 bp, Zea mays
gtattcctcgaattcttgttccccggtccctcctcctgtccccgcgtagatccgtccgtccgaggagcacaccgtccccacccccatgtttacccaccagttcctctgacggccgccgtgctccgatgaagctgagcgtgctccgtatccgccgctcccactccttctccgtcgccttcctctactggttctacgtcttctcatgaacgcatcgcccctctccacctgctgatccttcgccgtctctctctctctctctctctctctctctcttagatagtcttttgaatccatctctagggctcttgtttctcgccatcctcaccgcaccccaccccgcaccaaacagattcaatccgacaagacaagcatcgatgtcgtc

SEQ ID NO: 77934 - DNA, 317 bp, Zea mays
aggcggacgaggacctgtgccaagcaacaatgggtatctcacgcgactcgatgcacaagcgccgtgccaccggtggaacgcagaaggcctggaggaagaagcgaaggtatgagcttggtcgccagccggccaacaccaagttgtcaagcaataagacagtgaggagggtccgtgttcgtggaggtaacgtgaagtggatggctcttcgccttgatactggtaactactcatggggaagtgaagctgttacccgcaagacccgtatcctccacctggtctacaatgcatcaaacaatgagcttgtgaggacacaaacc

SEQ ID NO: 77935 - DNA, 330 bp, Zea mays
gaagggcattgctgagggtaacctgaatgctgcagttgttgattgttgcattggtattccagtctactttacggatctgcagcgcagggctgttcttgatgctgctactattgcgggtctccagccattgcgattgttccatgagacaacagccactgcactggcatatggtatttataagactgatctcccggagaatgaccagttgaacgttgcatttgttgatgtcggtcatgcaagcatgcaggtcagtgttgtcggttacaagaagggacagctcaagatgttgtcgcatacgtatgaccagtctcttggcgggagggactttga

SEQ ID NO: 77936 - DNA, 351 bp, Zea mays
attcgggcgtcgacacacgcgaccgcccacaccccccgagctcagcttagctccactccagctccaatcacagtcgtgaccagagcgcgagagctagctagagggccgtgaaaatgccgatcaataggatcgccctggggagccaccaggaggtgtaccacccgggcgccctcaaggcggcgttcgctgagttcatctccaccctcatcttcgtcttcgccggccagggctccggcatggccttcagcaagctgaccggcggcggcccgacgaccccggcgggcctgatcgcggcggcggtggcgcacgcgttcgcgctgttcgtggcggtgtctgtgggcgcgaacatct

SEQ ID NO: 77937 - DNA, 325 bp, Zea mays
caggcaacaaggcaccacacctcttcttcttcttcctcctcctcctagcacagctagcgcctgctccccttcgcctgtgatcatgtcttgcagcagcggcaagtgcgactgtggctccagctgctcctgcggcagctcatgcaactgcatgtcccctaacgtggagaccgccgccgccagcagcatcaagaccacggtcctcgccgcgccgaccaccaaggccagcgccggcggcttcgaggcggccaccgagggcggcggctgcgactgcaacacctgcaactgcggcaccagctgcggctgctcctgctgcagctgcaactga

SEQ ID NO: 77938 - DNA, 367 bp, Zea mays
atcgccacctcgttcgccgcctctcctgctcctaccgcagctctccctcatgtttagtgttcgcaatggcggccttcaacaagcttggtggccttctaaggcacagtgctctggtgagcggtatcactggtggctcttctcctgcagtgttcaatgctgcacggctcatgtctaccaagctatttagtggtggtcttgactggggtgttgatgacgtgaaactaagacaagcatttagcagctttggagacgttactgaagcgagggtgatcacagacagggagactgggatgttcaaaggctttggctttgtgaactactccgacagtgattctgccaatgaagctatttctgcaatggatggcaa

SEQ ID NO: 77939 - DNA, 371 bp, Zea mays
tcaggaatcttgagattttggtcggaaagcaaactgagaacatttcaactctacagcaagctaatgaagagttacaaaagaacatctacactttgactgagcaatcacaacaggtcaaggtggagatgcaaagtgatttgaaggcaatacaagaagagaagaatgcggtgctatcacaactgaagcagtcagaaacttcagtacaaaatcttgagaatgaggtgatacgactgaaagaggagctttctgtccagctagaaaacaattccaccttggacaagcagtttgaagaagccaggagcaatctgcatgctgaaatttcagagctacgtgcagataagaacacatctctattgaaattacagacgtct

SEQ ID NO: 77940 - DNA, 366 bp, Zea mays
aggccggtaggaatacggcgtcgacccacgcgaccgggcacctatctggtataggacggagctgagcttctagcaacgtacagtgtatccgccatgagtcctttcggggcggtgatcacgccagaaaccctcaagtacatgtccaagtaccagggacgtgagatcacgcaggtggactgcgcacgggaggcgatgaggctgatccacgcggaagacaagaacctcaaggccgaggactcagcgtgggagctgaagaagaagttcggcaacggcgtgagcaccatggtcctcgtctacaacgccaccggggccagcctgagcctggtggacgacgggaaagactggatgggctccgtctacagctcg

SEQ ID NO: 77941 - DNA, 323 bp, Zea mays
caacaaggcagcagcacaagcaagaaccacacctcctcccttcgcctgtgatcatgtcgtcttgctgcggcggcaagtgcgggtgcggctccagctgctcctgcggcagcggatgcaacggctgcggtatgtaccctgacgtggagaccgccgccaccagcagcgtcaagaccacggtcctcgccgcgccgaccaccaaggccagcgccggcggcttcgatgcggccaccgagggcggcggctgcgactgcaacacctgcaagtgcggcaccagctgcggctgctcctgctgcagctgcaactgagctggcccggcccggcga

SEQ ID NO: 77942 - DNA, 402 bp, Zea mays
  unsure (1)..(402): unsure at all n locations
ttgcaacaccctgacgtgagtcgtagaagcttggcaacgaaagcaacgaattattcaaaccgaaaacaatggagccggtgcggaagagcgtgtgcgtgaccggcgctggcggcttcgtcgcgtcggagctggtgaagctcctcctctcncggggccaatacgcggtccgcggcaccgtgcgcgaccctggtgctagcaagaatgcccatctcaaggtgctggaaggagctgaggaaaggttgcagcttctcaaggctgatctgatggactacaacagcattgcatcagcagttgccggctgtgagggtgtcttccatgtagccagtcctgtcctttcccatcgaccctccaaccctgaggtggaggtcatagctcccgctgtaataggtacaaccaatgtgt

SEQ ID NO: 77943 - DNA, 345 bp, Zea mays
tcggcccacgcgaccgctcatttcaaatccatccatcctcgtttcctccgtcccgcagcatctcaaccccatggccaagatcaagatcgggatcaatgggttcggcaggatcggaaggctggtggccagggtggccctgcagagtgacgatgtcgagctcgtcgccgtgaacgaccccttcatcagcaccgactacatgacctacatgttcaagtacgacactgtgcacggacagtggaagcaccatgaagtcaaggtgaaggactccaaaacccttctctttggtgagaaggaggttgctgtgtttggctgcaggaaccctgaggagatcccgtggggttcggt

SEQ ID NO: 77944 - DNA, 354 bp, Zea mays
ggaatacggcgtcggcccacgcgaccgtgaatttgctgatgactctgagaggccaccacggagaaactatgagcgccacagcgggactggccatggctatgagatgaagcgtgatggcgcagggcgtgggaactggggcactgccactgatgaacttattgcccaggatgcagaggactccccgaagatggaggaggctgctcctgttgctgagaaacaaggtgagcagaatgatgccccagcagcagatgagaacaaagataacaaggatgctactgcaaatgaggaggaagaaaaggaagaggacaaggagatgactctggaggaatttgagaaaataagagaggagaagag

SEQ ID NO: 77945 - DNA, 321 bp, Zea mays
ggatttcgcacactacaaatctggagtgtacaagcacatcaccggtggcattatgggtggccatgccgtcaagttgattggatggggaaccagtgatgctggagaggattactggcttctggcaaatcagtggaatagaggctggggcgatgatggatacttcaagatcataaggggcaaaaatgaatgtggcatcgaggagggcgttgttgctggaatgccatcgacaaagaatatggttccaaacttcggcggtgccgttggaagagctatagtttaattggttacgtttgcatggcctcaaatgctgttggaattaag

SEQ ID NO: 77946 - DNA, 324 bp, Zea mays
cgaatgctcctgacatggaaatattttccatgtacggagtaggcattcctactgaaagggcatatgtctataagttggccccacaggcagaatgttatatacctttccgaattgacacctcggctgaaggcggggaggaaaatagctgcttgaaagggggtgtttacttagccgatggtgatgaaactgttccagttcttagtgcgggctacatgtgtgcaaaaggatggcgtggcaaaactcgtttcaaccctgccggcagcaagacttacgtgagagaatacagccattcaccaccctctactctcctggaaggcaggggca

SEQ ID NO: 77947 - DNA, 387 bp, Zea mays
ggcagctgatgtggagtaccgttgcttcgtcggcgggcttgcctgggccaccagcaacgagtcgctggagaatgccttcgcctcctacggcgagatcctcgactccaaggtcatcaccgaccgggagacggggaggtctcgcggcttcggcttcgttaccttctcctccgagaactccatgctcgacgctatcgagaacatgaacggcaaggagctcgacggccgtaacatcaccgttaaccaggcccagtcccgtggcggtggcggtggcggcggtggctacggcggcggtcgcggcggcggcggctatggtggcgggcgccgtgacggcggttatggcggccgtggcggctacggcggtcggcgcgagggtggtggcggcggcta

SEQ ID NO: 77948 - DNA, 326 bp, Zea mays
ccgagtacggagaggcaagccagtaccagatccaagaagtcattggtaaaggcagctacggggtagttgctgcagctgtagatacccgcaccggtgagcgggttgctatcaagaagatcaacgatgtgtttgagcatgtctcggacgccacacgcatactgcgggagatcaagctccttcggttgcttcgtcacccagacatagttgagattaagcacatcatgctccctccatctcggagggagttccaagatatttatgttgtttttgagctcatggagtctgatctccatcaagtgatcaaggccaatgatgacctcaccccg

SEQ ID NO: 77949 - DNA, 341 bp, Zea mays
cacgcgaacgcccaagcgtccgcccacgcgtccgggggcgacgacttcagagcgctggtgttcgagttcatgcccaactacagcctggacaggtggctgggcgtcaaccccaggtctgaagagccgaggatcgtgaagagcctgagcgtgatccagaggctcaacatcgccgtcgacatcgccgacgcgctctgcgatctctacacacaatctcgttagcgcatatcgtcaagtgagatgtcaagcccagcaacgttctcctcggcgaggacatgagggcggtggtgggcgacttgggccttgcgaagctgctacatgagtccgggagccatgacacttgc

SEQ ID NO: 77950 - DNA, 323 bp, Zea mays
cgagaagtacgagtaccaggctgaggttacccgcttgatggacttaattgtacacagtttatacagccacaaggaagtatttttacgtgagcttgtaagtaacgcgagtgatgcactggataagctgagattcctcagcgtaactgatccttctgtgttggctgatggcggtgagttggagataaggattaaacccgacctagaggcggggacaatcactatcacagatactggcattggaatgactaaagatgagctcaaagactgtcttggaaccattgcacaaagtggcacctcaaagtttttgaaggctctaaaggaga

SEQ ID NO: 77951 - DNA, 343 bp, Zea mays
cagcacaggtgcatcggcgccaccaccctggaaggattaccgcaagtacttggaaaaggacgcaccgttcgagcggcggttccagcaggtgttcgtcgcggagccgagcgtgcccgataccgtcagcattctgaggggactcaaggagaagtacgaggggcaccatggcgtgaggatccaggaccgcgccctcgtggtcgcggcacagctctccgcgaggtacatcatgggtcggcacctgcctgacaaagccatagacctggtggacgaggcctgcgccaatgtgagggtgcagctcgacagccagccggaggagattgataacctggagaagaagagaatc

SEQ ID NO: 77952 - DNA, 324 bp, Zea mays
ccacgcgtccgctcgccggctcggggacgccgccgctggagaccacgggcttcgcgctggcgccggggcagtcgcgcgcgctgtacgcgccgcaggggtggtcgggccgcttctggggccgctccggctgcgacttcgacgccgcctccgccaagggctcctgcgccacgggcgactgcggctccggcgaggtcgagtgccgcggcgcgggggcgtccccgcccgccacgctcgccgagttcacgctcgacggcgccggcggcaaggacttctacgacgtcagcctcgtcgacggctacaacctgcccatgctcgtgcgggcca

SEQ ID NO: 77953 - DNA, 330 bp, Zea mays
caggattgtcttctgcccatgggaattacttctgaaaatgttgcccatcgatatggtgtaaccaggcaagagcaagatcaggccgccgctgagtctcataggagagctgctgcagccacggcctctggaaaattcaaggatgagatcgtcccggtcccaacaaagatcgttgatcctaaaactggagaggagaaggaagttgtgatatcagttgatgatgggattaggccagggaccacagcatctggattggcgaaactgaaaccagtttttaaaaaggatggaactacaactgcaggcaattccagtcaagtgagtgatggtgctgga

SEQ ID NO: 77954 - DNA, 325 bp, Zea mays
acagcccacgcgtccgcgcacgcgtccgctgctacccccaatttttgcatcagatgagagcacttcttgttcacaatggaacacagccatggaaaaacgtacacgatggacaagacaggaagttgtcggtaactttcgtattggagatgtgtttggaaattgttgtcgactcaacggcctacatgcattgacatagttcacagttgtcactcacaatgctatagaccgacatgattctgagaagttccctttctcaattttcgacaagaatggcaagtagtgtgcatgccttatcgactgccaccacactgagcaacacggatgg

SEQ ID NO: 77955 - DNA, 353 bp, Zea mays
gcattcgcgcggtcgacacacgcgaccgcccacgcgtccgcccacgcgtccgcggacgcgtgggtgaactcaagaagctagtggaagaaggaaaggttaagtacattgggttatccgaagcatctgcatcaacaatccgaagagctcacgcagtccatcctatcactgcagtacagcttgaatggtcattatggtctagagatgcggaagaagatataattcccacttgcagagaacttggaattggaattgtagcttacagtccactaggcagagggtttttttgtagtggagcaaaactagttgactcactgtcagagcaggacttccgcaagcatatgcctagacttcaa

SEQ ID NO: 77956 - DNA, 321 bp, Zea mays
ccacagccagcacgccaggctcctcctccagctcctgttcgagatggtggtggctccatgtttggaggaattgggtccaccattgctcaaggtatggcgtttggcacgggtagtgccatggcacacagggctgttgactctgtattaggtccccggaccatccagcatgagactcttgccacagaagctcctgctgctgcccctgctgctccagcgatgaatgctgatgcttgcagcttccattctaaggctttccaagattgtctcaacaactatggcagcgagatcagcaagtgccagttctacctagacatgctgaac

SEQ ID NO: 77957 - DNA, 397 bp, Zea mays
  unsure (1)..(397): unsure at all n locations
agcagcagcacaagcaggagccacacctcctcccttcgcctgtgatcatgtcgtcttgctgcggcggcaagtgcgggtgcggctccagctgctcctgcggcagcggatgcaacggctgcggtatgtaccctgacgtggagaccgccgccaccagcagcgtcaagaccacggtcctcgccgcgccgaccaccaaggccagcgccggcggcttcgacgcggccaccganggcggcggctgcgactgcaacacctgcaagtgcggcaccagctgcggctgctcctgctgcagctgcaactgagctggcccggcccggcgatggcgcacgagagtcgagaggaggaggacgacgacgaggcgtataaatataatagcggcgtccagtaaataagatcctgt

SEQ ID NO: 77958 - DNA, 378 bp, Zea mays
attcacggtcgaccacgcgtccgattttgtgttccatctcaggttgaggttgcgctcaagctctccaagatgcaagagtacactggccgctctgcccccaccgttatcacataaatttttgaaaagtgatttacaatgagttgacgcgcttacacaaattttcattcaagcctcttgttctaaagttctacttcctgttgcatctcaccaatgaataaaatgtatgtatcaagaccgaaaccgtagcactgcgcaagatccgcaagtaccagaagaacaaagaagctgctgatccgcaagctgcccttccaacacactgatgcgcaagatcgcacaagaattcaagacaaaacacaaggggcgggccccccaaagtgt

SEQ ID NO: 77959 - DNA, 346 bp, Zea mays
tcggaccacgcgaccgcacaaacagaaactgaactaaaagagaagaagttgagagttgaggatgccctaaatgcaactaaggctgccgttgaggaaggtattgttgttggtggagggtgcactcttttgcggcttgcagctaaagtcgacgccatcaaggatacactggagaacgacgagcagaaggttggagctgaaatagtaaggagggccctgagctacccacttaaattgattgctaaaaacgccggtgtcaatggcagtgttgtcactgagaaggtcctttccaatgataacttcaagtatggttacaatgctgctactggacagtacgaggacctgatgg

SEQ ID NO: 77960 - DNA, 324 bp, Zea mays
agcaaaagttattattgatgcaaacacaggccgttccaggggctatggatttgtcaggtttggagacgacaacgacaaatctcatgccatgtctgaaatgaatggtgtatattgctctacgaggccaattcgtataggacctgcgactcccagaagatcttcaggtgattctggctcctcgactcctggtcattcagatggtgattcttctaacagaacggtatatgttggtgggcttgaccccaatgtcagtgaagatgaactgagaaaagcctttgccaaatatgatcttgcctctgtgaaaattcctctaggaaagcaatg

SEQ ID NO: 77961 - DNA, 322 bp, Zea mays
ggctaggctaggaagacgcagccaatggcggggcttcacttcgtgctcgtgccgctactggcgcagggccacataatcccgatggtggacctggcgcgcctcctcgccggccgcggcgcgcgcgtcagcgtggtcaccacgcccgtcaacgccgcgcgcaacggggccgtcgtcgagagcgcgcggcgagcggggctcgacgtcgagctggcggaggtcgcgttccccggcccggggctcgggctgccagaggggatggagaacgtcgacatggtggcggaaaaggagcacttcatgcccttcttccaggccacgtggaaga

SEQ ID NO: 77962 - DNA, 381 bp, Zea mays
aaagtaagcttcttgaagtaatagattcgagtgagttgccagaattccttggtggatcatgcacatgtagtgacaagggtggttgccttggatcgaacacagggccatggaatgatccttatatattgaagctgatccacaatttggaagctggatgcatgacggaaaccaccaaacccgtttctgaaggcggtgaaagaagcagctcttcctttcggttggaacagatgaaatggcagggcatgttaagcgatacatcaaatgctgaatcaggatccgatgttgatgattttggtccatcatttgttcataaagtttcaggctatggttgcttgactccggttcgtgaggaagtaaagggcacagattgtgcaacatact

SEQ ID NO: 77963 - DNA, 394 bp, Zea mays
  unsure (1)..(394): unsure at all n locations
agctccaatctggtataggacggagctgagcttctaccaacgtacagtgtatccgccatgagtcctttcggggcggtgatcacgccagaaaccctcaagtacatgtccaagtaccagggacgtgagatcacgcangtggactgcgcacgggaggcgatgaggctgatccacgcggaagacaagaacctcaaggccgaggactcagcgtgggagctgaagaagaagttcggcaacggcgtgagcaccatggtcctcgtctacaacgccaccggggccagcctgagcctggtggacgacgggaaagactggatgggctccgtctacagctcgccgatcccggacaccttccacaacgggcagtggatcgccttcctccacgtcaagcccggctcgc

SEQ ID NO: 77964 - DNA, 410 bp, Zea mays
aaggtttagagaaactccccggctcgaggagatcgtgacattgagaggacgatgggagggcgcgcgctcctcctcctcctcctggtctcggcgttggtctttcagatccacgcctccgacacgctgctgtacgagccgttcgatgaggactttgaggggagatgggtcgtctccaagaaggatgaataccaaggtgtgtggaggcatgccaagagtgatggtcatgaggactatggcctccttgttagtgagaaggcaaggaaatacgccataatcaaggagcttgatgagccagttaccttgaacgatgggacagtggtcctgcagtttgaagtgagacttcagaatggccttgaatgctgaggtgcctacattaagtacatccgccctcaggatgctggatgggatgc

SEQ ID NO: 77965 - DNA, 348 bp, Zea mays
gggtcggcccacgcgaccgggaatggaaagaagagggtacaaggaggttggtttccttagagaggtcgacgaagtagtgagaacaggagtgacgcctgcggagaggctgctgaacctgtacgagaccaagtggcaacgcaacgtcgaccatgttttcgagcatttgttatactgattactgaggatgacgccgccgaacgacgttggactgagcttgtagatgtaccccgtaccctaatacagagtctcgtcttgattcattcaatgcctgagccggaagggctcagtttcaggcacacaggagcagagcttttggttggttgttgacgggggcaaccgctgcacagc

SEQ ID NO: 77966 - DNA, 354 bp, Zea mays
gaatacggcgtcggccacgcgaccgcttacgtgtacccttcccatccccgccgttctctctctcttttcccactctcccacacttcctccattgttccctttttctctcgcggagtagcggtgatccagacaccgagtgtcctacgcgtcacggaccgtgcacatggcggcggggtcgatccgggtcaccatggaggtgggcgccgacggcgtcgcgctcataaccatcgccaacccgcccgtcaacgcgctccaccccatcatcatcgccgggctcaaggacaagtacgcggaggccatgcgccgtgacgacgtcaaggccatcgtgctcaccggtgctggaggcaagttctg

SEQ ID NO: 77967 - DNA, 324 bp, Zea mays
catcgatccgccattgctcaccgcacacgtgcacgctcacctcacacacgcagctgactctctaacgccgtacgcgagaacaaggataggctcgacatggaccgacgagaacaagcacggcctgcagctgctggacttctgggtgagcccattcgggcagcgctgccgcatcgcgctggacgagacaggcctgacctacgagtacctgtaccaggacctgcggaaatcgagcgatctgcgcctccgcgccaacccggtgcacaagaatatccccgtgctgctgtacgacagcagcgtcgtctgcgagtccctcgtcatcgtgca

SEQ ID NO: 77968 - DNA, 342 bp, Zea mays
tcgacacacgcaaccgctcgcagcgcacctcttcgagatctcggcatcgtacgagaatcaacaggacattcagctcatgaggtttgctgattactttggccgggcatttgcagctgtgagcgcatctcaatttccatgggcaaagatgttcaaagaatcaacagtgtccaagatggttgatatcccattgtgccatatatctgaggctgtgatcaagactgtgagtgattggatcagtcaaagatcttctgatgccctgggagactttgttttgtggtgtatagatagcatcatgtctgaattgtcaggtccatcagctggccctaagggttcaaagaaggt

SEQ ID NO: 77969 - DNA, 356 bp, Zea mays
gcgtcgacccgatcgcagacaggcaaccggttgccaaagaattccctcccctagccgccgccgccgctcgtctccctgagaggtgccgggaccgaggaactggccgagttctaggtagagaatcggttttgcttgtctcagcacggggtctgctgcgtctggtggtggtgaaggggagaaattcgtgagatctgttccggatcaggcgtgcgagctcgggaatcaggggtttcacacatagcttcgtcgatttgaatttgatgtactaatggagtctaagggtggcaaaaagtctagcagtagtcgttccatgatgtatgaagctccccttggctacagcattgaggacgttcgac

SEQ ID NO: 77970 - DNA, 384 bp, Zea mays
attcagattgtatccagcctgcgtgcttcctccccaaattcttcggtcagaagagcaagatgaagactcgaaaggcaaggtctgagctgggacataacgccggcaccctgcccgagcttgttgccgagccaacatcagctcggtcgatgtcatttgtcgggacccatgaatacttggcccctgaaatcatcaaaggcgaagggcacggaagcgctgtcgactggtggaccttcggcatcttcctgcatgagctgctgtacggcaagaccccgttcaaggggtcagggaaccgtgccaccctgttcaacgtggtaggccagcaactgaaatttccagagtcgccgtccacaagctactcgagcagagacctcatccgtgggctct

SEQ ID NO: 77971 - DNA, 361 bp, Zea mays
aaacgactcccacccggtggctcgtcctcggacgccaagccactccgcgccccaatccggaagcgccgacgccgccgatggaccggccgtcgacccatgctccgcgcggcgctcttccgctcagcccccgggctccgccggtctccggcgacggcccacttatcgaccgccgccgccgccgcagcgtggctctccaacggtgcggtctccatgccgcctaaggtgcgcctcctcatcggcggggagttcgtcgagtcgcgcgccgacgagcacgtcgacgtcaccaaccgcgcgacacaggatgtggtgtctcggattccgctcactacgggcgatgagttcagagctgccgtcgatgccg

SEQ ID NO: 77972 - DNA, 453 bp, Zea mays
  unsure (1)..(453): unsure at all n locations
gggccacccacgcgtcgggaaaaaccctccccttcgcttccttcccaagcgcggacgccaaccagacgaaatggccccgaagaaggacaaggccccgccgccgtcgtcgaagccggccaagtccggtggtggcaagcaaaagaagaagaagtggagcaagggaaagctaaaggagaaggtaaacaacgcggtgctgttcgaccaggctacctacgacaagctgctctcggaggtgcccaagtacaagcaaatcaccccttccatcctctccgagcgtctgaggatcaacggctcccttgctcggagggccatcaaggacttgatggcgcgtggcctcattcggatggtctcggtccactcaagccagcagatctacaccagggcaaccaatacataaggatggggaagaggtctaaaatgcattgtctgcactctctgcaagangagctcgtc

SEQ ID NO: 77973 - DNA, 420 bp, Zea mays
aaagacccctgagctgatgcccctcagccatgtccttgccaccaagcttggtgctcgtctcacggaggttcgcaagaatggaacctgcccctggctcaggcccgatgggaagacccaggtgacagtggagtaccgcaacgagggtggcgccatggttcccatccgtgtgcacacagtcctcatctctacccagcacgacgagacagtcaccaacgacgagattgctgctgacctgaaggagcacgtcatcaagccagtcatccccgagcagtacctcgacgagaagacaatcttccacctcaacccgtctggccgcttcgtcatcggcggacctcacggcgacgctggcctcactggccggaagatcatcatcgacacctacggtggctggggagcccacggcgggggcgccttctccgg

SEQ ID NO: 77974 - DNA, 374 bp, Zea mays
aagtcaccgaaccgccttgtcgtcgacgaggccaccaacgacgataactccgtcgtcgcactgcaccctgacaccatggagaggctgcagctcttccgcggcgatactgtgctcctcaaggtctgatatggctaatctgagcttgttgcagcagcttggggatgttgagctaatctagcagattgtattatcacgtgaccgatctgtgtgtgttcgacctgaattccgtgtattcagagtgcagacctgttagaaataaccttagcttttgtcacaagtacttgctgaagtgtttaatgttgtaatttgttgtattgtttgagaacttgagtatgctgaggcattgagggtatttgggctcctcctgctttgct

SEQ ID NO: 77975 - DNA, 444 bp, Zea mays
aggacaacgccgcgcgccgctccggcgcggagatcgagaccatgaagaagtacaacgctggtatgaacaatgcggcgtccagcgggacatccctcaacaccaggcgcctcgacgatgacacagagaacctcgcccatgaccgagttccaagtgacctgaagaagaatctcatgcaagcaaggctcgataagaagttgacccaggcacagcttgctcagatgatcaatgagaagccacaggtgatccaggagtatgagtcaggcaaggcaattctcaaccagcagatcattggcaagctcgagagggccctgtgaacgaagctgcgtggcaagagataaccaggagcagcatagggaagacaaggcacactgtctgcttattatttgctatgtttggtaactcaagtcaatgcggactgtttgtgttggtacaagagtgaattac

SEQ ID NO: 77976 - DNA, 440 bp, Zea mays
gacgaaacacagctagctcgctgtggcagcatgttccgatctgccgtgcagcgtctcgtcagggccagcgggaagagtacggccgacccagccgccgccgcgtccgctttcttcctcagtcgcttctccgcggcggccgggccgccaccgccaccgccacagaggctggctggaaaggtggcgctgatcaccggcggcgcgagcggcatcggcagggcaacggcggcggagttcgtccggcacggcgccaaggtcatcctcgcggacgtccaggatgacctgggacgccacgtcgccgcggagctgagcctgccgggggggcccggcccggcggccgtccactacacccgctgcgacgtgaccgacgaggcgcaggtcgcggcggcggtggacctggccgtggagctgcacggccgcctcgacgtgatgctcagcaacgc

SEQ ID NO: 77977 - DNA, 422 bp, Zea mays
  unsure (1)..(422): unsure at all n locations
gcccgcccgctacccaaccgccgccgcggttctcgctgccagcgacggacgggccacaccgcgcaggggctcagccccgccacccaccttaaccccgccgtcgggaggcgtcgtccccggcccggcccggcccggccctcgccctctactgcaactggactggcgcgtagacctgtccccgccacgagatcgttccgccctatgtcggtgaagatgctctttgcatagctcaagctgcaatctgatggactctgatgacaagaagtttggaaatggaccaagggagctcactggtgctgttgatttgatcagccactacaaactgctgccacaccatgatttcttttgcaagaaacctttgccgctggcaatatcagatacacattatcttcacaatgttgtgggagacactganattcgca

SEQ ID NO: 77978 - DNA, 319 bp, Zea mays
  unsure (1)..(319): unsure at all n locations
agcagacgcgtgggcggacgcgtgggtcacaaagcgcctagcaaaagcatacttcccgaagcactcttgcaatccactgagttctgtttgttgagacgcatagagctagctgctagcgtcgacaatgtcgctcgtgaggcgcagcaacgtgttcgaccccttctcgatggacctctgggatcccttcgacaccatgttccgctccatcgtcncgtcggcgacctccaccaactccgagactgccgccttcgccagcgcccgcatcgactggaaggagacgcccgaggcgcacgtcttcaaggccgacctcnccggcgtc

SEQ ID NO: 77979 - DNA, 456 bp, Zea mays
cgccggtccgaaactcacggggccatgcacgcgtccgaaccttctcggttacttgttcactaacaaggtcgggacggcatggcccttggagctgcgtaccatcactacctgcagctcgccggcgaccatggcaccgccacacacgcactgctcctcggcgtacttatcttcctcgtcatccgcctagtatccgcaaggcgaaccggcacaacctcagccaacaaacgtaagcagcaacagcggcttccgctcccgccttcgcccccgggcaagctgcccatcatcggccacctccacctcatcggcgccgagacccacatctcgatccgggacctggacgccaagcacgggcgcaacggcctgctgctcctccgcatcggcgccgtgcccaccctgttcgtgtcctcgcccagcgccgccgacgccgtcctgcgcacccaggaccacatcttcgcg

SEQ ID NO: 77980 - DNA, 302 bp, Zea mays
cctgttacggattttagcttcgatgatcgttctgctccaatttacacacaacctagatatttgcctccttcaaaggttcttgatgctgatgtgacagacagtgttattggagaagggtgtgttattaaacattgcacaatcaatcattccgtagttggactccgttcctgcatttctgaacgtgcagttatacaggactctttgctaatgggtgcagactattacgagactgagaatgataagaatgtcctttctgacactggtggcattcccattggtaatgggaaaaattcacatatcag

SEQ ID NO: 77981 - DNA, 456 bp, Zea mays
tcgcgggtcgacacaagcctctaaacagaggtcatacaacacagcacaggcagctcgagagagagagagagagaaagatgtcgtggttcgggcaccaccaccacaaccagccggctcccccggcgtcgggccccaaccaggtgttcaagatcttctgccgcgccaacgagaactactgcctggccgtccgcgacggcgccgtcgtgctggccccggtcaaccccaaggacgaccaccagcactggtacaaggacatgcgcttcagcacccgggtcaaggacgaggaaggcatgccggcgttcgcgctcgtcaacaaggccacggggctcgcaatcaagcactccctcggccagtcccacccggtcaagctcgcgcctttcagcccggaccaggaggacgcgtcggtgctgtggacggagagcaaggacgtgggcaagggcttccgctgcatccgca

SEQ ID NO: 77982 - DNA, 471 bp, Zea mays
tcgtaggtcgttacaagactctatactgacgtcgtattacaccacacctcttcttcttcttcctcctcctcctagcacagctagcgcctgctccccttcgcctgtgatcatgtcttgcagcagcggcaagtgcgactgtggctccagctgctcctgcggcagctcatgcaactgcatgtcccctaacgtggagaccgccgccgccagcagcatcaagaccacggtcctcgccgcgccgaccaccaaggccagcgccggcggcttcgaggcggccaccgagggcggcggctgcgactgcaacacctgcaactgcggcaccagctgcggctgctcctgctgcagctgcaactgagccggtcaggcgatggcgcacgagagtcgagaggacgacgacgagtcgtataaatataatagcggcgtctaaataagattctgtcaactgcacccgccattatcgatccatggtcgctc

SEQ ID NO: 77983 - DNA, 431 bp, Zea mays
acgcctctaaagtcaaacgcagtattttttgatgaggtacattcattgacaacacaaacaggtaaagagggtgggtgggttgttgaacgtctcctaaatcagtttcctatcgaacgtgatggtgctggtcagcgtaaacgtgtctacatgataggagctacacacagaattgatatgatagatgatgctatgctacggcctggtagattcgggaagaaacattatgtacctatacctggtgctcgcgaaagggtttcaatattaaaggcactagccagacgcatacccgtttcatcaaccgttgatttggatgtgttggcacttcgagaagagtgcagcaatttcactggcgccgatctagcatcactggtggatgaggcagccatgttagctatggcagagagatggatgtacctcgataacaagacatc

SEQ ID NO: 77984 - DNA, 422 bp, Zea mays
  unsure (1)..(422): unsure at all n locations
gatcttactggtggagttggagctctatatggtcctctgcatggcggcgcaaacgaggcagtacttaaaatgttaaatgagattggaagcatggaaaatattcaagatttcattgtangagtgaagaacaggaagaggaagatgtccggttttgggcaccgtgtgtataaaaactatgaccctcgtgctaaagtcataaggaaattggcagatgaggtgttctcaattgttggacgggatccacttattgaggtggccattgccctagaaaaggcagcgctgtcagacgaatattttatcaagaggaagctgtatccaaatgtggatttctactctgggctaatttatagggcaatgggattccctacagaattttttcctgtgctgtttgctattcctcgcatgggtggctggctagcgca

SEQ ID NO: 77985 - DNA, 387 bp, Zea mays
gaggaggccgtgtcagcggcggaggcggcgggtacggtggatgcgccgtcgtcgcggcgtcactgcggttgcgtgcgccgtgatggctgccgcggctactgcggtcgcggtggctaccgtggtggcggcggtggctacagtggtggtggctgctgctactgctgctaccgccgctacggcagctcctactggaactggcggaactgagctgtggtgcccgcgccgacaacttatcctgttcgctaccgtgttgtttaccctagtccagagtgtttatcttcgttcgtctcgtgtttgttgttgctcatctgtgtatttgatctgcatgtctctctgtgtcagttgttagtgctgtgttcatcctcagctccatcagacccatgcatc

SEQ ID NO: 77986 - DNA, 409 bp, Zea mays
gggtccttgcacgcctctacaatgagtcggattaacgacgccgtgactcggattctgcgcgtcaagttcaccatgggcctgttcgagaaccccatgccggaccccagcctcgcggaccagctggggaagcaggagcacagggacctggcgcgggaggcggtgcgcaagtcgctggtgctcctcaagaacggcaagccgggcgacgcgccgctgctgcccctgcccaagaaggccgccaggatcctggtcgcagggagccacgccgacaacctggggtaccagtgcggcgggtggacgatcgagtggcagggcgacacggggcgcaccaccgtcggcaccacggtcctggacgccgtgaaggcggccgtggacccgtcgacggaggtggtgttcgcggagagccccgacg

SEQ ID NO: 77987 - DNA, 418 bp, Zea mays
aacgcgtgggcggacgcgtgggccggcaccggccccccgcgacgctggtgccgcacatcgcgggcgacgcgttccagctgacggagtggtacacggtgcccaagggcgccatcgtgttcccgtccgtgtacgagtcgtcgttccaggggttcccggacgcggaggcgttcgacccggagcgcttcttctcggaggcgcggcgggaggacgtggcgtacaggcgcaacttcctggcattcggcgccgggccgcaccagtgcgtggggcagcggtacgcgctgaaccacctcgtcctgttcatggcgctgttcgtgtcggtggtggacttccggcgggagaggacgcccgggtgcgacgacccggtgtacatgcccaccatcgtgcccaaggacggctgctccgtgtacctcaagcagcg

SEQ ID NO: 77988 - DNA, 429 bp, Zea mays
cacctgcgtctacgcctcgcttgcggcgactagggcgactgccgccgccgcccttcgcccaagctgcccaggtcttcgtcgggcgctttaccgctgaagagcgcccaccataccagattggccaccagaggattgctacatttgggaaggatgagcaaaggccctgttccattcgccaacattgggaagagagcaaaagatctcttgtacaaggactacaactttgatcaaaagttttttttgtcgacatgttctaactctggtttgaatctcacagccactggtgtgaagatcaatgaagacttcattggtgatatacggacacagcataaaagcagcagaaccactgttgatgtcataatcgatagtgattctaaagtgtcaaccacagtcactgttgatgaagcactaactggtttgaagacttca

SEQ ID NO: 77989 - DNA, 439 bp, Zea mays
  unsure (1)..(439): unsure at all n locations
ggaaagtcaaggtctaactcgcgaccgaaagccacagagaaatggggggccctggccgtccctggcgccggaacgtcttcctcgtcgtgtcgctgcagcttctccttgtggcgccatggcaggacgagacggccgctcgagctctcaatttcaccaggcaggatttccccagggccttcgtctttggtgccggcacgtcagcttaccagtacgaaggggcaaccgatgaagacggaaggagcccaagcatatgggacaactttactcatgcaggtangatgccggacaagagcactggcgacctaagggcggacggctaccacaaatacaagggagacgtgcagctgatgagtgacactggcctggaggcctaccgcttctccatttcttggtccaggcttattccaagaggaagaggagccatcaacnccaagggcct

SEQ ID NO: 77990 - DNA, 343 bp, Zea mays
acgcacacgcgtccggcatcgagtactttcagtgatctgaaggttactggaatccttcctctgaaggaaggcaaccctccgaagttttcccagcgggctcgtttgctcacagctaactatcaagttgtttaatggttgtaccgttgtccgagtgttgatccacttaaatatattcgaatagcatatttttgtgacatggtatgctactggcatgaacttttgcaagtcatgggatggaagatcattttgggttttgaaaaaaaaaaaaaaaaaaaaaaagaacaaaaaaaaagaaaaaaaaaatagagaagagtggaagaaaagacacaaggcgatgaagaga

SEQ ID NO: 77991 - DNA, 444 bp, Zea mays
cactaaggtggtttatgatgagtacaatcatgaaagatatcctcctggagatcccagcaagcgtgcatttgcttactttgtcctgagtggtgggaggttcatatatgcatcactgctgcgtctcctcgtattgaagtttgtcctgagcatgtcagcaagtaaggacgtgcttgcccttgcttcactcgaggtggacctctccagcattgagccagggaccacggtgactgtgaagtggcgcggaaagccagtcttcatcaggcgccggacggaggacgacatcaagcttgccaacagtgtggatgtggcatccctgcgccacccagagcaagatgcagagcgtgtgaagaatcccgagtggctggtggtcattggcgtgtgcactcacctaggctgcatcccactaccgaacgccggagactttggcggctggttctgccatgc

SEQ ID NO: 77992 - DNA, 457 bp, Zea mays
ggtccgagattaacggggccacgcacgcgtccgaaaaggctcacctgatggagattcaggtcaatggtggtaccattgctgacaaggtggactacggctataaattttttgagaaagaggtccctgttgatgctgtcttccagaaggatgagatgattgacatcattggtgtgaccaaaggtaaaggttatgagggtgtggtcactcgttggggtgtcacccgccttccccgcaaaacccacaggggtctccgcaaggttgcttgtatcggtgcatggcatccggctagggtctcgtatacggttgcccgtgctggtcagaatgggtaccaccaccgcactgagatgaacaagaaggtctacaagatcggcaaggctggacaagagacccacgatgcctccacagagtttgacaggaccgagaaggacatcactcccatgggtggcttcccccacta

SEQ ID NO: 77993 - DNA, 430 bp, Zea mays
gggtccacgcacgcgtccaaacttcacctcaatatctctcgtgagactcttcagcagaacaagatcctgaaggtgatcaggaagaaccttgtgaagaagtgtgttgagctcttctttgagattgctgagaacaaggaggactacaacaagttttacgaggctttctccaagaacctcaagcttggcatccacgaggactcgcagaacaggaccaagatcgccgagcttctgagataccactccaccaagagtggtgatgagctgaccagcctcaaggactacgtgaccaggatgaaggagggacagaatgacatatactatatcactggtgagagcaagaaggcagtggagaactcccccttccttgagaagctgaagaagaggggctatgaggttctgtacatggttgatgccattgacgagtatgctg

SEQ ID NO: 77994 - DNA, 446 bp, Zea mays
  unsure (1)..(446): unsure at all n locations
catgagagaagtgcaccaagaaggagagatagattaacgaggccactggtcagtgatttgaaaggggattggtatcctgcagatatgccagaaagcagcatgagaagcctgcaaggttacaaggccttcatctgcatagcgctcctcttgggcgatggtctttacaattttgttaaggttgttgcattcactgttaagagtctacttggcagatcaagactgaagaatgcaaagaaagaggaagacattccagtgcttgatgaaattcagcgcaatgagatttttacaagagacagtatccccacatggctagcctactctggatatcttgcactatcagctgttgctgtgtttgccattcncttgatgttccatgagatgaaatggtactatgttattatagcatacttattggccccggcattgggtttctgcaatgcctatgg

SEQ ID NO: 77995 - DNA, 436 bp, Zea mays
gacgcggcgcggctcaagaccttctccgagtgcgtcagggacgccatcgcgggcctcggcgtcgcgggccaggagaagcagcgcaggctccaggagtgggaccgcgccaccggcggctacgacaggtgcgtgtccaacgaccaggcgcgcgacatcgccgccagcctcggcgtcacgtccgtgttctgggactgggacctgccgcggaccagggaagggttctaccgcttcagggggtccgtggcggcggccgtggtccggggccgcgccttcgcgccgcacgccgacgtgctgtggatggagacgtccagccccaacgtggccgagtgcaccgccttcgccgagggcgtcaaggcggcgtgccccgaggcgatgctcgcctacaacctctcgccgtccttcaactgggacgcgtctgggatgacggacgccgaga

SEQ ID NO: 77996 - DNA, 445 bp, Zea mays
acacgcctctggatttactctgaacaagtgagtatgtgcggcatacttgctgtgctcgggtgcgccgacgaggccaagggcagcagcaagaggtcccgggtgctggagctgtcgcggcggctgaagcaccggggccccgactggagcggcctccggcaggtgggcgactgctacctctctcaccagcgcctcgccatcatcgacccggcctctggcgaccagcccctctacaacgaggaccagtcggtggtcgtcgccgtcaacggcgagatctacaaccacctggacctcaggagccgcctcgccggcgcaggccacagcttcaggaccggcagcgactgcgaggtcatcgcgcacctgtacgaggagcatggagaagagttcgtggacatgctggacggcgtcttctccttcgtgctgctggacactcgccatggcgaccgcg

SEQ ID NO: 77997 - DNA, 443 bp, Zea mays
ggggccacggacgcgtccgcacacgcatccgcggagccgccgcaacccagcgtcccccgaagtctaaccctagatccggaccggccatggcgtcccgccgggtcgtctcctcgctcctccgctccgcgtcccgcctgcgggccgcctcgcccgctgcgccacgcccgcgcgcgccaccgcaccgcccgtccccggccgggtacctcttcaaccgcgctgccgcctacgcctcttccgccgcggcccaggcggcacctgccaccccgccgccggccaccgggaagaccgggggcggcaagatcaccgacgagttcaccggcgctggcgccatcggccaggtgtgccaggtgatcggcgccgtcgttgacgtgcgcttcgatgagggcctcccgcccatcctcacggcgctcgaggtgctcgacaacaacatccgcctcgtgctc

SEQ ID NO: 77998 - DNA, 436 bp, Zea mays
gccaccgacggccgacgtcgagcctccgcggccgagcctccgcctagcaccaactccgtcgtcgatcgtcctatgcgaccacgcccccgtccgccttccgtctcctgcctccactgagtcgcgggcgcgacatcggggaacgccaaggctgagcttcgcccatacgcctaccgccctgttatgccccgaaccgccgtgctgaggtccgcccaggccgggccaggagcttctcccggcagacccacccccgcccaacggagctccatgcctccgcccagggccattgtccgagctacgccccacgctcctgtccagtgccctggccacttagatggttctgctcagtcatgtttagtgtctggttcaacaacttcaacttcaaccaagggacgcatctatcacaagacgtatggttgccaaatgaatataagtgaca

SEQ ID NO: 77999 - DNA, 433 bp, Zea mays
tcaccaattggccccggtaccgcccggtcatcgccgatttcatcgcaaggcggcccttcttcaaaatcaccgtggcaaccgtgatcgggtacaagcacaagacggacgcttcggcgtcgggccccgacgcggcgtgcggcggcgtcggcatcctcggcatcgcgtgggccttcggcggcatgatcttcatcctcgtctactgcaccgccggcatctcaggtgggcacatcaacccggccgtgaccttcggcctgttcctggccaggaaggtgtccctcgtccgcgcgctgctctacatcgtggcgcagtgcctgggcgccatctgcggcgtgggcctcgtcaagggcttccagagcgcctactacgtgcgctacggcggcggcgccaacgagctcagcgacggctactccaagggcaccggcctcgccgccga

SEQ ID NO: 78000 - DNA, 444 bp, Zea mays
aacgatttcaaagatatattcgacgtcgaccacttcaaggagtcgttgaaggaagacattgtgatcgtggattccctcccaccacattacagaagggtgaaaccgtacgtgagagcacccacctcctggtccagggcttccttctacagagacttcgcgaaaatcctgatgaagttcaaagtggtgaggttgacgcacacggattcacggatcgtgaacaacggcctcgctccttcgctgcaaaagcttcggtgccgcgcgaactacgaggcgctccagtacaggaaggagatcgaagagctcggcaacacgctggttgatcggctgagaaacgagtcgcagcattacatcgcgcttcacctgagatacgagaaggacatgctggcattcaccgggtgcaaccacaacctgacgctggatgatgcggcggagctgactgacatg

SEQ ID NO: 78001 - DNA, 424 bp, Zea mays
gaccaaagtcgactacgagaagattgtcagggagacatgccgcaacattggtttcgtgtcgaacgatgtcgggcttgacgctgaccactgcaaggtgcttgtgaacattgagcagcagtcccctgatattgctcagggtgtgcacggccacttcaccaagcgccccgaggagattggagctggtgaccaggggcacatgtttgggtatgcgactgacgagacccctgagctgatgcccctcagccatgtccttgccaccaagcttggtgctcgtctcacggaggttcgcaagaatggaacctgcccctggctcaggcccgatgggaagacccaggtgacagtggagtaccgcaacgagggtggcgccatggttcccatccgtgtgcacacagtcctcatctctacccagcacgacgagacagtc

SEQ ID NO: 78002 - DNA, 438 bp, Zea mays
cacggggccatgcacgcgtccggaggagaacccgccacaccagcaatcacagcagcccggagaacgccctggtccaacaagatgcagatcttcgtgaagacgctgacagggaagaccatcaccctcgaggtcgagagcagcgacaccatcgacaatgtcaaggccaagatccaggacaaggaagggatcccgccggaccagcagcggctgatctttgccgggaagcagctggaggatggccgcacccttgcggactataacatccaaaaggagtctacgctccacctcgtgcttaggctccgcggtggaatcattgagccctctctgcaggcgctcgctcgcaagtacaaccaggacaagatgatctgccgcaaatgctatgcacgactgcaccctaaggctgtcaactgccgcaagaagaagtgtggtcacagcaac

SEQ ID NO: 78003 - DNA, 447 bp, Zea mays
cactcgagttcagatcgagcgcgcgccaagcaagtcttccggccggccgcgaagagcgcaatcaagcaagacaagatggtgaagctcgccttcggaagcgtcggcgactccttcagcgccacctccatcaaggcctacgtggccgagttcatcgccaccctcctcttcgtcttcgccggcgtcggttccgccatcgcctacgggcaactgacgaatggcggcgcgctggacccggcgggcctggtggcgatcgcgatcgcgcacgcgctggcgctgttcgtgggcgtgtccgtcgcggcgaacatctcgggcggccacctgaacccggccgtgacgttcgggctggccgtgggcggccacatcaccatcctgacgggcgtcttctactgggtggcccagctgctgggcgccaccgtggcgtgcctgctcctcgggtttcgtcaccac

SEQ ID NO: 78004 - DNA, 447 bp, Zea mays
  unsure (1)..(447): unsure at all n locations
gtgctctgttctcatcttctgctcgctggtgtcccctccctctcacccatggcttcngcggcggcggcaactcaggtggggacttacttcctgcggaactactacaacctgctgcaacaaacccccgatgtcgtccaccagttctacagcgaagccagcaccatggtccgcgtcgacgacctcaccggcacgaccgcggctgccaacaacatgatggacatacactcactcatcatgtctttgaacttcacccaaattgagatcaagactgccaattttgtgaactcatggggcgatggggtgctagttatggtctctggtctagtgcagaccaaggagtacagccaccaaaggaaatttatccagatgttcttccttgcncctcaagagaagggttactttgtcctcaacgattactttcacttcgttgaccaagaacatgtgcag

SEQ ID NO: 78005 - DNA, 438 bp, Zea mays
  unsure (1)..(438): unsure at all n locations
ccaagcctctcttactctcggccgtcgccctgctcgcccgaagcagctgccggcaaaatggccccgaaaaaaggcggtagggcgccggtccccgccaagaaaaaggcggtggtgacaaacccgctcttcaagaaaaggccgaagcagtttgggatcngcggcgcccttccgcccaagaacgacctccaccgcttcgtcaagtggcccaaggtcgtgcgcatccagcgccagcgccgcatcctcaagcagcgcctcaaggtgcccccggcgctcaaccagttcacacgtaccctcgacaagaaccttgcaacaaacttgttcaagatgcttcttaagtaccgccccgaggacaaagctgccaagaaggagaagctcttgaagagggcccaggctgaaaacgaagggaaaactgttgagtcaaagaaaccaattgttgtg

SEQ ID NO: 78006 - DNA, 464 bp, Zea mays
cccacgcgtacgaaagaaagaaagaaaaaaaaactaggcattctgcttgcttgcttggggcgctctagtgctcgcttgctgcacctgcaccggtcgcgcacagcctgggaagaggcgagctgaggtctgaggaagccgagaagccgggctcagcgtgcgtacagggacagagacggcaagccggagcatcgatccgttggtgcaagcaggaccggaggatcaccactcagagccatgctgcagcacggcgaggagaagaaggggaaggtgaagaaggggtggctggcggtgcgcgtcggggcggcggagggcgacggctcccagcagcgcttcgtcatccccatcgcgtacctgtaccacccgcagttccggcgcctgctggaggccgcgcgcgacgcctacggctacgactactccgcggggccgctgcgcctgccctgctccgccgacgagttcctccgcct

SEQ ID NO: 78007 - DNA, 355 bp, Zea mays
gacgagcttctcaccaagtatatcagccgggtgctgctgctccgatatcctcaactgataagccaatatcatcaagatggaggatactgatgcccgatggatcctatggcaagtatccaactccgaggcgcctagccacatccgagataccagaaattgttgagcaataccgtcaagcagccataaacgccatcaaagcaggtttcgatggcatcgagattcatggcgcccatggctacctcatcgatgagttcctcaagggcggtatcaacgaccggactgacgagtacggtggctcactctccaaccgttgccagttcctcctggaggtgacccgagccgtggtctctgcgat

SEQ ID NO: 78008 - DNA, 433 bp, Zea mays
cagacgcatgggcggacgcgtgggcggacgcgtggggactcaagaaagtgctgaggagattgagacatatcagcggtataagtaccctactatgagcaaaacacaggggaatttcaagcttactgttgttgagggtgaatttaccgattctcagattgttgttatgcttggtgaaaacgggacagggaaaactaccttcattagaatgctggctgggttgttgaagccagacacagtggaaggaactgatattgaaattcctgaattcaatgtgtcttacaagccccaaaagattagcccgaaattcaagaacaccgtgaggcatttgctacaccagaaaattcgggattcctatatgcaccctcagtttgtgtctgatgtaatgaagccactgcaaattgaacaactcatggaccaagaggttgttaattta

SEQ ID NO: 78009 - DNA, 438 bp, Zea mays
acacgtctctagagggaatcctattatatctctaggaagactctcaggagctcagccgagaagtttgagttccaagctgaggtttccagactcatggacatcatcatcaactcactctacagcaacaaggatatcttcctgagggagctcatatctaatgcctctgatgcgttggataagattaggttcctttctcttactgataaggaagttctaggtgaaggggacactgcaaagcttgagattcagattaagttggacaaagagaagaaaatcctctccattcgggataggggtattggtatgaccaaggaagatcttattaagaaccttggaacgattgctaaatctggcacttcagcttttgtggaaaagatgcagtctggaggtgacctcaatcttattggacagtttggtgttggcttctactctgtgtac

SEQ ID NO: 78010 - DNA, 447 bp, Zea mays
  unsure (1)..(447): unsure at all n locations
catacaccactctacagtgagtcgtcatagcacaggcagctcgagagagagagagagagaaagatgtcgtggttcgggcaccaccaccacaaccagccggctcccccggcgtcgggccccaaccaggtgttcaagatcttctgccgcgccaacgagaactactgcctggccgtccgcgacggcgccgtcgtgctggccccggtcaaccccaaggacgaccaccagcactggtacaaggacatgcgcttcagcacccgggtcaaggacgaggaaggcatgccggcgttcgcgctcgtcaacaaggccacggggctcgcaatcaagcactccctcggccagtcncacccggtcaagctcgcgcctttcagcccggaccaggaggacgcgtcggtgctgtggacggagagcaaggacgtgggcaagggcttccgctgcatccgcatggtc

SEQ ID NO: 78011 - DNA, 437 bp, Zea mays
gattcagcttgtattcccactctgtcgcacagcgtcgcccgtcgccgctgagatcctaggaagaaatggagctctctcgcaagctcttcacggtcgtcctcctcgtcatgctgctgctgctgtccgcacgtacgttggtgcggccggctgaccgtcttacatgtcttctgtgctgtggactcggtactgatgatgagatgtctgagatgctgctgcgtgctgcagaggtcgggccggtggcggtggcggaggcgcggacgtgccagtcgcagagccacaggttccggggcccctgcctccgccggtccaactgcgccaacgtctgcatgaccgatgggttccccggcggcaggtgccgcggcttccgccgccgctgcttctgcagcacgcactgccactgattcgctcgctcgcgcagcggccggctggcgtcgccg

SEQ ID NO: 78012 - DNA, 451 bp, Zea mays
gccacccacgcgtccgcaaagaagaatcgccatcacagcaagctacgcgcactgaaatcctccaatccacaggacacagctctacttccacagttcgcagactcgcacgcaccgagcggctagcgatcaacgagaaatgtcgctggtgaggcgcagcagcgtgttcgacccattctctgtggacctcttcgacgccttcgacagcatgttccgctccatcgtgccgccgtcgttgtcgtcgtcggcggcctccgagaccgccgccttcgccagcgcccgcatcgactggaaggagacgcccgaggcgcacgtgttcaatgccgacctccccggcgtgaagaatgaggaggtcaacgtggaggtggaggacggcaacgtgctgctcatcagcgggcagcgcagcagggataatgaagacaacggcgacaagtggcaccgcgtggagcgcaac

SEQ ID NO: 78013 - DNA, 303 bp, Zea mays
ccacgcgtccgcatcgcatcccatcccactaccacccatctcgtcgtccgccgattcgatccggttcttccaacccagggtgagtctccggatccgtcgccgtctggtatccgtgtgctctcgtcgccgtcgccgtcgccgccgtctgactgcccccctcgcctcccgcggcgtcgggtctctggtgctgctgctgctgctgctgctgctgcgtgcagggcagtgatggcgacgaagaggagcgtgggcaccctcggcgaggcggatctgaaggggaagaaggtgttcgtgcgcgccgacctc

SEQ ID NO: 78014 - DNA, 412 bp, Zea mays
gcacgcgtccgcaagttatagatcgcgagcggccgcccgcgatctagacttctcctccccctccggttcgggttcgggttcgtgaggttctccggggttcggtttcgtgggtgagcggatcgagatggcggcgtcggatgttgagtaccgctgcttcgtcggcggcctcgcctgggccacggacgaccactccctccacaacgccttcagcacctacggcgaggtcctcgagtccaagatcatcctcgatcgggagacgcagaggtcccgcggcttcggcttcgtcaccttctccacggaggaggcgatgcggaacgccatcgagggcatgaacggcaatgagctggaccgccgcaacatcaccgtcaacgaggcccagtcccccggcggccgtggaagcggcggcggcggc

SEQ ID NO: 78015 - DNA, 437 bp, Zea mays
cacacacagcaaataccccacaaggccactccaaagagctagtagtggaaccgaagatgttcgggaacatcggaaagatccccatcatcggcgacctgacgggcagcaacaagaatgcgcacctcaagggcaacgtggtgctcgtgcgcaagaccgtgctcggcttggacgtcaccagcatcgccggctccctcctcgacggcgtcggcgagttcctcggccgcggcgtcacctgccagcttatcagctccaccgtcgtcgaccctaacaacggcaaccgcgggaagttgggcgcggaggcgagcctggagcagtggctgctgaacccgccgccgcttctgtccagcgagaaccagttccgcgtcaccttcgactgggaggtggagaagcaaggcatcccgggcgccatcatcgtcaagaacaaccacgcctccgag

SEQ ID NO: 78016 - DNA, 459 bp, Zea mays
ttcgcccggccacccacgcgaccggaggccatacgcaacaagcaaagcatacccccaaatccccaatccccaatccccaatccccaaaccctaggttatctcggcgcggcagcgatggcggcggcgggcctgaggaaggggaatgcgcgcctcccgccggaggtgaaccgggtgctctacgtgcggaacctgccgttcaacatctcgagcgaggagatgtacgacatcttcggcaagtacggcgcgatccggcagatccgtctgggcaacgccaaggacacgcgcgggaccgcttacgttgtctacgaggacatctacgacgccaagaacgccgtcgaccacctctccggcttcaacgtcgccaaccgctaccttatcgtgctctactaccagcccgccaagatgtccaagaagtcggatatcaagaagaaggaggacgagatcaccaggctccaggag

SEQ ID NO: 78017 - DNA, 363 bp, Zea mays
ccacgcgaacggactcctatctggtataggacggagctgagcttctagcaacgtacagtgtatccgccatgagtcctttcggggcggtgatcacgccagaaaccctcaagtacatgtccaagtaccagggacgtgagatcacgcaggtggactgcgcacgggaggcgatgaggctgatccacgcggaagacaagaacctcaaggccgaggactcagcgtgggagctgaagaagaagttcggcaacggcgtgagcaccatggtcctcgtctacaacgccaccggggccaacctgaacctggtggaccacgggaaagactggatgggctccgtctacagctcgccgattccggacaccttccaaa

SEQ ID NO: 78018 - DNA, 430 bp, Zea mays
ggggccacccacgcgatccgtaccgaaggacaggagctcccgcgtttcctcttacgagagccgccgggctggtgcctccccatacttctcatcgtctcatggacagagcagttcttctcgccggtcagaggagtcttgtgtggcagcagcggcggcagcagcaaagcaagctgcagagtgggaggatgttcggtgcccggtgtgcatggaccacccgcacaacgccgtcctgctggtctgctcctcacacgagaagggctgccgccccttcatgtgcgacaccagctcgcggcactcgaactgctatgaccagtaccggaaggcatccaaggattcaaggacagagtgcagcgagtgccagcagcaggttcagctctcgtgcccactgtgccgtgggccggtcagcgattgcatcaaggactacagcgcg

SEQ ID NO: 78019 - DNA, 443 bp, Zea mays
ggggccacccacgcatccgcacacgcgtccgcacgtgacagacggggacgcttgttcacgcggtgccgacggcggcggcggggctgtcgccctgccacgcccagacgatctccgtgagccccgggcggacgtcgacggcgcagaacttgttaaagtccagcgcgtccccggcgtcgtgcacgaactcgaccacggtcacgtccacggccacctcgagcacctcggcggtggccgcgagccgtccgttcgtgccctcggccttggcctccatcctcaccttccagcctttccccctggtgacctcgaatcctagggcgcgcgccacggactccagcttctccaccacggtggccgccggcgcgcgggccgtgaacacggtcgcggtcttctgctcgctctcgaacagccccgacaggtcgaacccggaggacatggacgagatg

SEQ ID NO: 78020 - DNA, 304 bp, Zea mays
cgggtccacgcacgcgtccggaccaggaaagttactgagaaccctcctgtgcgacattgtggcaactggactgaagattgaggaccagctctcccttgggaagaggttgtcactagttgctagcactggcgcgatgcgagcccaaggggacactgcatatggagctaacctggaggcacgcttgaaggacaaagactatccgatagcccagtccctctcaaccttgggtctctctctgatgaagtggcgtcgggaccttgctctgggcgcaaacttgcagtcccagttttccatcggaagggag

SEQ ID NO: 78021 - DNA, 449 bp, Zea mays
acacgccactgcagccgtgcactccatcggcgtctgctacggcacgctgggcaacaacctgccgtccagcagcgacgtggtgcagctctacaggtccaagggcatcaaaggcatgcgcatctactcccccgacgccaaagccctcgccgccctgcgcaactccggcatcgcgctcatcctcgacaccggcaacggcggcggcgtcctgggccagctcgccaggagcgcctcgttcgcggactcgtgggtgcagagcaacgtgcggccctactaccccgccgtcggcatcaagtacgtcgcggtgggcaacgaagtgcaaggcgacgacacgcgcagcctcctcccggcgatgcgcaacctggacgccgccctggcgcgcgccggcttcccgggcatcaagtgctccacgtcggtgcgcttcgacgtggtcgccaactcgttcacgccct

SEQ ID NO: 78022 - DNA, 367 bp, Zea mays
agagcccaaccgcacaagcgcgcgaggcaggagagagagagaggcggggagcaaaacaatggaggggaaagaggaggacgtgcgcctgggcgccaacaagttcgcggagcgccagcccatcgggacggcggcgcagggcgccgctgacgacaaggactacaatgagcccccgccggcgccgctgttcgagcccggggagctcaagtcctggtccttctaccgcacgggcatcgccgagttcgtcgccaccttcctcttcctctacatcaccatcctcaccgtcatgggcgtctccaagtccacctccatgtgcgccatcgtcggcatccagggcatcgcctggtccttcggaggaatgatcttcgcg

SEQ ID NO: 78023 - DNA, 429 bp, Zea mays
  unsure (1)..(429): unsure at all n locations
cacacgcgtccgcccacgcgtccgatccaccacaccacaccatgagcgggagcgcctccaggaagctcttccagaccgccaggtccatcgtcctctccgcttctcaacgctcctccttctccgtcctcgccgccgagggccgcaccgccgcgctcgccaactttggcaggaagatcctccccagcgcctgctcctaccacaggcagggatcccacgccgcgtcgggatggggagccatcgctgccgcagtccccgccgcagtttacatgctccaggaccaggaggctcatgctgcagagatggagcgcactttcatcgccatcaagcccgacggcgtccaaagaggcctgatttctgagattgtgaaccgattcgagagaaaaggctacaagcttgttgccatcaagctgattgtcncatccaaaggat

SEQ ID NO: 78024 - DNA, 391 bp, Zea mays
tggagttggagctctatatggtcctctgcatggcggcgcaaacgaggcagtacttaaaatgttaaatgagattggaagcatggaaaatattccagatttcattgtaggagtgaagaacaggaagaggaagatgtccggttttgggcaccgtgtgtataaaaactatgaccctcgtgctaaagtcataaggaaattggcagatgaggtgttctcaattgttggacgggatccacttattgaggtggccattgccctagaaaaggcagcgctgtcagacaaatattttatcaagaggaagctgtatccagatgtggatttctactctgggctaagttagagggcaatgggattgacctaagaaatttttcctgtgctgtttgctagtcctcgg

SEQ ID NO: 78025 - DNA, 455 bp, Zea mays
  unsure (1)..(455): unsure at all n locations
gggtccacgcacgcgtccgaaggttatcgcgccgccgccgccgccgccgccgcagccgcaacaatgccgtcgcacaagaccttccggatcaagaagaagctggcgaagaagatgcgccagaaccgccccatcccctactggatccgcatgcgcactgacaataccatcaggtacaacgccaagcgcaggcactggcgccgcaccaagctcggcttctgagcgtcgggattggccggctgctgcgtcggaaggctanggtctaagagctatcttccttctgttttatcaatgtgtcagtttttctgtaagctagcaagtgttgctatgacgcttttattaagattctggtgagcggtgatgttaagagaaaattggcactactgtggtgtaccccaagattccttgcagcattgctatgctaagtaaagaaccctttatcttagtatatatgtagt

SEQ ID NO: 78026 - DNA, 417 bp, Zea mays
cacacgcgtccgcccacgcgtccgctctgctcccggctcccccacggtactccagccgctaccctgcgattccgccagtacgccaccaccaccgagcctggactaccgccgccgcccttcgccgatatcttcagcggcgaacagcgcccaccagatcccgcccctgcgatggagtccgtggtgaacccgaaggcatacccgctggctgatgcgcagctgacgatgggtatcctcgatatcatccagcaggccgccaactacaaacagcttaagaagggagcgaatgaagcgacgaagaccctgaataggggcatatcggagtttgtagtgatggcggcggacacagagcctctcgagatcctgctccacctccccttgttagctgaggataagaacgtgccatatgtgtttgttcca

SEQ ID NO: 78027 - DNA, 445 bp, Zea mays
  unsure (1)..(445): unsure at all n locations
ccacgcgaccggaaaaagcaaagcacgcaatccaatttccctccatttctctagatctcgagttgctctgctacttcttttagattccttctttcgttcgggagagcgattctctagctggtggcaatggcgaagggcgagggtccggcgatcgggatcgatctcggcaccacctactcgtgcgtcggcgtgtggcagcacgaccgggtggagatcatcgccaacgaccagggcaaccgcaccacgccgtcctatgtcgccttcaccgacaccgagcggctcatcggtgacgccgccaagaaccaggtggccatgaaccccaccaacaccgtcttcgatgccaagcggttgatcggcangaggttctctgacccgtcagtgcagagtgacatgaagctatggccgttcaaggtcatccctggccctggtgacaagcccatgattg

SEQ ID NO: 78028 - DNA, 433 bp, Zea mays
caccgctccgcctccactcctcgcgccgctgccgcatctcctctacaggtaagaaggagagaaagagggcgaaatggtgaagcacaacaacgtcatccccaacgggcacttcaagaagcactggcagaactatgtcaagacatggttcaaccagcccgcccgcaagcagaggcgccgcatcgcacgtcaaaagaaggctgtgaagatattcccacgaccaactgctggccctcttcgtcccattgttcaatgccagactctcaagtacaacatgaagtcaagggctgggagaggctttacccttgaggagttgaaggctgcgggcattccaaaaaggcttgctccaaccattggcatttctgtggatcaccgccgcaagaacaaatcccttgaggggctgcaggccaatgtccagaagcttaagacatacaag

SEQ ID NO: 78029 - DNA, 460 bp, Zea mays
  unsure (1)..(460): unsure at all n locations
ggggccacccacgcgtccggagcgagagagaacccaaacggagagagacaatcgagagagatggcaaactgttttggtgacgtcgtggacaattacaagctagacacaatgccaagatatatcggcaaaaagaagactcgagaagaccgggcacgagaggcctcctatctcagtaatgagaatgagaagtacaagaaagctaaagactatgtgaacatgctgaaggactggtacggcaatggagcgtcgaagctgtgcgtgatctacaaccagacgggcggaaccctgcggtacgtcgacgacaaggactggctgggctacccggggccgacgccctacccgacggagatcggcaacgggcagtgggcgtccttcctccacgtccacaagaccggcgcctcgtcggggtccatggccgctgtcgtctaccgcggcaaggacngcngcggcagcgagcgcg

SEQ ID NO: 78030 - DNA, 424 bp, Zea mays
gcccacgcgtccgcccacgcgtccgcccacgcgtccgggcgattgttagtgcatttggcccactggctgcatatcgctttctttttaacaatgagctcggtggaccctgtgcatttcttgagtacgccgagcgcgcgcgttacgtctaaggcatgtgctggcctcaatgggatgatgcttggtggccgtgtactgactgctgtgcatgtgtttcctaatcctcatgtggaggctgctaatgaggcttccccattttatggtattcctgacaatgctaaattgcttctgaaagaaccaacaaaggtcctgcagctaaaaaatgtgtttgaacgagaagagtatatgctactttcaaaatctgagctggaagaaacattggtagatgtacgtgttgaatgtttggggcagtcaaatctgtaaatgt

SEQ ID NO: 78031 - DNA, 446 bp, Zea mays
ccacgcgaccgcacacgcgtccgcccacgcgtccgcccacgcgtccgcccacgcgtccgggagattgttagtgcatttggcccattggctgcataccgctttctttttaacaatgagctcggtggaccctgtgcatttcttgagtacgccgaccgctccgttacttctaaggcatgtgctggcctcaatgggatgatgcttggtggacgtgtactgactgctgtgcatgtgtttcctaatcctcatgtggaggctgctaatgaggcttccccattttatggtattcctgacaatgctaaattgcttctgaaagaaccaacaaaggtcctgcagctaaaaaatgtgtttgaacgagaagagtatatgctactttcaaaatctgagctggaagaaacattgggagatgtacgtgttgaatgtttggagcagtcaaatctgtaaatgta

SEQ ID NO: 78032 - DNA, 437 bp, Zea mays
tgaacgttgatgtgaacgagttccagaccaacctggtgccctacccgaggatccacttcatgctttcgtcctacgctccagtcatttctgctgagaaggcctaccacgagcagctgtccgtggccgaaatcaccaacagcgccttcgagccatcctccatgatggccaagtgcgacccccgccatggcaagtacatggcatgctgcctcatgtaccgtggtgatgtggttcccaaggacgtgaacgctgctgtggccacaatcaagaccaagcgcaccatccagttcgtggactggtgcccgactggcttcaagtgcggaatcaactaccagcctcccagcgtcgtccccggcggtgacctggccaaggtgcagcgtgccgtgtgcatgatctccaactccaccagtgttgtggaggtcttctcccgcattgaccac

SEQ ID NO: 78033 - DNA, 445 bp, Zea mays
cccacgcgaccgcagtcatcgatctcgtttcaaatccatccatcctcgtttcctccgtcccgcagcatctcaaccccatggccaagatcaagatcgggatcaatgggttcggcaggatcggaaggctggtggccagggtggccctgcagagtgacgatgtcgagctcgtcgccgtgaacgaccccttcatcagcaccgactacatgacctacatgttcaagtacgacactgtgcacggacagtggaagcaccatgaagtcaaggtgaaggactccaaaacccttctctttggtgagaaggaggttgctgtgtttggctgcaggaaccctgaggagatcccgtggggttcggttggtgctgaatatgttgttgagtctactggtgttttcactgaccaggagaaggctgcagctcacttgaagggtggtgcaaagaaggttgtcat

SEQ ID NO: 78034 - DNA, 432 bp, Zea mays
ttcccggggtcacccacgcatccggagccgcctcccccagacacttcgccgccggcaagatgggccgcgtgattcgcgctcagcgcaagggtgcggggtccgtgttcaagtcccatacccatcaccgcaagggccctgcccggttccggtccctcgacttcggcgagcgcaacgggtacctgaagggcgtggtcaccgacgtcatccacgacccgggccgcggcgcgccgctggccaaggtcaccttccgccatccattccggtacaagcaccagaaggagctgttcgtggctgctgagggcatgtacactggccagttcgtttactgcggacgccgtgctacactctccattggcaacgtcctgccgctcagggggatccctgagggtgccgttgtctgcaacgttgagcaccacgtcggggatcgcggtg

SEQ ID NO: 78035 - DNA, 414 bp, Zea mays
gaaccacggcggcgtgcgcgacggcaccaacatcgtgctctggaagtggtgcgagggcgacaaccagcgctggaagatcgtcccctggtaaatgtgctgttctgtggctgcactggtcatcaccatgatctggagctttgaaggcatagccacctgtggtcagcagctgctgccgtgttgctagaataaagttggtggcgatcgatcgatcgatctttggtgatgggtgtccctccctgtgtgtttgtgtttagttccagtcgtttgtgaggaagtcagttatgtttgagtgagaggggtacttcgctcttcggttaactctgtacttgtcatgaggagagttttcatacccggagtgtagaactctgtactgtactcggatccttccttttccatccaagtgggttttatttt

SEQ ID NO: 78036 - DNA, 365 bp, Zea mays
aagggaagtgcgcgttgtggtagttatgctgatgctgatggtcggtggccgattacatacactgcaacttctggtgtatgctcttctcttctggggacacgtaatgtaaccacaaagactgtgtcactgtagcctgtggtacaaaccctgctgtgtatcagcctgtctacaaaatacagcgatgagttgtgacgttacgtttctgacaattcagctactaatgagcacatctttgcattactagagctaagagaagttgatgaactgtcagccatctgcagcacagatcctcactatgcatcagaatcactcttgtttggattatctggatttatgatcgacttaagaatggtggagtttctgca

SEQ ID NO: 78037 - DNA, 418 bp, Zea mays
ggggccacgcacgcgtccgaaaaagacgtacaccaagcccaagaagatcaagcacaagcacaagaaggtaaagctcgcagtgctgcagttctacaaggtggacgacgccaccggcaaggtgacccgcctccgcaaggagtgccccaacaccgagtgcggtgcgggtgtcttcatggccaaccacttcgaccgccactactgcggcaagtgcggcctcacctacgtctacaatcagaaggcgtaatcccatgcgccgctttgcttcacccgcctacctatcaagcattcacctgttggttactcgatttgaatatcatttagatctgtttgaggttggaacataaatgcagcagtagtttctgtcttattatattggtacctctgttactgagttgatgtggtcctggttcctgagctt

SEQ ID NO: 78038 - DNA, 436 bp, Zea mays
catcatttgcatttatattacttacgtttgtttcaatgaacttgatactatctgtcacactcacacatctgcttcttactgacctggctgatgactgatgagaagtcttttcgttttttagacggatcctgattttgacttggatattagagatgatgtccaagatgaatgttccaagtttggtgcagtgaagcatatttttgttgacaaaaatactgcaggcttcgtgtatctgcagttcgatagtgtaactgcagcagggaaggcccaacaagcacttcatggaagatggttcgccggaaagatgattacagcgacatttatgtccgatcaggaatacagtactaagttcccaaacttgtgagcatatgcggggaagagttggtcagacccgcatagttcgttcggagagtttgctagtgctgtatcgttggat

SEQ ID NO: 78039 - DNA, 427 bp, Zea mays
gacgccgccgccgccgcctaaggagaagagggtccggccgtctccttgccccgatggcgtccgagaagaagcagtccaacccgatgcgggagatcaaggtgcagaagctggtcctcaacatatccgtaggggagagcggcgaccgcctcacccgcgccgccaaggtgctggagcagctcagcggccagacccccgtcttctccaaggcgaggtacacggtgcgctcgttcggcatccggcgtaacgagaagatcgcctgctacgtcacggtcaggggcgacaaggccatgcagctgcttgagagcggcctcaaggtcaaggagtacgagctgctcaggaggaacttcagcgacaccggctgcttcgggttcggcatccaggagcacatcgaccttggtatcaagtatgatccatcaacaggcatcta

SEQ ID NO: 78040 - DNA, 440 bp, Zea mays
cacgctctcctcgcgttcgggaaggtcgtttcgccatggcctcggagacggagacgttcgccttccaggcggagatcaaccagctgctctcgctcatcatcaacaccttctactccaacaaggagatcttcctcagggagctcatctccaactcctccgatgccttggacaagatcaggtttgagagtttgacggacaagaccaagctggatgcacagccagagctgttcatccacattgtccccgacaaggccaacaacacgctgacaatcatcgacagcggcattggtatgaccaagtcagaccttgtgaacaaccttggtaccattgcgcggtcaggcacgaaggaattcatggaggcacttgctgctggtgctgatgtgtccatgattggccagtttggtgtcggtttctactctgcctaccttgttgcagagagg

SEQ ID NO: 78041 - DNA, 395 bp, Zea mays
cacacgcgtccgctcacaacccagtcgctcaaaaccctagagctctcgcctgctcgcctccgccgccggagcgagctccccatcttcatccgtcaaccgtgggctctgtgccatcgcgcaggccgagtccctccgttacaagctcctcggaggccttgccgtccgcagggcttgctatggtgttcttcgttatgttatggagagtggtgccaagggttgtgaggtgattgtgagtggaaagctcagggcccaaagagccaagtccatgaagttcaaggatggctacatgatctcatctggtcagccagtgaacgagtacattgactcggctgtgagacacgttcttctcagacagggtgttctcggtatcaaggtgaagatcatgcttgactggg

SEQ ID NO: 78042 - DNA, 411 bp, Zea mays
gggccatagacgcgtccgaatccgcatcaacccagctgtgactttcgggctgttcttagccaggaagctgtccctgactagggccctcttctacatcatcatgcaatgcctgggtgccatctgtggagctggagtggtgaagggcttccagcagggactttacatgggcaacggtggtggcgccaatgttgtcgcacctggctacaccaagggtgatggccttggcgctgagattgttggcaccttcatcctagtctacaccgtcttctcagccaccgatgccaagaggaatgccagggactcccatgttcctatccttgccccactgccaattgggttcgcggtgttcctggtccaccttgccaacatccccatttatggcactggcatcaacccagctaaggacccttg

SEQ ID NO: 78043 - DNA, 321 bp, Zea mays
cccacgcatccgaacgagaagcctggccacgattttactctgacagcgtcgtttggaagtgtggatgcttcgagctacgacgcgcttgtggttcctggcggacgggctccagagtacctggctctgaacgataaggtcatcagcttggtgaaggccttcgcggagagcggaaagccaatcgcgtcgatctgccacggccagcagatattatccgctgccggagtcctcaaggggaagaagtgcaccgcatacccagccgtgaagctgaacgtgttgctcggtggcgggacctggctggagcctgacccgattcaacgctgc

SEQ ID NO: 78044 - DNA, 435 bp, Zea mays
catccggaacatcccgcaccgggtgcccgacctgcccgccaaattcaagtccatgctcgtgcccggcaagatccaacacatcatctgctctggcaacctctgcatcaaggaagttcatgactacctgaaaagcctttgccctgatctccacattactggaggtgaatatgatgagtatgctcgatacccagagactaagacacttacaattggtcagtttaagcttgggctgtgccatggtcatcaggttgttccatggggcgacctggactccctggcgatgctccagcggcagctggacgtggacatcctggtgaccgggcacagccatcagttcaaggcatataagcacgagggaggcgtggtgatcaaccctggctctgccacgggcgcctacagcagcatcacttacgacgtgaacccaagctttgtgct

SEQ ID NO: 78045 - DNA, 415 bp, Zea mays
acgacatcatccactcgatcatcgacatggacgcggacgtgatcaccatcgagaactcgcggtccgacgagaagctgctctccgtgttccgtgagggtgtcaagtacggcgcgggcatcggccccggtgtctacgacatccactcccccaggatcccgtcggccgaggagatcgccgaccgcatcgacaagatgctggccgtgctggacaccaacatcctctgggtgaaccccgactgcggcctcaagacccgcaagtacacggaggtcaagcccgccctgaccaacatggtctccgctgctaagctcattcgcacccagctcgccagcgccaagtgagcacctttttttgcctttttcgtttccgaggagggcgtcgtcgatgccaatttgtttccaataaacaggggtccccc

SEQ ID NO: 78046 - DNA, 400 bp, Zea mays
cccacgcgtccgcacctcagctccgccgcttgcccgcttttgctctctccctcccggctctcggcttcttcgacacgctaccgtctcacagccgtaaacgcccctcccggatcccgctagttcgccaccgccgcccgcccgcccgccgttcgcctcatcatggccgcctcgtcgaccgccacctccgtccacgacttcatcgtcaaggatgcgagcggcaaagacgttgacctcagcacctacaaggggaaggttcttctcattgttaacgtcgcatcccagtgtggcttaactaactccaactacactgagctggcccagctctacgagaagtacaaggaccaacgctttgaaatcctggctttcgcatgcaaccagtttggtgggcaggagcctggta

SEQ ID NO: 78047 - DNA, 393 bp, Zea mays
  unsure (1)..(393): unsure at all n locations
aaatgcgaggagacgactatgcatgatgtgaacaagatcaaggaaaacatccttgccatgcacgataactcactgaagctatgcaattttgccaccggcaagttcttgaaggtatacagtggacatgtgaacagacaatactgcatacagtccgcgttttctgttacgaatggaaaatacattgtcagtggatcagaagacaactgcgtgtacatatgggacctccaagggagaaatatccttcagaaattagaaggccatacggacactgtcatctcggtgtcctgccatccaacagagaacaagattgcttctggtggccttcataatgataggactgtaagattatgggttcaagatagctaatcaacttgcangtgtggactacgctca

SEQ ID NO: 78048 - DNA, 366 bp, Zea mays
cttgtccgcccggcctcttccgtctcggagcgagaaatcagcggcatcgccgcgcgcatccgaagcgcacacgacaatgcagggcggatccagcggcatcgtctatggtggcctcaagtaccaggcacggtgtatcgccgacgtgcgcgcggacgccagctcgaccaccttcctcgccgggaccctcagcctcaaggaggagaacgaggtgcacctgatccggctttcgccggcggagagtgagctggtgtgcgatggagtcttctaccaccccaacgagatctgggatctcaaatcatgtcccttcgatcacagggtcttctccacagtctacacatctggtgagggctttggtgcgtcagtttg

SEQ ID NO: 78049 - DNA, 386 bp, Zea mays
agacagcatcacttgctgctgcatctatcactatcgcaggtactgcctcgcctggggctgctgcgcgctcgaaggcgccatctgctgcgacgactactacatctgctgcccccatgactaccccgtctgcaacgtcaaccacggaacctgcctcatgtgcaaggacagcccactgtcactgtcagtgaaggatactaagcgcacgctggccaaaccgcactgtgcattccctgacaacacagctgctgacggcatgaacatcagcgcatgacaaatacgcaacatggcattaagtcaccaacagccagcatgattagagccccccttcattcacactgatcatccggtcccgtaattcaagacgaaagcatggctgggcggccgct

SEQ ID NO: 78050 - DNA, 362 bp, Zea mays
aggctggtcgagcggcgccgcccttggctaggtcttcgctgggttcttcgccggcgacgaacgtccatctggggtcgactgaactgagcaggcagtaggaagagacactatgttgttcttctcctacttcaaggagctggtgtggaaggaggtgacagtggagctcaagaatgacttggcgatccgcgggacgctccactcggttgaccagtacctcaacatcaagctcgagaacacccgcgtagtcgaccaggacaagtatccccacatgctttcagtgcggaattgcttcatcagaggctcggtggtgcggtacgtgctgctcccgcaggacggcgtggacatcgacatcctccacgacg

SEQ ID NO: 78051 - DNA, 415 bp, Zea mays
acagtgagcaaatcaaacaaaactggctatgaatcactactgagggtatatagggaaaccgatctaagccaggagaaagttcgtgtgttaggttctttggcatcatcccctgaccatgatgttgtccgtgaagtattgaatttcatattgtcacctgaggtgaggaatcaggacgcaatatttttgctaagaggggtgagttcaggggcacacgaggtagcatggcaatggctgaaggaaaactgggattacatattgggagcctactctggaactctgctcacctatttcgtcaacataactgtctcgccactggccaccgatgaacatggtgatgaggcggaggagtttttcaagagcagaaccaaggcgaacatcgcgaggactgtgaggcagagcatcgagaaggtgagga

SEQ ID NO: 78052 - DNA, 379 bp, Zea mays
atcagtccgatatctattcttttgggattgtggtcttgcgccttttgacaggaaggcctcctgatggcataaagaagattgtggaggatgccatggagaaaggcgacctgaactcagtagttgataccttggcaggagactggcctgctttgcacgtccagcagttagcactccttgctcttagttgcacagagatgagccggaggcaccgtcctgatctttcagccgtggtgtgggcagtggatgaggcgatgaaggatgctacaacagtaccttcagcctcatcttctagaccagtgtcggatgaaaataacacaccgtcatatttcatttgccctatatctcatgatgtcatgagcgatccacgtatcgcagctga

SEQ ID NO: 78053 - DNA, 402 bp, Zea mays
agtccctcctgtgcctcgtcctccccctttcccctccgagtccagcccggcgccacccactcagccgcggatccgaggcgcagatccgatccggcgatggcgtccacggcggcgaggcggctgcgggagctgcaggcgcagacggggaacaagacctgcgtggactgcgcgcagcggaacccgcagtgggcgagcgtctcctatggggtgttcatgtgcctcgagtgctcgggcaagcaccggggcctcggcgtgcacatcagcttcgtgcgctcggtcaccatggactcctggaccgaggcgcagctccgcaagatggaggccggtggcaacgaccgactcaacgccttcctcacagctcgcggggttcccaaggagacgccccacgtccccaagtacaac

SEQ ID NO: 78054 - DNA, 399 bp, Zea mays
agtgtcggtgtgcagtgtgttgtcatctccatctccagctccagcgccgccttgctctgtgtgcttccgcccgctctgtgttgctattgctaaactagtgtgttctgtcgctatgggctccctggccaccgcggacgggccgttgccgccgctcaagtaccctcaggctcgccgggacgaagacatcgtcgacgactaccacggcgtcctcgtgccggacccttacagatggatggagcatgtggattcgaaggaggtgaaggagttcgtggacgcgcaggcggccgtgaccagcgccgtgctgtccagctgcgaccaccgcgggcgcctgcgctggcagctcaacgcgctcttcgaccacgcgcgcttccgcgcgcccttcaagcgccggggcagcta

SEQ ID NO: 78055 - DNA, 391 bp, Zea mays
agtccttattcgtaagccttcaaaccgacgaatttgagcaactgcacccagagcgcgatccattgccggggaagaagcaacttgttgcgagcctcctctatggcgagctccgaccatggttccaccaccgcccccaacgacgtgccgggcagctacggcctgccgctggtgggcgccgtgcgcgaccgcctcgacttctactacttccaggggcaggacaagtacttcgagtcccgcgtggagcgctacggctccaccgtggtgcgcatgaacgtgccgccgggccccttcatggcgcgcgactcgcgggtggtggcggtcctggacgccaagatcttcaccgtgctcttcgacatggacaacgtggagatgaaggacctgttcacgggca

SEQ ID NO: 78056 - DNA, 388 bp, Zea mays
aggcggctgcggcggagcacggaggcgaaggaggacgagcagcagcagcaggcggcgccgaggagcggcatcccactcagtgcttgcaaccatggctaggggattgaagaagcacttgaagaggctcaatgcgcccaagcattggatgctcgacaagcttggcggagcttttgctcccaagccatcttctggacctcacaagtccagggagtgccttcctctgatcctcatcatcaggaacaggctcaagtatgctctgaactaccgtgaggtcatttctatcctgatgcaacgccatgtacttgttgatggcaaggtcaggactgacaagacctaccctgctgggttcatggatgtcatttccatccctaagacaatggagaactac

SEQ ID NO: 78057 - DNA, 401 bp, Zea mays
agacgacgattcatccatcttaaagcaagcagagacatggagtcgtcgccgctgctgcagctgccggcggcacgcgtggaggctctgagcctcagcggcctctccgccatcccgcccgagtacgtccgccccgccgacgagcgagccggcctcggggatgccttcgacctggcgcgcacccatgccaacgaccacaccgcgccgaggatccccgtcgtcgacatctccccgttcctcgacagcagcagccagcagcagcagcgggacgaatgcgtggaggccgtgcgtgccgccgccgccgactggggcgtcatgcacatcgccggccacggcatccccgccgagctcatggaccgcctgcgcgccgcaggaaccgccttcttcggcctccccgttcagga

SEQ ID NO: 78058 - DNA, 379 bp, Zea mays
accacgcgtccggcaacgccagggcgcaaccatgggtcagcagcagcaagggccggcggccaggcggatggccacgctcgcctcccacctgcgccatccctccgtctctcaccctcagatggaagatgttcccctcttgaggggatccaattgccgtgcaaaaggtgcggcgccaggcttcaaagtcgcgatcttgggtgcagcaggtgggattgggcagccacttgcgctattgatgaagatgaaccctcttgtttcggtgctccatctatactatgtcgtcaacgcacctggtgtcacagccgacatcagccacatgaacactggtgctgtggtacgtggcttcttgggccagccacagttggaaaatgccctggct

SEQ ID NO: 78059 - DNA, 370 bp, Zea mays
acatgattccaacggtaggcttcaatatgcggaaagtcaccaagggaaatgtcacgattaagctttgggatcttggtgggcagcggagattccgcactatgtgggagcgctattgccgtggagtttctgctattctgtatgttgtggacgctgctgaccgagatagtgtcccaatcgcgaaaagtgagttgcatgatctgctgacgaaacagtctttggctgggattcccttgcttgtccttggcaacaaaattgacaagtcagaagcgctttcgaagcaggccttggttgatcaacttggactggaattgataaaggaccgggaggtttgttgctacatgatctcgtgtaaggattctgtgaacataga

SEQ ID NO: 78060 - DNA, 355 bp, Zea mays
ctcttttccccaaggcaaccaaaccatctcgattctcgactcgtggggaagtttcgctctcgccggcgtcgacggcctagggttcgaggaacgtccgtccgtccgtccggggaaggagcggtacggaggcggagatgatcgaggtggtgctcaacgaccgcctggggaagaatgtgcgggtcaagtgcaacgaggacgacaccatcggcgacctcaagaagctggtggcggcgcagacggggacacgccccgagaagatccgcatccacaactggtacaacatctacaaggaccacatcaccctcaaggactacgaggtccacgacggcatgggcctcgagctctactacgactg

SEQ ID NO: 78061 - DNA, 402 bp, Zea mays
acccacgcgtccgcccacgcgtccgcccacgcgtccgaggctcctatctggtataggacggagctgagcttctagcaacgtacagtgtatccgccatgagtcctttcggggcggtgatcacgccagaaaccctcaagtacatgtccaagtaccagggacgtgagatcacgcaggtggactgcgcacgggaggcgatgaggctgatccacgcggaagacaagaacctcaaggccgaggactcagcgtgggagctgaagaagaagttcggcaacggcgtgagcaccatggtcctcgtctacaacgccaccggggccagcctgagcctggtggacgacgggaaagactggatgggctccgtctacagctcgccgattccggacaccttccacaacgggcagtgga

SEQ ID NO: 78062 - DNA, 414 bp, Zea mays
acgtccgatggctctgcatatcccgcgcccgactcccgttgctgcgtgcggcggcccgactagtcgcgccgcgctgcgcttggcttgattgaaccggccgggatgggggtgttggaagacctcgtggcgagagcgggcgggtgcgcggtcatcgacggcggcttcgccacgcagctagaggcgctcggcgccgacatcaacgacccgctctggagcgccgcttgcctcatcaccaggccgcacctcgtcaaggaggttcatatgcagtatcttgaagctggtgcggacgtcatcatttcatcatcttaccaggcaacaatcccgggtttcatagctagaggaatgtctgtcgctgaggcagaagatttactgcgaacaagtgttaaactggccaatgaagctcgagatgaattt

SEQ ID NO: 78063 - DNA, 376 bp, Zea mays
actgcaacagccaagtgcaagtgatcgagctcccccctcctcatcagtcgctaggcacagcgcacttgcaggatggcgcaggtctctaagacgcttctccttgtggccctggtgttcgtgtcgtcggcggcggtggagctgtgccgcgcgatcgacttcgacgagcgggacctggcgtcggacgaggcgctgtgggacctgtacgagcggtggcagacgcaccaccgggtgcaccggcaccacggcgagaagggccggcggttcgggacgttcaaggagaacgtgcgcttcatccacgcgcacaacaagcgcggcgaccggccctaccgcctccgcctgaaccggttcggcgacatggggcgggaggagttccggt

SEQ ID NO: 78064 - DNA, 378 bp, Zea mays
acctagagcagccaagaaaagcacatacccgagtcgccgaaacaacaacaatcccaatcccccctcgtcactcaaaactcgaccaacaatgtcgctgattcgccgtggaagcgcattcgaccccttctcccttgacctctgggaccccttccagggctttcccttcggctctggaagcagcagcagcagcagcctgttcccctcgttcggaggcaccaccagctctgagacggccgccttcgccggcgctcgcgtcgactggaaggagacgccggaggcgcacgtgttcaagaccgacgtgccggggctgaagaaggaggacgtgaaggtggagctggaggacggcaacgtgctccagatcagcggcgaacgcaacaa

SEQ ID NO: 78065 - DNA, 378 bp, Zea mays
aggcgcgcagcagcagcagcaacgtcttcgacccgctgtcgctggacttctgggcgtcgttcgccgacccgttcggcgtcgtccggccgctggcggagcagtgccccgtcctcaccaacgtgcgcgtcgactggaaggagacccccgaggcgcacgtgttcagggccgaccttccgggcgtcaggaaggaggctgccaaggtcgaggtggaggacggcaacgtgctcgtcatcagcggcgagcgcgccagggaggaggaggaggccggcaaggacgaggcgtggcgctggcgcctcgccgagcgcagcagcggcaggttcaagaggcggttccgcctgccgcgcggcgccaggctggaccaggttcacgcgtccatgg

SEQ ID NO: 78066 - DNA, 402 bp, Zea mays
agcgggcgccaacgccacgctcttcgaggtggcgcacggcatgtccccgtggagcttgacgaacaacgacgccctgtacaacaagaccttgaacgacgggtgcgcggcggacagcaacttcgccatggacacgctcctgagagagccccgggccgctggtatagtccgcgggctcggctcgctcgtcgacgtctgcggcggccacggtgccgctgcgatggccatcgctaaggccttcccacacatccggtgcagcgtgttggacctcgagcaagtagtcatcggggcagctgctgatggcacggtgaagttcatcgccggcgacatgttcgagtctatcccgggtgcagattgtgtcctgcttaaataggttctgcattgctgggaacgacaaagcaacgt

SEQ ID NO: 78067 - DNA, 359 bp, Zea mays
gagagagagaatccacacggagagagacaatcgagagatatggcacactgttttggtgacgtcatggacaattataagctatatacactgccaaggtatatcgggaagaagaagactcgagaagaccgggcacgagaggcctcgtatctcagtaatgagaatgagaagtacaagaaagctggagactatgtgaacatgctgaaagactggtacggcaatggagcgtcgacgctgtgcgtgatctacaaccagacgggcagaaccctgcggtacctctaccagaaggactggctaggctagcctgggccgacgcgctacccgacggatatctggaacggacagtgggcgtccttcctcca

SEQ ID NO: 78068 - DNA, 414 bp, Zea mays
agtctgctcaagaagtacttgacaaagttgctcaagagactccgaattttggaacagaacaggataaggcccattgtccgtttcatctcaagacaggggcttgtcgctttggattgcgctgcagcagagttcacttttaccctgataaatcaatcacattgctaatgaaaaacatgtataacggtccaggccttgctttggagcaagatgaagggcttgaggtttgttagaggaaattctctaatgcataactttgtatccttaaactactgtttatttacgtttaaggatgctcaattttggtttcatgggcagtgccattttaagttgtgatagtttaatactaaagcaagctcatgtcaaaataacaagtattccactttaagcttgtaagcctttataagaagacatgag

SEQ ID NO: 78069 - DNA, 396 bp, Zea mays
actccagcatcctcccgtctccgtcgtctcgtctccgctcctcacctcgccagccatgggcaagatcaagatcggaatcaacggtttcggaaggatcggcaggctcgtggccagggtcgccctgcagagcgaggatgtcgagctcgtcgccgtcaacgaccccttcatcaccacggattacatgacgtacatgttcaagtacgacaccgtgcacggccaatggaagcacagcgacatcgccctcaaggactccaagacgcttctcttcggcgagaagccggtcaccgtctttggcatcaggaaccccgaggagatcccgtggggtgaggctggtgctgagtatgtcgtggagtccaccggtgtcttcactgacaaggacaagctgctgcacatctg

SEQ ID NO: 78070 - DNA, 318 bp, Zea mays
cgattccccctccccgccggttgccgcgctcgtgccacggtgcgctagccccgtcgacgccggcggacagcgtgcactatgggttgctcctcctccgtgccagctagaaatactggagggctgaacactatcagcaacgatagctctccagacgccagttcaaaggacttgcgtgctaagttggtattgctgggagactcaggtgttgggaaaagttgcattgttcttcgttttgttcgtggtcagtttgatcctacttccaaggtaactgttggcgcatcctttttatcacaaacattggcattggaggattcaaca

SEQ ID NO: 78071 - DNA, 392 bp, Zea mays
acagcctacaaagccactcccaaacccccgcttccagaaccttctcgaagctccccgccgcctcctccactcgcaccgatggcgaaggaaccaatgcgcgtgctcgtcactggcgccgcaggacaaattggatatgccctggttcccatgattgctaggggtgttatgcttggtgcagaccagcctgttattctgcacatgcttgacattccgccagcagctgaagcccttaatggtgttaagatggagttggttgatgctgcgtttcctcttctgaagggagttgttgctacaactgatgttgtggaagcctgcactggggtcaatgtggccgtcatggttggtggattccccaggaaggagggaatggaaaggaaagatgttatgtccaa

SEQ ID NO: 78072 - DNA, 388 bp, Zea mays
acggtcgcttcaccactccactcgccgcaggccgccgggcgccgccgaggggatcggagcaagatgttcttccacatcgtgctggagcggaacatgcagctgcacccacgacacttcgggccgcacctccgcgacaagctcgtttccaagctcatcatggacgtcaagggcacctgcagcgggcggcacgggttcgttgtggcgatcacgggtgtggaggacatcggcaaggggctcagccgggaaggcacgggatacgtcaccttcaccgtcaagtaccagtgcgttgtctttagacccttcaagggcgagatcctcgaagctgtcgtcagcatggtgaacaagatgggcttctttgcggaggctgggccggtgcagatcctcgtgt

SEQ ID NO: 78073 - DNA, 402 bp, Zea mays
  unsure (1)..(402): unsure at all n locations
acgttgtgctctctctctttattcgttccccgcctcaccccgagccagccgtctcgctagggtttctccgccgccgccgccgccgccatgcctcgccgcagctcaggaaggtctgccccacgcccagctccccgtgctgctccagtgaggaacccgccacagccagcacgccaggctcctcctccagctcctgttcgagatggtggtggctccatgtttggaggaattgggtccaccattgctcaaggtatggcgtttggcacgggtagtgccatggcacacagggctgttgatgctgtattaggtcnccggaccattcagcatgagactgttgcctcagaagctgctgctgctgcccctgcccctccagtgatgaatgctgatgcctgcagcatccattct

SEQ ID NO: 78074 - DNA, 395 bp, Zea mays
accagcagcagaagagcagccccagagctccagcaataatggccgagaagggcgtgaaggtgttggggatgtgggcgagccccatggtgatcagggtggagtgggcgctgaggctgaagggcgtcgagtacgagtacgtcgacgaggacctcgccaacaagagcgccgacctgctccgccacaacccggtgaccaagaaggtgcccgtgctcgtccacgacggcaagccggtcgcggagtccaccatcatcgtggagtacatcgacgaggtctggaagggcggctaccccatcatgccgggcgacccctacgagcgcgcccaggcgaggttctgggccaggttcgcggaagacaagtgcaacgctgctctgtacccgatcttcaccgcgaccggc

SEQ ID NO: 78075 - DNA, 400 bp, Zea mays
aaagaagctgaagaaggtgctagaggtgtacgaggcacgcctgaccaagtgcaagtaccttgctggagacttcctcagcctcgccgacctgatccatgtgtctgtcactctctgcctgttcgctacgccctacgcatctgtgctcgacgcctacccgcatgtgaaggcctggtggtctggtctgatggagaggccgtctgtccagaaggtcgctgccctgatgaagccatctgcttgaaatggttgccctgtcaatcggtgaatggaatagtccaagtctgttctgggttgtttgcttgttcaatgatgtgtcttctatgacgacagttgactgcctatgtgtgagcatgcatgcttgtaacgagacattgaattgttcggaaatgagcattcctgtgct

SEQ ID NO: 78076 - DNA, 415 bp, Zea mays
acgacgagaaaggacaatctgcggcggacctacccgaagtcggaggcagggcaaaaggcccgatcccccctccccgccggttgccgcgctcgtgccacggtgcgctagccccgtcgacgccggcggacagcgtgcactatgggttgctcctcctccgtgccagctagaaatactggagggctgaacactatcagcaacgatagctctccagacgccagttcaaaggacttgcgtgctaagttggtattgctgggagactcaggtgttgggaaaagttgcattgttcttcgttttgttcgtggtcagtttgatcctacttccaaggtaactgttggcgcatcctttttatcacaaacattggcattggaggattcaacaatagtgaagtttgaaatttgggatactgctgggcaag

SEQ ID NO: 78077 - DNA, 385 bp, Zea mays
gggtcgagtcaggcgtccactggcgcgtttgtggagagtatggttaccgattttatcaaacccacccatggtggagggggcatggggatgagaatagtcgaaaggcctgatgaatttgtggattctgtactgagcgctcaacgggaagctgcagcatcgtttggtgtaaacacactattgattgagaagtatattactcaaccaagacacgtagaagtccaggtatttggcgaccaacatggaaatgcgatatacctttatgagagagactgcagtctacagagaaggcatcagaagatcatcgaggaagctccagctccaaatgtgccagctgagtttcggtctcatattggtggagctgctgtatctgcagcaaaggcagttg

SEQ ID NO: 78078 - DNA, 365 bp, Zea mays
agaagaaggagcttgctgagactgattcagtttatgatactgagaaattggctgagagaattgctaagcttgccggtggtgttgctgttatcaaggttggagctgcaactgagactgagcttgaggaccgccaactaagaattgaggatgcaaaaaatgccacttttgcagctatagaggagggcattgttccaggaggtggtgcggcatatgtgcacctatctacggttgtccctaagatcaaagaagcaattgaggaccctgatgagcgtcttggcgctgatattattcaaaaggcattggtagcacctgcttcattgattgcacacaatgctggagtagagggtgaagtggttgtcgagaag

SEQ ID NO: 78079 - DNA, 403 bp, Zea mays
aagacggactcgacgtatgactctgagaagttggcagagagaattgcaaagctttctggtggagttgctgtggttaaggttggagcatcgaccgaggcagagctagaggaccgcaagctccgcatagaggacgcgaagaatgcgacttttgcagcaatagaggaaggtattgttccaggaggcggtgcagcatatgttcatctatcgacattcgtaccggctatcaaggagacgttggatgatcctgaggagcgcctaggtgctgatatcattcagaaggctttggtggcacctgcagcgctgatagcccataatgctggggtggaaggtgaggtgattgtggataaaatccgggaaagcgagtgggagttcggttacaacgccatggcgggcaaacaccaaa

SEQ ID NO: 78080 - DNA, 377 bp, Zea mays
gacgcgtgggtggggagtctggatctcaagcaaccagcccaagaactgttctgctccccagttgtatacgatcgaaggaaaaaaaaaggatcccaaaccctagcatctctcatggacgacggcgacggcggactgagcttcgacttcgagggcggcctcgactctgccccggcggccgggggccccgtgccgtcctccaccgaccctggcgcgggaggcggcgacgggccgggtatgcacgggcgcggccgacgtcgcgggagctaccgccagacggtgtgccgccactggcttcggggcctatgcatgaagggcgaggcgtgcgggttcctgcaccagttcgacaaggcccgcatgcccgtctgccgtttcttccg

SEQ ID NO: 78081 - DNA, 427 bp, Zea mays
  unsure (1)..(427): unsure at all n locations
acggacccatccacattggtagactgcagtcaattggggtagattcaatcgagaagtttcgtggaaaattaccatcattacgagctgagctaaaagatgacaataaattccgtgatatatacaactttgcattcacttgggcaagggaaaagggtcaaaagtctctctcactggagacttctattggaatgtggcagttgctatttgctgaaaggaactggcctcttctggatcattggtgtcagtttttacaggtcagacacaataaagccatatctagagacacatggtcccagctgctggaatttgtgaagacgaccgatccacagttatccaactacgacgacgaaggtgcctggccctacctcatagacgaatttgtggaatatctgactgagaacggactcgtccagcgtanaagatgaac

SEQ ID NO: 78082 - DNA, 418 bp, Zea mays
gtggtcaatgagcagaggtatgtcccagatcacagatatgtgctccatgacattgaccatgacgccaaagaacatgcactgctgtacacagtgagacgctggcaattgcttatggtctgattagcactccagcacgaactcgacttcgtatcattaacaacctgatgatatgtggtgactgctacaacgccatcaagatcatgtcaacgatcattgggacagagcttattgtgatggacaacaagacgttccaccacttcaaagatggaaagtgctcctgtggagattattggtgataatggattaaagccgctcttcgatcctttatatggagctgctggcatccatggtttcagttgataataagcaatatgaacgtatccaatgggtgttgctagtattttgtcatccctaaata

SEQ ID NO: 78083 - DNA, 402 bp, Zea mays
tccaggcaccacacctcttcctcctcttcctcctcctagcacagctagcgcctgctccccttcgtctgtgatcatgtcttgcagcagcggcaagtgcaactgcggctccagctgctcctgcggcagctcatgcaactgcatgtcccctgacgtggagaccgccgccgccagcagcatcaagaccatggtcctcgctgcgccgaccaccaaggccagcgccggcggcttcgaggcggccaccgagggcggcggctgcgactgcaacacctgcaactgcggcaccagctgcggctgctcctgctgcagctgcaactgagccggcccgcccggcccggcgatggcgcacgagagtccagaggacgacgacgacgaggcgtataaatataatagcagcgtctaaat

SEQ ID NO: 78084 - DNA, 428 bp, Zea mays
  unsure (1)..(428): unsure at all n locations
cttatgaacgagagccattacagctgcagcgtgctatacgaatgcagttgccctgagctggaggagcttgtgaaggtctgcagagacaacggagcactgggagcacgtctgacaggagctgggtggggtggctgcgcggttgctctggtcaaggagcccatcgtccctcagttcattctgaaactaaaggaaatgtactacaaatcaaggattgacaggggagtaatcaagcagggcgatgtgggcctgtacgtgttcgcatccaagccgtcgagcggcgcggccatactgaggttgtaggcaggcaggaaggcagaggcagccgctattcttttcacgagtgtggtggccctgtaaaacatggaataaagttgccatgaacaccgaacccttgtantagcgttgaattatctcaagacacacgcgca

SEQ ID NO: 78085 - DNA, 429 bp, Zea mays
agaatgaaggccgtggtgatcacgtgcgccggcgggccggaggtgctggaggcgcgggaggtggacgaccatcccgcgctaggcgaaggagaggtgctcctcgaggtcgccgccgcgggcgtcaatcgcgcggacaccgtgcagcggatgggccggtacccgccgcctgccggcgcgtccccttacccggggctcgagtgctccggcaccatcctcgcgctcggccccaacgtcccctcccgctggggcgtgggcgataaggtttgcgcgctcctcagcggccgcgggtacgcggataaggtggtggcgccggcagggcaactgctgccgatacccgatgggggttcgctgactcacgcaaccggcttgcccgaggtggcctgcaccgtctggtcaaccgtattcatgaccagtcacctctcccccggt

SEQ ID NO: 78086 - DNA, 423 bp, Zea mays
accaagcagcgatccgaagctcaatcaattcactcaaacctcttccccaaatcttcgattagattctcgttgacaagaagactagaaccgaacctgaccatgtcgctgatccgccgcagcaacgtgttcgatcccttctccctcgacctctgggacccctttgagggcttccccttcggctccggcagcagcagcagtctcttcccctcgttcccgcggaccagctcggagaccgcggccttcgctggcgcgcggatcgactggaaggagactccagaggcgcacgtgttcaaggccgacgtaccggggctgaagaaggaggaggtcaaggtggaggtcgaggacggcaacgtccttcagatcagcggcgaacgcaacatggagcaggaggagaagacggacacctggcaccgcgtggagcgg

SEQ ID NO: 78087 - DNA, 375 bp, Zea mays
accaagcatcgatccgaagctcaatcaattcactcaagcgtcgtccccaaatcttcgattacattctcgttgacaagaagacgagaaccgaacctgaccatgtcgctgatccgccgcagcaacgtgttcgatgccttctccctcgatctctgggacccctttgagggcgtcgccttcggctcaggtagcagcagcagtctcttcccctcggtcgcgcggactaactcggagaccgcggccttcgctggcgcgcggatcgactggaaggagactctagaggcgcacgtgttcaaggccgacgtaacggggctgaacaaggaggacgtcaaggtggacgtcgaggacggcaacgtcattcagatcagcggcgaacgc

SEQ ID NO: 78088 - DNA, 401 bp, Zea mays
ggagaagatgagccaggtccaaagattggtgaaaggctcctatgtcgtcaccctttcaatgaatcaaagagagcgtacgttgttccacagcatgttgaggaattattgaagtgctactggcctggaaattcatcgaattcacgggaggagcttccatccatccatgagattaggactcggtgtattcaccatctggaccgaatgaggccagaccatatgaggcggctgaacccgacgccttacaaggtaagcgtgagtgctaagctgtatgacttcatccatttcttgtggctcaacgaagcgcctgtcggagaactgcaatgatgaaatgaagtggcggtagggtcggatcccaaacctaactctaataagctgctccgcttatgggtcctaataaactg

SEQ ID NO: 78089 - DNA, 336 bp, Zea mays
accaagacggagcagatcacggccgccatggagaacggcgtgcttacagtcactgtgccgaaggaggacgccaagaagcctgaagtgaagtccattcagatctccggctagacctcggtctgcggtcgtcgtacctgcgtggtttgaggaacggcagttcgcctcggtcgttctgtgaaataaaattgggttacaagaattatggcgtttgtcaatatggtcgtaatgtcgtacgatggtggaatgtggtcacaaactttgcgtatgttgggtctacatgtggtgtctgaatctatgtatggatgtcatgagtttgtctaaaaggtaaaacaaaaa

SEQ ID NO: 78090 - DNA, 288 bp, Zea mays
attccaactggcgtagttgaaccgggggaagatattaatgttggagccataagagaagtaaaagaagagaccgggattgatgcagaatttgttgaagtgctggccttcaggcagagccacacagctttttttgataaaccagatctatttttcgtgtgcctgctacgaccactgtcatatgacatctacgaagcaagactcggacctataagcatgccagtggatggcagtacaggaccttgcagcacacccatttgtccagacacatgatcttgtgaactacatcct

SEQ ID NO: 78091 - DNA, 359 bp, Zea mays
  unsure (1)..(359): unsure at all n locations
caggaatccgcggctgaggcgccggcgatggcggctcccatggtcgacgccgaatacctgcgccaggtcgacagggcgcgccgccacctccgcgccctcatctccaacaagggatgcgccccgatcatgctccgcctcgcatggcatgatgctggaacttatgacctgaagacaaaaactggtggtgcaaatggttcgattagatatgaagaagagtacacccatggttcaaatgctggtttaaagattgctatcgatctccttgagcctatcanagcaaagaatccanagataacatatgcagacctgtatcagccttgctgagtggtttcagtcgaagtgactgggggggcaactgt

SEQ ID NO: 78092 - DNA, 363 bp, Zea mays
atgcgctgcgcctcggttttacggcccttccctcaccgccccgcgcgagcgaaatcatgaagcttgaggtcatgcccaagcagcgggtgctggaggcggagcagagggaggaggccatggagatgagtggcctggacctgtggaagcacgagaagcccccaaggatctgccccttgcccccgtcgctcccggcgccgccagcgtgcgacgaggcggcgctcgtgccgccgctcaacttcgccatggtcgacgacggcatattccgctccggcttcccggagaccgccaatttccggttcctcaagtccctcaacctccgctccatcgtgtacctgtgcccggagccgtacccagagacgaaca

SEQ ID NO: 78093 - DNA, 429 bp, Zea mays
  unsure (1)..(429): unsure at all n locations
gaagcatatagcaccagcggaacacgggaacggcggaagcaaacaactagaaattccccagcccggttctttgcgtgcggttgatctcgtcggaggcccggccgcggttccccaatccgccatcgaattcgatggcggccaacgccgggaataagatccgcaacgccaagctggttcttcttggagatgtgggcgctggcaaatctagcttggttcttcggtttgttaagggacagtttgttgaattccaggaatcaacaattggagcagccttcttttcccagaccttagcggtcaatgatgagactgttaagttcgaaatctgggatactgccgggcaggagaggtatcatagcttggctcccatgtactatangggtgcagctgctgccattgttgtctatgacatcacaaatccggcctccttca

SEQ ID NO: 78094 - DNA, 408 bp, Zea mays
ggcatataggagtttgtagtgatggcggcggacacagagcctctcgagatcctgctccacctccccttgttagctgaggataataacgtgccatatgtgtttgttccatcgaagcaagctcttggccgtgcttgtggtgtgacaagaccggttattgcttgctcagtgaccagtactgacggtagccagctgagactacagatacagggtctcaaggactccattgagaagcttctcatctgatctgccgaagacctttcagtgtgatgggcctcatcgacacatttttcagatgcttggactggtgatggtgtcctgtttactttacgcttttcagactatatttgaacactgttaagtccatcatacctgaattgtaccgcatcctacgtctgtgattgtcatgta

SEQ ID NO: 78095 - DNA, 419 bp, Zea mays
  unsure (1)..(419): unsure at all n locations
agcagacatggccaccattccgaccaccgattctggcctcgtcctcagttcctccgctctcctccggaggactaagagggccgcctcatccgtcaccgccaggctgccagccgtcgcccgccgtcgcccgcagctcctcgtgcgtgcctccgccaaggagatcgcctttgaccagggctccagagccgcccttcaggccggcgtcgagaagctcgccgccgcggtcggcgtcaccctcggacccagaggaaggaatgttgtcttggatgagtttggaacccccanagtggtcaatgatggagttaccattgcccgcgctattgagcttgctgattccatggagaatgctggtgcttccttgattcgtgaagttgccagcaagacgaatgactcggctggtgatggaaccacaactgcct

SEQ ID NO: 78096 - DNA, 431 bp, Zea mays
gcagaagctacaatcctaaaaccatctgcttcagccttcagctagccccaagtttagtcggccgatcgatcactgaagtagtaatggcctccgccaacagctggaccctcgagatcgcgtcgccggtggccccgcagcgcctgttccgcgccgccgtgatggactggcacaccctggcgcccaaggtcgcctcccacgtcgtcgccagcgcgcagcccgtggagggcgacggcggcgttggcagcgtcaggcagttcaacttcacctcagtcatgccgttcagcttcatgaaggagcgtctcgagttcctcgacgcggacaagtgcgagtgcaagaacacgctcatcgagggaggcggcatcggcgtcgccatcgaaacggcgacgtcgcacatcacagtggagcccgcggccggcggcgggagcgtggtg

SEQ ID NO: 78097 - DNA, 383 bp, Zea mays
agcaagagatatgctgcagcacttgtggacaggtccgatctcaaatgcagctgttgatgttgttcaagggagtcgatcagttgaagttcggtctgttggagttaccaagggtgctgcaattgatcgtattttaggggagatagttcacagcgaaaacatgattactccaattgactatgtcctgtgcatagggcatttccttgggaaggatgaggacatctacgtcttctttgatcccgagtacccttctgaatccaaagtaaagccagagggcggctcagcatcacttgaccggaggccgaacgggaggccaccatcgaatggcaggagtaactccaggaacccacagtccaggacacagaaggcccagcaggctgcatccg

SEQ ID NO: 78098 - DNA, 176 bp, Zea mays
agccagtgcttagattggcaattttggcatcggtggtctgaagccacgcactcatcagtggaacattcgcagtcaataagtagaacctgtctctgagctgcttcccacgagtgaaagttgtactcacatctgaggggattcatggccaagtatacatccccgagatccattggatg

SEQ ID NO: 78099 - DNA, 398 bp, Zea mays
ccgaactggagcaatcgcccgcccaaggagacgatcctcctcgacggctgcgacttcgagcactggctcgtcatcatggagccgccgcctggtgacgcctccaaccccgacatcacacgcgacgagatcatcgatagctatatcaagactctcgcccaagtcgtcgggagtgaggaagaagctaggcaaaagatatactctgtatcgactcgtcattactttggctttggtgctcttgtatctgaggaactttcttacaaactgaaagaaattcccaaggtccgctgggttcttcctgattcatacttggatgtcaaaaacaaggactatggaggcgaacccttcataaatgggcaagctgttccttatgatcctaaatatcatgaggagtgggtgag

SEQ ID NO: 78100 - DNA, 220 bp, Zea mays
acctcagccgcgtcgcgtcgcatcctacgatccaaagctctctctgctcgcagccatggcgaagaactaaccgaccgtgagcgccgactacagcgaggctgttgataatgccaggcgcaagctccgagccctcatcgccgagaagagctgcgccccgctcatgctccgcctcacgtggcaatccgcggggacgttcgacgtgtcgtcgaggaccggccgt

SEQ ID NO: 78101 - DNA, 377 bp, Zea mays
ggaccagctcggagaccgcggccttcgctggcgcgcggatcgactggaaggagactccagaggcgcacgtgttcaaggccgacgtaccggggctgaagaaggaggaggtcaaggtggaggtcgaggacggcaacgtccttcagatcagcggcgaacgcaacacggagcaggaggagaagacggacacctggcaccgcgtggagcggagcagcgggaggttcctgcgcaggttccgactgcccgagaacgctaagacggagcagatcacggccgccatggagaacggcgtgcttacagtcactgtgccgaacgacgacgccaagaagcctgaagtgaagtccattcacatctccggctagacctccgtctgcggtcgt

SEQ ID NO: 78102 - DNA, 424 bp, Zea mays
  unsure (1)..(424): unsure at all n locations
ccgcggcctacccgacgccgttcgtcgctccgggtgaggagtcctcccgctacgccatcattgtcggcggagccaacttcgggtgcggttcctctcgcgagcacgcgcccgtcgcgcttggggccgctggcgcacgcgccattgttgcggagggctacgcgcgcatcttttttcgcaactccgtggccactggagaggtgtaccctctggagctcacggacgttggggcctggaaggagtgcaagacaggggatgtggtcaccgtggaccttgctaactccgtttttattaaccacacctctggcaaggagtacaagctgaaaccaattggtgatgctggccctgtaattgaggcgggagggatctttgcctacgcccggaagacaggaatgattgcgtcganagctgctgcatgagggaaaga

SEQ ID NO: 78103 - DNA, 419 bp, Zea mays
  unsure (1)..(419): unsure at all n locations
aatacatggaagcaatttcgatcttattggaagaatccaccctacaatgccatgcgctatcttatgacaatcctctacggtctcgtgttcggttcagtcttttggcgcatgggaaagaacgtgaaatcagagcaggaactgcaaaacctacttggagccacctatgctgctgttttcttccttggatctgcaaacttgctctcatctgtacctgttttttctatcgaaaggacagtcttctaccgtgaaaaggctgctgggatgttctctccgctgtcctattcgtttgcggtgacagttgtggagcttgtctacagcatagctcagggcatcctttataccatccctctgtattcaatgattggttatgagtggaaggcagacaagttcntctacttcatgttcttcctaacctgctc

SEQ ID NO: 78104 - DNA, 439 bp, Zea mays
  unsure (1)..(439): unsure at all n locations
ggcattccaccnagaccagacagcggctcatcctttgctggcaagcnagcgtggaggatggccgtaccctgtgcggattacaacatcccagaaggagagcaccctccacttggtgctgcgtctcaggggcggcatgcagatcttcgtgaagacacttactggcaagacaatcacccttgaggtggagtcctcggacaccattgacaacgtcaaggccaagatccaggacaaggagggcatcccaccggaccaacagcgcctgatcttcgccggcaagcagctggaggatggtcgcactcttgcggattacaacatccagaaggagagcaccctccacctggtgctccgcctcaagggtggcatgcagatctttgtgaagacattgactggcaagaccatcaccttggaggtggagtcgtctgacacaatcgataatgtc

SEQ ID NO: 78105 - DNA, 421 bp, Zea mays
acccacgcgtccgcccccagtctcggaagagaactatccagaagcgcaagactccaaagccgtcgccttcctatccatcccttcctcgccacgggggtcgcctgagatcacataaacaatggtgaaggctgttgctgtgcttggtagcagcgatggtgtcaagggcaccatctttttcacccaagtgggagatggccctaccactgtcaccggaagtgtctctggcctcaagcctggcctccatgggtttcatgtgcatgcgcttggtgacaccaccaatggctgcatgtcaactggaccacactacaatcctgcgagcaaggaacatggagcaccagaagatgagaaccgccatgccggtgatcttggaaatgtgacagctggagcagatggtgttgcaaacattaatgttaccgacagc

SEQ ID NO: 78106 - DNA, 419 bp, Zea mays
actactgcgacgcaagcaacaggcagtggccgtgcgcggcggggcagaagtactacgggcgcggcccgctgcagatctcgtggaactacaactacgggcccgccgggagggacatcggcttcaacgggctcgccgaccccaacagggtggcgcaggacgccgtgatcgcgttcaagacggcgctctggttctggatgaacaacgtgcaccgcctgatgccgcagggcttcggcgccaccatcagggccatcaacggcgccctcgagtgcaacgggaacaaccccgcccagatgaacgcgcgcgtcggctactacaagcagtactgccagcagctccgcgtcgacccagggcccaacctcacttgctaggccagcagctcctgctagctcgtccacaataaatgctcggcgtcgcaccct

SEQ ID NO: 78107 - DNA, 370 bp, Zea mays
agatccgcgccgccgcaagagaggaggagagaccacctccaacgccacccggaaaaaggacagcgcggcggggaggaggaagaagaagaacatggggaagggcgtcctggaggtgcacctcgtcgacgccaagggcctctccggcaacgatttcttagggaagctggacccctacgtgatcatgcagtaccggagccaggagcgcaagagcagcgtcgcccgagaccaaggaaggaacccgtgctggaacgaggtgttcaagttccagatcaactcggccgcggccaacgtgcagcacaagctcatcctacggatcatggaccacgacaacttctccagcgacgacttcctcggcgaggcgacgatcgac

SEQ ID NO: 78108 - DNA, 322 bp, Zea mays
gcacgcgtccagatcaacgccgccgcaggagaggaggagagaccagctccaaagctagacggacaaagcgagagctcagcggggacggaggaagacagagaacatggggaacggcgtcctggatgtgcacctcgtcgacgccaagggcctctccggcaacgatgtcttacggaagctggacccctacgtgatcatgcagtaccagcgccaggatcgtattaccatcgtcgaccgagaccaaggtgatggaccgtactggaaagaggtgttcaacttccacatcaactcggccgcggtcagattgcatcacaatctcatccta

SEQ ID NO: 78109 - DNA, 403 bp, Zea mays
ggctcctatctggtatacgacggagctgagcttctagcaacgtacagtgtatccgccatgagtcctttcggggcggtgatcacgccagaaaccctcaagtacatgtccaagtaccagggacgtgagatcacgcaggtggactgcgcacgggaggcgatgaggctgatccacgcggaagacaagaacctcaaggccgaggactcagcgtgggagctgaagaagaagttcggcaacggcgtgagcaccatggtcctcgtctacaacgccaccggggccagcctgagcctgctggacgacgggaaagactggatgggctccgtctacagctcgccgattccggacaccttccacaacgggcagtggatcgccttcctccacgtcaagcccggctcgctggcgcagg

SEQ ID NO: 78110 - DNA, 420 bp, Zea mays
ttcaggagagatgcaaggaaaaacctgagtgctcgggcaatccagtcacggtgtacatcactgacatgaactacgagcctatcgctccctaccacttcgacttgagcggcaaggccttcggctccctggcaaagcccgggctcaacgacaagattcgccactgcggcatcatggacgtcgagttcagaagggtgcgatgcaagtaccccgccgggcagaagatcgtgttccacatcgagaagggctgcaaccccaactacctggccgtgctggtgaagtatgtggcggacgacggcgacatcgtgctgatggaaatccaggacaagttgtcggctgagtggaagcccatgaagctctcttggggcgccatctggaggatggacactgccaaggcgctcaagggccccttctccatccgcc

SEQ ID NO: 78111 - DNA, 205 bp, Zea mays
atccccgccaacacgcgcgtcctcgtgaacggctgggccatcggcagagacccggcggtctgggagaagcccgaggagttcatgccggagaggttcatgcgggacggctgggacaagtccaacagctacagcggccaggacttcaggtacctgccgttcgggtctgggcgccggatctgccccggggccaacttcgcgctcgcga

SEQ ID NO: 78112 - DNA, 414 bp, Zea mays
acgggctcttcgccctcttgccggtcccgaataaagagcagcagcgcaagaggtcggtagagcgagaagaaggcaatggcggccgagagcttccttttcacctcggagtccgtgaacgaggggcaccccgacaagctgtgcgaccaggtgtcggacgccgtgcttgacgcatgcctcgcgcaggaccccgacagcaaggtggcctgcgagacctgcaccaagaccaacatggtgatggtgttcggcgagatcacgaccaaggcgaccgtggactacgagaagatcgtgcgcgacacctgccgcgagatcgggttcacctccgacgacgtgggcctcgacgccgaccgctgcaaggtgctggtgaacatcgagcagcagtcccccgacatcgcgcaaggcgtgcacgggcacttc

SEQ ID NO: 78113 - DNA, 391 bp, Zea mays
aaaccagtgagaagggggaaatgctgggccaagccgcccgccctctcgtctcccgcaccgccgcggcgcccaccgcccgccgggcgctcgtcacggcagaggtgcctgcggaggccgccgaggactccacgtttgtggaggcgtggaagaaggtcgcccccaacatcgagcccccaacgacgccccctcttcctcatgcagccgcgcccgcccacgccggctaccatccccactaagctcaccgtcaacttcgtcctcgcctacaagtccgagatcgccaacagggacgtggacatggtaattgtaccagctacaactggtcagatgggcgttttgccaggccatgttgcgacgattgcagagctcaagcctggtgttctctcagtacatg

SEQ ID NO: 78114 - DNA, 412 bp, Zea mays
acccacgcgtccggcggcggatgggcaagttcatgcgcaagttcgtgctgccggacaacgccgacgtcgacaaggtcgccgccgtgtgcagggacggcgtgctcacggtgaccgtcgagaagctgcccccgccggagcccaagaagcccaagaccatcgaggtcaaggtcgcctgagggagcaagcagtagctgtgcttctgaaactttgtgtgtttgtgtttgcttccttctttggtatcaccaatcatcctatctgatatatcgactggggtttttgctgtctccatagaataaatctctacatgtctcttgtaaccttttctggtgaagatcgtgtcgcgatgaatctataagttaccgtttgttttcgttttgaaaaggaatgggtgtgtagggggaggggggggggg

SEQ ID NO: 78115 - DNA, 411 bp, Zea mays
acccacgcgtccgaaagtttctctggaagatctttacaatggaatctcagagaagctctctctttcgcgcaatgtcatctgctccaagtgcaaaggcaagggctcgaagtctggtgcttcaatgaggtgccctgagtgccagggctcacgtatgaaagtcaccattcgtcagctggggccttccatgatacagcagatgcagcagccttgcaacgagtgcaatgggactgcggagagcatcaacgataaggaccgctgcccatggtgtaagggtgagaaggtcgttcaggagatgaaggttcttgaggttcatgttgagaacggaatgcaacacagccagaagatcaccttccctggtgaagctgatgaagcgcctgataccgttactggagacattgtattcgtcctcca

SEQ ID NO: 78116 - DNA, 372 bp, Zea mays
acggacgcgtgggcgacatgttccgcatcatgttcgaccgccggttcgacagcgagcacgacccgctcttcaacaagctcaaggcgctcaacgcggagcgcagccgcctgtcgcagagcttcgagtacaactacggcgacttcatccccgtgctccgccccttcctccgcggctacctcaaccgctgccacgacctcaagacgcgccgcatgaaggtcttcgaggacaacttcgtacaggagcgcaagaaggtgatggctcaaactggtgagattcggtgcgccatggattacatcctcgacgccgagatgaagggcgagatcaaccacgacaacgtcctccacatcgtcgagaacatcaacgtcgcaacga

SEQ ID NO: 78117 - DNA, 416 bp, Zea mays
agttgctaccatactcagggacagcgagatgttcaacgaatggactctggaactgaaggccatggttgaaaggttaatatacataaggcaacaccaattaatgccccggaatccaaaagaaaccctggtgaatggagccatatcaataagcaaattgggatgtttactttcactgggctgaatagcgaacaagtcgcattcacgaggcacgaataccacatttatatgacatctgatgggaagatcagcatggccggtttgagcatgaggactgtgccccatcttgcacatgccatacacgctgcagttactcaactgaaatgaggatagtatcgcagctttcgtgaataaaacctgaatcatccacaacaatgttctaagtactcatccactggtatttactggttgacctactg

SEQ ID NO: 78118 - DNA, 409 bp, Zea mays
  unsure (1)..(409): unsure at all n locations
aattacctaacgctagagtacggcatggccgagctcatcaacaacatgcacgtcatggagaagctacagacggaggtgaggacgacgatgcgctcgccggactgcaagaagctggacatgctagcggaggaggacctcggcagcatgccctacctcaaggcgaccatcaaggagacgctgcgcctgcacccgccggcgccgttcctcctcccgcactactccaccgccgactccgagatcgacggctacttcgtcccagccgggacgcgcgtcctcgtcaacgcctgngcgctcgggagggaccgcacgacgtgggagaagccggaggagttcatgccggagcggttcgtgcangaaccgggcgccgtggacgtccacatgaagggcaaggacctcaggttcatcccgt

SEQ ID NO: 78119 - DNA, 404 bp, Zea mays
acccacgcatccggcggcggatgggcaagttcatgcgcaagttcgtgctgccggacaacgccgacgtcgacaaggtcgccgccgtgtgcacggacggcgtgctcacggtgaccgtcgagaagctgcccccgccggagcccaagaagcccaagaccatcgaggtcaaggtcgcctgagggagcaagcagtagctgtgcttctgaaactttgtgtgtttgtgtatgcttccttctttggtatcaccaatcatcctatctgatatatcgactggggtttttgctgtctccatagaataaatctctacatgtctcttgtaaccttttctggtgaagatcgtgtcgcgatgaatctataagttaccgtttgttttcttttgaaaaacagcaaagacgacaggataagga

SEQ ID NO: 78120 - DNA, 414 bp, Zea mays
gccaaagcttctggcaagaagaaagaatctgggaaatcgtcagttttacttgatgtgaagccatgggacgatgagaccgacatggccaagctcgaggaagctgttaggagtgtccagatggaaggactgctttggggcgcatccaagcttgtcccagttggatatggcatcaagaagctgcaaatcatgatgaccattgtcgatgaccttgtctctgtcgacactctcatcgaggactatctctgcgctgagccagtgagcgaatacgtccagagctgcgacattgtcgccttcaataagatctaaatttccttgcaatggtggttggtggacactgtaccagcctaatttataattttccatgagcatcttcaagagtttttctaaattatcatttggagtcatttacataaa

SEQ ID NO: 78121 - DNA, 415 bp, Zea mays
actccaccctggaaatcctggagacaacaacggtcgtttttctctccgggacaagagaaaaggggagagagaggtgaggcgccgtgtccgcccgatctgctctgccccgacgcagctgttacgacctcctcagtctcagtcaggagcaagatgggtgccggcggcaggatgaccgagaaggagcgggagaagcaggagcagctcgcccgagctaccggtggcgccgcgatgcagcggtcgccggtggagaagcctccgttcactctgggtcagattaagaaggccatcccgccacactgcttcgagcgctcggtgctcaagtccttctcgtacgtggtccacgacctggtgatcgccgcggcgctcctctacttcgcgctggccatcataccgggggctccaaccccgctccgct

SEQ ID NO: 78122 - DNA, 354 bp, Zea mays
acggacacgtgggcttttgatgtcagtaacttgaccattgacacccgtgtgtttgaggtgctggccaccaatggtgacacccatcttggacgtgatgattttgaccacaggatcatggtatacatcaccacattcatcatcaagaactacatcaatgacatcagcaaggacaaccgtgctcatggaaagctgcagaaggaagctgagcgtgccaagagagccctgaccatccagcaccagctcctagttgagatcgagtccatccttgatcggatcgacttcgcgagcccgcctgaccgtgtcaagtttgcggagctgaacactgactcgttcctcaacactatgggccctgtc

SEQ ID NO: 78123 - DNA, 382 bp, Zea mays
aaccctagccgcgatccgacaacgcctccatccctagccgactgctgcaagcttcagagctcaagagtcagggcgccatggcgacagagacggagaccttcgcctttcaggctgagatcaaccagctgctctcactcatcatcaacaccttctattccaacaaggagatcttcctccgggagctcatttccaactcttccgatgcgttggacaaaatcaggttcgagagcctcactgacaagagcaagctcgatgcgcagccggagctgttcatccacattgtaccagacaaggcttcgaacacgctctccatcatcgacagcggcatcggcatgaccaagtccgaccttgtcaacaacctcggtaccatcgccaggtccgg

SEQ ID NO: 78124 - DNA, 421 bp, Zea mays
acttctctcctccccaaaatcaatcgcccacaaaggagagccaggcagccagccaaatcttccacctcctccatttccagccccgtccccacaccagctcgcgtaacctcctgcccatggctggaggcggcggcgcaggcgcgggctcgtcgtccggcggcggcggagggggcggcagggagggcgactgggactgcggcagctgcggcaaccgcaactacgccttccgctcgctctgcaaccgctgcaagcagccgcgcctcctcgtcgaccccaacaccccgcgcgactccaagtggctaccccgcgccggggactggatctgcaccggttgcagtaacaataattatgcatccagaaagaactgcaaaaagtgtggcttgcccaaggaggaagcagcaatgccagcattgcaaatggc

SEQ ID NO: 78125 - DNA, 390 bp, Zea mays
aaaatcccacccgcgatccgacaacccctcaatcccgagccgactgctgcaagcttcatcgctcaagagtcaaggcgccatggcgacagagaccgagaccttcgcctttcatgctgagatcaagcagctgctctcactcatcatcaacactttctattccaacaaggagatcttcctccgggagctcatttccaactcttccgatgcgttggacaaaatcaggttcgagagcctcactgacaagagcaagctcgatgcgcagccgcatctgttcatccacattgtaccacacaaggcttcgaccacgctctcgagcatcgatagcggcatcgtgatgaccaagtccgaccttgtcaacaacctcggtaccatcgcctggtctgggaccag

SEQ ID NO: 78126 - DNA, 421 bp, Zea mays
atcctacgcgagggcgaaacccacaaaccctctccctcctgtactccggccgacacatccaggggcgatgacgctgggtagctccggcgccggatcgagcgtcgtcgttcctcgaaacttcaggctattagaggagctcgagcgtggagagaagggcattggtgatgggacagtgagctatggaatggatgatgctgatgacatctacatgcggtcatggactggtaccatcattggccctcacaatactgtacatgagggtcgcatctaccagctgaagttgttttgtgacaaagactatccggagaagccaccatctgtcagattccactcaagaatcaacatgacatgcgttaatcacgagacaggaatggttgatccaaggaagtttggtttgctagcgaactggcagcgggactac

SEQ ID NO: 78127 - DNA, 414 bp, Zea mays
atagttcaagatcgcgagcggccgcccttttttttttttttttttactgacgaagaacagagtcactttattccttgcattatttaatcttgttcccggtacagctagcaagacacaagttttacagatgtaggattatcaggaagcaatccttggaacaaggagaagcttctccttccggcgaagcgtcagcccaaaggactcgtccatggacacccctgctgcagagcccggaacctcccaatcaaaatggtacatgagattggccagcatgatctccatggtcgcgaatccgaagttcatcccggggcagatcctccggccggagccgaacgggatgaatctgaggtccttgcccttcatgtggacgtccactgcgcccggttcctgcactaaccgctccggcatgaactc

SEQ ID NO: 78128 - DNA, 333 bp, Zea mays
ggggccgccgccaagcccttcgcgtgcgccgcaaccgctgagtgagaagaagagatggccggcaagggcgatgggccggctatcggcatcgatctcgggacgacgtacgcgtgcgtcagcgtgtggcagcacgaccgcgtcaacatcagtgccaacgaccagggtagccgcaccacgccctcgtgcgtcgccttcaccgactcggagcgcctcaacggagatgcggccaagagccaggtcgccatgagccccatcaacagcgtctttgacgccaggcgtgtcagcggcaggagggtcagtgaggcgtctgtccagactcagacgaagttgtgg

SEQ ID NO: 78129 - DNA, 403 bp, Zea mays
cggacgcgtgggcggacgcgtgggcgcaggtcgctaagacgcttctccttgtggccctggtggtcgtgtcggcggtggagctgtgccgcgccatcgagttcgacgagcgggacctggcatcggacgaggcgctgtgggacctgtacgagcggtggcagacgcaccaccgggtgcaccggcaccacggcgagaagggccgccggttcgggaccttcaaggagaacgcgcgcttcatccacgcgcacaacaagcgcggcgaccgacccctacggcctccgcctgaaacgccgtcggcgacatggggccgtgaggaattccgttccgggttcgccgactcccgcatcaacgacctccgccgggagcacgacgcggcgccggccgtgccggggttcatgtacgacga

SEQ ID NO: 78130 - DNA, 389 bp, Zea mays
  unsure (1)..(389): unsure at all n locations
gacatggacgcgctggtggcggcgtggctgccggggtcggaggggcanggcgtggcggacgtgctgttcggcgactacgggttcacggggaagctgccgcggacgtggttcaagtcggtggaccagctgcccatgaacgtgggcgacgcgcactacgacccgctcttcccgttcggcttcggactcaccaccaagggcacgaagtgagtgagtgtgaggcgctctgatgggatgtggcctgtgagtgagctgtgtattcgtgggcgggcgtgaggctctttgggtttcgaattggttgggggtgacgggcggcgagtcgtgtacgccgcacacattgcgcagcgtacgttgggttgggatgtgtgcgtctgggtaataacagtgatgca

SEQ ID NO: 78131 - DNA, 422 bp, Zea mays
agatttaatcagaaaaactgcaaaaaaattgggcgcagtggggttttgaacccaggacctccctcttctaagctgggagcactaaatgtaagaggctaaccagtagaactctagcgtatttgttgtaaatagcaaatataaaatctaaatatatatatactatgttttataaaataaaaaaaatataatcgtgccgggccgggccggcactgcgggccgagacagcggcccaagcacggcacggctgtcgtgtcgggcccgacccggcactattaaacgggccgtgcttcgggccggcccgttaagcacggcccatttggccatctataaataagggacgagttgtgagacagcacctcgctgtctcgtaatcagacgcatggagcaatatgattcttgtaaactctagcttcatccaatct

SEQ ID NO: 78132 - DNA, 425 bp, Zea mays
cgcctccccctcaagttccacaaacgcaagccccaatctcgccgtcaccacccccaatccagcaaacgcaaacccgatatcgccgccgccgccgccgccgccgcgatgtctcgccgctatgacagccgcacgacgatcttctcgccggaggggcgtctctaccaggtggagtacgcgatggaagcgatcggcaacgccgggtcagccctcgggatcctagcggccgacggcgtggtcctcgtcggcgagaagaaggtgacctccaagctcctccagacctcgcgctccgccgagaagatgtacaagatcgactcgcacctggcgtgcgccgtggccgggatcatgtccgacgccaacatcctcatcaacaccgcccgcctccacgcccaacgctacgcgctctcctaccaggagaccatccccgt

SEQ ID NO: 78133 - DNA, 415 bp, Zea mays
  unsure (1)..(415): unsure at all n locations
acccacgcgtccggctcccggctcccccacggtactccagccgctaccctgcgattccgccagtacgccaccaccaccgagcctggactaccgccgccgcccttcgccgatatcttcagcggcgaacagcgcccaccagatcccgcccctgcgatggagtccgtggtgaacccgaaggcatacccgctggctgatgcgcagctgacgatgggtatcctcgatatcatccagcaggccgccaactacaaacagcttaagaagggagcgaatgaagcgacgaagaccctgaataggggcatatcggagtttgtagtgatggcggcggacacagagcctctcgagatcctgctccacctcnccttgttagctgaggataagaacgtgccatatgtgtntgttccatcgaagcaagctc

SEQ ID NO: 78134 - DNA, 422 bp, Zea mays
aaaaactttttatgctggaaaagcgggtgtgccagttactgaggtgaatgttcctgttgttggaggccatgcgggtattactattctgccactcttctcgcaggccactcctgcaagcaattcgttgtcccaagaagacattgaggccctcaccaagaggacacaagatggtgggacagaggtggttgaagcaaaggcgggaaaaggctctgcaacgttgtccatggcatatgctggtgctgtttttgcagatgcatgtttgaagggtctgaatggagttccagacattgtagagtgctcttttgtgcaatcaactgtgacagagttgccattctttgcctccaaggttcggctcggcaagaatggagtggaggaagtgcctggtctgggtgagctcagcgagttcgagaagaatgggctgg

SEQ ID NO: 78135 - DNA, 420 bp, Zea mays
gcaagagaacggcctcactacggacaatctcaaggccatcttggtggacatgttcgaggcaggtatagagacatcttacctgacgctagagtacggcatggccgagctcatcaacaacaggcacgtcatggagaagctacagacggaggtgaggacgacgatgcgctcgccggacggcaagaagctggacatgctagcggaggaggacctcggcagcatgccctacctcaaggcgaccatcaaggagacgctgcgcctgcacccgccggcgccgttcctcctcccgcactactccaccgccgactccgagatcgacggctacttcgtcccagccgggacgcgcgtcctcgtcaacgcctgggcgctcgggagggaccgcacgacgtgggagaagccggaggagttcatgccggagcggtt

SEQ ID NO: 78136 - DNA, 404 bp, Zea mays
acggacgagtgggcggacgcgtgggcgcacgtcgctaatacgcttcaccttgtggccctggtggtcgtgtcggcggtggagctgtgccgcgccatcgagttcgacgagcgggacctggcatcggacgaggcgctgtgggacctgtacgagcggtggcaaacgcaccaccgggtgcaccggcaccacggctagaagggccgccggttcgggaccttcaaggagaacgcgcgcttcatccacgcgcacagcaagcgccgcgaccgaccctagcgcctccgcctgaagcgcttcggggacatgggccgtgaggaagtccgttcccggtgcgccgactcccgcattaacgagctccgccgggagcacaccgcgagtgccggccgtgcgggggttcatgtacgacgacg

SEQ ID NO: 78137 - DNA, 405 bp, Zea mays
gaccacacgtccgctcctcgcacgcgaaaaacctagcactccgtagtccctctcctctggaggtattcgcagtcgaccgtgtcctcggagcacgatgaaggttgttgctgcctacctgcttgctgtcctcgctgggaatgccagcccctccgctgaggatttgactggcattctggagtcagttggctgtgaagttgacaatgaaaggatggaactgctgctgtcccaactgagcggtaaggacatcaccgagctcattgccgcgggcagagagaagtttgcttcagtcccatgtggcagcggcggtgtggctgttgcggcaagtgcacctgctgctggcggagctgctcctgcagctgaggcaaagaaagaagagaaggtggaagagaaggaagaaagcgatga

SEQ ID NO: 78138 - DNA, 426 bp, Zea mays
  unsure (1)..(426): unsure at all n locations
acccgaaccgcccgtccgtcagccggaagccgatgccggcgccgggcagcgacgagtacgcggagctggagcgcaagccggagaaggtgttcgtgcgcaccagcaccagccagttccaggccctcgtcggcatctcgctgctggagatcctgtccagccactcctccgacgaggtgtacctcggccagcgcgacaccaaggagtggacgtcggacgccaaggcgcatgaggcgttcaagcggttcggcgcgcggctgaccgagatcgagaaacgcgtcgtcaccatgaacgcggaccctcgcctcaagaaccgaaacgggccggccgagttcccctacacgctgctctacgccaacacctccgacacgaagggcgacgccgccggcatcaccgccaagggcattccanacagcatctccatttgag

SEQ ID NO: 78139 - DNA, 421 bp, Zea mays
ggaaaaaaggcccagaggcagtgccgtgaccgattcgagacgcaagagaaggatcgagacgaggcggcggttttccggggcagcatcgtctcggccacgaagatgtcttactcaaggggctcaagtgaaaggtatggatctcgctcaccttactcgagaagcacaaggtaccgaagtcgctctaggagtgtcgactctagtgatgctgaaaaccctgggaacaacctgtatgtgactggtttgtcggctcgtgtaacggatcgagatctggagaagcacttctccactgagggtgaggtgattgatgcaagcgttgtgtatgatccttggacaagggaatcacgggggtttggttttgttaccatggctgctgttaaagatgcagatcgctgcatcaaatatctggaccgttctgtgttgc

SEQ ID NO: 78140 - DNA, 430 bp, Zea mays
agaactggcaggtggctatggaactctggaggagttgcttgagatcattacttgggcacaactggggatccacaagaagccggttgggcttttgaacgttgatggattctacgacccgcttctgtctttcatcgacttggctgtcagagaaggtttcgtatcggaggcggcaaggcgcatcatcatctcagccccaacagccaaggagctagttatgaagctggaggactacgtcccggagtatgacgtcggcttggtctgggaggagcagaagcccaacagcttggtcccagctgctgggatcacctcatcctgatgatctctcaccttccagcctgcaccgcatcatatatacacatataactaagtaactaaccgatcgaagcctgccacaaattttttgttcatctgccaaagtcctaaccaaagg

SEQ ID NO: 78141 - DNA, 361 bp, Zea mays
gggtcgacgcccgcgtccacccacacgtccgcgatctcgtttcaaatccagccatcctcgtttcctccgtcccgcagcatctcaaccccatggccaagatcaagatcgggatcaatgggttcggcaggatcggaaagctggtggccagcgtggccctgcagagtgacgatgtcgagctcgtcgccgtgaacgaccccttcatcagcaccgactacatgacctacatgttcaagtacgacactgtgcacggacagtggaagcaccatgaagtcaaggtgaaggactccaaaacccttctctttggtgagaaggaggttgctgtgtttggctgcaggaaccctgaggagatcccgtggggttc

SEQ ID NO: 78142 - DNA, 389 bp, Zea mays
tcccgggccgacccacacgtccacgcggtctcatctcctcccgggacgggcatgcagagcacggctgccatcggtctcgttaagccatgcgccgcgcggccactccccacctaccctagcccacggcgcggcgccggcgcgtgcagcggcgccgcacagccgatcctcgcgccccgcggcctctgcctctccgcccgcgccagcctactgccggactcgccgctggaggaggagtaccggagatgcagggccggccggcacgtggccgcggccgggaaggtggcggcggctgatggggccgtagaggaagcggggggagggctcgtcaagacgctgcagctggggtcgctcgtcgggctctggtacctcttcaacatctacgtcagcat

SEQ ID NO: 78143 - DNA, 416 bp, Zea mays
  unsure (1)..(416): unsure at all n locations
acggacgcgtgggcggacgcgtggggcaccttggtgggaaacaaaccaagggtggacgaagaagacgtcaagagcctcagctacctgaagatggtggtgaaagagaacttcaggatccacccaccggggaccttgttgattccacgggagaccatgaggagctgcgtcattggcggctacgacgtgctgccaggcacaaggattttcgtgaacgtttgggcaatgggaagggatgctagcatctgggatcgcccggaggagttcagtcncgagaggttcgagggaagtcatgtcgactttagaggctccagttttgagctcctcccgttcggctcagggcgaaggtcatgcnctgccatcgccatgggtgtcgccaatgtggagcttgtcttggccaacctgttacattgctttga

SEQ ID NO: 78144 - DNA, 423 bp, Zea mays
cccacgcgtccgcgcgcgccaccgagatcatcttcgtcctcgagggcacgctcgaggtcggcttcctcaccaccgccaacaggctcctcagcaagaccgtcgccacgggggacgtcttcgtcttcccccgcggcctcgtccacttccagcagaacagggggcacggccccgccgccgtcgtcgccgccttcaacagccagctccagggcacgcaggccatcgccatgacgctcttcggggccacgccgcccgtgcccaccgacatcctcgccaaggcattccgggtcggcagcggggaggtcgagcacatcaaggcaaacttcgcacccaagtagacgacgaccaggcagcgtgtctgcatttgttggtttctcaataaatatcccgcggcaacgattatattgctcggtcgatgtatcgtgt

SEQ ID NO: 78145 - DNA, 420 bp, Zea mays
acacacaacagcagctcacaaacctaacacacctcaacaagcagagcaaagacccgggattcgccggcgcggtagcgagagcgagagatggacgggaggatgttcggtctcgagacccccctgatggtggcgctgcagcaccttctggacgtgcccgacggcgacgccggcgcgggcggcgacaaggcgagtggtgccgcggcgggcggcgggcccacgcgcacctacgtccgcgacgcgcgcgccatggcggccaccccggccgacgtcaaggagctcccgggcgcgtacgcgttcgtggtggacatgccggggctgggcacgggcgacatcaaggtgcatgtggaggacgagcgggtgctggtgatcagcggcgagcggcgccgggaggagcgcgaggacgccaagtacctgcgcatg

SEQ ID NO: 78146 - DNA, 387 bp, Zea mays
tccgccgcagcagctgagtgcgaagaagagatggccggcaagggcgatggcccggctatcggcatcgatctcggcacgacgtacgcttgcgtcggcgtgtggcagcacgaccgcgtcgagatcattgccaacgaccagggtaaccgcaccacgccctcgtacgtcgccttcagcgactccgagcgcctcatcggagatgcggccaagaaccaggtcgccatgaaccccatcaacaccgtctttgatgccaagcgtctcatcggcaggaggttcagtgatgcgtctgtccagagtgatatcacgttgtggcccttcaaggtcatttctgggcctggtgagaagccaatgattggtgtccagcacaagggtgaggagaagcagtttgca

SEQ ID NO: 78147 - DNA, 418 bp, Zea mays
  unsure (1)..(418): unsure at all n locations
acaccgtcactcaacacagcacaggcagctcgagagagagagagagagaaagatgtcgtggttcgggcaccaccaccacaaccagccggctcccccggcgtcgggccccaaccaggtgttcaagatcttctgccgcgccaacgagaactactgcctggccgtccgcgacggcgccgtcgtgctggccccggtcaaccccaaggacgaccaccagcactggtacaaggacatgcgcttcagcacccgggtcaaggacgaggaaggcatgccggcgttcgcgctcgtcaacaaggccacggggctcgcaatcaagcactccctcggccagtcncacccggtcaagctcgcgcctttcagcccggaccaggaggacgcgtcggtgctgtggacggagagcaaggacttgggcaagggcttc

SEQ ID NO: 78148 - DNA, 416 bp, Zea mays
acatcccccttgcaagtatagtctcggcggctctagaagacgatgggcaaggacgacgtgatcgagagcggcgctggcggcggcgagttcgctgccaaggactacacggaccctcccccggcgccgctgatcgacgcggctgagctggggtcctggtcgctgtaccgcgccgtgatcgccgagttcatcgccacgctgctgttcctgtacatcacggtggccaccgtgatcgggtacaagcaccagacggacgcgtcggcgtcgggtgccgacgcggcgtgcggcggcgtgggggtgctgggcatcgcctgagccttcggcggcatgatcttcgtcctcgtctactgcaccgccggcatctcggggggccatatcaaccccgccgtcaccttcgggctcttcctggcgcgcaaggt

SEQ ID NO: 78149 - DNA, 384 bp, Zea mays
acattctactcgccgcatcttctagaatcatccagaggcgtacctgtgaagcgctagatcggtgacgcatggcaatgcagaccggggtcgcgacctctaacgtcctcatcctcgtcggtgcagggatgacgggctcgatactgctgcagaatggccgcatagctgatgtcttgggagaactccagcgtgtaaatcaaggaacttcttcgggtccctatgacattgcacttattcaagctcagattctgaatttatcgcaagaagtcagatatttgacattgtcaaagcccattactatactgaatggtaaatctgactcgggacgcactttatcatcctacatactgccatcagcagcacttggagcaatgggttattgctaca

SEQ ID NO: 78150 - DNA, 418 bp, Zea mays
  unsure (1)..(418): unsure at all n locations
atcaaagcaagccatgtggaggagggctttagcgatggtcctgttcatggctggcgccgcgctgctcgccggggctgccggcgccggcgcgcatcagggcgtgtggagcatcatcacccggcccatgttccagagcatgctgagccaccgcggcgacagcgggtgccagagcgccttctacacctacgacgccttcatcgaggccgccagcaagttccccggcttcggcaccaccggcgacgagcagacgcgcaggcgggagctcgccgccttcttcggccagacgtcccacgaaaccaccggtggatgggcgactgctccggatggaccgtttgcctgnggatactgccgggtgaaggaacagaaacagacggacccaccctactatggacgaaggaccatacagctaactcataag

SEQ ID NO: 78151 - DNA, 395 bp, Zea mays
gtccgatacaccaaccgagctcagcttagctccactccagctccaatcacagtcgtgaccagagcgcgagagctagctagagggccgtgaaaatgccgatcaataggatcgccctgcggagccaccaggaggtgtaccacccgggcgccctcaaggcggcgttcgctgagttcatctccaccctcatcttcgtcttcgccggccagggctccggcatggccttcagcaagctgaccggcggcggcccgacgaccccggcgggcctgatcgcggcggcggtggcgcacgcgttcgcgctgttcgtggcggtgtctgtgggcgcgaacatctccggcgggcacgtgaaccctgccgtgaccttcggcgccttcgtgggcggcaacatcaccctgttc

SEQ ID NO: 78152 - DNA, 342 bp, Zea mays
agagaaatatgctgtggatgagaaggctttctttgatgactacaaagaggcccacctcaagctctccgaactggggtttgctgatgcttaaatagaccctatcttggagtgatacattctgctgcctgtatggaatcatgtggtcttttgcatctggagtcaatgtgaacaagcagattgtcgtattgtctttctcgtaataaatttgtcgatgttgagcccttaggctgttgttggtacattggtacttcgtcgatgcttgaattgggacccttagtccgttttcccagactctgatgctgtatgcaactgaaacaagtaaatctatgatcttaaggctgc

SEQ ID NO: 78153 - DNA, 394 bp, Zea mays
accacgcgtccgcggacgcgtggggggaagatcccgattgatgtgaacaggatggggattgggctcatgtccttgtccggccacaagatttatggccccaagggcgtgggggccctctaccttcgtcgccgccctcgcatcagggtggaaccacagatgaatggtggtgggcaggagcgtggcatccgcagtgggactgttcctacacctcttgttgttggatttggggctgcctgtgagattgccgctcaagagatggattatgaccacaggcgtgtcagtgctctgcagcagaggctgcttgatggcatacgtgcgcaggtcgatgatgttgtcatcaatggaagtatggagcaccgttacccaggcaatctaaatttgtcatttgcttatg

SEQ ID NO: 78154 - DNA, 405 bp, Zea mays
accgcatcctctcatcagcttccttccacattcgtctcgagatctcgccccgtcgccatggacgcgatcgacagcgtggtggatcccctccgcgacttcgccaaggacagcgtccgcctcgtcaagcgctgccacaagcccgaccgcaaggagttcaccaaggtggcggcgcggacggcgatcgggttcgtcgtcatgggcttcgtcggcttcttcgttaagctcatcttcatccccatcaacaacatcatcgtcggttccggctaagcttacacgagtacatggcgactagcatgggagtagtgcaatacttttgggagcaatagataacgaggatcctggtctttcgaatagtattgttaatgaaatttttcgttcggttgtgtttctgaagtaatcgttgta

SEQ ID NO: 78155 - DNA, 409 bp, Zea mays
acagcaaggcaccacacctcttcttcttcttcctcctcctcctagcacagctagcgcctgctccccttcgcctgtgatcatgtcttgcagcagcggcaagtgcgactgtggctccagctgctcctgcggcagctcatgcaactgcatgtcccctaacgtggagaccgccgccgccagcagcatcaagaccacggtcctcgccgcgccgaccaccaaggccagcgccggcggcttcgaggcggccaccgagggcggcggctgcgactgcaacacctgcaactgcggcaccagctgcggctgctcctgctgcagctgcaactgagccggtcaggcgatggcgcacgagagtcgagaggacgacgacgagtcgtataaatataatagcggcgtctaaataagatcctgtcaa

SEQ ID NO: 78156 - DNA, 392 bp, Zea mays
acggacgcgtgggctttactgatatcagcatagaaaaagcagttgagtatgatgaatactgtcatagccaccagccgccaattgctttcattaagtccgaagtttgtggcctttttggcagtgttttctgtgactttggtcctgagttcactgttttggatgtcgatggcgaggaaccacatacaggaattgtggcatcaatcagcaacgacaatccagcacttgtttcttgtgtggatgatgaacgtctggagttccaggatggtgatctagttgttttctccgaagtgcatggaatgaccgaactcaatgatggaaaaccaagaaagattaagaatgcaaggccttattcttttactctagaagaagacaccacctcatatggcacttac

SEQ ID NO: 78157 - DNA, 375 bp, Zea mays
actcgcctcgggtcaaaccctaagcagggagttgatttatccgctgcagccatgagtaagttgcagtctgagtctgtcaaggatgccatctcccagattgttggggatgccaaggagaagaataggaagttcactgagactgtggaacttcagattggtctgaagaattatgatccacagaaggacaagcgtttcagtggctctgttaagttgccccatatccctcgtcccaagatgaaggtgtgcatgcttggtgatgcccagcatgttgaggaggccgagaagatgggacttgactacatggatgttgaggctctcaagaaaatgaacaagaacaagaagcttgttaagacgctttgcaagaagtaccatgct

SEQ ID NO: 78158 - DNA, 292 bp, Zea mays
aaaccgaagcagggagttgatttatccgctgcagccatgagtaagttgcagtccgactctgtcaaggatgctatctcccatattgttggggatgccattgagaagatgatgaagttcactgagactgtggaacttcagattggtctgaacaattatgatccacagaaggacaagcgtgtcactggctctgttaagttgccccatatccctcgtcccagtatgaatgtgtgcatgcttggtgatgcccatcatgtttaggatgccgacaagatgggacttgactacatggatg

SEQ ID NO: 78159 - DNA, 433 bp, Zea mays
ggtctggggtcgacgacgcgtccggccagcagatacgaatccgacgagctcgatcgctccacttccccgatcgcacgccaatcagcaccagccaccgtggcgatgacggaggaggcggaggcgaaggcgaagggcaacgcggcgttcgcggccggccgtttcgaggaggctgtccagcacttcagcgacgccatcgcgctcgcgcccgacaaccacgtcctctactccaaccgctcggcggcgtacgcgtcgctctggcgctacgcggaggcgctagatgacgccaagcggaccgtggcgctgaagccggactgggccaagggctactcccgcctcggcgccgcgcaccttggcctcggtgacgcgcccaaggccgtcgaggcctacgagaaagggcttgcgctcgagccgtccaatgaggcgctcaaatccg

SEQ ID NO: 78160 - DNA, 401 bp, Zea mays
ctcgcatttcctcccaatcaatcccgcctcaaaacccgaactccaagtcgccccgcatcgatggcgcccaaggccgatgaagaagcccgcggcgaagaagccggcggaggaggagcccgctgccgagaaggcgccggccgggaagaagcccaaggcggagaagcgtgtcccagcaggcaagtccgccggcaaggagggcggcgagggaaagaggggccggaagaagggcaagaagagcgtggagacctacaagatctacatcttcaaggtgctgaagcaggtgcacccggacatcggcatctcctctaaggccatgtccatcatgaactccttcatcaacgacatcttcgagaagctcgccgccgaggccgccaagctcgcgcggtacaacaagaagccca

SEQ ID NO: 78161 - DNA, 408 bp, Zea mays
taagcaagtgccaaccaacgagtagcaggaaacatgtctccgcccgtcaagatcctcggccactacgcgagcccgtactcgcaccgcgtcgaggccgctctgcggctcaagggcgtgccgtacgagctggtccaggaagacctgggcaacaagagcgagctgctgctcgccaagaaccctgtccacaagaaggtgcccgtgctcctccatggcgacagggccgtctgcgagtccctcctcatcgtcgagtacgtcgacgaggccttcgacgggccgtccatcctgccggccgacccccacgaccgtgccgtcgcccgtttctgggcgaacttcttggacaccaagttctcccagccgttctggctggcgtactgggcggagggcgaggcgcagaaggccgtggtgaag

SEQ ID NO: 78162 - DNA, 396 bp, Zea mays
  unsure (1)..(396): unsure at all n locations
acttcagcaaaattctctctttatgtgtttcctacttcacttctgtgtacgtaatgaagtggaaagacttctttcctaacaaagagctgaaggagccaccatattttgatgctcgagctgtatgttacccgaatttgaagactattcgtgattatttggcttggagacaagtggactgtaagctactggaattgattcaaattatcttgtatagcaaacgccacctcatatttgttcacacaacttttttgtttgccctgaagtcctacaaggaaactgcattatatacaccaaagttgtacaaagcatgaacctttgtgaacataaaaagaaaagtgatctatgtacgtgtcagaatcanncagtaattttgttagttcactgatatgcatattc

SEQ ID NO: 78163 - DNA, 405 bp, Zea mays
acttcagcaaaattctctctttatgtgtttcctagttcacttctgtgtacgtaatgaagtggaaagacttctttcctaacaaagagctgaaggagccaccatattttgatgctcgagctgtatgttacccgaatttgaagactattcgtgattatttggcttggagacaagtggactgtaagctactggaattgattcaaattatcttgtatagcaaacgccacctcatatttgttcacacaacttttttgtttgccctgaagtcctacaaggaaactgcattagatacaccagagttgtacaacgcatgaacctttgtgaacataacaagaaaagtgatctatgtacgtgtcagaatcaaacagtaattttgttagttcactgatatgcatattcgttgtttgt

SEQ ID NO: 78164 - DNA, 409 bp, Zea mays
accacgagtccgctgactcgtgggcggacgcgtgggtccgtgtgcgcccctcggttcaccacccgccgccgccgagacctcctcctcgccggctactcctgactccataaaggcaacgctcggaggtggccctctgtcgggtggcgtggtggacacatccgcgcccatggccaacctcggcgctgcggccggcaagctcaccgtcgccgagacattctccaacctcagggagcaacgcaagagtgcattcatcccgttcatcactgctggtgatcctgacctggcaaccacatcaaaagcattgaagattctcaattcctgcggttcggatgttatagaggttggcgtaccatactcggatccactggctgatggaccagttattcatgcttctgcaacacgggcgctt

SEQ ID NO: 78165 - DNA, 399 bp, Zea mays
acaggctacagctcccgtctctccgccgcttgcttggaaaacgaagaaaccctcctccaccaacccaatccagctacatccgtctgggtgaactccagggccaggagcagttcgccgccttcgttcgcatcacctacgcggttcgatccaactggcaggaaggaacgtgatggccaagacgagctcgttcaagctggagcacccccttgagaagaggcagtctgaggctaatcggatcagagagaagtaccctgacagaattccagtgattgttgagaaggctgagaggagtgacattcctgacatcgacaagaaaaagtacctcgtccctgctgatcttacggttggacaattcgtgtatgttgttaggaagagaatcaagctcagtgctgagaaagc

SEQ ID NO: 78166 - DNA, 390 bp, Zea mays
agagaggtttctgatacaaccgagagtacatgatgcagtgcttggccgtcggaaggctgaaaaggcaatggcttggcgggcagtttttacatcggctgggtttgctccagtgccactcagcaaccttgcagaggcacaagctgactgcctcttgaagcgggtgcaggtccgaggattccatgtggagaactgtggaatgggtctagcactctactggcatcggggcgagctcgtgtcagtcacggcgtggctgtgctgatcatagcaaccgcagccgtcgaccatcgtcgtcgtcgcgccgacactattcgcaggcatgttcaactccggtaagatgcgtctgatcgtgcaaacattgcagtgatactattgtcatggttgttccatgcc

SEQ ID NO: 78167 - DNA, 414 bp, Zea mays
agctgggcacgttctggctctagacttcattgaaagtgtgattaagaagaaccaaagcataaatgggcatcacaagaacataaccttcaggtgtgctgatgtgacatctaacgacttgaagattgaagataactctgttgatctgatattttcaaactggctattaatgtacctttcagatgaggaggtccaaaagcttgtggggaaaatggtaaaatggctaaaggtcggaggccatattttctttagagaatcatgttttcaccaatctggagattccaaaaggaaggtgaacccaacacactatcgagaaccaaggttttataccaaggtatttaaagagggccattcatttgatcaagatggaggttcgtttgaactttctctagtgacctgtaaatgtattggggctta

SEQ ID NO: 78168 - DNA, 223 bp, Zea mays
agtcaaaggcgcaaaagccctgtacaagttcggaaggctgcagcgcgggcgatacagccccaatggatctgaccaggcaatcttctacaattccaccagctactgggacgagtttgtgtggggtggtgcgtggatgtactttgccacagggaacaattcatacctcacggttgccactgccccaggaatggcaaagcatgctggagcctactggtttggaagt

SEQ ID NO: 78169 - DNA, 379 bp, Zea mays
aaaaccatctgcttcagccttcagctagccccaagtttagtcggccgatcgatcactgaagtagtaatggcctccgccaacagctggaccctcgagatcgcgtcgccggtggccccgcagcgcctgttccgcgccgccgtgatggactggcacaccctggcgcccaaggtcgcctcccacgtcgtcgccagcgcgcagcccgtggagggcgacggcggcgttggcagcgtcaggcagttcaacttcacctcagtcatgccgttcagcttcatgaaggagcgtctcgagttcctcgacgcggacaagtgcgagtgcaagaacacgctcatcgagggaggcggcatcggcgtcgccatcgaaacggcgacgtcgcacatca

SEQ ID NO: 78170 - DNA, 396 bp, Zea mays
accaaggctgctgatgttggtgctgaccttgtggggaaggtagaaagaaacattcctgaggacgatccaagaaacccagctgttattgctgacaatgttggtgataatgttggagatattgctggaatgggatcagatctctttggctcatatgctgaatcatcatgtgctgctcttgttgtggcctctatctcgtcttttggaatcaaccatgaatttactccgatggtgtaccctcttctcgtcagttctgttggtattatagcatgtctcataacaacgctgtttgcaactgatttcttcgagataaaggctgtggatgaaatagagcctgctctcaagaaacagctcataatttccacaattgtgatgaccattggcattgcactaatcagt

SEQ ID NO: 78171 - DNA, 345 bp, Zea mays
agttacaaccttatttcacttggatcggccaatgtatttactaggatatcttgcaaaccaaagccgtgtctatcttattgataagcaatttaatgttgtggggtatactttactccttagtttgatcgagtataaaacacttgtaatgcgtggggattttgatcgtgcaaatgatgttttagcatctacaccaaaggaacaatatgacagtgtggcacgtttcttggaatcacgtggaatgttggacgaagccctcgagattacaactgacactaattacagatttgacctggctgtgcagcttggtcgacttgaaatagcgaaggtgattgctactgacgtgca

SEQ ID NO: 78172 - DNA, 413 bp, Zea mays
cggacgcgtggggccgccgccaatcccttcccgtgctccgcaaccgctgagtgagaagaagagatggccggcaagggcgatggcccggctatcggcatcgatctcggcacgacgtactcttgcgtcggcgtgtggcagcacgaccgcgtcgagatcattgccaacgaccagggtaaccgcaccacgccctcgtacgtcgccttcaccgactccgagcgcctcatcggagatgcggccaagaaccaggtcgccatgaaccccatcaacaccgtctttgatgccaagcgtctcatcggcaggaggttcagtgatgcgtctgtccagagtgatatcaagttgtggcccttcaaggtcatttctgggcctggtgagaagccaatgattgttgtccagcacaagggtgaggagaagca

SEQ ID NO: 78173 - DNA, 398 bp, Zea mays
  unsure (1)..(398): unsure at all n locations
ggccgcgctgcagcctgcctgtcaatctcgatcgatcaaggggtggcttgccgaaatggcggaccggccgtcgcttcctgctctcattattgctatcgccgttcttgctggcagttactgccgcgtggcgagctcggcctcgccggcggtggaagatgagctgcgcggtggaggaggagccggcggtccgacgacgatgccgcggcgcgccgcgtccgtgatggtgcccatcnacatcctcaagtccgctgttagcgacggagctgtgtgcatggatggaacgccacctgcttaccacttggatcctggctccggagcgggcagcagaagctggattgtgaacttagagggaggtgcgtggtgcaacagcgccaagacatgccggctcaccaggagct

SEQ ID NO: 78174 - DNA, 390 bp, Zea mays
  unsure (1)..(390): unsure at all n locations
tttgcaccttccaaaccttgaaaccaccccggtatttctttcttggccaatggccctgaggaggatcaccaaggacctcaaggacctgcaaagggatccacccacgtcctgcagcgcagggcctgtgtccgacgacatgttccactggcaagcgacgatcatggggcccagcgacagcccctactcagggggcgtgttcctggtcgccatccacttccctccggactacccgttcaagcctcccaaagtggcgttcaagacgaangtgttccaccccaacatcaacagcaacggcagcatctgcctggacatcctcaaggagcagtggagccccgcgctgacngtctccaangtgctgctctccgtctgctccctgctcaccgaccccaa

SEQ ID NO: 78175 - DNA, 401 bp, Zea mays
cccacgcgtccgcgccccgccgccgcttcgacggcgcgccgaccggctaggacgcgcctccgacccggatagtgttccgctcggtcgaatccgacggccgctcgctgctgcagcgggcgcttgctgtgcgtcgcgtgggctcggctggaggcaggcggaacctttcctgggtctcggagatggcggcgcctccggcgaaggcccgggccgactacgacttcctcatcaagctgctcctcatcggagatagcggtgttgggaaaagttgtctccttttacggttctcagatggctccttcactactagcttcatcaccaccattgggattgacttcaaaataagaacagttgagcttgatggtaagcgcataaagttacagatatgggatactgctggtcaa

SEQ ID NO: 78176 - DNA, 435 bp, Zea mays
ctcgtaggccgatacaagactctagactaagtcgtattaagaggaaaacgagtgagaggggggaaatgctgcgccacgccgcccgccgtctcgtctcccgcaccgccgcggcgcccaccgcccgccgggcgctcgtcacggcagatgtgcctgcggaggccgccgaggactccacgtttgtggaggcgtggaagaatgtcgcccccaacatcgagcccccaacgacgcccctcttcctcatgcatccgcgcccgcccacgccggctaccatccccactaagctcaccgtcaacttcgtcctcccctacaagtccgagatcgccaacaaggaggtggacatggtaattgtaccagctacaactggtcagatgggcgttttgccaggccatgttgccacgattgcagagctcaagcctggtgttctctcagtacatg

SEQ ID NO: 78177 - DNA, 413 bp, Zea mays
  unsure (1)..(413): unsure at all n locations
agaacaatccttctgctgtttgtctactaattctatctcacattgttgatacaaatgggtatcttagcctcattaattttcttctctctgtctttctttatatgctatcgatttgtggcttccgctaagatgcttttcttgtttggataataaaatgttgcctaggattttaatatgtgagttgtcaagttttacagttagtccagttcccgctactgacatgcttgtttcctcgccagggcttgctatggtgttcttcgttatgttatggagagtggtgccaagggttgtgangtgattgtgagtggaaagctcagggcccaaagagccaagtccatgaagttcaaggatggctacatgatctcatctggtcagccagtgaacgagtacattgactcggctgtgagacacgt

SEQ ID NO: 78178 - DNA, 414 bp, Zea mays
acagacatgatcattggtgatgacactgtgtactactatcatgacatgatagtggaaatgattaaatggggatatcaagaaggaaaaactctctttggatttggttatgatttccgtcaaagcaacaggctctcagagacacttgacagattttctaaaaagctggagtcagtgtacacagcttctggtggaaagaagatcaatctcattactcattcaatggggggattacttgtgaaatgtttcatctcactgcacagtgatatatttgaaaaatatgtcaagagttggatcgcaattgctgcaccattccaaggtgcccctgggtacataactaccagtctgctgaatggaatgtcttttgtcgaaggatgggaatcaagattctttatttccaaatggtgtatgcagcaa

SEQ ID NO: 78179 - DNA, 401 bp, Zea mays
acagcaagctaagcatatgccaaccaacgagtagcaggaaacatgtctccgcccgtcaagatcctcggccactacgcgagcccgtactcgcaccgcgtcgaggccgctctgcggctcaagggcgtgccgtacgagctggtccaggaatacctgcgcaacaagagcgagctgctgctcgccaagaaccctgtccacaagaaggggcccgtgcccctccaaggggacaaggccgttctgccagtccctcctcatcctccagtacgtccacgaggccttcgacgggccgtccatcctgccggccgacccccacgaccgtgccgtcgcccgtttctgggcgaacttcttggacaccaagttctcccagccgttctggctggcgtactgggcggagggcgaagcgc

SEQ ID NO: 78180 - DNA, 419 bp, Zea mays
acccacacatccggcgccggcgaaggcggcgaccccgaggtccaggagcttcctccgccggagccgacgaggtttgccttcgccaccgcggccaaggcagcagttgatggcgtgatgacgacgactccaaaggatgtcaaaggagatagaccagtaaagcgcggccggaagaaccagtacaggggaatccggcagcgcccttggggcaaatgggcagctgagatcagggaccctaacaagggcgtccgcgtctggctcggaacctacaacaccgccgaggaggcagctagggcatacgacgccgaagctcgcaagatccgcggcaagaaagcgaaggtgaatttccccgatgacgacgcgccaggcactggtcacaggccagcgaacgcagcgcctaagctagtagctccacccccacc

SEQ ID NO: 78181 - DNA, 439 bp, Zea mays
attcaggggcttgaggatgttgcatctcaagattcactcagtgtttcagttgcaattcttcatcagttcaacattttacctgagaagtatcaagttggctacacaaagttgttcttccgaactggtcagattggcaaccttgaagatactcggaatcgtactctgcatggtattttaagggttcaaagctgtttcagggggcatcaagcccgtcatcatgcaagagaacgaacaagaggagttttgactcttcaatcattcattcgtggtgagaatgcacggcaaatttactcctctttgttgaggaaacatagagccgcagttgttttgcagagaaatgtgagatgttggcttgcaagaaggtatttcataaatgtccggaaggcctcagtgataatacagtctggtattcgtggcagtcttgttcgaagatgtaatg

SEQ ID NO: 78182 - DNA, 410 bp, Zea mays
  unsure (1)..(410): unsure at all n locations
aggcaatcaccatgggagatcaatctggctctagaaatggaccacaacagaagtacgtttcaggagcccagaatgcctgggatatgttctctgatgagctgtcacagaaacacatcactactggttctggtgacctcaatgacatacttggtggcgggattcactgcaaagaagttactgagatcggtggcgtcccaggggttggtaaaactcaactggggattcaactagcaatcaatgtacaaatcccagtggaatgtggtggccttggtgggaaagcagtttatatagattgctgaagggtgtattanggacatactggagcactttccgcacagccatgagaagtcctcttctgtccaaaaacaattacagcctgagcgtttcctggcggatatctattacttccg

SEQ ID NO: 78183 - DNA, 404 bp, Zea mays
attcagtttcggcataagggcatcccttatctgaacacgtatgacggccgcaccatccgctacgctgaccccctcatcaaggccaacgacaccatcaagatcgatctggagaccaccaagattgtggacttcatcacgtttgatgttggcaacgtcgtcatggtgactggcggaaggaacactggccgcgtgggtgttatcaagaacagggagaagcacaaaggcagctttgagaccattcacgtggaggactccctgggccaccagttcgccacccgtatgggcaacgtgttcaccatcggcaagggtaataagccgtgggtgagcctgcccaagggcaagggaatcatgctgagcatcatagaagagcatacgaagcgggatgccgctgcccaggctgctgc

SEQ ID NO: 78184 - DNA, 422 bp, Zea mays
  unsure (1)..(422): unsure at all n locations
ggtcgacgacgcgtccacggacgagtggggtcccctttcctccactggaatttaaccctcctggtgctccgtccaactcccccgctccgggccgccggcggcggcccaagccacgttctgaaggtttcgttggtctcttcgcccgcgacgagcacccagcagttctgtaaaaatggctgatggtgaggacatccagcctcttgtctgcgacaatggcactggaatggtcaaggctggttttgctggcgatgatgcaccaagggcggttttccctagcattgttggccgtcctcgccacactggtgtcatggtanggatgggacagaaggacgcatatgttggcgatgaggcacagtccaagagaggtattcttacgctcaagtacccgattgagcacggtattgtgagcaactgggatgaca

SEQ ID NO: 78185 - DNA, 413 bp, Zea mays
gaaaaagagcaaccatgtcacgaggaagcttgagaagcgcaaggagggacgtacccttgacccacacattgaggagcaatttggcagtggacggttgctggcatgcatttcttcccgccctggacagtgtggccgtgctgatgggtacatccttgagggtaaagagcttgagttctacatgaagaagctacagaggaagaagggcaagagcgctgtagcttagagcattctcatggattgtcttgcaccgaaatgtgtgtcctgatgagtacactttttttggttagtcgtctcaagttcagagcgttatgccatgttttcagacctgattagtacactcttttctaaaagcgattgagctctagtccaatgtattgataatatctgctgttgtcctattgcggtgatgttta

SEQ ID NO: 78186 - DNA, 323 bp, Zea mays
agccacccacccacccacccactcgcttcagccgcctccgccgcgcgtacaagcaggtggagacaggatgccggctggccacggcctgcgctcgcggacgcgcgacctcttcgcgcgccccttccgcaagaagggctacatcccgctcaccacctacctccgcacctacaagatcggcgattacgtcgatgtcaaggtgaacggcgccgtccacaaggggatgccgcacaagttctaccacggccgcaccggtcgcgtctggaacgtcaccaagcgcgccatcggcgtcgacgtcaacaagcaggtcaatgggcgcatcatca

SEQ ID NO: 78187 - DNA, 409 bp, Zea mays
cggacgagtgggcggacgcgtgggcgagtacgggagaacgcatgtggtgaggcccaagggcacgcacaaggccaccattgtctggctccatggacttggggacaatggagccagctggtctcaactactggaaactcttccccttcctaatataaaatggatatgccccactgcaccttcaagacccgtgtcagtgtttggcgggttcccctccacagcatggtttgatgttgctgatctttctgaggatgctcctgatgacattgagggaatcgatgcctcagcagcacatgttgcgaatttgttgtcaactgaacctgctgacatcaaacttggtgttggcggctttagtatgggtgctgctactgctctgtactctgcaacttgctttgcccatggaaaatatggg

SEQ ID NO: 78188 - DNA, 407 bp, Zea mays
  unsure (1)..(407): unsure at all n locations
cgctcatcaatcgccagaggagttgttgatcgaggtgagtgaggttgaaaagcacaccatcgtcatggacggcggatactacggcggtcgcgatcagcgctacagcggcgggtactacggcggcggtggcatcgcaacgccggggtacgctccggcggtcccgtacgggatgtcgcaggtgaacatcgagggcaacgggtgcgggcgggcgctgccgccgcagccgaccgtgaaggtgtactgccgcgccaaccccaactacgccatgagcgtccgcgacgggaaaggtgtgcctgcccccgggaaccccaaaggccaattacagcactggatcaaggacatgcggtggagcacgagcatcaaggacgangaaggttacccggcgttcgcgctggtgaacaaggcga

SEQ ID NO: 78189 - DNA, 419 bp, Zea mays
  unsure (1)..(419): unsure at all n locations
cacgcgtccactcacctccattccaagcacatattcccggcccggcagctcaccaactaccttgcacttcaattcatcttatcgcggcacgcacagatatatatagattagtacctagctagatgctcatttagctgcagaggcgccatgattggggtgcgcattgtcagttataagtctctgatcatggtgctactgctggtgctcctcgtctgcgttgtctcgccggcgacggccgcggccggccgggcggaggaggcgcacctggtgcccgcgttgtacgtgttcggcgactccaccgtggacgtgggcaacaaccagtacctgccggggaactccgcgccgcagctcccctacggcatcgatttcncgcactctcgggccaccgggcgcttcagcaacggctacaacgtcgccga

SEQ ID NO: 78190 - DNA, 412 bp, Zea mays
ggatgacatgctgatgtttgactataatgttgaagaatgagttaatgatttttgttgctgcagccatagaacaggtaaactttcaatattgttgccacagactgtagttcactagagcaattaactatgcttcgttcaaagtaagaaaattggatttaattaacttgtgatgatcaggcaaactttacgcgtacaaaccacataatttggaccatgggagataattttagttacaatatatagaatcttggttccggaatatggacaaacttatctatcgcgtgaacaaggtattgctgattttaaactgaagctctcaagttttgatacacagttttcttgtttagctgtcattttaatttacctttctgcaatgatactactacatacaaaatcttttttctatgagatg

SEQ ID NO: 78191 - DNA, 346 bp, Zea mays
cccacgcgtccgcccacgcgtccggaagcctaccattacgtcccgcgagatccagacctccgtccgcctcgtcctccccggcgagctcgccaagcacgccgtctccgagggcaccaaagccgtcaccaagttcactagctcctaggcgagcgatgcgacgtgcactcgtctcctcttcttgcagtagtgcaatagtagtacggttaggtgtgttgccgtggtggtagttgccgctgtgtttgctttctgggctgggctcggttgatgtgttttatgtaagaaagtaactgtattgtgtctgcagtaccttaccatgcatgttttaagtagcacaatagacaagaaa

SEQ ID NO: 78192 - DNA, 364 bp, Zea mays
cccacgcgtccgcccacgcgtccgcccacgcgtccggcgagagagaacccaaacggagagagacaatcgagagagatggcaaactgttttggtgacgtcgtggacaattacaagctagacacaatgccaagatatatcggcaaaaagaagactcgagaagaccgggcaacgagaggcctcctatctcagtaatgagaatgagaagtacaagaaagctaaagactatgtgaacatgctgaaggactggtacggcaatggagcgtcgacgctgtgcgtgatctacaaccagacgggcggaaccctgcggtacgtcgacgacaaggactggctgggctacccggggccgacgccctacccgacggag

SEQ ID NO: 78193 - DNA, 321 bp, Zea mays
gttctagatcgcgagcggccgcccttttttttttttttttaagaatatgaacggtcattttttttcaggcataaatataaatccgttctcttgccatggtatttagcacgcacaagcaacgcttgaataagtcttgcaaattcaacacaggttctacgaaagtggctttggctaaggaacgactgcaatgtcgagaaacgacactaagttctttcagcgcttctcaacaccgccgcccaacttggggcccttggaacccttctggaccgcaccctttgtctgcgtcttctgggacttgctcaactccgccttcttcgcttt

SEQ ID NO: 78194 - DNA, 377 bp, Zea mays
acgccgcctctgatctccgcgaggttgtcaggattcaatatgtcgaccagcacattcgctacttcctgcacgctgttgggcaatgttagaacaacgcaggcctcccagacagcggtgaagagcccttcgtctctaagcttcttcagccaagttacgaaggttccaagcctgaagacctccaagaaactggatgtctccgccatggctgtatacaaggtgaagcttgtcgggcctgaaggtgaagagcacgagtttgatgctccagacgacgcctacatccttgacgcagccgagactgccggtgtggagttgccatactcgtgccgtgctggggcttgctccacctgtgccggcaaaatcgagtctggttcggttga

SEQ ID NO: 78195 - DNA, 285 bp, Zea mays
gcggcgcgccgcacaacaacaccatcaagctcgggaacgccgtcatattcgggccggatgatacgccgtgggacggtggcacgtgcaagcttaccttgcagtttacagaagattatccacacaagccaccaactgttcgatttgtctctacgctgtttcatccaggtatatatgctgatggactcatctgtttggatatcctacagaaccaatggagtcccatatatgaagttgctgcagatttaacttctatccagtctctgctgtgtgattcatacccaaact

SEQ ID NO: 78196 - DNA, 324 bp, Zea mays
agctggcttctccacaccctcttatcaagtcctcctcgggttatggttccttagggttttgtggacgggcgatggctgcggctgatgtggagtaccgttgcttcgtcggcggacttgcctgggccaccagcaacgagtcgctggagaatgccttcgcctcctacggcgagatcctcgactccaacgtcatcaccgaccgggagacggggaagtcccgcggcttcggcttcgttaccttctcctccgagaactccatgctcgacgctatctagaacatgaacggcaacgagctcgacggccgtaacatcaccgttgaccaggccc

SEQ ID NO: 78197 - DNA, 385 bp, Zea mays
agactgtaagtacctgggaacaagaatcagagcagatggaacaattggagactacaaatggatgacatatggagaagctagcacgagcaggactgcagtaggttctggccttatatatcatggagttcgtgaaggtgcatgcattggtctgtattttgtaaacagacctgagtggattatagttgaccatgcttgttctgcatattcatatgtatctgtgccactttatgacacacttggcccagatgctgttcaattcattgtgaaccatgcagcggtggaagttatattctgtgtgcctcaaactctaagcactctgttaagttttatagctcaaatgccatgtgttcggcttatagtggtagttggtggagatgattcaaat

SEQ ID NO: 78198 - DNA, 311 bp, Zea mays
acagcgatccgaagctcaatcaattcactcaaacctcttccccaaatcttcgattagattctcgttgacaagaagactagaaccgaacctgaccatgtcgctgatccgccgcagcaacgtgttcgatcccttctccctcgacctctgggacccctttgagggcttccccttcggctccggcagcagcagcagtctcttcccctcgttcccgcggaccagctcggagaccgcggccttcgctggcgcccggatcgactggaaggagactccagaggcgcacgtgttcaaggcagacgtaccggggctgaaga

SEQ ID NO: 78199 - DNA, 378 bp, Zea mays
acagagatccgaagctcaatcaattcactcaaacctcttccccaaatcttcgattacattctcgttgacaagaagactagaaccgaacctgaccatgtcgctgatccgccgcagcaacgtgttcgatcccttctccctcgacctctgggacccctttgagggcttccccttcggctccggcagcaggagcagtctcttcacctcgatcccgcggaccagctcggagaccgcggccttcgctggcgcgcggatcaactggaaggagactccagaggcgcacgtgttcaaggcagacgtaccggggctgaagaaggaggaggtcaaggtggaggtcgaggacggcaacgtccttcacatcagcggcgagcgcaacaagga

SEQ ID NO: 78200 - DNA, 415 bp, Zea mays
  unsure (1)..(415): unsure at all n locations
gaaggccacagagcgaaggaattgcagagttttcttggcgcgaaagaaggggagagagagagagaaagacgaagatgtttatccagaaggcatggaggacggcggcgtttgggctctacggcttcaaccatttcacaaaatctggtttcctggagcatgcgaagaaattcagagaggaggatatgcagatccggttggatggaaaaaattgcctagtaactggagcgaattctggcattggttttgctacggctgagggcttggcttcacatggtgctaccgtctatatggtctgtcgtaacaaggagagatgggaggcagctctcaaccaaataagatccaaaactggcaatgcacacgttcatctggagatatgtgacctttcatctatcantcaagtaaaatcgtttgcaac

SEQ ID NO: 78201 - DNA, 417 bp, Zea mays
gctcacactccggcagccgagcgatcgagctccccggtcgctagcacagccggccactgcacacgacggtgctggtaggttgcaagcacttgcaggatggcgcaggtcgctaagacgcttctccttgtggccctggtggtcgtgtcggcggtggagctgtgccgcgccatcgagttcgacgagcgggacctggcatcggacgaggcgctgtgggacctgtacgagcggtggcagacgcaccaccgggtgcaccggcaccacggcgagaagggccgccggttcgggaccttcaaggagaacgcgcgcttcatccacgcgcacaacaagcgcggcgaccgaccctaccgcctccgcctgaaccgcttcggcgacatgggccgtgaggaattccgttccgggttcgccgactcgcgcatc

SEQ ID NO: 78202 - DNA, 385 bp, Zea mays
aaaaaagacacgcaaggaaaatggctccgaccgccgccaaggacagtggctccgccgatcgctggcgcgaggtgcatgcgttcgaggacagcaagctgggtgtgaagggcctggtcgactccggcgtcaagtccatcccggccatgttccaccacccgccggagtccctcaaggatgtcatttctccaccagctctgccctcctccgacgatgcgccggccatcccactggtggacctgtccgtggcgcggcgcgaggatctggtggcccaggtgaagcacgcggccgggacggtgggcttcttctgggtggtgaaccacggcgtgccggacgagctgatggccagcatgctcagcggggtgcgccagttcaacgagggctctct

SEQ ID NO: 78203 - DNA, 387 bp, Zea mays
  unsure (1)..(387): unsure at all n locations
acactcaacagcaacagctaagcctctcccacaagacagcaacatggctgaggaggaggccaagaaggtggaggtggaggtcaccaaggagcccgaggcggcggcgaaggaggacgtagccgatgacaaggccgtcatccccgcgaccgacccgccgccgccgccgccgccggccgacgactccaaggccctggccatcgtcgagaaagttgcagatgaacctgctcccgagaagcctgcccctgcgaagcaagggggctccaatgacagggatctcgctcttgcaagggtggaaacagagaagaggaactctttgatcaaagcttgggaagagaatgagaagacaaaagctgagaacaaggctgctaaganagtatccgctattct

SEQ ID NO: 78204 - DNA, 393 bp, Zea mays
  unsure (1)..(393): unsure at all n locations
cggataggtagcaccggagcaggtanaacgctgcacaatccccttcgccgccgccaagatggtgaacgttcctaagaccaagaagacgtactgcaagaacaaagagtgcaagaagcacacactccacaaggtgactcagtataagaagggcaaggatagcctgtctgcccagggaaagcgccgttatgaccgcaagcagtcaggatatggtggtcagaccaagcctgtcttccacaagaaggccaagaccaccaagaagattgttctgaagctgcagtgccagagctgcaagcactactcacagcacgccatcaagagatgcaagcattttgagattggtggagacaagaagggcaagggcacatctcttttctaagcttctcgtccaactgt

SEQ ID NO: 78205 - DNA, 372 bp, Zea mays
agacaacgtcaaggccagaatccatgacaaggagggcattcccccacaccagcagcggctcatctttgctgggaagcagcttgaggacgggcgcacgcttgccgactacaacatccagaacgagagcacccgccacttggtgctgcgcctcaggggatgcatgcacatcttcgtgaagaccctgaccggcaagactatcacccttgaggtggagtcgtcagacaccatctacaacgtcaaggccaagatccacgacaaggatggcatcacaccggaccaccagcgtttgatcttcgctggcaagcacctggacgatggctgcacccttgccgactatgacatccacaatgagagcaccctccacctggtgct

SEQ ID NO: 78206 - DNA, 393 bp, Zea mays
ggacatataacatttgatgtcccaacatctttatacaggagcaatacaaaccatgagcatgatcagccgcctcatctccgcttgagggatcctacagtacccgaacgagtaaatgttgcactgtatgcagcgccagaatcacgctattgcccagcccgggtttacgaatatatctctgatgagaaaggtgacccaaagcttcatataaatgcacagaattgtcttcattgcaaggcttgccacatcaaagattcaaagcagaacatccaatggacagttccaaaaaggtgaagttgtcctggttacacaattatgttaaatgcccaatgatgaaaatatgttgccttcaaaaataataaccggtcaatcaacaatggtgtcaaaactggaaca

SEQ ID NO: 78207 - DNA, 353 bp, Zea mays
gcggcagccgagcgatcgagctccccggtcgctaccacagccggccactgcgcacgacggtgctggtaggttgcaagcacttgcatgatggcgcaagtcgctaatacgcttctccttgtggccctggtggtcgtgtcagcggtggatctgtgccgcgccatcgagttcgactaccgggacctggcatcggacgacgcgctgtgggacctgtacgaacggtggcagacgcaccaccgggtggatcgaaatcacgggaagaacggtccccggttcgggaccttcaaggaaaatgcgcgctttaaccacgctcaaaacaatcccggagatcgaccctaccggctccgcctgaaccg

SEQ ID NO: 78208 - DNA, 276 bp, Zea mays
aagacgcttggatctctctcgctctcggcgacgactgggcgaccgccgccgccgctgcgccgcccttgtccatgtgcccaggtcttcgcacgcgccttcgccaggtcttcgacggtaacgagcaccaaccggattcagggaatataagtaaaatgaggccagttttttgtgggaaccttgactatgatgttcgcatctcagaggttgagcgcctttttgggaactatggaacggtggaacgagtggatctaaagacagggtttgcaattgtctaca

SEQ ID NO: 78209 - DNA, 349 bp, Zea mays
acagcaagctaggatcatcagcatctgagcttatatattactacatcgatcggttgccaaatggcggggatgacagtcggcaataagctggcgctggctgcggtgctgctgtgcgcggcggcggccatggccacggcgcagcaggcctccggcgtgcgcgccacctacaacttctacaacccgcagcagaacaactgggacctcaacgccgtgagcgcgtactgcgcgacgtgggacgccagcaagccgctgtcgtggcgcatgaagtacggctggacggccttctgcgggcccgccggccccaccggccaggccgcgtgcgggcagtgtcctctggtgactaacactg

SEQ ID NO: 78210 - DNA, 394 bp, Zea mays
cggacgcgtgggtcgcccacgcgtccgcggacgcgtgggctcctctcctctcgccggcgcatcgcccgactgtcagtcagcctcagccatggccgcggaggaggagcagggcttccgcccgctggacgagtcgtccctgctcgccgacatcaacgccacgccggcgctcgcctcccgcctcggcggtcgtggcagtctagactccatcgagatcaaggaggtctgcgacggcaacctcaacttcgtcgacatcctgcagtccgaggccggcgccatcgtcgtcaagcatgcgctcccgtacgtgcgctgcgtgggggattcgtggcccatgacgcgggagcgcgcctacttcgagggctccacgctgccggagcaccgccgcctgtgccccgag

SEQ ID NO: 78211 - DNA, 405 bp, Zea mays
agcctgcagtcacgagctcccgttctccatttccagccatggcggtgtcgatcgagctcaccaaggagtacggctacgtcgtgctggtgctggtggcctatgtcttcctcaacctttggatgggcttccaggtcggcaaggcccgcagaaactagaaagtgttctaccccaccatgtacgccatcgagtcggagaacaaggacgccaagctcttcaactgcgtgcagagggggcaccagaactctctagagtgggtgcccgttttcttcgtcatactgctgctgggcggtctgcagcacccgaccatcgccggccggtctggggcggatctacatcctcgcgaggttcttctaggtcaagggatacgccaccggcgttccgggcaatcgtcccaagaatgggggg

SEQ ID NO: 78212 - DNA, 418 bp, Zea mays
cacagcgatccgagaccatgtccatgcttctacagttcctctttctcagcctcatcgtactcgcaacgtccactacgggtggtgatggccatcagttcgcctactcaggcttctccactaacgatctcgtcgtcgatggatctacaaccatcacatcaaacgggctcctcgagctcaccaactcgaacggactaccagacacgccacgccttctagccaagctcggtgtcgttcaccaggtcacccaacggaacggtgcactctttctacagctccttcgtgttcgcaatcctgtccgtgtacaccgacctaatcgcccacggcatggccttcgtcgtggcgccgagcaggaacttcccgggcgtcttgcctgagcagttcctcgagctcaccgacatccggaacgactgcaacgcga

SEQ ID NO: 78213 - DNA, 414 bp, Zea mays
ggcagaaattctgaagaacaatggatttgctgttgaaaagaaaattaggacctctactgttgaaataaacgacgaatcaagaggtcgtccattccaaaaggccaagattgagataatcttgggaaagagcgacaaatttgatgagctgatggccgctgctgcagaagagaggggcgaagtggaagatggtgaagagcagacttgaaaacagtaccgatgacaagctgctgctgttgtgctctgttagtgttgtttaatttagtttaataccgtgtgcatgagatatggcacgcgttcttgctcaactacatcaccatggcaatgtctgcaaatccatggattgatggatggatgttggttgtttcttgacattctggacatgttgttcactttggctatgtatgttttaacagt

SEQ ID NO: 78214 - DNA, 424 bp, Zea mays
  unsure (1)..(424): unsure at all n locations
gacaaaaaatacaggcaaggaaaatggctccgaccgccgccaaggacagtggctccgccgatcgctggcgcgaggtgcaggcgttcgaggacagcaagctgggtgtgaagggcctggtcgactccggcgtcaagtccatcccggccatgttccaccacccgccggagtccctcaaggatgtcatttctccaccagctctgccctcctccgactatgcgccggccatcccagtggtggacctgtccgtggcgcggcgcgaggatctggtggcccagatgaagcacgcggccgggacggtgggcttcttctgggtggtgaaccacggtgtgccggaggagctgatggccagcatgctcagcggggtgcgccagttcaacganggctctctggaggccaagcaggcgctctactcacgggaccccgc

SEQ ID NO: 78215 - DNA, 396 bp, Zea mays
acaagtcagagaaggtttcagatgatttcatcaacccaactgctccagctaacatatccacatcatcccattcaaaggcagaagcacatccacctccgagttatggtggcaggccagacagagtatctgacgacttcataaacccaactgcacctagcttctcggcgccttctcgtcctacaaatgaggagccagcccgcccatccgtgaagcggcaagagagcctacctgacgacgacttcataaacccaactgctcttcctggtttctcgtcgtcttcagctactaaggagtctggcgaggaccttccaaaggctccatgggaagcacaagctgccgcgggttccctaccgccgcctccggcgatgtacggccagagacagcagtacttcgagc

SEQ ID NO: 78216 - DNA, 426 bp, Zea mays
  unsure (1)..(426): unsure at all n locations
caacacacacagagagaggacaactcctcacaactctcccttccctcctgtaggggccaaaagggttagagagtaagagaagtagttcattcccttgcccaacacaagaaaacaagctctcctcatcaccctaatccaagcaactgcttgtgtgttgggaaattcttgtgacccctgttatattattatccgtgtagctactagcttcattcccccctttgtacccatcaaatggctggcatgtctctgcaacacccctgggcgtttgctttcggtctactaggtaacgtcatctcattcatgaccttcctggccccgataccgacgttctaccgcatctacaagagcaagtcgacggaaggcttccagtcggttccctacgtggttgcgctgttcagcgccatgctgtggatcntctacgcactg

SEQ ID NO: 78217 - DNA, 418 bp, Zea mays
  unsure (1)..(418): unsure at all n locations
aaaaaggccaccagcagcggcgagaagaacgtgctcatcttcgacctcggtggtggcaccttcgatgtgtcgctcttgaccatcgaggagggcatcttcgaggtgaaggccaccgccggtgatacccatctgggtggggaggacttcgacaaccgcatggtcaaccacttcgtccaggagttcaagcgcaagcacaagaaggacatcagcggcaacccgcgcgcgctgcggcgtctgcggacggcctgcgagcgggccaagcgcacgctgtcgtccaccgcgcagaccaccatcgagatcgactcgctgtacgagggcatcgacttctacaccaccatcacccgcgcccggttcgangagctgaacatggacctcttccgcaagtgcatggagcccgtggagaaatgcttcgcgatgc

SEQ ID NO: 78218 - DNA, 375 bp, Zea mays
aggacgcgtgggcgagcacgtgaaccgcctcgtcgccgcgcggctccagttcgacgtcatgggcgtggagaccgtcctcgtcgcgcgcaccgacgccgtcgccgccacgctcatccagaccaacgtcgacgcgcgcgaccaccagttcatagtcggcgccaccaacccgggcctcaggggccagagcctcgcggccgtgctctcggccggcatgtcggcgggcaagagcggaagggagctccaggccatcgaggacgagtggctggccgcggcgcagctcaagaccttctccgagtgcgtcagggacgccatcgcgggcctcggcgtcgcggcccaggagaagcagcgcaggctccaggagtgggaccgcgccac

SEQ ID NO: 78219 - DNA, 307 bp, Zea mays
acttcaccttgcacaagtctgagcgggaggccagcaggatccgctaaatccctgttggccttggatgtaactctgtaaactttgttctatgtttgtcgaacttgccgtgtcacttgcaacatctgctttgagatttactgatcctggattgcagttttactttaagtacctgctggaaagtagacttgccgagacatagttatcattggttatctataatagctcaatcgacgcgtgcaatctgaaggctttgttatatgtggtaaagtcgtcgatgtagttttgtcatacttgatgtcggttggct

SEQ ID NO: 78220 - DNA, 381 bp, Zea mays
ttcctcccaacaccacctcgccgcgatctccgtagcctccgtcgcgtcgagcatcgatcatgtcggcctactgcggaaagtacaaggatgagctcatcaagaatgctgcctacattggcacccctggcaagggtatccttgctgctgatgagtccactggcaccattggcaagcgcctttccagcatcaatgtcgataacgttgaggagaaccgccgtgccctccgtgagctcctattctgctgccctggtgctctccagtacatcagcggtgtgatcctcttcgaggagaccctgtaccagaagaccaaggatggcaagccttttgttgatgtcctcaaagagggaggcgtcctccctggcatcaaggttgacaagggca

SEQ ID NO: 78221 - DNA, 351 bp, Zea mays
cccgctcgggttgccatggcggaccagctcaccgacgaacagatcgccgagttcaaggaggccttcagcctcttcgacaaggacggcgacggctgcatcaccaccaaggaacttggcactgtgatgcgctcattggggcagaaccctactgaggctgagcttcaggacatgatcaatgaggttgatgctgatggcaatggaaccatcgactttcctgagtttctcaacctgatggcgcgcaagatgaaggacaccgactccgaggaggagctcaaggaggccttccgtgtgttcgacaaggaccagaacggcttcatctccgctgctgagcttcgccatgtcatgaccaac

SEQ ID NO: 78222 - DNA, 409 bp, Zea mays
cccacgcgtccgccacgcgtccgcccacgcgtccgccacgcgtccggaagcagcaaatattttctgacttagagaagtactgtccttcacattgcatccttgctactaacacatctacaattgatcttaatctgattggggagaaaacaaaggctcaagatcgtattgctggtgcacacttctttagtcctgcgcatgtgatgccacttctggaaatagttcgtactcagcacacttcaccacaagttgttgttgacttgctggatgttgggaagaagattaagaagacaccaatagtcgtcgggaactgtactggctttgcagttaataggatgttctttccatacactcaatcagcactcttttatgttgatcttggtatggatgtttataagattgatcgtgcttg

SEQ ID NO: 78223 - DNA, 431 bp, Zea mays
tggagtagggagcacgccgcacgagccctttccgccgccgccaaaatggtgaacgttcctaagaccaagaagacctactgcaagaacaaggagtgcaagaagcacactctccacaaggttactcagtacaagaagggtaaggatagcctgtctgcccagggaaagcgccgttatgaccgcaagcagtcaggatatggtggccagaccaagcctgtcttccacaagaaggccaagaccaccaagaaaatcgtattgaagctgcagtgccagagctgcaagcactactcacagcacgcaattaagaggtgcaagcattttgagattggtggagacaagaagggcaagggaacatctctcttctaagtttctcatcgcccatctcgatgttggatcgaacctgtgggtctactactgttctaaaaactcgtcaa

SEQ ID NO: 78224 - DNA, 358 bp, Zea mays
caaagcgcctaacaaaagcatacttcccgaagcactcttgcaatccactgagttctgttgagacgcatagagctagctgctagcgtcgacaatgtcgctcgtgaggcgcagcaacgtgttcgaccccttctcgatggacctctgggaccccttcgacaccatgttccgctccatcgtcccgtcggcgacctccaccaactctgagactgccgccttcgccagcgcccgcatcgactggaaggagacgcccgaggcgcatgtgttcaaggccgacctccccggcgtcaagaaggaggaggtcaaggtcgaggtcgaagacggcaacgtgctggtcatcagcggccagcgcagcaaggag

SEQ ID NO: 78225 - DNA, 350 bp, Zea mays
aggtgggctggcttctcctccccctcttaccaagtcctcctcgggttagggttccttagggttttgtggaggggcgatggcggcggctgatgtggagtaccgttgcttcgtcggcgggcttgcctgggccaccagcaacgagtcgctggagaatgccttcgcctcctacggcgagatcctcgactccaaggtcatcaccgaccgggagacggggaggtctcgcggcttcggcttcgttaccttctcctccgagaactccatgctcgacgctatcgagaacatgaacggcaatgagctcgacggccgtaacatcaccgttaaccaggcccagtcccgtggcggtggccgtg

SEQ ID NO: 78226 - DNA, 421 bp, Zea mays
agtctctgaccgcgtggtggactccccctgctgcctggtgacgggcgagtacggctggacggccaacatggagaggatcatgaaggcacaggcgctcagggactcgagcatgtctgggtacatgtcctccaagaagaccatggagatcaacccggagaacgccatcatggaggagctgcgcaagcgcgcggaggccgacaagaacgacaagtctgtcaaggaccttgtcatgcttctgttcgagacggcgctgctcacctcgggcttcagccttgacgaccccaacaccttcggcagccgcatccaccgcatgctcaagctgggcctcagcatcgacgaggacgatgctccggaggccgacaccgacatgcctcctctggaggatgacgctggcgagagcaagatggacgatgtggactag

SEQ ID NO: 78227 - DNA, 429 bp, Zea mays
accacgcgtccgtgaccgtgctgcagattgtctgtttgcacggtcaaaggaaagaaaatctagatatataacagaactggagcggaaggttcaaactcttcagacagaggctactactctttcagcgcagctcacactattccagagagacacaactggactttcggcagaaaatgctgagctgaagataaggttgcaggccatggagcagcaggctcaactgcgggatgctctaaacgatgcgctgaagcaagaagtggagaggctcaagatagcgacgggcgagatgccgaagtccaacgaacaattcaacatggggatgcagcacgtctcgtacagcggcccttctttcttccatctcccggagcagcacgtagacattcagctgccgcaccattttcagcagcctccgcggaacgtccagatgct

SEQ ID NO: 78228 - DNA, 428 bp, Zea mays
actaggcttgatcgatctctcgacagcacatagctagcaataatggagaagtacaccaaagccctagcgtcattgctcaccatgctggtgctggcacctctcctcgccatggccaccgacccagaccccctgcaggacttctgcgtcgccgacctcaacggcaagccatcagtgaacgggtacccatgccagccgccgtcgtcggccggcgaccagttcctcttctcgaccaagatcgccacgggaggcgaccccctggccaacccgaacggctccaacgtgacggatctggacgtttccgagtggcccggcgtgaacacgctgggcgtgtccatgaaccgcgtcgacttcgcgcccggcgggcacaacccgccccacgtccacccgcgcgccatcgaggtcgggctcgtcacccgctgcgagctcct

SEQ ID NO: 78229 - DNA, 376 bp, Zea mays
aatagttctagatcgcgagctagaactagtcctcgtgaatggcatctgctggactgcttacgcgctcatccgcttcgacctctacattactatccccaacgggctgggcgtgctgttcgcggtggcgcagctggtgctgtacgccatctactacaagtccacccaggagatcatcgaggcgcgcaagcgcaaggccgaccagatcgccatgaccggggtggtcgtcgacggcggcaagaccaacaaccaagccggcgcgggccaatactgaccgacgatcaagtgacgatcgacaccaatatgctcaagcaagaagccagcggcaaatcaattatgtcgccgctgggttttatgtattttgtgattctatatgcac

SEQ ID NO: 78230 - DNA, 402 bp, Zea mays
ggcggcggcaccggcaggcggcggccctcgggcattgtcccagcgggagcaggacatccagatgatgctcgccgccgatgtccacctcggcaccaagaactgcgacttccaggtggagcgctacgtgtacaagcgccgcactgatggtatctacattattaaccttggaaagacctgggacaagcttcagttggccgccagggtcatcgttgccattgagaatccgcaggacattatcgtgcagtctgctaggccctatggccagagggctgtcctcaagtttgcgcagtacactggtgcccatgccattgctggcaggcacactcctggtacattcaccaaccagttgcaaacctccttcagtgagccacgccttcttatcctgactggaccgaggactga

SEQ ID NO: 78231 - DNA, 384 bp, Zea mays
agaagaatcgccatcacagcaagctacgcgcactgaaatcctccaatccacaggacacagctctacttccacagttcgcagactcgcacgcaccgagcggctagcgatcaacgagaaatgtcgctggtgaggcgcagcagcgtgttcgacccattctctgtggacctcttcgaccccttcgacagcatgttccgctccatcgtgccgccgtcgttgtcgtcgtcggcggcctccgagaccgccgccttcgccagcgcccgcatcgactggaaggagacgcccgaggcgcacgtgttcaaggccgacctccccggcgtgaagaaggaggaggtcaaggtggaggtggacgaccgcaacgtgctgctcatcagcgggcagcgcaac

SEQ ID NO: 78232 - DNA, 346 bp, Zea mays
cccacgcgtacgcgccactccccaaccgtcccaggacccaggctcagcactagcagccatgccgcacctcgtcctgcttctcttcctcggcctcggcgggctcctgcccgcggcgtcggccgccgacgagcagttcgtgttcgacggcttcaagggcgcgaacctcagcctcgacgggatggccacggtcacgccggacgggctgctcatgctcaccaacggcaccagccagctcaagggccacgccttctacccggcgccgctgcggttccacggggcgcccgacggcacggcggcagcgatggagtccttctccactgccttcgtcatcggcatcatcggcgcg

SEQ ID NO: 78233 - DNA, 425 bp, Zea mays
cacgcgtccggatcagatccctcgacaatggcactccaggcagcctacgagtacctgcagcaggccgtcggccatggcgcgttggccttcaagcagaacgcgaagctgccggctcatcgccgtacccaccgtactactgctgctagcgtccctcgccaagagcacgtcgtcgtccggtaggggcaagccgccgctccctccctcgccgccgggcaccctccccatcgtggggcacctacaccagatcgggccccagacccacatctcgctccaggagctggtggccaagtacgggcacaacgggttcctgttcctccgcgccggcgccttgccaaccctgatcgtgtcgtcgcccagcgccgccgaggccgtaatgcgcacccaagaccacatcttcgcttcgcggctgtggtccagggcctccc

SEQ ID NO: 78234 - DNA, 333 bp, Zea mays
  unsure (1)..(333): unsure at all n locations
gccaagtgcaagtgatcgagctcccccctcctcatcagtcgctaggcacagcgcacttgcaggatggcgcaggtctctaagacgcttctccttgtggccctggtgttcgtgtcgtcggcggcggtggagctgtgccgcgcgatcgacttcgacgagcgggacctggcgtcggacgaggcgctgtgggacctgtacgagcggtggcagacgcaccaccgggtgcaccggcaccacggcgagaagggccggcggttcgggacgttcaaggagaacgtgcgncttcatcacgcgcacaacaagcgcggcgaacggccctaccgcctccgcctgaac

SEQ ID NO: 78235 - DNA, 337 bp, Zea mays
ggacgcgtccgagactcaaccgtcctcactcaccgggagacggcgacgtgtcacggttcctgatgcgtttgagtctgcgcgaagaaggcgagctgacgatgcagtcccgtatgcttcatcggagggcttgcctgcgccactagcaccgagtcactggtgaatactctcgccgccgagggcgagatccgcgactccaacgtcatcatcgaccgggagacggggaagtcccgcggcttcggcatcgttgccttctcctccgacatctccatgctcgacactatctactacatcaacggcatcgaccgcgacggccgtagcatcaccgttaaccaggccc

SEQ ID NO: 78236 - DNA, 386 bp, Zea mays
cgtccgcacctcttcttcgcgcagatctaccacgaccgcaagcagcgggaggcgcgcatgtcgctgccccgcgccgagcgcgcgcgggcgccgtacgtcgacttcctcaagcccatcatcgccgacggcgacacgggcttcggcggcgccacggccaccgtcaagctctgcaagctcttcgtcgagcgcggggcggccggggtccacctcgaggaccagtcctccgtcaccaagaagtgcggccacatggcgggcaaggtgctcgtcgccgtctccgagcacgtgaaccgcctcgtcgccgcgcggctccagttcgacgtcatgggcgtggagaccgtcctcgtcgcgcgcaacgacgccggtcgccgcacgctcatcccagacaa

SEQ ID NO: 78237 - DNA, 370 bp, Zea mays
gggtccaggccgcgtccggagccaccatcggattctggcaaggggacattaggtacctgatggaggatgtgcaagtgatgaaaccgacaatattctgtggtgttcctcgtgtttatgatcgtatatatacaggtataaacatgaaaattcagtctggagggatgataaccatacacctttttcagtatgcctacaactacaaacttgccaatatgaggaaagggctgaaatagcatgaagcatcaccgtttttcgacaagatagttttcagcataataaaggaagggcttggatggcgtatacctctcatgatagctggagcagcaactttgtcagggcaaatcgaataattcatgcgggtaacgacctg

SEQ ID NO: 78238 - DNA, 393 bp, Zea mays
cagggggtccgtggcggcggccgtggtccggggccgcgccttcgcgccgcacgccgacgtgctgtggatggagacgtccagccccaacgtggccgagtgcaccgccttcgccgagggcgtcaaggcggcgtgccccgaggcgatgctcgcctacaacctctcgccgtccttcaactgggacgcgtctgggatgacggacgccgagatggccgccttcatcccgagcgtcgcgcgcctcggctacgtctggcagttcatcacgctcgccgggttccacgccgacgcgctcgtcaccgacacgttcgcgcgggacttcgcacgccgcggcatgctggcctacgtggagaggattccagaggaggagaggatcaacggcgtggagacgctggagca

SEQ ID NO: 78239 - DNA, 407 bp, Zea mays
aaacaaacaagcacacagatgatggggttaatagaagtgttggagcaagtactggagcttcaagtgaagccaataatgtgcctggaaccgagaaggcacaggaagcaggttcacttgattctatatccaagtctaacaggaagaggacagctaaacgaactgcattttctgattcagattcagaagacctagacctatcaaaggaggaccttgtgaagctgcttcttgagaaagacgaatcattgaagtctaaagatgaagagtttaaagatatgaaggataaggtcctacgcagctatgctgagatggagaatgtccttgccagaacaaagcgtgagtcagagaacaccaagaagtatgccatacagagcttctccaagagcttgttagatgttgcagacaatttg

SEQ ID NO: 78240 - DNA, 412 bp, Zea mays
acgataggtaaaaagaatatatgtgccactacctgatccaaatgtacgaaggttacttctgaaaaatcagctcaaaggacaatcattcaaactgtcgaaccatgattttgaaagacttgctgtggagaccgaagggtattctggaagtgacctgagagccttgtgtgaagaagctgcaatgatgccaataagagagctcggtccacaaaatattcttactatcaaagcaaatcagctgcgacctttgaggtacgaggacttcaagaacgcgatgacggtgatcaggccaagcttgcagaagagcaaatgggacgagctggagaactggaacgaagaattcggttcgagctgacggagacgcgcgctgcctgatgatgatgatcaagcggccctatttccagatgtacatgat

SEQ ID NO: 78241 - DNA, 387 bp, Zea mays
ccagcttgccggagttgtggccgtcgaggtcaccggtgggcctgagatccccttccaccccggcagggaggacaagcctcagccgccacctgagggccgtcttcctgatgccaccaagggttctgaccacctgaggcaagtctttggcaagcagatgggtttgagtgatcaggacattgttgccctctctggtggccacaccttgggaaggtgccacaaagagcggtctggttttgagggggcctggactacgaaccctttggtctttgacaactcttacttcaaggaacttctgagtggcgacaatgaaggtcttcttcagctcccaagttgacaaaccctgctgagcgaacctggtcttccgccctcttgtggagaaatatgctg

SEQ ID NO: 78242 - DNA, 422 bp, Zea mays
agcgaagcaagcagcctaaaaaaaccgtatcgtctcgcctgttcagtttccttctcttcccgcagcccggtttgccgaccaggttccaccgttccagagtagccaagcgaatcccgtgtctggttcgcgcgatggcggaggagcagtccaacccccagcaccagcaagcggaggagagggaggttatggtggagcagcagcagccgaggagggccccgaagctgacgtacctggacttcgtccaggtggcggctgcccaggccgcggtgtgcctcgctgggctctacggcctcgccaaggaccacgccggcccgctccgccccagcgttgacgccgtcgagtctgccgtgaagggcgtcgttagccccgtctacgaccgcttcggcggcctgccgctcgacgtcctcgccttcgtcgaccgc

SEQ ID NO: 78243 - DNA, 371 bp, Zea mays
cacgttcgagagtctcactgacaagagcaagctcgatgcgcagcctgagcctttcatccaccttgtcccagacaacggcaagaatacgctcttcaacaatcaacagcggaatcggcatgaccaattccgaccttgtcaacaacctcggttaaatcgccagttccggaacgaaggatttcatggaagcccttgctgccggcgctgatgtgtcaataattggccatttcggcgtcggtttctactctgcctacctcgtcgccgatagagttgtcgtgaccaccactcaaaacgatcacgagcaatacgtgtgggagtcccaagcgggcgggtcgtacagtgttactcgtgacacgtcaggggagcagcttggc

SEQ ID NO: 78244 - DNA, 390 bp, Zea mays
gcctcattcatctccattcgaaacaccctcgcacccacactctcccttcgtccccagcctaaatccccgcaaagatggctcgcacgaagcagacggcgcgcaagtccacgggcggcaaggccccgaggaagcagctggcgaccaaggcggcgcgcaagtcggcccctgcgaccggcggcgtgaagaagccgcaccgcttccgcccgggcaccgtggcgctgcgcgagatccgcaagtaccagaagagcacggagctgctcatccgcaagctgcccttccagcgcctggtccgcgagatcgcgcaggacttcaagaccgacctccgcttccagtcctccgccgtcgccgcgctgcaggaggctgccgaggcctacctcgtcggcctgtttg

SEQ ID NO: 78245 - DNA, 366 bp, Zea mays
aattcacaaagcgatactagctagtccctaccaaagcatacttcctgaaacactcttgcaatccactgagttctgtttgttgagacgcatagagctagagtcgacaatgtcgctcgtgaggcgcagcaacgtgttcgaccccttctccatggacctctgggaccccttcgacaccatgttccgctccatcgtcccgtcggcgacctccaccaactccgagactgccgccttcgccagcgcccgcatcgactggaaggagacgcccgaggcgcacgtgttcaaggccgacctccccggcgtcaagaaggaagaggtcaaggtcgaggtcgaggacggcaacatgctggtcatcagcggccagcgcag

SEQ ID NO: 78246 - DNA, 415 bp, Zea mays
gggtcgagcacgcgtccgcactcacacactgcaacagccaagtgcaagtgatcgagctcccccctcctcatcagtcgctaggcacagcgcacttgcaggatggcgcaggtctctaagacgcttctccttgtggccctggtgttcgtgtcgtcggcggcggtggagctgtgccgcgcgatcgacttcgacgagcgggacctggcgtcggacgaggcgctgtgggacctgtacgagcggtggcagacgcaccaccgggtgcaccggcaccacggcgagaagggccggcggttcgggacgttcaaggagaacgtgcgcttcatccacgcgcacaacaagcgcggcgaccggccctaccgcctccgcctgaaccggttcggcgacatggggcgggaagagttccgggtcacgttcgccg

SEQ ID NO: 78247 - DNA, 402 bp, Zea mays
gatcaaggagacccgcctcaagctcttcaaggatttcttcctcgaggagaggaagaagctggcgagcaccaaggccacggacagcaacggcctcaagtgcgccattgatcacatactggaggcacagcagaagggtgagatcaacgaggacaacgtgctcttcatcgtcgagaacattaacgttgcagcgatcgagaccacgctgtggtcgatcgagtgggcggtcgctgagctggtgaaccacccggagatccagcagaagctgcggcaggagctggacacggtgctcgggccgggccaccagatcacggagccggacacgcacaacctcccctacctgcaggcggtgatcaaggagacgctgcggctgcggatggccatcccgctgctggtgccgcacat

SEQ ID NO: 78248 - DNA, 392 bp, Zea mays
atccgttgcgctgcgcccggttccctcgcgcggtgcggaatttaacatggccgtgccggaggtggtggtcgacggcgtcgtcttcccgccggtggcccgcccgccgggctccgccggctcgcacttcctcggcggcgcaggcgtgcgaggcgtcgagatcggaggcaacttcatcaagttcacggccatcggcgtgtacctggaggacgcggccgtgcccgcgctggccaagaagtggggcggcaagacggccgacgagctcgcctccgacgccgccttcttccgcgacgtcgtcacgggcgacttcgagaagttcacgagggtgacgatgatcctcccgctgacgggcgagcagtacgcggagaaagtgacggagaactgcgtggcgttct

SEQ ID NO: 78249 - DNA, 411 bp, Zea mays
acgatccccaattcctccttcggatctcgcattcagcgcagcgcaggtgtgaaggaagggggacgcggaggaagatggggctcgcgttcgggaagctcttcagccggctcttcgccaagaaggagatgcggatcctcatggtcggcctcgacgccgccggtaaaaccaccatcctctacaagctcaagctcggcgagatcgtcaccaccatccccaccatcggtttcaatgttgaaactgttgagtacaagaacattagcttcactgtctgggatgtcgggggtcaggacaagatcagacctctttggaggcattacttccagaacacccagggtcttatctttgttgtggacagcaatgaccgtgaccgtgttgttgaagccagagatgagctccacaggatgctgaacg

SEQ ID NO: 78250 - DNA, 427 bp, Zea mays
aaaaaaagcctccgcctcctcctcctcctcctcctccgccgccttccgcctgttctcacttcccgcccctccctccggacctagacccctccaagcgccagcgccggtgaacaccgctttcccgtacctgcgccatgggccgcccaaagggcggcgccgcgtcctcctcgaagaagccgaaggcgaagcagaaacagcgaggtggcgtcgacttcaagaagtacaagcacaaggtcgggcgcaagcttccgccgccgaagaatgccaccaacacggaaatcaagtccaaaacgatcgtgctgccggagcagagcatggcgtcggagaggacgggcatggcagtgaacaagcgcgggctcacgctacgggagctcctgcagcagacggggcactacaatgccaatgtgcggcgggctgcactgaatgg

SEQ ID NO: 78251 - DNA, 306 bp, Zea mays
cagacgcgtgggcggacgcgtggggtacaatgatgatcaaaatgtcatccacttgatggctaaatcattgcttgagaaatttgaagagaagtggctccattttcttcctaaagttgagagtgaggaaaaaagacaaaaggaggaggaatcaaagggtgttgcagccacaaatacttctcgagaagttgcaattgtaaaattagcaaaagacactgatgatgagctaaatcagattaacaggaagctggaggagctccggaaaatggtggttcacagatgcaggaaaatgacgacagatgagaagag

SEQ ID NO: 78252 - DNA, 378 bp, Zea mays
gggtccacgcacgcgtccggaggcagtgggaggtacgatcatttagcgaggcggttgaatgatatcggcatcaaggtgtacgggatggactggactggtcatggtggaagtgatggtctacatggatatgtgcaatctcttgaccacgctgtcaatgacttgaaaatgtacctcaagaaagtatcagccgagaaccctggtcttccatgcttctgcttcggccattcgacgggtgggggtatcattctgaaggctgcacttgatccagacgtagaaacgctcatcagcggtgttgtcctgacatcaccagctgtccgtgttcagcctgcccaaccaatcatagcggccatggcaccgatttttgccctgatcgcgcca

SEQ ID NO: 78253 - DNA, 378 bp, Zea mays
  unsure (1)..(378): unsure at all n locations
ctcgccgcagacctctgccatggcggaccagctcaccgacgagcagatcgcggagttcaaggaggccttcagcctcttcgataaggatggcgacggctgcatcactaccaaggagcttggaacggtgatgcgctcccttggccagaaccctaccgaggcagagctgcaggacatgatcaacgaggtcgatgcggatggcaatgggaccatcgacttcccggagttcctgaacctgatggcgaggaagatgaaggacacggactcagaggaggagctcaaggaggccttccgcgtcttcgacaaggaccagaacggtttcatctcggctgccgagctccgccatgtcnatgacaaccttggcgagaagctgactgacga

SEQ ID NO: 78254 - DNA, 409 bp, Zea mays
tcccggttcgcgttcccgtcggaggagagcgggtcctcctcgccgttctactactcgttcgacgccggcggcatccacttcgtcatgcttgcgtcctacgccgactacagcagatcaggtgcgcagtacaagtggctggaggcggacctggagaaggtggacaggtcggtgacgccatggctgatcgcgggctggcacgcgccctggtacaccacctacaaggctcactacagggaagccgagtgcatgagggtggagatggaggagctcctctacgcctacggtgtcgacgtcgtcttcaccggccacgtgcacgcgtacgagcggtcgaaccgggtgttcaactacacgctggacgcgtgcggccccgtgcacatctcggtgggcgacggcgggcaacgcgagaaga

SEQ ID NO: 78255 - DNA, 420 bp, Zea mays
aatacctactactcaagtatccatccttattgagtacagtgttgatccatggactcggaaggagttgtagcagcaaaggtggcagatgagactactaaaccggcaatccaagaagacggcgccgagagcaaggccgggatgactgatctgctgatgctgaccgacaagtcgcagctgcaggcgctggcgatgctgctgcggaacaacgaggagctcatgatgagccaggcgatcaagtcggagacggagcgcattgagtacctcaagacggtgagcgactgctacacgcggacgatgaagctcctcgacgattccatggcggccaggaccacgtacgagcgttcgggcggaacgaggagcctcgtcgcccgggacatggacgactacgtcgtctacggcctcaacgcgtgcttgcagaac

SEQ ID NO: 78256 - DNA, 402 bp, Zea mays
acaataagctgaggcagaaacatgcatctggtgaaggtgctaattatggtgtagacataaacactggcggaattgctgattcctttgcaaactttgtttgggaacctgctgttgtaaagatcaatgctataaatgctgcaaccgaagcttcctgccttattcttagtgtcgatgagacagtgaaaaacccaaagtcggagagcgcacaaggtgaggctgctgccggtgcgatggctggtcgcggtcgaggtgcaatgcgaggacgtggtggcaggggcatgcgcaggcgataaactgggtcaagtagatcatggtgagatttttttgcatgtttgcgagtgcttttgtgccttactgcacatgtatggacgctgcacttactattgtgcgcttttggttgtg

SEQ ID NO: 78257 - DNA, 433 bp, Zea mays
  unsure (1)..(433): unsure at all n locations
cagttgctggtgctagcaactgttccagaataaatgacatggtacccacaattattctggaacagttgctggtgctagggaggcattcttatatgggattcctgcaatagctatgtcatatgattgggttgcgggtcggagcagtgttaatgacctcaaggtgtctgcagaggtctgcatgcctctgataaatgctatcgtgactgagatcaagaatgggacttaccctcaaggatcattcttgaatgtagatgtacctacagatgctgcgcaccacaagggctacaaaattacaagacaaggaacatatatggccagaattagttgggagcagacggtttacaagaagcctgcagtagaaagttaccagacagcanacatggatgttgatggtgaaaaggatagcgaactagttacgtcagaaaatgaccta

SEQ ID NO: 78258 - DNA, 193 bp, Zea mays
cgtccgagcacatctagcatcttccatgccaaggccgggatcgctctgatagaccacttcgtcaagctcgtcacgtggtaggacaactattggggctacagcaactgcgtcatcgacctgatgcgccacatgttcaagacgcagtataggggtgttttccccatgcttctgcatgatgggagctgcaggtgta

SEQ ID NO: 78259 - DNA, 402 bp, Zea mays
taccaggctattgtgaagaacactataggcattggtgttgatgatgaggatcggaagcgcacgtgggttcctgatgctgaggaatgcaagaagcgtggttcaattgaaacagcacgcgccatctatgcacatgcgcttactgtgttccttactaagaagagtatttggctgaaagcagcacaacttgagaagagccatgggactagggagtcacttgatgcgctcctcaagaaggctgttaactacaatccacgagctgaagtattgtggcttatggctgcaaaggagaaatggttggctggagatgtgcctgctgctcgtgcaattcttcaggaagcttatgctgctatccccaattcagaagagatctggctggctgcattcaagctcgagtttgagaac

SEQ ID NO: 78260 - DNA, 409 bp, Zea mays
gcgtccgtaccaagctattgtgaagaacactataggcattggtgttgatgatgaggatctgaagcgcacgtgggttcctgatgctgaggaatgcaagaagcgtggttcaattgaaacagcacgcgccatctatgcacatgcgcttactgtgttccttactaagaagagtatttggctgaaagcagcacaacttgagaagagccatgggactagggagtcacttgatgcgctcctcaagaaggctgttaactacaatccacgagctgaagtattgtggcttatggctgcaaaggagaaatggttggctggagatgtgcctgctgctcgtgcaattcttcaggaagcttatgctgctatccccaattcagaagagatctggctggctgcattcaagctcgagtttgagaac

SEQ ID NO: 78261 - DNA, 366 bp, Zea mays
agtgaccctccctcagccgcgtcgcgtcgcatcctacgatccaacgctctctctgctcgcagccatggcgatgaactacccgaccgtgagcgccgagtacagcgaggctgtggagaacgccaggcgcaagctccgagccctcatcgccgagaagagctgcgccgcgctcatgctcagcctcgcgtggcactccgcggggacgttcgaagtgtcatccaggatcggccgtccattctgaacgatgaacctctcgtcggacatggctcacggcacttccactgggctagacttctgcagttccgcgagccggagacggtcaggggagcactccagcactatctgcctgcgggtagggtttctcccggt

SEQ ID NO: 78262 - DNA, 430 bp, Zea mays
gggcaccggacagctactacgacgagctgaagagggactacagcgcgaagaaggctatcctgctggaaggactcgaagccgcagggttcatcgtctacccatcgagtgggacatactacatcatggtcgaccacaccccgttcggtttcgacagcgacgtagagttctgcgagtacttgatccgcgaagtcggcgtctgcgctataccgcccagcgtgttctacctcgaccccgaagagggaaagaaattggtgaggttcaccttcagcaaggacgaaggcacgctgcgggccgcggtcgagaggttgaaggcgaagctcaagaggaaatgaatgaatgggggattacatgtttgtggctggtgattgttgaataatctgtgctgggtttcaactgcgcccggatgcctgtactgtctcttttttttttt

SEQ ID NO: 78263 - DNA, 423 bp, Zea mays
cagccatcgacttcatctcggattgaagcaatgtcgtcggacgatgaggtcagggaggagaaggagctcgacctctcctccaacgacgttgtcaccaagtacaaggctgccgccgaaatcctcaacaacgctctgaagattgttgtgtctcagtgcaagccaaaagtcaagattgttgacctttgcgagaagggcgactctttcataagagagcaaactgggaatgtttacaagaacgcatagaggaagattgaaaggggtattgctttcccaacctgtgtatccgtcaatgacacagtttgccactttccaacgcttggcaaccgatgaagccgttctggaagaaaatgacatggttaaaattgatatggggcggtcatattgagggctttattgctgtggtggcacatacacatgtaatta

SEQ ID NO: 78264 - DNA, 397 bp, Zea mays
gccgccgtcgccgcctcctctccccagcacccggagctcgaccgaacgccgctcaccatgatcatccccaagaagaaccgcaatgagatctgcaagtacctcttcaaggagggcgtgctgtatgccaagaaggactacaacctggcgaagcacccgcagatcgatgtgcccaacctccaggtgatcaagctcatgcagagctttaagtccaaggagtatgttagggagaccttctcctggcagtactactactggtatctcaccaacgatggcattgagcacctacgcaactacctgaacctcccgtctgagatcgtgcctgccacgctcaagaagtctgccaagccacctggccgcccatttggctctggccctcctggtgaccgcccaaggggcc

SEQ ID NO: 78265 - DNA, 427 bp, Zea mays
agggagcggcagctcccaaccatacgtccatatccccctcccaacaaaaaaaaaactcccatcaatggcgatctgaatcaaccaaggcatctggaagcttggacatggagcggatcctcaagtccgccagggagtcgggctccctgaacctctccaatcgctccctcagggagatacccaaggaggtttacaacaacttggacactggcagccaggatgagaaatggtgggagggagtggacctccaaaagctcattctggctcacaataatcttgaggtgttaagagaagaccttaggaacttgtcttcgcttgttgttctaaatataagtcacaacaagatatcttcccttccagcagctatcggagatctcccgttgctaaaatcactggacatgtctttcaatcaaataaacactctgcccga

SEQ ID NO: 78266 - DNA, 432 bp, Zea mays
gcaccacacctcttcttcttcttcctcctcctcctagcacagctagcgcctgctccccttcgcctgtgatcatgtcttgcagcagcggcaagtgcgactgtggctccagctgctcctgcggcagctcatgcaactgcatgtcccctaacgtggagaccgccgccgccagcagcatcaagaccacggtcctcgccgcgccgaccaccaaggccagcgccggcggcttcgaggcggccaccgagggcggcggctgcgactgcaacacctgcaactgcggcaccagctgcggctgctcctgctgcagctgcaactgagccggtcaggcgatggcgcacgagagtcgagaggacgacgacgagtcgtataaatataatagcggcgtctaaataagatcctgtcaactgcacccgccattatcgattcatggtcgct

SEQ ID NO: 78267 - DNA, 379 bp, Zea mays
caccacgcgtccgccacgcgtccgcggacgcgtgggagcgtgtgaagctgcttattcagaaccaagatgagatgattaagtctggtaggctatcagagccgtacaagggtattgttgactgcttcaaacgtaccattaaggatgaaggtttctcttccttgtggaggggtaacactgctaatgttattcgttacttccctactcaggctttgaactttgcatttaaggactacttcaagaggttgttcaacttcaagaatgatatggatggctattggaagtggtttgctggcaacctggcctctggtggtgctgctggtgcttcctctttgttttttgtgtactccctggaccacgcgagaacaatgttggctaatga

SEQ ID NO: 78268 - DNA, 406 bp, Zea mays
caaacggagagagacaatggagagagatggcaaactgttttggtgacgtcgtggacaattacaagctagacacaatgccaagatatatcggcaaaaagaagactcgagaagaccgggcacgagaggcctcctatctcagtaatgagaatgagaagtacaagaaagctaaagactatgtgaacatgctgaaggactggtacggcaatggagcgtcgaagctgtgcgtgatctacaaccagacgggcggaaccctgcggtacgtcgacgacaaggactggctgggctacccggggccgacgccctacccgacggagatcggcaacgggcagtgggcgtccttcctccacgtccacaagaccggcgcctcgtcggggtccatggccgctgtcgtctaccgcggcaagga

SEQ ID NO: 78269 - DNA, 388 bp, Zea mays
catcgaagtccactcagtactcacctcaaggaagtgaaagtagtaatctacaagttggtcaaggcaacttgaaacttcaatataatgaagctggaaaattatccctgtactccgatagtaagactatggttcaagcaaactttgagcagaaatacaagtattatattggacaggatggaaatggaagtgatcctcaggcttctggagcatacatattccgccctaatggcacagttccaatcagtactgatgggcaggtttctctcacagttctgcgtgggcccatattggatgaagtgcaccagcagataaattcatggatttttcagattaccaggctttacaaggagaaggactttttggaaactgaatttatagttgggcccat

SEQ ID NO: 78270 - DNA, 359 bp, Zea mays
gcgtccgcacacacgtccgcggacgcgtgggtcaccagctgccattgccatctactgacctgtgacctccgcattcccaaacagcccgagcgagcgagctagcagatcggcggcaggcacctccctcctcaaggaacatggcccgcacgcagcagttggcagtagtggcgagcgccgtggtggccttggtgctgctggcggcggcgacctcggaggcggccatcagctgcgggcatgtggcgtcggccatcgcgccctgcatctcctacgcgcgcggccagagctcggggccctccgccggctgctgcagcggcgtcaggagcctcaacaacgccgcgcgcaccaccgccgaccgccgc

SEQ ID NO: 78271 - DNA, 395 bp, Zea mays
ggttttgttaccatggccgctgttaaagatgcagatcgctgcataaaatatctggaccgttctgtgttgcaagggcgggtcataactgttgagaaggcaaagagaagacgaggtagaaccccaacacctgggaagtatcttggcacaaaatcatcccgtggacggaggtactccacaagctactcacctgatcggaggggccgttacagttcccgctactcacctgatcggagggactgtcatggtagagaccggtcatactctccatatgacagaaggcgatcatactctccctacagcagggatggatcatactccccttactatggccggcgatcatactcaccttactacagcagacggtatcgttcaaagtcccatactgctacagaaga

SEQ ID NO: 78272 - DNA, 424 bp, Zea mays
atccgatccgccgagtgcacaccacctttccccactccgatcgaatcgatggccgccgagggcgagaagaagatgataaccctcaaaagctccgatggcgaggagttcgaggtggaagacgcggtggcgatggagtcgcagaccatccgccacatgatcgaggatgactgcgccgacaacggcatccctcttcctaacgtcaactccaagatcctatccaaggtaatcgagtactgcaacaagcacgtacatgccgccgcagccgcagccgccgcctcgaatgccggttccgacgacgtgggtgccgcctccgccaacagcaccgccgcctccggtgaggacctcaagaactgggatgcggacttcgtcaaggtcgaccatgccacgcttttcgacctcatcttggctgcaaactatctgaaca

SEQ ID NO: 78273 - DNA, 354 bp, Zea mays
ccgaaaaaaaggagagagaacacacacacacaaaccccaatcccctgcggcggcgatggacccgtcatcggcgggctccggcggcaactccctcccgtccgtcggccccgacgggcagaagcggcgcgtgtgctacttctacgagccggatgtgggcaactactactacgggcatggccatccgatgaagccgcagcgcatccggatgacgcactcgctgcaggcgcgctacggcctcctcaaccagatgcaggtgtaacgccccaacccggcccgcgaccgcgacctctgccgcttccacgccgactactacatcaacttcctgcgctccgtcacgccggagactcagcagga

SEQ ID NO: 78274 - DNA, 424 bp, Zea mays
gtgatgattaatctcagcatactgtttaagtttccccatgcttcaatgtctgcatccaacactggtggtgcctgggacaacgccaagaagtacattgaggctggagtttcagagcatgccaggacccttggcccaaaaggttctgaccctcacaaggcggctgtcattggtgacaccattggagatcctctcaaggacacgtctggcccttccctcaacatcctcatcaagcttatggcggttgaatcccttgtcttcgcccccttcttcgccgcccatggtggcattctcttcaaatggctctaagccagcgagagacgcaggataaaggccgtagttttgcaaggcgagtagagcagtatgtcagtaatacagcatctatggcatgtgcttttgctcgtccagttcatgagccccgttgtgt

SEQ ID NO: 78275 - DNA, 401 bp, Zea mays
cagaagagccaattccttacttgatttcaaaggatggccctgaacacgttggcaagtttttgtatctagaacgagtggaatacatcatgtggaacacatatgatgtgcatttctacgcatcttttgctctccttgatttgttcccaaaaatagagttgagtatccaacgtgattttgccaatgctgtgctgtatgaagatcggcgcaaagtaaaatttttggctgatggtacatccggaatccgcaacgctaaaggtgcagtgcctcatgacctcggtacgcatgatccgtggcatgaaatgaatgcatataacatacacgatacaagcaaatggaaagatttgaaccccaaatttgtgctccaaatatacagagactttgctgcaacaagtgatatgcaa

SEQ ID NO: 78276 - DNA, 357 bp, Zea mays
ccccatcgccccataccacagcgcgacagtgagtacagcatcagcagctgagagcgtgagagcgtgcgaagcaggatggatgacacgaataagccgatggcggttgtgagcggcagcggcgggatgctgaacccctgggcggagcccttcgtgccttccggggcgcggtaccgctgcctgcggaccgtggaggcgacgcctgagcacgaggtggaggacttctcccccgagtggtggcgcctggtgtccgcctcaccggccttccgcgaccgctggctgcgcgagtactgcgcgctcggcctactcgacgccgaggacgacctgtacgacgacgtcgacagcttcctccccgacgac

SEQ ID NO: 78277 - DNA, 444 bp, Zea mays
ctcacgaagagtcgctctcctgcgtccacgcctcgcttgcggcgactagggcgactgccgccgccgcccttcgcccagctgcccaggtcttcgtcgggcgctttaccggtgaagagcgcccaccataccagattggccaccagaggattgctacatttgggaaggatgagcaaaggccctgttccattcgccaacattgggaagagagcaaaagatctcttgtacaaggactacaactttgaccaaaagttttctttgtcgacatgttctaactctggtttgaatctcacagccactggtgtgaagatcaatgaagacttcattggtgatatacggacacagcataaaagcggcagaaccactgttgatgtcataatcgatagtgattctaaagtgtcaaccacagtcactgttgatgaagcactaactggtttgaagacttca

SEQ ID NO: 78278 - DNA, 282 bp, Zea mays
ccgcctcatagtctaaaatcttgtgaggatacgtatcatctgaagagcaagctggtacttggaatctcaagtcccaggtcaagaacaggtaccgcaggatgaggcgcatggaggatgccatgacgagttcgtgagagatctaggccgtcgtctcccagtcaactttgggttgctggaccgttgtctccttattttgtatttatttatttattttgtatagaactcatgttatgtagtaaagatgtgacattcgatcttgtgccatgattcatcatatgtgtg

SEQ ID NO: 78279 - DNA, 372 bp, Zea mays
atgcgatgctgaagcgcgcgctcgtgaagctccgagcgaagcaccctggcgcgaggatcatctatggcgattacttcacgccaatcatccagttcatactccagcccaagaaattcgggttttacaaacaaccaccaagggcatgttgtggcgcgcctgggaggggtccttacaatttcaacctgacagcgaagtgcggtgagcctggtgcctccgcttgcgctgatcctaagacgcactggagctgggatggtattcacttgacagaagccgcgtatctgcacattgccagaagctggcttcatggaccgttcgcagaccagcctgttgtacaagcaccttgagttgagtacagtacacccagcctctcct

SEQ ID NO: 78280 - DNA, 450 bp, Zea mays
  unsure (1)..(450): unsure at all n locations
ccaagttcactcctgagcaggctaaactggtgaagggctcggcagactacatcggtatcaacgagtacacatccagctacatgaaggggcagaagctggtccagctggcgcccagtagctactctgccgattggcaggttcaatatgtttttgcacgcaatggcaaaccgattggaccacaggcgaattctaagtggctctacatcgccccgacggggatgtacgggtgcgtgaactacctcaaggagaagtatgggaatccaacgatctacataacggagaacggaatggaccagcctggaaacttgacccgagaccagtacctgcgcgacgccacgagggtgcggttctacaggagctacatcggccagctgaagaaggccatanaccaaggagcgaacgtggctggctacttcgcctggtccctcctccacaacttcgagtggctgg

SEQ ID NO: 78281 - DNA, 388 bp, Zea mays
  unsure (1)..(388): unsure at all n locations
catcgtcgacgctgcttctgggaagacgttcccgacgctggacccgcgcaccggcgaggtcatcgcgcgcgtcgccgagggcgacagcgaggacatcgaccgcgccgtggccgccgcccgcagggccttcgacgagggcccgtggccgaggatgaccgcctacgagcggtgccgcgtgctgctgcgcttcgcggacctgatcgagcggcacgcggaggaggtcgcggcgctggagacgtgggacaacggcaagacgctggcgcaggcggcgggggccgaggtgcccatggtggcgcggtgcgtccggtactacgccgggtgggcggacaagatccacggcctggtggcgccggccgacggcgcgcancacgtgcaggtgctgcacgag

SEQ ID NO: 78282 - DNA, 431 bp, Zea mays
ataatccgcgcctctacatttcttctctctctgctcctccgcctccgcctccgcctgatccatccaagacagggatcgccatgtcggactcggaggagcaccacttcgaatcgaaggccgacgctggggcgtccaagacctacccgcagcaggctggcaccgtccgtaagaacggcttcatcgtcatcaagaaccgtccctgcaaggttgtggaggtttctacctccaagactggtaagcatggccacgccaaatgccactttgtcgccatagacatattcaatgggaaaaagcttgaagatattgttccttcatcacacaactgtgacattccgcatgtgaaccgtactgagtatcagctgattgatatttctgaggatggatttgtgagccttcttacttcagatggcaacactaaggatgatcttaga

SEQ ID NO: 78283 - DNA, 358 bp, Zea mays
tgcacaaagcgcctagcataagcatacttcccgaagcactcttgcaatccactgagttctgtttgttgagacgcatagagctagctgctagcgtcgacaatgtcgctcgtgaggcgcagcaacgtgttcgaccccttctcgatggacctctgggatcccttcgacaccatgtgccgctccatcgtcccgtcggcgacctccaccaactccgagactgccgccttcgccagcgcccgcatcgactggaacgagacgcccgaggcgcacgtcttcaaggccgacctccccggcgtcaagaacgacgaggtcaaaggtcaggtcgaagaccgcaacctgctgggtcacagccgccagcgca

SEQ ID NO: 78284 - DNA, 453 bp, Zea mays
cagagaagcaaatgacacctgacgcatgtgctccattgattgccaccctgccattggaggtccgcacaaagataggtggtttcattagagctgtattttctgttttccaagacttggatttctcatttcttgagatgaacccattcaccttggtaaatggtgaaccgtatcctctggatatgagaggagaactagatgacacagctgctttcaaaaacttcaataagtggggcaatattgtgtttcccctaccatttggaagagttctcagtccctccgaaagttttatccatgaactggatgagaagacaagtgcttctctgaaattcacggtactgaacccaaaaggacgcatctggacaatggttgcaagtggtggtgctagtgtcatatacgcagacactgttggtgaattgggatatgcttcggagctaggaaattatgcagagtaca

SEQ ID NO: 78285 - DNA, 415 bp, Zea mays
gaagaggaaggcatgccggcgttcgcgctcgtcaacaaggccacggggctcgccatcaagcactccctcggccagtcccacccggtcaagctcgcgcctttcaacccggaccaggaggacgcgtcggtgctgtggacggagagcaaggacgtgggcaagggcttccgctgcatccgcatggtcaacaacacccgcctcaacttcgacgccttccacggcgacaaggaccacggcggcgtgcacgacggcaccgccgtcgtgctctgggagtggtgcaagggcgacaaccagagctggaagatcctgccgtggggtcccgaggccaactcctccgcggcccacgcgggaggcccgcacgccgtgcgcgtcttctgcaaggccggcggcgaggactacagcctcacggtgcgcaacg

SEQ ID NO: 78286 - DNA, 421 bp, Zea mays
gttcgacgtcatgggcgtggagaccgtcctcgtcgcgcgcaccgacgccgtcgccgccacgctcatccagaccaacgtcgacgcgcgcgaccaccagttcatagtcggcgccaccaacccgggcctcaggggccagagcctcgcggccgtgctctcggccggcatgtcggcgggcaagagcggaagggagctccaggccatcgaggacgagtggctggccgcggcgcagctcaagaccttctccgagtgcgtcagggacgccatcgcgggcctcggcgtcgcggcccaggagaagcagcgcaggctccaggagtgggaccgcgccacgggcggctacgacaggtgcgtgtccaacgaccaggcgcgcgacatcgccgccagcctcggcgtcacgtccgtgttctgggactgggacctgccg

SEQ ID NO: 78287 - DNA, 404 bp, Zea mays
gacaagaacagatacccgagtcgacgaagcaaccgctcacaatcccaatctcccgcgtcactcataacccgaagtaacaaccgtcggtccgaccaacaatgtcgctgattcgccgtggaaacgcattcgaccccttctccctcgacctctgggaccccttcgagggcttcttccccttcggctccggcgacgtccgcagcctcgttccctcgttgccgcgcaccagctcggagaccgcggcatttgccggcgcgcggatcgactggaaggagacccccgaagcgcacgtgttcaaggcggacgtgccggggctgaggaaggaggaggtcaaggtggaggtcgaggacggcaacgtcctgcagatcagcggcgagcgcaacaaggagcacgaggagaagaacgac

SEQ ID NO: 78288 - DNA, 97 bp, Zea mays
agcactcgttgcaatccactagagttcagtttgttgagacgcagacagctaggtgcgatcgtcgacaatgtcactcgtgaggcacatcaacgttttc

SEQ ID NO: 78289 - DNA, 132 bp, Zea mays
gacccacgggcgcgctcaagaactcaatttcgatctcagttgaaagcaacccatcctcgtttcctccgtctagcagcctctcagcctcatggccaggatcaagatcgggatcaatgggtttggcaggatcgg

SEQ ID NO: 78290 - DNA, 408 bp, Zea mays
cggacgcgtggcgactgcatctctggtctcccacgcctataatcccattcccctccttcaaatccctgcggcgatttcgattcttcccttctatctccaggtatacccatcggagcagcactgacaaaaattctccagatatggcaagcaaaaggattcagaaggaactcatggatctccaaaaggacccaccgacatcatgcagtgcagggcctgctggagaggatctattccactggcaggccacaatcatgggtcctagtgacagcccctatgcaggcggggttttctttattaatatccattttcctcctgactacccctttaagcctccaaaagtgaacttccaaacaaaagtttatcacccaaacatcaactctaatgggagcatttgccttgatatcctca

SEQ ID NO: 78291 - DNA, 380 bp, Zea mays
  unsure (1)..(380): unsure at all n locations
ggcaccacacctcttcctcctcttcctcctcctagcacagctagcgcctgctccccttcgtctgtgatcatgtcttgcagcagcggcaagtgcaactgcggctccagctgctcctgcggcagctcatgcaactgcatgtcccctgacgtggagaccgccgccgccagcagcatcaagaccatggtcctcgctgcgccgaccaccaaggccagcgccggcggcttcgaggcggccaccganggcggcggctgcgactgcaacacctgcaactgcggcaccagctgcggctgctcctgctgcagctgcaactgagccggcccgcccgggccggcgatggggcacgagagttcagaggacgacgacgacgaagccgtataata

SEQ ID NO: 78292 - DNA, 414 bp, Zea mays
ctagcccacggacccaaccaaatcctcctccacctcctccatctccagccccgtccctacccagctcgtgtaacctcccgatgtccgggggcggaggcggcgcaggcgcgggctcgtcgtccggcggcggcggcggaggtggagggggcggcagggagggcgactgggactgcggcagctgcggcaaccggaactacgccttccgctcgctctgcaaccgttgcaagcagccgcgcctcctcgtcgaccctaacaccccgcgcgactccaagtggctaccccgtgccggggactggatctgcaccgaaagaactgcaaaaagtgtggcctatccaaggaggaagcagcaatgccagcattgcaaatggcacggatggctatgccagcttatgcaacttatatcgcaagactaca

SEQ ID NO: 78293 - DNA, 413 bp, Zea mays
cagcattgctgaggcctgggcgtcttgatcagcttatctatattcctctgcccgatgagcagtccaggcttcagatcttcaaagcctgtctcaggaagtctcctgtggccaaggatgttgacttgaatgctctcgccaaatacacccagggtttcagcggtgcagatatcacagagatctgccagcgcgcgtgcaagtatgccatcagggagaacatcgagaaggatatcgagagggagaggcgcaggaaagacaaccccgaggctatggaggaagacgaggtagacgacatcgctgaaatcaaggctgctcacttcgaggagtccatgaagtacgcccgtcgcagcgtgagtgacgccgacatccgcaagtaccaggccttcgcccagaaactccagcagtcccggcgggtt

SEQ ID NO: 78294 - DNA, 310 bp, Zea mays
cgacacgcctcagacaattcggacccgctggcccgtccgccactctctcggcctcacgtcactaaagcgcatcagttctcaagtgccagtcgcagagaagtctcaagaagccactgtccttcacatgcacggtcgccagttccacatgcactggatcatcggtgaaggtgtacaggccagtaacatacgcgcatccgtctcagcatacgaggaagagaatctgccacgagaactacatggacacagacctgtggggcccttcaatgtcagttagcagtagcatgtatatcacagtgatgcagaccccgct

SEQ ID NO: 78295 - DNA, 415 bp, Zea mays
ggtcgaccacgcgaccgcattaatccagagctggcttatggagcatctggttcacctccaactatcccacccaatgcaaccctgcagtttgatgttgagctgctttcatggaccagtgtcaaagacatttgcaaagatggcggcatattcaagaagatccttaaagagggagagaaatgggagaacccaaaggatcctgatgaagtacttgtgaaatatgaggcccgtctggaagatggtactgttgtatccaagtctgagggggttgagtttacggtgaaagatggctacttttgtcctgccctggccaaagctgtcagaaccatgagaaaagcagataaggtgctccttacagttaaaccacaatatggagttggtgagaagggttgaacagcagccgggagaggaaggtgct

SEQ ID NO: 78296 - DNA, 427 bp, Zea mays
ggcagcggcggcggcggcagcaacaacatacaccgctggccgtggcgccatgggcatcctggaccacatgtcgcatgtgtgcagcatcacggagacgaaggaggcgctcaagctcaggaagaagcgaccgctgcagacggtgaacatcaaggtgaagatggactgcgaaggttgcgagcgtcgcgtgaagagcgcggtgaagtcgatgcgcggcgtgacgagcgtgacggtgaacgcgaagcagagcaagtgcacggtgaccgggtacgtggagcccgccaaggtgctggagcgcgtcaaggccaccggcaagaacgccgagatgtggccctacgtgccctacacgctcaccacctacccctacgtcggcggcgcctacgacaagaaggctcccgcgggcttcgtccgcagcgcgccgcaggccatg

SEQ ID NO: 78297 - DNA, 408 bp, Zea mays
gcagcggtggccgctgccggcgccgtccatccccaccgcacaccaccgcctccaccacgccaccgactccgcctctcgctcccccctcgccgcgccgcccgaacgccacgatgcgtcacctcctcctctcccgcttcctccgccgcggtggcggcagcggcatccccaacggccactaccaccacctccccctcctccgcgccctctcctcctccccctccccggtctcctcggacgcagagctccgcaagtacgcgggctacgcgctgcttcttctcggctgcggcgccgcgacctactactccttcccgttccccgccgacgcgctgcacaagaaggccgtgccattccggtacgcgccgctgccggaggacctccacgccgtctccaactggagcggcacgcacg

SEQ ID NO: 78298 - DNA, 354 bp, Zea mays
gtgggttggcttctcctccccctccggttcgggttcgggttcgtgaggttctccggggttcggtttcgtgggtgagcggatcgagatggcggcgtcggatgttgagtaccgctgcttcgtcggcggcctcgcctgggccacggacgaccactccctccacaacgccttcagcacctacggcgaggtcctcgagtccaagatcatcctcgatcgggagacgcagaggtcccgcggcttcggcttcgtcaccttctccacggaggaggcgatgcggaacgccatcgagggcatgaacggcaaggagctggacggccgcaacatcaccgtcaacgaggcccagtcccgcggcggccg

SEQ ID NO: 78299 - DNA, 417 bp, Zea mays
cgcaccacaagcgagcgagggacccggggcggaagaagagagagaagacgtctctctcctctcggcgtccccgttccccaacctctcgtctgctgcctgcctgcctgcctgcctgcaaaaaggagtttgtcatggcgtctaagcgcatcctcaaggagctgaaggacctgcagaaggacccccccacatcatgcagtgcaggtcctgctggtgaggacatgtttcattggcaagcaacaattatgggaccacctgacagtccctatgctggtggtgtttttttagtgaacattcatttcccgccagattaccccttcaaacctccaaaggtttctttcaagacaaaagtcttccatcctaatatcaacagcaatggaagtttatgccttgacattctcaaagagcagtggagccctg

SEQ ID NO: 78300 - DNA, 393 bp, Zea mays
  unsure (1)..(393): unsure at all n locations
tcgacccacgcgcccgggaactggcagaggttttggaggaggtgctggtggaggaggtggactaggcggtggtgccggtggcgggtttggcggtggcgcaggangaggtgttggtggaggtggtggccttggtggcggtgcgggaggcggtgctggcggtggtgcgggagctggcggtggtctcggtggtggtgtaggcagtggtgtcngtggtgggtttggaggaggcaaaggcggaggctttggtggtgggattggtgggggcggcggcgcaggtggtggtgccggtggtgggttcggangaggcaaaggtggcggttttggtggtggcaagggaggtggtttcggcngaggcgccggtggtgggttcggangaaggcaaagtggtggttt

SEQ ID NO: 78301 - DNA, 459 bp, Zea mays
cggacgcgtgggctctgctaagcgaagcgaagcttcaagctagtctcggcggctctagaagacgatgggcaaggacgacgtgatcgagagcggcgctggcggcggcgagttcgctgccaaggactacacggaccctcccccggcgccgctgatcgacgcggcggagctggggtcctggtcgctgtaccgcgccgtgatcgccgagttcatcgccacgctgctgttcctgtacatcacggtggccaccgtgatcgggtacaagcaccagacggacgcgtcggcgtcgggcgccgacgcggcgtgcggcggcgtgggcgtgctgggcatcgcctgggccttcggcggcatgatcttcgtcctcgtctactgcaccgccggcatctcggggggccacatcaaccccgccgtcaccttcggcctcttcctggcgcgcaaggtctccctggtgcgcgcgctgct

SEQ ID NO: 78302 - DNA, 453 bp, Zea mays
accacgtgcgctccacgcctcctccaggaaagcgagagcttctgcataagaacaacaaatcaaaagcgtgatcagctcggtgccaacaaaacctcaacaaccaagtttcatgtctgatctcgacgtccagcttccatctgcctttgatccgtttgctgaggcaaatgctgaggactctggtgctggtcctggaacgaaggattatgtgcatgtgcgcatccagcagcgcaacggcagaaagagtctgactacagtccagggtctgaagaaggagttcagctataacaagatcctcaaggatctgaagaaggaattctgctgcaatggtactgtagttcaggacccagagctaggccaggtcattcagctccaagggtgacagcgcaagaatgttgctactttcctagttcaggctgggattgcgaagaaagagaacatcaagaatcacgggtt

SEQ ID NO: 78303 - DNA, 429 bp, Zea mays
caaacgcgtccgcaaacactcaagtcctcgtcccttccgcaccctcctcttcaactccagccgctttcaccgccaatcagaggtccaccaccacatctcttcgcatccaaccgccccgtaggatcacagaaaacggggatggcgagcggcggggcggtgagggaggtgggctcggcggccgagctgcaggcggcggtggccggggcgcgggcggcggcggtgcacttctgggcgtcctggtgcgaggcgtccaagcagatggacgaggtcttcgcgcacctcgccgtcgacttcccccacgcggccttcctccgggttgaagctgaagaacaacctgaaatatcagaggcgtatggagttacagcggtgccatattttgttttctgcaaggaaggcaaaactgtcgatactttggagggagcaaaccca

SEQ ID NO: 78304 - DNA, 389 bp, Zea mays
catagctacctactactcaagtatccatccttattgagtacagtgttgatccatggactcggaaggagttgtagcagcaaaggtggcagatgagactactaaaccggcaatccaagaagacggcgccgagagcaaggccgggatgactgatctgctgatgctgaccgacaagtcgcagctgcaggcgctggcgatgctgctgcggaacaacgaggagctcatgatgagccaggcgatcaagtcggagacggagcgcattgagtacctcaagacggtgagcgactgctacacgcggacgatgaagctcctcgacgattccatggcggccaggaccacgtacgagcgttcgggcggaacgaagagcctcgtcgcccgggacatggacgact

SEQ ID NO: 78305 - DNA, 373 bp, Zea mays
  unsure (1)..(373): unsure at all n locations
agcatcagcagagatcgcagcggcactccatggtccaggcccagcagcctcttcggctcttcgttgggggtgcgtggacaccggaaattgcctcggggattgcgttcctgatctaagcccggcatgaagggctgctcagagcgtttgctgctcctgctgctgctggcatcgtcgttgttactgtccgtcgtggttgccgcgcagcagacttgccctgccgacctcgacagcaaatgcgacggtggcgcgcctgatgactgggagggggaattcttccccggcgtcncgaaaatcaagtatgagggtccaacaagcaagaaccctcttgcttataagtggtataacaaggaggaagtcattctcggaaagaaga

SEQ ID NO: 78306 - DNA, 415 bp, Zea mays
caaaggtcttgatgtcattcagcaagcacaatctggtacaggaaagacagcaaccttctgttctgggatcttgcagcagctggactatggcctggttgaatgccaggccctggtccttgctcccacccgtgagcttgcacagcaaatcgagaaagtcatgcgcgcgcttggtgattaccttggtgttaaggtccatgcatgtgtgggaggaacatccgtccgtgaggaccaaaggattcttggcagtggtgtgcatgttgttgttggtacacctggtcgtgtgtttgatatgctgcgcagacagtccctccgccctgataacatcaagatgtttgttctagatgaagctgatgaaatgctttctcgtggtttcaaggatcagatttacgacatcttccagcttctcccagcaaag

SEQ ID NO: 78307 - DNA, 409 bp, Zea mays
cagagatcatgaaagttgcagatttcatcaacgaaattcgtcaggctggcagaaatggagaactttcaggtgagactttcatattcttcaacaagcagatcaaaggaaacaagagggagatcatacagcttggtgtaccgttatttcaacctaccacagaggatgctaattgtcacacagaaccaatcccccttgtcctgcaggctgtcattgaccaccttgttctttggcgtttaataccagaaagcaggaaaccaaatagtgtcgtcatcaacttcttcgatgaggatgaacattcgcagccctacttcaagcctccccatcttgacaaccccatttgcactcttctgctgtctgaaaccacgatggcatttgggaagtcacttgtcactgacagcaacggtaacta

SEQ ID NO: 78308 - DNA, 423 bp, Zea mays
ccatcagctcacactccggcagccgagcgatcgagctccccggtcgctagcacagccggccactgcacacgacggtgctggtaggttgcaagcacttgcaggatggcgcaggtcgctaagacgcttctccttgtggccctggtggtcgtgtcggcggtggagctgtgccgcgccatcgagttcgacgagcgggacctggcatcggacgaggcgctgtgggacctgtacgagcggtggcagacgcaccaccgggtgcaccggcaccacggcgagaagggccgccggttcgggaccttcaaggagaacgcgcgcttcatccacgcgcacaacaagcgcggcgaccgaccctaccgcctccgcctgaaccggctcggcgacatgggccgtgaggaattcggttccgggttcgccgactcccgcatc

SEQ ID NO: 78309 - DNA, 411 bp, Zea mays
acgacatcgtctcttcgtccccacgagcaaccgataatccgccggcgctgagatgttggtttatcaagacctcctatctggcgacgagctcctgtcggattcattcacctacaaggagctcgagaacggcgtcctgtgggaggtcgagggaaagtgggtcacccaaggtcctgttgatgtagacattggtgccaatccatccgccgagggtggtgaggatgaaagcgttgatgacacagccgtgaaggtggttgatattgttgacacattccgtctacaggagcaacctccttttgacaagaaatcatttgtctcttacataaaaaaatacatcaagaatctcactgctgtgttggagccagagaaagcggatgagttcaaaaagggtgtcgagggtgcaaccaagtttct

SEQ ID NO: 78310 - DNA, 420 bp, Zea mays
acagcctccaaagccactctcaaacccccgcttccagaaccttctcgaagctccccgccgcctcctccactcgcaccgatggcgaaagaaccaatgcgcgtgctcgtcactggcgccgcacgataaattggatatgccctgattcccatgattgctaggggtgttatgcttggtgcagactaacctgttactctgcacatgcttgacattccgccatcagctgaagcacttaatggtgttaagatggacttggatgatgctgcgtttcctcttctgaagggagttgttgctacaagtgatgttgtggaagcctgcactgaggtcaatgtggccctcatggttggtggattctcaggaaggacagaatggacaggatagatgttatgtcgaaaaatgtttcaatcgacatatcccaagcat

SEQ ID NO: 78311 - DNA, 409 bp, Zea mays
gcgtactgtctgtgcgaaggcgaccattccttcttcgctccttcgccgccgctatggttaagtactcgcaggagccgggcaaccctaccaaatcggccaaggccatgggaagggacctgagggtccacttcaagaacacaagggagacagcttttgcgcttcgcaagctgcctttgaccaaggctaagcgataccttgaggatgttattgctcacaagcaggcaattcccttccggagatactgtggaggtgttggtcgcaccgcacaagcaaagtctcgccactccaatgggcagggtcgctggcctgttaagtcagccaggttcatattggatttgctgaagaatgctgagagtaacgctgatgtgaaaggcttggacgtggacaacctctatgtttcacacatcca

SEQ ID NO: 78312 - DNA, 432 bp, Zea mays
  unsure (1)..(432): unsure at all n locations
agtggagtcaccacagaatcaaagaaaagctttcccccgatcctctcgcggacaccagcgatgggttcccgctacgaggtggaggtcaccgtcggctccgcccgggacctcaagaacgtcaactggcgcaacggcgacctcaagccctacgccgtggtgtggatcgactccggcagcaagtgctcgacccgcgtcgacctcgacaacggcgagagcccggcgtgggacgagaagctgctcgtcccgctcccccccgaacctcccaaccgaaggatggagtgggttgtacagcggcctcaagccctctctcatcggcactgccgcgtcgcagggaatctattactacttctaccagatcctcaagaacaaggtggaagatatagcggttgctcgtancaagaaggccttggggatggtactgtcgggatgctt

SEQ ID NO: 78313 - DNA, 426 bp, Zea mays
  unsure (1)..(426): unsure at all n locations
accttctccaacctccgtttctaatccgcgctgctaatcccactcccagtcccagctcgtccgctgagatggacagtagcagcctcaaatccgcgcagctcctggagctgatgcgccagcacctggccaccgatgccggcaaggaggtcaccaagaaggtcggcctcgtctaccagctcaacatcgcccccaagaagatcggcgttgatgaggagatcttcgtggtcgacctcaagaagggcgaggtcaccaaagggccgtaccagggaaagccggatgccactttctccttcacggacaacgatttccttggaatcgccaccggcaagacgaatccgcagattgcattcatccgaggggcgattaanatcaaggggagcatcagtgcggcgcagaagtgtacccctgacatcttccccaagcctg

SEQ ID NO: 78314 - DNA, 416 bp, Zea mays
accacgcgtccgcccacgcgtccggagagcacgagacgcccctctgcttccttttctctgtcgctcaaaagttgctggagccctcttctctctctcctctccgagccccaaccatggatgaggcgcaagttgtggagtcaaaggatggaaccatctcagttgcttctgcatttgttgctcatcaggaagctgtacaagacagggatcacaaattcttgacaaaagcagtggaagaagcataccgaggagtcgattgcggcgatggaggtccatttggagcagttgtcgtccgtaatgatgaagtggttgttagctgccataacatggttctgaagcacactgaccctactgcgcatgctgaagtaactgcaattagagaggcttgcaaaaagctcgggaaaatcgagctctctgac

SEQ ID NO: 78315 - DNA, 441 bp, Zea mays
gggtcgagtcacgcatccggacaggcagccaaagccacccaccgcttttaccgatcggcgttgccgccaccgctagcattgtcggcttcagctccatccaaatccaccgccagcaagcaagccggcgccatgggtctgccgatgaggagggagagggacgcggaggcggagctgaacctgccgccggggttccggttccaccccaccgacgacgagctggtggagcactacctgtgccgcaaggcggcggggcagcgcctccccgtgcccatcatcgccgaggtggacctgtacaggttcgacccctgggacctgccggagcgcgcgctcttcggggcccgcgagtggtacttcttcacgcccagggaccgcaagtaccccaacggctcccgccccaaccgcgccgccggcaacgggtactggaagggcaccggcgccgac

SEQ ID NO: 78316 - DNA, 368 bp, Zea mays
  unsure (1)..(368): unsure at all n locations
cccacgcgtccgcccacgcgtccgacatgaagctcagggacgacctcgagaggctcaagaagatcaggaaccaccgtggtctgcgtcactactggggcctccgtgttcgtggccagcacaccaagaccactggcaggcgtggaaaaactgttggtgtctccaagaagcgataagctacatatctatcgacaaatctcagatgtactagtgttggttcatgttcanactgtcttgatgaagggtttctgttgggacagtttcctgaaattatgttttgccctaagataatcctgcagttatggaaccttaatataatgtatcctgcaatttgtttttttgcaacttataagagtaattttatttgatga

SEQ ID NO: 78317 - DNA, 431 bp, Zea mays
aaccacatcaagaagcgtagtcgtcgccggaaggaactgcgcggagcaagatgtcgtggcaggcgtacgtcgatgagcacctgatgtgcgagatcgaaggacaacatctcagcgccgccgccatcgtctgtcacgacagcagcgcttgggcgcagtccgagagcttccccgagttaaagcctgaggacgttgctggtatcataaaggactttgatgaacctggtactcttgcaccaactggtcttttcgttggaggtacaaagtacatggtgatccaacgtgaacctggagttgtcatccgatgaaagaagggcactgggggcattactatcaagaaaaccggcatgtccttgattactggtgtctacgacgagccaatgactccagggcaatgcaacatggtggtggagaagctcggcgataacctgatc

SEQ ID NO: 78318 - DNA, 418 bp, Zea mays
actcactgctcgttgccggctgcccccgcggccccggccagtccatcccctcgctcgctccccaactccagcaggcagatcagatacatccatccattcgcggaccggaagtaatcatcaggaaaggaaagggttgaactatgagcgccgtggcggtttcgtcgtcgctgaacccggacgcgccgctcttcatcccggcggcgctgctgcaggtggaggacttctcgccgcagtggtgggacctcatcaccaccactgcctggttccgcgaccactggtcccgcgagcgcgcccatctggacgagatggccgagcagatcgacgcggccggcctcctccccgacgacgaggacctcttctacgacgaccagctcgagcatggccccgtcgccgccgcccttaagacagattcggtgct

SEQ ID NO: 78319 - DNA, 403 bp, Zea mays
agaccgcctcgtcgccgacggctacgcggaggcgtccgacctcgagttccgcgacaggctcgccgcccatttcggccggctcccgcacagctatcagctggatatcaatgttgacaaagcatccgatgtcttggtccaccagaacgtcttagcggaagcaaaggatcctgataggcgccctgcattctatgtccgtttcttgaggattgaagatatggattcagcatacgactccgatgcatctgaagaaggggatgatgatggtgatgatctctctgtaaggcaggacacaccatatactcacattcatgagatagttttctccacaatcgataagccaaagctccttagtcagctatctgcattgctatctgacattggattgaacatcagagaagcacat

SEQ ID NO: 78320 - DNA, 427 bp, Zea mays
tactcaagtatccatccttattgagtacagtgttgatccatggactcggaaggagttgtagcagcaaaggtggcagatgagactactaaaccggcaatccaagaagacggcgccgagagcaaggccgggatgactgatctgctgatgctgaccgacaagtcgcagctgcaggcgctggcgatgctgctgcggaacaacgaggagctcatgatgagccaggcgatcaagtcggagacggagcgcattgagtacctcaagacggtgagcgactgctacacgcggacgatgaagctcctcgacgattccatggcggccaggaccacgtacgagcgttcgggcggaatgaggagcctcgtcgcccgggacatggacgactacgtcgtctacggcctcaacgcgtgcttgcagaacgtccgcaactgctgcg

SEQ ID NO: 78321 - DNA, 388 bp, Zea mays
  unsure (1)..(388): unsure at all n locations
aatttatttttttttttcagattacagagttttattctgggtgtacaaagtttagagatatgacgcacatgtgcactacacgatgtctgtgtcntgcagttgtagtaacaggtagctcttgttacttagtaggcgtcaacgtgatatgaggtggtattattggtggtgcttaagattgtgtttccgaatgggctctggtcgtagcagtccaagttgtcgccgtagctgagaccaaacatgtcgcagtagcgtttgtagaagccgatccggctggcaacacgagcgtcagcgccgtggccgcactcgaggccgccgttgatgatgttggtgaggacgccataccccggcagcctccctgcggccacgtcgtcgggcgaaggcgcccact

SEQ ID NO: 78322 - DNA, 428 bp, Zea mays
agcccccaaggccccaactacccccagtctcggaagagaactatccagaagcgcaagactccaaagccgtcgccttcctatccatcccttcctcgccgcgggggtcgcctgagatcacataaacaatggtgaaggctgttgctgtgcttggtagcagcgatggtgtcaagggcaccatcttcttcacccaagagggagatggccctaccactgtcaccggaagtgtctctggcctcaagcctggcctccatgggttccatgtgcatgcacttggtgacaccaccaatggctgcatgtcaactggaccacactacaatcctgcgagcaaggaacatggagcaccagaagatgagaaccgccatgccggtgatcttggaaatgtgacagctggagcagatggtaatggtctctgcccttctttttctgat

SEQ ID NO: 78323 - DNA, 416 bp, Zea mays
acagagcgtcagagcccgatcccgatccagcgaggcggcgaccctccctcctccccttgcttcgctcgtccagccctgaccacccgcatccccgtcagtcatggcagcggcagcaggcggaggcgcggtgcgtgcgctgtcccagaaggagcaggacatacagatgatgctcgccgccgacgtccaccttggcaccaagaactgcgatttccagatggagcgctatgcctttaagcgccgcaccgacggcatctacatcatcaaccttggcaagacatgggagaaactgcagcttgcagcgagggttatcgttgccatcgagaacccgcaggacatcatcgtccagtccgcccgcccctatggccagcgtgctgtcctcaagttcgctcagtacactggcgctcatgccatcgctg

SEQ ID NO: 78324 - DNA, 407 bp, Zea mays
ccaacctcagcacatcgaggagaagaggagtggccaatggcttcgtcggtggccgccgcggcgagcacattcctgggcacccgcctggcggacccggtgccgcagaacgggcgcatcgtggcccggttcgggttcggcggcggaaagcccaaggctgccgtcccgaagaaggtggcgaagacgtcgatctcctctgaccggccgctgtggttccccggcgccgtggcgcccgactacctcgacggctcgctggtcggcgactacgggttcgacccgttcgggctcgggaagcccgtggagtacctgcagttcgaactggactcgctggaccagaacctggccaagaacgaggccggcggcatcatcggcacccggttcgagtcctccgacgtcaagtccaacccgct

SEQ ID NO: 78325 - DNA, 418 bp, Zea mays
tccttctctccgcttccaagatgtcgaagcgagggcgtggaggttcggctggtaacaagttccggatgtcactgggtctaccagtggcagctactgtgaactgtgccgataacactggagccaagaacctgtacatcatttctgtgaagggaatcaagggtcgccttaacaggcttccttctgcctgtgttggtgacatggttatggcaaccgtgaagaagggaaagcctgaccttagaaagaaggtgatgccagctgttattgtgaggcagcgcaagccatggcgccgaaaggatggtgtctacatgtactttgaagacaatgctggagtgattgtgaacccaaagggagagatgaaaggttctgccatcactgggcccatcggaaaggagtgtgctgatctctggcccaggattgc

SEQ ID NO: 78326 - DNA, 284 bp, Zea mays
cggacgcatgggctctggttgagcatccaatccaatatggacgtggatggaaggtgtactgctgctggtccgtggctgtcgctgtcctgtgtggatgtttcctgtgtcttctacgatatataatgtacttccgtctgtttcgtttcctgtgtacaatctcaatcttgcgggtatcgttcatgtatccctttgaataataacaaataaaatcgggtttgtcacggtaaaaaaattaaaagattcaaaaatcaaaaaaggaagaaaaaataaaaaaaagatatcgt

SEQ ID NO: 78327 - DNA, 391 bp, Zea mays
aagagacgccggcccgtccgcctcactctccgcctcacgtcaccaaggccaatagttttcaagtggcaatggctgaccatggcaaccaagccaacgtccttcaaaagcccggtggccaattccaactgcgcccgattatccccgaaagtgttcgggcccgtaacatatgcccatctgtctcatcttatgaaaggagatttgccacaaggaactacattacccagagcctttggggcccttcaatgtctgttagcggtggcatcaatgtcccagtgatgcagaccccgctctgtgctaatgctcctgctgataaaggaggcaagaacttcatgattgatttcatgatgggcggtgtttcaactgctgtttcaaagactgctgctgctcccat

SEQ ID NO: 78328 - DNA, 412 bp, Zea mays
  unsure (1)..(412): unsure at all n locations
gccagtacccacagtcctacgagcagtcgcacgcaagtgtcaagagacanaacggtcgacatggctcgcacgcaatctgccgtagcggtcgccgtggtggccgcggtgctgctgctggcagcggcggcgacgacctcggaggccgccatcacctgcgggcaggtgagctccgccatcgcgccctgcctctcctacgcccgcggcacggggtccggcccctccgcgtcctgctgtagcggcgtcaggaacctcaagagcgccgccagcaccgccgccgacaggcgcgccgcctgcaactgcctcaagaacgccgccaggggcgtcagcggcctcaacgccggcaacgccgccagcatctcctccaagtgcggcgtcagcatcccctacaccatcagcacctccaccgactgct

SEQ ID NO: 78329 - DNA, 412 bp, Zea mays
acctgcagccacgaactcccgttctccatttccagccatggcggtgtcgatcgagctcaccaaggagtacggctacgtcgtgctggtgctggtggcctatgtcttcctcaacctttggatgggcttccaggtcggcaaggcccgcagaaactacaaggtgttctaccccaccatgtacgccatcgagtcggagaacaaggacgccaagctcttcaactgcgtgcagagggggcaccagaactctctagagtggatgcccgttttcttcgtcatactgctgctgggcggtctgcagcacccgaccatcgccgccggtctgggcggcatctacatcgtcgcgaggttcttctacttcaagggatacgccaccggcgttccggacaaccgtctcaagattggggggctcaactac

SEQ ID NO: 78330 - DNA, 427 bp, Zea mays
ggcacccagacccagcagctattgtggtcgtccctcagccgcgtcgcaccgcatcgcattctacgattcgaagctctctctgctcgcagccatggcgaagaattacccaaccgtgagcgccgagtacagcgaggccgtcgagaaggccaggcgcaagctccgcgccctcatcgccgagaagagctgcgcgcccctcatgctccgcctcgcgtggcactccgcggggacgttcgacgtgtcgtcgaggaccggcggtcccttcggtactatgaagtgcccggcggaactggctcacggcgccaacgcggggctggacatcgcggtgcggctgctcgagcccatcaaggaggagttccccaccctctcctatgccgatttctaccagcttgccggagttgtggccgtcgaggtcaccggtgggcctgag

SEQ ID NO: 78331 - DNA, 414 bp, Zea mays
gaagggtttgatactacgactggcatccactggcagaaataataagagaattttccactgaacgcaatcatacatggagcatatatgctgttagctggagtcctgacaataaacaggttcgaatagtttctgctgataaatctgcagaagtatgggatatcatcggaagatgcaagtgggaaattgactcgaactttgtcttgccctggtacaggacgtgtgtatgatatgcttgttggttgtctctggaagaataaccacctcatgacactctctcttggtgggacatttaatgtgtactctgcacgcaacccagaccagagaaccagttacatttgcaggacatttgaatactgttacttctttggtctactatcctcaaagtagcccaacaactatacgatctactagcta

SEQ ID NO: 78332 - DNA, 434 bp, Zea mays
  unsure (1)..(434): unsure at all n locations
cactccttttgctcggaacgcacacaccgcccgtccccgatctccgatcccctcgtcgatccaaagatgcagatcttcgtcaagaccctcactggaaagactatcaccctcgaggtggagtcttctgacaccattgacaacgtcaaggccaagatccaggacaaggagggcatccccccggaccagcagcggctcatctttgctggcaagcagctcgaggacgggcgcacacttgccgactacaacatccagaaggagagcaccctccaccttgttctccgcctcaggggaggcatgcagatcttcgtcaagaccctcactggaaagactatcaccctcgaggtggagtcttctgacaccatcgacaacgtcaaggccaagattcaggacaagganggcatccctccagaccagcagcggctcatttttgccgg

SEQ ID NO: 78333 - DNA, 396 bp, Zea mays
gatgtataccataatgcccgtgcatgccttacgttgcgtgtggcgtgtgagaagcttaagaagatgctgagcgccaacccagacgccccactgaacattgagtgcttgatggatgacaaagatgtgagacggtttattaagagatacgagtttgaacacatcagtgcacctgtgctggtacgtgtcaaaggacccttggagaatgccttggctgaagctggcttgacaactgaaaatgtgcactttgttgaggttgtcggatctggttctcgtgttccagccataatcaagataatcactgatttttttgggaacgagccgatacgaaccatgaatgcaagcgagtgtgttgcgtggggctgtgctctccaatgtgctattctcagccccactttc

SEQ ID NO: 78334 - DNA, 427 bp, Zea mays
acaataaggtaaggggtgacgaaaatggctccaacgaccgccaccaaggacgacagtggctacggcgacgagcgccggcgcgagctgcaggcgttcgacgacacgaagctgggggtgaaaggtctggtggactccggcgtcaagtccatcccgtccatcttccaccacccgccggaagccctgagcgacataatttctccggcgcctctgccgtcgtcgccaccctccggcgccgccatcccggtggtggacctctcggtgacgcggcgcgaggacctagtcgagcaggtgaggcacgcggccgggacggtgggcttcttctggctggtgaaccacggcgtggcggaggagctgatgggcggcatgctccgcggggtgcgccagttcaacgagggccccgtggaggcgaaacaggcgctctactcca

SEQ ID NO: 78335 - DNA, 428 bp, Zea mays
gaaaacctccaaccctagccgcgatccgacaacgcctccatccctagccgactgctgcaagcttcagagctcaagagtcagggcgccatggcgacagagacggagaccttcgcctttcaggctgagatcaaccagctgctctcactcatcatcaacaccttctattccaacaaggagatcttcctccgggagctcatttccaactcttccgatgcgttggacaaaatcaggttcgagagcctcactgacaagagcaagctcgatgcgcagccggagctgttcatccacattgtaccagacaaggcttcgaacacgctctccatcatcgacagcggcatctgcatgaccaagtccgaccttgtcaacaacctcggtaccatcgccaggtccgggaccaaggagttcatggaagcccttgctgctggcgc

SEQ ID NO: 78336 - DNA, 408 bp, Zea mays
ccacctctgagagaagatgacagggatgggcattatgtttttgctgttggagataacctcacatctcgctataagatcaatgcaaaaatgggagaaggtacctttggtcaggtgttggagtgttgggacaaggaaaggaaagaaatggtggctatcaaaatcattaggggcattaaaaagtacagggatgctgcaatgatcgaaattggcatgctcgagcagcttggtaaatatgatgaaagtagatctagttgtgttcaaattcggaactggtttgactatcgtaaccatatctgtattgtctttgagaggcttggaccaagcttatatgattttctgcgggaaaacagttaccgctcattcccaattgccctagttcgggagattgccaaacaactgttggaatgt

SEQ ID NO: 78337 - DNA, 420 bp, Zea mays
  unsure (1)..(420): unsure at all n locations
agcgcctccaccaccccgaccccgccgtcgcaacaggccaagacgcagcagtagaagcaccaccaccaccaccaccggcacacgaccccggcggcagcgagtgccggttctgcgagatgacgcggcagcaccagccgcagtgcgcgcggcggctgccgaagcgcatcatcctggtgcggcacggcgagagccagggcaacctggacatgtcggcctacaccaccacgcccgactaccgcatcccgctgacggcgctgggcgtggagcaggcgcgcgccgcggggcagcgcatccgcgacgtggtggcgggcagcggcaactggaaggtctacttctacgtgtccccctactcgcgcacccgcgccacgctgcgcgagatcggccgcgccttcncgcgggaccgcgtcatcggcgcccgcg

SEQ ID NO: 78338 - DNA, 389 bp, Zea mays
  unsure (1)..(389): unsure at all n locations
agacacctccgccacctccaccctcgaatcgttccccaccatggcgtcgcagggatcctccgtcttcgccgcactcgagcaggccccggaggaccccatcctcggagtgaccgttgcctacaacaaggatcccagccccgtgaaggtcaacctcggggtcggcgcctaccggaccgaggaagggaagcccctagtgctgaacgtggtcaggcgcgccgagcaaatgttgatcaataatccgtcacgtgtcaaggagtacctaccaatcaccggtctggctgaattcaataagctgagcgctaagcttatctttggcgctgacagccctgctattcaggagaatanggttgctaccgtgcagtgcctatcgggtactggttctttaagag

SEQ ID NO: 78339 - DNA, 429 bp, Zea mays
aatctacttcttccccgcgctgcctgctgcctgctcgagcttggagatggcgttggtgcggcgatgcctctgtggatccgaggaagactgcagagcgcttttgggcatggaaaatctccggctgttctcctacagagagatcagagcaggcacaaacaacttcgatcagagtaacaagcttggacgaggtggttttggaactgtctacaagggagttctaagagacggcactgaatttgccgcgaaggttctgtcctcggaatccgagcaggggatcaaggagttcctagctgagatcgagagcatatcccaggtgaagcacgcgaacctcgtcaggcttctgggctgctgcgtacagaggaaaaaaaggatactggtgtacgagtaccttgcgaacaacagcctcgatcatgcgctcaaaggagcagc

SEQ ID NO: 78340 - DNA, 420 bp, Zea mays
agggagccaaccaggaggatgccctcgcgcgaattgaaaagctttcagaagtaaacccgatgcttggcttccgtgggtgcaggcttggtatatcgtaccctgaattgacagagatgcaagcccgggccatttttgaagctgctatagcaatgaccaaccagggtgttcaagtgttcccagagataatggttcctcttgttggaacaccacaggaactggggcatcaagtgactcttatccgccaagttgctgagaaagtgttcgccaatgtgggcaagactatcgggtacaaagttggaacaatgattgagatccccagggcagctctggtggctgatgagatagcggagcaggctgaattcttctccttcggaacgaacgacctgacgcagatgacctttgggtacagcagggatgatg

SEQ ID NO: 78341 - DNA, 380 bp, Zea mays
acacccaccgcctccgccgccgacaacagcgtagtgtagtgtagttccggagagggttggggagagtagtagtgatccgcaatgtcgacggaggaggctgttgtggctgaggtcccggtgaccgaggtgccagcggaggtcccggcggcccaagtggccgaggcgcccaaggcgaagaaggcgcccaaggagaagaaggcgcctaaggagaagaagccgtccgcggcgaagaagccggcggcgcaccctccctacgctgagatgattgtagaggcgatcgctgccctcaaggagaggaaggggtcgagctcggtggccatcagcaagtacgtcgaggggaagcacggcggcaagctccccaccaacttccgcaagcagct

SEQ ID NO: 78342 - DNA, 386 bp, Zea mays
cccacgcgtccgccctttgcaagtatagtctctctgctaagcgaagcgaagcttcaagctagtctcggcggctctagaagacgatgggcaaggacgacgtgatcgagagcggcgctggcggcggcgagttcgctgccaaggactacacggaccctcccccggcgccgctgatcgacgcggcggagctggggtcctggtcgctgtaccgcgccgtgatcgccgagttcatcgccacgctgctgttcctgtacatcacggtggccaccgtgatcgggtacaagcaccagacggacgcgtcggcgtcgggcgccgacgcggcgtgcggcggcgtgggcgtgctgggcatcgcctgggccttcggcggcatgatcttcgtcctcgtctac

SEQ ID NO: 78343 - DNA, 389 bp, Zea mays
caaacccagcagctattgtggtcgtccctcagccgcgtcgcaccgcatcgcattctacgattcgaagctctctctgctcgcagccatggcgaagaattacccaaccgtgagcgccgagtacagcgaggccgtcgagaaggccaggcgcaagctccgcgccctcatcgccgagaagagctgcgcgcccctcatgctccgcctcgcgtggcactccgcggggacgttcgacgtgtcgtcgaggaccggcggtcccttcggtactatgaagtgcccggcggaactggctcacggcgccaacgcggggctggacatcgcggtgcggctgctcgagcccatcaaggaggagttccccaccctctcctatgccgatttctaccagcttgccggag

SEQ ID NO: 78344 - DNA, 325 bp, Zea mays
tatgagactgcgaccattccttcttcgctccttcgccgccgctatggttaagtactcgcatgagccgggcaaccctaccagatcgggcaatgccatggtaagggaccttagggtccacttcaagaacacaagggagagagcttttgcgcttcgcaagctgcctttgaccaatgctaaccgataccttgaggatgttattgctcacaagcatgcaattcccttccggacatactgtggaggtgttggtcgcagcgcacaagcaaagtctcggccactccaatgggcaaggtctctggcctgttaagtcatccaggttcatattgga

SEQ ID NO: 78345 - DNA, 413 bp, Zea mays
aaccgacatcgatgtcccctgggagtttcgctgacacgccttcccctggaagagcttcatctagtgcctgtttggttcgatgaacttgccacacttttaacttttctgctaaggtaacttttctgctaaggtcagttctttaattcgaacgactaaatttagacaaagtgtgacacatttaaacacgaaccaaacataactcgccagagaagcacttgttgtctctcgatttctttttcatgtctgtcgcattggtcttctcctcaactcgctggccgctgacggtagatgcacaactcataatttaactgatcgagacgatgaactaatgaattcaaaatttaaataaatataaataaaacaatctttttccaacaaaaactgatgtgtactattctttttatacaaataac

SEQ ID NO: 78346 - DNA, 386 bp, Zea mays
tgagcttaatcttccgcgtgttcctcctcctgctcttcctctccgtcaccgccggccagttcgccatcctcttcaagaccacggcgtacagcgggccgatcaacttcaccaacggaggggacatcgctgtgtcttcggtggttcaggtggtcggcctcgtcctctgcctgcacgccgctgccaagatctcccaccgagctcagaacatcgctgcgctggctagccggtggcacgcgctggcgacgtgctctaacgactccacctacgtgaccaccccgaacagttccgggaacctcgcgcctttccccgcgcacctgttcctgagagactactcggggagtgacctggagtccctggacagcgcgtcggttcagggcagctcccac

SEQ ID NO: 78347 - DNA, 403 bp, Zea mays
aaccaccagccgagttcgcagcggcactccacggtccaggcccagcagcctcttcggctcttcgttgggggtgcgtggacaccggaaattgcctcggggattgcgttcctgatctaagcccggcatgaagggctgctcagagcggttgctgctcctgctgctgctggcatcgtcgttgttactgtccgtcgtggttgccgcgcagcagacttgccctgccgacctcgacagcaaatgcgacggtggcgcgcctgatgactgggatggggaattcttccccggcgtcccgaaaatcaagtatgagggtccagcaagcaggaaccctcttgcttataagtggtataacaaggaggaagtcattctcggaaagaagatgaaggactggatgcgcttcagtgttgcg

SEQ ID NO: 78348 - DNA, 335 bp, Zea mays
  unsure (1)..(335): unsure at all n locations
tcagctcacactccggcagccgagcgatcgagctccccggtcgctagcacagccggccactgcacacgacggtgctggtaggttgcaagcacttgcaggatggcgcaggtcgctaagacgcttctccttgtggccctggtggtcgtgtcggcggtggagctgtggggggggatcgagtgcgacnagcggggacctggcatcggacgaggcgctgtgggacctgtacgagcggtggcagacgcaccaccgggtgcaccggcaccacggcgagaagggccgcgnggtnnggggggggggggggggggggggggttggggggggggggggtggggggg

SEQ ID NO: 78349 - DNA, 376 bp, Zea mays
ccaacgcgtccgcccacgcgtccgcactgcctcgtgtggccgtcgtctcccgttcggaacgccaagcccccctccggcgaaatggcccccaagcgaggtggcagggcgccggtgccggccaagaagaagacggataaagtgacgaaccctctgtttgagaagaggccgaagcagttcggcatcggcggcgcgttgccgcccaagaaggacctgcaccggttcgtcaagtggcccaaggtcgtgcgtatccagcgccagcgccgcatcctcaagcagcgcctcaaggtaccaacggcgctcaaccagttcaaccgcaccctcgacaagaacctcgctacgaacctgtttaagatgcttctcaagtaccggcctgaaa

SEQ ID NO: 78350 - DNA, 408 bp, Zea mays
atcaccaactgccattgccatctactgacctgtgacctccgcatttccaaacagcccgagcgagctagagctagcagagcggcaggcacctccctcctcaaggaacatggcccgcacgcagcagttggcagtagtggcgaccgccgtggtggccttggtgctgctggcggcggcggcgacctcggaggcggccatcagctgcgggcaggtggcgtctgccatcgcgccctgcatctcctacgcgcgcggccaaggctcggggccctccgccggctgctgcagcggcgtcaggagcctcaacaacgccgcccgcaccaccgccgaccgccgcgccgcctgcaactgcctcaagaacgccgccgccggcgtcagcggcctcaacgccgggcaacgccgccagcatccccc

SEQ ID NO: 78351 - DNA, 387 bp, Zea mays
acacgcaccccgctgccgcggctcgaacataaaccctagagccgccggcccggtcgcgctagcgacacaaatctcaaatcacccggagagaactcgctcgcgaaggctgaactcatggctcgcgtcttcgttgggaacctggatccgcgtgtcacggcgcgggagattgaggacgagttccgcacgtttggggttctgaagagtgtatgggttgctaggaaaccaccagggtttgccttcattgacttcgatgaccgcagggatgcacaagatgccattcgcgatttggatggtaagaatggttggagggttgagctgtcaaccaaagatggtggtggccgtggccgagaccgtaatggttctgatatgaagtgctatgagtgtggt

SEQ ID NO: 78352 - DNA, 399 bp, Zea mays
acacgtccgaatgtaatggctggttttgtactttcaagtgttgctaatcctgttggtgccgttagtgaattcattgctcagttgcagattttagagttgcttgacaatgctattttcactgccggctacaaagctgtgttgcatattcactctgttgtcgaagagtgtgagattgttgagctcatagaggaaattggcatgaagaaaaagaaagaagaagatccaaagaagaaaaagccaaagaggaagcctctttttgtgaagaacggtgcaattgttgtttgccgcattcaggtgaataacttgatatgcatagagaagttctctgatttccctcagcttggaaggtttacacttagaactgaaggaaagacggtagctgtaggcaaagttgttgat

SEQ ID NO: 78353 - DNA, 423 bp, Zea mays
aaaaaatagcatgtaaatctataaaatcaatttccatctctcaccctatgaatttgagataggtttaaatgataactttggaaagtggtgaatgtcacattctaaaaaagtagcctattccattagtaagattccaattcctcaaaatgaaaggaaacaaacgggaccttaatctatttcttgtaaaagcatggattgggttggaattgtcaccatggttctaaaaaaactaattgcacttacatttattgtctattaaatctcaaatggacccctagtgtcttgtttagggcctgggcatccaataaaactctcgacactctaggcggtgcacatagacacaagacagtgtttaagtggcgcggaaacacgaaaaagcgtctgcctggctggcttggtgagctatgtgtgactgcaggaaaa

SEQ ID NO: 78354 - DNA, 400 bp, Zea mays
cagcgtcgcatcctacgatccaaagctctctctgctcgcagccatggcgaagaactacccgaccgtgagcgccgagtacagcgaggctgtggagaaggccaggcgcaagctccgagccctcatcgccgagaagagctgcgccccgctcatgctccgcctcgcgtggcactccgcggggacgttcgacgtgtcgtcgaggaccggcggtccattcggcacgatgaagcatcagtcggaattggctcacggcgctaacgcggggctggacatcgcggtgcggctgctcgagcccatcaaggaggagttcccaatcctcgcttacgccgatttctaccagctcgcgggagttgtggccgtggaggtcaccggtgggcctgagattcccttccaccccggtagg

SEQ ID NO: 78355 - DNA, 387 bp, Zea mays
gcgagaaacagacgcgtatacccaggcggcggttgaggaggaggagaagaagaagaagaagatggcttcctccgcgtacgcctcatggtccaagcggtggatccgtcccgaggtgtacccgctgttcgtgccgatggccgtggccctgggtatctgctcgtaccagcttgtgcgcaacatcacgggcaaccccgatgtgcgggtgaccaaggagaagagggcggccggcgtcctggacaaccacgacgagggcgagaggtacgccatgcacgggctcaggaagttcgtccgcgggaagaagcccgagatcatggcttccatcaactccttcttcgcccgacctcacaaggacgattaagccagattccgtcatggatggatgagtat

SEQ ID NO: 78356 - DNA, 403 bp, Zea mays
caggacacgacgcagcgccgaagcacctaggatggcgcccgagattcagagcctgtgtccgagtacgacggccgcgctcctcctgctggccgcctgcctcgccgccgcggtggcagcgctcgacgctgcggactacgccaggccgccgctgcctgcaggcggaggcggccggcgcgtcctcttcgccaacgggctcgggctgacgccgcagatggggtggaacagctggaaccatttccagtgcgacatcaacgaggcggtcgtccggagcaccgctgatgcgctcgtcgccaccggacttgcaaaggctggctacacgtatgtcaacttagatgactgctgggcggattccgagagaaccaaagagggatacatggtcgctaaccccaagacattcccatca

SEQ ID NO: 78357 - DNA, 333 bp, Zea mays
gagaacccccaaaaggtgccctttaaggactaaggaacgtaaaataagccacaaccaaagaaggaaaaggggaatgcccggatccggcccattaagcaagactgggaaccggttggttttccgaaaaaaggacccaccgccgctgccaagaaagatgagaaggccgtcaacgccgcgcgccgctccggcgccgaaattcagaccatgaagaagttcaacgctggtattaacaaggcggcgtccagcggcacatccctcaacaccaagcgcctcgacgacgacacagagaacctcgcccatgagccagttccaagtgacctgaagaaaaatctc

SEQ ID NO: 78358 - DNA, 419 bp, Zea mays
acagttctatatttacaaagaggccagatattatttttaagtggctcgggccccatggtagtgattgtggcatagtgaatgtgaacatacctactaatggtgctgaaattggtggagcatttggtggagaaaaagcaactggtggtggacgagaagcagggagtgattcctggaagcagtacatgaggagggcgacttgtacaatcaactatgggagcgagctacctctagcccagggaatcaattttggttaatcctgcagaaatgttgcgcgtggatctcggtgttttctgcagacgtggatgccgtacggaaagaactgatgcaaccgcatttgagatctcagcagacttgagcagcatttattggcgtcagttgtgaaacttaaactgcacgagcatcttgtacataaataaaat

SEQ ID NO: 78359 - DNA, 357 bp, Zea mays
gcaacagccaagtgcaagtgatcgagctcccccctcctcatcagtcgctaggcacagcgcacttgcaggatggcgcaggtctctaagacgcttctccttgtggccctggtgttcgtgtcgtcggcggcggtggagctgtgccgcgcgatcgacttcgacgagcgggacctggcgtcggacgaggcgctgtgggacctgtacgagcggtggcagacgcaccaccgggtgcaccggcaccacggcgagaagggccggcggttcgggacgttcaaggagaacgtgcgcttcatccacgcgcacaacaagcgcggcgaccggccctaccgcctccgcctgaaccggttcggcgacatgggg

SEQ ID NO: 78360 - DNA, 400 bp, Zea mays
agcggcggcgcgggcggacaaggagcaggcggaggaggagttgtgccaagccacaatgggtatctcgcgtgactcgatgcacaagcgccgagccaccggtggaaagcagaaggcctggaggaagaagcgaaagtatgagcttggtcgccagccagccaacaccaagttgtcaagcaataagacagtgaggatggtccgtgttcgtggaggtaatgtgaaatggagggctcttcgccttgatactggtaactactcatggggaagtgaagctgttacgcgcaagacccgtatcctcgacgtggtctacaatgcatcaaacaatgagcttgtgaggacacaaacccttgtgaagagtgccattgtgcaagttgatgctgccccattcaagcagtggtacctc

SEQ ID NO: 78361 - DNA, 369 bp, Zea mays
cccacgagtccgcccacgcgtccgcccacgcgtccgcccacgcgtccgatggaagccgatcgtagacggggttcaccagaaaggagggatatttttctgtcagatttggcacgtatggagagtctccaattccacttttcagcctaatgggcaggctccaatttcaagcaccgataagccactaaagcctcaagtgagagccaatggtatagacgtggctactttcgcagttcctagacgcttagagactgatgaaatccctttggtcgtcaatgatttcagggtagctgctcgaaatgcgattgaagctggatttgatggtgtcgaaatccatggagctcacggttacctgattgatcagtttctaaa

SEQ ID NO: 78362 - DNA, 345 bp, Zea mays
agacgagctcgatcgctccacttccccgatcgcacgccaatcagcaccagccaccgtggcgatgacggaggaggcggaggcgaaggcgaagggcaacgcggcgttcgcggccggccgtttcgaggaggctgtccagcacttcagcgacgccatcgcgctcgcgcccgacaaccacgtcctctactcgaaccgctcggcggcgtacgcgtcgctctggcgctacgcggaggcgctagatgacgccaagcggaccgtggcgctgaagccggactgggccaagggctacgcccgcctcggcgccgcgcaccttggcctcagtgacgcgcccaaggccgtcgacgccta

SEQ ID NO: 78363 - DNA, 395 bp, Zea mays
atacctagccgccgccgcaggcggccccccatcgccgccaagatgcagatccttgtgaagactctgacggggaagaccatcactttggaggtggagtcctccgacaccattgacaatgtgaaggccaagatccaggacaaggagggcatccccccggaccagcagcggctcatcttcgccggcaagcagctcgaggacggtctcaccctcgccgactacaacattcagaaggagtctaccctccacctggtgctccgcctccgcggtggcgccaagaagcgtacgatgaacacgtacaccaagcccaagatgatcaagcacaagcacaagaaggtgaagctctccgtgctgcagttcgataaagtggacgacgccactggcaacgtgatccgcct

SEQ ID NO: 78364 - DNA, 359 bp, Zea mays
aggaggaaccagtagcggaggcttcgattttcggcgggcgcaataaatttcccgcatggctcggagggccgcgtcctcgctcgtctcccgctgcctcctggcgagggcccctgccggcgcgccgcccgctgccccctctgcgccgcgcaggacagtgcctgcagatgggatgcacaggctgttgccaggtgtccttcagaggttcagcactgcagcagcagtagaggagcccatcacgccgtcagtccatgtgaactacacaaagctcctcattaatgggaactttgttgattccgcatccggcaagaccttcccaactctggaccctcgtacaggggaggtgattgctcatgtggctg

SEQ ID NO: 78365 - DNA, 373 bp, Zea mays
  unsure (1)..(373): unsure at all n locations
aggccggcggcgccatggccatgaagctggacatgtccgcgctcgagaccaacttcgccaacctgaccgcctccgccggcgacgacacgtacttctccgccgaggcccccgacgtgccgtccatggtgctccccatctgcgacgacttcgacggcttccaggcggccaccaaggatatggtgaagaataagaaggggacgaccacgcttgccttcatcttcgacaagggcgtcatcgtcgccgctgattccagggccagcatgggcggttatatatcctcacaaaccgtgaggaaaattattgaaataaatccttacatgctggggacaatggctggaggtgctgctgattgccaattttggcatangaacct

SEQ ID NO: 78366 - DNA, 421 bp, Zea mays
acaatgacctccttatgctcccgttagtcatgctcgttcttctgatatcaaagaccatagccgacagctttaacaaaggggtttatgatcagattgtggtgatgaaaggcttgccattcctggaagctcatgccgaaccatacatgacgcacttggttgctagcgatgttgtgtctgggccactgatctccttttcaggcgtcgagagagtggggaatatcgttcaggcgttgaggatcacaggccacaacggatttccagtggtcgatgagccacctctatcagaggctccagaacttgttgggctttgtgctcagattccatctgctggtcctgctgaaaggtaagggcttcatgaaagagaagatgaaaaccagcggtagcttcgtgctggaaagatttggtgccttcgattttgcca

SEQ ID NO: 78367 - DNA, 418 bp, Zea mays
acgaaaccctaacgccgccgccgcttcacaggtaagccgccgtcatggtctccggttccggcgtatgcgcgaagcgcatcgtggtggacgcgcgccaccacatgctgggccgcctgtcgtcgattatcgccaaggaactgctcaatgggcagaaggtggtcgtcgtccgctgcgaggagatctgtatgtcgggtggactcgtacgccagaagatgaagtacctccgctttctccgcaagcggatgaacaccaagccatcccatgggcccatccacttccgcgccccgtccaagatcctgtggcgcaccatccgcgggatgattccgcacaagaccaagaggggggaggcggctctggcgaggctcaagacgtacgagggcgtcccgccgccgtacgacaagaccaagcgcctggtcat

SEQ ID NO: 78368 - DNA, 397 bp, Zea mays
ggcttgcgggcgatggcggcggagcagaccgccgagcagttccggggccaggcgcggctgccccacttcgcgtccccgcggcgctacgacctgcgcctcacgcccgacctccccgcctgcgtcttcactggctcggtggcggtttccatcggcgtggccgcgcccacccgcttcctcgtactcaacgcagccgagctcgacgtcgcgaccgggggcgtcagcttcgcgcctcagggctccgaccaggtgctacaacctttggaggttaccaacgtgccagaagatgagatcctgattattcgcttcaatgaggtgctttctatcggggagggaactttgacgattgcattcaagggggactttgaatgataagatgcatggattctacagaagtgtg

SEQ ID NO: 78369 - DNA, 410 bp, Zea mays
aagaggacggcggcgatggcgaagaggctgctcccatctctgaaccgggtgctggttgagaagctggtgcagcccaagaagaccgccggcggcatcctcctcccggaaacatccaagcagctgaatgctgctaaagtggtggctgttggccctggtgagcgcgacaaggcaggcaatctgatcccagttgctctgaaggaaggtgacactgttctcctgccagagtatggtggaactgaagttaagcttgcagctgataaagagtacctcctcttcagagagcacgacattttgggcacacttgtggactgattcagagcatcagcaagcctgtcactagtcgttggttctagacttctagtgtgagatgcgtagtatcagattctgggatcaaaatccctaagaactct

SEQ ID NO: 78370 - DNA, 368 bp, Zea mays
  unsure (1)..(368): unsure at all n locations
agcaagcagaaggacctcccaattttttgttggtgagtccatgaaggatgatgcgtctgtggtattcgcctattacaaggatggtgccactaatccgacattcctctatttctctcatggtcttaaggagatcaagtgctangcgtgcggcgaaattagttacccatgttgggtactatctatgtactattattatatccaaaactatagttgtcctggctgaattgaactcaaaagggtttgtttgagaaaaaattgtcccaagattggattgcttgttaaagctcaatattgttattgaagtgttattgcttaaaaaaaaaaaaaaaaccaaaacaaaaaaacaggacacacacataccaaaagaa

SEQ ID NO: 78371 - DNA, 386 bp, Zea mays
  unsure (1)..(386): unsure at all n locations
agcgacagaggagacggccatggtggcagcgatggagctcgagatcctatgcatgaatttcgggtgcgtcctcgcggctctgtccgacgccaagatccccgacaagggctgcctgctcccgctcatctctaagctgctcggctacgccatcgtcgccgcatccaccaccgtgaagcttccccagatactgaaaattttgaagcatggaagtgttagaggactaagtgtggcatcctttgaacttgaggttgtcggctacacaattgctttggcatagtgtattcataaaggacttcccttttcagcttatggggagctagcttttctgttaatccaagcaattattttggttgcaatcatttactattactcancaccaatgggaa

SEQ ID NO: 78372 - DNA, 416 bp, Zea mays
caatctttcatgacccaacccagcaagtgttcgaccacgacatgctatcgaaggatgacgagatgggtgacgcagagattgacctgcagccgatgatcagtgcagctacagcgtttggcgaccctgatctgctcgcggacatgcagatcggcaagtggctcaggtccccagataatgcgctggcaagggacagcgccgtcaatgtcgttggtggcaaggtcaagcaggaggtctctctgaggctgcagaacgtggaatcgggggaggtggaactggagctggagtggataccactcaatcagtagagttcaaatccacctgtaggctatatgtgatgcatgtttcatgtgtgccacacaagtcctgatgctcttgatcatcttcagtttgtcagggtgcctgcagtgttgtagact

SEQ ID NO: 78373 - DNA, 403 bp, Zea mays
aaatctttcatgacccaacccagcaagtgttcgaccacgacatgctatcgaaggatgacgagatgggtgacgcagagattgacctgcagccgatgatcagtgcagctacagcgtttggcgaccctgatctgctcgcggacatgcagatcggcaagtggctcaggtccccagataatgcgctggcaagggacagcgccgtcaatgtcgttggtggcaaggtcaagcaggaggtctctctgaggctgcagaacgtggaatcgggggaggtggaactggagctggagtggataccactcaatcagtagagttcaaatccacctgtaggctatatgtgatgcatgtttcatgtgtgccacacaagtcctgatgctcttgatcatcttcagtttgtcagggtgcctgc

SEQ ID NO: 78374 - DNA, 416 bp, Zea mays
  unsure (1)..(416): unsure at all n locations
accacgcgtccgctgatctgctgctagctggggatcctgcagaggctaccgcgttcttcttgtctggggtgcacagtgcatgggcagtgggtgaactggtagagagcaagatggggaattgcatcgacaccacggcgcgggtggatcacagcatgaacaatgctgcctacccatcaaaagtgaccagcaagacaagtttgtcgtcaatcccttccacaattaagagcaactcaagtcgttcaacgctgactcttccatcaatgagagatcgaaatgagcttcctactcctcggacagaaggtgaaatcttgtcatcttctaatttgaaggcattcacgttcaatgatctaaaanatgcaaccaagaacttccgaccggacagccttcttggggaaggagggtttgggcatgtttac

SEQ ID NO: 78375 - DNA, 426 bp, Zea mays
acactcacttcgtcgaccccgccgcggcatctgggggcccctccaacgcgtccccgagccttacgggcctcgcccgcggcgggcagcaggtcgccgcctgccgcgccgcgcacgtcaaggccatcgaggtgcttgtcgagctcgcctcgctccagacctccttcctcacgctcgacgaggccatcaagaccaccaaccgccgcgtcaacgcgctcgagaatgtcgtcaagcccaggatcgagaacaccatcagctacatcaagggggagctcgacgaactcgagcgcgaggactttttcaggctcaagaagatccagggctacaagaagagggagatcgagcgccagatggccaacgccaggctattcgcagaggaacagctcgccgaggatctcgcgctgaagaggggcatctccgtgggcgctg

SEQ ID NO: 78376 - DNA, 419 bp, Zea mays
acagacccagcagctattgtggtcgtccctcagccgcgtcgcaccgcatcgcattctacgattcgaagctctctctgctcgcagccatggcgaagaattacccaaccgtgagcgccgagtacagcgaggccgtcgagaaggccaggcgcaagctccgcgccctcatcgccgagaagagctgcgcgcccctcatgctccgcctcgcgtggcactccgcggggacgttcgacgtgtcgtcgaggaccggcggtaccttcggtacgaggaggtgcccggcggaactggctcacggcgccaacacggggctggacatcacggtgcggctgctcgagcccatcaaggacgagttccccaccctctcctatgccgatttcaacagcttgccggagttttggcgtcgaggtcaccggtgggcctga

SEQ ID NO: 78377 - DNA, 381 bp, Zea mays
aggagtagtcgacgcgccgtcactgaatcctcagatcacggctagccgtaatcacgccactctgctgactcccggcgagcagtgtaacattttccttcagccatgggcaaggagaagactcacatcaacattgtggtcattggacatgtcgactctggcaagtcgaccaccactggccacctgatctacaagctcggcggtattgacaagcgtgtgattgagaggttcgagaaagaggccgcggagatgaacaagcggtcattcaagtatgcctgggtgcttgacaagctcaaggccgagcgtgagagaggtatcacaattgatattgctttgtggaagttcgagaccaccaagtactactgcactgtcattgatgcccct

SEQ ID NO: 78378 - DNA, 290 bp, Zea mays
acacgcgtccgcaccttgatcaggcctgatgggaagaagaaggcttacgtgaagctgactcccgactatgatgctcttgatgttgccaacaaaatcggcatcatctaagtgctgcattaggcatcctaattcatctgttgtgtcctagttctatgtgaaaccagagttttctagctatggctctcaatcgctccattaccatgtgttatgcacacttctgaatttgatatcatccaagtgaccttttgaactagtttgcgttctgcacttcattacacttggacaccgtc

SEQ ID NO: 78379 - DNA, 370 bp, Zea mays
agcatttgcgtggtggctgctgcacgcagctgggcgcggagtgcgtgggcacgttcatcctcatcttcttcgcgacggcggcgccgatcgtgaaccagaactacggcggcgcgatcagcccgttcggcaacgcggcgtgcgcggggctggcggtggcgaccgtcatcctgtcgacggggcacatctccggggcgcacctgaacccgtcgctcaccatcgccttcgcggcgctgcgccacttcccctggctgcaggtgcccgcgtacgtggccgtccaggcgctggcatccgtctgcgccgccttcgcgctcaagggcgtcttccacccgttcctctccggcggcgtcaccgtgcccgacgccaccatctc

SEQ ID NO: 78380 - DNA, 384 bp, Zea mays
agttggggatgggtctcggtgcagtatttgtgaaccagctggtaaaatttgacgagaagctcaaggaggacctcgacaagatgcttgagcgcgccaggctagccaacgagcaacgctacattgatgatgatgaatagctgttcagatttgtttgtcagtgacctgtattttttgcaacatgttgtcagtacacatggtcaggactgtggatcccccatgacttagttgttgcctcagcttccacatttcaactgtggccttgtaataaaatgtcgttgcccaatggatctgatgcatcagagaaagtaagcgatcatattcaaagcccataatttgtagcttacaattgtggccccgagcacctcgtccgcaacccgtttggtc

SEQ ID NO: 78381 - DNA, 372 bp, Zea mays
acgcatactcctcatcagcttccttccacattcgtctcgagatctcgccccgtcgccatggacgcgatcgaaaacgtggtggatccccccgcgacttcgccaaagacagcgtccgcctcgtcaagcgctgccacaagcccgaccgcacagagttcaccaaggtggcagcgcggacggcgatcgggttcgtcgtcatgggcttcgtctgcttcttcgttaagctcatcttcatccccatcaacaacatcatcgtcggttccggctaggcttacacgagtacagggcgactagcatgggagtagtgcaatacttttgggagcaatagataacgaggatcctggtctttcgaatagtattgttaatgaaattttt

SEQ ID NO: 78382 - DNA, 411 bp, Zea mays
cgggccgacccaaacgtccactcaagtcgcgggacgacgcgtggcagttccacgacaggatgcagaggttcctgaagaaggcggacgacgagatcatccgggtgcagtgccaggagagcgtggcgctgtcgctggtgaaggagatcaccgagtacttccacggcgactccgccaaggaggaggcgcaccctttccggatcttcatggtcgtgagggacttcctggcggtgctggaccaggtctgcaaggaggtgggcaggatcaacgagcgcaccatcgccagctccgcgcgccacttcccggtgcccgtgaacccgatgatgccgcagctgttcccgcggctgcacgcgttgagagccgggttctccgacgacgagagctcagccgcttcggtgtcgtcgccatgaccga

SEQ ID NO: 78383 - DNA, 400 bp, Zea mays
ctgatattgggcggctgccctacctccaagccgtggtgaaagagaccttcagactgcatcctgctgccccgctgttgctaccgcggcgtgcccaggccgacgtgaagatgatgggctacgtgattcccgaagggtctcgagtgttcgtaaacgtatgggcgatgggccgagacgaggagacgtggcctgagcctgagaagtttatgcccgagaggttcctggggaagaagaagacgcaggcggttgatctcaggggcggggacttcgatctcatcccgttcggtggaggacgccggatctgccctgggatgccgctggcgatcaggatggtgcatctgctgcttgcgtcgctcttgaatcagtttgcatggaagcttccggctgagctagagaggaatgg

SEQ ID NO: 78384 - DNA, 371 bp, Zea mays
acagtggtgcttttgcatgggagattattccggttcaagttcctgttggtagaggaaaacccccaacattaattgagagagatgaaagcctggataagtttgacccagtaaaactaaagaaacttcggccaagtttcaaggagaatggtggtacagttacagctggaaatgcttctagtataagtgatggagctgctgcattacttttagtgagtgggcagaaggctcaagagcttggccttcaagtccttgcaaggatcaaaggttatgctgatgcagctcaagctccggagctttttacaaccactccagcacttgcaataccacaagctatcgcaaatgctggattagagtcatcccgtgttgatttc

SEQ ID NO: 78385 - DNA, 439 bp, Zea mays
gggccgacccaagcgtccacagtggtgcttttgcatgggagattattccggttcaagttcctgttggtagaggaaaacccccaacattaattgagagagatgaaagcctggataagtttgacccagtaaaactaaagaaacttcgcccaagtttcaaggagaatggtggtacagttacagctggaaatgcttctagtataagtgatggagctgctgcattagttttagtgagtgggcagaaggctcaagagcttggccttcaagtccttgcaaggatcaaaggttatgctgatgcagctcaagctccggagctttttacaaccactccagcacttgcaataccaaaggctatcgcaaatgctggattagagtcatcccgtgttgatttctatgagattaatgaagccttttcggctgttgcgcttgcaaatcaaaaact

SEQ ID NO: 78386 - DNA, 421 bp, Zea mays
acattctcgaattacgattcccaatccagcaaaccctaccagccttttgcaaactcagagagggacccgatggcacccaaggcggagaagaagccggcggcgaagaagcccgcagaggaggagcccgcggccccggcggagaaggcccccgctgggaagaagccgaaggcggagaagcggctcccggcgggaaaatccgccggcaaggaatgcggtgttgacaagaatgggcggaagaaggccaagaagagcgtggagacgtacaagatctacatctgtcaagtgctgaagcaggtgcacccggacatcggcatctcctcaaagggcatgtcaatcatgaactccttcatcaacgaaatcctccagaaactccccggcaaggcggccaaactcgcccgctacaacaagaagcccaccatca

SEQ ID NO: 78387 - DNA, 392 bp, Zea mays
  unsure (1)..(392): unsure at all n locations
gttcccgctgcagcccgtgggccgcctggtgctcaaccgcaacatcgacaacttcttcgcggagaacgagcagctggccttctgcccgggcctcatcgtccccgggatctactactccgacgacaagctgctgcagaccaggatcttctcctactccgacacgcagcgccaccgcctcggccccaattacctgctgctaccggccaacgcgcccaagtgcgcacaccacaacaaccactacgacgggttcatgaacttcatgcaccgccacgaggaggtcgactacttcccctccaggtacgacgccgccaggaacgcgcccaggtaccccatcccgaccgcccacattgccggccgccgagagaagactgtgattnagcaagagaacaact

SEQ ID NO: 78388 - DNA, 331 bp, Zea mays
atccttttttacagagataatagcatcagtttcagatataaaatttgcaagggatggaagacacattcttagtcgtgattatatgacactcaagttgtgggatctaaacatggattcaggcccagttgcaacttttcaggttcatgaatacttacgtcctaagctttgtgatttatacgagaacgattcaatttttgacaaatttgagtgctgcctcagcggcgatggactccatgttgcaactggttcttatagtaatttgtttcgtgtttttggttgttctcctgaaagcgtggaggcatcaacgttggaagccagcagaaatcccatg

SEQ ID NO: 78389 - DNA, 356 bp, Zea mays
  unsure (1)..(356): unsure at all n locations
actgcaacagccaagtgcaagtgatcgagctcccccctcctcatcagtcgctaagcacagcgcacttgcaggatggcgcaagtctctaagacgcttctccttgtggccctggtgttcgtgtcgtcngcggcngtggagctgtgccgcgcgatcgacttcgacgagcgggacctgncgtcggacgaggcgctgtgggacctgtacgagcggtggcagacgcacaaccgggtgcaccggcacaacggcgaagaagggccggcggttcgggacgttcaaggagaacgtgcgcttcatccacgcgcacaacaagcgcggcgaccggccctaccgcctccgcctgaaacggttcggcgaca

SEQ ID NO: 78390 - DNA, 327 bp, Zea mays
ggacatgtgtactacttcctggaagatgtatacccacgtatgactgggcgtcgccccctaaagacaccgtccttcattaaggcgctatttgctgatgacaatgttgtggtggcacagccacccaatgctgggattggtgctggtgcaaggttcggtgctattggtgtagatccccaggctcaatgatgaattactttcagtgacctgagggccgaggctgtgactgatctgggatgcggcagtttgtattctctgcgcaaattgcggaactggcccggaggaaattggatcgtgatgggcaaacaggccaatccctgttgcagaaac

SEQ ID NO: 78391 - DNA, 271 bp, Zea mays
tcaccttgcccgcgccgccgctcgccgtttgcccctcgtctccgcaccgcgcgctgttgtccatccttgtgcagcaaaaatgacggctggctacattgttggctcactggtcggatcctttgccattgcatacctgtgtgacacatttatctctgacaagaaggcatttggaggtagcacccccaagactgtttctgagaaggagtggtggcaagccacagacaccaagttccaggcctggcctcgcactgctgggccaccggttgtcatg

SEQ ID NO: 78392 - DNA, 376 bp, Zea mays
aattaagctgccgagctacaggggcgacaacgtcaacggcgacgacttcaccgagaagagccgcgtgccggacccgcagaggatgatccgcgcctacgcacagtcggtggcgacactcaacctgctccgcgcgttcgccaccggagggtacgctgccatgcagcgcgtcactcagtggaacctcgatttcatggatcacaacgagcaaggtgataggtaccgtgaattggcccatagggtggatgatgctcttgggttcatgactgcatcggggcttacagtcgaccacccgataatgacaactactgactttctggactccgcacaattgcctcccctaacccaacgaacaaggtcctaacccttaaggatccaa

SEQ ID NO: 78393 - DNA, 426 bp, Zea mays
catagtggaaagtttattcttccattgaacatcccactgagtgtaatgcatatgcagaaatgcatatgcagaaattgaggtagcatataactgccgcaagggaaaatatggtgtagcagatgaggatataatcttatatggtcaatgtgtttgaattggtccaaccattgatatttcttcgcggttgctagacttgagagtcgcagttttgcatagtcctatattctatctgcactaagagtaatatatacagccaagcggacgtttggtttaacatttacaaggtatgtttggtccttttgttttttggaattaatggttgtccgatggctgtcattcatatgagttctaatatcaagcccccttaagttactcatcatcaaaagtttcaatgtgaatgttttaaatgtagatttaaagggttga

SEQ ID NO: 78394 - DNA, 413 bp, Zea mays
catgcaatcacaacgaacaaaagctctcgatctcaccgacaccgaggaagaagagatcaatggcgtccgagcagggagtcgtgatcgcgtgccacagcaaggctgagttcgacgcccacatgaccaaggcccaggaagccggcaagctggtggtcatcgacttcactgccgcctggtgcggtccatgccgcgccatcgccccactgttcgtcgaacacgccaagaagttcactcaggtcgtcttcctgaaggtggacgtggacgaagtgaaggaagtcaccgcggcctacgaggtcgaggcgatgccgaccttcaacttcgtcaagaacggcaagacggtcgcgaccatcgtgggtgccaagaaggacgacctcctggccctgatcgagaagcatgccgcgcctgcgcctgcg

SEQ ID NO: 78395 - DNA, 375 bp, Zea mays
ctcagacagaacaagggatcatcaagtgcagcaccagctaaggtaaccgcgaatcatgcaccctctactcagacagtgcctgctactccacctcaaacgtcagcagccccagatgcaccggcacctattgtacctgtcagtgcaccggctgcaactgctacagcctcagcagctcctgctgttgctgtctccactgaggcggatagttatggtcaggctacctcaaacctagttgctggcagcaacttgggaggaacaattaaatccattcttgaaatgggtggcgggacatgggatagagacactgtactacgtgctctgcgggctgcgttcaacaatccaaaaccttccggttgattacttaaatccgggaat

SEQ ID NO: 78396 - DNA, 399 bp, Zea mays
cacacgcgtccggcaagcaatccgaattctctgcgatttctcgagatctcgaccacccctactagttttggttcctcctttcgttcgagagagcgtttctagtggcaatggcgaagagcgagggtccggcgatcgggatcgacctcggcaccacctactcgtgcgtcggcgtgtggcagcacgaccgggtggagatcatcgccaacgaccatcggaaccgcaccacgccgtcctatgtcagcttcacggacaccaagcggctcatcggcgacgctgctaataacaggtcgccatgaaccccaaccagaacgttctccgatgcaagcggtttatccgcatgaggttctcttgaccgtcagtgcagagtgacatgaagctatggccgttcaatgtcatccc

SEQ ID NO: 78397 - DNA, 436 bp, Zea mays
cgcttcgccgaattccctgtcctccgcccgcttcgccgaatttcctctcctccccgcccgccgcccgtcaccgcggcttcgtctgcgcttgtccctcccgttccaaggagcacgtgcttctcgccgcgccgttcgcccgccgccgccgccaccggttcatcgccagctatgtcttctcaggtcgacagccgcagccagtccgccgggaagcgcgcgcgcaccgacggcagccggcgtgaggacgactgggtttgccccagctgcaagaacgttaacttcgcctttcgcaccacttgcaacatgcgcaactgcaaccagtccaggccagcaaatcaaacaagggcaagcaaaacccggctcgccaacccaaattaagaaggtacaataacccaagggagccaacgttgaagttaccttgtgggtgtggccccccaaa

SEQ ID NO: 78398 - DNA, 338 bp, Zea mays
gggtccacgcacgcgtccgcacacgcgtccgcgccgcccagaccgcctccccttccccgcctccggtgcccaaggccaggccaacagttttgaggtggtaatggcggaccaggctaaccaacccactgtccttcataagctaggtggccagttccacctgagctccagcttctctgaaggtgtacgggcccgtaacatctgcccttctttctcaccttatgaaaggagatttgccacgaggaactacatgacccagagcctttggggcccttcaatgtctgttagcggtggcatcaatgttccagtgatgccgactccgctttttgccaatgctccag

SEQ ID NO: 78399 - DNA, 378 bp, Zea mays
cagacgcgtgggcgcgacctcctcccccggcgtacctccggagatccaccccgacccaccaccgcgtgcctcggcaatggccggcgctccgactaccgtaaccaagtccccgccgtccctggtcccgccggcggggcccacgccaggcggctccctcccgctctcctccatcgacaagactgccgccgtccgcgtctccgtcgacttcatccaggtcttccccgcccctacatcggtgaaggacgactggagcccctcctccacgatcgcggctatgcgcgagggctttgccaaggcgctcgtgccgtactaccccgtcgccggccgcatcgccgagcccgttccgggggagcctgagattgagtgcacaggggaaag

SEQ ID NO: 78400 - DNA, 341 bp, Zea mays
ctcagacagaacaagggatcatcaagtgcagcaccagctaaggtaaccgcgaatcaggcaccctctactcagacagtgcctgctactccacctcaaacgtcagcagccccagatgcaccggcacctattgtacctgtcagtgcaccggctgcaactgctacagcctcagcagctcctgctgttgctgtctccactgaggcggatagttatggtcaggctacctcaaacctagttgctggcagcaacttggaaggaacaattaaatccattcttgaaatgggtggcgggacatgggatagagacactgtactacgttctctgcgggctgcgttcaacaatcc

SEQ ID NO: 78401 - DNA, 387 bp, Zea mays
cacacgcgtccggcacgcagtagtgcagcagcactgaagcactacttcctgcactcactgtgctagctgctcaaaccgtagtagtaacagtccatcaccatcaccatcaccaccaatggctcccaaggttgcgctcttccttgccctaagcctcctgttcgctgccaccgcgcatggctgcgaaccctactgttccggcccagtcgtcccaacaccaccagtcgtgccgactccgtcgtcgcatagccacgggcgctgcccgatcgacgcgctcaagctcaaggtgtgcgccaatgtgctgggcctcgtcaaggtcggcctaccgcaatacgagcaatgcctgcccaattgctggaggggctggtggaccttgacgccccattgtgc

SEQ ID NO: 78402 - DNA, 407 bp, Zea mays
gacaaagatggcgagcgtgcacaaggccaccacccttgttctcatgttctgcctgctagcgctggggagagcggagtacctcaagtacaaggacccgaagcagcccgtcgctgttcgcatcaaggacctgctgggtcggatgactctcgctgaaaagatcggccagatgacgcagatcgagagggaaaacgccacggccgacgcgctggccaaatacttcataggtagcgtgctgagcggcggaggcagcgtgcctgctcctcaggcgtctgctcaggcttgggccgccatggtgaccgagatgcagaagggcgctctttctacgcgtctgggtaaaccgattatctacggtatcgatgcagtgcatgggcacaacaacgttccacaagctactaatttccctcaaa

SEQ ID NO: 78403 - DNA, 337 bp, Zea mays
caacgcgtcagcctctctccgcggctccgccttccgccgcgaacacgccgctgtctcgacgccttgtcctcctccttcagcaagatggcggagattgagataacaacagcacctgctgacttccgcttccctacaacaaaccagacaaggcattgttttactcgctatgtcgagtaccacacgtgtttgaatgccaaacgggatgatgctggtgtttgcgaaaaatttgccaagtactacaggtccctttgccctggagaatgggttgagaaatggaacgagcagagggagcatgggacgtttccaggacctctctgaaatgtacgcccgagacctc

SEQ ID NO: 78404 - DNA, 418 bp, Zea mays
ggaggatttgatattagttcctttggtggtgttcaaggaggccaaacaatgcaaccaaaggttggctacatagcaatagatattctcacagatactgtagaagctgctgaacatcaatggaaatttcatctctggtgaagggatcgatgaggtggaggaaatcttgaaggctggtaagaaacccctgaaagtgctgggcccactagatgagaatgagcctgatggagagcctgatgatgacgatgaagaggttgaggataatgaggactagctgaattcgaagctgcagagtgtgaaggttgagcaagatgattgaccgagttggtatcgagatataagcctgtcgcaaggtcttgataactgagttatctacaatgctgttgatccttgggtttgtaatcggtttttgttatgaaaa

SEQ ID NO: 78405 - DNA, 385 bp, Zea mays
aagaattccctcatagccgccgccgccgccgccgccgccgctcatctcgccgagaggtgacgggaccgaggaactcgccgagttctaagatagagaatcgcttttcacagcctggggtctgctgcgtagggtggtgttgaaggggagaagtttaagatctgttccacagatcacgcgtgcgcgctcgcgaatcgggggttccacacatagcttcgtcgttttgaatttgatgtactaatggagtctaagggtggcaagaagtctagcagtagtcgttccatgatgtatgaagctccccttggctacagcattgaggacgttcgacctgccggaggcgcgaagaagttccagtctgctgcttactccaactgcgcaaagaagccat

SEQ ID NO: 78406 - DNA, 363 bp, Zea mays
actagttctagatcgcgatcgggatcggaggagaggtgccccgcgaccctgacgatgacgatgcctcgccgcgcccttctcttcgccgcggtgctcctcgcggcctccgccgccgcggtctccgggttccacctcgccggggacgagagcggcctcgtgaggggcgtgctcacagcggtccgcgagcgggccgaggccgaggccgaggacgccgcgcgcttcgccgtcgcctaccacaacaggaaccagggtgctgctttggagttcactagggtgctcaaatcgaagcggcaggttgtgaccgggaccctgcatgacctgatactggaggcagctgatgctggaaaaaagagtctgtacaga

SEQ ID NO: 78407 - DNA, 422 bp, Zea mays
cactattcgttccccgcctcaccccgagccagccgtctcgctagggtttcgccgccgccgccgccgccgccgccgctatgcctcgccgcagctcaggaaggtctgccccacgcccagctacccgtgctgctccagtgaggaacccgccacagccagcacgccaggctcctcctccagctcctgttcgagatggtggtggctccatgtttggaggaattgggtccaccattgctcaaggtatggcgtttggcacgggtagtgccatggcacacagggctgttgatgctgtattaggtccccggaccattcagcatgagactgttgcctcagaagctgctgctgctgcccctgcccctccagtgatgaatgctgacgcttgcagcatccattctaatgctttccaagattgtctcaacaactat

SEQ ID NO: 78408 - DNA, 429 bp, Zea mays
gaatcggcgcagcacgactacaggcatatggacgtggaagcgagccatgagtctccgcccttgcgcagcaagacgatgcgccgcctcctggtggcgaccaactgcgtgatgctcgcgcttggcgtcaccggtgggcagctcctcagccgcctctactttagcaagggcggacaccggcagtggctctccggatggctccagaccggtggctggccgctgctgctcccgccagtggcggcttcctacgtccgccgccgagcgcgcgaccggagcgccccggtgctgctcacccagacccagccgcgcatactgctggccgccgcggggctcgggctcatcgcgggcgtggacaacttgctctacgcctggggcctcgagttcctgcccgtctctacctccgcgatcgtcacctccacgcagctggccttc

SEQ ID NO: 78409 - DNA, 417 bp, Zea mays
cactaaggtggtttatgatgagtacaatcatgaaagatatcctcctggagatcccagcaagcgtgcatttgcttactttgtcctgagtggtgggaggttcatatatgcatcactgctgcgtctcctcgtattgaagtttgtcctgagcatgtcagcaagtaaggacgtgcttgcccttgcttcactcgaggtggacctctccagcattgagccagggaccacggtgactgtgaagtggcgcggaaagccagtcttcatcaggcgccggacggaggacgacatcaagcttgccaacagtgtggatgtggcatccctgcgccacccagagcaggatgcagagcgtgtgaagaatcccgaatggctggtggtcattggcgtgtgcactcacctaggctgcatcccactaccgaacgcccg

SEQ ID NO: 78410 - DNA, 427 bp, Zea mays
gtccgaaggcacaacacctcttcttcttcttcctcctcctcctagcacagctagcgcctgctccccttcgcctgtgatcatgtcttgcagcagcggcaagtgcgactgtggctccagctgctcctgcggcagctcatgcaactgcatgtcccctaacgtggagaccgccgccgccagcagcatcaagaccacggtcctcgccgcgccgaccaccaaggccagcgccggcggcttcgaggcggccaccgagggcggcggctgcgactgcaacacctgcaactgcggcaccagctgcggctgctcctgctgcagctgcaactgagccggtcaggcgatggcgcacgagagtcgagaggacgacgacgagtcgtataaatataatagcggcgtctaaataagatcctgtcaactgcacccgccattatcg

SEQ ID NO: 78411 - DNA, 350 bp, Zea mays
cccacgcatccgcggacgcgtgggcgggtggtgaccctatggtaccgcccacccgaactgcttctcggcgcaacggattacggggtgggtgtggacctgtggagtgcagggtgtatcctggccgagttgctcgctgggaggccaattatgccaggacgaacagaggtggaacagctacataaaatttttaagttgtgtggctccccaacagaagaatattggaaaaagtcgaagctacctcatgctacaatatttaagcctcagcagccgtacagaaagcgaataagagagacgtttaaggattttccacaatcagcactgcagttgatcgagacactacttgcaattga

SEQ ID NO: 78412 - DNA, 372 bp, Zea mays
ccggtccgagatcacgggtcgacgacgcgtccggaggaggcttcgattttcggcgggcgcaataaatttcccgcatggctcggagggccgcgtcctcgctcgtctcccgctgcctcctggcgagggcccctgccggcgcgccgcccgctgccccctctgcgccgcgcatgacagtgcctgcagatgggatgcacaggctgttgccaggtgtccttcagaggttcagcactgcagcagcagtagaggagcccatcacgccgtcagtccatgtgaactacacaaagctcctcattaatgggaactttgttgattccgcatccggcaagaccttcccaactctggagcctcgtacaggggaagtgattgctcatg

SEQ ID NO: 78413 - DNA, 355 bp, Zea mays
gagaacccgccgccgacgcagcagcaggagacgcgccaatgagagcccacaaggaggcgactatgacggccaactggaaaaagaatcgcatgaggaggctgaagatgaatcgccaatagatgatgcatagatccaagtacgctgatggggattgtggatggtggtgtcagcataattgtgtaacctctcttcgatgcatgagttcaaggacagatgtcacatcctagttcgtcgtcaatgtttgccatgggtccaatggcacgtcttggtaacctgcacttcattaggccatctatcctggtttcgatctatatccatagttctgtgctaacacaaatcagtcagtcgttttgtg

SEQ ID NO: 78414 - DNA, 406 bp, Zea mays
  unsure (1)..(406): unsure at all n locations
cacttcggcctcttcctggcgcgcaaggtctccctggtgcgcgcgctgctctacatcgtggcgcagtgcctcggcgccatctgcggcgtcggcctcgtcaaggcgttccagagcgcctacttcgacaggtacggcggcggcgccaactcgctcgcctccggctactcccgcggcaccggcctcggcgccgagatcatcggcaccttcgtgctcgtctacaccgtcttctccgccaccgaccccaagcgcaacgcccgcgactcccacgtcncggttctggctcccctccccatcggcttcgccgtgttcatggtgcacctggccaccatccccgtcaccggcaccggcatcaacccggccaggagcctgggcgccgccgtcatctacaacaaagacaagccctggg

SEQ ID NO: 78415 - DNA, 389 bp, Zea mays
ggcgcctacgggcagcagggacacaccggtagcgcctacgggcagcagggacacaccggcggctcctacgccaccggcaccgagggcaccggcgagaagaaaggcattatggacaagatcaaggagaagctgcccggacagcactgagcggcgcctatacgtggctgtgctgggctgtgctggcgcgtcaaagccgtaatgttcagtgttccatagataataagataaacccatgaataagtgtccctacccttgatcatgtgacagggacagggacagtttcctgtacttgtggggtgaatttgtacgtgtgatacggtaactgggtccgtgtactgttcatgctacgttttcctacgtatatagtacagcacttgcgagtggcttta

SEQ ID NO: 78416 - DNA, 427 bp, Zea mays
ggtacattgagttttacgacgttatgtctgttccaatggcaattgctctgtctggtcaaccgctgcttggacaagcagtgatggttaaaccatctgaggctgaaaagaacttagttcagtcaaatgcgacatcaggtggtgcggcttcaggtggagcaagaaagttgtacgttggcaatcttcactcaaatattactgaagaccaattgagacaggtatttgaaccatttgggcaagtagagcttgtacagcttcctgtagatccaatgactggattgtgcaaaggttatggttttattcagtttgcacggcttgaagatgcaaaagctgcacagagcttgaatgggcagcttgatatcgctggcagagttattaaggtttcagctgttaccgatcatgtgggaatgcaagctagtggaacaactac

SEQ ID NO: 78417 - DNA, 351 bp, Zea mays
atacgcgacaccatgccgcgcctcgccgccgccgccgccgccgtctcacgccgcgccggcgaggccctgcgccgcggcgcgtttgggggactgcggcctctctcctccctgcaaccgttaaacgccgcctccagcgacgaggtgctcgttgaaggaaagacaagtgcgcgcgctgccgtgctcaaccgccctggctacctcaacgccctcaccaccaccatgggagctaggctcaataaattttatcaatcatgggaggacaacccagacattggctttgtcatgatgaagggcagccgccgagcattctgtgctgggtgggatgttgttagattacatgaacttttcact

SEQ ID NO: 78418 - DNA, 406 bp, Zea mays
  unsure (1)..(406): unsure at all n locations
caggagccaaccaggaggatgccctcgcgcaaattgaaaacctttcaaaagtaaacccgatgcttggcttccttgggtgaaggcttggaaaaccgtaccctgaattgacaaaaatgcaagcccgggcaatttttgaacctgcaatagaaatgacaaaccagggtgtcaaattgtcccaaaaaataagggtcccccttgttggaacaacacaggaactggggcatcaagtgactcttatccgcaaagttgctgagaaagtgttcgcaaatgtgggcaagactatcgggtacaaagttggaacaatgattgagatcccaaggcaactctgggggctgatgagataacggagcaagctgaattcntctccttcggaacgaacgacctgacgcagattacctttgggtac

SEQ ID NO: 78419 - DNA, 423 bp, Zea mays
caccggaggcgcacgtgttcaagaccgacgtgccggggctgaagaaggaggaggtgaaagtggagctggaggacggcaacgtgctccagatcagcggcgagcgcatcacggagcaggaggagaagacggacacctggcaccgcgtggagcgcagcagcggcaggttcctgcgcatgttccgcctgccggagaacgccaggacggagcagatcagtgcgtccatggcgaacggcgtgctcaccgtcaccgtgcctaaggatgaggccaagaatgccgacgtcaagtctatccagatttccggctagtatgctcaatctcacaagcagatggtgtgccgtcatcgtcttgtgttgatcgatctggtagttcttaacatgccggttgtccataacatgccaacgtccgtgtaactgtgttatactg

SEQ ID NO: 78420 - DNA, 416 bp, Zea mays
gacaccacacctcttcctcctcttcctcctcctagcacagctagcgcctgctccccttcgtctgtgatcatgtcttgcagcagcggcaagtgcaactgcggctccagctgctcctgcggcagctcatgcaactgcatgtcccctgacgtggagaccgccgccgccagcagcatcaagaccatggtcctcgctgcgccgaccaccaaggccagcgccggcggcttcgaggcggccaccgagggcggcggctgcgactgcaacacctgcaactgcggcaccagctgcggctgctcctgctgcagctgcaactgagccggcccgcccggcccggcgatggcgcacgagagtcgagaggacgacgacgacgaggcgtataaatataatagcagcgtctaaataagatcctgtcaactgca

SEQ ID NO: 78421 - DNA, 390 bp, Zea mays
gaagaagctcgctgccgccggcaagctgacgagggtgaagaactccttcaagctgccggccaccgacgccaagcccaaggccgccaagcccaaggcacccaaggccgcgcccaagcccaagccctcgccgaaggcgaaggccaagaccgctgcgaagcccaaggcggcgtcgcccaaacccaaggccaaggccaaggccaagcctgtcgctcctgccgccgcgtcgcccaagccccgcgggcgccctcccaaggtcgccaagacctccgccaaggcctcccccgccaaggcagccaagaaggcggctgctcctgccaagaaaggaaaggcagcggcgggctcctaaaaaggttgcaaccccgaagaaggctgctgctgctggcgccccgg

SEQ ID NO: 78422 - DNA, 371 bp, Zea mays
ccacgcgaccggaagaagctcgctgccgccggcaagctgacgagggtgaagaactccttcaagctgccggccaccgacgccaagcccaaggccgccaagcccaaggcacccaaggccgcgcccaagcccaagccctcgccgaaggcgaaggccaagaccgctgcgaagcccaaggcggcgtcgcccaaacccaaggccaaggccaaggccaagcctgtcgctcctgccgccgcgtcgcccaagccccgcgggcgccctcccaaggtcgccaagacctccgccaaggcctcccccgccaaggcagccaagaatgcggctgctcctgccaagaagggaaaggcagcggcggctcctaagaaggtggcaacccc

SEQ ID NO: 78423 - DNA, 382 bp, Zea mays
gtccgacagcacaggcagctcgagagagagagagagagaaagatgtcgtggttcgggcaccaccaccacaaccagccggctcccccggcgtcgggccccaaccaggtgttcaagatcttctgccgcgccaacgagaactactgcctggccgtccgcgacggcgccgtcgtgctggccccggtcaaccccaaggacgaccaccagcactggtacaaggacatgcgcttcagcacccgggtcaaggacgacgaaggcatgccggcgttcgcgctcgtcaacaatgccacggggctcgcaatcaagcactcgctcgggcagtcgcaaccggtcaagctcgcgcccttcagcccgggccaagaaggacgcgtcggtggctgttgga

SEQ ID NO: 78424 - DNA, 371 bp, Zea mays
acgcgtccggcaaagaataagaagacataagcggcaacccccgtgcactgcgcccggctgcgcacggcgtgcgagcgcgccaagcgcacgctgtcatcgactgcccaagacgaccattgagatcgactccctgttcgagggcatcgatttctactccacgatcaccagggctcgcttcgaggagctcaatatggacttgttccggaagtgcatggaacctgtggagaagtgcttgcgcgacgccaagatggacaagagcagcgtgcacgacgtcgtgctcgtccgtggctccaccgcatcccaaggttgaaccacctgctgcaggacttctccaacggaaaggaattgtccagaaccatcacccccaacaa

SEQ ID NO: 78425 - DNA, 335 bp, Zea mays
gatctaaaactggccaagaatggactggaaagaagagggtacaaggaggttggtttccttagagaggtcgacgaagtagtgagaacaggagtgacgcctgcggagaggctgctgaacctgtacgagaccaagtggcaacgcaacgtcgaccatgttttcgagcatttgttatactgattactgaggatgacgccgccgaacgacgttggactgagcttgtagatgtaccccgtaccctaatacagagtctcgtcttgaatcattcaatgcctgacccggaagggctcatttccaggcacacaggaccaaaccttccggttggtggttaacggggg

SEQ ID NO: 78426 - DNA, 364 bp, Zea mays
aacacttccatcttcccgagctcgtattcgatcaattcccaattcaaataataatataacaacaatggtggttcccgtcatcgacttctccaagctggacggcgctgagagggccgaaaccctggcgcagatcgccaatggctgcgaggagtggggattcttccagctcgtgaaccacggcatcccgctggagctgctcgagcgcgtcaagaaggtgtgctccgactgctaccgcctccgggaggccgggttcaaggcgtcggagccggtgcgcacgctggaggcgctcgtcgacgcggaacggcgcggcgaggttgtggcgccggtggacgacctggactgggaagacatcttctacatccac

SEQ ID NO: 78427 - DNA, 333 bp, Zea mays
  unsure (1)..(333): unsure at all n locations
aatgcagttggccgacacggcctctgggcgccggtccccgccgccggcgcccgaaggcgccaaggccaacaaccccttcaaccaccataccaaccgcaccccaaaaaataaccctgtggttaggttaaaggcctccattaataacttaccaaggaattacaacaaaaagatggtcaccaaggattcacggtgcctaagtcaaatgtttgctgctaaaattttcatgcatcgtttcttgctctcgagtgctgtccggacactanatcccaaggaagctgattggttctatacaccagtttacactacttgcgatttaactaacgctggactgcc

SEQ ID NO: 78428 - DNA, 342 bp, Zea mays
  unsure (1)..(342): unsure at all n locations
atagggtttttgatttagcccgccgcgccggtcaacccaaaaccccccaaaaaaacccttgccctccgccattcaatccaatggccttcttccccaacttcaaaaccgccaacggcctcaattccctcgaggtccacttcgccggaaaaacctaagtttctggtaactccattactaaggatgacattaacgtcatccccgcggtgccgtcaaaacctggcgctgagtttcctaatgccgcccgctggtacgagaccgtctctgcngctgtagcctcaagattccctggtaaagctgttggtgtaaaccagcctgcgggatcagctcctgccgtagctgctc

SEQ ID NO: 78429 - DNA, 372 bp, Zea mays
ggagactccagaggcgcacgtgttcaaggccgacgtaccggggctgaagaaggaggaggtcaaggtggaggtcgaggacggcaacgtccttcagatcagcggcgaacgcaacaaggagcaggaggagaagacggacacctggcaccgcgtggagcggagcagcgggaggttcctgcgcaggttccgactgcccgagaacgctaagacggagcagatcacggccgccatggagaacggcgtgcttacagtcactgtgccgaaggaggacgccaagaagcctgaagtgaagtccattcagatctccggctagacctcggtctgcggtcgtcgtacctgcgtggtttgaggaacggcagttcgcctcggtcgttc

SEQ ID NO: 78430 - DNA, 369 bp, Zea mays
ggcgatggagtaaatgatgcccctgccctaaagaaagctgatattggtatagcagttgctgatgccactgatgcagccaggagtgcatctgacattgtcctgacagaacctggcttgagtgtgataattagtgccgttcttaccagccgggccattttccagaggatgaagaactacactgtatgtcagaaggaaacctaacgaaataaattttcaaaaaatagttgctttttctgatccaccttcacctttgcagatctatgctgtttccatcacaatacgaattgtgctaggatttatgctacttgccctcatatgggagttcgatttcccaccatttatggtacttattattgcaattctaaatga

SEQ ID NO: 78431 - DNA, 389 bp, Zea mays
ctaggtaatctggtggtacgacgacatggcggccaccagcagcaagtcgtcgtcgtcctcgagctcggcgcagcgggcagctgccgcactgctcgtggccgccgccgtggcggtgtccgtcctggtggtgggcgcggcggcggtgtgcgacatgagcaacgagcagttcatgtcgtgccagcccgcggcggccaagacgacggacccgccggccgcgccgtcgcaggcgtgctgcgacgcgctggcgggggcggacctcaagtgcctgtgcggctacaagaactcgccgtggatgggcgtctacaacatcgaccccaagcgcgccatggagcttccggccaagtgcggcctcgccacgccgcccgactgctagcagtgtgctagccaag

SEQ ID NO: 78432 - DNA, 368 bp, Zea mays
aatctcctccagttcataggcacagcagcagaaagcgccaggagcttaagaacatggcgaacaggggcttgcatctggctctgttcctcgtccttctcgggctgtcgtccaatttggcagccgggcagatcctgttccagggcttcaactgggagtcgtggaagcagaacgggggatggtacaacttcctgatgggcaaggtggacgacatcgccgaggccggcatcacgcacgtctggctccctccggcgtcacactctctcgccgagcaaggctacctgccggggcgcctgtacgaccttgacgcgtccaagtacggcaacgaggcgcaactcaagttcctgatcgaggcgttccacagcaagggc

SEQ ID NO: 78433 - DNA, 372 bp, Zea mays
acaaccctcaacgttcctaccagctgccaccgcctgtttacccgtgaatgtctccccgcccttgccgctggcgtggagcccatggccgtcgacgattccgcctccaagaatggccaagcgcaagcagctcaaggccgccgccggcgccgcggatgcagacgcggacgccgcttcggtcaaaaatcaaaatcaagtttgatattgatgctaacggtatcctttctgtcactgctgtggaggagggtacacggaagaatcaagagattacaattactggtgccaggactcagcccttcgacgatgtggagaggatggtcgacgaagctgacaagtttgcaaaggacgataaggaaaacacagatgccattgaca

SEQ ID NO: 78434 - DNA, 372 bp, Zea mays
gctcgaaagctcacgagcagcatcttaactcgcgatcacatcttttgaaagcctctcaggagcccaatgcctctattgctggtatcacgatagtcaagccacttcctgaacgagtctcacgaagagctccatctgcagtagaggaggatcaagacgacgatgaggaagaagagtgggttgaagttgacccaagtgagatggagttggctgatgagtctacttcaaacatgcaagaagatgagcactcctcaaaatcagatgatgacatggatgaccttgaagagttggatatctcgtcgtgtttcatgtgtgacctcaagcatgacaccatagaagactgcatggtccatatgcataagaagcatgggtttt

SEQ ID NO: 78435 - DNA, 372 bp, Zea mays
cgcgttcgcctactccttctccaacatcctcatcgagatccaagacacgatcaaggcgccgccgccgtcggagtcgaaggtgatgcagaaggcgacgcggctgagcgtggcgacgacgaccatcttctacatgctgtgcgggtgcatggggtacgcggcgttcggcgacaaggcgccggacaacctgctgacggggttcggcttcttcgagccattctggctgatcgacgtggccaacgtggccatcgtggtgcacctggtgggcgcgtaccaggtgttctgccagcccatcttcgccttcgtggagcgccgcgccgccgcggcctggcccgacagcgccttcgtcgcgcgggagctccgcgtggggcccct

SEQ ID NO: 78436 - DNA, 332 bp, Zea mays
atcgcgatcagagcaggagcaggcaacgcgcaccgaaatcttccaatccacaagactcgctacttcgcagttggcagagtcgcccgcagcgagccgctagcaaccaagcagaaatgtcgctggtgaggcgcggcagcgtgttcgacccactcaccgtggacctcttcgactccttcgacagcgtgttccgctccatcgtgccgtcatcgtcgtcggcggcggcgggctccgaaagatccgccttcgccagcgctcgcatcgactggaaggagatgcccgaggcgcacgtgttcaacgcagacctcaccgagcgtgaacaacgacgagtgtaa

SEQ ID NO: 78437 - DNA, 394 bp, Zea mays
tgggacaatgccaagaagtacatcgaggctggtgccagcgagcacgcgaggaccctcggtcccaagggatccgactgccacaaggccgctgtgatcggtgacaccattggtgaccccctgaaggacacctccggcccgtccctcaacatcctcatcaagctcatggccgtggagtccctcgtgtttgcccccttctttgccacccagggtggcctgctcttcaagtacctgtaacagggacaacaccaagcacacagcagaagtatacgatctcccgaccgaccgtggacaatatcgaataactcctgccaaatcgccagttccttttgtgtactgtgcgctagccgccgcctagctgcactgctgtatttttgtttcaggattgctgctgctg

SEQ ID NO: 78438 - DNA, 392 bp, Zea mays
ggcccgacccacgcatccagtttctcgcgagccatcgcttctgcatccggaagaaatggccaagtcgaagaaccacacggcgcacaaccagtcgttcaaggcgcacaagaacggcattaagaaacccaagcgccaccgccagacctccaccaaggggatggaccccaagttcctgaggaacctgaggtattctaggaagggcaacaaaaagagtggtgaggctgaagctgaggagtaggaaggaaagcatggctttgtttcctctgtttttagctcagttccacctttaggacctggggttttgctaaagatggaacttaagtggtgttactgtatgatggcaaggaccttttgctgccgaaagttatgttttgaagttcatgccacccttt

SEQ ID NO: 78439 - DNA, 343 bp, Zea mays
acaatgcctcctgttggcgtccgcccccgttccggaaggcaagcccccctccggggaaattggccccaaaccaaggtgcaaggcccccggtgccggcaaaaaaaaaaacggttaaattgacaaaccccctgtttgaaaaaaggccgaagcagttcggcatccgcggcccgttgccgcccaagaaggacctgcaccggttcgtcaagtggcccaaggtcgtgcgtatccagcgccagcgccgcatcctcaagcagcgcctcaaggtaccaccggcgctcaaccagttcacccgcaccctcgacaagaacctcgctacgaacctgtttaagatgcttctcaagta

SEQ ID NO: 78440 - DNA, 336 bp, Zea mays
tcgacccacgcgaccgatttctcgcgagccatcgcttctgcatccggaagaaatggccaagtcgaagaaccacacggcgcacaaccagtcgttcaaggcgcacaagaacggcattaagaaacccaagcgccaccgccagacctccaccaaggggatggaccccaagttcctgaggaacctgaggtattctaggaagggcaacaaaaagagtggtgaggctgaagctgaggagtaggaaggaaagcatggctttgtttcctctgtttttagctcagttccacctttaggacctggggttttgctaaagatggaacttaagtggtgttactgtatgat

SEQ ID NO: 78441 - DNA, 358 bp, Zea mays
  unsure (1)..(358): unsure at all n locations
acggacgcgtgggccgcgatctccgtagcctccgtcgcgtcgagcatcgatcatgtcggcctactgcggaaagtacaaggatgagctcatcaagaatgctgcctacattggcacccctggcaagggtatccttgctgctgatgagtccactggcaccattggcaagcgcctttccagcatcaatgtcgagaacgttgaggagaaccgccgtgccctccgtgagctcctattctgctgccctggtgctctccagtacatcagcggtgtgatcctcttcgaggagaccctgtaccagaagaccaaggatggcaagccttttgttgatgtcctcaagganggaagcgtcctccctggcatc

SEQ ID NO: 78442 - DNA, 362 bp, Zea mays
agaaacaaaggagtacggaggagacaaatatgacaatggtgtcatcactccaagaccaccacctgttcattatagcagaccatcaagaactgacaggaaccgtaactaccgaggaaactaccaggatggccctccacagcaaggaaattaccagaacaaccgtcctccaccagaaggtggttaccagaacaacccgccgcagcaaggaaactaccagacataccgctcgcagcaagatggaagaggctatgccccacagcagaattatgcacaaggtggtcaggatggtagaggttttggaaggaatgattacacagaccgttcaggctacaatggaccacctgattttcgaagtcaaactc

SEQ ID NO: 78443 - DNA, 356 bp, Zea mays
acagcagctcaaaaacctaacacacctcaacaagcagagcaaagacccgggattcgccggcgcggtagcgagagcgagagatggacgggaggatgttcggtctcgagacccccctgatggtggcgctgcagcaccttctggacgtgcccgacggcgacgccggcgcgggcggcgacaaggcgagtggtgccgcggcgggcggcgggcccacgcgcacctacgtccgcgacgcgcgcgccatggcggccaccccggccgacgtcaaggagctcccgggcgcgtacgcgttcgtggtggacatgccggggctgggcacgggcgacatcaaggtgcaggtggaggacgagcgggtgctg

SEQ ID NO: 78444 - DNA, 387 bp, Zea mays
agcgagagagaacccaaacggagagagacaatcgagagagatggcaaactgttttggtgacgtcgtggacaattacaagctagacacaatgccaagatatatcggcaaaaagaagactcgagaagaccgggcacgagaggcctcctatctcagtaatgagaatgagaagtacaagaaagctaaagactatgtgaacatgctgaaggactggtacggcaatggagcgtcgacgctgtgcgtgatctacaaccagacgggcggaaccctgcggtacgtcgacgacaaggactggctgggctacccggggccgacgccctacccgacggagatcggcaacgggcagtgggcgtccttcctccacgtccacaagaccggcgcctcctccgg

SEQ ID NO: 78445 - DNA, 380 bp, Zea mays
attcccgggcccgagtctcgtccaaacgtcgtcctcctagctcctctactcgccagtcgccatgggcaagattaagatcggaatcaacggcttcggaaggatcggcaggctcgtggccagggtcgccctccagagcgaggatgtcgagctcgtcgccgtcaacgaccccttcatcaccacggactacatgacctacatgttcaagtacgacaccgtccacggccactggaagcacagcgacatcacactcaaggactccaagacccttctcttcggtgacaagccggtcaccgtctttggcatcaggaaccctgaggaaatcccgtggggtgaggctggcgctgagtatgtcgtggagtccaccggcgtcttcactgaca

SEQ ID NO: 78446 - DNA, 398 bp, Zea mays
gacagcctgcctccatagtccatctcctctccccctaccgacaccgatcccattccccaggcccaagcgcccatggatcccaagcccgacgccagcgcgcccgccgcggtgccagcggagcacgcggcgtacccgaggctgtcaccggaggacatcgccccgccgccgccgcctgtcgtgccgccgtccggcgccaacccctacgtgctctccgccccgtcgcctaacccgcccgccaagagcgctagggagaatctgagggagatgttcggcatggtggggaagaagttcaacgaggccgcgcgcaagaccgagggcatcgccggcgacgtctggcagcatctgaaaactggacccagcatcactgatactgccatggggaggattgctcagatatc

SEQ ID NO: 78447 - DNA, 401 bp, Zea mays
aaccctagctttacctccccacaagcgcctccaagatgaagctcgtcaggttcttgatgaagctgaacaacgaaacggtgaccatcgagcttaagaacggcaccgtcgtacacggaaccattaccggtgttgacatcagcatgaatactcatctgaagactgtgaagctgacactaaaagggaaaaatcctgttacccttgatcaccttagtgtgaggggaaacaacatccgctattatatccttcctgacagcctaaacctggagactttgctggttgaggaaacaccaagggtcaagcctaagaagcctacttctgggaagcccttgggccgtgggcgtggccgtggtcgtgggcacggtcagggtcggggacgttgagcatgctagctgcttttggaa

SEQ ID NO: 78448 - DNA, 388 bp, Zea mays
cacacgcgtccgaaagcaacaaggcagcagcacaagcaagaaccacacctcctcccttcgcctgtgatcatgtcgtcttgctgcggcggcaagtgcgggtgcggctccagctgctcctgcggcagcggatgcaacggctgcggtatgtaccctgacgtggagaccgccgccaccagcagcgtcaagaccacggtcctcgccgcgccgaccaccaaggccagcgccggcggcttcgaggcggccaccgagggcggcggctgcgactgcaacacctgcaagtgcggcaccagctgcggctgctcctgctgcagctgcaactgaactggcccggcccggcgatggcgcacgagagtcgagaggaggaagacgactacgacgcgtataaata

SEQ ID NO: 78449 - DNA, 340 bp, Zea mays
gttttgctgctctccgaccccgagctccgaaggccgcagcatcaggcgcggcccccctcgcgtgtgaccgagatggcgctgccgaatcaggggaccgttgattaccccagcttcaagctcgtcatcgtcggcgatggtggaactggtaaaactacatttgtgaagaggcatctcactggagagtttgagaagaaatatgaaccaaccattggtgtggaagttcatccgttggatttcaccactaactgtggtaagatcaggttctactgctgggataccgcagggcaagagaagtttggtggcctcagggatggatactatatccatggccagtgtgcga

SEQ ID NO: 78450 - DNA, 274 bp, Zea mays
atcgccgccgaggcgcccgtcgtcttctcccgcgcctgcgagatgttcatcctcgagctcacccaccgcggctgggcacacgccgaggagaagacgcgccgcacgctgcagaagtccgacatcgccgccgccgtcgcgcgcaccgaggtcgtcgacttcctcgtcgacatcatgccgcgggacgaggccaaggacgccgacgctgccgccatgggagcatccgggatcccgcacggcgccgccggcctgcccggcgccgatcacatgggctact

SEQ ID NO: 78451 - DNA, 396 bp, Zea mays
aacgcgtccggccgtccgcttccgtttccttggataaccacgacgcccgcccgccccccggcaagcgaaagcgaagcgagccaacccagccatggagaaggcgatcgatcggcagcgggtcctcctggcgcacctcctcccctccccctccgccgcctcctcgcagcctcagcttgcggcgtcggcgtgcgcggccggggacagcgccgcctaccagaggtcctcctccttcggggacgatgtcgtcgtcgtcgctgcctacaggacgccgatatgcaaggccaagcgaggaggcttcaaggacacctacccagaggacctcctcactgttgttctcaaggctgttctggacaacactagaatcaatcgagctgacatcggtgacatcgtcgttgg

SEQ ID NO: 78452 - DNA, 437 bp, Zea mays
gccagaggaagctagcagagtcgagagagagagagagagagagagagagagagagagagagagagcatggctggcaggagtttcctgattcggtcccccaaggaggaggagtccgacgccgccgtcagagaagctgtactgctgggagcaaagaacgccgcaatagctggtactgtggttgcagttcccacgttggttggctgccgtgtccttccttgggctaaggcgaatctcaactacactgcacaagcactcattatatctgcagcctgtattgctggcttcttcatcactgctgacaaaaccattctacggaacgcacgacaaaacaccatcgggaagcttgacaagtcaacctgatgcagagatgtagctgaagctgaaaaggttctctggttgccgcggcggttgatagggtgtcttttgccccatatgca

SEQ ID NO: 78453 - DNA, 333 bp, Zea mays
aaagaataatcatagtcttgtaaatcaacaaggagttcaggtcccttgaaatacctcgatgatttacaagactatgattattctttagacatgtggagtcttggttgcatgtttgctggaatgatatttcgcaaggaaccattcttttatggccatgacaaccatgaccaacttgtgaagattgcaaaggtccttggaacagatgggctgaattcttatttgaacaagtaccacattgagctggaccctcaacttgaagctcttgttggaaggcatagtagaaaaccctggttgaagttcatgaatggtgataaccaacatctagtatcaact

SEQ ID NO: 78454 - DNA, 360 bp, Zea mays
  unsure (1)..(360): unsure at all n locations
gcaaaaccatcagatctagcagaactctctcgacctcatcggcgttggcggagcgcgtgttgaccggagatggcgccgagcgggtggaggaggagcgcggcggcgcgggtcgcctggcgcccggccacggtttgcctgtggctcgcgctcgccgccgccgcactgacgctcgcccaggctaagaaggacctgacggaggttacccacaaggtctacttcgacatcgagatcgacggcaagcccgcaggccggattgtcatggggctttttgggaagactgttcctaagacggcagagaacttccgagctctttgcacangagagaaaggggtcggcaagagtggcaaagccctccactac

SEQ ID NO: 78455 - DNA, 433 bp, Zea mays
caacagcgaaggagaaagcagaccaacctagccacccagggagaaagaggccaaaagggaggggagagtgtcgtcatggcttccattgtcgcttccaggagggccgttcctctagttcgcgctctggagaagctcatcgcagcgtcctccgctcccgggactggctccgccctcaggccggtggcagtcgccggcggcctccgcggctacaacaccggcgctccgctccgacgctacgagggggccgagtcggaagacgatagcgtccgcgagtacgatgggcggcacggcggccgggactacgctgtgcccagcctgttctcagatattttccgtgatccgcttagtgcgccgcacagcattggccgcctgctgaaccttgtggacgacttggcggtggcggcgccaggtcgtgcggtgcgccgtggctgga

SEQ ID NO: 78456 - DNA, 361 bp, Zea mays
ctcgactaagccggagtacccggtggtggatcggaacccggccttcaccaaggtggtcggcaacttctctgcgctcgactacatgcgcctctccaccatctccgccgtctccgtcaccgttggctacctctccgggatcaagccggggatccggggcccgtcgatggtcacgggcggcctcatcggggtcatgggagggttcatgtacgcctaccagaactccgccgggcgcctaatgggattctttcccaacgacgccgaggttgcgcgctacaagcacaagcttcattgaggatccagctccattccgtctctcttttcgcaaccgtttcgcctgttcctttcctgattccgtgttaac

SEQ ID NO: 78457 - DNA, 349 bp, Zea mays
aacagatgggttgaatgcttatttgaacaagtatcacattgagctggaccctcaacttgaagctcttgttggaaggcatagtagaaaaccctggtcaaagttcatgaatgctgataaccaacatctagtatcacctgaggccatagattttctcgataagctcctgcgctatgatcaccaagataggctcactgcacgtgaagctatggcacatccctacttcctccaagtcagagctgtggagaacagtagaacgagaccacaataatcgttgtctacaccctcgaaatgaagttgttgctaatttctggaacatcataggctaaaaccgttcaataagcatctcgct

SEQ ID NO: 78458 - DNA, 363 bp, Zea mays
cctcagctcccatatccgctcccctacctctccagcatcctcccgtctccgtcgtctcgtctccgctcctcacctcgccagccatgggcaagatcaagatcggaatcaacggtttcggaaggatcggcaggctcgtggccagggtcgccctgcagagcgaggatgtcgagctcgtcgccgtcaacgaccccttcatcaccacggattacatgacgtacatgttcaagtacgacaccgtgcacggccaatggaagcacagcgacatcgccctcaaggactccaagacgcttctcttcggcgagaagccggtcaccgtctttggcatcaggaaccccgaggagatcccgtggggtgaggctggtg

SEQ ID NO: 78459 - DNA, 374 bp, Zea mays
aaccaagccaaagcaagttgctaggtcctttgaaccagcaactgaagcttcctcgtctcatcatcgagaccagtaagcagcatggcggctaatctcaagtgggctcctgttctagccctcctcgtcgtcgttgctgccatggttggcactaccagcgccggcaacatcgcattgtactggggccagaacggcaacgaatgcagcctggcggacgcctgcaattccgggctctacgcctacgtcaacatcgcgttcctcacaaccttcggcaacggacagaccccagttctcaacctcgccggacactgcgaccccggctccggcagctgcatcggccagagcagcgacatccagacctgccagtcgctggggca

SEQ ID NO: 78460 - DNA, 416 bp, Zea mays
ggaaaacctccaaccctagccgcgatccgacaacgcctccatccctagccgactgctgcaagcttcagagctcaagagtcagggcgccatggcgacagagacggagaccttcgcctttcaggctgagatcaaccagctgctctcactcatcatcaacaccttctattccaacaaggagatcttcctccgggagctcatttccaactcttccgatgcgttggacaaaatcaggttcgagagcctcactgacaagagcaagctcgatgcgcagccggagctgttcatccacattgtaccagacaaggcttcgaacacgctctccatcatcgacagcggcatcggcatgaccaagtccgaccttgtcaacaacctcggtaccatcgccaggtccgggaccaaggagttcatggaaaccc

SEQ ID NO: 78461 - DNA, 441 bp, Zea mays
ggtccaggattcgcgggtcgcagctcaggcgtcagtgagcatgtgcggcatacttgctgtgctcgggtgcgccgacgaggccaagcagggcagcagcaagaggtcccgggtgctggagctgtcgcggcggctgaagcaccggggccccgactggagcggcctccggcaggtgggcgactgctacctctcccaccagcgcctcgccatcatcgacccggcttctggcgaccagcccctctacaacgaggaccagtcggtggtcgtcgccgtcaacggcgagatctacaaccacctggacctcaggagccgcctcgccggcgcaggccacagcttcaggaccggcagcgactgcgaggtcatcgcgcacctgtacgaggagcatggagaagagttcgtggacatgctggacggcgtcctctctttcgtgctgctggacactcg

SEQ ID NO: 78462 - DNA, 417 bp, Zea mays
cgccgtctgccttctgcgcctccatttcggcctctgtcccttgcaagttcaatctcacctccaaccatgggtaaagagaagtcccacatcaacattgtggttattggccatgtcgactctggcaagtcgaccaccacaggacaccttatctacaagcttggaggcattgacaagcgtgtgatcgagaggtttgagaaggaggctgctgaaatgaacaagcggtccttcaagtacgcgtgggtgctcgacaagctcaaggctgagcgtgagagaggtatcaccattgatattgctctgtggaagtttgagaccaccaagtactactgcacggtcattgatgcccctggacaccgtgactttcaacaagacatgatcactggtacctcccaggctgactgtgctgtccttatcattgac

SEQ ID NO: 78463 - DNA, 268 bp, Zea mays
gggccgactcacgcgtccgcctcactcccgttccatttccccatctcccagatccaattcgcgagttctccctcctctgccgccatggcgctctctgtggagaagacctcgtctggacgggagtacaaggtcaatgatcgctcgcatgcggacttcggtcgcctcgagattgagctggccgaggtcgaaatgcccggcctcatggcatgccgcgccgagttcggctcgtctatgcccttcgacggcgctaggatgactgagtctcacc

SEQ ID NO: 78464 - DNA, 405 bp, Zea mays
ctccaccgtattccagcaaagaccttggaccagtactatagcagagatgcttcccactgaatcactgatcgttgatcagtgttccaatattttggcaagtgcagctttgaataaattgaacagattggcctcgtggccattttcctgtatttatctgtagtcaggtccaattcttttctgttggtgagcgcaagttattcatagatgactcggtcatgggaatatttgtaatattatgtcatgtatcgttaaatttcagtttgtttggttcaactgcaagaactgttaacaagagtatcctggagctggaagctcgaacgcaactggttgtatctatatccttgaatgccgaataaaggaggggcaataaactgcagcgaaatatgtgctgtcagacattgttga

SEQ ID NO: 78465 - DNA, 427 bp, Zea mays
cggacgcgtgggcaacgacaccaccatgtcgtctgtccaggaggagcttaataacacacaggacatgctccaaggttacgtggagctctacaattacagtctctcctacgtgaagaccatggcgatcgggtgcgcgatccagctaggcatccctagcgccatccaccgccgaggtggggcagcaacaatctcggacatcatcaccgagaccggcgtcgacccgtcgaagctcccgtatctccgacggctcatgcgcgtgcttaccgtctccagcatcttggccaccacaggcacagacgagactgagactgagagcgacgacagtactgtttacaagctcactccggcgtcccgcctcctcgtaagcggcgcgggggcaccgacctcgtgcgacatatcgccgatgctggaccttctgaagcgcccc

SEQ ID NO: 78466 - DNA, 417 bp, Zea mays
  unsure (1)..(417): unsure at all n locations
cgagacgcccctctgcttccttttctctgtcgctcaaaagttgctggagccctcttctctctctcctctccgagccccaaccatggatgaggcgcaagttgtggagtcaaaggatggaaccatctcagttgcttctgcatttgttgctcatcangaagctgtacaagacagggatcacaaattcttgacaaaagcagtggaagaagcataccgaggagtcgattgcggcgatggaggtccatttggagcagttgtcgtccgtaatgatgaagtggttgttagctgccataacatggttctgaagcacactgaccctactgcgcatgctgaagtaactgcaattagagaggcttgcaaaaagctcgggaaaatggagctctctgactgcgaaatttacgcgtcctgcgagccatgccc

SEQ ID NO: 78467 - DNA, 416 bp, Zea mays
cccacgcgtccgcatccatgtccaggaggtctgttgctgcacacccttggcatgatctggagataggtcctggtgctccaaccatattcaactgcgtcattgagataccaaggggcagcaaggttaaatatgaacttgacaagaaaactggactgatcaaggtggaccgtgtgctgtattcatcagttgtttaccctcacaactatggattcattcctcgcacgctttgtgaagacagtgatcctttggatgtactggttataatgcaggagcctgttatcccaggctgtttcctacgtgcgaaggccatcggccttatgccgatgattgatcagggagaggcagatgacaagatcattgcagtgtgcgctgatgatcccgagtacaggcattacaatgatatcaaggagctccca

SEQ ID NO: 78468 - DNA, 342 bp, Zea mays
gtgtacgcgtccaatgacgtctcttgcacagcgcaccataactcagcatttactgaacatggactgcagctcccctcggaggcgtcctcgctggcatgagcgggagaggagctactggtactacatctaatagcatggactggtctggtgaatgtggaccgtctgctttaatcatcaattatttaagctcataactatggattcattcctcacacgctttgtgaacacagtgatcctttggatgtactggttataatgcaggagcctgttatcccaggctgtttcctatgtgcgattgcaatcggccttatcccgaatattgatcagggagaagcagatgac

SEQ ID NO: 78469 - DNA, 321 bp, Zea mays
  unsure (1)..(321): unsure at all n locations
cgctgccaaattataagcatcgcagaagcataagagatatatcaatacaaaatgaatcatactagtatgtgttgggaccatgcttcgtcgctgaaggtcctacggaaagaaacagcttcggctgaagctgctcgtacgtgatgctgaaggtaccattcatgaagcttcggtattatagcatatccgaagatgaagggtcgaactgacttaaagatagaatgaccttttagtccataagggtctgagtcattgttgtaaacttttatgaggggcatgattgtaattcctcacgcanaaaaaaaaaaaaagggcggccgctct

SEQ ID NO: 78470 - DNA, 376 bp, Zea mays
gtgagcaccatggtcctcgtctacaacgccaccggggccagcctgagcctggtggacgacgggaaagactggatgggctccgtctacagctcgccgatcccggacaccttccacaacgggcagtggatcgccttcctccacgtcaagcccggctcgctggcgcagggcagccaggccgccagggtgttccgcggcagggacgtcgatggccggactcgggacttcgtcgtcgcctggtacatcccgtgggacaacataccgacacgagcttacactgaaattggcagtgaaaactacttcaagactcggtggagtagtgtcaaaacgagtctaggacattcaaggagagtgacccgtgccaaggacgagaactgtg

SEQ ID NO: 78471 - DNA, 413 bp, Zea mays
  unsure (1)..(413): unsure at all n locations
gcaggcagttgactttcctggagggaaagtatcctttgtggcagaaatgaacttccttccagaatcgacgagggaaaggatcaactgctaccgcgtgcttgacgacgacggcagaacgatatcaggaagtagattccaagaggtcagtcgggagctggctctgaagatgtacagcgagatggtgacgctccagatcatggataccatcttctacgaggctcagaggcagggcaggatctcgttctacctcacttccaacggcgaggaagcgatcaacatagcctctgctgctgcgctcagcatggatgacattgtgctgcctcagtacanggaacctggtgttcttctatggcgtggcttcactctgcangaatttgcannacagtgctttgggaacaagctggactatggta

SEQ ID NO: 78472 - DNA, 388 bp, Zea mays
aggcggcgcagcatcgctaccaccgtccaaagatggtgaagttcctcaagcccggcaaggccgttatcctcctccagggccggttcgccggccggaaggccgtgatcgtgcgcgttttcgaggagggcacccgtgatcgtccctacgggcactgcctcgtcgcgggcctcgccaagtaccccaagaaggtgatccgcaaggactccgccaagaagacggccaagaagtcccgcgtcaagtgcttcatcaagctcgtcaacttcacgcacctcatgcccacccgctacaccctcgacgtcgactttaaggacgtcgcatcgggcgggcccgacgcgctctccacccgggacaagaatgtcgaagcctgcaaggccgccaaggcgcgcct

SEQ ID NO: 78473 - DNA, 407 bp, Zea mays
ccccacggttaaaaaaaaatggcgggccgccggcgaacaaaaaaattcttaaaaaaccggttcaagcatttcagaaggcccaacctcaacggctacaagtgcctaaagccaagctggcgcaggccaaagggtattgattcccgtgtcaggaggaagttcaagggatgcaccttgatgcccaacattggttatggttctgacaagtcgaccaggcactacctccccagcaagttcaagaagtttgtggtccacaacgtttctgagctggagttgctcatgatgcacaacaggacctactgcgctgaaattgctcacaacgtgtccaccaagaagcgcaaggagatcgtggagcgtgctgcacagctcgacattgtggtcaccaacaagcttgctaggctccgcagcca

SEQ ID NO: 78474 - DNA, 415 bp, Zea mays
actgactcgtgagccgctatctccgtatcctccgtcgcttcgagcatcaatcatctctgcctactgcgcaaagtacactgatgagctcatcctgaatgctgcctacattggcacccctgtcaatggtatccttgctgctgaggagtccactggcaccatgtggcaagcgcctttccagcatcactgtcgataacgttgaggagaaccgccgtgccctccattagctcctagtctgctgccctggtgctctccattacatcagcagtgtgatcctcttcgaggagaccctgtaccagatgacctatgatggcaagccttttgtctatgtcctcaacgatggaagactcctccctggcatcaaggttgacatcggcaccattcaggttgttggcactgataatgagaacactgccca

SEQ ID NO: 78475 - DNA, 410 bp, Zea mays
gtttagtagaaggctcagttagcaggatcgttgcaagaaaaacaccagagagcaggtgtcctgcaatttcattagcagaagttcctagcaaacaagcaagaaatgatcatgaggcagcagagaagcttaagtttgtcatttatcaaaggcccaaagcattccaaaatggaagcactgatttgggaaacaagaatggtgcaccaaaaactgttgaagagagaatagaggaatataataaagcacgagcacgcatcttcaatggttctgtttctgcagattctgatgctgcaagtgttttgggaactctttgcactggcagagatgagtcagtaaatgttgaaccttctgttgatgaaatcaaagtcagcacgatgaacaaccgttccagagttgctgttttcaaagatact

SEQ ID NO: 78476 - DNA, 356 bp, Zea mays
attgacgaggacgatgaggctccggaggctgacaccgacatgccccctctggaggatgacgctggcgatcagcaagatggaggacgtcgactaagctgggtttattcttatggaggacagagagagaacatctggtcagttctgtgggtcttaccacttacgctattatgcactctgttgttggtatgctagtgcgagcattgtctctgctgtcttacagttaaatgtgtagttgttttgcctagtcagtatcttcaacgattcagtttcagaaaacatctcatctgtgagatgatttgggagttcgactgagagttggaacacattgcctagttcttctgtcttctgttgatgaa

SEQ ID NO: 78477 - DNA, 404 bp, Zea mays
ggtccacgcacgcgtccgggatgaataacatggtggactttgccttcccgtacctgttgcagttcatccgtgaatacactagcaaggtggatgatttagtgaaggacacaatcgagtcacagaatgaagaaagagccagagagaaggaggagaaagatcttgtggctcagcataccatgtatgcgcaactgcttcctcttgccctgcctgctccgccaatgcccggcatgggtggccctccacctccgatgggcggaatgggcatgcctccgattggcgggatgggcatgccgccgatgggccctggtccgatgccagcattcgggatgccaccaatgggaagctactgagatgtattttttggcagagagcttagatgatgaattgatatgttcctgtgtaag

SEQ ID NO: 78478 - DNA, 279 bp, Zea mays
taaaaaagccgatcaatatgatcgccctgtggagccaccagaaggtgtaccacccgtgcgccatcaatgcggcgttcgctgagttcatctccaccctcatcttcgtcttcgccggccagagctccggcatggacatcagcatgctgactcgtagctgcacgacgaccccagcgggtctgatttcagtggctgtcgctcaaacgttcgcactgtgcgaagcgctatctgttagcgcaattatctgcattggacaaattcaccctttcatcagcttccgta

SEQ ID NO: 78479 - DNA, 363 bp, Zea mays
  unsure (1)..(363): unsure at all n locations
cctgcccggctggcggctgcccccgtcttcgtcttccttaatctcaaattcncaatcctcctccgacgccttgtttctggattatccagcggggggacgccggtgtattgctcggtcctcctccctggttgcccgaggcagccgtgacggaggcngaggtagcgggggggaccatgtacagatcggcgggggtcgcgatggcgtggaacgtgttccggttctgcacggctctccgtgggctgggttccatcatgatcctactcgtcctcgccatcgtcggcgttacctactacgctgtcgtcctctgcaactacggccccgccctcctcaccggcggcggcaacactctcgccgcgctcgctg

SEQ ID NO: 78480 - DNA, 421 bp, Zea mays
attcagaactggatcgaagatttattctggaaacaacttgatctcgactacccaggcatgcctgaagcaaatgttcacagtggattttattctgcttaccacaacacaacaatgcgtgacagagttatgagaggtgttaaaaatactaggaaactgtatggtgatattcccatcatggtcacaggacattccatgggaggagctatggcttcattttgtgcccttgatcttattgttaatgttgggttcaaggatgtgtcactcatgacatttgggcaacctcggattggcaatgctatatttgcatctaatttcaaaagatatttgccgaatgcaattcgattgatcaatgcacatgatattgtgcctcatttacccccatactatcactactttccacagaagacataccaccattttc

SEQ ID NO: 78481 - DNA, 383 bp, Zea mays
cccatccgcacctctctccatctccctgctcctccgccttcttcttgatccagccaagccagggatcgccatgtcggactcggaggagcaccacttcgaatcgaaggccgacgccggagcgtccaagacctacccgcagcaagctgggaccgtccgtaagaacggcttcatcgtcatcaagaaccgcccctgcaaagttgtggaggtttctacctcaaagactggtaagcatggtcatgccagatgccactttgttgccatagatatattcaacgggaaaaagctcgaagatattgttccttcgtcacacaactgtgatattccgcatgtgaaccgtactgagtatcagctgattgatatatcagaggatggatttgtgagcc

SEQ ID NO: 78482 - DNA, 395 bp, Zea mays
  unsure (1)..(395): unsure at all n locations
gaacggacatggcatgcagtgggtgcagctgcgaggcggcggtgggggcgatggcgtcggaggcgtacctggagggggcgccggtgcgggaggcgcgggagctggtggcggagctctgtcggcacttctacgcgcagggatgggtcacgggcaccggcggcagcatcaccgtcaaggtcaacgaccccgccgtgccgctcgccgaccgcctcatcgttatgtcaccctccggtgtgcagaaggagaggatggtagcagaggacatgtatgtgatggctgcagatgggaaagtgctttctgcgcctgtagcanagccatgggcaaacaagcctcctaagtgcacggactgtgctcctctgttcatgaaggcgtatctgatgaaaggacctggggct

SEQ ID NO: 78483 - DNA, 398 bp, Zea mays
acgaaacatagctacctactactcaagtatccatccttattgagtacagtgttgatccatggactcggaaggagttgtagcagcaaaggtggcagatgagactactaaaccggcaatccaagaagacggcgccgagagcaaggccgggatgactgatctgctgatgctgaccgacaagtcgcagctgcaggcgctggcgatgctgctgcggaacaacgaggagctcatgatgagccaggcgatcaagtcggagacggagcgcattgagtacctcaagacggtgagcgactgctacacgcggacgatgaagctcctcgacgattccatggcggccaggaccacgtacgagcgttcgggcggaacgaggagcctcgtcgcccgggacatggacgactacg

SEQ ID NO: 78484 - DNA, 359 bp, Zea mays
ccaatcacatcctccacccaatcgaaggacctagcgagcggcagcggcggcggcgatcggagaagatggtgcgcaaggcgaaggttgagttcgacgagcagccgccggataacttcgacccgaagaacccgtatgccgacccggtggcgatgctcgagtaccgggaacacctggtgcgagagaagtggatccagatcgagaccgccaagatcatccgggagcgcctccgctggtgctaccgcatcgagggcatcaaccaccaccagaagtgccgccacctcgtcgaccaatacctagaggctacccgcggcgtgggttggggcaaggatgcccgcccgcctgaactccacgagcccaag

SEQ ID NO: 78485 - DNA, 421 bp, Zea mays
ggtcgacgcccgcgtccgcacaaactttcgcgctgctaccgccgccgcggcttccttctctacccttcttccctcgcgccgccgccaccgcaagagtatctcaactctgccccgagacctcccccctcgctggtctcagccatggtgaaatattcgacggagccgaccaaccccaccaagtccgccaaggccatgggccgtgacctacgtgttcacttcaagaacacacgtgagacagcttttgcccttaggaagttgtcactcaccaaggccaaaaattaccttgaggatgtgatcgcccacaagcagggcatcccgttccgcacgtattgtggtggtgttgggcgtactgctcaggctaagtctcgccactcgaatggtcaaggacgctggcctgtcaagtctgctaaattcattctag

SEQ ID NO: 78486 - DNA, 402 bp, Zea mays
ggtaaacgcatggagattatcgaactgccaactcataggtttttcgtcggtgcacaatttcatcctgaattcaagtcaaggcccggcaagccatctccgcttttcttaggattggtagcagcgtcatcaggtcagcttgatcacctgctccaacctggtcttatcagttcgactggcagacacacctgcagcaaaggaggagcgcaaaaattaaaggctgggcacgtcatgaagccactgaatggcctggtgaacgcacactattcagcaaccggcaatggcgccattcccatctagcagcgcagagctgcgacgcgtcgcgtgcttgtttgggatttctcttctaccgttactgcttgttccttttttttccctttccctcgaagggtgttcttccgtacg

SEQ ID NO: 78487 - DNA, 342 bp, Zea mays
agtcaaagatgccatctcccagattgttggggatgccaaggagaagaataggaagttcactgagactgtggaacttcagattggtctgaagaattatgatccacagaaggacaagcgtttcagtggctctgttaagttgccccatatccctcgtcccaagatgaaggtgtgcatgcttggtgatgcccagcatgttgaggaggccgagaagatgggacttgactacatggatgttgaggctctcaagaaaatgaacaagaacaagaagcttgttaagaggcttgccaagaagtaccatgctttcttggcatcagaagccatcatcaagcagattccccgtct

SEQ ID NO: 78488 - DNA, 307 bp, Zea mays
acttgcgtttccaagtccgatacaaaccagcgccgcgccgcgcgagcacgtcgggcgacgttgcggcaggcgagatccgagaacactcctccctcgcgcccccgcacccgcatggccgccgctggccgcagatagggaggcgcaggcgggggcgtgcagatccagatccggtgggcggcgaggacgagatcgccccctaccaccatggcgggcgccgtgtcggcgctcttcctgctggacattaaaggccgcgtcctcgtctggcgcgactatcgtggtgatgtctccgcgctccaggccgaacgct

SEQ ID NO: 78489 - DNA, 407 bp, Zea mays
cagcgatccgaagctcaatcaattcactcaaacctcttccccaaatcttcgattagattctcgttgacaagaagactagaaccgaacctgaccatgtcgctgatccgccgcagcaacgtgttcgatcccttctccctcgacctctgggacccctttgagggcttccccttcggctccggcagcagcagcagtctcttcccctcgttcccgcggaccagctcggagaccgcggccttcgctggcgcgcggatcgactggaaggagactccagaggcgcacgtgttcaaggccgacgtaccggggctgaagaaggaggaggtcaaggtggaggtcgaggacggcaacgtccttcagatcagcggcgaacgcaacaaagagcaggaggagaagacggacacctggcaccg

SEQ ID NO: 78490 - DNA, 432 bp, Zea mays
atcgatacctcaacctccaattaatcaattcagcaaacatcattctaatccccaaaaaggaaggcgcggaggtagctggggacttcagacctataagcctcatccattctttcattaagattatcaccaaaaccctggctcttcgtctggcgccgagaatgaatgagttagtttcaccttgccaaagtgccttcattcaaaaaaggagcattcatgaaaacttccttgcagttagaagcgctgttaggcgcttccagcgtattaattcgcccacgctattcctcaagctagacattgaaaaagcttttgactccgtccgctgggattacttgattgccttactccgcaatttgggattccctgtgaggtggactgactggatcgcttctatcctctccacctcaacatcaagagtgctcgttaacgggggtc

SEQ ID NO: 78491 - DNA, 414 bp, Zea mays
  unsure (1)..(414): unsure at all n locations
ggcctcactctttttcctcgcactccgcaagacgcaagaccacctcaccagcctcctcgtccccgatctcctcccacccgcatccaagggtttccttctcgaccgtgcggaacgagccagagaacaggtatggcggcggcgcggcacctcagatccggcctcnccctcctccgcgcccacctcgcatcctccgaatccgcggccgtcgctcaagtttcgaggggcttcgcgtcgcaagccgccaagcccaccgggaaggagatcaaggttccaaaggctctgtttggcngcacaagcaactatgccagtgcactgttcctcacagcagctaaatctaatgcattggacaaagttgaatctgagattaaagctattgtagaggcttccaagaagagcccgttgttttctcaattc

SEQ ID NO: 78492 - DNA, 393 bp, Zea mays
ggaagatgtccggttttgggcaccgtgtgtataaaaactatgaccctcgtgctaaagtcataaggaaattggcagatgaggtgttctcaattgttggacgggatccacttattgaggtggccattgccctagaaaaggcagccctgtcagacgaatattttatcaagaggaagctgtatccaaatgtggatttctactctgggctaatttatagggcaatgggattccctacagaattttttcctgtgctgtttgctattcctcgcatgggtggctggctagcgcattggaaagagtcactcgatgatcctgacactaagattataaggccccaacaggtatacaccggcttctggcttaggcactatacccccgtcaaaaaacgagtgctat

SEQ ID NO: 78493 - DNA, 414 bp, Zea mays
  unsure (1)..(414): unsure at all n locations
tgtcctcgacctttgatccgacanattggctgcattctctgctgcatacgcagaacttgaatctgtactttctggattgaatgtgcttgttgagacttactttgctgatgttcctgctgagtcctacaagaccctaacatctctgagcagtgtgactgcttatggttttgatcttgtccgtggaacccaaactcttgggcttgtcacgagtgctggtttccctgctggaaagtacctctttgctggtgttgtggatggacgcaacatctgggctgatgatcttgctacatctctcagcactctccagtctcttgaggctgttgttgggaaggacaagcttgtcgtatcaacttcctgctcgctcatgcacaccgctgtggatcttgtgaacgagactaagcttgacagcgagat

SEQ ID NO: 78494 - DNA, 410 bp, Zea mays
ggaaaaagagagcagagaaccctagctagagtttggcgagtggtgcggaggcgcggctgctcctgctcgtcgcgacgtcgaatttcagcgccgcccgcgcgatccttggtctcttcgcccgtgaggagaggcgcgacaatggctgggaaaggcgggccgaccaacctggagaaggagcagatgtttgggatggcggagaaggagatggagtacagggttgatcttttcaacaggcttacaaagacctgttttgagaagtgcgttgaaaaaaggtataaagaagctgagctcaatatgggtgagaacagttgcattgatcgatgtgtttcaaagtattggcaggtgactaatttagtaggtcagatgcttgggaaccagcctcagatgtgaaccgagatgcactagttcca

SEQ ID NO: 78495 - DNA, 437 bp, Zea mays
  unsure (1)..(437): unsure at all n locations
gtcgagattagcgggtccacgcacgcgtccggaagaggccgggtaccccgctctacaacatcaaggctttcctccctgtcatcgagtcctttggtttctccagccaactgagggccgcaacctctggtcaggcgttcccccagtgtgtctttgaccattgggacatgatgggctcagatcctttggaggccggctcccaggctgctcagctggtgctggatatccgcaagaggaagggtctcaaggaacagatgacccctctttctgagtttgaggacaagctctaaaatttttggctgttggtgatactgtttcatctgccggtttaatcatcaattcgtctactgtaatagcagcgacttcaatattttattttgttttagttgtcanatgcacctgtttttgaacantatttgtgatgtantgccctgccgcgc

SEQ ID NO: 78496 - DNA, 418 bp, Zea mays
  unsure (1)..(418): unsure at all n locations
cccaggtacacgtccgcacgctgagtcgttgcctgctgcggattgcccccaggcgggccccactcattccgctgctgaaatttcgtttggttctcctttccgttcttgtccgtcgccaaggccttccgctcgctccccagctccagcaagcagatcagatccatccaaccacgaacaagaaggaaggtatgangaagggctgaagttgaaccatgagtgccgtcgcggtttcgtcgtcgctgaacccgaacgcgccgctcttcatcccggcggcgctgctgcaagtggaggacttctcgccgcagtggtgggacctcatcaccaccaccgcctggttccgcgaccactggtcccgcgagcacgcccacctggacgagatagccgagcagctcgagttggtcgccctccttgcctacga

SEQ ID NO: 78497 - DNA, 308 bp, Zea mays
gagactacaccacagccacttttgaaggatgactttgaattcaacggaaggaaactaacaaaggctggtgtgagacaaatgatataacgggatattttggagtatcatcgccagatgcttcaggactacatcgaatgtgcagatcacattcacttcctatacccaagtggggttgatcgcgtccaacgacagattgctcatctcgacgagaactacaggagacgagtatctagcagcccgtcgcgaacgcagcccacatcgctgccaagggagcgagtctgctcatcagatcatggtcacagtcacga

SEQ ID NO: 78498 - DNA, 367 bp, Zea mays
tacgcatctgtacaacttcgggaaaagccaacggctcgtcagctataattcaccggacatgtccggtgtgcaccggactgtccggtgtgactccagcgcaacgggtatcccgcgccaaccggtaacttgcaaaggcattaaatgcgccgcagcgcgcgcagatgtcaggtttgcccatactggcgcaccggacaatgaacaggagctgtccggtgcgccaccggacatcaagggtggcccacaagtcagaactccaacggtcagattccaacggcactgatgacgtggcaggggcaccggacatgtccggtgtgcaccggactgtccggtgcgccatcgagcagactggctccccaacggccacatt

SEQ ID NO: 78499 - DNA, 177 bp, Zea mays
gcgggcttcgcgcatggcaggacggaggtggggggcgaacgcgagatcgccgccttgcgtcgcgcacgtcacgcacgaggacggacatttctgctaggtcagcgagatcaacaagagcaacgcctactgcgacgcaggcaacaggcagtggccgtgcgcggtggagcagaagtacga

SEQ ID NO: 78500 - DNA, 208 bp, Zea mays
ccacagttgaccgactccattgtgctaccagagaagtttgagttatttggacagaacatcgacctgagtccactgaaaggcatattttcttccatcgaaaatgcagcatcctcggttgcaaagaccatatctgagcagcctccgctcaaaataccgatcaggacaaacaatgctgaatcgtggttgcttacgacataccttgacgaac

SEQ ID NO: 78501 - DNA, 208 bp, Zea mays
cggacgcgtgggcggacgcgtggggcaagaataagaaggacataagcggcaacccccgtgcactgcgccggctgcgcacggcgtgcgagcgcgccaagcgcacgctgtcatcgactgcccagacgaccattgagatcgactccctgttcgagggcatcgatttctactccacgatcaccagggctcgcttcgaggagctcaatatgga

SEQ ID NO: 78502 - DNA, 182 bp, Zea mays
  unsure (1)..(182): unsure at all n locations
gccgatacgaatccgacgagctcgatcgctccacttccccgatcgcacgccaatcagcaccagccaccgtggcgatgacggaggaggcggaggcgaaggcgaagggcaacgcggcgttcgcggccggccngtttcgaggaggctgtccagcacttcagcgacgccatcgcgctcgcgcccga

SEQ ID NO: 78503 - DNA, 185 bp, Zea mays
aggcctgtccccgtggtacgacaacctatgccgccctgtcacagacttgctgcccattatcgccagcggcgtccgtggagtcaccagcaacccaacgattttccaaaaggccatttcatcgtccagcgcatatgatgatcagttcaagcagctcatttcggcaggaaaggatgcggagagcgcta

SEQ ID NO: 78504 - DNA, 182 bp, Zea mays
cggacgcgtgggctcttggagatagtgtgatatgcaaggttgattacaaccggcgcacactgattgctccaaatcatacgtgtacccacatgttgaactttgctctaagggaagtacttggtgatcatgttgaccagaagggttcaattgttctaccagagaagctaagatttgatttctca

SEQ ID NO: 78505 - DNA, 216 bp, Zea mays
aacgtccgaaaaaatagcatgtaaatctataaaatcaatttccatctctcaccctatgaatttgagataggtttaaatgataactttggaaagtggtgaatgtcacattctaaaaaagtagcctattccattagtaagattccaattcctcaaaatgaaaggaaacaaacgggaccttaatctatttcttgtaaaagcatggattgggttggaata

SEQ ID NO: 78506 - DNA, 209 bp, Zea mays
ccacgcgtccgggcaaacggtggctgtcggagtcatcaagagtgtggagaagaaggacccaactggagccaaggtgacgaaggctgctgccaagaagaaatgatctatctggctggtgctgtgcttgcttgttggttacctcgtggaagcttaaaatatctcgtcttgttgacatccttgcagttgtcgcgtgaacaagtaatctatga

SEQ ID NO: 78507 - DNA, 206 bp, Zea mays
gtgtggcgcaagtcgctgctcttcaactgcgacggcttcaccgtctacgacgcccgcggcgacctggccttccgcgtggactgctacgccggctcgttccgccgccggcgccgcgccgacgtcgtgctcatggacgccacggggaagccgctgctcaccgtgcgccgcaagacgcggttcggcttagcggagcgctgggtcatcta

SEQ ID NO: 78508 - DNA, 182 bp, Zea mays
  unsure (1)..(182): unsure at all n locations
cccacgcgtccggtgccatacatcctatcactcggtatgttatgaactatctccgtgctgcgtgtgggtcgcggcagacattggaagaggtgatggaaggtgactttggtgttaatagaggtgcgcctngtggctgttgaccctgaccgccccacatcatcccttgctgtgcacatcgcatg

SEQ ID NO: 78509 - DNA, 182 bp, Zea mays
tacgaaacgaattaatccccaatcaacacagcaagtcagcaacaagcaaagcagcgacccgagagatggacgcgaggatgttcgggctggagaccccccgggtggcggcgctgcatcacctgctggacgtgcccgacggcgacaaggcgggcggcggcgccacgcgcacctacgtccgcgac

SEQ ID NO: 78510 - DNA, 183 bp, Zea mays
gaaacatagctactcctactactcaaatccatccttattgagcttagtgtttgatccatggactcggaaggagtagcagcaaaggtggcagatgagactactaaaccggcaagccaagaagacggcgagaagcaaggccgggatgactgatctgctgatgctgaccgacaagtcgcagctgca

SEQ ID NO: 78511 - DNA, 206 bp, Zea mays
gtcagtgtcaccacgggatcctagcacatcctccactggctaagggaccattagggttttgtggaggggcgatggcggcggctgatgtggagtaccgttgcttcgtcggcgggcttgcctgggccaccagcaacgagtcgctggagaatgccttcgcctcctacggcgagatcctcgactccaaggtcatcaccgaccgggagacg

SEQ ID NO: 78512 - DNA, 184 bp, Zea mays
  unsure (1)..(184): unsure at all n locations
atcacaacgaacaaaagctctcgatctcaccgacaccgaggaagaagagatcaatggcgtccgagcagggagtcgtgatcgcgtgccacagcaaggctgagttcgacgcccacatgaccaaggcccaggnaagccggcaagctggtggtcatcgacttcactgccgcctggtgcggtccatgcc

SEQ ID NO: 78513 - DNA, 177 bp, Zea mays
ggcagagtggccttgctgccacgatccactgagatccagccccgcgtcgcacggattcgtctgcaaaggattcagcacgccgcccgttgggaagggagcttcgaggcggcccgccgcggcgcgtcggccgggcgggctgagccaatggcacgggcccttggggcgcgaacgccctaa

SEQ ID NO: 78514 - DNA, 209 bp, Zea mays
cacacagcgaaccgagaaaccaacacaacaagcaaagcagcgatccgacatccgagagatggacgcggtgatgttcgggctggagactcccctgatggccgcgctgcagcacctgctggacgtgcccgacggcgacgccggcgcgggcggcgacaacaagacgggcagcggcggcagcgccacgcgcacctacgtccgcgacgcgcgcg

SEQ ID NO: 78515 - DNA, 182 bp, Zea mays
acggagcacgacgcacgcagagccgcagagatccgtcacactgcaagttttgaaaactgaactgtaagatggcatcagcagagctttcccgtgaggaaaatgtgtacatggcgaagctcgccgagcaggcagagaggtacgaggaaatggttgagttcatggagaaggtagcgaaaactgtt

SEQ ID NO: 78516 - DNA, 195 bp, Zea mays
gagaaaccaacacaacaagcaaagcagcgatccgacatccgagagatggacgcggtgatgttcgggctggagactcccctgatggccgcgctgcagcacctgctggacgtgcccgacggcgacgccggcgcgggcggcgacaacaagacgggcagcggcggcagcgccacgcgcacctacgtccgcgacgcgcgc

SEQ ID NO: 78517 - DNA, 222 bp, Zea mays
ccggctcgacccaaacgtacggtcagacgtcagccagcagttcgaaaccagggatcgatccaggagcttccggaaggctaggcgcgcgcgcagcgtcgaggtgctggtgccggtgccgcccatggatcgggctcgcggatccgcgttcctgctcggcgtcctgcacgcaggatccgtgctcgcgttttcagtcgcgaaagaggagaccacgaagctcgggac

SEQ ID NO: 78518 - DNA, 215 bp, Zea mays
agcaaggcaccacacctcttcctcctcttcctcctcctagcacagctagcgcctgctccccttcgtctgtgatcatgtcttgcagcagcggcaagtgcaactgcggctccagctgctcctgcggcagctcatgcaactgcatgtcccctgacgtggagaccgccgccgccagcagcatcaagaccatggtcctcgctgcgccgaccaccaaggca

SEQ ID NO: 78519 - DNA, 213 bp, Zea mays
cgacgactaccagaagtggcgctggcagcccgacggctgcgacctccccagatttgaggctaagttgcttctggagaagctaaggaacaaaaggctgatgtttgtgggtgattctctgaatcggaaccagtgggagtccatggtgtgcctggtccagtcagaggcaccatgggacaaaaaatctctcgtcaagaatggttctcttaatgtctt

SEQ ID NO: 78520 - DNA, 184 bp, Zea mays
cccacgcgtccgcgcgggcggacaaggagcaggcggaggaggagctgtgccaagccacaatgggtatctcgcgtgactcgatgcacaagcgccgggccaccggtggaaagcagaaggcctggaggaagaagcgaaagtatgagcttggtcgccagccagccaacaccaagttgtcaagcaataa

SEQ ID NO: 78521 - DNA, 214 bp, Zea mays
agccttcccttacccggcggcttaaaccctagttctcactcccatcgccgcttcagctccgccgcagcagatggagttctggggtctcgaggtcaagcctggttccactgttaagtgtgagcctggatatggctttgtgctgcacctttcccaggctgctcttggggaatcgaagaagagtgataatgccttgatgtatgtcaaaattgatgac

SEQ ID NO: 78522 - DNA, 219 bp, Zea mays
acgcagctgaagcagttcttcccagcaaggacgatctgaggaagaccattactgaaatcctcaagaaagttgacttcaacacggcaactttcagtgacattctgaagaagctcgacaatcactacaaaatggatctgaccccaaagaaagaagccatcaaagttatgatccaagacgagttgaccaagctatcagaggaggatgaagaaggagagggag

SEQ ID NO: 78523 - DNA, 185 bp, Zea mays
cgcctctgaccagttcggtaccgccggatcgtcagcgtcactccccgcctcctctccccaatgacagtaggtttcacctcggaatggcggatcatgctaaccaatgtcactgtccttcagtaagcacggatcgccagattccattctggcgctcgagtcacactcgtgcaaggatgtggcggtgc

SEQ ID NO: 78524 - DNA, 214 bp, Zea mays
gcagaacggcatcaacgagaacaacaccatcatcgaccggcagggcctgatgaacatccacatgccggcctacctggacgcgctccgcaagggcgtctccaccgtcatgatctcctactccagctggaacgggctcaagatgcacgccaaccacgacctcatcacaggcttcctcaagggcaggctcaacttccagggcttcacgatctcggat

SEQ ID NO: 78525 - DNA, 182 bp, Zea mays
cgactccagcatccctcgtccccgcatcaccgcgccgccgacactccgctcgctttcgctcccgagacccgggcctgccgagccgccgccatggacgaggagtacgacgtgatcgttctgggcacggggctcaaggagtgcatcctcagcggtctcctctctgtcgacggcctcaaggttct

SEQ ID NO: 78526 - DNA, 263 bp, Zea mays
ggttgccctggcggtactagtctagaattcccgggccctcacctatcatcgccgctgcgccgtctcctccgctcccgtcgtccggaaagatggcgtcccacattgttggataccctcgcatgggccccaagagggagctcaagtttgcacttgagtctttctgggatgggaagagcaccgctgaggatctggagaaggttgctaccgacctcagggccagtatctggaagcagatggctgatgctgggatcaagtacatcccc

SEQ ID NO: 78527 - DNA, 184 bp, Zea mays
acccacgcgtccggcatcgatccgccattgctcaccgcacaagtgcacgctcacctcacacacgcagctaagtagctaacgccgtaggcgagaacaagaaaaggctcgacatggccgaggagaagaagcagggcctgcagctgctggacttctgggtgagcccattcgggcagcgctgccgcaa

SEQ ID NO: 78528 - DNA, 185 bp, Zea mays
  unsure (1)..(185): unsure at all n locations
aggcccttttggaggtggtggcagcagtaggggcagaaggcagcgaaggggagaggatgtggttcatcctctgaaggtttctctggaggatttgtacaatggcacatcgaagaagctctctctgtcccgcagtngttctctgctccaagtgcaatggtaagggttcaaagtctggagcttcatcg

SEQ ID NO: 78529 - DNA, 119 bp, Zea mays
catgaactcaaaaataaaccaaacaaacagccaaaaggacatggccggctctccgtctcctctctctctcacacacacctctttttgtttgcaaactgtgttacgcatgcgctgcaggc

SEQ ID NO: 78530 - DNA, 203 bp, Zea mays
acttccttggcagggcttgaaagcagccacaaagaaacagaagtatgacaaaataagtgagaagaagctttcgactcctattgaggctctatgtaaatcccatcctgtggaatttgcttcctatttccactactgccattctctgacatttgatcagcgtcccgattatagtttcttgaggcatgtctttcgagaattgtttg

SEQ ID NO: 78531 - DNA, 201 bp, Zea mays
ctttttgttcctcgcgccgccgccgccgccgccgtgacggaaggaagaggaggagcaaggagcacgacgcgatgggccactccaacgtgtggaactcgcaccctaagaactacggccctggctcccgcgtctgccgggtctgcgcgaaccctcacggtctgatcaggaagtacgggctcatgtgctgcaggcagtgcttca

SEQ ID NO: 78532 - DNA, 178 bp, Zea mays
cgggcttcgcccatggcgggacggaggtggagggcaagcgcgagatcgccgccttcttcgcgcacgtcacgcacgagaccggacatttctgctacatcagcgagatcaacaagagcaacgcctactggcgacgcaagcaacaggcagtggccgtgcgcggcggggcagaagtactacg

SEQ ID NO: 78533 - DNA, 176 bp, Zea mays
cccacgcgtccggcagcgatccgaagctcaatcaattcactcaaacctcttccccaaatcttcgattagattctcgttgacaagaagactagaaccgaacctgaccatgtcgctgatccgccgcagcaacgtgttcgatcccttctccctcgacctctgggacccctttgagggct

SEQ ID NO: 78534 - DNA, 200 bp, Zea mays
cccacgcgtccgcccacgcgtccgcccacgcgtccgcccacgcgtccgcggacgcgtgggtgggttggcttctcctccccctccggttcgggttcgggttcgtgaggttctccggggttcggtttcgtgggtgagcggatcgagatggcggcgtcggatgttgagtaccgctgcttcgtcggcggcctcgcctgggccac

SEQ ID NO: 78535 - DNA, 196 bp, Zea mays
acgagaactgcacggtctacatcgacgccgcgcccggtaaggacgaactggtctacagggtggaccggagcggcggtctggtgaacgctgagacggggatgaagtcggacatcctgatccaggtccccaccagctccaccaggagcgacgctgcgcaggccgtcaagaagatgaggatcatggaggaggacgagga

SEQ ID NO: 78536 - DNA, 180 bp, Zea mays
  unsure (1)..(180): unsure at all n locations
cgaactcaatgatggaaaaccaagaaagattaagaatgcaaggccttattcttttactctagaagaagacaccacctcatatggcacttactttagaggtggtattgtcacacaggtgaagccaccanaaggttcttaaattcaaaaccttgaaggatgcaatcaaggagccaggagaac

SEQ ID NO: 78537 - DNA, 180 bp, Zea mays
agatcctcaaggtcatccgcaagaacctggtcaagaagtgcatcgagatgttcttcgagatcgcggagaacaaggacgactacgccaagttctacgacgccttctctaagaacatcaagctgggcatccacgaggactcgcagaaccgcgccaagctcgccgacctcctgcgctaccaca

SEQ ID NO: 78538 - DNA, 199 bp, Zea mays
cgagcactcgacaccagcgtctaacgggatggcgagcctgaccatgccgccggtgccggcgtggccgcggcaggacgccatcgacctccacaaagcattcagagggttcggttgcgacagcacgacggtgaccaacatcctggcgcaccgcgacgcgacgcagcgctcgctgatccagcaggagtaccgggccgtgttc

SEQ ID NO: 78539 - DNA, 198 bp, Zea mays
gttgggaataaactactacacctcaatattctccaaacatatcgacatctcaccaaaatactcgcctgttctcaacactgacgacgcctacgctagtcaagaaacgtatgggcctgacgggaaacccattggtcctcctatgggaaatccgtggatctacttatacccagaaggcctaaaggatatccttatgatcat

SEQ ID NO: 78540 - DNA, 194 bp, Zea mays
accagccgccgtcatgtcgaagcgaggtaggggaggttcggctgggaacaagttccgcatgtcactgggtctaccggtggcggccacggtgaactgcgcggacaacacgggcgcgaagaacctctacatcatctccgtcaagggaatcaagggccgcctcaaccgcctcccgtccgcctgcgtcggcgacatgg

SEQ ID NO: 78541 - DNA, 178 bp, Zea mays
gcagcttctgcttgctctggggggaaggagagagagagagcgagagagatctagtagagaggctagctaggtggtcctcgaacgaagatgttggcggtgttcagcgggcaggtggtggaggtgccggcggagctggtggcggcgggcagccggacgccgtcgcccaagacgaaggcgt

SEQ ID NO: 78542 - DNA, 201 bp, Zea mays
cagcctggatgaccccaacaccttcggcaaccggatccaccgcatgctcaaactcggtctgagcatcgatgaggacgagcctgttgaggcagaggctgagatgcctcagcttgaggacgacgctggtgaaagcaagatggaggaggtcgactaagtgtcgcatcgcatgcttgccgtttatcttatccctagctaagctac

SEQ ID NO: 78543 - DNA, 214 bp, Zea mays
gggtcgacccccacgtccggtggtcaatgagcacaggtatgtcccagacacatgatatgtgctccatgacattgaccaggaggccaaggaacaggcattgctgtaccacagtgagaggctggcaattgcttatggtctgattagcactccagcacgaactccacttcgtatcattaagaacctgaggatatgtggtgactgccacaacgccatc

SEQ ID NO: 78544 - DNA, 198 bp, Zea mays
attcctttcgtgggcagctgagcctgagatggaagagagaaagctgatgggagtgaaatggatctttctactatcactagcgcttctccaagctgcctactaccgccgcatgaggtggtcagtcctgaagtcccgaaagctggtcctggatgtcgtcaactgaggactatcattaccctttttttattgaaatatgtt

SEQ ID NO: 78545 - DNA, 194 bp, Zea mays
gtggtcaatgagcagaggtatgtcccagacacaagatatgtgctccatgacattgaccaggaggccaaggaacaggcattgctgtaccacagtgagaggctggcaattgcttatggtctgattagcactccagcaagaactccacttcgtatcattaagaacctgaggatatgtggtgactgccacaacgccat

SEQ ID NO: 78546 - DNA, 179 bp, Zea mays
cggacgcgtgggtgcgcctccatttcggcctctgtcccttgcaagttcaatctcacctccaaccatgggtaaagagaagtcccacatcaacattgtggttattggccacgttgactctggcaagtcgaccaccacaggacacctgatctacaagcttggaggcattgacaagcgtgtga

SEQ ID NO: 78547 - DNA, 177 bp, Zea mays
atccaggacaactggcgcatcctcgacttcttctcgcaccacccggagagcctgcacatgttctccttcctcttcgacgacgtcggcatccccgccgactaccgccacatggacggatccggggtgcacacgtacacgctcgtcagccgcgccggcaccgtcacctacgtcaagttc

SEQ ID NO: 78548 - DNA, 217 bp, Zea mays
ggcccgggtcgagtacaggtcggagagcacaggggggtcgtgttccagcccttcgaggagatcaagggggagctcgcgctcgtgccccagtccccagacaagtcgctcgcgcgccacaagttcgtcgatgactgcgaggccgccctcaacgagcagatcaacgtggagtacaacgcctcgtatgcataccactccctcttcgcctatttcgaccgcg

SEQ ID NO: 78549 - DNA, 218 bp, Zea mays
gggccgacccacacgtccagcagcaacgaacacgaaccttggcagaacgaagctgaagtagttcgctgtgaacccagtatggcaaacgcgccgaggatcctggccctcggcctgctagcgctcctgtgcgctgccgccggcccggccgccgcgcagaactgcggctgccagccaaacttctgctgcagcaagttcggctactgcggcacgaccgacgc

SEQ ID NO: 78550 - DNA, 198 bp, Zea mays
cagataaggaagaggaggagggcaggatgtcgcaccgtaagttcgagcacccgaggcacggctccctcggcttccttcccaggaagcgctcctcccgtcaccgcggcaaggtgaagtcattccctagggatgaccccaagaagccttgccatctcactgccttccttggctacaaggctggcatgactcacattgtcc

SEQ ID NO: 78551 - DNA, 194 bp, Zea mays
gtcagtccgatatctattcttttgggattgtggtcttgcgccttttgacaggaaggcctcctgatggcataaagaagattgtggaggatgccatggagaaaggcgacctgaactcagtagttgataccttggcaggagactggcctgctttgcacgtccagcagttagcactccttgctcttagttgcacagag

SEQ ID NO: 78552 - DNA, 179 bp, Zea mays
aagcaacaaggcagcagcacaagcaagaaccacacctcctcccttcgcctgtgatcatgtcgtcttgctgcggcggcaagtgcgggtgcggctccagctgctcctgcggcagcggatgcaacggctgcggtatgtaccctgacgtggagaccgccgccaccagcagcgtcaagaccacg

SEQ ID NO: 78553 - DNA, 199 bp, Zea mays
caaacatgcaatgcatcgagctcttgaacgcaatggacaggtggttttactgggttctgcaccagatcctcgcatacaaagtgactttacaaatttggccagtaagctgcatggtgaataccatggccgagtgaagctatgtctaacctatgacgagccactgtcacatttgatatatgctggcgcagacttcattctc

SEQ ID NO: 78554 - DNA, 202 bp, Zea mays
acccacgcgtccgcccacgcgtccgcccacgcgtccgcccacgcgtccgatttggtgcgtttgtaagccgggctgctatctccactgttgatgttctgactcctaaagtattcatcgggcttattgtcggtgctatgctcccgtactggttctcggcaatgaccatgaagagtgtgggcagtgctgcgctcaagatggtgga

SEQ ID NO: 78555 - DNA, 194 bp, Zea mays
cgctcactggcaatggctaccattaccaagctcgtggcccttggcttggccgtcctcgtgagcgttgggttctccgatgcagcgagggtagttaggcttgggagctatgcgtctgccggaggaggcggcggcggtggaggcggcggctccggatcgaccggggctgctgggtacggcggtgggtctggcggtgg

SEQ ID NO: 78556 - DNA, 180 bp, Zea mays
ccccgctccgcctccactcctcgcgccgctgccgcatctcctctacaggtaagaaggagagaaagagggcgaaatggtgaagcacaacaacgtcatccccaacgggcacttcaagaagcactggcaggaactatgtcaagacatggttcaaccagcccgcccgcaagcagaggcgccgca

SEQ ID NO: 78557 - DNA, 181 bp, Zea mays
aagcaacaaggcagcagcacaagcaagaaccacacctcctcccttcgcctgtgatcatgtcgtcttgctgcggcggcaagtgcgggtgcggctccagctgctcctgcggcagcggatgcaacggctggcggtatgtaccctgacgtggagaccgccgccaccagcagcgtcaagaccacgg

SEQ ID NO: 78558 - DNA, 198 bp, Zea mays
cgagaagagcggcggcgcgggcggacaaggagcaggcggaggaggagctgtgccaagccacaatgggtatctcacgcgactcgatgcacaagcgccgtgccaccggtggaaagcagaaggcctggaggaagaagcgaaagtatgagcttggtcgccagccggccaacaccaagttgtcaagcaataagacagtgagga

SEQ ID NO: 78559 - DNA, 202 bp, Zea mays
acaacatcaagctctatgtgcgcagggtgtttatcatggacaactgtgaggaactgatccctgagtggctgagttttgttaagggtattgttgactctgaggaccttcccctcaatatctcccgtgagactcttcagcagaacaagatcctgaaggtgatccggaagaaccttgtgaagaagtgtgttgagctcttctttga

SEQ ID NO: 78560 - DNA, 199 bp, Zea mays
aacttcctcttatctatctggcagcaactgctggtgccaggcttggtgtagcagaggaaataaagtcatgcttccatgtcggctggtctgattatgagagccctgaacgtgggtttcagtacatttacctcactacacaagattactcacgtctaagctcttcagtaatagctcacgagctgcaactaaaaaatggaga

SEQ ID NO: 78561 - DNA, 196 bp, Zea mays
gtaaaaattgtggaagtagggccacgagatggtctacagaacgagaaggacatcgtgccaacacctgtaaaggttgagcttatacgaagattggccacatctggattacctgttgtggaggcaacgagttttgtatctccaaaatgggtacctcagttagctgatgcgaaggatgttatggaagcagttcggacta

SEQ ID NO: 78562 - DNA, 198 bp, Zea mays
cggacgcgtgggacaaggcagcagcacaagcaagaaccacacctcctcccttcgcctgtgatcatgtcgtcttgctgcggcggcaagtgcgggtgcggctccagctgctcctgcggcagcggatgcaacggctgcggtatgtaccctgacgtggagaccgccgccaccagcagcgtcaagaccacggtcctcgccgcg

SEQ ID NO: 78563 - DNA, 177 bp, Zea mays
cttctcctccccctcttaccaagtcctcctcgggttagggttccttagggttttgtggaggggcgatggcggcggctgatgtggagtaccgttgcttcgtcggcgggcttgcctgggccaccagcaacgagtcgctggagaatgccttcgcctcctacggcgagatcctcgactcca

SEQ ID NO: 78564 - DNA, 180 bp, Zea mays
ctcctcgacgtccgcctcatcgcgctcgacatgggcgcgcttgtcgcgggcgccaagtaccgcggcgagttcgaggagcggctcaaggccgtgctcaaggaggtggaagaggccgaggggaaggtcattctcttcatcgacgagatacacctcgtcctgggcgcgggcaggacggagggt

SEQ ID NO: 78565 - DNA, 202 bp, Zea mays
accaccgtcactcaacacagcacaggcagctcgagagagagagagagagaaagatgtcgtggttcgggcaccaccaccacaaccagccggctcccccggcgtcgggccccaaccaggtgttcaagatcttctgccgcgccaacgagaactactgcctggccgtccgcgacggcgccgtcgtgctggccccggtcaaccccaa

SEQ ID NO: 78566 - DNA, 194 bp, Zea mays
cgacatggacgcggacgtgatcaccatcgagaactcgcggtccgacgagaagctgctctccgtgttccgtgagggtgtcaagtacggcgcgggcatcggccccggtgtctacgacatccactcccccaggatcccgtcggccgaggagatcgccgaccgcatcgacaagatgctggccgtgctggacaccaaca

SEQ ID NO: 78567 - DNA, 175 bp, Zea mays
cttcacggcgctgcactttgctgctcagaattctcacctggatcttgtgaagtaccttgtgaagaaaggtgttgacgtcacagcaaagaccaaaggtggtcagacagctctacatgtcgctgaggatgatgaagtgcgtgcgttcctgaaggagtgcgagcaatccttgaagaag

SEQ ID NO: 78568 - DNA, 177 bp, Zea mays
ccgagatggctcggactcagaaaaataaagcaacagaatatcatcttggacaactgaaggcaaaactagcaaagttgaggacacaactattagagcctccaaagggttccagcggaggtggagatggttttgaagtcacaaagtttgggcatggtcgtgttgcacttattggatttc

SEQ ID NO: 78569 - DNA, 259 bp, Zea mays
agaggtcaaggtcgaggtcgaggacggcaacatgctggtcatcagcggccagcgcggcagggagaaggaggacaaggacgacaagtggcaccgcgtcgagcgcagcagcggccagttcgtcaggcgcttccgcctgccggagaacaccaaggtggatcaggtcaaggctggcctcgagaacggcgtgctcacggtcaccgtgcccaaggcggaggagaagaagcctgaggtgaaggctattgagatctctggttgagca

SEQ ID NO: 78570 - DNA, 258 bp, Zea mays
gcttccagagccccccgccgccgctgcgccctcctctcggtcctgccgtccgtcgaggtaaaaggacagcatggtgagggtcagcgtgctcaatgatgctctcaagtccatgtacaatgctgaaaagatagggaaacgtcaggtcatgatcaggccgtcatccaaggtgatcatcaagttcctgacggtcatgcagcgccatggttacattggcgagttcgagtacgtggatgaccacagagctgggaagatcgtggt

SEQ ID NO: 78571 - DNA, 258 bp, Zea mays
cggaatccagagccccccgccgccgctgctccctcctctcggtcctgccgtcagtcgaggtagaaggacagcatggtgagggtcagcgtgctcaatgatgctctcaagtccatgtagaatgctgagaagatagggaaacgtcaggtcatgatcaggccgtcatccaaggtgatcatcaagttcctgacggtcatgcagcgccatggttacgttggcgagttccagtacatggatgaccacagagctgggaagattgtg

SEQ ID NO: 78572 - DNA, 255 bp, Zea mays
atgcgggccaaggcgagagggaggcactcgcactagcttcgtggattggcaggagctacagggcgcacactggatcggagatccgctggtcggacactgaagacgcggcgggctctcccctgacgctgttctggaagcacagcgacgccataatctgctgctctctaaagccggctttcacgctcaagttcgccaaccgcgccggcttcgacatactggagacgacggtggcgaatgtccaggacctgccgctgg

SEQ ID NO: 78573 - DNA, 313 bp, Zea mays
cgagaagctcgccggcgaggccgccaagctcgcgcggtacaacaagaagcccaccatcacctcccgcgagatccagacctccgtgcgcctcgtcctcccaggagagctcgccaaacatgccgtctccgagggaaccaaggccgtcaccaagttcaccagcaattgagcagcctgcagcgtccacggatttgttaggtctccccttcttacaagggttcttcgtcgtgtcctctacccctccccgcctatgtatgtgctgtgaaatcgttgatgttctcgtcgggtgaacaaaggccagtagctagcttgcctg

SEQ ID NO: 78574 - DNA, 316 bp, Zea mays
aggcaccacacctcttcctcctcttcctcctcctagcacagctagcgcctgctccccttcgtctgtgatcatgtcttgcagcagcggcaagtgcaactgcggctccagctgctcctgcggcagctcatgcaactgcatgtcccctgacgtggagaccgccgccgccagcagcatcaagaccatggtcctcgctgcgccgaccaccaaggccagcgccggcggcttcgaggcggccaccgagggcggcggctgcgactgcaacacctgcaactgcggcaccagctgcggctgctcctgctgcagctgcaactgagcc

SEQ ID NO: 78575 - DNA, 310 bp, Zea mays
gcagctgccacagagacatcagagagcggtcctccttgtgagtctgagctgaagaggaggaggaggaggaggagaagcagcagcgcagccggaggagggagagcgaagatgcgccgcgtcgcgctgttgctcgtcgccgccgtgtgcgcgctggcggcgccggctgccgcggtcgtcactgacggtcttctcccgaacggcaacttcgaggatggcccgcccaagtcggcgctggtgaacggcacggtggtgtcgggcgcccacgccatcccgcggtgggagacgtccggcttcgtggagtacatcgagt

SEQ ID NO: 78576 - DNA, 314 bp, Zea mays
gaagaaggtgctagaggtgtacgaggcacgcctgaccaagtgcaagtaccttgctggagacttcctcagcctcgccgacctgaaccatgtgtctgtcactctctgcctgttcgctacgccctacgcatctgtgctcgacgcctacccgcatgtgaaggcctggtggtctggtctgatggagaggccgtctgtccagaaggtcgctgccctgatgaagccatctgcttgaaacggttgccctgtcaatcggtgaatggaataagccaagtctgttctgggttgtttgcttgttcagtgatgtgtcttctatgacg

SEQ ID NO: 78577 - DNA, 255 bp, Zea mays
caccgggcacaccccccgagctcagcttagctccactccagctccaatcatagtcgtgaccagagcgcgagagctatctacagggccgtgaaaatgccgatcaataagatcgccctggggagccaccattaggtgtaccacccgggcgccctcaaagcggcgttcgctgagttcatctccaccctcatcttcgtcatctccggccacggctccggcatggccttcagcaagctgacctgcggcggaccgacgacc

SEQ ID NO: 78578 - DNA, 258 bp, Zea mays
gtgaactctcaacatccattgatgggaggattactgaatgctgtagagactgttttgaagctctcattaccaaatgtctacctgtggctttgcatgttttattgccttttccatctgtggttaaacatacttgctgagattcttcgatttggtgaccgagaattctacaaagactggtggaatgcaaagacaattgatgagtactggagaaaatggaacatgcctgtgcataaatggattgttcgtcatatatatttt

SEQ ID NO: 78579 - DNA, 312 bp, Zea mays
ggggctacgaggtcctgtacatggttgatgccattgatgagtatgctgttggtcagctcaaggagtttgagggcaagaagcttgtctcggccaccaaggagggtctgaagcttgatgagaccgaggatgagaagaagaggaaggaggagctgaaggagaagtttgagggtctgtgcaagatcatcaaggaggttctgggcgacaaggttgagaaggttgtggtgtctgaccgtgttgtggactcaccgtgctgccttgtcactggtgagtatggctggacagccaacatggagaggatcatgaaggcgcagg

SEQ ID NO: 78580 - DNA, 270 bp, Zea mays
gtcgaaccacgcatccggcaagcgcgagatcgccgccttcttcgcgcacgtcacgcacgagaccggacatttctgctacatcagcgagatcaacaagagcaacgcctactgcgacgcgagcaacaggcagtggccgtgcgcggcggggcagaagtactacgggcgcggcccgctgcagatctcgtggaactacaactacgggcccgccgggagggacatcggcttcaacgggctcgccgaccccaacagggtggcgcaggacgccgtgat

SEQ ID NO: 78581 - DNA, 254 bp, Zea mays
gcgccgtccacagaaaaaatggaagaggtaaaagaagcaactaagggctccaaaacatcaggagttttgagtcccgcagcaaacgttgagatagtaaaaaatcaaaaagtgccagcaatgactccgaaaagaaagaggatggccaatgtgctagatgtactggaaacaatcaaatcttcaagcacacctccgaagaaggctgctgtcactcctgaaacagcaactgaaatttctggttctacagctccagagca

SEQ ID NO: 78582 - DNA, 252 bp, Zea mays
ggtgatcttcagcccggtgctggtgccggccgccatcgcgctggcgctcatggcggccgggttcgtcacctccggcggcctcggcgtcgctgcgctgtccgtgttctcctggatgtacaagtacctgacgggcaagcacccgccgggcgccgaccagctggaccacgccaaggcgaggctggcgtccaaggcccgcgacatcaaggatgcagcacagcaccgcatcgaccaggcgcaggggtcttgagagaa

SEQ ID NO: 78583 - DNA, 314 bp, Zea mays
cagcgatccgaagctcaatcaattcactcaaacctcttccccaaatcttcgattagattctcgttgacaagaagactagaaccgaacctgaccatgtcgctgatccgccgcagcaacgtgttcgatcccttctccctcgacctctgggacccctttgagggcttccccttcggctccggcaacagcagcagtctcttcccctcgttcccgcggaccagctcggagaccgcggccttcgctggcgcgcggatcgactggaaggagactccagaggcgcacgtgttcaaggccgacgtaccggggctgaagaagga

SEQ ID NO: 78584 - DNA, 313 bp, Zea mays
cgcgttcgtggtggacatgccggggctgggcacgggcgacatcaaggtgcaggtggaggacgagcgggtgctggtgatcagcggcgagcggcgccgggaggagcgcgaggacgccaagtacctgcgcatggagcggcggatgggcaagttcatgcgcaagttcgtgctgccggacaacgccgacatggacaagatctcggcggtgtgcagggacggcgtgctcaccgtgaccgtcgagaagctgcccccgcccgagcccaagaaacccaagaccatcgaggtcaaggtcgcctgaggtgggactaggtcgacc

SEQ ID NO: 78585 - DNA, 315 bp, Zea mays
cttgggggagagagagaagtgggagacccgcgagaggctgccgtgtagggactagggaccgtagagtaagcgacagcgaaggagggagagggggatggccgggatcgggccgatcaggcaggactgggagccggtggttgtgcggaagaaggcacccaccgccgctgccaagaaggatgagaaggccgtcaacgccgcgcgccgctccggcgcggagatcgagaccatgaagaagttcaacgctggtatgaacaaggcggcgtccagcggcacatccctcaacaccaagcgcctcgacgacgacacagagaacct

SEQ ID NO: 78586 - DNA, 257 bp, Zea mays
gctacagcaaccgcgtcgtcgacctgatccgccacatgttcaagacccagtagaggggttttttccccctgcttctcatggatggttgctgcttgtgtatgccgagaataaatgtggatggcgcgtgcctctgggtcgccaggttcatgctgagtctggacatgttttgcacttttgcttcccttcctgctaccatctgtgacagaaccgctcgctaatatgggacctgagattagctttttgctgcttgtggtgat

SEQ ID NO: 78587 - DNA, 251 bp, Zea mays
gtcctacctgcgtgcgaataagatgttcgttgatcacagccaggttgacgctgaaagggtatactcttcctatctagaacttaacttggaagaggtagaaccatgtctatcaggaccaaaacggcctcatgatcgagtgacattgaagaatatgaagtctgattggctttcttgcttggacagcgatgtaggattcaagggttttgctgtccccaaagaatcacagggcaaagttgcagaattttcgttcc

SEQ ID NO: 78588 - DNA, 315 bp, Zea mays
cccacgcgtccggtcctttcggggcggtgatcacgccagaaaccctcaagtacatgtccaagtaccagggacgtgagatcacgcaggtggactgcgcacgggaggcgatgaggctgatccacgcggaagacaagaacctcaaggccgaggactcagcgtgggagctgaagaagaagttcggcaacggcgtgagcaccatggtcctcgtctacaacgccaccggggccagcctgagcctggtggacgacgggaaagactggatgggctccgtctacagctcgccgatcccggacaccttccacaacgggcagtgga

SEQ ID NO: 78589 - DNA, 314 bp, Zea mays
cccacgcgtccgcgagctcgagccctcgcccgctcagtcacaaagcctcagatctcagtcgcctgcgccgccgcttcgttcgtgtggaggggagaagacaggaaatggcggcgactgagggcgtgctcttggggatgggcaaccccctcctcgacatctccgccgtcgtcgatgacgccttcctgacaaagtatgacatcaagctgaacaatgctattctcgctgaggagaagcacttgcctatgtatgacgagttggctagcaagagcaatgttgaatatattgccggaggagccacccagaactctatcagg

SEQ ID NO: 78590 - DNA, 257 bp, Zea mays
caagcctgccctgtcctgccttgttaagcaacacagcgagacatcacgagagctacagagagatggcggccacggtttcctccttcgcggtggtgaacatggacaagttggagacagaggagagggccacggtcatggaggtcatccgcgacggctgcaataactggggcttcttcgagctgctgaaccacgggatctcgcacgatctgatggacgaggtggaacggctgaccaaagcgcactacgccaccttctgg

SEQ ID NO: 78591 - DNA, 253 bp, Zea mays
gcggcggcggctatggctgcggcggaggaggagatcgcggtgaaggagccgctggatctgatacgcctcagcctcgacgagcgcatctacgtcaagctccgatccgaccgcgagctgcgcggcaagctccatgcgtatgatcaacatttaaacatgatacttggagatgttgaagaggtcgtgacaactgttgagatagatgatgaaacatatgaagaaattgtgcgcaccacgaaacgcactatcccctttc

SEQ ID NO: 78592 - DNA, 260 bp, Zea mays
atccaatctagaagctcccctctccctccctccctctctctctctctcttcgccgtccgaagctccgcacccaatctaatcgacacctcaccgagatgggccgcaagttcttcgtcggtggcaactggaaatgcaatggaaccacagatcaggtcgagaagattgtcaaaaccctgaatgaaggacaggttcccccttcagatgttgtcgaggtcgttgtcagccctccttatgtcttccttcctgtggtcaagagccat

SEQ ID NO: 78593 - DNA, 253 bp, Zea mays
cccacgcgtccggttgttgctatagctaatcagaggcttcttggtatcccttccggaaagctaaacttaagtggtggtgctgtttccctgggccatcctatcggttgcagtggtgcacggataattgtcactttgcttgggattcttaggcagaaaaatggaaaatttggtgttgctggagtttgcaatggcggcggcggcgcttcagccctcgttttggagctcatgcaaccctcttcgcatatccattcat

SEQ ID NO: 78594 - DNA, 310 bp, Zea mays
acttaattaccctcacgcgaagcaccttacctctgctagtcctcctacgtctcttctcttcgcttaatcttggtcggtgatttgattcttcacttcttgcgcgcattgcagagggtgctcggtctgcagctatcttaggttaaccagtcgtgtgtggtctatcggtttcgatatagtattactactgctctgttataatcagcggggaggaggaagatgacggtgacgccacggatcacggtgagcgacgggcggctgacggtgcgcggccgtacggtgctcaccggcgtgccggacaacgtgtcggcgg

SEQ ID NO: 78595 - DNA, 259 bp, Zea mays
caatggacggtgtcgtacttgaacatgtaggtcatgtactccgtggccactggaagcacagcgacatcacactcatggactccacgacccttctcttcggtgacaagccggtcaccgtctttggcatcaggaaccctgacgaaatcccgtgaggtgaggctggcgctgagtatgtcgtggagtccaccggcgtcttcactgacaaggacaaggctgctgcacatctcaagggtggtgccaagaaggttgttatctctgc

SEQ ID NO: 78596 - DNA, 259 bp, Zea mays
ggagatctgtgacttcgacttcgagccctgtggctactccatgaatgctgttcatggccctgctttgtcgaccattcatgtgaccccagaggacggcttcagctatgcaagctacgaggtcatgggctttaacccgggctctttctcttatggtgacctggttaagagggtgctgaggtgctttggtccaactgagttctctgttgccgtgaccatcttcggtgatcgggacaatgcgaagacctgggggacgaaactg

SEQ ID NO: 78597 - DNA, 257 bp, Zea mays
cgcgatcagagcaggagcaggcaacgcgcaccgaaatcttccaatccacaagactcgctacttcgcagttggcagactcgcccgcagcgagccgctagcaaccaagcagaaatgtcgctggtgaggcgcggcagcgtgttcgacccattctccgtggacctcttcgaccccttcgacagcgtgttccgctccatcgtgccgtcgtcgtcgtcggcggcggcggcctccgagaccgccgccttcgccagcgcccgcat

SEQ ID NO: 78598 - DNA, 255 bp, Zea mays
gatgaggacaagaagctgaatgctacgtacatcattagtgttgcaaggaagattggatgctctgtgttcctgttgccagaggacatcgtcgaggtgaatcagaagatgattctaacacttaccgctagcattatgtattggagcctacagaatcagcatcagtcacagtctgaaatgccagagcaatcagaaccatctagcatggcttcagacgcagcctctgacattgcctcggaggacggtgcttcaacgaca

SEQ ID NO: 78599 - DNA, 256 bp, Zea mays
cccacaccgggcacaccccccgagctcagcttagctccactccagctccaatcacagtcgtgaccagagcgcgagagctagctagagggccgtgaaaatgccgatcactaggatcgccctggggagccaccaggaggtgtagcacccgggcgccctcaaggcggcgttcgctgagttcatctccaccctcatcttcgtcttcgccggccagggctccggcatggccttcagcaagctgaccggcggcggcccgacg

SEQ ID NO: 78600 - DNA, 315 bp, Zea mays
gcagcaacagccaacacctaaactaaagaacagtagtagtccccgtgtacgtctagcaacgatccgcaccgagctcgccagttttgctcgttagtttggggacggcgatggcgtccggtcaggaaagcagggaggagctggcgcgcatggccgaggaggggcagaccgtcgtccccggcggcaccggcggcaagaccctcgaggcgcaggagcacctcgccgaagggcgcagtcacggcgggcagacccggagtgagcagctgggccatgaggggtacagcgagatgggcagcaagggcgggcagacccgcaaag

SEQ ID NO: 78601 - DNA, 313 bp, Zea mays
ccctctcgcgcttggcttgctttcactctccagggccccactcccacctcgccgccgcagccatggcgatcacagcgccaactcccgacatcctcggcgagcgccagtccggccaggacgtccgcacgcagaacgtgatggcttgcggggcggtggccaacatcgtcaaatcctcgctcggccccgttggtctcgacaagatgctagtggacgatattggtgatgttacaatcactaatgatggagcaaccatacttaagatgttggaagttgagcatccagccgccaaggttcttgttgagttggctgagct

SEQ ID NO: 78602 - DNA, 315 bp, Zea mays
cccacgcgtccgcccgccgccaccccacgcctgcagccatgccgcccaagctcgacccgtcgcaggtggtggaggtgttcgtccgtgtgaccggcggcgaggtaggcgcggcgtcttcgttggcccccaagatcggtccgctcggtctttctcccaagaagatcggagaggacattgccaaggagacggccaaggactggaagggcctccgcgtcaccgttaagctcactgtccagaaccgacaggccaaggtctccgtcgttccctctgccgcggcgctcgtcatcaaggcgctcaaggagcccgagagggacc

SEQ ID NO: 78603 - DNA, 305 bp, Zea mays
  unsure (1)..(305): unsure at all n locations
aatgcntacccccgaaaatttgccgtcttctcatctcgctcccctctttgcgccgcccccagatccggcaccgcccgctgctcgaacccgcaccccacgcccgcaggccgggaccggtgggcgcgcgccgggcagtacgagggagaggaagggcggcatggcggcgccgccggcgagggcccgggccgactacgactacctgatcaagcttcttcgcagtggggatagcggtgttggcaagagttgcctcctgttgcggttctctgatggttccttcacgagaagctttagtaccacaattggga

SEQ ID NO: 78604 - DNA, 437 bp, Zea mays
  unsure (1)..(437): unsure at all n locations
actcgcgggccgacacacgcgtcaacgcatttcggccgtaccccaatctcctcccagcgatttgccttgccgaggtcgccttgccgctgttcccgagcccgacgccttgccgcccctgccctgctaggctgctacagaggaggagaacccccagattttcccacccccatggcaacgcgcgcgccgccgcagtcttcttcgaccggatccgtgacggtgacgatcgacccgtccccctcgtcgtcgtcctcctccgccccgcccgcgtcggcgccggccccggccccggctcctgagtcggtggtgctgcgcctgaagcgccgggctaagaagaaggtgtcgtggaaggangggacggtggacaacgaagggctcggccgcaggagctcaaagaatgctgcatattccacaaggaggtccccttcgacgaggactgc

SEQ ID NO: 78605 - DNA, 424 bp, Zea mays
accggtctagtaggcactcgcgggccgacccacgcgtcaggagacattcagggttcattatccctctgtcaagggtgcaaaagttgtgactgataaattgacaatgcgcacaaagggttatggatttgtgaaatttggtgatcctacagagcaagctcgtgcaatgactgaaatgaatggaatgccttgttcttccaggcctatgcgtattggtcctgcagcaagtatgaaaaatacaggaggtgttgttcaagagagagtaccaaattctcaaggagctcagtctgagaatgatcctaacaataccactatatttgttggtgggcttgaccccaatgtcactgaagataccctaaaacaagttttttctccttacggtgaagtcgtccatgttaagatccctgttgggaagacatgtggtttt

SEQ ID NO: 78606 - DNA, 412 bp, Zea mays
catcacccgacttgtttacccccgaaaatttgccgtcttctcatctcgctcccctctttgcgccgcccccagatccggcaccgcccgctgctcgaacccgcaccccacgcccgcaggccgggaccggtgggcgcgcgccgggcagtaggagggagaggaagggcggcatggcggcgccgccggcgagggcccgggccgactacgactaccttatcaagcttcttctcattggggatagcggtgttggcaagagttgcctcctgttgcggttctctgatggttccttcactacaagctttattaccacaattggtattgactttaagatacggacaatagaattggatggcaagcgtataaagctacagatttgggatacagcgggccaagaacgcttccgtactattaccac

SEQ ID NO: 78607 - DNA, 315 bp, Zea mays
catcacgccgccactgatctgctctgttgctggtgactaggagcagtagcgagagggattctggatggccaagtcgaagaaccacacggcgcataaccaatcgttcaaggcgcacaagaacggcatcaagaagcccaagcgccaccgccagacctccaccaaggggatggacccgaagtttctgaggaacttgaggtactcaaggaagggcaacaagaagagtggcgaggctgagtccgaggagtaagatgatggtgattgagtttgtggcgacaaatgcatctcttgtatcgctaagagtcttagctgtgaact

SEQ ID NO: 78608 - DNA, 427 bp, Zea mays
  unsure (1)..(427): unsure at all n locations
acaagcctcaacactgagtcgcaatacgaagcttcaagctagtctcggcggctctagaagacgatgggcaaggacgacgtgatcgagagcggcgctggcggcggcgagttcgctgccaaggactacacggaccctcccccggcgccgctgatcgacgcggcggagctggggtcctggtcgctgtaccgcgccgtgatcgccgagttcatcgccacgctgctgttcctgtacatcacggtggccaccgtgatcgggtacaagcaccagacggacgcgtcggcgtcgggcgccgacgcggcgtgcggcggcgtgggcgtgctgggcatcgcctgngccttcngcggcatgatcttccgcctcgtctactgcaccgccgggcatctccggggggccacattcaaccccgccgtcaccttcggcctcttcc

SEQ ID NO: 78609 - DNA, 438 bp, Zea mays
  unsure (1)..(438): unsure at all n locations
tcgcgggccgatacacgcgtctacaagcatcatactcttcttcttcttcctcctcctcctagcacagctagcgcctgctccccttcgcctgtgatcatgtcttgcagcagcggcaagtgcgactgtggctccagctgctcctgcggcagctcatgcaactgcatgtcncctaacgtggagaccgccgccgccagcagcatcaagaccacggtcctcgccgcgccgaccaccaatgccagcgccggcggcttcgaggcggccaccgacggcggcggctgcgactgcaacacctgcaactgcggcaacagctgcggctgctcctgctgcaactgcaactgagccggtcaagggatggcgcacgagagtccagaggacgacgacgagtcctataaatataatagcggcgtctaaataggatcctgtcaactgcacccgcca

SEQ ID NO: 78610 - DNA, 346 bp, Zea mays
gacacacgcgtcaacatctgcgcacacggtctccctcttcctgtcagtagtagagtgagagtgaggcagcgagtgggagacaaggggaaatggggaagggagcgcaagggagcgatgcggcggcggcgggcggcgaggtggaggagaacatggcggcgtggctggttgccaagaacaccctcaagatcatgcccttcaagctcccgcccgtcggcccttatgatgtccgcgtgcgcatgaaggcagtggggatttgcggcagcgatgtgcactacctcagggagatgcgcatcgcgcacttcgtcgtgaaggagccgatggtgatcgggcacgagtgcgcgggcgt

SEQ ID NO: 78611 - DNA, 433 bp, Zea mays
  unsure (1)..(433): unsure at all n locations
ctcgtgggtcgatacaagcctcaaaaattcgtcagtacaaacaaacagggtagagggagaggagaggagaggagaggagaggttgggtctgggacaccatggctccgatgaagctgtacggggcggtgatgtcgtggaacgtgacgaggtgcgcaacggcgctggaggaggctggctccgactacgagatcgtgcccatcaacttcgccaccgccgagcacaagagccccgagcacctcgtccgcaacccgtttggtcaggttccagctctgcaggatggtgacttgtacctcttcgaatcacgagcaatctgcaagtacgctgctcgcaaaaacaagccagagctgttgagggaaggaaacctcganngaggagcaattgttgaatgtttggattcaggtggaggctaaccagtacaccgctgcactgaatc

SEQ ID NO: 78612 - DNA, 439 bp, Zea mays
tcgtgggccgatacacgcgtcaacggtcacttggggcaattgctctcagaaggcactagcacgcaaaaaccccacgagagagacgaatcttccgaatctctcggtggcgatggcgctctccgaccgctcccgcgagtcgctcctcccgagcttcctctacgcctcctcggcgcgctctttcgctgccacaggagccgccgcgcgcctccctgtctcctccccagcgcctgccacggctggagcaggaggcggcgtgccgttctcgatccaggcgcccaaggagaagatcgagatgtactcgccggccttctatgccgcctgcactgccggaggaatcgccagctgcgggctcacccacatggccgtcacgcctctcgacctcgtcaagtgcaatatgcagattgacccagcgaaatacaagagtatctcatctggattt

SEQ ID NO: 78613 - DNA, 380 bp, Zea mays
  unsure (1)..(380): unsure at all n locations
aaccgccgtcgaggccgcgtcccagtgcgaagagaccacgactcagatggccagccgctgggtccggcccgaggtgtacccgctgttcgcggcaacgggcgtggccgtcggcatctgcggatttcagctcttccggaacatcaccggcaacccggaagtcagggtaaacaaggcaaggagggcagctggtgtgcttgagaaccatgangaggggaagcgttacgccatgcatggcctaagaagctttgtgcacgacaagactcctgagatcatgcctgcagttaacaagttcttcactgaccctaagtgaagcatgttgattggcatactactactactacttgctactggggattttacactttgctggcaactcaata

SEQ ID NO: 78614 - DNA, 419 bp, Zea mays
  unsure (1)..(419): unsure at all n locations
agcacatccctcgagaagacgcctgctcctcgccgatcgatacgatggccgtcttctccgacctccacaccgccgacggcctcaagtccctcgaggctcacctcgccggcaaaacctatgtgtctggtgactccattactaaggatgacattaaggtcttcgccgcggtgccgtcgaagcctggcgctgagtttcctaatgccgcccgctggtacgagaccgtctctgcggctgtagcctcaagattccctggtaaggctgttggtgtaaatctgcctgcgggatcagctcctgcggcagctgctcctgcggatgaggctgangatgatgatgaccttgatctttttggtgatgaaactgangaggacaagaaggcagctgatgagcgtgctgccgcttgcaaggcctcttctaaaaag

SEQ ID NO: 78615 - DNA, 429 bp, Zea mays
  unsure (1)..(429): unsure at all n locations
tcgcgggcgcctacacgcgtcaagaatccttgcaatgagtgcaaggggactggagagagcatcaatgagaaggaccgctgtccagggtgcaagggtgagaaggtcattcaagagaagaaggttcttgaggttcatgttgagaaggggatgcaacacaaccagaagatcaccttccctggtgaagctgatgaagcgcctgatactgtcactggagacattgtattcgtcctccagcagaaggatcactccaaattcaaaagaaagggtgaagatctcttctatgagcacaccttgtctctgaccgaagcactatgtgggttccaatttgttcttacacatctggacaacaggcagcttctcatcaaatcagaccctggtgaagttgttaaacctgaccaattcaaggcgattaatgatgangggatgcca

SEQ ID NO: 78616 - DNA, 416 bp, Zea mays
  unsure (1)..(416): unsure at all n locations
agccttcgatagcgtgttccgctccatcgtgccgtcgtcgtcgtcggcggcggcggcctccgagaccgccgccttcgccagcgcccgcatcgactggaaggagacgcccgaggcgcacgtgttcaaggccgacctccccggcgtgaagaaggaggaggtgaaggtggaggtggaggacggcaacgtgctgctcatcagcgggcagcgcagcagggagaatgaggacaagggcgacaagtggcaccgcgtggagcgcagcagcggccagttcgtgcggcgcttccgcctccccgagaacgccaagaccgatgaggtgagggccgcgctggagaacggcgtgctcacggtcaccgtgcccaaggccgacgtcangaagcctgaggttaagagcatccagatctccggctgaagaagac

SEQ ID NO: 78617 - DNA, 416 bp, Zea mays
actcgcgggccgacacacgcgtcaacggtcactcgggtcagccgccgctccgcctcagcgcgtcgcccgccgccacatcctacagcgacctcatcgatcaccttcaactttcaatcatggcggacgtcgatgtcgaaccggaggttgccgccggcgctcccaagaagaggacgttccgcaagtacagctaccgcggcgtcgacctagatgcgcttctcgacatgtccacggacgacctcgtccagctcttccccgcgcgcgccaggagaaggttccagaggggtctgaagaggaagcccatggcactcatcaagaagctgcgcaaggcgaaaaaggatgctcctgctggtgagaagccagagccagtcaagacacatcccccgtaacatgaatcattgcccccctgagatgattgg

SEQ ID NO: 78618 - DNA, 260 bp, Zea mays
cgcgtcagaaccattcctcccaacaccacctcgccgcgatctccgtagcctccgtcgcgtcgagcatcgatcatgtcggcctactgcggaaagtacaaggatcagctcatcaagaatgctgccgacattggcagccctggcaagggtatcgttgctgctgatgactctactggcttcattggcaggcgcctttccaccgtcgacgtcgataatctacaggacacggtccgctgcccacggtcagtaccaatcaggtagtc

SEQ ID NO: 78619 - DNA, 425 bp, Zea mays
gacccacgcatcagcccacgcgtccggttattttctgcaatactaagagaaaggtggattggctcactgaaaaaatgcgtacaaataacttcaccgtatcagctatgcatggtgacatgccccaacaagaaagggatgccattatgggtgagttcaggtctggcgcaactcgtgtgctaataactacagatgtttgggctcgaggactggacgttcagcaggtttcacttgtcataaattatgatctcccaaataatcgtgagctttacatccatcgcattggtcgttctggtcgttttgggcgcaagggtgtggcgatcaatttcgtgcgcaaggatgacatccgtatactgagagatatagagcagtactacagcacacaaattgacgagatgccaatgaatgttgctgatcttatttgagca

SEQ ID NO: 78620 - DNA, 322 bp, Zea mays
acgttccagttctactcggagggcgtgttcacgggcgactgcggtacggacctggaccacggcgtggcggcggtcggctacggcgtcggcgacgacggcacgccctactggatcgtcaagaactcctggggcacctcctggggcgagggtggctacatccggatgcagcgcggcgccggcaacggcggcctctgcggcatcgccatggaggcgtccttccccatcaagacctcgcccaaccctgcagacccgccgcgcaagccccgccgcgcgctcatcgccagggacacctcttcttcccagtgacacacacgaccacaac

SEQ ID NO: 78621 - DNA, 420 bp, Zea mays
atcagcaagtacttcgagtcccgcgtggagcgctacggctccaccgtggtgcgcatgaacgtgccgccgggccccttcatggcgcgcgacccgcgggtggtggcggtcctggacgccaagagcttccccgtgctcttcgacatggacaaggtggagaagaaggacctgttcacgggcacctacatgccgtccacctccctcaccggcggctaccgcgtctgctcgtacctggacccctccgagcccacccacaccaaggtgaagcagctgctcttctccctcctgctctcccgcaaggacgacgtgatccccaccttccgctccaacttctcctcgctcctcgccaccgtggaggcggagctggccaagggcggcaaggccgagttcaacaagctcaacgacgtcacctccttcgacttc

SEQ ID NO: 78622 - DNA, 319 bp, Zea mays
acggcgtgccgcgtgcgtgaggcgatcggagcatcccgtcccgaggaggaagacaaccggcgacgcggggggaacatggggaagacgccggtgcggatgaaggccgtcgtgtacgcgctgtcgcccttccagcagaaggtaatgcccgggctgtggaaggacatcaccaccaatatccaccacaaggtcaccgagaactggatctccgccacgctcctcctcacccccgtcgtcggcacctaccaatacgccatgtggtacaaggatcaggataagctttcccacagatactaaatgcgctgcccttcacatacagcac

SEQ ID NO: 78623 - DNA, 354 bp, Zea mays
agatcccgcgtggagcgctacggctccaccgtggtgcgcatgaacgtgccgccgggccccttcatggcgcgcgacccgcgggtggtggcggtcgtggacgccaagagcttccccgtgctcttcgacatggacaaggtggagaagaaggacctgttcacgggcacctacatgccgtccacctccctcagcggcggctagcgcgtctgctcgtacctggacccctccgagcccacccacaccagggtgaagcagctgctcttctccctcctgctctcccgcaaggacgacgtgattcccaccttccgctccaagttctcctcgctcctcgccaccgtggaggcggagctggccaag

SEQ ID NO: 78624 - DNA, 417 bp, Zea mays
atcagaggagcttgtcatgcctgttcctgcttttaatgtaataaatggaggtagccatgctggcaacaatctggccatgcaggagttcatgattttacctgttggagcaactacatttgctgaagctcttcgtatgggcagcgaagtttaccatgtcctgaagagcatcattaagtcaaaatatggtcaagatgcatgcaatgtcggagatgaaggaggttttgctcctaatgttcaagacaacagagagggtcttattttgcttatggatgccattgagaaggcaggctacactggaaaaatcaaaattggtatggatgttgcggcatctgagttccttacaaaggatgggaactatgatctaaactttaagaatcagcctaatgatggagcccatattctctcagcccagcatct

SEQ ID NO: 78625 - DNA, 421 bp, Zea mays
ctcgcgggccgatacacgcctcaacacttcgtcccgctgaccgccgcgtccgcctcgcccagcgcagcagccgccgcagcacatcgctatctcgatctcagccatggcggaggtggagcagcaacaggacacgccgaagctgttcaaccgctggaccttcgatgatgtccaggtgaacgacatctcgctgaacgactacctcgctgtgaacgcgacgaagcacgcgatgtacctgccgcacaccgcggggcgttactccaagaagcggttccgcaaggcgcagtgcccgatcgtcgagcgcctcacaaactccctcatgatgcacgggcgcaacaacggcaagaaggtcatggctgtccgcatcatcaagcataccctggaagatcattcacctggctcaccgggatgccaaccccatcca

SEQ ID NO: 78626 - DNA, 349 bp, Zea mays
tcgcggtccgttacaatcctctataatggatcatattaaaaaaacaaaaaaaaaaaaaaaaaaaatcacccatgaaattcatcacacaaaaacaaaccaaaatcacagttatctcagaccaccgcccgctttggaaaatgctcaacaaaagcggggcgacacgctccagcctcacgacgaggaaacatgtgcatcaaggccagaggacagatgttcctgtgggactggttctaccgggtgctggcctctctcagcctgtggcaggaggaagccatgattttcttcctctaactcgacttcaccagcaacaccattctgctccacatgctcaatgacaagcggttggtgc

SEQ ID NO: 78627 - DNA, 382 bp, Zea mays
actcgagtaaccacagcgagaaccaatcgccaagcaaaaagcccgagaaagaaagaacaaacaggagacacagatggcggctgcagcgaaggcgtcgtggatggtggcgatgagcgtcggggccgtggaggcgctcaaggaccaggcgggcctgtgccgctggaactacgcgctgcgctccgtccaccgcgccgccaaggccaacgctcccagcttcgcgcaggccaggaagctggcgccgcccgccgcggacaaggccgccgcggaggaggggatgaggaccgtcatgtacctcagctgctggggccctaactagctagggcctctgctagtttcgggctccctgcaaaccgtaccgagcctccgggccttcaaatctgat

SEQ ID NO: 78628 - DNA, 352 bp, Zea mays
  unsure (1)..(352): unsure at all n locations
ctcgtgggtcgatacaagcctctagagttagtcatattacgctccaacttctcctcgctcctcgccaccgtggaggcggagctggccacaggcggcaaggccgagttcaacaagctcaacgacgtcacctccttcgacttcaacggcgaggcctacttcggcgtgcgcccctcggcgaccgagctcggcaagggcgggccgagcaaggcggccaagtggctcatctggcagctccacccgctggtcacgctcggcctccccatggtcctggaggagccgctgctccacacgttccacctcncgcctttcctcgtcaagggcgactacagggcgctgtacaagtacttctcca

SEQ ID NO: 78629 - DNA, 299 bp, Zea mays
aatagccactctagacccccgcttccagaaccttctcgagactctgaggcgcggcctcagctgcaagccgtaggcgacggaaccgatgcgcgtgctcgtcactggcgccgcagggcaaattggatatgcgcctgttcccaagattgctaggggagttatgcctggtgcaggccagcctgttactctgcacatgcttgatactccgcgagcagctgaagcccctaatggcgttaagatggagttggttgatgctgcaattcctcgtctgaacggagtcgttgccacaactgaggttgtgg

SEQ ID NO: 78630 - DNA, 367 bp, Zea mays
tcgtgggtcgatacacgcctctacactcactcgtgataaggcaaggcaagatggtgcagcaacagcaagccgcgaaggaggtgatcccgctgctgacgccttacaagatggggcagttcgagctctctcaccgggtggtgctggcgccgctgacgaggtgccgctcctacggcaacgtgccgcagccacacgccgccgtgtactactcgcagcgcgccaccaggggtggcctgctcatcgcggaggccatgggggtgtctgccaccgcgcaggggttcccggagtctcctgtcatctggacgcaggatcaagtccaggcgtggaaactcatcgtctaagccgtccaccgcaatggcgccatcttcgt

SEQ ID NO: 78631 - DNA, 343 bp, Zea mays
acttttggcttactgcgcaagaagaagggtaacaagaggacggcggcgatggcgaagaggctgctcccatctctgaaccgggtgctggttgagaagctggtgcagcccaagaagaccgccggcggcatcctcctcccggaaacatccaagcagctgaatgctgctaaagtggtggctgttggccctggtgagcgcgacaaggcaggcaatctgatcccagttgctctgaaggaaggtgacactgttctcctgccagagtatggtggaactgaagttaagcttgcagctgataaagagtacctcctcttcacagagcacgacattttgggcacacttgttgact

SEQ ID NO: 78632 - DNA, 364 bp, Zea mays
  unsure (1)..(364): unsure at all n locations
atcaagattcttcaagcagatcngcgcccaccccgaccccgaaaaggccaaggactccttcggcatccgccccggcaagggttaaaatcccaaccgccgctacatcaaccgcaagggcccgctcatcgtctacggcaccgagggctcaaaggtcgtcaaaggccttccgcaaccttcccggtgtggatgttgccaacgtcgagcgcctcaacctactagaccttgcccccggtggccaccttgggcgctttgtgatctggacccagagcgcgttcaataagctcgaggaggtgtatgggagctatgacgccccgtcgcagaagaagaagggcttcgtgctgccgangcctaagatgtccaacgc

SEQ ID NO: 78633 - DNA, 352 bp, Zea mays
tagcgacaggtcacgataaaccgcgcgagccgcgccaactccctactgcatgaggtgcctcggccttcgtcgtgctctccgccggcaacgagtatagactggcgcgcatgggcagcttcgagctgtaccggatgtccaccatcggcatgtgcctcaccgagacgctcgacgatatggtctccaacggtaccctcagcccggagctcgctatccaggtcctcgtccagttcgacatgtccatgacggatgctctggacaaccaagtgaacagcaaggttactgtcaagggtcacctgcacacctacacgttctgtgacaatgtgtggaccttcatcgtgacagacgcaagctt

SEQ ID NO: 78634 - DNA, 366 bp, Zea mays
aaggtacggcggcggcgccaactcgctcgcctccggctactcccgcggcaccggcctcggcgccgagatcatcggaaccttcgtgctcgtctacaccgtcttctccgcgaccgaccccaagcgcaacgcccgcgactcccacgtcccggttctggctcgcctcaccatcggcttcgccgtgttcaaggtgcacctggccaccatccccgtcaccggcaccggcatcaacccggccaggagcctgagcgccgccgtcatctacaacaaggacaagccctgggacgaccactggatcttccgggtgggccctctcgtgggcgctgccatcgcggccttctaccaccagtacatcctccgggctggcgc

SEQ ID NO: 78635 - DNA, 372 bp, Zea mays
tatgatgagtcgttatacagatcaaatgctgatccttttaaaaacgggttgggttttaacaatggaaatggtatttactctggtgagcaagggttcgctattggtggtgaagagaggttaagcagatcaaatggctatctttctgagttggtcgcggcagcatatgtgtgccatggatgtttatgaaggaacaaggatggctacagcggaagatcttcctggcattagaaaaattattcggccgctggaggattctggtgttttggtgcggagaacagatgcacagcttcttgaagcgctagagtcattctatgttgttgaaagagatggttcaatcaatgcttgtgctgctctaattccaatccctgagga

SEQ ID NO: 78636 - DNA, 392 bp, Zea mays
agatcgctgctgacctgaaggagcatgtcatcaagcctgtcatccctgagcagtaccttgacgagaagaccatcttccaccttaacccatctggccgctttgtcattggtggacctcacggcgatgctggcctcactggccgcaagatcatcattgacacctacggtggctggggagcccatggtggtggcgctttctccggcaaggacccaaccaaggttgaccgcagcggagcctatgtcgcaaggcaggctgccaagagcatcgtcgccagcggccttgctcgccgcgccatcgtccaggtgtcttacgccatcggcgtgcccgagcctctctccgtgttcgtcgacacgtacggcaccggcgcgattcccgacaaggagattctcaag

SEQ ID NO: 78637 - DNA, 398 bp, Zea mays
  unsure (1)..(398): unsure at all n locations
gtcgatacaacactctaaactgactcgtatcattcncggcctcaccccgagccagtcgtctcgctatggtttcgccgccgccgccatgcctcgccgcagctcaggaaggtctgccccacgcccagctccccgtgctgcttcactgaggaacccgccacagccagcacgccaggctcctcctccagctcctgttccagatggtggtggctccatgtttggaggaattgggtccaccattgctcaaggtatggcgtttggcacgggtagtgccatggcacacagggctgttgactctgtattaggtccccggaccatccagcatgagactcttgccacagaagctcctgctgctgcccctgctgctccagcgatgaatgctgatgcttgcagcttccatt

SEQ ID NO: 78638 - DNA, 388 bp, Zea mays
gggtcgtaccacgcgtccaagcgagcacatttgactgaccgccatagcaacgagaggaaacaaagcggcgaccgacgagccaagcaagcagcagagcatggacgcgggcgaagtgcggcactggaacgcggacgtcaacggcgtctccatccacgtcgccgaacggggccccgaggatgggcccgcggtgctcctaatccacggcttcccggaactctggctctcgtggcgccaccaaatgggcgcgctcgccgcccgcgggttccgcgcgctgggtcccgatttccggcggtaccgggaaccctccgttgcggtcggacccggcgccctacaccatcttccacatcgttggcgacatcgtcgcgctccttgagcacctccaactcac

SEQ ID NO: 78639 - DNA, 407 bp, Zea mays
tacactaccatccatgatatagcagaactctctcgacctcatcggcgttggcggagcgcgtgttgaccggagatggcgccgagcgggtggaggaggagcgcggcggcgcgggtcgcctggcgcccggccacggtttgcctgtggctcgcgctcgccgccgccgcactgacgctcgcccaggctaagaaggacctgacggacgttacccacaaggtctacttcgacatcgagatcgacggcaagcccgcaggccggattgtcatggggctttttgggaagactgttcctaagacggcatagaacttccgagctctttgcacaggagagaaaggggtcggcaagagtggcaaagccctccactacaagggaagtaagttccacagaatcatccccagcttcatgctcca

SEQ ID NO: 78640 - DNA, 366 bp, Zea mays
taccgagtgtcaagcgatcggcaggctgtgccacatgagacctatgtttacttcatggaccttctcgccaagacagttagagatgagatcgctgggtgcagcgaaaaggggtatgattccctatctgtaagtgatgcaaaacaaatgcttatgttcagttctgaccaagatctgcacgagtacatcacagaggagcacccggaatgggagtttaagaatggcgccgtcttcttccagaaggcaaaggaatcacagccctacaaggagatcccatccttgcagctcatcaaccagacgctcagctatgcgagggagctggagcgtattgtatgatttaatttcacagtaatccctggtggatgttta

SEQ ID NO: 78641 - DNA, 400 bp, Zea mays
cgggtcgacacaagcctctagaatgagtgcatcatacacaagcaagaaccacacctcctcccttcgcctgtgatcatgtcgtcttgctgcggcggcaagtgcgggtgcggctccagctgctcctgcggcagcggatgcaacggctgcggtatgtaccctgacgtggagaccgccgccaccagcagcgtcaagaccacggtcctcgccgcgccgaccaccaaggccagcgccggcggcttcgaggcggccaccgagggcggcggctgcgactgcaacacctgcaagtgcggcaccagctgcggctgctcctgctgcagctgcaactgagctggcccggcccggcgatggcgcacgagagtcgagaggaggaggacgacgacgaggcgtataaatataatag

SEQ ID NO: 78642 - DNA, 371 bp, Zea mays
acatattgtgacattgcagcaaagtacactgtgaagtcctttgggattcggcgcaatgataagatcccatgctatgttaccgtgccgggtgataaagcaattcagctgctggagaatggcttcaaggtgaaggagtacgagctgctgaggaggaacttcagtgacactggctgctttggatttggtatccaagagcacattgatcctggcatcaagtaagatgatctcatgtcttatcgtaaataagttgaatgacgcctgtttgtttctgtgaacgggtgttttatgatgggcactgttgcgtgcctgggaaaagatatgtaactttgtaatcatgtagcctgttcccactatgggagtcacctactggg

SEQ ID NO: 78643 - DNA, 413 bp, Zea mays
aatccaatctagaagcacccctctccctctctctctcttcgccgtccgaagctccgcaccccaatctaatcgacacctcaccgagatgggccgcaagttcttcgtcggtggcaactggaaatgcaatggaaccacagatcaggtcgagaagattgtcaaaaccctgaatgaaggacaggttcccccttcagatgttgtggaggtcgttgtcagccctccttatgtcttccttcctgtggtcaagagccagctgcgccaagagttccatgttgctgctcagaactgctgggtgaagaagggaggtgctttcactggtgaagtcagtgctgagatgctcgtcaaccttggtgttccctgggtcattcttggacactctgaaaggaaagctctgctgggaaaatcaaatgaatttg

SEQ ID NO: 78644 - DNA, 351 bp, Zea mays
agagtgtttcgcgcaaagaatccccatgcatacaaacagggtagaggtagagggagatgagaggagaggagaggataggagaggttgggtctgggacaccatgatctccgattaagctgtacggggcggtcatgtcttggaacgtgactatgtgcgcatcagtgctggatgaggctgggtccgactacgacatcgtgccgatcaacttcggcaccgccgagcacatgatccccgagcagctcgtccgcaacccgtttggtcaggttccagctctgcatgattgtgacttgtacctcttcgcatcacgcgctttctgcatgtacgctgttcgcataaacaaggcaaatctgt

SEQ ID NO: 78645 - DNA, 366 bp, Zea mays
gagaaattgcaaacctgtcactagcgaagcatacttcgtcgagcacactcttgcaattaatccaccgagttcggtttagtagcatagcatcgacaataaatgtcgctcgtgagtcggcgcagcagcaacgtgttcgaccccttctccctcgacctctgggaccccttcgacatgttccgctccatcgtcccgtcggcggcctcctccggcggcggttccgagaccgccgccttcgccaacgcccgcgtggactggaaggagacgcccgaggcgcacgtgttcaaggccgacctccccggcatcaagaatgaggatgtcaaggtcgaagtggacgaccgcaacgtgctcgtcatcagcggcaagcgc

SEQ ID NO: 78646 - DNA, 356 bp, Zea mays
agtggttcttctatggctcttttcggccgcgttggtggtggtatttataccaaggctgctgatgttggtgctgaccttgtggggaaggtagaaagaaacattcctgaggacgatccaagaaacccagctgttattgctgacaatgttggtgataatgttggagatattgctggaatgggatcagatctctttggctcatatgctgaatcatcatgtgctgctcttgttgtggcctctatctcgtcttttggaatcaaccatgaatttactccgatggtgtaccctcttctcgtcagttctgttggtattatagcatgtctcataacaacgctgtttgcaactgatttcttcgagat

SEQ ID NO: 78647 - DNA, 144 bp, Zea mays
  unsure (1)..(144): unsure at all n locations
aaagggaaagcctgacctttaganagaaggtgatgccagctgttattgtgaggcagcgcaagccatggcgccgaaaggatggtgtctacatgtactttgaagacaatgctggagtgattgtgaacccaaagggagagatgaaag

SEQ ID NO: 78648 - DNA, 359 bp, Zea mays
taggccgtctctctccgcgcccccacgcctccagtctgtgaccccaaaagccttcttttcatgtttggaatggagctggactacagcgacgccctcattggtggccgcttcttgttccagaatccaaacgcaacaaaaacctgtgggtgcggcaaatctttcgcgactggaaaggagaccgaggccgcggcaaccacttgcaacaactagagtagagaaatattgttagctaaacgtgatgtggcatgttgtatagcttgctcatgttgaagccctgtggctacaccacagatacataaagaggcatagttcaaaggaattacaccattaccaatggcctaattcagattttcctggtt

SEQ ID NO: 78649 - DNA, 356 bp, Zea mays
agcacgactgacaaaaatatggcagggaaagccggcggactcaaaggggttgccctcatcggcggcagcgccaacagcacggtcgctggggtcattcacttcttcgaggacccctccaccaggtacaccgaggtgaggggcaaggtcaccggcttgactccgggaaggcatggattccacatccacgtcttcggcgacactaccaatggctgcaactcaaccggtccccattttaaccctcataataaaccccatggagctccatttgacgacgaacgacatttgggcgacctgggaaatatagtagccaatgaagatggagatgcataagtgttcataagagacttacagatttc

SEQ ID NO: 78650 - DNA, 333 bp, Zea mays
  unsure (1)..(333): unsure at all n locations
taccttgactcgtacaagtacggcaacgaggcgcagctcaagtccctgatccangcgttccacagcaagggcgtgaacgtcatcgccgacatcgtcatcaaccaccgcacggcggagcaccaggacggccgcggcatctactgcatcttcgagggcggcacgccggactcccgcctcgactggggcccccacatgatctgcagcgacgacagggcgtactccgacggcacggggaaccccgacaccggcgccgacttcggcggcgcgccggacatcgaccacctgaacccgcgcgtccagcaggagctcaccggctggctcaactggctcaag

SEQ ID NO: 78651 - DNA, 374 bp, Zea mays
atatgattcccgcttagggtgcgagaggtcgcgagttcgtttcacgcaacaccccacatcccagtccccagagaagtcgcccgcgcgccacaagttcgtcaatgactgcgaggccgccctcaacgagcagatgaacgtggagtacaacgcgtcgtatgcataccactcccgcttcgcctatttcgaccgcgacaacgtggctctcaaaggatttgccaagttcttcaaggaatccagcgacgaggagagggagcacgctgaaaagctcatggagtaccagaacaaacgtggaggcagggtgaggctccaatcgagtgtgacgcctttaaccgagtttgaccaccctgagaaaagagaagctctggaagccaagg

SEQ ID NO: 78652 - DNA, 336 bp, Zea mays
ggaaaaatctgttccaatggaaactgatgcaaaggttgagccatcgaaaaggaaaattaagaaaacttctgttccgatccatgagttggtctacggcgcattgtctgccactgacctgcagaaggctgtagagaaagagtatgagatggctctgcaggacagagtaatggaagagaccaaagaaaagaaaaatgctgtggaagcttatgtctatgacatgcgtaacaagctgtacgacaagtataacgattttgtcacacccgaggagaaggaagggttgattgcaaagcttcaggaggttgaagattggctgtatgaagatggtgaggatgagac

SEQ ID NO: 78653 - DNA, 385 bp, Zea mays
caccgacactcaacacagcacaggcagctcgagagagagagagagagaaagatgtcgtggttcgggcaccaccaccacaaccagccggctcccccggcgtcgggccccaaccaggtgttcaagatcttctgccgcgccaacgagaactactgcctggccgtccgcgacggcgccgtcgtgctggccccggtcaaccccaaggacgaccaccagcactggtacaaggacatgcgcttcagcacccgggtcaaggacgaggaaggcatgccggcgttcgcgctcgtcaacaaggccacggggctcgcaatcaagcactccctcggccagtcacacccggtcaagctcgcgcctttcagcccggaccaggaggacgcgtcggtgctgt

SEQ ID NO: 78654 - DNA, 383 bp, Zea mays
acaacgtctacgcgcacgaccaccagttcatagtcggcgccaccaacccgggcctcaggggccagagcctcgcggccgtgctctcggccggcatgtcggcgggcaagagcggaagggagctccaggccatcgaggacgagtggctggccgcggcgcagctcaagaccttctccgagtgcgtcagggacgccatcgcgggcctcggcgtcgcggcccaggagaagcagcgcaggctccaggagtgggaccgcgccacgggcggctacgacaggtgcgtgtccaacgaccaggcgcgcgacatcgccgccagcctcggcgtcacgtccgtgttctgggactgggacctgccgcggaccaaggaaaggttccaacgcctcaagggg

SEQ ID NO: 78655 - DNA, 315 bp, Zea mays
acaagcagtgatccgaagctcaatcaattcactcaaacctcttccccaaatcttcgattagattctcgttgacaagaagactagaaccgaacctgaccatgtcgctgatccgccgcagcaacgtgttcgatcccttctccctcgacctctgggacccctttgagggcttccccttcggctccggcagcagcagcagtctcttcccctcgttcccgcggaccagctcggagaccgcggccttcgctggcgcgcggatcgactggaaggagactccagaggcgcacgtgttcaaggccgacgtaccggggctgaaga

SEQ ID NO: 78656 - DNA, 390 bp, Zea mays
gcactactctaaattgaatcgtattacgctacacactatttcatgagtggccatctggatctgatcgatgaacgacttgcaaagttagtaactgatgatccatcagttattgattcgtcccttgcacaatatggagacatggtttatccggacaaaaatagcattgttcataggctggaggtgattgataaatgcttcagccatgacacagttgaagagattgttgatgccttggaaagtgaagcagccagctcaaatgaagaatggtgtatcttggcgctgaaacgattgaaagaggcctctccgttagctttgaaggtctcactgcgatcgatacgcgagggtagatatcagacacttgatgagtgccttgtccgtgagtaacgcatg

SEQ ID NO: 78657 - DNA, 456 bp, Zea mays
  unsure (1)..(456): unsure at all n locations
ggtcgatacaagcctctagagaaaatcgtatgactgacagatttccagtgctggacattgggaagcacaccactgaaggtgacccgtgagactgtcaatgtcttgcaagactgctatcctgagaggttggggcttgcaatcctttacaaccctcctaggatatttgaatcattctggaagatagtgaagccgttcctagaccatgagacccgcaagaaggtgaagtttgtgtactccaacgacaaggagagccagaagataatggcagaagtctttgacatggaggagctcgactcggcattcgggggaaagaacccagcgacatttgagtacaacagctacgcagagcagatgcaggacgacgacaagaagatgggatcttcgcacggctcagccaatagcttgcttggatcagctgggaaagangctaatggcgcagactcggacgcctcaagc

SEQ ID NO: 78658 - DNA, 451 bp, Zea mays
gtcgatacaaccctctaaatgcagtcttattacgtgatatgggctacaacgttagtatgatggctgactccacctcacgatgggctgaggctttgcgtgagatctcagggcgtttggctgaaatgcctgctgatagtggttacccagcttacttggctgcgcgtttggcatccttttatgaacgtgctggtaaggtgaaatgcctgggaagtccagacaggactggcagtgtcacaattgttggagccgtctctcctccaggtggtgatttttcagaccctgttacctctgcaaccctcagtattgttcaggtcttctggggtttagataaaaagcccgctcaaaggaagcatttcccatctgtgaattggctcatttcctattcgaaatactccaaggcccttgagtccttttatgagaggtttgatccagatttcattgatattaggac

SEQ ID NO: 78659 - DNA, 431 bp, Zea mays
aatcgctcatcaatcgccagaggagttgttgatcgaggtgagtgaggttgaaaagcacaccatcgtcatggacggcggatactacggcggtcgcgatcagcgctacagcggcgggtactacggcggcggtggcatcgcaacgccggggtacgctccggcggtcccgtacgggatgtcgcaggtgaacatcgagggcaacgggtgcgggcgggcgctgccgccgcagccgaccgtgaaggtgtactgccgcgccaaccccaactacgccatgagcgtccgcgacgggaaggtggtgctggcgccggcgaaccccaaggacgagtaccagcactggatcaaggacatgcggtggagcacgagcatcaaggacgaggaaggttacccggcgttcgcgctggtgaacaaagcgaccggggaggccatcaagcact

SEQ ID NO: 78660 - DNA, 392 bp, Zea mays
gtatgctccccaaccctgaacttgcattggacgcgctgtctgtatgcatgactgttaacgggtgggtgttcatgatcgcagtagggttcaacgccgctgccagcgtgagagtgagcaatgagctcggcgccggccaccccaagtccgcgtatttctcggtgtgggtagtgaccgcgctgtcgacgctcatatctatcatgctcggcgttctggtcctctgcctgcgcaactacatcagctacttgttcacggagggcgaggtggtgtccaacgcggtggcggatctctgcccgctgcttgccgtcacgctcgttctcaacggcatccagcctgtgctgtcaggtgtcgccgttgggtgcgggtggcagcagttcgtggcctacgtgaacatt

SEQ ID NO: 78661 - DNA, 434 bp, Zea mays
aaagaagggttacatcccgctcaccacgtacctgcgcacctacaagatcggcgactacgtcgacgtcaaggtgaacggcgccgtgcacaagggcatgccgcacaagttctaccacggccgcaccggtcgcgtctggaacgtcaccaagcgcgccatcggcgttgagatcaacaagcaggttaatggccgcatcatcaggaagcgtatccatgtccgtgtggagcatgtgcagccctcccgttgcacagaggagttccgcttgaggaaagccaagaacgatcagctcaaggttgatgccaaggaccgtggcgaggtgatcagcaccaagaggcagcctgtgggacccaaacctggcttcatggttgagggtgctacacttgagaccgttactcctattccctatgatgtggtaaatgatctcaaggggggttact

SEQ ID NO: 78662 - DNA, 460 bp, Zea mays
cacaggactaggactcgcgggtcgatacaagcctctagattgagtcatataatagcagtcgaccggttcctcggagcacgatgaagtttgttgctgcctacctgcttgctgtcctcgctgggaacgccagcccctccgctgacgatttgactgccattctggagtcagttggctgtgaagttgacaatgaaaagatggaactcctgctgtcccaactgagcggtaaggacatcaccgagctcattgccgcgggcagggagaagtttgcttcagtcccatgtggtggcggcggtgtcgctgttgcggcagctgcacctgctgctggcggagctgctcctgcagctgacgcaaagaaagaagagaaggtggaagagaaggaagaaagcgatgatgatatgggcttcagcctcttcgactaggctgcacagtcatcacagtattgttttgggcagtgaaacca

SEQ ID NO: 78663 - DNA, 403 bp, Zea mays
cgcgggccgacacacgcctcaaggctcagacctggtataggacggagctgagcttctagcaacgtacagtgtatccgccatgagtcctttcggggcggtgatcacgccagaaaccctcaagtacatgtccaagtaccagggacgtgagatcacgcaggtggactgcgcacgggaggcgatgaggctgatccacgcggaagacaagaacctcaaggccgaggactcagcgtgggagctgaagaagaagttcggcaacggcgtgagcaccatggtcctcgtctacaacgccaccggggccagcctgagcctggtggacgacgggaaagactggatgggctccgtctacagctcgccgatcccggacaccttccacaacgggcagtggatcgccttcctccacgtc

SEQ ID NO: 78664 - DNA, 433 bp, Zea mays
agcatgtttgtccatacgcattggtctgaatactgtagctactagcgcgagtgccactgtgccgcagctgcctgctcgccattactgcaagctgtgttcaatcaaagcttaattaggctccctctacatctgatccagctaagtagctagccagcactacagaagggcgtggcaagaatcaggagagagatagcaggggggctagctagctgagctcgtgcgacgaagaatggccggaattggcaggaacatggtggcgccgctcctggtgctcaacctcatcatgtacatcatcgtcatcggcttcgcgagctggaacctgaaccacttcatcaacgggcagaccaactatcccggtacgtaagaaaggccagtagtaatcacgcatcatgcatatactcatgcatcgatatgcatggcgcgcctctgatgc

SEQ ID NO: 78665 - DNA, 431 bp, Zea mays
actctcgattcgattcctaagcagctagccagtgactcgatctcagcgtgctacaatggcggcagctgctattgccctgctcctcctgctctgctcagccttctgctcccttgcccaccgggcggccggcgtcgactacggctcgtggcagagcgcccacgccacgttctacggcggcggcgacgcgtctggcacgatgggcggcgcgtgcggctacgggaacatgtacagcacggggtacggcaccaacacagcggcgctgagcacggcgctgttcaacgacggcgccgcgtgcgggtcctgctacgagctgcgctgcgacaacaacgggcagtcgtgcctgccgggcaccatcaccgtcacggtcaccaacttctgcccgcccaactacggcctccccagcgacgacggcggctggtgcaacccgccgc

SEQ ID NO: 78666 - DNA, 298 bp, Zea mays
tcatcttcttcttcctcctcctcctatcacagctagcgcctgctccccttcgcctgtgatcatgtcttgcagcagcggcaagtgcgactgtggctccagctgctcctgcggcagctcatgcaactgcatgtcccctaacgtggagaccgccgccgccagcagcatcaaaaccacggtcctcgccgcgccgaccacgaaggccaccgccggaggcttcgacgcggccaccgagggcggcggctgccactgcaacagctgcaactgcggcaccagctgctgctgctcctgctgcagctgc

SEQ ID NO: 78667 - DNA, 445 bp, Zea mays
acaggtccaggactcgcgggtcgacacacgcctctacggtgattcatgagagcgggagccccgatacgctgcgcgacccgcgcgggttcgccgtcaagttctacacccgggagggcaactgggacctgctgggcaacaacttctccgtcttcttcatccgcgacggcatcaagttcccggacatggtgcacgcgctcaagcccaacccgcggacgcacatccaggacaactggcgcatcatcgacttcttctcgcaccacccggagagcctgcacatgttctccttcctcttcgacgacgtctgcatccccgccgactaccgccacatggacggatccggggtgcacacgtacacgctcgtcagccgcgccggcaccgtcacctacgtcaagttccattggcgccccacctgcagcgtgcgctcactgatggacgacgaggccgt

SEQ ID NO: 78668 - DNA, 394 bp, Zea mays
agatgactgggtcctgtgccgcatctacaacaagaagggcggcgggctggacaaggcggcggcgccggcggccggcggcgaccacaagcctgtgttcgccacggcggcggtgagctccccgccggagcagaagccgttcgtagcgggcgcgggcgggctgcccccggcgttcccggagctggcggcgtactacgaccggccgtcggactcgatgccgcagctgcacgcagactactccagctgctcggagcaggtgctgtccccggagcagctggcgtgcgaccgggaggtgcacaaccagcccaagatcatcgactgggagcggaccttcgcctcagaccccgtgaacccctcgggctccatgctccagcccgtcgtcggccacacgggcggg

SEQ ID NO: 78669 - DNA, 453 bp, Zea mays
gactcgcgggtcgacacaagcctctagagagatcccatatcaaacattgtggttattggccacatcgactctggcaagtcgacaaccaccggccacctgatctacaagcttggaggcattgacaagcgtgtgatcgagaggtttgagaaggaggccgctgaaatgaacaagcgatccttcaagtatgcttgggtgcgtgacaagctcaaggctgagcgtgagatgggtatcaccattgatattgctctgtggaagtttgagaccaccaagtactattgcaccgttattgatgcccctgaacaccgtgactttatcaagaacatgatcactggtacctcccaggctgactgtgctgtccttaccattgactccaccactggtggttttgaggctggtatctccaaggatggccagacacgtgagcatgctctccttgcgttcacacttggactg

SEQ ID NO: 78670 - DNA, 417 bp, Zea mays
acacgtcggatcgaacagctagggtttccaagatgttcgggcgcgcgccgaagaagagcgacaacacacggtactacgagatcctcggggtctccaaggacgcgtcgcaggatgacctcaagaaggcctaccgcaaggccgccatcaagaaccaccccgacaagggcggcgatcccgagaagttcaaggagctagctcaggcctatgaggtcgtcagtgatcctgaaaagcgagagatttatgatcaatatggtgaggatgccctcaaggacggaatgggaggtggtggagggatgcacgatccctttggcatattccagtcattctttggtggtggaagcccttttggaggtggtggcagcagtaggggcagaatggcaccaaggggacaagatgtggttccacccctgaacggtt

SEQ ID NO: 78671 - DNA, 421 bp, Zea mays
acgccgaaagcatgctcatcaacggcaacttcgagacggcgccgcggaggctgaacaagaccctcatcgtggggcgccactcgctgccggggtggacggtgcaggggcacgtggagtacgtctcgggcggtccccagcccgggggcatgttcttcgcggtgccgcacggcgtgcacgcgctgcgcctcggcagccgcgcgtcggcgtcgcagaacgtgacggtgcggccgggggcgctgtacgcgctcacgttcgcggcgacgcggacgtgcgctcaggacgaggccctgcgcgtggcggtggcgccgtcgatctcggcccccgccgacgtcgccgtgcgcacgctctacagcggcgcgtccgccgacacctgggcctggggcttccgcgcctcctcgcccgtcgcccaagtcacgttcgc

SEQ ID NO: 78672 - DNA, 430 bp, Zea mays
attcgcacctgcccgcgcggccccgacccctagtcctccccacccatggcgcggcgatccgctcctctcctgcgccgcctcgtctccgcctcctccccgcccgcgcttcagtccctcacggaccacgtcggcgtcctcgcgcggcgcacggtgacctacatgccccggcccggggacggcgcaccacgcgccgtcacgctcatcccaggcgacggcatcggtcccctcgtcacgggcgccgtgcggcaggtcatggaggcgatgcacgcgcccgtctacttcgagacctacgacgtccacggaggacatgcccacggtcccgccagccgtcatccaatccatccggcgcaacaaggtctgcatcaagggcgggctcgccacgcccgtcggtggcggggtctcctccctcaacatgcagctgcgcaaggag

SEQ ID NO: 78673 - DNA, 423 bp, Zea mays
agccgaattcgcagcagcactccagggtccaggcccagcagcctcttcggctcttcgttgggggtgcgtggacaccggaaattgcctcggggattgcgttcctgatctaagcccggcatgaagggctgctcagagcgtttgctgctcctgctgctgctggcatcgtcgttgttactgtccgtcgtggttgccgcgcagcagacttgccctgccgacctcgacagcaaatgcgacggtggcgcgcctgatgactgggagggggaattcttccccggcgtcccgaaaatcaagtatgagggtccaacaagcaagaaccctcttgcttataagtggtataacaaggaggaagtcattctcggaaagaagatgaaggactggatgcgcttcagtgttgcgttctggcacacgttccgtggtactggt

SEQ ID NO: 78674 - DNA, 398 bp, Zea mays
acagaaccatatgtcctgtcaggaggaaaggacaaatttgttgtcttgtggagcatccaagaccacatatctgcccttggggattcctcgtcttctcccggagcatctggcagcaagcagtctggcaaaattgcaaatgaaaaggagagtcctaaagttgatcctagaggtatattccatggccatgacagtactgttgaagatgttcagttctgcccttccagtgcgcaggagttttgtagtgtgggtgatgatgcttgtcttattctgtgggatgctcgaactggcactgacccagctgttaaggttgagaaagctcacagtggagatgttcattgtgttgattggaatccccttgatgttaactatatcttaactggttctgccgataactctgt

SEQ ID NO: 78675 - DNA, 349 bp, Zea mays
atgacatcagatgaggactctaacgctgtcatgttacacatctgcaacaacagttcagcaccttgtgaatccccgccctctaacggtacatctggcagcaaacagtctggcaaaattgcaaatgaaaaggagagtcctaaagttgatcctaaaagtatattccatggccatgacagtactgttgaacatgttcagttctgcccggtcggagtgcccaggagttttgtagtgtgggtgatgatgcttgtcttattctgtggtatgctcgagctggcactgacccatctgttaacgttgataaagctcacagtggagatgtacattgtgtggattgcaatccccttgatgt

SEQ ID NO: 78676 - DNA, 407 bp, Zea mays
tagactcactcgtccggccgccgtcgccaccgcccgcctgcctgggcccgctgcaccgactctgacagcgcacgtcctgcttcctgtagcggcaggcgagggagaggactcagggagtgtgatggcggcaatgccggcgccgcttctgcctctgcttctgctggtggtggccgcggcgatgacgctctcccccgccgccgcccgcattcccggcgtgtacggcggcggcggcggcggcggctggcagagcgcgcacgccacgttctacggcggcagcgacgcttcgggcaccatgggcggcgcctgcgggtacggcaacctgtacagccaggggtacggcgtgaacaacgcggcgctgagcacggcgctgttcgacgaggggctcggctgcggcgcgtgcttcgaga

SEQ ID NO: 78677 - DNA, 431 bp, Zea mays
atgagaagccagagtttggtgaatggacatggatgacacccaaggaagttatcgaaaaggcagttgatttcaagaaacctgtatatgaggaagcattgaaacactttgccccctacctgcagtcagatccagccgcttcatcatagaagatttggccaatttgcttgcatccctgctgtatctggacccccaataatttgacacgacgcaatgtagccatgaggtgtgctatacaatttgatagtgtgtggcctgtttgagtcaattatatatgccagcattggatcctcgccctctacttagtcacataagtatacaataagtggtggaaacagtttactgtaatgaccgctacagatgcaccgtcgcatgattgggcctgtggctctagtttcagccaatctggaacatggtggccagtgtatcttgtc

SEQ ID NO: 78678 - DNA, 417 bp, Zea mays
catatcaagtcctcctcgggttagggttccttagggttttgtggaggggcgatggcggcggctgatgtggagtaccgttgcttcgtcggcggacttgcctgggccaccagcaacgagtcgctggagaatgccttcgcctcctacggcgagatcctcgactccaaggtcatcaccgaccgggagacggggaggtcccgcggcttcggcttcgttaccttctcctccgagaactccatgctcgacgctatcgagaacatgaacggcaaggagctcgacggccgtaacatcaccgttaaccaggcccagtcccgtggcggcggcggcggcggcggcggcggtggctactgcagcggtcgcggcggcggccgctatggttgctggcgccgtgacggcggttatggcggcggttgcggctac

SEQ ID NO: 78679 - DNA, 364 bp, Zea mays
aacaccgtcttctccgccaccgaccccaagcgcaacgcccgcgactcccacgtcccggttctggctcccctccccatcggcttcgccgtgttcatggtgcacctggccaccatccccgtcaccggcaccggcatcagcccggccaggagcctgggcgccgccgtcatctacaacacggacaagccctgggaagaccactggattctcggggtgggccctcccgtgggcgctgccatcgcggccttctaccagcagtacatcctccgggctggcgccatcaaggccctcggctccttcaggagcaacgcgtgatgagcggggcttggctgttgagcaactgcgggcgacctaccggcgggggaag

SEQ ID NO: 78680 - DNA, 438 bp, Zea mays
atgaattttcactggcatttgcaaggattgaaaaccactactttgtgaataagggatttttaccctcggactcattcctattggacaatgttgataagatccgacatattaaaggttttattgtacagggacgttatgatgtttgttgccctatgatgtctgcttgggatcttcataaggcttggcctgaagcagaattcaaggtggtagcagatgcagggcactcggccaatgaagttggcatcgctgccgaactgaggtcagccaccgataaactgagagacttgctgcgcaaatgagccggcgaaaggcaacctgcacctctatctgatcatggaactcagaggcccataataattacatagctgtgtaacggttagcactgtgccgttaaacaatgtcattgtcaccatcgatatgttgtttgtttgctcgctg

SEQ ID NO: 78681 - DNA, 418 bp, Zea mays
ctcgtgggtcgatacaagcctctaaagtcagtcgtagtagtctctgaagacgaaaagaagaccagaatgggctctttgaagaaaaaagcaatagatgcatcaactaagattaggcattcattaaagaagaacaggaggaagagtggtagccgagtcctttctgtgtctattgaggatgtgcgtgatctagaggagctgcaagctgttgaagcatttagacaagcactactcttggatgagctgttgcctgcaagacacgatgactatcatatgatgctgagatttctaaaagcaaggaaatttgatatcgacaaagcaaagcaaatgtggatggatatgcttcattggcggagggagtatggcactgatacgattttggaggacttcgaatacactgagttggacgctgttttgcaat

SEQ ID NO: 78682 - DNA, 384 bp, Zea mays
tacgctgctcctcaccagtcgccgccggaaatcaggaagcccaagtgctcccttgggtgcgctcgtcgccggtggcagtgagccagtgatgcaccttcatctccggcttccttactaggatcagcccgtcgatcgatcatggcgtcgtcgagctcggctgctactaccagtggcgacagtcagggcctcaaggctcgagatgcctgcatcgtcggcgtcgcccgcacgcccatcggcgcacttctcgggtcgctgtcgtccctccccgccaccaagctcggctccatcgccatccagggtgctctcaagagggcgaaggtcgacccggcgctcgtgcaggaggttttcatgggcaacgtcctcagcgccaacctcggccaggct

SEQ ID NO: 78683 - DNA, 374 bp, Zea mays
gtcgacacacccctctaaatcgcatactcgcacccacgcactcgctggagcctggcgtggaccagcaggacttcaacacatacggtatccgtcatggcaaggatgacgtaacggcacagggaacgtttgcaaacattacgatcgtcaacaactttttgcacggagaagttggccccaagaccattcatgttcctactggggagaaactttctgcatttgatgccgccataagatacacatctgacggccatgctactataatccccgctgctgctgactatgcaagcggaagttctcctgattgcgctgctaagggtctcatgctcctgagagttaaagctgtgattgccaggagctttcagcgtatccacaca

SEQ ID NO: 78684 - DNA, 424 bp, Zea mays
acaatacgacttaatccccaatcaacacagcaagtcagcaacaagcaaagcagcgacccgagagatggacgcgaggatgttcgggctggagaccccccgggtggcggcgctgcatcacctgctggacgtgcccgacggcgacaaggcgggcggcggcgccacgcgcacctacgtccgcgacgcgcgcgccatggcggccaccccggccgacgtcaaagagctcgcgggagcgtacgcgttcgtggtggacatgccggggctgagcacgggcgacatcagggtgcaggtggaggacgagcgggtgctggtgatcagcggcgagcggcgccgggaggagcgcgaggacgccaagtacctgcgcatggagcggcggatgggcaagttcatgcgcaagttcgtgctgccggacaacgccgacgtggac

SEQ ID NO: 78685 - DNA, 391 bp, Zea mays
aacgaattaccctcggtgccctccctctcggcggcggcggcgcaagtccccttcatctccggcgcggcaaatggcaggcggcagggttgcacatgctaccctcaagggccccagcgtggtgaaggagatcttcattggactgaccctgggtctgatcgctggaggtatgtggaagatgcaccactggaacgagcataggaaaactatatccttctacgacatgcttgacaagggccagatcgtcgtcgtcgaggagtagttcccacgtgtcacctcagaagtttttttttccagttgtttttgaaaactcactctggacagcacgacacagtgaatactgtggagatttggcttgaaaataagcataaccatttgataacatgtaattgcc

SEQ ID NO: 78686 - DNA, 375 bp, Zea mays
acgagcggccgcccttttttttttttttttattttttttttttttttttttttttttagaactagatatatgtatgttctaattaatacaccccgagcaactttactacatgtatcagtacaaggcacatagatacagctgcagtaacgtatacatgaataccctttgtctcgctcctgtttatctatgcaactgctggcatgcatgcaaaagacgcctcgggagataagacccctgttattctgctagtacgtatgcatgcatgtgcacgatcgatgggcgcgatggtcatatcatccgttgggtcagtagtatggctggatcttccaacactggttgtcgccctcgcaccacttccaaagcacgacgttggtg

SEQ ID NO: 78687 - DNA, 400 bp, Zea mays
ctcgcgggtcgatacaagactctagactgagtcctctaaaagtacctataatggatccctcaaaagcatcaaaaaggcctgttggaattctacttgtgaaggttgtgagagcccaaaatctgcggaagaaggatctgctgggtaaatctgacccatacgtgaaacttaagatgtcagatgataaacttccatccaagaagacaactgtaaagcgcagcaatctcaatccagagtggggtgaagacttcaagtttgttgtgacagatccagaaaaccaggctcttgaagttaatgtcttcgactgggaacaggttgggaaacatgaaaagatgggaatgaacatgatcccacttagagaactcctaccagaggggactaaagttactaccctcaacttgct

SEQ ID NO: 78688 - DNA, 410 bp, Zea mays
aaaaccctcttcttcacccttcccgtgctcgacccagatcgagggctcgatccgtcggccatggcgctggagtgggtggtgctgggctacgcggcgggcgcggaggcgatcatgctgctgctgctgacgctgccggggctcgacggcctgcgccggggcatgatctccgtggtgcggagcgcgctgaagcccatgatgtcggtggtgcccttctgcctcttcctgctcatggacatctactggaagtacgagacgcgccccacctgcgacgacgagcacgcctgcaccccctccgagcacctccgccaccagaagtccatcatgaagtcgcagcggaacgcgctcctcatcgccgccgcgctgctcctctactggattctcttctccggtcaccagctcgtcgtcaggct

SEQ ID NO: 78689 - DNA, 378 bp, Zea mays
cccacgcgtccgctcgaaagctcgaaagatcccgcggcgcagcagccacccttctctcctctccgctcccaatcttatcgtcgcctccctcgaagtcgccgctgccttcattccaccatggcgcttcacgccccggtccacgtgatgaaggactcgctgaagcgggagtctggcgcgaaggttcaccaagccaacatccaggcggccaaggctgttgctgacatcattcgcacgacattgggtcccagatccatgctgaaaatgcttctggacgctggtggaggtattgtggttactaatgatggtaattctattttgagggaaatagacatcgcacaccctgctgccaagtctatgattgaactaagtcgtacacaa

SEQ ID NO: 78690 - DNA, 412 bp, Zea mays
ctcgcgggtcgatacaagcctctacacttcgtcctgccaccgccgcgtccgcctcgcccagcgcagcagccgccgcagcacatcgctatctcgatctcagccatggcggaggtggagcagcaacaggacacgccgaagctgttcaaccgctggaccttcgatgatgtccaggtgaacgacatctcgctgaacgactacctcgctgtgaacgcgacgaagcacgcgatgtacctgccgcacaccgcggggcgttactccaagaagcggttccgcaaggcgcagtgcccgatcgtcgagcgcctcacaaactccctcatgatgcacgggcgcaacaacggcaagaaggtcatggctgtccgcatcatcaagcataccctggagatcattcacctgctcaccgatgccaacccca

SEQ ID NO: 78691 - DNA, 350 bp, Zea mays
aagcgtccggtgatattggatctgtgctacctgaagaagcttcacttgttgcatatcttattgatgcagtcactggacgcatacttcatcgtgtaactcatcatggtgcacaaggccctgtacatgcagtcttgagcgagaactgggttgtttatcattattttaatctgcgagctcacagatttgaaatggcggtgattgagatatatgatcaatctagggcggacaataaagatgtcatgaagctcatacttgggaagcataatctttcagcaccaattacatcatacgcccgccctgaggtggcagtaaaatcccagtcatactttttcacccattcagttaaagca

SEQ ID NO: 78692 - DNA, 375 bp, Zea mays
aaagaaagctagcaccatgagcttgtttttcaaaagcagtactggacagatagtttcattcagtggtcccctctgggaacctacatggcaacggttcataggcagggatcacaggtgtggggcggtgaaaatggcttcgagcgtttgatgcgttttgctcattccatggtgaaactgattgacttctctcctggtgagaggtatttggtcacatacagcagccatgagcccagcaaccctagagacacacatagagttgtcctgaatatatttgatgtaaggactgggaaagtgatgcgagactttaagggaagcgctgatgattttactactggcgggaatattggggtttctggtgtttcatggcctattttc

SEQ ID NO: 78693 - DNA, 342 bp, Zea mays
attcttcttcttcctcctcctcctagcacagctagcgcctgctccccttcgcctgtgatcatgtcttgcagcagcggcaagtgcgactgtggctccagctgctcctgcggcagctcatgcaactgcatgtcccctaacgtggagaccgccgccgccagcagcatcaagaccacggtcctcgccgcgccgaccaccaaggccagcgccggcggcttcgaggcggccaccgagggcggcggctgcgactgcaacacctgcaactgcggcaccagctgcggctgctcctgctgcagctgcaactgagccggtcaggcgatggcgcacgagagtcgagaggacgac

SEQ ID NO: 78694 - DNA, 374 bp, Zea mays
ctcgccggtcgatacacgcatctacactgactcgtgctaacgcgtccgcccacgcgtccggaaacatgaaacctgcgaggctgccatcgcaatgtacctgaacctctcctgcatccccgaggcacaggcgatcatcggctcgagcgtcgccatccatttcctcgtcaacagcctaggggaaggtggcccccggagcgacacctgccgcatggacgcgctgctcaccctgtacaacctgtccctgcacgcgcccaacatcccacccctcatggcgtccggcatcatcgagaacctccgccgcgtgctggtgccgtcctccccgtggacggacaaggccctagcggtcctgctgaacctggcgctgacccggaaga

SEQ ID NO: 78695 - DNA, 393 bp, Zea mays
cccaggccaatacaacactctataatgagtcatattaggtgaccatcaaatttgctgctcgcgctgatctccaccatctggctatgtttcttgctgggaggcagccagatgcccctcaagaggctcttcaagtacttgacatcgtgctacgtgaaatgcctactgccaagtattgtcctgttggtagatcattttattctcccaagttagggagacctcagcaacttggtgaaggtttggaaacttggcgtggtttctaccaaagcataaggcccacacagatgggtctttctctgaatattgatatgtcctctactgcattttttgaggccctccctgtaattgattttgtttctcagcttcttaatagagatatctcagttagaccattgt

SEQ ID NO: 78696 - DNA, 362 bp, Zea mays
tagaaacagtctggatagttctgggtttgcccaaatggcggcaaagagtgccattacaggcatgcccttccgcctggatacgtactgaaatcacaaatgaaggccttactagaggaagagagtgagaagatagctattgaagatgagattgaagatcagcgtaaaaagacaaagactacaacccctatgacaacggaattgttcatggaatggaagaggaggaaggcagaagaaagagaagctggtcaggctgccttgaaagcagagagggctaagaatgatcgcatgattggccgtgagttgttcatggctgacgcaagtgtgtttgttgatgatgctgaagcatatgaagtatatgagag

SEQ ID NO: 78697 - DNA, 193 bp, Zea mays
actgtcatgggatcccagccaccgccgctagaagaagagctcggcgattctcaggtcccgcgagaatatgccgaagcagatccatgagattaaggacttcctcctcaccgcgaggacgaacgatgcccgctcagtgaagatcaagaggagtaacgatgttttcaagttcaaaggtccgctgccccaagtacct

SEQ ID NO: 78698 - DNA, 396 bp, Zea mays
actgctgcacagaaggataatgctgagggacaagaggttgaggcagcagctgaggaaacgaaaaagagcaaccatgtcacgaggaagcttgagaagcgcaaggagggacgtacccttgacccacacattgaggagcaatttggcagtggacggttgctggcatgcatttcttcccgccctggacagtgtggccgagctgatgggtacatccttgagggtaaagagcttgagttctacatgaagaagctacagaggaagaagggcaagagcgctgtagcttagagcattctcatggattgtcttgcaccgaaatgtgtgtcctgatgagtacactttttttggttagtcgtctcaagttcagagcgttatgccatgttttcagtcctgattagtaca

SEQ ID NO: 78699 - DNA, 406 bp, Zea mays
cccgggccgatacacgactctatagagattcgtaccatcttacttcagatggcaacactaaggatgatcttagactcccaactgatgagactcttgtggcccagatcaaggaagggtttgaaagtggcaaggatcttgttgtgactgtccagtctgctatgggggaggagcagatctgcgcgctgaaggatgttggccccaagtaacttccctgccttggaatactgtatctcaaaacctaaatcgaaaaaagaagtgtatcaaggattgctacagagacatccatctggcttgagctggcttttgctatgtcaaacacaagtgcagggatcgctgggtgttgcaccgtgtctgcattatctgtggttacattctggaccctgtattttctatgcttttatgcccc

SEQ ID NO: 78700 - DNA, 332 bp, Zea mays
cttaaaacccaaccgcacaagcgcgcgaggcaggagagagagagaggcggggagcaaaacaatggaggggaaagaggaggacgtgcgcctgggcgccaacaagttctcggagcgccagcccatcgggacggcggcgcagggcgccgctgacgacaaggactacaatgagcccccgccggcgccgctgttcgagcccggggagctcaactcctggtccttctaccgcgcgggcatcgccgagttcgtcgccaccttcctcttcctctacatcaccatcctcaccgtcatgggcgtctccaagtccacctccaagtgcgccaccgtccgcatcc

SEQ ID NO: 78701 - DNA, 422 bp, Zea mays
agggaaacacatcgggtggcggcaaccggtagccggttcggctggcacgatgggcggcgaggccgagggcggggagcggcggctggggcgggtcctgagctttgggatcccggacacggcgctggggctagtgatggggtacgtggaggacccctgggaccgcgacgccatctcgctggtgtgccgccactggtgccgcgtcgacgcgctcagccgcaagcacgtcacggtggccatggcctactccacaacacccgagcgcctgttcggccgcttcccgtgcctcgagtcactcaagctcaaagcaaagccccgcgcggccatgttcaacctcatctccgacgactggggctggtctgcgtcgccgtggaatcgacagctctcgggcacttttcagtcccctcaagaagctccacctgcgc

SEQ ID NO: 78702 - DNA, 356 bp, Zea mays
gtcgatacacgactctatactgacgtcctattagctcgtcggctccaggtcagcaatcatgcaaagcagcggtccgagagatggacacgacgatgttccggctggacaaccgcctggtggcggctctgcatcacctgctggacgtgcccgatggcgacaccagagcgggtggctacaaggcgggcggcggcgccacgcgcacctacctccgcgacgcgcgctccatggcggcgacgtcggccgacatcaaggagctcgcgggagcgtacgcgttcgtcgtggacatgctggggttgaccacggaccacatctgggtgcaggtggtggacgagcaggttcttgtgatcaactgcgag

SEQ ID NO: 78703 - DNA, 445 bp, Zea mays
tcgcgggtcgacccaagcctctagagtggctgctcggacggacaaggagcaggcggaggaggagttgtgccaagccacaatgggtatctcgcgtgactcgatgcacaagcgccgagccaccggtggaaagcagaaggcctggaggaagaagcgaaagtatgagcttggtcgccagccagccaacaccaagttgtcaagcaataagacggtgaggagggtccgtgttcggggaggtaatgtgaaatggagggctcttcgccttgatactggtaactactcatggggaagtgaagctgttacccgcaagacccgtatcctcgacgtggtctacaatgcatcaaacaatgagcttgtgaggacacaaacccttgtgaaaagtgccattggtggcagttgatgctgccccatttcaagcagtgggacctcactcactatgggagtgaca

SEQ ID NO: 78704 - DNA, 383 bp, Zea mays
tacccacacgtccgcgcctgtgtgataaactacgattttccagagtcggctgctgcctatattcacaggatagggcgatccggaagagccggtaggtccggggaggctatcacgttcttcacagaggaggacaagccattcttgaggaatatcgccaacgtgttggtatcttcaggctgtgaagtgccttcctggataatggcactgccaaagctcaagcgaaagaagcacagagtggatagggacccaatctcctacctacctgacgaagtttgagagcggcttggtaagatgctctatttatttatttttgtggggagggggggatatataacacaggctgtccagagtggtactttaaccatgcacttccgagaggtggc

SEQ ID NO: 78705 - DNA, 428 bp, Zea mays
actcgcgggccgacacacgcctctagacagcagtcgcacgacacctccaatcaacaaattcccaatccgccgcttcccatcccgcgttcgccgctccatttgatcgaattcccgatggcgcccaaggccgagaagaagcccgcggagaagaagccgacggaggagaaggccgagaagaagcccagggcggagaagcgcgtgccgggcaaggagggcggcgagaagaaggggaagaagaaggccaagaagagcgtcgagacgtacaagatctacatcttcaaggtgctcaagcaggtgcacccggacattggtatctcgtccaaggccatgtccatcatgaactccttcatcaacgacatcttcgagaagctggctgctgaggccgccaagctcgcccgccacaacagaaggccaacaataacctcccg

SEQ ID NO: 78706 - DNA, 403 bp, Zea mays
cgcccgggccgacacacgactctacactgaggtcgcatcacccagatcaccgtgtgtttcgacatggacgcgaacggcatcctcaacgtgtcagcggaggacaagaccaccggacagaagaataagatcacgatcaccaacgataagggacggctaagtaaggaggagatcgagaagatggtgcaggaggcagagaagtacaaagccgaggacgaggaacaccagaagaaggtgaacgccaagaacacgctcgagaactatgcctacaatatgcgcaacaccatcagagacgacaagatcgcctccaagctaccggtggacgacaagaaaaagatcgatgacgccgtcgagggggccatcaattggctcgacaacaaccagctcgccgaggttgatgagtttg

SEQ ID NO: 78707 - DNA, 357 bp, Zea mays
ataatcccacaagccttcagctgggaacggagaagacatttttacgcgcaatggcagatggaatttcaataataagaagctcattagagctagcagtgtcgagaaatgggcagtagtaaacttttctgcacgatgcaatgtccgggatcttgtccgtgatctcatcaagtgtggaggcatgaagggcattatggttgatgcaccatttgctgtatttgatgagaatccttcaatgagacggtcacctgctgtaagaagggttgaagacatgtttgaacaagtgaaaactaagcttcctggagcacccaagtttcttttgtgtgttctagcggaaagaaagaattccgatatttatgg

SEQ ID NO: 78708 - DNA, 354 bp, Zea mays
actcccccctcctcatcagtcgctaggcacagcgcacttgcaggatggcgcaggtctctaagacgcttctccttgtggccctggtgttcgtgtcgtcggcggcggtggagctgtgccgcgcgatcgacttcgacgagcgggacctggcgtcggacgaggcgctgtgggacctgtacgagcggtggcagacgcaccaccgggtgcaccggcaccacggcgagaagggccggcggttcgggacgttcaaggagaacgtgcgcttcatccacgcgcacaacaagcgcggcgaccggccctaccgcctccgcctgaaccggttcggcgacatggggcgggaggagttccggtccacgt

SEQ ID NO: 78709 - DNA, 359 bp, Zea mays
aaagcaatctcaagtgaatcaaaccgccagacttcgcagtcctcctccactaccagagcatgcgcgttgccgcgacccgaaccgccgccgccgccgccgctcaccctccgagcgccttcctgctcctcctcgtactcctcggttgcgcgtccctcgcgatcggaggagcagccatggccggccacgtcctcggcggcgtgaaggagaacccagccgcggccaacagcgccgagtccgacgggctcggccgcttcgccgtcgacgagcacaacaggcgcgagaacgcgctgctggagttcgtgcgcgtggtggaagccaaggagcaggtggtggccggcacgctgcaccacctcacgctc

SEQ ID NO: 78710 - DNA, 382 bp, Zea mays
aggcactctcctggtcctgcagccttctcaggctccagcctacgctcaaaattaccgtcaattccatccatctccagtctcaaaccctccaaatatgtggtctcctcgctgaaaccactctacctagcaccgctggatggtccgcgcactgccgagcttaagtctcggagacagccacttgagttccgttgttctgcttctgctgctgatgacaaggagtcaaagactcaggtggtgccagttcagtcggaaggcgcacagaggttgaagatctccatctatttcgccacctggtgggcgcttaatgtgatatttaacatttacaacaagaaggttctcaatgcattcccttacccctggctcatctccacactctccctcg

SEQ ID NO: 78711 - DNA, 334 bp, Zea mays
atccacccacgcgtccgcccacgcgtccggccgcccagaccgcctccccttccccgcctccggtgcccaaggccaggccaacagttttgaggtggtaatggccgaccaggctaaccaacccactgtccttcataagctaggtggccagttccacctgagctccatcttctctgaaggtgtacgggcccgtaacatctgcccttctttctcaccttatgaaatgagatttgccactaggaactacatgatccagagcctttggggcccttcaatgtctgttaacggtggcatcaatgttccagtgatgccgactccgctttttgccaatgctcca

SEQ ID NO: 78712 - DNA, 343 bp, Zea mays
aaacagcacatcgctctctcgatctcagccatggcggaggtggagcagccccaggacgcggtgaagctcttcaaccgctggaccttcgacgatgtccaggtgaacgatatctcgctgaacgactacctggctgtgactgcggcgaagcacgcgacattcctgccgcactccgcggggcgctactccaagaagcggttccgcaaggcgcagtgcgccatcgtcgagcgcctcaccaactcgctcatgatgcacgggcgcaacaacggcaagaaggtcatggccgtccgcatcatgaagcacaccctggagatcatccacctgctcactgacgccaatcccatcc

SEQ ID NO: 78713 - DNA, 419 bp, Zea mays
acaaaaacttcaccaccaaagcatatctgcaatggattttggtgacagatcaattggtcatgttggatccccaactgcatcttgtgaggtgaaacttgtggatgtcccagaaatgaattatacatctgatgatcaaccttatcctcgtggagaaatttgtgttagaggacctataatattccagggttactataaggatgaagttcaaacaaaagaagtcattgatgaagatggttggttgcacactggagacataggtcagtggctacctggaggacgtttaaagatcattgataggaaaaagaacattttcaagttaactcaaggagaatacatagctccagagaagattgaaaatgtccatgccaaatgcaagttcattgcccaatgttttatatatggcgacagtttcaactcct

SEQ ID NO: 78714 - DNA, 376 bp, Zea mays
aaactaattaccctcggtgccctccctctcggcggcggcggcgcaagtcaccttcatctccggcgcggcacatggcaggcggcacggttgcacatgctaccctcaatggccccatcgtggtgaaggagatcttcaatggtctgaccctgggtctgatcgctggaggtatctcaaaaatccaccactgttaccaacatatgaaagctatatgcttctacgacatgcttgataagggccagatcgtcgtcggccaggagtaattcccacgtgtcacctcacaagtttatttttccagttgtttttgacaactcactctggacaatacgacaccttgaatactattgagatttggcatgaaactcatcataaccatttg

SEQ ID NO: 78715 - DNA, 357 bp, Zea mays
  unsure (1)..(357): unsure at all n locations
atctagacataatctggttacaggtcaagtacgagggtgtgatcctcaacaaggcccaagccaacacctcctaagcctaagcgtcaccataagatattagaccctcttggtctcttctagtgcttcgagttaatggagtatatctggcggtgggatttgtattagaagaaaaccggatgcattatcatttttgcctgtactggtcctactggagttagttggatccatgtttttgtgtgtcgaatacattgatgttattactgttctacctcgacagcagtctgggctattctttgttctgttattgaatcgtgagatctcggncgcaatggcagtgcaatttgtacaccgtttctg

SEQ ID NO: 78716 - DNA, 377 bp, Zea mays
gcgccaaagggacggcacctggtgtgcttgaaaaccatgacgaggggagacgttacgccatgcatggccctaagaagctttgtgcacgacaagactcctgagatcatgcctgcagttaacaagttcttcactgaccctaagtgaagcatgttgattggcatactactactactacttgctactggggattttacactttgctggcaactcaatatgttggggacatccatgacctctaaaagtactttgagcgcttggtgatgacttggtatatgtatgatggtggatgagtttgatcgtccatgcttgatgttcatattcatctgtcatctggatttgccgcacttcagtgataaaattgtcatttggatactggg

SEQ ID NO: 78717 - DNA, 405 bp, Zea mays
cccacgcgtccgacgtgccaaacccccaacgccatcctctataaacggcttcctcgcgggctccccctccccatcgccgccctccgatccttcatggccgctgccacagccgccgccgccgccgccgcgctcgcctccccggcggccctctccacatcgctggcgcgccgcggcctcgtcagcttcgcccccgcgctccgccccggccctgaccgcagctctcgcgccgtctccctcctcggtgtgcgaactcatgttgcggctgttgatcaagccattgtaaaaggtgatacgaagttggaaggtcctgtggttgttgttactggtgcttccagggggattggaaaagccactgcattggctcttggaaaagcaggctgcaaggtcttggtgaattatgctcga

SEQ ID NO: 78718 - DNA, 424 bp, Zea mays
acccacgcgtccgatcgtgaacccgccgccgacgcagcagcaggagacgcgccaaggagagcccgcaaggaggcgactatgagggccaagtggaagaagaagcgcatgaggaggctgaagaggaagcgccgaaagatgaggcagagatccaagtaggctgatggggattgtggatggtggtgtcggcatagttgtgttacgtttcttcgatgcgtgagttcatggagagatgtcacatcctagttcgtcgtcaccgtttgccatgggtccaatggctcgtcttggaaacctgcacttcagtaggccatctatcgtggtttctagctatatccagagttttgtgctaagacaaatcagtcagtcgttttgtgaacctattatgatggagctttatttgctgctaatatcgacctacctggttaag

SEQ ID NO: 78719 - DNA, 411 bp, Zea mays
cgggtcccgccggtagcccaccatctcctcgccgctgcctctcgtttctcttttcaataatcaagatgagccgtggtggtagtgccggtggtggtcaaagttctctgggttatctctttggaagcggtgagccccccaaaccagcagtggcaccagctgcaagtgctccacctgttgagaaaccatctgctgcaaagactgatgcggccaagcaggttgctgctggggttaccagccaaaccaataactaccacagggctgatggtcagaacactggcaacttccttacggaccgtccttcaaccaaggtccacgctgctcctggcggtggctcttccctgggctacctgttcggtggcaactgatgcccgtgctggtgcgctcaccaaagttatcctcccctgcctgctg

SEQ ID NO: 78720 - DNA, 431 bp, Zea mays
acggacgcgtgggtagagaggaagaacagctcgtccgagaccatgaagagcagcccacacctggtgctgatcctgtgcctccaggccgctctggtcatgggcgtcttcgccgctttggctaaagaaaatgccctggttgagagcaaggccatcgacatcaacccggggcagctcaagtgctgcaccaactgcaacttctccttctcggggctctacacctgcgacgacgtcaaaaaggactgcgaccccgtctgcaagaagtgcgtcgtcgccgtgcacgcctcctactcgggcaacaacaagttcaggtgcaccgacaccttcctcggcatgtgcggccccaagtgctagctagagaggaagaacgcgcgctgctgctagctgctatagcttcgttccttcggcggccggccggccgccggccggtgcat

SEQ ID NO: 78721 - DNA, 404 bp, Zea mays
agcctgccctgtcctgccttgttaagcaacacagcgagacatcacgagagctagagagagatggcggccacggtttcctccttcccggtggtgaacatggagaagctggagacagaggagagggccacggccatggaggtcatccgcgacggctgcgagaactggggcttcttcgagctgctgaaccacggcatctcgcacgagctgatggacgaggtggagcggctgaccaaggcgcactacgccaccttccgggaggccaagttccaggagttcgcggcgcggacgctggaggccggcgagaagggcgccgacgtcaaggacgtggactgggagagcaccttcttcgtccgccacctcccggcctccaaactcgccgacctccccgacgtcgacgaccgcta

SEQ ID NO: 78722 - DNA, 421 bp, Zea mays
aatccccatcaccggcaccggcatcaacccggcgaggagcctgggagccgcggtcatctacaacaaggacaaggcctgggacgaccaatggatcttctgggtgggcccactgattggcgccgccatcgccgccgcctaccaccagtacgtgctgagggccagcgccaccaagctcgggtcctaccggagcaacgcctaagttccggccggccgcccgcccgaacgcgccaggagctgggcaccgttacaattctgttcctccacatgacgccctgttccgtttccgtgtggccaggactccgcttgcttcctgctgttttctacttcggaccaaagtgtgacgtatcgttgctttctgtacatgtatgtaggaatgcatcatgtaacgagaatttggaatacaattgcgtgaatttttagc

SEQ ID NO: 78723 - DNA, 377 bp, Zea mays
gtccagttgtgatatcattggcacccttgatggagctaatgttgaaataagagaggaggttggagaagataatttcttccttttcggtgccaaagccgatgaagttgctgggctgaggaaggatagagaaaatggtctgttcaaaccagacccacgttttgaagaagccaagcagtttataaggagtggcgcttttggcagctatgactatgaacctctcttggattcccttgaagggaattctggatttgggcgtggtgattatttccttgttggctatgacttcccaagctacatcgatgcacaggatcgggtggatgcagcctacaaggataagaagaagtggaccaagatgtccatcttgaacacagctggga

SEQ ID NO: 78724 - DNA, 378 bp, Zea mays
acttctccaggaaagggttcgtactcatggcgccgccgcagccaaagtcgggcctcttcgttggcatcaacaagggtcatgtcgtcaccaagcgcgagctgcctccccgcccgtgccaccgcaaggggaaatcaacgaagagggtgtctatggtcaggggcctgatcagagaggttgctgggtttgctccttatgagaagcgtatcactgagcttctgaaggttggcaaggacaagcgtgccctgaagcttgctaagagaaagcttggaactcacaagagggcaaagaagaagagagaggagatggcgggcgtcctcaggaagatgaggtcggctggtacgcacactgacaaaaagaaatagagagcatttcaagttc

SEQ ID NO: 78725 - DNA, 422 bp, Zea mays
agaaagagctgctggcatgtactcagctttcccatacccgtttggcaaggttgtcattgaccttcaaaacccacgggcccaggataccctttacggtgtcaaattgtacccaaggaaagggttcgattggacggctgctaagtccttcgggtacctcttctttgggtacttcacgctgctctacttcacattctacggcatgatggccgtggggctgacacctaactaccacatcgccgcgatcgtctcctcggcattctacgccatctggaacctcttctccgggttcatcatcccccgaccgaaagtgccgatctggtggaggtggtactgctggatatgccccgtggcgtggacgctgtacgggctggtggtgtcacagttcggtgacgtcatgactccgatggacgacggaagggccg

SEQ ID NO: 78726 - DNA, 420 bp, Zea mays
agaagaaaaaaaaaagagctactatacagcaatggccggaggagacgacctgaagctgctgggcctgtgggcgagcccgtacgtgctgcgggtgaagctcgcgctcagcctcaagggcctgagctacgagtacgtggaggaggatctgagggacaagagcgagctcctgctcaagtccaaccccgtccaccagaaggtccccgtgctgatccacgacggcaagcccgtctgcgagtcgcagatcatcctgcagtacatcgacgaggctttcgccggcaccggcccgtccctcctcgccgccgacccctacgagcgcgccgtcgctcgcttctgggccgcctacatcgacgacaagatgctgcccgccctggaacagtcgaggatgggccaagacggaggaggaaagggccgaggggaaaa

SEQ ID NO: 78727 - DNA, 98 bp, Zea mays
agataaaaggaaagttaacgaacaatgtgacaaaaggtcagctttgagtttaatcaattgtattgcggcttgaggttaatcggttcaaggtgggggtt

SEQ ID NO: 78728 - DNA, 398 bp, Zea mays
acacggcgagaagggccggcggttcgggacgttcaaggagaacgtgcgcttcatccacgcgcacaacaagcgcggcgaccggccctaccgcctccgcctgaaccggttcggcgacatggggcgggaggagttccggtccacgttcgccgactcccgcatcaacgacctccggcggcaggattcccccgcggcgcgggccggggccgtgccggggttcatgtacgactccgccgccgacccgccgcggtccgtggactggcggcaggagggcgcggtgacgggcgtgaaggaccagggccactgcggaagctgctgggccttctcgacggtggtggccgtggagggcatcaacgccatccggacgggcagcctggcgtcgctgtcggagcacgagctga

SEQ ID NO: 78729 - DNA, 368 bp, Zea mays
aagtcaccccagccgcaaactgcagctctgcaagctacagaggccaccacgagtccacgacgccacgccctccgagagaaagagaaagagaaaaccaaagcacgataatgcccccgacccccacagccgccgcagccggcgccgccgtggcggcggcatcagcagcggagcaggcggcgttccgcctcgtgggccaccgcaacttcgtccgcttcaacccgcgctccgaccgcttccacacgctcgcgttccaccacgtggagctctggtgcgccgacgcggcctccgccgcgggccgcttctccttcggcctgggcgcgccgctcgccgcgcgctccgacctctccacgggcaactccgcgcacgcg

SEQ ID NO: 78730 - DNA, 218 bp, Zea mays
agggaaagttaacgaacagtgtagtaactgttcagctttgtgtttattcagttgttttgctgcttgaggttattcgtttctaggtgggggttggaatccttttcgccataaacctctcagtggcataaataagatggtttgcataagagtacttcatggataccgtaagggctactactgaaagagaaatgtttaagcagcatggtatgtgagcaact

SEQ ID NO: 78731 - DNA, 217 bp, Zea mays
aggaaagttaacgaacagtgtagtaactgttcagctttgtgtttattcagttgttttgctgcttgaggttattcgtttctaggtgggggttggaatccttttcgccataaacctctcagtggcataaataagatggtttgcataagagtacttcatggataccgtaagggctactactgaaagagaaatgtttaagcagcatggtatgtgagcaact

SEQ ID NO: 78732 - DNA, 326 bp, Zea mays
acccaaattacaatggaacaatgggctgaaatggctaatcctggtaaccaaatggcaaaagaaaataataacggcgggaatggaaccaattggaaaaggcaccatgaaattccccctgaagggttgggtaaccattggaacccttgatggagctaatgttgaaataagaaaggaggttggaaaaaataatttcttccttttcggtgccaaagccgatgaagttgctgggctgaggaaggatagagaaaatggtctgttcaaaccagacccacgttttgaagaagccaagcagtttataaggagtggcgcttttggcagctatgact

SEQ ID NO: 78733 - DNA, 411 bp, Zea mays
acacactgcaacagccaagtgcaagtgatcgagctcccccctcctcatcagtcgctaggcacagcgcacttgcaggatggcgcaggtctctaagacgcttctccttgtggccctggtgttcgtgtcgtcggcggcggtggagctgtgccgcgcgatcgacttcgacgagcgggacctggcgtcggacgaggcgctgtgggacctgtacgagcggtggcagacgcaccaccgggtgcaccggcaccacggcgagaagggccggcggttcgggacgttcaaggagaacgtgcgcttcatccacgcgcacaacaagcgcggcgaccggccctaccgcctccgcctgaaccggttcggcgacatggggcgggaggagttccggtccacgttcgccgactcgcgcatcaacgacct

SEQ ID NO: 78734 - DNA, 378 bp, Zea mays
aagcctactaccgctaacaactcagcagcaaataagcgcaggcggaagaaccagtacaggggaatccggcggcggccctggggcaagtgggcggccgagatcagagaccccagcaagggcgtccgcgtctggctcggcacatacagcaccgccgaggaggcggccagggcgtacgacgccgaggctcgcaggatacgcgggaagaaagccaaggtcaatttccgggacgaagcggcggcggcaggtgctcagaagccaccagccgcaactactccaactgcttgtgccagcgcagcgaggctagctcctccacctccaccgccgaagttccgtgctgacgaggttttcgggaacatggaccgtggcagcaacgatctg

SEQ ID NO: 78735 - DNA, 390 bp, Zea mays
accaagccaaagcaagttgctaggtcctttgaaccagcaactgaagcttcctcgtctcatcatcgagaccagtaagcaacatggcggctaatctcaagtgggctcctgttctagccctcctcgtcgtcgttgctgccatggttggcaccaccagcgccggcaacatcgcagtgtactggggccagaacggcaacgaaggcagcctggcggacgcctgcaactccgggctctacgcctacgtcaacatcgcgttcctcacaaccttcggcaacggacagaccccagttctcaacctcgccggacactgcgaccccggctccggcagctgcaccggccagagcagcgacatccagacctgccagtcgctgggcatcaaggtgctcctctcca

SEQ ID NO: 78736 - DNA, 174 bp, Zea mays
  unsure (1)..(174): unsure at all n locations
acaccagccgccgtcatgtcgaagcgaggtangggaggttcggctgggaacaagttccgcatgtcactgggtctaccggtggcggccacggtgaactgcgcggacaacacgggcgcgaagaacctctacatcatctccgtcaanggaatcaagggccgcctcaaccgcctcccg

SEQ ID NO: 78737 - DNA, 424 bp, Zea mays
acatgattgatgaggatgaaccaattttggagaaagccattggtactgaaattgaatggtaccctgggaagtgcttgacacaaaaggtgctaaaaaagaagccacggaagggttcaaagaacactaaacctatcacaaaaactgaagattgtgagagcttcttcaacttcttcagtccacctcaagtccctgatgatgatgaggaaattgatgaggatatagctgaacagttgcagaacgaaatggaacaagattatgatattggatctaccatcagagacaagattatcccacatgctgtctcgtggttcactggagaggctgctcaagatgaggagtttgaagttatggatggtgaggatgacgatgatgaagacaatgatgatgaagacgaagataacgaagatgatgatgatgatgatga

SEQ ID NO: 78738 - DNA, 412 bp, Zea mays
tccatccccttcccttcccttccttcgtgccccgccggctctccagcgcgccgtctctgcccagatccaggagatatgcctcgctatgatgatcgctatggaggcacgcgcttgtatgttggcagattggccccccgtactcgttctcgtgatttagaatatctcttcggcaaatatggaagaatacgagaagtggagttgaagcgcgactatgcatttattgagttcagtgaacatcgtgatgccgatgaagctcggtaccaactagatggcagggatgtcgatggaagtcgcattgttgttgagtttgctaaaggggtcccacgtggtccaggtggctcacgtgaatatatgggaagaggccctccaccaggcacaaggtcgttgttcaactgtgggaatggatggtcac

SEQ ID NO: 78739 - DNA, 392 bp, Zea mays
agtcatctccaagtgcgtgcgccggacgccccctatcccgccggccctgtgtgtgttccccgctaccagctatggcgtcgccgttctccgtgccttcgcagatcatggacgaggaaaggcggttcgacgcggacgtggcggaggtggagtcctggtggggcacggagcggttccggctcagcaagcgccactacaccgcccgcgacgtggtcctccaccggagcacgctcaggcacagctacgcgtcgggggagatggccaagaagctgtggcgcacgctcaaggcgcaccaggccggcggcaccgcctcccgcaccttcgagcgcgctacgaccccgtccaggtcaccatgatggtcaaacacctggacaccatctacgtctccgggtggc

SEQ ID NO: 78740 - DNA, 419 bp, Zea mays
gagacttccagccatcccttctacgctctccccgttcccgtgtcgtcctcccgacaaagagggagccgctagggtttagcggcttccgcttctgggcgagggcttacccgcgagggacggcgcgacgcggcggcacttgagctagggtttccctccgatcccgttcctttcccggcgaggcgatggacgaggcggcgattgacgacttgatccggcggctcctcgaggcccgcggcgggcgcaccccgcgcaacgcgcaggtgactgacgccgagatccggcgcctctgcgccaccgccaaggacgttttcctctcccagcccaacctcctggagctcgaggcccccattaagatatgcggggatgtccatggccagtattcagacctccttcgatttattgagtatggtggctatcca

SEQ ID NO: 78741 - DNA, 396 bp, Zea mays
agctccttacagtaaagccacaatatggatttggtgagaagggtagaccagcagctggagaggaaggtgctgtgccgccaaatgcttcgctgctcattgaccttgagttgatttcatggaagactgtcacagaaattggggatgataagaaaatccttaagaaggttctcaaggagggagaaggttatgagcgtcccaacgagggtgctgttgttgaagtcaaaattatcggaaagcttcaggatggcgcggtgtttacaaagaaggggcatgacgaagagccatttaaattcaagaccgatgaagaggaagttattgccggtcttgatcgtgctgtgttgaacatgaagaagggcgaggttgctcttgtcacaattcctcctgaatatgcatttg

SEQ ID NO: 78742 - DNA, 325 bp, Zea mays
tacacacacgtctgcgcagcaacgaacacgaaccttggcagaacgaagctgaagtagttcgttgtgaacccagtatggcaaacgcgccgaggatcctggccctcggcctgctgctagcgctcctgtgcgctgccgccggcccggccgccgcgcagaactgcggctgccagcctaacttctgctgcagcaagttcggctactgcggcacgaccgacgactactgcggcgacgggtgccagtcgggcccgtgccgctcgggcggcggcggcggcggcggcggaggcggaggcagtggcggtgcgaacgtggctaacgtggtcagcga

SEQ ID NO: 78743 - DNA, 393 bp, Zea mays
gcgtccagtttataacaacacttctagtcactttagtaatggttatgatatggaagacaagcctgctgtggattgcactctttctagtaataattggtggagcagagctcgtatacttatcttccgcattctacaagttcactcaaggtggctacttgccattagcttttgcaggaattttgatgtttataatggccacatggcattatgtccatgttcatcgatacaactatgagctccagaacaaagtatcaagtaactatgtggcagaattgtccgcaaggagaaatctggccaggttgccaggaatacgctttttgtactctgagcttgtacaaggcatcccacccatacttcctcacttgatagaaagggtaccttccatccattcag

SEQ ID NO: 78744 - DNA, 301 bp, Zea mays
cctcctcccttcgcctgtgatcatgtcctcttgctgaggccgcaagtgccggtgcggctccagctgctcctgcggcagcggatgcatcagctgctgtatgtaccctgacgtggagaccgccgccaccagcagcgtcaagaccacggtcctctccgcgccgaccaccagggccatctccggcggcttcgaggccgccaccgagggcggcggctgcgactgcaacacctgcatgtgcggcaccagctgcggctgctcctgctgcagctgcaactgatctggcccggcccggtcatggcgcacc

SEQ ID NO: 78745 - DNA, 382 bp, Zea mays
aaaaagcaacaaggcaacagcacaagcaagaaccacacctcctcccttcgcctgtgatcatgtcgtcttgctgcggcggcaagtgcgggtgcggctccagctgctcctgcggcagcggatgcaacggctgcggtatgtaccctgacgtggagaccgccgccaccagcagcgtcaagaccacggtcctcgccgcgccgaccaccaaggccagcgccggcggcttcgaggcggccaccgagggcggcggctgcgactgcaacacctgcaagtgcggcaccagctgcggctgctcctgctgcagctgcaactgagctggcccggcccggcgatggcgcacgagagtcgagaggaggaggacgacgacgaggcgtataaatataat

SEQ ID NO: 78746 - DNA, 417 bp, Zea mays
acccttgcaagtatagtctcggcggctctagaagacgatgggcaaggacgacgtgatcgagagcggcgctggcggcggcgagttcgctgccaaggactacacggaccctcccccggcgccgctgatcgacgcggctgagctggggtcctggtcgctgtaccgcgccgtgatcgccgagttcatcgccacgctgctgttcctgtacatcacggtggccaccgtgatcgggtacaagcaccagacggacgcgtcggcgtcgggtgccgacgcggcgtgcggcggcgtgggggtgctgggcatcgcctgggccttcggcggcatgatcttcgtcctcgtctactgcaccgccggcatctcggggggccacatcaaccccgccgtcaccttcggcctcttcctggcgcgcaaggtctccct

SEQ ID NO: 78747 - DNA, 428 bp, Zea mays
agcgccatcttaagaagcgccctactgagtttcgtgtggaccgtgtgctccagccgtttgaccctgccaaattcaatttcacaaaagttggccaggaagaggttctcttccaatttgagaatagtggtggtgatgacagctatttcctgaacaacgctccaatcattgctgttgatcgggctccaaatgttattgctatcaatgtaagcccaattgaatatggacatgtgcttctcattcctcgtgttctggaccgcctgcctcagaggattgatccagagagcttcttgcttgcactgcaaatggcagccgagggaggtagcccatacttcaggcttggttacaatagcttgggtgcgtttgccaccatcaatcacctccactttcaggcgtactacttgtcagtgccctttcccggttgaaaagga

SEQ ID NO: 78748 - DNA, 388 bp, Zea mays
agcgagcacatttgactgaccgccatagcaacgagaggaaacaaagcggcgaccgacgagccaagcaagcagcagagcatggacgcgggcgaggtgcggcactggaacgcggacgtcaacggcgtctccatccacgtcgccgagcggggccccgaggatgggcccgcggtgctcctaatccacggcttcccggaactctggctctcgtggcgccaccagatggccgcgctcgccgcccgcgggttccgcgcgctggctcccgatctccgcggctacggcgactcctccgtgccgtccgaccccgccgcctacaccatcttccacatcgttggcgacatcgtcgcgctccttgagcacctccaactcacaaatgtgttcgtggtggggc

SEQ ID NO: 78749 - DNA, 395 bp, Zea mays
atacacggttgctcccccttggatccttgtttgcttcctgctgcctggccttctctcctccccaaaatcaatccctcgccgacaaaggagagccagccaaatcttccacctcctccatttccagccccgtccccacaccagctcgcgtaacctcctccccatggctggaggcggcggcgcaggcgcaggctcgtcgtccggcggcggcggaggggcggcagggagggcgactgggactgcggcagctgcggcaaccgcaactacgccttccgctcgctttgcaaccgctgcaagcatccgcgcctcctcgtcgaccccaacaccccgcgcgactccaagtggctaccccgcgccggggactggatctgccacgaaagaactgcaaaaagtgtggc

SEQ ID NO: 78750 - DNA, 386 bp, Zea mays
ggtcggatcaaagtctgaagctagtggaattgccaaagctggagcaaagatggtcatggcagtttcctgtgctaaggttcctaaaattacaataattgttggtggaagttttggggctgggaattatggaatgtgcggacgtgcatatagcccaaactttttatttctttggccaactgctaggatatctgttatgggtggcatccaggcagctggagttctcgctcaaatagaagagaacaacaaaaggagacaaggagtggagtggagcaaggacgaggaagaagccttcaaagccaaagtcgtggaggcttacgacagagaaggaagcccgtactactccactgctaggctatgggacgacggggtcatcgaccctgctgaca

SEQ ID NO: 78751 - DNA, 428 bp, Zea mays
  unsure (1)..(428): unsure at all n locations
caagcaatccgaattctctgcgatttctctagatctcgaccacccctactagttttggttcctcctttcgttcgagagagcgtttctagtggcaatggcgaagagcgagggtccggcgatcgggatcgacctcggcaccacctactcgtgcgtcggcgtgtggcagcacgaccgggtggagatcatcgccaacgaccaggggaaccgcaccacgccgtcctatgtcggcttcaccgacaccgagcggctcatcggcgacgctgccaagaaccaggtcgccatgaaccccaccaacaccgtcttcgatgccaagcggttgatcggcaggaggttctctgacccgtcagtgcagagtgacatgaagctatggccgttcaaggtcattccagggcctggtgacanacccatgattgtagtcaactacaagg

SEQ ID NO: 78752 - DNA, 416 bp, Zea mays
acgcttcaaaagccatggccggtccgccgctcttgagcttccccttcttcttccttctctgcgtcgccctcgcctggagcgaggcgtatggagcaagcggtggctacgggctcggcgtcaactacggccgggtggcggacgacatcccttcgccgtggcgctccgtggagctgctccgcgcggcgggggccgggtcggtcaagatctacgacgccaacccgggcgtgctccgcgcgctggctgggacgcgctggcccgtctccatcatggtgccaaaccaaatcataccggacctcgccgcctctgctgccgcggcggaccggtgggtcgccgagaacctggtcccctactacccggcgacacgggtcaagttccttctcgtggggaacgagatcctctccgacttgtccatcgcg

SEQ ID NO: 78753 - DNA, 321 bp, Zea mays
  unsure (1)..(321): unsure at all n locations
aactttgcctcctaacaaatccaccaccgggtaagggtccctaagggtttgtggaagggcgatggccgcggctgatgtggagtaacgttgcctcctccgggggcctgcctgggccaacaacaacgaatccctggagaatgccttcgcctcctacggcgagattctcgactccaaggtcatcaccgaccgggagacggggaggtcncgcggcttcggcttcgttaccttctcctccgagaactccatgctcgacgctatcgagaacatgaacggcaaggagctcgacggccgtaacatcaccgttaaccaggcccagtcccg

SEQ ID NO: 78754 - DNA, 414 bp, Zea mays
cccacgcgtccggccttcccggttacttgttcactaacaaggtcgggacggcatggcccttggagctgcgtaccatcactacctgcagctcgccggcgaccatggcaccgccacacacgcactgctcctcggcgtacttatcttcctcgtcatccgcctagtatccgcaaggcgaaccggcacaacctcagccaacaaacgtaagcagcaacagcggcttccgctcccgccttcgcccccgggcaagctgcccatcatcggccacctccacctcatcggcgccgagacccacatctcgatccgggacctggacgccaagcacgggcgcaacggcctgctgctcctccgcatcggcgccgtgcccaccctgttcgtgtcctcgcccagcgccgccgacgccgtcctgcgcaccca

SEQ ID NO: 78755 - DNA, 397 bp, Zea mays
  unsure (1)..(397): unsure at all n locations
ccaaatttgtggacattagcaaggaagatttggatttaggtgataacaatgaggaaagagagaaggagataaagcaggagttcagccaagcctgtgactggataaagaatcgcttgggtgacaaggttgcacgtgttgacatatctaatcgtctcaggtcatcgccatgtgttcttgttgcagcgaagtttggttggtcagccaatatggaaaggctgatgagagcacagtctatgggtgatacagcctctttggatttcatgcgttcgangaaagtttttganatanacccagagcatgagataatcaaggccttgaatgtggcatgcangaataaccctgatgatcctgaagccctaaaggctctggatgttctctttgaaactgctatgatttc

SEQ ID NO: 78756 - DNA, 396 bp, Zea mays
cccggtttctctccggttcgtgggagggccaaagcttcgaggaaggaaaaccctaccgctgtgggagtagcctccggcgatggctgcggcggcgatcctgccggagctggcgacgcaggtgctcatcccggtcgcggcggccgtgggcatcgcgttcgcggtggtgcagtgggtgctggtctccaaggtgcgggtcacccccgagcgccgcgcggacggcggggccgtgaagagcgggcccagcgactacctcatcgaggaggaggagggactcaacgaccacaacgtcgtcgtcaagtgcgccgagatccagaccgccatctctgaaggagctacatctttccttttcactgagtacaagtatgttggattaatcatgggcatctttgcaatccc

SEQ ID NO: 78757 - DNA, 428 bp, Zea mays
  unsure (1)..(428): unsure at all n locations
gcagaaacgagagggccggagcagccgcagtcccggcgatcccgccgccggtcgccctcatacttcctcgtcactgccttcgtttctctttccaacaatcaagatgagccgtggcggtagcgcgggtggtggtcaaagttctctgggttacctctttggaagcggtgagccccccaaaccagcagtggcaccagctgtaagtgctccacctgctgctgcaggtgctccacctgctgagaaaccacctgctgcaaagcctgatggcaccagtcagattgctgctggggttaccagccaaaccaataactaccacagggccgacggtcagaacaccggaaacttccttacggaccgtcctttcgacaaggtcaacgctgctcctgncggtggctcttccctgngatacctgtttggtggcaactgatgcc

SEQ ID NO: 78758 - DNA, 416 bp, Zea mays
atcgacaatggcactccaggcagcctacgagtacctgcagcaggccgtcggccatggcgcgtggtcgtccacgcagacgctgacgctgctgctcatcgccgtacccaccgtactactgctgctagcgtccctcgccaagagcacgtcgtcgtccggtaggggcaagccgccgctccctccctcgccgccgggcaccctccccatcgtggggcacctacaccacatcgggccccagacccacatctcgctccaggagctggtggccaagtacgggcacaacgggttcctgttcctccgcgccggcgccgtgcccaccctgatcgtgtcgtcgcccagcgccgccgaggctgtgatgcgcacccacgaccacatcttcgcgtcgcggccgtggtccatggcctcccacatcctccgct

SEQ ID NO: 78759 - DNA, 335 bp, Zea mays
gtccacccgcccgtccggaagcctagagcagccaagaaaagcacatacccgagtcgccgaaacaacaacaatcccaatcccccctcgtcactcaaaactcgaccaacaatgtcgctgattcgccgtggaagcgcattcgaccccttctcccttgacctctgggaccccttccagggctttcccttcggctctggaagcagcagcagcagcagcctgttcccctcgttcggaggcaccaccagctctgagacggccgccttcgccggcgctcgcgtcgactggaaggagacgccggaggcgcacgtgttcaagaccgacgtgccggggctgaagaa

SEQ ID NO: 78760 - DNA, 388 bp, Zea mays
aacaaagcgatactagctagtccctaccaaagcatacttcctgaaacactcttgcaatccactgagttctgtttgttgagacgcatagagctagagtcgacaatgtcgctcgtgaggcgcagcaacgtgttcgaccccttctccatggacctctgggaccccttcgacaccatgttccgctccatcgtcccgtcggcgacctccaccaactccgagactgccgccttcgccagcgcccgcatcgactggaaggagacgcccgaggcgcacgtgttcaaggccgacctccccggcgtcaagaaggaagaggtcaaggtcgaggtcgaggacggcaacatgctggtcatcagcggccagcgcagcagggagaaggaggacaaggacgaca

SEQ ID NO: 78761 - DNA, 327 bp, Zea mays
aacatggcgccgccgcagccaaagtcgggcctcttcgttggcatcaacacgggtcatgtcgtcaccaagcgcgagctgcctccccgcccgtgccaccgcaaggggaaatcaactaagagggtgtctatggtcaggggcctgatcagagaggttgctgggtttgctccttatgagaagcgtatcactgagcttctgaaggttggcaaggacaaacgtgccctgaagcttgctaagagaaagcttggaactcacaagagggcaaagaacaagacagaggacatggctggcgtcctcacgaacaataggtctgctggtacgcacactgac

SEQ ID NO: 78762 - DNA, 414 bp, Zea mays
cccacgcgtccgcaacccagtcgagtccccctccgctctctctgcagttctgcactctgcagctgccggccatggcgcgcgccccgagctcgtggacgccgtccctcgccatggtgctcctcgtcgtggccgccgccgccgtggccgtgtcgtcggaggcggccagggtgcccgccgccgtcggcaactggacgggggaggagctgcgcggggccgcggcgaggcggggcggccggcgctcccggcgccgcgcgttcgagaacggcctcggccggacgccgcagatggggtggaatagctggaaccacttcggctgcgggaataacgagaacctcatcaagcagacagctgatgcgctggtcaacaccggtctggcgaagctgggctacgagtatgttaacatagatgattgct

SEQ ID NO: 78763 - DNA, 397 bp, Zea mays
ccctgcgctgcaaatcctcggtggttttgcagcttccagagcttgagattgagaccagcgcggcagttctttcttggtcgatggcgctgaggaggatcatcaaggagctcaaggacctgcagagggatccacccacgtcctgcagcgcagggcctgtgtccgacgacatgttccactggcaagcgacgatcatggggcccagcgacagcccctactcggggggcgtgttcctggtcgccatccacttccctccggactacccgttcaagcctcccaaggtggcgttcacgacgaaggtgttccaccccaacatcaacagcaacggcagcatctgcctggacatcctcaaggagcagtggagccccgcgctgacggtctccaaggtgctgctctccgt

SEQ ID NO: 78764 - DNA, 152 bp, Zea mays
agttaacccacaaataagcgcattccagaaagcacaggattgtcttctgcccatgggaattacgtctgaaaatgttgcccatcgatatggtgtaaccaggcaagagcaagatcaggccgccgctgagtctcataggagagctgctccagcca

SEQ ID NO: 78765 - DNA, 381 bp, Zea mays
caagcctctagattaagtcgtagaatacggtgggggatgggcggctggtggcgcacgggcggagcgtcctcgccggcgtgccggacaacatcgtgctcacgcacgcctccggggcggggctggtcgacggcgccttcgtcggcgccacggccgccgagcccagcagcatgcacgtcttcaccttcggcaccctccgggacctgcgattcgtgtgctgcttccggttcaagctgtggtggatgacccagcgcatgggcacctccggccgcgacgtcccgctggagacgcagttcatgctcctggagtgcggcccgggcgacggccacggcgacggcgacgcggcggtgtacgtggcgatgctgccgctgctggagggccagt

SEQ ID NO: 78766 - DNA, 356 bp, Zea mays
gtccggagaaagtatggcaacgccaatgcatggaggtactgcactgatgtgtttgattaccttacgctatcagcaatcattaatggccaagtcctctgtgttcatggtggtcttgctcctgaggtacgcactattgaccagatacgaacgattgatcgcaattgtgaaattccccatgaaggccctttctgcgatcttatgtggagtgaccctgaggagatagagacatgggctgttagtccccgtggagcacgttggctgtttggatcgcgagtaacagcagagttcaactttgttaatggtatcgagctagtttgccgggctcaccagctggtccaggaaggcttaaagtacat

SEQ ID NO: 78767 - DNA, 439 bp, Zea mays
gcccttccgaccgaccttgaagaggggaagagttctgagaactttctctatgttgtggagggaatgcaatttgaccgtggttacatctctccgtactttgtaacagacagtgagaaaatgactgcagagtacgagaactgcaagctgcttttggttgataagaaaatcaccaatgcaagggatcttatcaacgttttggaagaatccatcagaggtgcatacccaatcctgataattgcagaggatattgagcaggacgctcttgctacccttgtcgtcaacaagctcagaggatcactgaagatcgctgccatcaaagcccctggttttggagagcgcaagactcagtacttggatgatattgccatccttactggagcaactgtaaccagacatgaagttgggctatcacttgacaaggcagacaaattagttcctg

SEQ ID NO: 78768 - DNA, 300 bp, Zea mays
ggccgggtcgcccatggtcgccgcgcggaggcaggcttccgcgcggagggaggtagccatgcgccgggcgcgggaggccgggcgggagtacgagctcatccccagcgctcgcggcgagacgctcttgacgcagtgctggtggccgcgcccgtcctccaccgttaaaccaagggcgctagttgttgtcatgcacgggctaaacgagcacagtgggaggtacgatcatttagcgaggcggttgaatgatgtctgcatcaaggtgtacgggatggactggactggtcatggtggaagtgatgg

SEQ ID NO: 78769 - DNA, 338 bp, Zea mays
atgtttgcgggaatgccatctggtatcgacattgagtggtaccctgtgaagtgcttgacacacaaggtgctaggagagaatccacggtcgggttgaaagaacactaaacctatcacaagaactgaagattgtgaaagcttcttcaacttcttcagtccacctcaagtccctgatgatgatgaggaaattgatgaggatatagctcaccagttgcagaacgaaatggaacaagattatgatattggatctaccatcagtcacaagattatcccacatgctgtctcgtggttcactggacaggctgctcaagatgaggagtttgaacttatggatggtga

SEQ ID NO: 78770 - DNA, 389 bp, Zea mays
acgaaagtacgagcttggtcgccagccggccaacaccaagttgtcaagcaataagacagtgaggagggtccgtgttcgtggaggtaacgtgaagtggagggctcttcgccttgatactggtaactactcatggggaagtgaagctgttacccgcaagacccgtatcctcgacgtggtctacaatgcatcaaacaatgagcttgtgaggacacaaacccttgtgaagagtgccattgtgcaagttgatgctgccccattcaagcagtggtacctcactcactatggagttgacattggtaggaagaagaaaacccctgctgcaaagaaggataatgctgagggacaagaggttgaggcagcagctgaggaaacgaaaaagagcaaccatg

SEQ ID NO: 78771 - DNA, 382 bp, Zea mays
actacgcaagcaggcttcgagaacaagggggagggggaggaccaagcgaaagggggaactagagcaagatgggcggcgaactgctgcttgcgcgcctcctcgtctctgctgctgccgcccctcaggtacttggagttggcaatggagacaatcacatgagaatcatccaggaggacatcattgagacagtcaacaaccatcccagtgctgggtggacagcctcacgtaatccttacttttcaaactataccattgcgcaatttaagcacatacttggagtgaaaccagcaccacagaatgcactaagcaatgttcctgtcaaaacttattcaagatcactggaacttccaaaagagtttgacgctagatctgcatggtcccg

SEQ ID NO: 78772 - DNA, 439 bp, Zea mays
tagcgtcgaaattcagggtcgaccacgcgtccggggcccatcagcttccagctgcagtggttccagcaggtcacctccgccgtgtgcgggcaggactgcaagagctacctggccaactcgctgttcgtgttcggcgagttcgggggcaacgactacaacgccatgctgttcggcaactacaacgcggaccaggccagcacgtacacgccgcagatcgtgagcgccatcgcggccggcgtggagaagctgctggccatgggcgccacggacgtggtggtgccgggggtgctccccatcggctgcttccccatctacctcaccgtctacggcacctccaacagcgccgactacgacgcgctcggctgcctcaagaagttcaacgacctctccaccaaccacaacgcccagctgcaggcccagatctccgccctccaggcca

SEQ ID NO: 78773 - DNA, 404 bp, Zea mays
gagagagggagagattagagggagcgccctgcccaagcaaagagaaaccgcggcgcgagaagagggaggaagggcagacgggcgagcaggatgagagagatcatcagcatccacatcggccaggccgggatccaggtcggcaacgcctgctgggagctctactgcctcgagcacggcatcgagcccgatggcaccatgcccagtgataccacggttggcgtcgcacatgatgccttcaacacgttcttcagcgagaccggttctggcaagcatgtgccgagggccatcttcgtcgaccttgagcccactgtcattgatgaggttcgcactggctcgtaccgccaactcttccacccagagcagctcatctcgggcaaggaagactcagctaacaactttgcccg

SEQ ID NO: 78774 - DNA, 383 bp, Zea mays
gtaatcttctttttcttctctccctcgcagaagtcgagaaaacaacccggtttagcatgcatcggtacggtagctcgctgcgttgattctgctgtttacgtgtgcctgagacaccagtacacggggggaatcatttttcttctgttgtgtttggggagggcggcctcgctggtgtgggggcgatccggctcctgggcgggggcgcggggccccccggcttgctgtccctcctggggacgcgaaggggtgagctgtgagcagcactgcgtgctctggaccttgtcagggcatgtacagtgggtgtcttaagttgtgtcttcgagtgtgtctaggggggtgattgtaaaaaaactcaagacatgtatcttgacgaagacacagtg

SEQ ID NO: 78775 - DNA, 421 bp, Zea mays
cgtccacctacccggacgcgcgcacgcaaagcagaacgctcccctcccggccttcccttcctccccgccctccgaagtccgaaggccagaagcttccggaagccagcccaagccatgaacgccgccagcaccgccgccgcggcccccgcgcctgccgcgaccgtgcaggtcccgcgcgggcaggtggatctgatcgacttcatcgactggaccggcgtcgagtgcctcaaccaggactcgtcccacagcatcgtcaacgcgctcaagcagagtttgagagacgacgaggggctgtacctcgccagcgattcggacgagcagctgctgatctacatccccttcatgcaggtagtcaaactgcattccgcgctattcaaaggtcccgaggaagagggccccaaaacaattaaactcctctcca

SEQ ID NO: 78776 - DNA, 196 bp, Zea mays
ggagcggaaggcgaaagagtagcagcagcaggcggcgccgagtagcggctccccacctcgagcttgccaccatggctagaggattgaagaagcatttgaagaggcgcagtgcgcccaagcattggatgctggacaagcttggcggagcttttgctcctaagccatcttctggacctcacaggtctagggagtgccc

SEQ ID NO: 78777 - DNA, 440 bp, Zea mays
actcgcgggtcgacacaagcgtctaaactaaatcagcggaggcgcgggcggacaaggagcaggcggaggaggagctgtgccaagccacaatgggtatctcacgcgactcgatgcacaagcgccgtgccaccggtggaaagcagaaggcctggaggaagaagcgaaagtatgagcttggtcgccagccggccaacaccaagttgtcaagcaataagacagtgaggagggtccgtgttcgtggaggtaacgtgaagtggagggctcttcgccttgatactggtaactactcatggggaagtgaagctgttacccgcaagacccgtatcctcgacgtggtctacaatgcatcaaacaatgagcttgtgaggacacaaacccttgtgaagagtgccattgtgcaagttgatgctgccccattcaagcagtggtacctcactcac

SEQ ID NO: 78778 - DNA, 320 bp, Zea mays
acatagcagcgagaggaaacaaggcggcgaccgacgagccaagcaagcagcagagcatggacgcgggcgaggtgcggcactggaacgcggacgtcaacggcgtctccatccacgtcgccgagcggggccccgaggatgggcccgcggtgctcctaatccacggcttcccggaactctggctctcgtggcgccaccagatggccgcgctcgccgcccgcgggttccgcgcgctggctcccgatctccgcggctacggcgactcctccgtgccgtccgaccccgccgcctacaccatcttccacatcgttggcgacatcgtc

SEQ ID NO: 78779 - DNA, 437 bp, Zea mays
cgggccgacccaagcgtccatgattcgtgaagagatcgagcttcttttgcaccacaaggtcgaggatgtcttgcaactgcggatcaagctgcggctgcggctcaagctgcaagtgcggcaagaagtagcctgacctggaggagacgagcaccgccgcgcaggccaccgtcgtcctcggcgtggccccggagaagaaggccgcgcccgagttcgtcgaggccgcggcggagtccggcgaggccgcccacggctgcagctgcggtggcaactgcaagtgcgacccctgcaactgctgatcacatcgatcgacgaccatggatatgattattatctatctagcttgtggtggtggttgaacaataataagcgaggccgagctggctgccatacatatgtattgtgtggtgtgtgtgagagagagagaaacagagttcttc

SEQ ID NO: 78780 - DNA, 355 bp, Zea mays
  unsure (1)..(355): unsure at all n locations
caagtacactcggctaggtaatctggtgggttacacgacatggcgggcaccagcagcaggtcgtcatcgtcctcgagctcggcgcaacgggcagctgccgcactgctcgtggccgcggccgtggcngtgtccgtcctgatggtgggcgctgcggcggtgtgcgacatgagcaacgagcagttcatgtcgtgccatcccgcggcggccaatacgactgacccgccggccgcgccgtcgcatgcgtgctgcgactcgctggccggggcggacctcaagtgcctgtgcggctacaagaactcgccgtggatgggcgtctacaacatctaccccaagcgcgccatggagcttccggcca

SEQ ID NO: 78781 - DNA, 427 bp, Zea mays
gcctcatctgtggaaaaggagagaagactgaagagaagggaagacatggccgtgacggcggaagcggcggcagagatggtgttggagcggcgggcgtacgcgcgggtggggctcctcggcaaccccagcgacgtgtacggcggcagggccctgtccttcgccatcgccgacttttccgccaccgtccacctccgcccttcgcccgagctgctcatccagccgcatccgcaccacgacctcgtcgccttcccctctctccctcaactcgtgagccgtttgcaaagtgaaggatattatggaggcgtccggctgctgatggctatctgtaaagttttctacaactattgtgttcaaaataacatcagtttaaaagctgaaaatttcaccttatcatacgatactaatattcctcggcagtctgggctgt

SEQ ID NO: 78782 - DNA, 419 bp, Zea mays
  unsure (1)..(419): unsure at all n locations
cggacgcgtgggcggacgcgtgggcggacgcgtgggaaaccggattaatttaacacctgttgcattaatggaggcaacttgctttgctaaaactgtgtttggtggcgagcaagttaagcctgatcacagagatgttccttgtgctgttttctccattccaccactatctgtagtgggcctcagcgaagaacaggccttggaggaagccaatggtgatattcttgttttcatctcatcattcaacccaatgaagaacagcatatccaagcgccaggagaagactatcatgaaactggtagttgatgctgaaactgacaaagtacttggtgcatccatgtgtggaccagacgcacctganattttatcaggcatcgctattgcggttaaatgtggagccacaaaagcagacttcgacagca

SEQ ID NO: 78783 - DNA, 419 bp, Zea mays
  unsure (1)..(419): unsure at all n locations
cctctccgaaatcaaggtagcatacaccgctgcagtttctagagccctctctgccactcgtgatcccactagtcacgatgcctgccctcgctaagcccgcctcccgcaccgccaagcccgccgcggctccgaagccgaagcctgccgccgccaagccgaaggcggccaccgctggtgcctcccacccgccttacttcgagatgatcaaggaggctatcacggcgctaaaggagaggaccggctccagctcgcaagcgatcgccaagtatgtgggggacaagcacggcgcgtctctgccggccaacttcaagaagatgctttccatccagctccgtgggtccgcagccaagggcaagctcgtgaaggtcaaggcttcgtacaagctctcggacgccgccaagaaggcatcnncccaagac

SEQ ID NO: 78784 - DNA, 442 bp, Zea mays
agcacaacacttcttcctcctcttcctcctcctagcacagctagcgcctgctccccttcgtctgtgatcatgtcttgcagcagcggcaagtgcaactgcggctccagctgctcctgcggcagctcatgcaactgcatgtcacctgacgtggagaccgccgccgccagcagcatcaagaccatggtcctcgctgcgccgaccaccaaggccagcgccggcggcttcgaggctgccaccgagggcggcggctgcgactgcaacacctgcaactgcggcaccagctgcggctgctcctgctgcagctgcaactgagccggcccgcccggcccggcgatggcgcacgagagtcgagaggacgacgacgacgaggcgtataactataatagcagcgtctaaattagatcctgtcaactgcacccgccattatcgattcatggtcgct

SEQ ID NO: 78785 - DNA, 438 bp, Zea mays
gcccctccctctctctctcgtggagacgactgggccgccgtcgttgctgccctacgcggctacacccacgtcttcttcgggcccttagccgcgacgagcgccaccagggagtagaagaggttaaccttctggttggaaacgatgtacttcgaaggctatggcttccgtggaagtactttcgagcagacatatcgctgctatcctgcgtctttcatcgacaagccacaacttgaggccggtgacaaaattataatgccaccatcagctcttgatcgtcttgcatctctgcatattgaataccctatgctatttgaagtccacaatgcagcagcagaacggacttcgcattgtggtgttctggagttcattgcagaagaaggcatgatctacatgccatattggatgatgcaaaatcttcttttgcaagagggagatatg

SEQ ID NO: 78786 - DNA, 441 bp, Zea mays
acccctccctctctctctcgtggagacgactgggccgccgtcgttgctgccctacgcggctacacccacgtcttcttcgggcccttagccgcgacgagcgccaccagggagtagaagaggttaaccttctggttggaaacgatgtacttcgaaggctatggcttccgtggaagtactttcgagcagacatatcgctgctatcctgcgtctttcatcgacaagccacaacttgaggccggtgacaaaattataatgccaccatcagctcttgatcgtcttgcatctctgcatattgaataccctatgctatttgaagtccacaatgcagcagcagaacggacttcgcattgtggtgttctggagttcattgcagaagaaggcatgatctacatgccatattggatgatgcaaaatcttcttttgcaagagggagatatggtg

SEQ ID NO: 78787 - DNA, 442 bp, Zea mays
agcaatcacaacgaacaaaagctctcgatctcaccgacaccgaggaagaagagatcaatggcgtccgagcagggagtcgtgatcgcgtgccacagcaaggctgagttcgacgcccacatgaccaaggcccaggaagccggcaagctggtggtcatcgacttcactgccgcctggtgcggtccatgccgcgccatcgccccactgttcgtcgaacacgccaagaagttcactcaggtcgtcttcctgaaggtggacgtggacgaagtgaaggaagtcaccgcggcctacgaggtcgaggcgatgccgaccttccacttcgtcaagaacggcaagacggtcgcgaccatcgtgggtgccaagaaggacgagctcctggccctgatcgagaagcatgccgcgcctgcgcctgcgtctgcgtctgcctaaaggagatcagatcagt

SEQ ID NO: 78788 - DNA, 389 bp, Zea mays
ggtcgagcccgcgtccgaaatcaacatcacagcaagctccgcgcactgaaatcttccaagccacaggacacagctctacttccacagttcgcagactcgcacgcaccgagcggctagctatcagcgataaatgtcgctggtgacgcgcaccagcgtgttcgacacagtctctgtggacctcttgaaccccttcgagaccatgtttcgctccatcatgccgccgtcgttgtcgtcctcggcggcctcctagaccgcctccttcgccaacgcccgcatcgactggaatgagacgccctacgcgcacgtgttcaatgccgacctcaccggcgtgtacactgaggaggtcacggtgaaggttgatgactgtaacgtgctgctcatcagcgggc

SEQ ID NO: 78789 - DNA, 321 bp, Zea mays
ggatgaatcatgcgacaaggtcgacatgtcatctccgccgccggtgaagctgatcggcttcttcggcagcacgtacgcgttccgcgcggaagcggcgctgtgcctgaaatgcgtggcgtacgagctgatcctgtaagagctgttcagcagcaagagcgagctcctgctccaccacaaccccgtgcacaagaaggtgcccgtgctcctccacggcgaccgccgggccatctccgagtccctcgtcatcgacgactacgtcgacgaggacttcgacgggctgctgctgctcgccgccgacccctacgcgcgcgccgcggcccg

SEQ ID NO: 78790 - DNA, 445 bp, Zea mays
agttcccggctctctgatgccataacaggagatggcattgtgaacagaggccaggcattgaatgatgctgacgatgaagagtgcaaggacatgcctttgatcctccgcaacaaggccccaaggtggcacgagcagcttcagtgctggtgcctcaacttccggggccgggtgactgtcgcctcggtcaagaacttccagctagtcgcggcgacacagcctgccgccggagccctgaccccatcacaggcagccccgcagccagctccgcctcctccgccggaccaagagaaggtcatactgcagtttgggaaggtcggcatggacatcttcaccatggactactgctacccgctgtcagccttccaggccatcgccatctgcctgaacaacttcaacaacaatttggcctgcgaataaatccaaccaacaattctggtacctacca

SEQ ID NO: 78791 - DNA, 440 bp, Zea mays
  unsure (1)..(440): unsure at all n locations
cacaacacaactcgtaggcagcgagcgtctctcctcttcctctcccacgcaccgcgccaaggaaggcagagagagatcgccgctcctcttctctccgtcggtggtgcggttgaccgccctcctcgagcgagatctcgctgcagtccctcgagatctggtcacagatctatccgacaagatggtgaagatctgctgcatcggtgctggctatgtcggtggcccaaccatggctgtcattgccctaaagtgcccagacattgaggttgtcgttgttgacatctccaagccccgcattgaggcatggaacagcgacaccctctcgatctacgagcccggcctcgatgatgttgtgaagcagtgcaggggcangaacctcttcntcagcactgatgttgagaagcacgtcgctgaggctgacatcatcctcgtctcggtgaaca

SEQ ID NO: 78792 - DNA, 443 bp, Zea mays
atcgactccgccgccgctccgcctcagcgcgtcgcccgccgccacatcctacagcgacctcatcgatcaccttcaactttcaatcatggcggacgtcgatgtcgaaccggaggttgccgccggcgctcccaagaagaggacgttccgcaagtacagctaccgcggcgtcgacctagatgcgcttctcgacatgtccacggacgacctcgtccagctcttccccgcgcgcgccaggagaaggttccagaggggtctgaagaggaagcccatggcactcatcaagaagctgcgcaaggcgaaaaaggatgctcctgctggtgagaagccagagccagtcaagacacatctccgtaacatgatcattgtccctgagatgattggaagcattgttggggtctacaacggcaagacgttcaaccaggttgagatcaagcctgagatga

SEQ ID NO: 78793 - DNA, 365 bp, Zea mays
acgcagcagatcatcagcgacgagctcatgctggacggcaacccgcgcctgaacctggcgtccttcgtcaccacgtggatggagcccgagtgcgacaagctcatcatggactccatcaacaagaactacgtcgacatggacgagtaccccgtcaccactgagctccagaaccgctgcgtaaacatgatagctcacctgttcaacgcgccgatcaaggaggacgagaccgctataggggtcggaacattgggatcctcggaagcgatcatgcttgcaggtctagcgttcaagaggaaatggcagaccaagaggaaggaccaggggaaaccgtgtgacagacccaacatcgtcaccggtgccaacgt

SEQ ID NO: 78794 - DNA, 398 bp, Zea mays
ctggcttctcctccccctcttaccaagtcctcctcgggttagggttccttagggttttgtggaggggcgatggcggcggctgatgtggagtaccgttgcttcgtcggcgggcttgcctgggccaccagcaacgagtcgctggagaatgccttcgcctcctacggcgagatcctcgactccaaggtcatcaccgaccgggagacggggaggtctcgcggcttcggcttcgttaccttctcctccgagaactccatgctcgacgctatcgagaacatgaacggcaaggagctcgacggccgtaacatcaccgttaaccaggcccagtcccgtggcggtggcggtggcggcggtggctacggcggcggtcgcggcggccgccgctatggtggcgggcgccg

SEQ ID NO: 78795 - DNA, 405 bp, Zea mays
atggcttctcctcgccctcttactaggtcctcctcgggttacggctccttacggttttgtggaagggcgatggcggcggctgatgtggagtaccgttgcttcgtcggcgggcttgcctgggccaccagcaacgagtcgctggagaatgccttcgcctcctacggcgagatcctcgactccaaggtcatcaccgaccgggagacggggagggctcgcggcctcggcttcgttaccttcgcctccgagaactccatgctcgacgctatcgagaacatgaacggcaaggagctcgacggccgtaacatcaccgttaaccaggcccagtcccgtggcggtggcagtagcggccgtggctacggcggcggtcgcggcggctgccgctatggtggcgggcgccgtgacggc

SEQ ID NO: 78796 - DNA, 427 bp, Zea mays
cggacaaagcccgtccctctcctactcctcccccaaagttccgttcagttccctcccgcaggtcaaaaccctcaacctcccacgcggctcgctgggtgggtcggtcggccatggctccccccgcgctcggatctcaggtggccgccgcagcctcggttcccgtcggctcggactctctcgctaagggcgcggcgctcaagggtaacagcactctaaactttcggaccaaaccatgcatcggaatggcattagcatggaaaaacaggacccagcaaccacggcgtctgaacaaggtactctgcatgtctgttcaacaagcaagcaggagcaaggttgctgtcatgcccgtcgagttggagaaggcaaaggagccactgctccacctgtacaaaccaaaggagccttacacggccacgatcgtcactgt

SEQ ID NO: 78797 - DNA, 418 bp, Zea mays
  unsure (1)..(418): unsure at all n locations
agcggaagagttcgcggangaggacaagaaggtgaaggagcggatcgacgcccgcaaccacctggaaacttacttgtacaacatgaaaaacacggtgggcgacaaggacaacctcccggacaagctggaggcggaggaaaaggaaaaggtggaggaggccctgaaggaggcgctggagtggctggactacaaccagtccgccgagaaggaggactacgaggagaagctcaaggangtggangccgtgtgcaaccccatcgtgtcggccgtgtaccagcggtcgggcggcgcccccggtggtgatgccgacggcggcgtcgacgacgaccacgacgagctgtagatggtggtggggagcggtgacgtggagtgccgggaaccaagccaaattttgtaatggtgtttaagggggagggtg

SEQ ID NO: 78798 - DNA, 203 bp, Zea mays
ggcgtgctcacggtcaccgtgcccaaggcggaggagaagaagcctgaggtgaaggctattgagatatctggttgagcatccaatccaatatggacgtggaaggaaggtgtactgctgctgctggtccgtggctgtcgctgtcttgtgggatgtttcctgtgtcttctacgatatataacgtacttctgtttgtttcgtttaaa

SEQ ID NO: 78799 - DNA, 413 bp, Zea mays
cccacacgtccggccgaagcttgagggtttcagcatcccgcggccaacctcctacaacttcgagcgctctcagcccgtgcagcggctctaccgtccgaccgatgacccggacctcgacgacatcgccttctccgacgacgctccgtcagatgccccagccggcaccgcggtggatggaaaggcggagcatgacgaggagatcgacccgctcgacgccttcatggcggagatccaggaggagatccgcgcgccgcccccgccgcccaaggccgaggcgcttcgccgcgcggactccggcgacgatgaagatgaccccgttgagagctttctgcgggccaagaaggatgccgggctcacgctgggcgccgacgccatgcgcgctgggtatgactccgacgaggaggtctacgccg

SEQ ID NO: 78800 - DNA, 416 bp, Zea mays
gattcacctccagttcataggcacagcagcagaaagcgccaggagcttaagaacatggcgaacaggggcttgcatctggctctgttcctcgtccttctcgggctgtcgtccaatttggcagccgggcagatcctgttccagggcttcaactgggagtcgtggaagcagaacgggggatggtacaacttcctgatgggcaaggtggacgacatcgccgaggccggcatcacgcacgtctggctccctccggcgtcacactctctcgccgagcaaggctacctgccggggcgcctgtacgaccttgacgcgtccaagtacggcaacgaggcgcagctcaagtccctgatcgaggcgttccacagcaagggcgtgaaggtcatcgccgacatcgtcatcaaccaccgcacggcggagca

SEQ ID NO: 78801 - DNA, 380 bp, Zea mays
gccccgtggctacctcacccgccggggctcgccacgatgaaaggcctcctcgcgtgcgccaccctcgcccgccgcgccgccgcctcctccgcgcccgcgcgcgtccgccacctggcgggcgccgcggatgcggcggaggccgagctcaagaggacggcgctctacgacttccacgtcgcccacggcggcaagatggtgccgttcgccggctggagcatgcccatccagtacagggactccatcatggactccaccgtcaactgccgcgccaacggcagcctcttcgacgtcgcccacatgtgcggcctcagcctcaaaggccgcggggccatccccttcctcgagtccctcgtcgtcgccgacgtcgccgcgctcaggga

SEQ ID NO: 78802 - DNA, 414 bp, Zea mays
aaagaagacgcggcactccgaggtcggccacaagagcctgctcaagagcgacgacctctaccagtacatcctggacacgagcgtgtacccgcgggagccggagagcatgaaggagctccgcgagatcaccgccaagcacccatggaacctgatgacgacctccgccgacgaggggcagttcctgaacatgctcatcaagctcatcggcgccaagaagaccatggagatcggcgtctacaccggctactccctcctcgccacggcgctcgccctcccggaggacggcacgatcttggccatggacatcaaccgcgagaactacgagctgggcctgccctgcatcgagaaggccggcgtcgcccacaagatcgacttccgcgagggtcccgcgctccccgtcctcgacgacctcat

SEQ ID NO: 78803 - DNA, 421 bp, Zea mays
acagccgcttcaccgcgccgccaccgccaccgcgaggatgccgttcaagaggttcgtggagatcgggcgcgtggccctggtgaactacggggaggactatggccgtctcgttgtcatcgtcgatgtggtcgaccagaacagggcacttgtggatgcccctgatatggtcaggtgccaggtgaacttcaagcggctctcacttactgacatcaagattgacatcaaacgtgtccccaagaagacagccctgatcaaggcgatggaggaagctgatgtgaagaccaagtgggagaacagctcatggggcaagaagctgattgtccagaagaggagagcatcgctcaatgactttgataggttcaaagtcatgctggcgaagattaagaggggcggtgctatcaggcaagagctcgccaagctg

SEQ ID NO: 78804 - DNA, 441 bp, Zea mays
  unsure (1)..(441): unsure at all n locations
cacaccgggcacaccccccgagctcagcttagctccactccagctccaatcacagtcgtgaccagagcgcgagagctagctagagggccgtgaaaatgccgatcaataggatcgccctgnggagccaccaggaggtgtaccacccgggcgccctcaaggcggcgttcgctgagttcatctccaccctcatcttcgtcttcgccggccagggctccggcatggccttcagcaagctgaccggcggcggcccgacgaccccggcgggcctgatcgcggcggcggtggcgcacgcgttcgcgctggttcgtgccgtgtccggtggcgcgaacaatctccggcgggcacgtgaacccggccgtaaccttcggcgccttcgtgggcggcaacatcaccctgttccgagggctcctgtactgggtggcgcagctgctggggtccacc

SEQ ID NO: 78805 - DNA, 364 bp, Zea mays
agagatagcgtcgccggtggctccgcagcgcctgttccgcgccgccgtgatggactggcacaccctggcgcccaaggtcgcctcccacgtcgtcgccagcgcgcagcccgtggagggcgacggcggcgttggcagcgtcaggcagttcaacttcacctcagtcatgccgttcagcctcatgaaagagcgtctcgagttcctggacgcggacaagtgcgagtgcaagaacacgctcatcgagggcggcggcatcagcgtcgccatcgaaacggcgacgtcgcacatcaaggtggagcccgcggccggcggcgggagcgtggtgaaggtcgagtcgacttacaagctgctgccgggcgtggaagtg

SEQ ID NO: 78806 - DNA, 415 bp, Zea mays
aggtgctcgtcgccgtctccgagcacgtgaaccgcctcgtcgccgcgcggctccagttcgacgtcatgggcgtggagacggtcctcgtcgcgcgcaccgacgccgtcgccgccacgctcatccagaccaacgtcgacgcgcgcgacgaccagttcatagtcggcgccaccaacccgggcctcaggggccagagcctcgcgggcgtgctctcgggcggcatgtcggcgggcatgagcggaagggagctccaggccatctaggacgagtggctggccgcggtgcagctcaagaccttctccgagtgcgtcatggacgccatcgcgggcctcggcatctcggcccaggagaagcatcgcaggctccaggagtgggaccgcgccacgggcggctacgacaggtgcggtgtcaacgacca

SEQ ID NO: 78807 - DNA, 442 bp, Zea mays
  unsure (1)..(442): unsure at all n locations
ctacgattttgctgctctccgaccccgagctccgaaggccgcagcatcaggcgaggcccccctcgcgtgtgaccgagatggcgctgccgaatcaggggaccgttgattaccccagcttcaagctcgtcatcgtcggcgatggtggaactggtaaaactacatttgtgaataggcatctcactggagagtttgagaagaaatatgaaccaaccattggtgtggaagttcatccgttggatttcaccactaactgtggtaagatcaggttctactgctgggataccgcagggcaagagaagtttggtggcctcatggatggatactatatccatgggcagtgtgcgatgatcatgtttgatgtaacctcaaggcttacttacaagaatgttcctacgtggcataaggatctgtgcanggtctgtgaaaacatcaccattgtcct

SEQ ID NO: 78808 - DNA, 406 bp, Zea mays
cgtcatctccaagtgcgtgcgccggccgccccctatcacgccggccctgtgtgtgttccccgctaccagccatggcgtcgccgttctccgtgccttcgctgatcatggaggaggaagggcggttcgaggcggaggtggcggatgtggagtcgtggtggggcacggagcggttccggctcaccaagcgcccctacaccgcccgcgacgtggtcctcctccggggcacgctccggcagagctacgcgtcgggggatatggccaagaagctgtggcgcacgctcaaggcgcaccaggccggcggcaccgcctcccgcaccttcggcgcgctcgaccccgtccaggtcaccatgatggccaagcacctggacaccatctacgtctccgggtggcagtgctcgtccacgca

SEQ ID NO: 78809 - DNA, 413 bp, Zea mays
aagacaatcacccttgaggtggagtcctcggacaccattgacaacgtcaaggccaagatccaggacaaggagggcatcccaccggaccaacagcgcctgatcttcgccggcaagcagctggaggatggtcgcactcttgcggattacaacatccagaaggagagcaccctccacctggtgctccgcctcaggggtggcatgcagatctttgtgaagacattgactggcaagaccatcaccttggaggtggagtcgtctgacacaatcgataatgtcaaagccaagatccaggacaaggagggcattccaccggaccagcagcgcctgatctttgctggcaagcagctggaggatggccgtaccctcgccgactacaacatccagaaggagaagcacctccacctggtgctccg

SEQ ID NO: 78810 - DNA, 358 bp, Zea mays
agcagctcaaaaacccaacacacctcaacaagcagagcaaagacccgggattcgccggcgcggtagcgagagcgagagatggacgggaggatgttcggtctcgagacccccctgatggtggcgctgcagcaccttctggacgtgcccgacggcgacgccggcgcgggcggcgacaaggcgagtggtgccgcggcgggcggcgggcccacgcgcacctacgtccgcgacgcgcgcgccatggcggccaacccggccgacgtcaaagagctcccgggcgtgtacgcgttcgtggtggacatgccggggctgggcacgggcgacatcaaggtgcaaggtgaggacgagcgggtgctggtga

SEQ ID NO: 78811 - DNA, 407 bp, Zea mays
acttccaactaagaaaatcaaggacccagaggctaagaagcctgaggactgggatgacaaggagtacattcctgaccctgaggacaagaagccagagggctatgatgatattcccaaggaaattcctgaccctgatgctaagaagcctgaggactgggacgatgaggaagatggtgaatggactgcccctaccattcccaacccagaatacaagggaccatggaaacaaaagaaaatcaagaacccgaactaccagggtaaatggaaggcacctatgattgacaacccagattttaaggatgatccatacatttacgccttcgacagcttgaagtacattggcattgagctgtggcaggttaaatcgggcactctgtttgacaacatcatcatcactgatgaccctg

SEQ ID NO: 78812 - DNA, 390 bp, Zea mays
gcgtccaactgtacccggctccccgccgccgcacaaagacgagaggaagaggttcccggcggcgccacgactatgtcgtcgatgatgaacgcgctggcgaactggctggcgaacccgcgccgcaacccgctggcgcgcctccacatgcacgccgtctcctcgcgcctcaggaaatacggactgaggtacgacgacctctacgacccctacttcgatctggacatcaaggaggcgctcggtaggctgcctagggaggtggtcgacgcccgcatccagcgcctcaagcgtgccatggacctctccatgaagcaccagtacctcccggaggacctccaggcacagcaggttccattcagaggatatttgagtgacatgttggcgttggtgaaa

SEQ ID NO: 78813 - DNA, 425 bp, Zea mays
aagggtgtgcatggccacttcaccaagcgccccgaggagattggagctggtgaccagggacacatgttcgggtatgcgaccgatgagacccctgagttgatgcccctcagccatgtccttgccaccaagctaggtgctcgtctcaccgaggtccgcaagaacggaacctgcccctggctcaggcctgatgggaagacccaggtgacagtcgagtaccgcaatgagggtggtgccatggtccccatccgtgtccacaccgtcctcatctccacccagcacgacgagacagtgaccaatgatgagatcgctgctgacctgaaggagcatgtcatcaagcctgtcatccctgagcagtaccttgacgagaagaccatcttccaccttaacccatctggccgctttgtcattggtggacctcacggcga

SEQ ID NO: 78814 - DNA, 268 bp, Zea mays
cgttcaggctgatgcttcgcaggaacgagccgctctaccttgttcctagggccgtctagctagctagttactgtgccgccgccgcctcctatccaagaatgcatgagtcttagacgtgtggcagtaataattgcgtggggtgtagtaaaataataagcacgtttgttgagttgtaatggattcacattatgtgcattcgagacaggtccaaggaattgtatctctaaagtgaaaatttcctttttcaccaaagatgtagtggataaaa

SEQ ID NO: 78815 - DNA, 389 bp, Zea mays
gtgatgatgtggacttaatgatcattgctagaggaacaccgggattctctggtgcagaccttgctaacttggtaaatgttgctgctcttaaggctgccatggatggtgcaaaagctgtcacaatggatgatcttgagtatgcacaggaccgaatcatgatgggtagtgagcggaagtcggcagttatctctgacgaatgcaggaagctgacagcataccatgagggagggcatgcccttgttgcaatccacacataaggagctcaccctgtccacaaggctaccatcttacctagggggatggccctacgaatggtggcccaactccccgacaaagaccagacaagtgtgtcaaggaaacagatgctagcataactggatgtctgcatg

SEQ ID NO: 78816 - DNA, 455 bp, Zea mays
ggtcgacgcccgcgtccggcgaaaagagaaaccaacacaacaagcaaagcagcgatccgacatccgagagatggacgcggtgatgttcgggctggagactcccctgatggccgcgctgcagcacctgctggacgtgcccgacggcgacgccggcgcgggcggcgacaacaagacgggcagcggcggcagcgccacgcgcacctacgtccgcgacgcgcgcgccatggcggccaccccggccgacgtgaaggagctgcccggcgcgtacgcgttcgtggtggacatgccggggctgggcacgggcgacatccgggtgcaggtggaggacgagcgggtgctggtggtcagcggcgagcggcgccgggaggagcgcgaggacgacgccaagtacctgcgcatggagcggcggatgggcaagttcatgcgcaagttcgtgctgccggacaacgccgacg

SEQ ID NO: 78817 - DNA, 296 bp, Zea mays
  unsure (1)..(296): unsure at all n locations
cgctcaatgacagagtagattattacatcttgatcaggtcgtcggggagtacctgctcggtgaagttccatcttccgtagactggcgcgggaagaaggtcctctctaaaaagccgccggcgttgacgagcagctggcgcgcgctggagtattgacatcagttcgaggtcctgtatgaatgcactactcgtacgatatatcttgggcgagtgcttgctgaaataatcggacatggncggtggggctctctancgcgacctggtacaagagcgactctcctctgtgtacgtccggacg

SEQ ID NO: 78818 - DNA, 441 bp, Zea mays
gaataatattagaaatgcaacggaactgctgtatgatatggtgaatgctttgaaccctgctgaccgcatgacagttaaagatgaaattattgcagatcttgtaaatcaatgtcgttcaaatcaacaaaagctcatgcagtttgtcagttccacaggggatgaagacctgctaaagcaaggactagaattaaatgatcgcttacagagtgtcctcacaagacatgatgctattgcttctggttctccattaccagttgagacaccgattagagaaccacagagagaggatccaaatcctgagccatctacaccaattacacatgataataaggctcaagttgaagaggatgaagatgatgagtttgctcaaatagcacgaagaaaaaacaaatctgtgatatgcggtgatgaggcatcatcgagtgctggtgatcaagccct

SEQ ID NO: 78819 - DNA, 428 bp, Zea mays
  unsure (1)..(428): unsure at all n locations
acttcgtctgcggctgccgcgacctcggcgaggcgctccgcanggtgcgcganggcgccgccatgatccgcaccaagggggaagccggcacgggcaacgtcgtcgaggccgtgcgccacgtgcgctccgtcatgggcgacgtccgcgcgctccgcagcatggacgacgacgaggtcctcgcctacgccaagcgcatcggcgcgccctacgacctcgtcatgcagaccaagcagctgggccgcctcccgtcgtgcagttcgccgcggggggtgtcgccacgcccgccgacgccgcgctcatgatgcagctcggatgcgacggcgtcctcgtcggctcgggcattctcaannancngcgaccccgcgcgccgcgcccgcgccatcgtccaagcagtcacccactacagcgacccccacatcctggccgac

SEQ ID NO: 78820 - DNA, 347 bp, Zea mays
acctcctcttcctcctcctagcacagctagcgcctgctccccttcgtctgtgatcatgtcttgcagcagcggcaagtgcaactgcggctccagctgctcctgcggcagctcatgcaactgcatgtcccctgacgtggagaccgccgccgccagcagcatcaagaccatggtcctcgctgcgccgaccaccaaggccagcgccggcggcttcgacgcggccaccgagggcagcggctgcgactgcaacacctgcaactgcggcaccagctgcggctgctcctgctgcagctgcaactgagccggtccgcccggaccggcgatggcgcacgagagtcgagaggacgatt

SEQ ID NO: 78821 - DNA, 409 bp, Zea mays
gacccaagcgtccactctgtcgcttgcaagttcaatctcacctccaaccatgggtaaagagaagtcccacatcaacattgtggttattggccatgtcgactctggcaattcgaccaccacaggacaccttatctacaagcttggaggcattgacaagcgtgtgatcgagaggtttgagaacgaggctgctgaaatgaataagcggtccttcaagtacgcgtgggtgctcgacaagctcaaggctgagcgtgagagaggtatcaccattgatattgctctgtggaagtttgagaccaccaagtactactgcacggtcattgatgcccctggacaccgtgacttcatcaagaacatgatcactggtacctcccaagctgactgtgctgtccttatcattgactccaccact

SEQ ID NO: 78822 - DNA, 417 bp, Zea mays
gcaaacctctagactgagtcgtactagttcaatctcacctccaaccatgggtaaagagaagtcccacatcaacattgtggttattggccatgtcgactctggcaattcgaccaccacaggacaccttatctacaagcttggaggcattgacaagcgtgtgatcgagaggtttgagaaggaagctgctgaaatgaataaccggtccttcaagtacgcgtgggtgctcgacaagctcaaggctgatcgtgacagaggtatcaccattgatattgctctgtggaagtttgagaccaccatgtactactgcacggtcattgatgcccctggacaccgtgacttcatcaagaacatgatcactggtacctcacatgctgactgtgctgtccttatcattaactctcacactggtggttttga

SEQ ID NO: 78823 - DNA, 378 bp, Zea mays
gatcctcatccctgcatgggacaacgcggtgcagacggaccatgccgcgcatatggtgtacctccacgccggcgacaaccccttcgacaccgtcaccgccgccgtcaaggccgtggacaagcaactgcagacgttccaccaccgcgacaagaacaatctgccgtcgttcctcgactggttcggctggtgcacctgggacgccttctacaccgacgtcaccgccgacggcgtcaaacacggccttcagagcctgtccaagggcggcgcgccgccgcggttcctcatcatcgacgacggctggcagcagatcgcctccgagaacaagcccgaccccaacgtcgccgtccaggagggcgcgcaattcgccagccggctgac

SEQ ID NO: 78824 - DNA, 409 bp, Zea mays
ccacaacagcgaaggagaaagcagaccaacctagccacccagggagaaacgccaaaagggaagggagagtgtcgtcatggcttccattgtcgcttccaggagggccgttcctctagttcgcgctctggagaagctcatcgcagcgtcctccgcgcccgggactggctccgccctcaggccggtggcagtcgccggcggcctccgtggctacaacaccggcgctccgctccgacgctacgacggggccgagtcggaagacgatagcgtccgcgagtacgatgggcggcacggcggccgggactacgccgtgcccagcctgttctcagatattttccgtgatccgcttagtgcgccgcacagcattggccgcctgctgaacctgatggacgacttggcggtggcggcgcca

SEQ ID NO: 78825 - DNA, 409 bp, Zea mays
ccacaacagcgatggagaaagcagaccagcctagccacccagggagaaaggccaaaagggaggggagagtgtcgtcatggcttccattgtcgcttccaggagggccgttcctctagttcgcgctctggagaagctcatcgcagcgtcctccgcgcccgggactggctccgccctcaggccggtggcagtcgccggcggcctccgtggctacaacaccggcgctccgctccgacgctacgagggggccgagtcggaagacgatagcgtccgcgagtacgatgggcggcacggcggccgggactacgccgtgcccagcctgttctcagatattttccgtgatccgcttagtgcgccgcacagcattggccgcctgctgaacctgatggacgacttggcggtggcggcgcca

SEQ ID NO: 78826 - DNA, 374 bp, Zea mays
cttcttctcttctctgaattccagtccaagggccggaataccgtcagagcagagggagtgggaggaagaaaaaaaaaagatggtgaagctcgcatttggaagctttcgcgactctttgagcgccgcgtcgctcaaggcctatgtggccgagttcatcgccacgctgctcttcgtgttcgccggcgtcgggtccgccattgcctactcgcaattgacgaagggcggagctctggaccccgccggcctggtggacatcgccatcgcccatgcgttcgcgctcttcgtcggcgtctcaatagccgctaacatctccggcggacacctgaaccccgcgtcaccttcggcctccccgtcggcggccacatcaccatcct

SEQ ID NO: 78827 - DNA, 410 bp, Zea mays
ctcatctgaagcgcgcgagagacagacgcgtatacccaggcggcggttgaggaggaggagaagaagaagaagaagatggcttcctccgcgtacgcctcatggtccaagcggtggatccgtcccgaggtgtacccgctgttcgtgccgatggccgtggccctgggtatctgctcgtaccagcttgtgcgcaacatcacgggcaaccccgaggtgcgggtgaccaaggagaagagggcggccggcgtcctggacaaccacgacgagggcgagaggtacgccatgcacggcctcaggaagttcgtccgcgggaagaagcccgagatcatggcttccatcaactccttcttcgccgaccctcccaaggacgattaagctagattccgtcatggatggatgagtatgttttacaa

SEQ ID NO: 78828 - DNA, 380 bp, Zea mays
tccatatcggccagcggacacacatactctgtatatccattacggtgggtgatcgatgaggagaatgttatcataacatcgcttcctccgcgtacgccgcatggtccacgcggtggatccctcgcgaagtgtatccgctgttcgtgcgcatggccgtgggcctgggtatccgcgcgtatcagcttgtgcgcaacatcacggggaaacccgatgtgcgggtgaccaaggagaatagagcgggccgcgtcctggacaaacaagatcagcgaataggtacccatgcacgcggtcaggacaattctctgcggaaacagtcccgagatcattgccttgatcaactcattcttcgccgaatcactcaacgactattaagctagatt

SEQ ID NO: 78829 - DNA, 399 bp, Zea mays
cgtccaagcagcagatcatcagcgacgagctcatgctggacggcaacccgcgcctgaacctggcgtccttcgtcaccacgtggatggagcccgagtgcgacaagctcatcatggactccatcaacaagaactacgtcgacatggacgagtaccccgtcaccactgagctccagaaccgctgcgtaaacatgatagctcacctgttcaacgcgccgatcaaggaggacgagaccgctataggggtcggaacagtgggatcctcggaagcgatcatgcttgcaggtctagcgttcaagaggaaatggcagaacaagaggaacgagcaggggaaaccgtgtgacagacccaacatcgtcaccggtgccaacgttcaggtctgctgggaaaatttggcagggt

SEQ ID NO: 78830 - DNA, 413 bp, Zea mays
aacaatccgaaaaccatctgcttcagccttcagctagccccaagtttagtcggccgatcgatcactgaagtagtaatggcctccgccaacagctggaccctcgagatcgcgtcgccggtggccccgcagcgcctgttccgcgccgccgtgatggactggcacaccctggcgcccaaggtcgcctcccacgtcgtcgccagcgcgcagcccgtggagggcgacggcggcgttggcagcgtcaggcagttcaacttcacctcagtcatgccgttcagcttcatgaaggagcgtctcgagttcctcgacgcggacaagtgcgaatgcaagaacacgctcatcgatggaggcggcatccgcctcgccatcgagacggcgacgtcgcacatcaacgtggagctcgcggccggcggcgg

SEQ ID NO: 78831 - DNA, 315 bp, Zea mays
atcagctaattcatacgcatgcatgtccacaatctcatggccccatggtcatatcatccgttggttcagtagtcaggctggatcttccagagctggttgtcgccctcgcatgacttctacagcacgacgttggtgccgtcacggatgccgccgtgccagttgtcgccgtggagggcatcgaagttgaggtagatgtcgttgaccacgcggacgcagcggatgccgttgccgacttcacggatctccgtctacagcatcgactcgtcaagaaagtccggcttgtatggcacgaggcggaccaggtggatacgcccc

SEQ ID NO: 78832 - DNA, 410 bp, Zea mays
  unsure (1)..(410): unsure at all n locations
aggaatagctgaaatggctgggatgagccataggattcgtgagagaactgatgctctagaatctgcaggaaattacaaggctgcaattgggaanggttttggcattggctctgcaaccttggtttcccttgcactaatttgtgcgtttgttagccgggctgctatctccactgttgatgttctgactcctaaagtattcatcgggcttattgtcggtgctatgctcncgtactggttctcggcaatgaccatgaagagtgtgggcagtgctgcgctcaagatggtggaggaagttcgtcggcagttcaacaacatccctgggctcatggaaggcaccacaaagcctgactacgcaacttgtgtcaagatctcaacggatgcatccattcaagagatgatccccccaggtg

SEQ ID NO: 78833 - DNA, 404 bp, Zea mays
  unsure (1)..(404): unsure at all n locations
ctctcggtctcggactacggttgagcgaactcgtcactgtaatctactgatctgcacatggcagaggcggaggctacggtggggcgactgatgctgtactcgtactggcgcatctcgtgctcccaccgtgcctgcatcgctctcaatctcaaatgtgtggattacgagtacaatgctgtgaaccttctcaatggcgagcactctgatccacaattcgtcaagcttaatcctatgaagttcgtccctgcgttagttgatggcatttctgtaatatgtgactcttagacgataacactgtatttggaggacacgtagtcataacctcctcttctacctcaagaccttcaatagaatgctttgaattaccagattgcaagcattgtagcttctggtantcaacctct

SEQ ID NO: 78834 - DNA, 101 bp, Zea mays
aactgagtctggacatgttttgcacttttgtttcccttcctgctaccatctgtgacagatccgctcgctaatatgggacctgagattagctttttgctgct

SEQ ID NO: 78835 - DNA, 414 bp, Zea mays
accgatccccaattcctccttcggatctcgcattcagcgcagcgcaggtgtgaaggaagggggacgcggaggaagatggggctcgcgttcgggaagctcttcagccggctcttcgccaagaaggagatgcggatcctcatggtcggcctcgacgccgccggtaaaaccaccatcctctacaagctcaagctcggcgagatcgtcaccaccatccccaccatcggtttcaatgttgaaactgttgagtacaagaacattagcttcactgtctgggatgtcgggggtcaggacaagatcagacctctttggaggcattacttccagaacacccagggtcttatttttgttgtggacagcaatgaccgtgaccgtgttgttgaagccagagatgagctccacaggatgctgaacgag

SEQ ID NO: 78836 - DNA, 402 bp, Zea mays
agtcccgcctcggcactcgacggccgccggcacacaccgcgcagtctcgagacaggaaccggaggaacgaggatggaggatgactcgccgctgacgaagacgatgaagggtgcggtgacaggactcgccgcggggaccatctggggcaccgtcgtcgccacctggtacgacgtgccccgtgtggagcgccacgtcgcgctccctggccttatccggacgctcaagatgtgcggcacctacggggccaccttcgccaccatcgggggcctctacatcggcgtcgagcagctcgtgcagagccagcgcaagaagcgcgacttcgtcaacggggccgtcggcacgttcgttgccagagcctctgtctgcggctacagaggaaagagtattcagtcagccttcatc

SEQ ID NO: 78837 - DNA, 413 bp, Zea mays
aataccacgaccgcaagcagcgggaggcgcgcatgtcgctgccccgcgccgagcgcgcgcgggcgccgtacgtcgacttcctcaagcccatcatcgccgacggcgacacgggcttcggcggcgccacggccaccgtcaagctctgcaagctcttcgtggagcgcggggcggccggggtccacctcgaggaccagtcctccgtcaccaagaagtgcggccacatggcgggcaaggtgctcgtcgccgtctccgagcacgtgaaccgcctcgtcgccgcgcggctccagttcgacgtcatgggcgtcgagaccgtcctcgtcgcgcgcaccgacgccgtcgccgccacgctcatccagaccaacgtcgacgcgcgcgagcacgagttcatagtcggcgccaccaacccgggcctc

SEQ ID NO: 78838 - DNA, 398 bp, Zea mays
aagcaagatggtccttgatgactggaagaggctatactcaaacacaaagaccaacttccgggaggttgccatcaaaggtttctgggacatgtatgacccagagggctactctctgtggttctgtgactacaagtacaatgacgagaacaccgtctcctttgtgaccctgaacaaggttggtggattcctgcagcggatggacctgtgccgcaagtacgcctttggcaagatgctcgtggtaggttctgagccacccttcaagctgaacggcctttggctcttccgtggccaggaggttcccaagtttgtaatggatgaggtctatgacatggagctctacgagtggaccaaggtcgacatctctgatgaggcccagaaggagcgtgtcaatgccatga

SEQ ID NO: 78839 - DNA, 404 bp, Zea mays
cgaacatcacccccgatctgatcgaatcgaaggctgcggcggcgatgggcggtgaccatggcggtgggcacgccggcggcgacttccgccagaaggtatggagcatgacgggcggcccgtactgccgccccgtccactggcgccgtaacaccgccatcgccatgttcggcgtcttcctcatctgcatccccatcgctatgaagtccgcagagctcgagcaacgcccgcatcacccagtccggccaatcccatctcaactgtggtgcaaaaactttggtaagaaggaatactgaaggaccctccaactagcatgaagtgcgggcaccttgcttttgccttctttttgtggaaacctgtgcctagccataatgctgggttaagtgttaggagcatctctggaatgc

SEQ ID NO: 78840 - DNA, 428 bp, Zea mays
  unsure (1)..(428): unsure at all n locations
ggtcgagcacgcgtccgagggcattggattgttgggccagggataccaccccaaggaaggccaacatttctccccggccgccgccggtaaacctaatcggctcctccggaaccccttaccctttccccccggaggcggccctttccctaaaaggcttgccttacaacctgatcctgaaggacctgttcggaaccaaaaccaagctcctgctcaacaacaaccccgtgcacaagaaggtgcccgtgctcctccacggcgacngcanggccatctccgagtccctcgtcatcgccgagtacgtcgacgaagccttcgacgggccgccgctgctccccgccgacccctacgcgcgcgccgccgcccgcttctgggccgacttcatcgagaacaggctcaccaagcccttcttcatggcgatctgggtggag

SEQ ID NO: 78841 - DNA, 413 bp, Zea mays
aggaaactcgcacgcacgcactctcttccccccctcctgcccactctccaacgcagcacaagcatctagcaaagctgcgcagcgcagccagcaagcaagcttggtccggagagacaacagatataagccagccagagagcagcagacggaggcatggcgacgtccgtggcctgcgccttcttcttcgacgcggagccgctgggcgagcccgggcggcacgcgctggacgcctgcgcgctctgcgccaagccgctcagccgcaacagcgacatcttcatgtacaagggcgacaccccgttctgcagcgaggactgccgctatgagcagatgcaccacgacgcggcgtacgcaaggcaggcggccagcagccggcggaagcagcagcagtcgcagcggagcagaggggcctcgtc

SEQ ID NO: 78842 - DNA, 414 bp, Zea mays
  unsure (1)..(414): unsure at all n locations
gtcgacgcggggggccaggcgttccagttctactcggagggcgtgttcacgggcgactgcggtacggacctggaccacggcgtggcggcggtcggctacggcgtcggcgacgacggcacgccctactggatcgtcaagaactcctggggcacctcctggggcgagggtggctacatccggatgcagcgcggcgccggcaacggcggcctctgcggcatcgccatggaggcgtccttccccatcaagacctcgcccaaccctgcagacccgccgcgcaagccccgccgcgcgctcatcgccagggacacctcttcttcccagtgacacacacgaccacaactggcacgtaagtacacgttgccaggaatgacatgctatgctactagtgtntgcttgaactattatcgattgggt

SEQ ID NO: 78843 - DNA, 433 bp, Zea mays
cgggtcgagcacgcgtccgattaaattctcgttgacaagaagactagaaccgaacctgaccatgtcgctgatccgccgcagcaacgtgttcgatcccttctccctcgacctctgggacccctttgagggcttccccttcggctccggcagcagcagcagtctcttcccctcgttcccgcggaccagctcggagaccgcggccttcgctggcgcgcggatcgactggaaggagactccagaggcgcacgtgttcaaggcagacgtaccggggctgaagaaggaggaggtcaaggtggaggtcgaggacggcaacgtccttcagatcagcggcgagcgcaacaaggagcaggaggagaagacggacacctggcaccgcgtggagcggagcagcgggagattcctgcgcaggttccgactgcccgagaacgccaag

SEQ ID NO: 78844 - DNA, 408 bp, Zea mays
  unsure (1)..(408): unsure at all n locations
actaaaatcagccctcctctagtcctctttcatcgtgatgttgaccctccttcatcgtcagcttacaagtaacaaactgaccataaaaatgcaaggacagctgataactgccaagaaagaaaggggtcgaatttctcacccctttacggccaatgtactcggccatctgcccgctggcgatcgccccgaccatgccgccgacgttggacagcgatccgaacgccgagaactgcagagcgcgcgcggtgagtattcacgctcaagcacggttcttcaacanagaaaaaaaaaaagaatctaagagaggacggcctattggttacttcgttacctcggagatagagaggttgaggtcncgaaccatggcgtcctgngtcggggaggagaagccgctggtgaagccgaact

SEQ ID NO: 78845 - DNA, 414 bp, Zea mays
ctcattattattctcactggtcgatctgctaacacaaacagcagcagctcctcctcactagctagccttctctatttttgctactgcaagtgtccaagtctgcgacgacgtccgagatgtcgacggtgagccgtgcatcccttgaccagaagcttgccctcgccaagcgctgctcccgagaggcgactcttgccggagctaaggcggcagcagtggcgactatcgcctccgcgattcccaccctcgcgagcgtgcggatgctgccgtgggccaaggccaacatcaaccccaccggccaggcgctcatcgtctccacggtggccgggatggcctacttcatcgccgccgacaagaagatcctgtcgctggcgaggcgccactcgttcgaggaagctccggagcacctcaagaaca

SEQ ID NO: 78846 - DNA, 402 bp, Zea mays
aagctcgagccctcgcccgctcagtcacaaagcctcagatctcagtcgcctgcgccgccgcttcgttcgtgtggaggggagaagacaggaaatggcggcgactgagggcgtgctcttggggatgggcaaccccctcctcgacatctccgccgtcgtcgatgacgccttcctgacaaagtatgacatcaagctgaacaatgctattctcgctgaggagaagcacttgcctatgtatgacgagttggctagcaagagcaatgttgaatatattgccggaggagccacccagaactctatcagggttgcccaatggatgcttcaaactcctggtgcaacaagttacatgggatgcattggaaaggacaagtttggtgaggaaatgaagaaaaacgctcaagctgc

SEQ ID NO: 78847 - DNA, 413 bp, Zea mays
atatcatcattatctttcaggtatctacattattaaccttggaaagacctgggacaagcttcagttggccgccagggtcatcgttgccattgagaatccgcaggacattatcgtgcagtctgctaggccctatggccagagggctgtcctcaagtttgcgcagtacactggtgcccatgccattgctggcaggcacactcctggtacattcaccaaccagttgcaaacctccttcagtgagccacgccttcttatcctgactgacccgaggactgatcatcatgtaaaacttatatctgttgaaagaaaaactagagcgtgcaactcggtttgctgattcagaggactttaaaatcttctttatccaaactttgtacagcccattaaggagtctgcgcttggaaacattccca

SEQ ID NO: 78848 - DNA, 414 bp, Zea mays
  unsure (1)..(414): unsure at all n locations
acttgatcaaggtcactgtggctcttgttgggcttttggtgctgtggagtgcctccaggaccgtttttgcattcacctcaacatgagcattttactttcagtcaatgacctactggcatgctgcggttttatgtgcggcgatgggtgtgatggaggctatcctatagaggcatggcgctactttgttcaaaatggtgttgttacggatgagtgtgatccatacttcgacccggtcggttgcaagcatcctggatgcgaacctgcttatcctacaccaaagtgtgaaaagaaatgcaaggagcagaaccaagtttggcatgaaaagaagcatttcagcattgatgcgtacagaataaattcagatccacatgacataatggcagaggtctacanaaatggtcctgtagaagttgc

SEQ ID NO: 78849 - DNA, 415 bp, Zea mays
  unsure (1)..(415): unsure at all n locations
accgcttcagttggcagttgcgacttgcgagtggctccaacaaggcaacacaatccaccggcaccaacccagcgcggcgccaccggcgacccgtacccccttccccggagagcgatggcgacggagctgacggcggcgcagctgcgcgcgtacgacggcaccgacccgtccaagcccatctacgtctccgtccggggcaaggtctacgacgtcacctccggccgcggcttctacggccccggcggcgcctacgccgtcttcgcgggccgcgaggccagccgcgccctcggcaagatgtccaaagacgaggccgacgtctccggggacctctccgggctcaccgacaatgagctcggcgtcctcgccgactgggagaacaggttccaggccaagtaccccgtcgtcgcncgactcg

SEQ ID NO: 78850 - DNA, 404 bp, Zea mays
agcagaccaacctagccacccagggagaaaggccaaaagggaggggagagtgtcgtcatggcttccattgtcgcttccaggagggccgttcctctagttcgcgctctggagaagctcatcgcagcgtcctccgcgcccgggactggctccgccctcaggccggtggcagtcgccggcggcctccgtggctacaacaccggcgctccgctccgacgctacgaaggggccgagtcggaagacgatagcgtccgcgagtacgatgggcggcacggcggccgggactacgccgtgcccagcctgttctcagatattttccgtgatccgcttagtgcgccgcacagcattggccgcctgctgaacctgatggacgacttggcggtggcggcgccaagtcgtgcggtgcg

SEQ ID NO: 78851 - DNA, 392 bp, Zea mays
gacccaagcgtcaaggacgatgtgactaagatgaaggagggccagaatgacatctactacatcactggcgagagcaagaaggccgtggagaactcccccttccttgagaagctgaagaagaagggctatgaagtcctgtacatggtggacgccatcgacgagtatgctattggccagctcaaggagttcgagggcaagaagctcgtctcggccaccaaggagggcctgaagctcgatgagagtgaggatgagaagaagcggaaggaggagcttaaggagaagttcgagggcctgtgcaaggtgatcaaggacgtgctgggcgacaaggtggagaatgttgtgggctctgaccgcgtggtggactcgccctgccgcctggtgacgggcgagta

SEQ ID NO: 78852 - DNA, 413 bp, Zea mays
cagacactctacatatatcctctgcgcgtgtatctcgtcgtacagagccgaaagctggagcttccaatggcgggagacaacgacctgaaggtgctcggcgtgtggacgagcccgttcgtgatccgggtccgcatcgtgctcaacctgaagggcctggcgtacgagtacgtggaggaggacctcagcaacaagagcgcgctcctcctggggtccaacccggtgcacaagagcgtgccggtgcttctccacgccgggcgcgccataaacgagtcccaggtcatcctgcagtacatcgacgaggtgtgggcggggacggggccggacgtgctgccggccgacccctacgagcgcgcggtggcgccgttctggggcgcgtacatcgacgacaaggtggagtcggcgtggctggggat

SEQ ID NO: 78853 - DNA, 410 bp, Zea mays
  unsure (1)..(410): unsure at all n locations
tctcctcacggcttcctcacacggcactccagccgctagccctcactcaaccagacaaccagtacaccaccgccaccaagcccgggccgaataactctgccgggcaaccgccgcccttcgccggcaaagaacgcccaccagatccaccccggcctgctatggagtccgcggtgaacccgaaggcgtacccgctggctgatgcgcagctgacgatgggtatcctcgatatcatccagcaggccgccaactacaagcagctcaagaagggagcgaacgaagcgacgaaaaccctgaatagggggatatcggagttcgttgtgatggcggcggacacggagcctctcgagatcnntgctcacctcnccttgttagccgaggataagaacgtcccatatgtatttgttccatcg

SEQ ID NO: 78854 - DNA, 406 bp, Zea mays
agctcacacagcaaatacccacagtccacactccacagcaagaaccgaagatgttcggaaacatcggaaagatcccgatcattggcgacctgacgggcagcaacaagaatgcgcacctcaagggcaacctggtgctcatgcgcaagaccgtgctcggcttcgacgtcaccagcatcgccggctccctcatggacggcctcggcgagttcctcggccgcggcgtcacctgccaactcgtcagctccaccgtcgtcgaccccaacaacgggaaccgcgggaaggtgggtcaggaggcgagcctggagcagtggctgctgcacccgccgccgctgctggccggcgaggaccagttccgcgtcaccttcgactgggaagtggagaagcacggcgtcccgggcgccatcat

SEQ ID NO: 78855 - DNA, 371 bp, Zea mays
taaaagaactaaggatcttgatactgttgctttgcttgatcatctaccatcattgcagcaactccttttccgtcttcttgcttgccagccacaaggagcgtcgtcttacaatgttataatccagcatgcactctcaatggttgctttagagagtattaagatctacactgcgattagtgatggaacaatcaatctagttgacaagttcttcgagatgcaaagaaatgatgctgttagggcacttgatgtatacaaaagagcaactaaccaggctgaacgactttcagagttttatgaagtgtgcaaaactatacacattgggcgtggtgagaaattcctgaaaatcgagcagcctccagcatcattcctga

SEQ ID NO: 78856 - DNA, 377 bp, Zea mays
ttactctcttacctttcagttcggatcagtatgggagtcgctttatacagcagtaactagaaactgcttctactgaacagaagaatatgatttttcctgagatccttccccatgcacgtacattgatgactgatgtttttggaaactatgttatacagaagttctttgaatacggaactgaaacgcaaacgaagcaactggcaaccctgcttaagggttttgtgttacagctgagtcgtcaaatgtatggctgccgggtgattcagaaggctttggaagttgttgaagtggaacaacatacacaaatggctttggagcttgatggatctatcatgagatgtgttcgtgattagaatggcaaacatgtcaaccaaaaa

SEQ ID NO: 78857 - DNA, 414 bp, Zea mays
  unsure (1)..(414): unsure at all n locations
gcaacaatgcagcagcacaagcaagaaccacacctcctcccttcgcctgtgatcatgtcgtcttgctgcggcggcaagtgcgggtgcggctccagctgctcctgcggcagcggatgcaacggctgcggtatgtaccctgacgtggagaccgccgccaccagcagcgtcaagaccacggtcctcgccgcgccgaccaccaaggccagcgccggcggcttcgaggcggccaccgagggcggcggctgcgactgcaacacctgcaagtgcggcaccagctgcggctgctcctgctgcagctgcaactgagctggcccggcccggcgatggcgcacgagagtcgagaggangangacgacgaccaagcgtataaatataatagcggcgtccagtaaataagatcctgtcaactgcacc

SEQ ID NO: 78858 - DNA, 414 bp, Zea mays
accaaatgaatgggaaggattactcgtcgaattctgttcatgtatttcacattggaaagctgagaataaaacttcgaaaaggatggtccacaaaagcaagagagtcgtattccactacgatgaagttatgcgggagccgtggtggtggtaatgctgcagctagggcagttttctggcaccctaggaaaggctcgtcctacactctagccttcgaaacagacagggacaggaatgctgcgattatgattgctcgcaagttcgcttcgaattgcaatatcgctctcgctggcccaggcgaccaaggcacctgatgaagtgatcacgctatgttttgacggcgacaacagtacataattaaggggttgaattggctgattgggtggcgtgcttgtcttagttttgtcgatttgtgct

SEQ ID NO: 78859 - DNA, 402 bp, Zea mays
agctgatgctgaccgacaagtcgcagctgcaggcgctggcgatgctgctgcggaacaacgaggagctcatgatgagccaggcgatcaagtcggagacggagcgcattgagtacctcaagacggtgagcgactgctacacgcggacgatgaagctcctcgacgattccatggcggccaggaccacgtacgagcgttcgggcggaatgaggagcctcgtcgcccgggacatggacgactacgtcgtctacggcctcaacgcgtgcttgcagaacgtccgcaactgctgcgtgcgcctggacgccatcgacaagctgcgggcgcactacgacgccctcgccgacgccgtcgccgaccccggccgcaaccgtccagggcctcgccgcggaggcgtccgagtacaag

SEQ ID NO: 78860 - DNA, 373 bp, Zea mays
ctcgcgggccgacacacgcctcaacaggagatcgtcccagatccgattagtggcgacggtgaggggaacgggcagggaaacgtcggcgcggcgacggaggcgaagcggaaggccaatggctgcaggctcgatgggctcgtcagcaagaagaggaactacgcgcagctccatctggagctagggcagcctgatttcgtcctccacacgtgctccgtgtgcggcatgatgtacgcccgagggaacgacgaagacgaaaaggttcacagggcgtaccacaagagctactccgagggagtccctttcaagggttggaaaaaagagacagtgatagcgaggtccgagggcggtgatcgggttgttcttgcaactgacg

SEQ ID NO: 78861 - DNA, 408 bp, Zea mays
agcccacgcgtccgcttggccttcgtccccgccttccgacttcctccaaaattccattccctttcccaagaaaccaagaacccaaccccccaacaagacgaactcctcctccccttccaaaaaggggctgaacaagattgcctggaatccggtggaaaaagaactccccgaatggcaacaaaacccccccggcgggttcaagcacaagggccccgataacctccaaaagggggtaaatgaagtgaccggaacgcgggggaccctttatacccgggagagcgtaaaattgcaagtggagatctctgagcactatcccatagaggcgcatcacgtgacatttctcacaccagagccaatgcatccacacatttacagcaacgggcacatctgcttagatattctgtatga

SEQ ID NO: 78862 - DNA, 385 bp, Zea mays
cgggtcgatccaagcctctaaacaggctcctattagagatgtgcaggaggcctgtgtacatgatggatatgttctacccaaattgtatgcaaaggttcatcactgtgtctcatgcgcaatccatgcgcacattgtccgggtccgctctcgtgagaacaggaggaaccgtgagcccccgcagcgcttcagacgccgggatgatggcccaaggcctggtcagggcccgccgcgcccaggcggtgcagctcctgcagctgcacctgctgctgctcctcgtacctaagttctggaattagtttcggggcttagttttgtgaaacattacctgttttgagaaaccattgttactgtatccccttgatgtcaaactttttagtacaatttg

SEQ ID NO: 78863 - DNA, 343 bp, Zea mays
agctgtctcacgtccacataccacaaccagctcactcaagtacatagaacccaacccatggcttctcccaagccgctcctcctgctcgccacctcgttcctgagctgcggcctcctgttggtcgccgactacgccccattgaccctgaccgtggtgaacaactgcccctacccggtgtggccgggcatccaggccaactccgggcacgacgtcctggagggcggcggcttcgtcttcgcgccgctctcgcataattccttctctgcgtcggcgcagccttggtccggccgcatctgggcgcgcatgggctgcgcgggcgccggcgctcagctccattgcgcca

SEQ ID NO: 78864 - DNA, 375 bp, Zea mays
acggacgcgtgggtccacattgtaccagacaaggcttcgaacacgctctccatcatcgacagcggcatcggcatgaccaagtccgaccttgtcaacaacctcggtaccatcgccaggtccgggaccaaggagttcatggaagcccttgctgctggcgctgatgtgtctatgattgggcagttcggtgtcggtttctactctgcctacctcgtcgccgagagggtcgtcgtgaccaccaagcataacgatgacgagcagtacgtgtgggaatcccaggcgggcgggtcgttcactgttactcgtgacacgtctggggagcagcttggcaggggtactaagattacacttttcctcaaggaagatcagttagaatac

SEQ ID NO: 78865 - DNA, 386 bp, Zea mays
gcgggtcgacccaagcctctagcatcaatcagtgaatccggcgggcattctctgctggtacaccaataatcgaggagcagctagcgtgcgagagacaacagagccagaggccgcccggccggccagtacagagaaccaagctagtgccaaaccgacagaacacgcctgtgatcggtaggtctacaccaccgacacttggccatgagcacggccacggacgccgtcccggtcgccgtggcgccggcgaagcgcccgcccatcaacaagtacgccttcgcctgcgccctgctcgcctccatgaactccgtcctcctcggctatgacatctcggtgatgagcggcgcgcagctgttcatgaaggaggacctcaagatcacggacacgca

SEQ ID NO: 78866 - DNA, 360 bp, Zea mays
acatgaaatgggagaaagagagagagaagagagagagaagagagagagagagagaggagtgggagacccgcgagaggctgccgtgtagggaccgtagactcagcgactgcgaaggagggataaggggatggccgggatcggaccgatcaggcaggactgggagccggtcgttgtgcggaagaaggcacccaccgccgccgccaagaaggatgagaaggccgtcaacgccgcgcgccgcgccggtgcggagatcgataccatgaagaagtacaacgctggtacgaacaatgcggcatccagcggtacatccctcaacaccaagcgcctcgacgacgacaccgaaaacctcgcccatgagcg

SEQ ID NO: 78867 - DNA, 402 bp, Zea mays
gctccgccggcggcctcgcgctctctcccccgccgctccttctctacgcttggcctgccaagatgaagctcgtcagattccttatgaagctaaacaatgagacggtcaccatcgagctcaagaacggaacgggtgtccacggcaccatcaccggtgttgacataagcatgaacactcatctgaagacagtgaagcttacactgaaagggaagaaccctgtaacgctcgaccacctcagcgtgcgaggaaacaacatccgctattacattcttcctgacagcttaaacttggagactttgttggtagaggaaacccctaaggtcaagcctaagaagccaactacaggaaagcctttggggcctgggcgccggccgtggtcgtggacgtggtcggggccggggg

SEQ ID NO: 78868 - DNA, 361 bp, Zea mays
aggcaaacagtgataacctcccaccaaatgtcatcaagcaattgggtaaagaactgaagaatcataatgaatcacctgcagaaggaattaatgtgactgtcaatgatgatgacttcactactatttttgctgatagtgaaggccctgctggaactccatatgacaatggagtgttcaggatgaagctattattgtctcatgatttccctcaatctcccgcaaaacgattcttcttgacagaaattttccatccaaacatagctactaatggtgagatatgtgtagacacactgaacaatgattgggatcctatccttgggttaagacatgttcttctggtagtgagatgccttctggtcga

SEQ ID NO: 78869 - DNA, 418 bp, Zea mays
cctcccaacagtgaatcgtattaacgcgtgggctctcacacactgcaacagccaagtgcaagtgatcgagctcccccctcctcatcagtcgctaggcacagcgcacttgcaggatggcgcaggtctctaagacgcttctccttgtggccctggtgttcgtgtcgtcggcggcggtggagctgtgccgcgcgatcgacttcgacgagcgggacctggcgtcggacgaggcgctgtgggacctgtacgagcggtggcagacgcaccaccgggtgcaccggcaccacggcgagaagggccggcggttcgggacgttcaaggagaacgtgcgcttcatccacgcgcacaacaagcgcggcgaccggcccttaacggctcggcctgaaccggtttcgcgacatggggcgggaggagttccggt

SEQ ID NO: 78870 - DNA, 364 bp, Zea mays
  unsure (1)..(364): unsure at all n locations
agcaggagacggacccagatccgattagtggcgacggtgaggggaacgggcagggaaacgtcggcgcggcgacggaggcgaagcggaaggccaatggctgcaggctcgatgggctcgtcagcaagaagaggaactacgcgcagctccatctggagctagggcagcctgatttcgtcctccacacgtgctccgtgtgcggcatgatgtacgcccgagggaacgacgaagacgaaaaggttcacanggcgtaccacaagagctactccgagggagtccctttcaagggttggaaaaaagagacagtgatagcgaggtccgagggcggtgatcgggttgttcttgcaactgacgagaactcctgtat

SEQ ID NO: 78871 - DNA, 408 bp, Zea mays
agtctggtcacagatctatctgacaaaatggtgaagatctgctgcatcggtgctggctatgtcggtggcccaaccatggccgtcattgccctcaagtgcccagacattgaggtcgtcgtcgttgacatctccaagccccgcattgaggcctggaacagtgacaccctgccaatctacgagcctggtctcgatgatgttgtgaagcagtgcaggggcaggaacctcttcttcagcactgatgttgagaagcacgtcgctgaggctgacattatctttgtctcggtgaacacccccaccaagacccgtgggcttggagctggcaaggctgccgacctcacctactgggagagcgctgcccgcaatgatgcggatgtctccaagtctgacaagattgttgttgagaagtcc

SEQ ID NO: 78872 - DNA, 370 bp, Zea mays
actagcgccggcgcctccacttcgttttcctcactctctcctccagctcagggtccggcggcgaagggaaggcaagatgtacaccgcgaggaagaagatccagaaggagaagggtcttgagccctccgagttcgaggactccgttgcccaggctttctttgatctggagaacgggaaccaggagctcaagagcgacctcaaggacctgtacatcaacaatgctatccagatggatgttaccgggagtaggaaggctgttgtcattcacgtcccataccgcctgcgcaaggccttcaggaagatccatgtcagactcgtcagggagctggagaagaaattcagcggcaaggatgtggtaattgttgctaca

SEQ ID NO: 78873 - DNA, 373 bp, Zea mays
aggcagtcggctgccgcagactggtagtagccggcgcgccgtcaccgtatcctcagatcagaggcgagcagaaaccacaccactctactgacgcccgacgagcagtgtaacattttccttcagccatgggtaaggagaagactcacatcaacattgtggtcattggccatgtcgactctggcaagtcgaccaccactggccacctgatctacaagcttggaggtattgacaagcgagtgattgagaggttcgagaaagaggctgccgagatgaacaagcggtcattcaagtatgcgtgggtgcttgacaagctcaaggctgagcgtgagagaggtattacaattgatattgccctgtggaagttcgagaccac

SEQ ID NO: 78874 - DNA, 366 bp, Zea mays
ctcgcgggccgacacacgcgtcaacccacacgtccgggcagcagcacaagcaagaaccacacctcctcccttcgcctgtgatcatgtcgtcttgctgcggcggcaagtgcgggtgcggctccagctgctcctgcggcagcggatgcaacggctgcggtatgtaccctgacgtggagaccgccgccaccagcagcgtcaagaccacggtcctcgccgcgccgaccaccaaggccagcgccggcggcttcgaggcggccaccgagggcggcggctgcgactgcaacacctgcaagtgcggcaccagctgcggctgctcctgctgcagctgcaactgagctggcccggcccggcgatggcgcacgagag

SEQ ID NO: 78875 - DNA, 371 bp, Zea mays
tacagtggatgataataattaatcagcaggctttggggccaaaagaaacggagaggagaaaagcgggggcggcaagcaaccacgggcggagctcggagcgtcctcctcctcccgtctataaattcccctccttttcttcctccatatataggggccatcagatccaagaagagggaagagcaccaaggaccttcggcgcccgttcaggatccacatcttcccgagcgagttcttggttgacctcttcctcttcggaccacctccaaggctcttggtgtagcttgccactctcaccaatcaagttttcatgtctgatctcgacattcagatcccaactgccttcgatcccttcgctgaagccaatgctgggg

SEQ ID NO: 78876 - DNA, 410 bp, Zea mays
gtattattgatcatcaagctcttccccgcctcgtgaatctgttgacgcagaaccacaagaaaagcattaagaaagaggcatgctggactatttcaaatattactgctggaaacaaagatcagatacaggctgtcataagtgccggtatcatcgctcctttgttgcaactgcttcaaacagcagagtttgatatcaagaaggaggctgcttgggccatctcaaatgctacctctggtggttctcatgagcaaatcaagtacttggtgtctgagggctgcatcaagccattgtgtgaccttcttgtctgccctgatccgagaattgtaacagtttgtctggagggtcttgagaatattcttaaagtaaggcagcatgacaggaccatgggtgcaacaggtgacactaacgtc

SEQ ID NO: 78877 - DNA, 404 bp, Zea mays
aaagctcttccccgcctcgtgaatctgttgacgcagaaccacaagaaaagcattaataaagaggcatgctggactatttcaaatattactgctggaaacaaagatcagatacaggctgtcataagtgccggtatcatcgctcctttgttgcaactgcttcaaacagcagagtttgatatcaagaaggaggctgcttgggccatctcaaatgctacctctggtggttctcatgagcaaatcaagtacttggtgtctgagggctgcatcaagccattgtgtgaccttcttgtctgccctgatccgagaattgtaacagtttgtctggaaggtcttgagaataatcctaaacgtaagggcagcattggcaagaacatggggtgcaacaggtgacactaacggtctta

SEQ ID NO: 78878 - DNA, 379 bp, Zea mays
ctcgcgggccgacccacgcctcaagcatcctccacatgtatgctgcgtctcagaggtggcatgcagatcttcgtgaagacacttactggcaagacgatcacccttgaggtggagtcctcagacaccattgacaacgtcaaggccaagatccaggacaaggagggcattccaccggaccagcagcggctgatcttcgccggcaagcagctggaggatggtcgcaccttggctgactacaacatccagaaggagagcaccctccacctggtgctccgcctcaggggtggtatgcagatttttgtgaagacattgactggcaagaccatcaccttggaggtggagtcgtctgacacaatcgataatgtcaaagccaagatcc

SEQ ID NO: 78879 - DNA, 411 bp, Zea mays
agccaagtgcgtgcgccggccgccccctatcccgccggccctgtgtgtgttccccgctaccagccatggcgtcgccgttctccgtgccttcgctgatcatggaggaggaagggcggttcgaggcggaggtggcggaggtggagtcgtggtggggcacggagcggttccggctcaccaagcgcccctacaccgcccgcgacgtggtcctcctccggggcacgctccggcagagctacgcgtcgggggagatggccaagaagctgtggcgcacgctcaaggcgcaccaggccggcggcaccgcctcccgcaccttcggcgcgctcgaccccgtccaggtcaccatgatggccaagcacctggacaccatctacgtctcccgggtggcagtgctcgttcacgcacacctccacc

SEQ ID NO: 78880 - DNA, 374 bp, Zea mays
  unsure (1)..(374): unsure at all n locations
aacgtatatgcccttgtcccggttcctttccccatccccaactccattatttgcttgatccttgagaagagagaggaagacgagagctagaagcgaaggagaaaagcagttcttcagctaggcaggagggcacaggaaggaggagatggcgtcaaagaggattcagaaggagctcaaggatctgcagaaggaccctcccacctcgtgcagtgcaggtcctgttggtgaagacatgttccactggcaggcaacaataatgggtccatctgatagcccatattctggtggagttttcctagttacaatccattttcctcctgattatcctttcanaccatcaaaggtggcatttcgcactaaggtgttccatccaa

SEQ ID NO: 78881 - DNA, 383 bp, Zea mays
acacgtaggtcgatacaacactctacagggagtcgctaataacagcaagcgaaaatctcccgatcccctctagtctccgcggcgaagatgtcggggcgcggcaagggcgggaagggcctgggcaagggcggagcgaagcgccaccggaaggtgctccgcgacaacatccaggggatcacgaagccggcgatccggcggctggcgcgcaggggcggcgtgaagcgcatctccgggctcatctacgaggagacccgcggcgtcctcaagatcttcctggagaacgtgatccgcgacgccgtcacctacaccgagcacgcgcgccgcaagaccgtcacagccatggacgtcgtctacgcactcaagcgccagggccgcaccctcta

SEQ ID NO: 78882 - DNA, 382 bp, Zea mays
acacgtaggtcgatacaacaccctacagtgacgtcgtactacgcgtccgcccacaccgggcacaccccccgagctcagcttagctccactccagctccaatcacagtcgtgaccagagcgcgagagctagctagagggccgtgaaaatgccgatcaataggatcgccctggggagccaccaggaggtgtaccacccgggcgccctcaaggcggcgttcgctgagttcatctccaccctcatcttcgtcttcgccggccagggctccggcatggccttcagcaagctgaccggcggcggcccgacgaccccggcgggcctgatcgcggcggcggtggcgcacgcgttcgcgctgttcgtggcggtgtcggtgggcgcgaacat

SEQ ID NO: 78883 - DNA, 371 bp, Zea mays
gcgggccgatacaagcctctagagatagtcatcttaatcacttcactcaaacctcatccccaaatcttcgactacattctcgttgacaagaagactataaccgaacctgaccatgtcgctgatccgccgcaacaacgtgttcgataccttctccctcgacctctgggaaccctttgagggcttcaccttcggctccggcaacaacagcagtctcgtcccctcgttcccgcagatgagctcggagaccgcggacttcgatggcgcgcggatcgactggaaagacactccagatgcgcacgtgttcaacgccgacgtagcggggctgaagaacgacgaagtcaacgtggatgtcgaggacggcaacgtccttc

SEQ ID NO: 78884 - DNA, 389 bp, Zea mays
gcgggtcgacacaagcctctaatctgagtcgcaataaattcactcaaacctcttccccaaatcttcgattagattctcgttgacaagaagactagaaccgaacctgaccatgtcgctgatccgccgcagcaacgtgttcgatcccttctccctcgacctctgggacccctttgagggcttccccttcggctccggcagcagcagcagtctcttcccctcgttcccgcggaccagctcggagaccgcggccttcgctggcgcgcggatcgactggaaggagactccagaggcgcacgtgttcaaggcagacgtaccggggctgaagaaggaggaggtcaaggtggaggtcgaggacggcaacgtccttcagatcagcggcgagcgcaaca

SEQ ID NO: 78885 - DNA, 408 bp, Zea mays
aggtccttcttcgtaagccttcaaaccgacgaatttgagcaactgcacccagagcgcgatccattgccggggaagaagcaacttgttgcgagcctcctctatggcgagctccgaccatggttccaccaccgcccccaaggacgtgccgggcagctacggcctgccgctggtgggcgccgtgcgcgaccgcctcgacttctactacttccaggggcaggacaagtacttcgagtcccgcgtggagcgctacggctccaccgtggtgcgcatgaacgtgccgccgggccccttcatggcgcgcgacccgcgggtggtggcggtcctggacgccaagagcttccccgtgctcttcgacatggacaaggtggagaagaaagacctgttcacgggcacctacatgccgtccac

SEQ ID NO: 78886 - DNA, 429 bp, Zea mays
ctcgtggtccgatacaaccctctataattagtcgtactaagcttagcaatccgtctctctatctacaggcgggggaattaatagatggagggcaaggaggaggacgttcgcctgggcgccaaccgctactcggagcgccagccaatcggcacggcggcgcagggcacggaggagaaggactacaaggagcctccgccggcgccgctgttcgaggcggaggagctgacgtcgtggtccttctaccgggccgggatcgccgagttcgtggccaccttcctgttcctgtacatcagcatcctgactgtgatgggcgtgagcaagtcgtccagcaagtgcgccaccgtgggcatccagggcatcgcgtggtccttcggccgcatgatatccgcgctggtgtactgcacggcgggcatctccggcggccacatc

SEQ ID NO: 78887 - DNA, 347 bp, Zea mays
atagcgcatcgaagcctggagcgacggccgggagctccctgcaggacgcgccgctaatcgaggaggtggtgcaaggaggaagcggaggccacgacggcgacggcgacggcgacggcggcgcgcaggcgcaggagcagcccccggccccggggacctgcgacctgtacaagggccgctgggtgtacgacgagtcccgcgcgccgctgtacaaggagtccgactgcagcttcctcacggagcaggtcacctgtatgcgcaacggccgacgcgacgacgactatcagaagtggcgctggcagcccgacggctgcgatctccccagatttgaagctaagttgcttctggag

SEQ ID NO: 78888 - DNA, 362 bp, Zea mays
aatcctaaaaccatctgcttcagctagccccaagtttagtcggccgatcattcactgaagtagtaatggcctccgtcaacagctggaccctcgagatcgcgtcgccggtggctccgcagcgcctgttccgcgccgccgtgatggactggcacaccctggcgcccaaggtcgcctcccacgtcgtcgccagcgcgcagcccgtggagggcgacggcggcgttggcagcgtcaggcagttcaacttcacctcagtcatgccgttcagcttcatgaaggagcgtctcgagttcctggacgcggacaagtgccagtgcaagaacacgctcatcgagggcggcgggatcggcgtcgccatcgaaacg

SEQ ID NO: 78889 - DNA, 426 bp, Zea mays
gaccgacgcgtccaccccatcaccccagaccacagcgcgacagtgagtacagcagcagcagctgagagcgtgagagcgtgcgaagcaggagggaggacaagaagaagccgatggcggttgtgagcggcagcggcgggaggctgaacccctgggcggagcccttcgtgccttccggggcgcggtaccgcggcctgcggaccgtggaggcgacgccggagcaggaggtggaggacttctcccccgagtggtggcgcctggtgtccgcctccccggccttccgcgaccgctggctgcgcgagtacggcgcgctcggcctactcgacgccgaggacgacctggacgacgacgtcgacagcttcctccccgaagacttcctcttcgcctcgggccccgcgctacgagagcgagcgggaggacgccgcgggc

SEQ ID NO: 78890 - DNA, 412 bp, Zea mays
aactcacactccgtgcaaccgagcgatcgagctccccggtcgctagcacagccggccactgcacacgacggtgctggtaggttgcaagcacttgcaggatggcgcaggtcgctaagacgcttctccttgtggccctggtggtcgtgtcggcggtggagctgtgccgcgccatcgagttcgacgagcgggacctggcatcggacgaggcgctgtgggacctgtacgagcggtggcagacgcaccaccgggtgcaccgacaccacggcgagaagggccgccggttcgggaccttcaaggagaacgcgcgcttcatccacgcgcacaacaagcgcggcgaccgaccctaccgcctccgcctgaaccgctttcgcgacatgggccgtgaggaattccgttccgggttcgccgactc

SEQ ID NO: 78891 - DNA, 344 bp, Zea mays
ctaaggcgggggcgccttctccggcaaggacccgaccaaggtggaccgcagcggggcctacgtcgcgaggcaggctgccaagagcatcgtcgccgccggcctcgcccgccgtgccatcgtccaggtctcctacgccatcggcgtgcccgagcccctgtcggtgttcgtggacacgtacggcaccggcgcgatccccgacaaggagatcctgaagatcgtgaaggagaacttcgacttcaggcccggcatgatcatcatcaacctcgacctcaagaaaggcggcaacgggcgctacctcaagacggcggcctacgggcactttgggagggacgaccccgacttca

SEQ ID NO: 78892 - DNA, 354 bp, Zea mays
aggacgcatgggtggaggtgcaggttttccttctggtctcaaatggtcctttatgcccaaggtttcagatggacgcccttcttatcttgtcgttaatgctgatgagagtgagcctggaacttgcaaagatagagaaatcatgcgccatgacccccacaagcttctggaaggatgccttattgctggagttggaatgagggcatcagctgcttacatctacattagaggtgaatacgtgaatgagcgtctcaaccttgagaaagctcggcaggaagcgtatgcagctggacttctgggtaagaatgcttgtggctctggttatgattttgatgtgcatattcattttggtgctgg

SEQ ID NO: 78893 - DNA, 356 bp, Zea mays
gcttcacgtccgctacataccggcgaggagacgaaaggagggagttttgagaagcataaatggctcctaaagccgctcctgtcaagaagggtgatgccaaggcccaggccttgaaggtggccaaggctgtgaagtctggggcaggcaagaagaagaccaagaagattcgcacatctgtaacatttcaccagcccaagaccctgaagaaggccagggacccgaagtacccaagaatcagcactactggaagaaacaagcttgatcagtaccaaatcctcaagtaccccctcaccacagaatctgcaatgaagaagattgaagataacaacactctggtctttattgttgacctcaag

SEQ ID NO: 78894 - DNA, 355 bp, Zea mays
ctcatgatctccggatcctgcgatcaggctgacgccggcaggggcgacttccaggagctcgaccagatcgccgccactaagcccttcgccaagctcgccgtcaaggcaacaaccatcgccgacatcccgcgcctcgtcttccaggccctcgccgccgccgtgtccggccgtcccggagggtgctacctcgatatcccgtccgacgtcctccaccaaaccctccctgaatccgaggccgcggctctcatagcagcagcagccgccgattcggccgcatccgatccttccccgtcaatgcacaagtctcttgacgagggaatcgccaaagctgcggacctgctccggtgtgcggagg

SEQ ID NO: 78895 - DNA, 315 bp, Zea mays
aactacggccctggctcccgcgtctgccgggtctgcgcgaaccctcacggtctgatcaggaagtacgggctcatgtgctgcaggcagtgcttccgcagcaacgccaaggacattggtttcatcaagtaccgttgaagaggccactgtgctgctgtggagaacttcctacatcaaagaaatgggtccttcattagaaggcctaatttatgcgctttagctttttgttcagaacttgagactcatgtgttaaactcgacttgttaaagttttgatggctactttgtgcttgttggaccagctataatcagaagattg

SEQ ID NO: 78896 - DNA, 383 bp, Zea mays
tcgatacaagcctctagatagtgtcatcgaactgattgcttagccgtcgaaactgcacaacccgcagatcgaagtctttgcaaaggtgttctacggcgacccggcaaagaagctgtacgaagcagccgacatggtcccgcttagctgcatggtggtcgggagcagaggactaagcacgctcaagagggctctgatggggagcgtgagcacgtatgttgtgaaccacgcggcctgccccgtgacggttgtgaaggagatggtgtagcgtgttgaacaccgctggttacaagcttcaccctagccagattgaataagcgtgcttgataagcactgatcaggggggatcttgctacttatacgacattttgtgcttgaaatttggg

SEQ ID NO: 78897 - DNA, 357 bp, Zea mays
atcagaactcgggaaaaaaaatgtcagaggccgccgtgcgtgtgatcggcctatggccgagcccgttcgtgatccgcgtcctgatcgccctgaagctgaagggcgtcgagttcgagttcgtggaggaggtggtgggcaggaagagcgagctgctgctgaggtcgaacccggtgcacaagaagatccccgtcctgctccaccacggcaagcccatctccgagtctctgatcatcgtccagtacatcgacgaggtctggtcctccggcgcgccggccttcctccccgccgacgctcacgcccgcgccgtccagcggttctgggcgcagtacgtcgacgacaaggtgaagcaaaaactag

SEQ ID NO: 78898 - DNA, 214 bp, Zea mays
atcggctcccgttcggaatgcgcagccctgcctccggcgaactggtccccaagcgatgtggcatggcgccggtgccgggtacgatcacgacggctaaagtgacgaaacctctattcttgaagaggccgatgcagttcggcatcagcggccctttgccgcccagtatagacctgcaccggttcgtcaagttgcccattgtcctgcgttgccagcg

SEQ ID NO: 78899 - DNA, 356 bp, Zea mays
ctagctcacttaacgccgccgcggagctgctccgcgcccccgacgccggtgattaggagcaggagcaagaggggttcggaatggccaagtctaagaaccacacggcgcataaccagtcgttcaaggcgcacaagaacggcatcaagaagcccaagcgccaccgccagacctccaccaaggggatggaccccaagtttctgaggaacttgaggtactcaaggaagggcaataagaagagttgtgaggctgagtcagaggagtgagatgatgcctgagtttgtggcgacaaatgcatctcttgtatcgttagggtcttagttgtgaacttaattttcacatctgtatgattaaaagag

SEQ ID NO: 78900 - DNA, 380 bp, Zea mays
gactcgcgggtcgatacaagcctctacatcgtgtcatgggagagagagagagagaagagagagagaagagagagagagagagaggagtgggagacccgcgagaggctgccgtgtagggaccgtagactcagcgactgcgaaggagggataaggggatggccgggatcggaccgatcaggcaggactgggagccggtcgttgtgcggaagaaggcacccaccgccgccgccaagaaggatgagaaggccgtcaacgccgcgcgccgcgccggtgcggagatcgataccatgaagaagtacaacgctggtacgaacaaggcggcatccagcggtacatccctcaacaccaagcgcctcgacgacgacaccgaaaacctcgcg

SEQ ID NO: 78901 - DNA, 420 bp, Zea mays
ctcgtaggtcgatacaagactctacacagacgtcgtactaacgcgtccgcctgacttccctgctacttggggggcaatggaaaagttatatgatgctggcaaagctcgcgctattggtgtgagtaacttctcctcaaagaaattgggtgatttgcttgctgtagctcgtgtacctccagctgttgatcaggtggaatgtcatcctggttggcagcaaactaagctccatagcttttgtcagtcaactggtgttcatctaactgcttactcaccactaggttcacctggtacaacttggatgaatggtaatgtccttaaagaaccaataatcatctcaatagctgagaaactcgggaaaacttctgcacaagtggctctgcgctggaacattcagatgggtcacagtgttcttcaaagagc

SEQ ID NO: 78902 - DNA, 358 bp, Zea mays
aaaaccctctagcttcccactccgctcggccaccagctttgaccgcctcccctcccctccgctcctgttcctccataccccacccccccgcaggagcggcgcggcggcggcggcggcaaagccaaaggcaagatgttcgggcgcgcgccgaagaagagcgacaacaccaagtactacgagatcctcggggtgcccaagtcggcgtcccaggacgacctcaagaaggcctaccgcaaggcagctatcaagaaccaccccgacaagggcggtgaccccgagaagttcaaggagctcgcacaagcctatgaggttttgagtgatccagagaaacgtgagatttatgatcagtatggtgaag

SEQ ID NO: 78903 - DNA, 365 bp, Zea mays
ggtcgatacacgcctctacacacacgttctgccaaaacctcgctaaagcccgatgaactgagcctcctgaggaggatatgcgacgcgtactacctcccggactggtgctcaccttcagactatgtgaacattgccaagtcactgtctctcgaggatatcaagacagctgactggtcggagaacgtggccccgttttggcccgccgtgataaaatcagcgctaacatggaagggcttcacctctctgctgacgaccggatggaagacgatcagaggcgcgatggtgatgccgctaatgattcaagggctacaagaaaggggctcatcaaattcaacatcatcacctgtcgcaagccttgagccgcg

SEQ ID NO: 78904 - DNA, 414 bp, Zea mays
gactcgcaggtcgatacaagcctctagactaaatcgtagtagatgatgatgacgacgacactgaagctctaatggcagagcttgagaggattaagaaagaaagagccgaggagaagcttagaaaggagcggcaacaagcagaagaggaggccaagatgaaggaggctgaactgatgcggggaaacccgttgattaatatcaacaatgctggctccttcagtgttaagagaaggtgggacgacgacgtggtattcaagaatcaagcacgaggagagaccaagacaccgaaacggttcatcaacgacaccatcaggagtgatttccaccgtaaatttcttcagaggtacatgaagtgacgcttccgtcgttcacaattcagcctggagcccctcatcgttatcatgtttgtgtatg

SEQ ID NO: 78905 - DNA, 359 bp, Zea mays
gagaaactgcacatcgtgtatcaagcccaggagtctcagttggccttgtctggacttcggttggcggggaagttcagtttgtggaggctacagccatggtgggtaacggtgacttgcatttgactgggcagcttggtgatgttactaaggagtcagcgcatctagctttgacatgggtgagagcaagagctgccgacctcaatttgtcacctacttctgatatcaacttattggagagccgtgatatccacatacattttcctgctggtgctgtgccacaggatggcccttctgcacgtgtcacattggtaacggcactagtgtcgctttttagcaacagaaaagtcacagcagatact

SEQ ID NO: 78906 - DNA, 280 bp, Zea mays
aaactggattcccccgattccctcacccatcaaccccacagcggacaaaaggcaatatgttcggcttcgggcatcacggtcaccacggttagaacccgccggtgcatggcggcctgcaccagcccatcttcaatatcgtctgcaacgccgacgaggggtactgcttcaacgtccgcgacggcaacgtggtgctggcccccgccgacccgcgcgactaacaccagccttgggacaacgccatgcgcttcagcacgcatgtcatggtccaggagggcaggcc

SEQ ID NO: 78907 - DNA, 428 bp, Zea mays
  unsure (1)..(428): unsure at all n locations
tcgatacaagcctctatattgagtcataagatatcgtgttattatacggttccgttgcaacgcacgggcactcacttagtataatattaagtatgcaagctcgaataaaacctgccactgtcgtcaacgcagcagcggctgaggcgagatttgtgtgagcctctggagcagcatgtcgttccacgtgtcgacagggccgggcaggcaccagtgcaggcagtcgctggcgttcctgacccagcgtttgtcgtagtgccagcccgggtggccgtcggcgcgcagcatcatcgccttggtgacgtccagcagctcaaacttggtgctgccgctggtctccctcaccctcgccacctcttggctctgcaccctcctcagctcncacccgatgctcctcggatcgaggtcgccttcctccagcggccgctcta

SEQ ID NO: 78908 - DNA, 353 bp, Zea mays
  unsure (1)..(353): unsure at all n locations
aactttgaagatctctcaacttcctttggcttcaggcaagcaaaagaggattgctgtgattactcaaggtgctgatccagtggttgttgctgaggatgggaaggtgaaaacgttccctgtgatcctattgcccaaggagaagcttgttgacaccaacggcgcaggtgatgctttcgttggaggcttcctctcacagttggttctaggcaagggcattgaagactgcgtgagggcaggttgctatgccgcaaacgttatcatccagcgcccgggctgtacttacccggagaagcctgacttcaactagtgcanaaactgaggcacgtcatgagagggactgttataggcacact

SEQ ID NO: 78909 - DNA, 407 bp, Zea mays
ctcgcaggccgacacacgcctctagaccctgtccaatgatggcaagggctgtggctcgtgctaccagatacgttgtgtcaaccacccggcatgctctggcaacccggagactgtgatgatcaccgacatgaattactacccagtcgccaagtaccactttgatctcagtggcacggcgtttggtggcatggcacagcccggccgcgacaatgagctccgccacgccggcatcatcgacatccagtttaggagggtgccctgcatctaccccgggcagacagtgaccttccacatcgagcacggctcaaaccccaactacttagcagtgctcgtcgagttcgaagatggcgatggcgatgtggtccaggtggacataatggaggccaactctgggtggtggatgccga

SEQ ID NO: 78910 - DNA, 384 bp, Zea mays
acaggcctctacaatgagtagtcgtatgcccgattacaatcagccatcgccaccacctccctccgcggctccgccttccgccgcgaacacgccgctgtctcgaccccttgtcctcctccttcagcaagatggcggagattgagataaaaacagcacctgctgacttccgcttccctacaacaaaccaaacaaggcattgttttactcgctatgtcgagtaccacaggtgtttgaatgccaaaggggatgatgctggtgtttgcgaaaaatttgccaagtactacaggtccctttgccctggagaatgggttgagaaatggaacgagcagagggagcatgggacgtttccaggacctctctgaatgtaccgcccgagacctccag

SEQ ID NO: 78911 - DNA, 382 bp, Zea mays
taaactcagtcaattcactcaaacctcttccccaaatcttcgattagattctcgttgacaagaagactagaaccgaacctgaccatgtcgctgatccgccgcagcaacgtgttcgatcccttctccctcgacctctgggacccctttgagggcttccccttcggctccggcagcagcagcagtctcttcccctcgttcccgcggaccagctcggagaccgcggccttcgctggcgcgcggatcgactggaaggagactccagaggcgcacgtgttcaaggccgacgtaccggggctgaagaaggaggaggtcaaggtggaggtcgaggacggcaacgtccttcagatcagcggcgaacgcaacaaggagcaagaggagaaga

SEQ ID NO: 78912 - DNA, 366 bp, Zea mays
caatgtgactttgacattgctggtgtatatgaacctatggaaccggattttgaggtcataaaagttctgactgaattgctgaatcagctggatataggcacatatgagataaaattaaatcacagaaagttgcttgatggtatgttggagatttgtggtgtgccccctcaaaagttcagaacagtttgctcgagtattgacaaactggacaagcaaacattcgaacaggtgaagaaggaactggttgatgagaaaggtatatcaaatgaaactgcggatgaaattggcaatttagtgaagactaggggccccccgttggaagttttgatggagttgagaaaggagggcagcaagtttatgaataat

SEQ ID NO: 78913 - DNA, 373 bp, Zea mays
aggaaggctctcgtgaccaccgggatgtccgccatggagaccgacatcaacgcgccgccgccgcccgccccagctggcgagggatcctctgcggccggtccgtcctcctcccgcaagcccaacaagcgcttcgagatcaagaagtggaacgccgtcgcgctctgggcatgggatatcgtcgtcgacaactgcgctatctgccgcaaccacatcatggatctatgcatcgagtgccaggcgaaccaagccagcgcgaccagcgaggagtgcactgttgcttggggagtctgtaatcatgcttttcacttccactgcatcagcaggtggcttaagactcgtcaagtgtgcccattagataacagtgagtgggagt

SEQ ID NO: 78914 - DNA, 286 bp, Zea mays
aggccagcatgatctccatggtcgcgaatccgaagttcatcccggggcagacgcttcgccggaaggagaagcttctccttgttccaaggattgcttcctgataatcctacatctgtaaaacttgtgtcttgctagctgtaccgggaacaagattaaataatgcaaggaataaagtgactctgttcttcgtcagtaaaaaaaaaaaaaaaaaaaaaaaaaaaaaaaaaaaaaaaagaaagaaaaaaaatgaaaaaaaaagtaaatcaaaataaaaactgccaatgaa

SEQ ID NO: 78915 - DNA, 374 bp, Zea mays
acggacgcgtgggcgcagacaagaactcgcctgttcgcgtcaacgggttcccttgcaaggacccgatggcggtcaccccggacgacttcttcaacacggcgatgatcatcgacaagcggagggacacgaacaacaaggtggggtccaacgtcaccaacgtgaacgtggagagcttcccggggctgaacacgctgggcatctcgctggcgcgcatcgactacgcgccgctcggggtgaacccgccgcacatccacccacgcgctaccgagctgctcaccgtgctcgagggcaccctctacctcggcttcgtcacgtccaaccccaaccgcctcttctccaaggtggtcaagaagggcgacgtcttcgtcttcccc

SEQ ID NO: 78916 - DNA, 397 bp, Zea mays
gatcaggtgagcaaggcagcaggggaaaagtggcgctctatgtcagagcaagagaagcaaccctatgtggaccaagctgggcagaagaagcaggactatgagaagactaaggcaaatattgagaaggagagcacaagctcaaagaaggctaagactgatgacgacgatggctcgaagtccgaggtcgatgatgaggatggcggtagtgacgaggataacgacgacgacgagtaaatagtatttccgctgttgtgaggtagcaaatcgattgttaggtccccaattagctcactggtttgctatctttaatgttaagttgtttggaacaggtgtttatgaaggggatctattagtttcgtgaggttgttagtttagtgcattagcaaagaaaaagccg

SEQ ID NO: 78917 - DNA, 356 bp, Zea mays
catcacaccgccactgatctgctctgttgctggtgactaggagcagtagcgagagggattctggatggccaagtcgaagaaccacacggcgcataaccaatcgttcaaggcgcacaagaacggcatcaagaagcccaagcgccaccgccagacctccaccaaggggatggacccgaagtttctgaggaacttgaggtactcaaggaagggcaacaagaagagtggcgaggctgagtccgaggagtaagatgatggtgattgagtttgtggcgacaaatgcatctcttgtatcgctaagagtcttagctgtgaacttagttctcacttctgtgtgactgtgatcaagggagatccat

SEQ ID NO: 78918 - DNA, 390 bp, Zea mays
tgggtcgttccaagactctacactgagtcggattatcttctcccctcctctgcccccatctcgcttctcgcacacggcagccggattccgaagcgcaccccctcggccccagccaaaagcatcgcagtttctaatcgtttggagagcacacaagaatgtcgttcgtgcagctctctggtgctggagtcgctgcagtggccttcacgaacaagagcctagtctctcggcacgcagcgctacgggtctgctcgtcgaggcgctcgatccgtagcctggtcgttaaggctgcaactgtcgtcaccccaaagtacacttcactgaagcctctgggagatagggtgcttgtgaagcttggtgccgcagaggagaagacagtttgtggcattttgc

SEQ ID NO: 78919 - DNA, 380 bp, Zea mays
acacgactctaaagtaagtcatatcatcctcctcttcctcctcctagcacagctagcgcctgctccccttcgtctgtgatcatgtcttgcagcagcggcaagtgcaactgcggctccagctgctcctgcggcagctcatgcaactgcatgtcccctgacgtggagaccgccgccgccagcagcatcaagaccatggtcctcgctgcgccgaccaccaaggccagcgccggcggcttcgaggcggccaccgagggcggcggctgcgactgcaacacctgcaactgcggcaccagctgcggctgctcctgctgcagctgcaactgagccggcccgcccggcccggcgattgcacacgagagtcgagaggacgacgacgacga

SEQ ID NO: 78920 - DNA, 409 bp, Zea mays
gacacacgcgtctacccacgcgtctgccaacgcgtccgccacagcgtcgtcgtcttcgtctccagtccaagcaagcgaagagcacccctcgagatctctccctccccgcgccgccatggacgcagttgactcggtagtcgacccgctccgggagttcgccaaggacagcatccgcctcgtcaagcgctgccacaagccggaccgcaaggagttcaccaaggtcgccgcgcgtactgcgatcggcttcgtcgtcatgggattcgtcggcttctttgtcaagctcatcttcatccctatcaacaacatcatcgtcggctccggctgatccgttcacctcaggctagtggctgcaggagtggacaatggcgtcactaccttggaggcaggcaccgggtttccagctctgatt

SEQ ID NO: 78921 - DNA, 394 bp, Zea mays
ctctcacacactgcaacagccaagtgcaagtgatcgagctcccccctcctcatcagtcgctaggcacagcgcacttgcaggatggcgcaggtctctaagacgcttctccttgtggccctggtgttcgtgtcgtcggcggcggtggagctgtgccgcgcgatcgacttcgacgagcgggacctggcgtcggacgaggcgctgtgggacctgtacgagcggtggcagacgcaccaccgggtgcaccggcaccacggcgagaagggccggcggttcgggacgttcaaggagaacgtgcgcttcatccacgcgcacaacaagcgcggcgaccggccctaccgcctccgcctgaaacggttcggcgacatgggggcggggggggagttccggtccacgt

SEQ ID NO: 78922 - DNA, 386 bp, Zea mays
cggatacgtctggcagttcatcacgctcgccgggttccacgccgacgcgctcgtcaccgacacgttcgcgcgggacttcgcacgccgcggcatgctggcctacgtggagaggatccagagggaggagaggatcaacggcgtggagacgctggagcatcagaagtggtcgggcgccaatttctacgacagggtgctcaaggctgtgcagggtggcatctcctcgactgcagccatgggcaaaggagttactgaagagcagttcaaggatccacggcccgcaactgggagcagtggcctgcaagttatggccaaatccaggatttgatgaagactcagaagaagaagaatgatttggagaaggctctaaataaattccaaagagaaat

SEQ ID NO: 78923 - DNA, 384 bp, Zea mays
acggacgcgtgggcaaagaatgctcctcctcctcttgtaaggttgtctgggaaaagtctggtatctgccatctggaaaggggacagttcaatagttgctgaactcattcagtcgatggaacctcatgttgaagaagaggtacttagtgatctgaaggccaaaatccgtgctcatgatccgtcagagtctgaagatattgagggaggcatccggaattctctcttgtggctgcgtgatgaattgcgaactctttcatgcacttacaagtgccgtcatgatgctgctgcagatttgattcatttgtatgcttatacaaagtgcttcttccgagtccgggattataagacagtaaaatctccaccagttcatatcaatccgcttgac

SEQ ID NO: 78924 - DNA, 396 bp, Zea mays
aagacgacttcttgccccggacggctactcctcttgaagacattttcaagtcgatcctctgcttgccttgcctcctaggtttgagatgtttgagggatacatgtatacctgaagacgctatgcttaaggatccaaggaggctttatgcaccaggccggatttatcacatagtcgaaagaagaacgtgcaggtgcggaagatatccaccggtagtcaaaacagctgtgccggtggatggtagatttgagcacatagttctttcctgcaatgccacagcggaccatgccattatttggattgagagggaggcccagaaggctttggatctgatgctggaggaggagaacacgctggcagtgccgtcggagcagcggatggagcggaacgaaaccctgc

SEQ ID NO: 78925 - DNA, 414 bp, Zea mays
  unsure (1)..(414): unsure at all n locations
gtcccgagcgacacaacagacagaggaggaaggagaaggatatgggaggcgaggcgggaatggggctccgcgtccgcgcctcctccctcctgctgtcactggtcctcgagctcgccgtcgcgctcgtctcagtgtcggcgcagcacaagttcgggatcaactacgggcagatcgcgaacgacctcccggacccggcgcaggtggcgacgctcctgcagtcgatgggcgtgaacaaggtgaagctgtacgacgcggacccccgggtgctgacggcgttcgccaacacgggcgtcggcttcaccatcgccgtgggcaacgaggacctgcaggcgatggcggccagcccggacgcggcgcgccgttgggtggcggcgaacgtgcagccctacgtcncggccacgcgcatcacctgcg

SEQ ID NO: 78926 - DNA, 392 bp, Zea mays
taaccgcagtcgccgcacgctcgctcgcctccgctccggcagcgagctctatcccccgcgacgagcagcagctgccaccgacgcacgcagaccggggaataaatattggtattggtagtgtgatatctataagaagtcaagatggtgaagttcacagctgaagagctccgtgctatcatggacaaaaagaacaacattcgtaacatgtctgtcattgctcatgtggaccatggcaagtctacgcttacagattcccttgtggcagctgctgggattattgcccaggaagttgctggtgatgttcgcatgactgatactcgtgcagatgaagcagagcgtggcattacaatcaaatctactggtatctctcctttactagtggagatgactga

SEQ ID NO: 78927 - DNA, 311 bp, Zea mays
aacaattcctccttcggatctcgcattcaacgcatcgcacgtgtgaaggaacggggacgccgatgaagatggggctcgcgttcgggaagctcgtcagccggctcttcgccaagaacgacatgcggatcctcatggtcggcctcgacgccgccggtaaaaccacgatcctctacaagctcaagctcggcgagatcgtcagcagcatctccatcagtcggtttcaaggttgaaactgttgagtacaagaacattagcttcactgtctgggatcttcggggtcaggagaggatcagacctctttgggaggcatt

SEQ ID NO: 78928 - DNA, 392 bp, Zea mays
aagcctccgatccccaattcctccttcggatctcgcattcagcgcagcgcaggtgtgaaggaagggggacgcggaggaagatggggctcgcgttcgggaagctcttcagccggctcttcgccaagaaggagatgcggatcctcatggtcggcctcgacgccgccggtaaaaccaccatcctctacaagctcaagctcggcgagatcgtcaccaccatccccaccatcggtttcaatgttgaaactgttgagtacaagaacattagcttcactgtctgggatgtcgggggtcaggacaagatcagacctctttggaggcattacttccagaacacccagggtcttatctttgttgtggacagcaatgaccgtgaccgtgttgttgaagccaga

SEQ ID NO: 78929 - DNA, 385 bp, Zea mays
gaagaagggtgagaacgcaatcttcactattccgccgggtcttgcctacggcgagatgggttcaccgcctaccatcccgcccaatgccacactccagttccatgttgagctcctttcttgggccagcgtcaaagacatatgcaaggacggtgggatttttaagaagatcatcgttgaaggggagaagtgggagaaccccaaggaccttgatgaagtttttgtcaagtacgaggtaaggctcgaggatggaactgttgtgtccaagtctgatggtgttgagtttgctgtcagagatggttatttctgcccggcactttcaaaggctgtgaagacaatgaagaagggcgaaaaggttctcctcaatgtcaagccacaatatggcttc

SEQ ID NO: 78930 - DNA, 398 bp, Zea mays
aatcccccttgcaagtatagtctcggcggctctagaagacgatgggcaaggacgacgtgatcgagagcggcgctggcggcggcgagttcgctgccaaggactacacggaccctcccccggcgccgctgatcgacgcggctgagctggggtcctggtcgctgtaccgcgccgtgatcgccgagttcatcgccacgctgctgttcctgtacatcacggtggccaccgtgatcgggtacaagcaccagacggacgcgtcggcgtcgggtgccgacgcggcgtgcggcggcgtgggggtgctgggcatcgcctgggccttcggcggcatgatcttcgtcctcgtctactgcaccgccggcatctcggggggccacatcaaccccgccgtcaccttcggcctc

SEQ ID NO: 78931 - DNA, 398 bp, Zea mays
atcaggcttgaggctcttgaccagatcaccgagcccaagaggccttcggacaagcccctgcgtctgcccctccaggatgtgtacaagattggtggtattggaactgtaccggttggtcgtgtggagactggtgtcatcaagcctggtatggtagtcacctttggtccaactggcctgactactgaggtgaagtctgttgagatgcaccacgaggcgcttcaggaggctcttccgggcgacaatgttggcttcaacgtgaagaacgttgctgtcaaggatctcaagcgtgggttcgtggcctccaactccaaggatgaccctgccaaggaggctgccagcttcacctcgcaggtcatcatcatgaaccaccctgggcagattggcaacggctatgcccc

SEQ ID NO: 78932 - DNA, 264 bp, Zea mays
aacgggtcagccgccgctccgcctcagcgcgtcgcccgccgccagatcctgacagcgacctcatcgatcaccttcaactttcaatcatggcggacgtcgatgtcgaaccggaggttgccgccggcgctcccgaagaagaggacgtgccgcaagtacagctaccgcggcgtcgacctagatgcgcttctcgacatgtccacggaccacgtcgtcgagctcttccgcgcgcgcgccacgagaaggttccagaggggtctgaagagg

SEQ ID NO: 78933 - DNA, 357 bp, Zea mays
gcaagaaccacacctcctcccttcgcctgtgatcatgtcgtcttgctgcggcggcaagtgcgggtgcggctccagctgctcctgcggcagcggatgcaacggctgcggtatgtaccctgacgtggagaccgccgccaccagcagcgtcaagaccacggtcctcgccgcgccgaccaccaaggccagcgccggcggcttcgaggcggccaccgagggcggcggctgcgactgcaacacctgcaagtgcggcaccagctgcggctgctcctgctgcagctgcaactgagctggcccggcccggcgatggcgcacgagagtcgagaggaggaggacgacgacgaggcgtataaatataat

SEQ ID NO: 78934 - DNA, 402 bp, Zea mays
ctcgtgggtcgacccaagcctctacaatatctcgtatcatcacagatcatccacagagaccatcttccgtgtaagagacaagagagtgggagagaggggggatatatggcagacatcgcgttgctggtgacggagcagttcgacaagaagctgaagcgaggcgcccccggcgaggacatcggcggcggcgccggcgaatataggaggaacttcggggccgtggccaaggtgtggagctcgtgggtggagtccgccgccgccgcgtccggggtgaggttcagcgtcgcggtgcacctggagcccaagaccgcgctcgccctggccgccgccgacggcctcttctccgcctagctagctagctagctactagtgtcgcctagctgcttccaggcccttctcctg

SEQ ID NO: 78935 - DNA, 321 bp, Zea mays
gaacagccaagaacagagatacccaagtcaccgaagcaaccgctcacaatcccaatctcccgcgtcactcaaaacccgaagtaacaaccgtcggtccgaccaacaatgtcgctgattcgccgtggaaacgcattcgaccccttctccctcgacctctgggaccccttcgagggcttcttccccttcggctccggcggcgtccgcagcctcgttccctcgttgccgcgcaccagctcggagaccgcggcatttgccggcgcgcggatcgactggaaggagacccccgaagcgcacgtgttcaaggcggacgtgccggggctg

SEQ ID NO: 78936 - DNA, 437 bp, Zea mays
ccgggccggcccacgcgtccagtcaaccctgccaccgccgacgccgcgccgccgcagcaattgtcaccgtcgctatggcccgtatcaaggtgcacgagctccgggggaagagcaagacggacctgcaggcgcagctcaaggagctgaagtctgagctctccctcctccgcgtagccaaggtcaccggcggcgcacccaacaagctctccaagatcaaggtggtgcgcacctcgatcgcgcgcgtgctcacagtgatctcgcagaagcagaagtcggcgttgcgggaggcgtacaagaagaagaacctgctccccctcgacctccgccctaagaagacccgtgccatccgccgccgtctgaccaagcaccagctctctctgaagaccgagagggaaaagaagcgtgagaagtacttccccatgaggaagtatgctatc

SEQ ID NO: 78937 - DNA, 449 bp, Zea mays
cgtgggccgacccaagcctctacacgtgagtcggacatatccctccctctcccctcaacccagcgcccccctcccgccgccactagggtttctcctccccgcccacccccaaaccatccccgaagcttccagtgcgtcgcgccgcaaccatgagcgacggtaaggactccctcgacctctccgccctcggcgccgccatccccaactcggccgagctcagcgcggaagacaaggctaaccttgtggcgtcgatcaagaacacgctcgagggattggcgtcgcggcataccgacgtgctcgagaacctcgagcccaaggtcaggaagcgcgttgagaagctcagggagatccagggcgaacacgatgaacttgaggcgaagtttttcgaagagagagctgctctagaagctaagtatcagaagttgtatgaaccactttactcaaagcgt

SEQ ID NO: 78938 - DNA, 393 bp, Zea mays
atacaaccctcaatacatagtcgtggtaaggctcggcgattacctgatcgagcagggcttctaaaagttcgtcatgttctgttttggtcatttgggcaccaaagtttgcgcctcatttggttctgtaatccgtgagctcgtgcatgtacttggcgtattgcatgcagtgaataatttagcttgggtttgtttgttgggggcagtgttggggacggatttggattggggtttatgcttggcatcgcgtcgtatcgaaactcagctgctgtttcgctgagtaatgtacatttccctggtaatggtacttgtggactctgatgcttttatgggaacgagtgcattttaaaaaaaaaaaaaaaagtaaaaaaaaaaaagggcggccgcccctaaagg

SEQ ID NO: 78939 - DNA, 422 bp, Zea mays
  unsure (1)..(422): unsure at all n locations
acgcctttctttcatcatattgaccaaattcgtcgtctctgtcgcgctgttgtaaacgggttagcagaagaacacacagggtgacaacaaatccttgttcggttatttctaatacatatggattggatgagattggaaaaaattaagaagaagtttaacttgtttgcgattcaaacacatccaatctcattcaattcacatggattgagagctaaccgaacaagcctgtagttggacaagggtgtaacacttatttgtcaggcgtaccgggcacagaccgcttcctatttgttcgtggggatgtaactgtaagccttgtgnaccctaagcagtctgcgtcttgtgcctgctgctgtancggtagagcagagagagagatcanatgtanattacattttttagctcaaattcacgacaaattg

SEQ ID NO: 78940 - DNA, 363 bp, Zea mays
gacccgcccgtcaacagtcggagagagattcagatccactcgtcacacatccgcgttaccccctctcccttggtttcctctcccaccaccaacccccatcccggttatctccgccgccgcccgctttgggaaggcgcgacgaaggcaggcgagaggctccagccggacgaggaggaaagaggagcagcagggccggaggagagatgttcctgtgggactggttctacggggtgctggcctccctcggcctgtggcagaaggaggcgaagatcctcttcctcggcctcgacaacgccggcaagaccacgctgctccacatgctcaaggacgagcggttggtgcagcaccagccgacgcagcacc

SEQ ID NO: 78941 - DNA, 341 bp, Zea mays
ccgtcaaagccacttacaaacaagaaagaaaatgatgaagttttcattaagctgggttctgacaaggataagaagaaggaaaatgctgagcgtgatgagcgtgccaagaagtcggtgagcatcaacgagttcctgaaacctgctgaaggagaaaggtactacggcggccgtggccgtggaaggggccgtggggatcgtggtggttttagaggcggatacggagggggatacagtcgtggcccagctgctgctgctccatccattgaagatcaagctcagttcccaagcctcggtgggaagtgaagggcgcccagctgctgctgtcaccgagcgttgtgttg

SEQ ID NO: 78942 - DNA, 350 bp, Zea mays
taaacacgcgtccgcgagggtgctgaagcgcatgtccttgacctgggtgctgaagcgcatgtcaaggacgaggagggcaaccctgcgttcgccctcgtcaacaaggccactgggctcgccatcaagcactccctcggccagtcccacccggtgaagctggtgccgttcaacccggagtaccaggacgagtcggtgctgtggacggagagcggcgacgtgggcaagggcttccgctgcatccgcatggtgaacaacatccgcctcaacttcgacgccttccacggcgacaagggccacggcggcgtgcacgacggcaccaccgtggtgctgtgggagtgggccaagggcga

SEQ ID NO: 78943 - DNA, 374 bp, Zea mays
acgcacatttctgcatccccctcccgccgcgccgcctcaccgccgccggagaagatgggtcgcgtgatccgcgcgcagcgtaagggtgcggggtccgtgttcaagtcccacacccaccaccgcaagggccccgcccgcttccgctccctcgacttcggcgagcgcaacgggtacctcaagggcgtcgtcaccgacgtcatccacgaccccggccgtggcgcgccgctcgccaaggtcactttccgccacccattcaggtacaagcaccagaaggagctctttgtcgcagccgagggcatgtacacgggccagttcgtctactgcggtcgccgcgccaccctctccatcggcaacgtgctgcccctccgcgggat

SEQ ID NO: 78944 - DNA, 354 bp, Zea mays
tctacagtaagtcctcataggcaatggctaccattatcaagctcgtggcccttggcttggccgtcctcgtgagcgttgggttctccgatgcagcgacggtagttaggcttgggagctatgcatctgccggacgatgcggcagccgtggacgctgcggctccggatctaccggggctgctgggtacagcagtgggtctggcggtggcagtggctacagcataggcaagggtggcggggactggtggaacaatttcgtctccagcgtagcgggcagtggtcgtgggggacagggccgacggggtggcaccaacagtggatacgggtccggcggtggatcgggctatggttctggca

SEQ ID NO: 78945 - DNA, 342 bp, Zea mays
aagcaatggctaccattatcaagctcgtggcccttggcttggccgtcctcgtgagcgttgggttctccgatgcagcgagggtagttaggcttgggagctatgcgtctgccggacgaggcggcggcggtggacgcggcggctccggatcgaccggggctgctgggtacggcggtgggtctggcggtggcggtggctacggcataggcaagggtggcggggactggtggaacaatttcgtctccagcgtagcgggcggtggtggtgggggacatggcggagggggtggcaccaatagtggatccgggtccggctgtgggtcgggctatggttctggcaccagtt

SEQ ID NO: 78946 - DNA, 277 bp, Zea mays
gccgacccacgaatccgcccacgcgtccgtgcctctcctcctccagagctcgtcgccaccggccaccgccaccctcgatcacgccgtccgtcgaggtaaggtcagcatggtgagggtcagtgtgctcaacgatgcgctcaagtccatgtacaacgctgagaagatcggcaagaggcaggtcatgatcaggccgtcgtccaaggtcatcatcaagttcctgacggtcatgcagcgccacggctacattggagagttcgagtacgttgatgaccaccga

SEQ ID NO: 78947 - DNA, 377 bp, Zea mays
accgccgccagcatcatcaagaccatggtcctcgctgcgccgaccaccaaggccaacgccagtggcttctatgctgccaccgagggcagcggctgcgactgcaacacctgcaactgcggcaccatctgccgctgctcctgctgcagctgcaactgagccggcccgcccggcccggcgatggcgcatgacagtcgatacgacgactacgacgaggcgtataaatataatatcaccgtctaaataacatcctgtcaactgcacccgccattatcgatccatggtcactcctgaggttcatgttcatctgtctaacctgctcgctgtcatgtccgtctcgtacctgaattaatatttatattcatgtacttgtgtttttc

SEQ ID NO: 78948 - DNA, 373 bp, Zea mays
acccacaccgggcacaccccccgagctcagcttagctccactccagctccaatcacagtcgtgaccagagcgcgagagctagctagagggccgtgaaaatgccgatcaataggatcgccctggggagccaccaggaggtgtaccacccgggcgccctcaaggcggcgttcgctgagttcatctccaccctcatcttcgtcttcgccggccagggctccggcatggccttcagcaagctgaccggcggcggcccgacgaccccggcgggcctgatcgcggcggcggtggcgcacgcgttcgcgctgttcgtggcggtgtcggtgggcgcgaacatctccggcgggcacgtgaacccggccgtgaccttcggcgc

SEQ ID NO: 78949 - DNA, 362 bp, Zea mays
aaccacggcgtggcggcggtcggctacggcgtcagcgacgacggcacgccctactggatggtcaagaactcgtggggcccttcctggggagagggcggctacatccggatgcagcgcggcaccggcaacggcggcctctgcggcatcgccatggaggcgtcctttcccatcaagaccgcgcgcaatccgtcgcgcaagccccgccgcgcgctcatcaccatggacgcctcttcccagtgacaggctgatccatctcggcgtcgaactcgtactactggcacgtaagtaggagtacgttgacacgatgacatcctgctgctgctgtttgcctgtactattttcgaatgtgtatgtacgtttga

SEQ ID NO: 78950 - DNA, 389 bp, Zea mays
acgagtccaaccacgcgtccgccccagtctcggaagagaactatccagaagcgcaagactccaaagccgtcgccttcctatccatcccttcctcgccgcgggggtcgcctgagatcacataaacaatggtgaaggctgttgctgtgcttggtagcagcgatggtgtcaagggcaccatcttcttcacccaagagggagatggccctaccactgtcaccggaagtgtctctggcctcaagcctggcctccatgggttccatgtgcatgcacttggtgacaccaccaatggctgcatgtcaactggaccacactacaatcctgcgagcaaggaacatggagcaccagaagatgagaaccgccatgccggtgatcttggaaatgtgacagct

SEQ ID NO: 78951 - DNA, 386 bp, Zea mays
acgcagctctagagcctccatgggcagctacgcgtacaagtactgcatgtgcttcacgcgcaagttccgatccccggacgcccagccgccgccggacgtccgcgccgcccacctctccttcgcctctgacgcccatgccctccgccgcttcgtcgccggcgtccagggcgagtcccccgccgacgtcgaccgcatcctcgccatgctctccgggggccacagccatggaatcgcccgcctcgtcacaaggtcgccggcggcatccacgcccacgctcgaagacttcttggccttcctcttctcccccgacctcaacccacccatcgcgcaccaggttcaccaggacatgtcagcgccgttctctcactatttcgtgttcaccgggc

SEQ ID NO: 78952 - DNA, 383 bp, Zea mays
acctaaaaccatctgcttcagccttcagctagccccaagtttagtcggccgatcgatcactgaagtagtaatggcctccgccaacagctggaccctcgagatcgcgtcgccggtggccccgcagcgcctgttccgcgccgccgtgatggactggcacaccctggcgcccaaggtcgcctcccacgtcgtcgccagcgcgcagcccgtggagggcgacggcggcgttggcagcgtcaggcagttcaacttcacctcagtcatgccgttcagcttcatgaaggagcgtctcgagttcctcgacgcggacaagtgcgagtgcaagaacacgctcatcgagggcggcggcatcggcgtcgccatcgaaacggcgacgtcgcacatca

SEQ ID NO: 78953 - DNA, 379 bp, Zea mays
agcggcacggacctggaccacggcgtggcggcggtcggctacggcgtcagcgacgacggcacgccctactggatcgtcaagaactcgtggggcccttcctggggagagggcggctacatccggatgcagcgcggcaccggcaacggcggcctctgcggcatcgccatggaggcgtcctttcccatcaagacctcgcccaacccgtcgcgcaagccccgccgcgcgctcatcaccagggacgcctcttcccagtgacaggctgatccatctcggcgtcgaactcgtactactggcacgtaagtaggagtacgttgacaggatgacatcctgctgctgctgtttgcttgtactattttcgattgtgtttgtaggtttgatt

SEQ ID NO: 78954 - DNA, 344 bp, Zea mays
atataacaatgtaaggagccagcttactgcattcaacagaaagcaaagtgggagcttatcagttcgtgacctttccaatctggtagaagcaaaggatatggtctgctcatagcatctagtaacacttcttgctattgttccgaagtactcacaaaaggactggttgtcaagctatgaatcactcgacacatttgtggtacccaggtcatctacacagctctatgaacacaatgagtatgcacgctatatcataacactttttgctaacgttgttgacaactttaatgtcagtgctcgcgagaagggtttccagattcgtgattttgactatagtcatgaagcac

SEQ ID NO: 78955 - DNA, 374 bp, Zea mays
agaaagatgtacaattcttgccaatttctggtcttgtgggaaccaatatgaagaccaggatggataaaagcatttgtagttggtgggatggaccttgtctttttgaagttctggaccgtattgaaattcctttacgcgaccccaaaggtccagtaaggatgccgattattgataaatataaggatatgggcactgttgtaatgggcaaaatagaggctggcactatcagagagggtgacagtttattgattatgccaaacaagtctcatgtgaaagtcattggtttgaacttggacgagagcaaagtacgtcgtgctggacctgctgagaatgttcgtgtcaaattgtccggagttgaggaggaggatgtaatg

SEQ ID NO: 78956 - DNA, 399 bp, Zea mays
ctcgcgggtcgacacacgcctctacacagattcctcagtctcggaagataactatccataagcgcaagactccaaagccgtcgccttcctatccatcccttcctcgccacaggggtcgcctgatatcacatatccaatggtgaatgctgttgctgtgcttggtaccagcgatggtgtcaagggcaccatctttttcacccaagtgggagatggcactaccactgtcaccggaagtgtctctggcctcaagcctgacctccatgggtttcatgtgcatgcgcttggtgacaccactcaatggctgcatgtcaactggaccacactacaatcctgctagcaacgaacatggagcaccatgttcatgataaccgtcatgccggtgatcttggaaatgtgaca

SEQ ID NO: 78957 - DNA, 339 bp, Zea mays
agtcccggttctggcacccctccccatcggcttcgccgtgttcatggtgcacctggccaccatccccgtcaccggcaccggcatcaacccggccaggagcctgggcgccgccgtcatctacaacaaggacaagccctgggacgaccactggatcttctgggtgggccctctcgtgggcgctgccatcgccggcctccaacaacaattcaacctccgggctggcgccatcaaaggcctccggtccttcaagagcaacgcctgatgaacggggcttggctgttgagcaatggcgggcgacctacaggcgggggaagtcctgagcgaggagaatgacatcat

SEQ ID NO: 78958 - DNA, 385 bp, Zea mays
taaccacacgtctgctaacgcgtccgcccacgcgtccgcccacgcgtccgcaaatatatctccccgcgtccgctagccctagccgccgtccgccgacttcatcgtcgccgtcgtctagacctcttcacgcactggaaaggttaaagtccgacatcaatggcgaagcatcatcctgatctcatcatgtgccggaagcagcctggcatcgcgattggccgcctttgcgagaaatgtgatggcaagtgtgttgtctgcgactcgtacgtgcgcccatgtacgcttgtccgggtctgcgacgagtgcaattatggttcgttccagggaaggtgtgtgatctgtggaggagtcggcatctcagacgcttactactgcaaggagtgcaccc

SEQ ID NO: 78959 - DNA, 371 bp, Zea mays
agcacgcagtattgcagcagcactgaagcactacttcctgcactcactgtgctagctgctcaaaccgtagtagtaacagtccatcaccatcaccatcaccaccaatggctcccaaggttgcgctcttccttgccctaagcctcctgttcgctgccaccgcgcatggctgcgaaccctactgttccggcccaatcgtcccaacaccaccagtcgtgccgactccgtcgtcgcatagccacgggcgctgcccgatcgacgcgctcaagctcaaggtgtgcgccaatgtgctgggcctcgtcaaggtcggcctaccgcaatacgagcaatgctgcccattgctggacgggctggtggaccttgacgccgcattg

SEQ ID NO: 78960 - DNA, 365 bp, Zea mays
aacacactgcaacagccaagtgcaagtgatcgagctcccgcctcctcatcagtcgctaggcacagcgcacttgcaggatggcgcaggtctctaagacgcttctccttgtggccctggtgttcgtgtcgtcggcggcggtggagctgtgccgcgcgatcgacttcgactagcgggacctggcgtcggacgaggcgctgtgggacctgtacgagcggtggcagacgcaccaccgggtgcaccggcaccacggcgagaagggccggcggttcgggacgttcaaggagaacgtgcgcttcatccacgcgcacaacaagcgcggcgaccggccctaccgcctccgcctgaaccggttcggcgacatgggg

SEQ ID NO: 78961 - DNA, 361 bp, Zea mays
aaattctagatcgcgatctagaactagtcccacgcgtccgcggacgcgtgggtttggatatgtctaatctgtggccatgttggctgtggaaggtacaagggtggacatgctattgaacactggaaggaaactcaacattgttattcacttgagttagagacacaaaaagtgtgggactatgctggggacaactatgtacatcggcttattcagtcaaaaacagatggaaagctagttgagtacaatttccatggtgatcacacagcagacagcacgtgttcactatgcagtggtgatgccgcactggatgaagctctactgaacagtaaatttgaagctattgttgacgagttcaatgatc

SEQ ID NO: 78962 - DNA, 345 bp, Zea mays
  unsure (1)..(345): unsure at all n locations
agcaaagttcccgaagcactcttgcaatccactgagttctgtttgttgagacgcatagagctagctgctagcgacgacaatgtcgctcgtgaggcgcagcaacgtgttcgaccccttctcgatggacctctgggaccccttcgacaccatgttccgctccatcgtcccgtcggcgacctccaccaactccgagactgccgccttcgccagcgcccgcatcgactggaaggagacgcccggggcgcacgtgttcaaggccgaccccccggcgtcaagaaggangaggtcaaggtcgaggtcgaagacggcaacgtgctggtcatcagcggccagcgcagcagggag

SEQ ID NO: 78963 - DNA, 352 bp, Zea mays
aacggcaggctgtgccacatgagacctatgtttacttcatggaccttctcgccaagacagttagagatgagatcgctgggtgcagcgaaaaggggtatgattccctatctgtaagtgatgcaaaacaaatgcttatgttcagttctgaccaagatctgcacgagtacatcacagaggagcacccggaatgggagtttaagaatggcgccgtcttcttccagaaggcaaaggaatcacagccctacaaggagatcccatccttgcagctcatcaaccagacgctcagctatgcgacggagctggagcgtattgtatgatttaatttcacagtaatccctggtggatgtttatt

SEQ ID NO: 78964 - DNA, 380 bp, Zea mays
aggcaccacacctcttcttcttcttcctcctcctcctagcacagctagcgcctgctccccttcgcctgtgatcatgtcttgcagcagcggcaagtgcgactgtggctccagctgctcctgcggcagctcatgcaactgcatgtcccctaacgtggagaccgccgccgccagcagcatcaagaccacggtcctcgccgcgccgaccaccaaggccagcgccggcggcttcgaggcggccaccgagggcggcggctgcgactgcaacacctgcaactgcggcaccagctgcggctgctcctgctgcagctgcaactgagccggtcaggcgatggcgcacgagagtcgagaggacgacgacgagtcgtataaatataatagcg

SEQ ID NO: 78965 - DNA, 374 bp, Zea mays
  unsure (1)..(374): unsure at all n locations
acggacgcgtgggcggacgcgtgggaaccaggcccgccccgacccgaagatgcagcggtggctcccggcgctcctccgccgcgccgcgcccggcggcggggcggcgcggctcttcgcctcgtcctccctcctcttcgacgacacgcaggagcagttcaaggagagcgtgcgcaagttcgcgcaggagaacatcgcgccgcgcgccgcggccatcgacgcctccaaccacttcccgcgggacgtggacctgtggaggctcatgggggacttcaacctccacggcctcaccgcgccggaggagtacggcggcatgggcctcggctacatgtaccactgcatctccatggaggagatcaccanggcctccggcgccg

SEQ ID NO: 78966 - DNA, 373 bp, Zea mays
  unsure (1)..(373): unsure at all n locations
acaaaaggtcctcttgtttttctaagagtctatccttttcattcaaggcatcaatcaattcattaattttatctactttagttctatccaatcccttgaacaaactagagtaatctatttcatcatcactagactcatcatcgctggaagaatcataagtgacattgttttgattacataccttcttctcccttgccataaggcatgtgtgacgctcgttggggaagagggatgacttgttgaaggcagtggcggcgagtccttcattgtcggagtcggaggaggagcaatccgaatcncactcctttccgatatgtgcctcgcccttggccttcttgtaatgcttcttcttttccctcttgctcccgtgttc

SEQ ID NO: 78967 - DNA, 381 bp, Zea mays
agttccgctccttcctccccctatctagctagccttcccgttcctgcatcgcggcggagatgggcgcctccaccacgccgctcgcgtcggcggcggcgctgcttctgctgctgctcgcgccgctcgccgcggcggcggacagcatgtcgatcgtctcctacggcgagcggagcgaggaggaggcgcggcggatgtacgccgagtggatggcggcgcacggccggacctacaacgccgtcggcgaggaggagcgcaggttcgaggtgttcagggacaacctccgctacgtcgacgcccacaacgccgccgccgacgcgggcgtccactccttccgcctcgggctcaaccgcttcgccgacctcaccaacgacgagtaccgcg

SEQ ID NO: 78968 - DNA, 375 bp, Zea mays
agccagccatcctacagtcacacacacacacacacacagacaagtggtttccaaagccaagtgtgtgtactagcaaccagctagctcgggcggcagcaggcagccatcatgtcggaggagaagcaccaccacttcttcaaccaccacaagaaggacgaggagcagcccgccggcgagtacgggtactccgagaccgaggtggtcaccgccaccggcgagggcgagtacgagaggtacaagaaggaggagaaggagcacaagcacaagcagcacctcggcgaggccggcgccatcgccgccggcgccttcgcactctacgagaagcacgaggcgaagaaggaccccgagcacgcgcacaggcacaagatcacggag

SEQ ID NO: 78969 - DNA, 375 bp, Zea mays
agcatcacacgcaagaaccacacctcctcccttcgcctgtgatcatgtcgtcttgctgcggcggcaagtgcgggtgcggctccagctgctcctgcggcagcggatgcaacggctgcggtatgtaccctgacgtggagaccgccgccaccagcagcgtcaagaccacggtcctcgccgcgccgaccaccaaggccagcgccggcggcttcgaggcggccaccgagggcggcggctgcgactgcaacacctgcaagtgcggcaccagctgcggctgctcctgctgcagctgcaactgagctgggccggcccggcgaatggccaacaaaatcaaaaggaggaggacgacgacgaggcgtataaatataatagcggcgt

SEQ ID NO: 78970 - DNA, 375 bp, Zea mays
acttctctttctctcccagccgccagccgccgccgcactctcccagccgccagccgccgccgccgccgccgcaaaaaaccctaacccccaatccaccaatggcgtcgagcagccccgaccttgccgacgacggcttcgcggcgccgcgcctcttctcgcagggtgtctcctacacatacgacgacgtcatctttctcccgggctacatcggcttccccgccgacgccgtcgacctctccactcgcctctcccgccgcgtcccgctatccatcccctgcgtcgcgtccccgatggacactgtctccgaggccgctatggccgcggccatggcatcactcggcgccgccgccgtcgtgcactgcaacaccgagcccc

SEQ ID NO: 78971 - DNA, 367 bp, Zea mays
aaatgaggttggagcaactattggaatagctgattatactaactatgaagatatgaaacacgcgataaggaagctagatgattctgagttccgtaatgctttttcaaggacatatgtccgggtgagggagtatgatgctaggcgcagccgttctcgctccagaggcagaaaccgctctaagtcaagaagcagaagccacagccattcgtactcaagaagcagaagccgcagttatagcaagagcatgagcccaaagatttaaaatctgcttcagagtcaaaatcacctgttaaggcaagattaccatccagattccctcctatttctcaccggcgtgacaagtctgcaagcatgagtcctgccagga

SEQ ID NO: 78972 - DNA, 399 bp, Zea mays
  unsure (1)..(399): unsure at all n locations
caacggcaacaacaaatttccccaaattccaatcaaccctccgcaataaagcagcccaaggcggcggccggcggcggtcaaccaacaatccagaacgaaaaccgaacccgccgttgccaataaggcggggctggtcaagttcaagggcggacttctccggcggaagcgccggtaagcctcctccggcaaaccgggaacggaaggtggcaacctgggcgcctgcggcggcatcgggcagccgctctccctcctcatgaagctcaacccgctcgtctcctccctctccctctatgatatcgccgggacccccggcgtcgcggccgacgtctcncacatcaactcncccgccctggtgaaggggttcatgggggacgaccagctccgggaaggcgctcaagg

SEQ ID NO: 78973 - DNA, 397 bp, Zea mays
acggacgcgtgggtatcgaatggtgagattgtgcacttcaaagttgcttttaagccgacaccatctatcggggtgaaacagaacactgtgtcaagggagcgtcagaacgttgagcttctggcaagagggcgccatgacccatgcgtcgcccctcgagctgttcctgtggtggaatccatggccgcgttggtcctcgtggaccagctgatggcgcacgtggcccagtgcgagatgttcgcgctcaatgctgcacttcaagaaccagttggctctttctagcagaggcagagcacacctgatgagctcgcgccaaattttatcatttatcatagtaataagtagctcaagcgtggcttggtttgcttgtctcttgcaccgtagttttgttttttttccc

SEQ ID NO: 78974 - DNA, 401 bp, Zea mays
gcgcgggtcgacacaacactctagagtgagtctcactaccccctccggttcgggttcgggttcgtgaggttctccggggttcggtttcgtgggtgagcggatcgagatggcggcgtcggatgttgagtaccgctgcttcgtcggcggcctcgcctgggccacggacgaccactccctccacaacgccttcagcacctacggcgaggtcctcgagtccaagatcatcctcgatcgggagacgcagaggtcccgcggcttcggcttcgtcaccttctccacggaggaggcgatgcggaacgccatcgagggcatgaacggcaaggagctggacggccgcaacatcaccgtcaacgaggcccagtcccgcggcggccgtggaagcagcggcggcggcgggtacg

SEQ ID NO: 78975 - DNA, 376 bp, Zea mays
ctctagccagagtcatctgatgagttcaaaaagggtgtcgagggtgcaaccaagtttctccttagcaagctgaaggacctccaattttttgttggtgagtccatgaaggatgatgcgtctgtggtattcgcctattacaaggatggtgccactaatccgacattcctctatttctctcatggtcttaaggagatcaagtgctaggcgtgcggcgaaattagttacccatgttgggtactatctatgtactattattatatccaaaactatagttgtcctggctgaattgaactcaaaagggtttgtttgagaaaaaattgtcccaagattggattgcttgttaaagctcaatattgttattgaagtgttattgctt

SEQ ID NO: 78976 - DNA, 342 bp, Zea mays
attcagaaagggtgtcgagggtgcaaccaagtttctccttaacaagctgaatgacctccaattttttgttggtgagtccatgaaggatgatgcgtctgtggtattcgcctattacaaggatggtgccactaatccgacattcctctatttctctcatggtcttaaggagatcaagtgctaggcgtgcggcgaaattagttacccatgttgggtactatctatgtactattagtatatccacaactatagttgtcctggctgaattgaactcaaaagggtttgtttgagaaaagattgtcccaagattggatttgcttgttaaaagcctcaatattgttattg

SEQ ID NO: 78977 - DNA, 370 bp, Zea mays
aggagaagattgataatgaaatgtacctggcacgagagaaagcactagcagatgcaaactactacaggattttgaaggaagcagaggcaaataggctcaaactgacacctgagtatctggagctgaggttcattgaatcaattgccaacaactcaaagattttctttggtgaaaagattcctaacatgatcatggatcaaaggttgctcaagaattaccttgatgctgttcctaggaaggaccattatgaaatgtagccgcgggttccgtgggttggaagcagaagtctttcttttttgtgtgatcccacgcagtagataggattaccgtgtagccgtccagtatactagtaagccagaaaggagtcatc

SEQ ID NO: 78978 - DNA, 410 bp, Zea mays
  unsure (1)..(410): unsure at all n locations
gacacacgaatctagccgctatcataagagctcggcgattcccaggtcccgcgagaatatgccgaagcagatccatgagattaaggacttcctcctcaccgcgaggaggaaggatgcccgctcagtgaagatcaagaggagtaaggatgttgtcaagttcaaggtgcgctgctccaagtacttgtacacgctctgcgtcttcgatgctgagaaggcaaacaagttgaagcaatctcttcccccaggtttgaccgtcgaggaggtctgattggatacatggcaacgccgagttgaactacccaagcttctttatcagtagcagagcatgctactctatgtacttttggaacctaagctattagacctgtcagtgttggatgtctggatcntgcatttttggagaaatacaa

SEQ ID NO: 78979 - DNA, 403 bp, Zea mays
tcgcgggtcgacacacgcctctaaacatcatacgcgaacgagggacccggggcggaagaagagagagaagacgtctctctcctctcggcgtccccgttccccaacctctcgtctgctgcctgcctgcctgcctgcctgcaaaaaggagtttgtcatggcgtctaagcgcatcctcaaggagctgaaggacctgcagaaggacccccccacatcatgcagtgcaggtcctgctggtgaggacatgtttcattggcaagcaacaattatgggaccacctgacagtccctatgctggtggtgtttttttagtgaacattcatttcccgccagattaccccttcaaacctccaaaggtttctttcaagacaaaggtcttccatcctaatatcaacagcaatggaagt

SEQ ID NO: 78980 - DNA, 366 bp, Zea mays
atcacaacaagcaaagcagcgatccgacatccgagagatggacgcggtgatgttcgggctggagactcccctgatggccgcgctgcagcacctgctggacgtgcccgacggcgacgccggcgcgggcggcgacaacaagacgggcagcggcggcagcgccacgcgcacctacgtccgcgacgcgcgcgccatggcggccaccccggccgacgtgaaggagctgcccggcgcgtacgcgttcgtggtggacatgccggggctgggcacgggcgacatccgggtgcaggtggaggacgagcgggtgctggtggtcagcggcgagcggcgccgggaggagcgcgaggacgacgccaagtacctgcgcat

SEQ ID NO: 78981 - DNA, 274 bp, Zea mays
atacaatacgacaccccaagccgcacagcacagacccgggcttcgccggcgcggtagccagagcaagacatggacgggaggacgtacggccacgagaccaccctgatggtggctgctgcagcaccttctggaagtgcccagactgcgacgccggctcgcgcggcgatctcgcacgtcctgccgctgcgggcggcgggcatacgcgcgggttgcttcgcgaagcggccccgtcggcgcgcatccggccggcgttaccgtggccgtagcgcgctgt

SEQ ID NO: 78982 - DNA, 332 bp, Zea mays
aaaggtcgtttgccgagaagcactacgccgatctcgcctccaagcccttcttccagggcctcgttgactacatcatctctggccctgtggtggccatggtctgggagggcaagagcgtcgtcacaactggccgcaagatcattggcgccactaaccccctggcttctgagcccggcaccatccgtggcgactttgctgtcgacattggcaggaatgtcattcatggaagtgacagcattgagagtgccaataaggagattgccctgtggttccccgagggccctgctgattggcagagcagccagcacccctggatctacgagaagtaaaca

SEQ ID NO: 78983 - DNA, 368 bp, Zea mays
ctctagagtatctcgtactagcggtgggtcgggctatggttctggcaccagttccaccgcagcctctggccccagcagtggcaactacgccaacgctgagggcaagggcgccggtgggggcatgggcggtggtgccgacggcgcctacggttctggtgccggtggaggcgttggcaagggccagggcgagagtggcgtggcattggcaccgtcgtccggtggctactacaatggcggcgccgctgatgctaccggtggtggttccggcgctggcggtggacatggcggtggcgcagccggagctccaagctacgggactggaggtggccttggcggaggcaagggcgaagccggcagcgacgggtcct

SEQ ID NO: 78984 - DNA, 316 bp, Zea mays
acagttctgcaccaaactacatgaatcaatggcggagaccttggtagaattagctttgatggcagcttgtttattttctatataaataaggccatgtttggtttcaattagtcttaagactaaactttagtcctaagactaaactttaatccctacttgtttggttctagggactaaatagactcaaatgctcttggaatacactcatgtgggcttttaatcaaaaaaaaaaaacccaaaaaaaaaaaagggagcattccaaaaaaagataatgaaaatgaaagtggtaaaaaaaaaaaaggggggccgcccaaaa

SEQ ID NO: 78985 - DNA, 370 bp, Zea mays
gtaatttgacaaaggaaaccctgcatttatatcttcaaacatcacacttgttgagagatatattgtggtgcatggacagataatactccagcagtttgcagattttccagatgagactatccgtcggagtgcatttgtcagtggtcttttattgaagatggaacagaggaggcatacaaagttagttatgaagaaaaaaactcaagtgatgaggggagagaatctgaatccaagtgcagcaatgggtccagcatcgaggaaaaaagcaatgcatgcaacaacaaccaggctcatcaacagaatctggagtgattactatgcacatcatttccctgaagattccaaggagggagatggaaattgaaataaa

SEQ ID NO: 78986 - DNA, 393 bp, Zea mays
gacccacgcatccacggacgcgtgggcggacgcgtgggcggcgcacgagctcgcccgagatggcgaacgcgagatcgggtgtcgctgtgaacgatgagtgcatgctgaagtttggcgagctgcagtcgaagaggctgcaccgcttcataactttcaagatggacgacaagttcaaggagatagttgtggaccaggtcggggatcgcgctaccagctacgatgacttcacaaacagcctccctgagaatgactgccgatacgcgatctatgatttcgactttgttactgcagaggatgtccagaagagcaggatcttctatatcctatggtccccatcctccgccaaggtgaagagcaagatgctttacgcaagctcaaaccagaaattcaaga

SEQ ID NO: 78987 - DNA, 379 bp, Zea mays
  unsure (1)..(379): unsure at all n locations
atccagagcaacgcaattgtgatagccaagaacaactgcatgctgggaatgggcagtggtcagccgaacaggcgagagagcgttcgaatcgccttcaggaaggcaggagaggaggccaagggagccgcattggccagcgacgccttctttccctttgcctggaatgatgccgtcgaggaggcgtgccagaacggcatcggcatcatcgcccagccaggaggcagtaagaaggacgaggacgccgtcgcgtgctgcaacaagtatggtgtgtcgctcgtcctcaccggcgtcaggcacttcaagcattagccgtcatgccccatggctggtcatcttagcttanggagttacggaaaatacaacaagcttcgaaagctgc

SEQ ID NO: 78988 - DNA, 367 bp, Zea mays
aaatcgctagcagcagctgcatgctggcaatgtgcagtggtcaacctaagatgtcacagagcgttctaatcgccttcaggaatgtaggagacgacgctacgggagccgcattggccatcgacgcgttctttccctttgcctgtactgatgccatctaggaggcgtgctacaacagtatcggtatcatcgcccagccagtacgcagtaacaacgacgaagacgccgtcgcgtgctgcatcaagtatggtgtgtctctcgtcctcaccgatgtcaggcacttcaagctttacccgtcatgctccatggcaggtcatcttagcgtacggagttacggactttacaccaaccttcgacagctgctccttgt

SEQ ID NO: 78989 - DNA, 383 bp, Zea mays
taaaatgagtcgtattgagctgatcgtcatggagttccccaaggaccccgcgcccacccgcgagcagatgatcgacacctacctcaacacactcgccaccgtcctcggcagcatggaggaagccaagaataacatgtacgcattcagcacgaccacctacaccgggttccagtgcaccgtggacgacgagacgtcggagaagttcaagggtctgcctggggtgctgtgggtgctccctgattcctacatcgacgtgaagaacaaggactacggaggtgacaagtacgtgaacggcgagataatcccctgcacgtacccgacgtaccagccgaaggagcggaggacgtccaagtacgagagcaggcggtacgagaggctgagag

SEQ ID NO: 78990 - DNA, 385 bp, Zea mays
actctaaagtaacatcgtatacacctcttcctcctcttcctcctcctagcacagctagcgcctgctccccttcgtctgtgatcatgtcttgcagcagcggcaagtgcaactgcggctccagctgctcctgcggcagctcatgcaactgcatgtcccctgacgtggagaccgccgccgccagcagcatcaagaccatggtcctcgctgcgccgaccaccaaggccagcgccggcggcttcgaggcggccaccgagggcggcggctgcgactgcaacacctgcaactgcggcaccagctgcggctgctcctgctgcagctgcaactgagccggcccgcccggcccggcgatggcgcacgagagtcgagaggacgacgacgacgaggc

SEQ ID NO: 78991 - DNA, 419 bp, Zea mays
tacagcgatccgtagcacatccaattcactcaaacctcttccccaaatcttcgattagattctcgttgacaagaagacaagaaccgaacctgaccatgtcgctgatccgccgcagcaacgtgttcgatcccttctccctcgacctctgggacccctttgagggcttccccttcggctccggcaacagcagcagtctcttcccctcgttcccgcggaccagctcggagaccgcggccttcgctggcgcgcggatcgactggaaggagactccagaggcgcacgtgttcaaggccgacgtaccggggctgaagaaggaggaggtcaaggtggaggtcgaggacggcaacgtccttcagatcagcggcgagcgcaacaaggagcaggaggagaagacggacacctggcaccgcgtggagcgg

SEQ ID NO: 78992 - DNA, 424 bp, Zea mays
gggtcgaggcccgcgtccacacatatatagtatgagatgccgcataagagctccttgctgcaatgaaatttttgattgccgacactgccacaatgaaactaagaattccattaaaattgataaaatgaagaggcatgaacttccacgccatgaagtgcagcaggttgtatgctcattgtgtggcactgaacaggaggtgcgacaagtatgtatcaattgcggtgtttgcatggggaaatacttctgtggtttgtgcaaactcttcgacgatgatgtctctaaacagcagtatcactgcaacggatgtggaatatgtagaatcggagggagggagaatttcttccactgttcaaaatgtggatgttgctattcaattgcgctgaagaatagtcatgcatgtgttgaaggggcgatgcatcatgac

SEQ ID NO: 78993 - DNA, 434 bp, Zea mays
cagacgcttgggcggacgcgtgggcggacgcgctgggcaacagccaagtgcaagtgatcgagctcccgcctcctcatcagtcgctatgcacagcgcacttgcaggatggcgcaggtctctaatacgcttcaccttgtggacctggtgttcgtgtcgtcggctgcggtggagctgtgcctcgcgatcgacttcgacgagcgggacctgtggtcggacaaagcgctgtgtggacctgtacgagccgtggcagacgcaccaccgggtgcaccggtatcactgcgagaagggtcggcggttcgggaccttcagggagaacgtgcgcttcaaccacgcgcacaataagcgcggcgaccggccctaccgcctccgcctgaaccggttcggcgacatggggcgggatgagttccggtcaacgttcgccgactcacgcatca

SEQ ID NO: 78994 - DNA, 433 bp, Zea mays
agaggaggagggcaggatgtcgcaccgtaagttcgagcacccgaggcacggctccctcggcttccttcccaggaagcgctcctcccgtcaccgcggcaaggtgaagtcattccctagggatgaccccaagaagccttgccatctcactgccttccttggctacaaggctggcatgactcacattgtccgtgaggttgagaagccaggatccaaactccataagaaggaaacttgtgaggctgttaccatcattgaaacccctcctcttgtcattgttgggctcgtggcatatgtgaagactcctcgtggcctccgcacactcaactctgtttgggcccaacatcttagcgaagaagtgaggagaaggttctacaagaactggtgcaagagcaagaagaaggctttcacaaagtatgctctcaaatatgaaaat

SEQ ID NO: 78995 - DNA, 404 bp, Zea mays
cctctaaagcgtctactcggatccccgatttccgcttgctgctgcgcttccaacaccatggacggcgggggatccggcaatgcctccggcggcagcggcggcgcatcgacgtgctgctactacgcgctcctcggcatccgcaagaacgcctccgccaccgacatacgcgccgcttaccggaggctcgcgatgaagtggcacccggaccggtgggccagcgaccccggcgcggccggcgaggccaatcagcggttccagcggatccaggaggcatactccgttctgtcggacaaggggaagaaggccatgtacgacgccgggctcttcgaccccctcgacgacgacgaccaggatttctccgacttcatgcaggagatgctggtgatgatggatagcgtgaaaaa

SEQ ID NO: 78996 - DNA, 366 bp, Zea mays
accctaggattgccatggcggaccagctcaccgacgaccagatcgccgagttcaaggaagcattcagcctcttcgacaaggacggcgacggctgcatcaccaccaaggaacttggaactgtgatgcgctcgttggggcagaaccctactgaggctgagcttcaggacatgatcaacgaggttgatgctgatggcaatggaaccatcgacttccctgagtttctcaacctgatggcacgcaagatgaaggacaccgactctgaggaggagctcaaggaggccttccgcgtgttcgacaaggaccagaacggcttcatctctgctgctgagcttcgacatgtcatgaccaacctaggtgagaagctga

SEQ ID NO: 78997 - DNA, 406 bp, Zea mays
gacacaggcgtctaaactctatagtccgagaccccaagcaccagcgcggcggcggcgaccatggctgtcggaaagaacaagaggatctccaagggaaagaagggtggcaagaaaaagaccgtcgaccctttctctaagaaggattggtatgacatcaaggcaccgtcggtgttcagtgtgcgcaacatcgggaagactctcgtatccaggacacagggtaccaggattgcttctgagggtctgaagcacagagtctttgaggtttgcctagctgatcttcagggcgacgaggatcaagcttacaggaaaatcaggctccgtgctgaagatgtgcagggcaggaatgtgctcacaaacttttggggtatgaattttaccactgataaactgagattcctagtgaaga

SEQ ID NO: 78998 - DNA, 453 bp, Zea mays
gggtcgatacaagcctctaaaatgattcgcaacattaggtatggtgttgacggtggagctacccttgtgacgggtggtgataggttgggtgacaagggtttctacatccagccaacgattttctcagatgtccaggacggcatgaagattgctcaggaggagatatttgggcctgtgcagtcgatcctcaagttcaaagacctcaatgaggttatcaagagggcaaacgcgagccagtatggattggccgccggcgtgttcaccaacagcctggacacggccaacaccctgacgcgcgcgctcagggccgggaccgtctgggtgaactgcttcgacgtcttcgatgctgcgattccgtttggtgggtacaagatgagcggcatcgggagggagaagggcgttgacagcctgaagaactacctgcaggtgaaggcggtcgtcaccccaatcaag

SEQ ID NO: 78999 - DNA, 399 bp, Zea mays
agctagacacaagtcagtctccttcccctctctagtgctcaccggctccttccgtcgccatggacgtcctcttctgctgctgcctgctgcttctcctggcctccgccgcgtccgccggcagcgagcggtgcgtgcggcaggggaaggcggcctactctccctcgctctccccggcccctcacggtagcagcggagcgtgcgggtacggcgccatggccgccgagatcaatgggggcttcctcgccgccggcgggcccaggcagcaccgcgggggcctcggctgtggccgctgtttccagatgagatgccgagacgcaaggctgtgcagcgccgggggagtgcgggtggtgctgaccgacttccacaggagcaaccgtacggacttcctgctcgccgggg

SEQ ID NO: 79000 - DNA, 398 bp, Zea mays
agtcgccttcccctctctagtgctcaccggctccttccgtcgccatggacgtcctcttctgctgctgcctgctgcttctcctggcctccgccgcgtccgccggcagcgagcggtgcgtgcggcaggggaaggcggcctactctccctcgctctccccggcccctcacggtagcagcggagcgtgcgggtacggcgccatggccgccgagatcaatgggggcttcctcgccgccggcgggcccaggcagcaccgcgggggcctcggctgtggccgctgtttccagatgagatgccgagacgcaaggctgtgcagcgccgggggagtgcgggtggtgctgaccgacttccacaggagcaaccgtaccgacttcctgctcgccggggtcggcgtccgcggg

SEQ ID NO: 79001 - DNA, 390 bp, Zea mays
accgtcggtccgaccaacaatgtcgctgattcgccgtggaaacgcattcgaccccttctccctcgacctctgggaccccttcgagggcttcttccccttcggctccggcgacgtccgcagcctcgttccctcgttgccgcgcaccagctcggagaccgcggcatttgccggcgcgcggatcgactggaaggagacccccgaagcgcacgtgttcaaggcggacgtgccggggctgaggaaggaggaggtcaaggtggaggtcgaggacggcaacgtcctgcagatcagcggcgagcgcaacaaggagcacgaggagaagaacgacaggtggcaccgggtggagcgcagcagcggcaagttccttcgcaggttcagactgccggacaacgc

SEQ ID NO: 79002 - DNA, 371 bp, Zea mays
cttcagccccacgctatggccctcgcactgcgcctccgtcgggtcctcgcggcggcctccaccgcggcacccctgctccgcccgtccacctcggtcgcccggccttgcccgctcgttcccctcgcctccccggtcgcgccgctcccgctgccgccgtggcgattcctgcccggcggcggcgccgggttcaggtccacggcggcggcggctgcgcggggcgggaccgactatgggacggacgacagcaagatctcccccgacgagatcctcttcgagggctgcgactacaaccactggctcatcaccatggacttcccggaccccaagccgtcgcgcgaagagatgatcgagacatacctccagactctcgc

SEQ ID NO: 79003 - DNA, 413 bp, Zea mays
cccaggcgtccgagcggtgcaccctccatagcgcctgagcgctctgtcctcggatcggagcttctctgcgtgtcgcagccaagcttccttccccatggcgcccggcgcccaagtccccagccgtgaccctgccgagctccgccccgactccacgtctcctggtcgggctctcgttctatgcctgatgccgctgttccctggtgctccctgctcggtccctgcccagcgcctgactacagctccagctcgcggcgtcccctctgcttagccaggattgtcgtgcctctgctccctggttttccctacgcgcgagctcgctggcgttgcccctgctccgcttggccgcgtccccctcagtccaccactctgctcggccatggaagacacgccgcaccctggttccagctcgcgat

SEQ ID NO: 79004 - DNA, 361 bp, Zea mays
caggcctccgacttgcataaagataccgtgattccactacgaatcgccatattccttacagagaaaataagagcttgactggtacagcgcgctatgcaagttgcaacaccaaccttggaatagaacaaagccgcagagatgatttggtatctctaggctatgtgcttttgtattttctccgaggaagccttccttggcagggactaaaagccgcaacaaaggcacagaagtatgacaagatatgtgagaaaaagatatcgactcctatcgaggtcttatgcaaatcctgtccggtcaagttttcaccttacttccattattgccattcattggcatttgatcagcgacctgactatgcatt

SEQ ID NO: 79005 - DNA, 434 bp, Zea mays
ctcgctagtcgatacaagcctctaaagtgagtcataataaaggaggtttctcatgagtggcaattggttaacaagcagaagcctatctggatgagaaagcctgaggagattaccaaagaagagtatgctgctttctacaagagcttgaccaacgactgggaggagcatctcgccgttaagcacttctctgttgagggtcagcttgagttcaaggctgtcctgtttgtgccgaagagggccccctttgacctcttcgacaccaggaagaaactgaacaacatcaagctctatgtgcgccgtgtcttcatcatggacaactgtgaggagctgatcccagagtggctgagctttgtcaagggcattgttgactctgaggaccttcccctcaacatctcccgtgagaccctccagcagaacaagatcctcaaggtcat

SEQ ID NO: 79006 - DNA, 446 bp, Zea mays
tcgatccaagcctctacagtgagtcattttatctacaccatcgacgacgactgcttcgttgccaaggacccatctggcaaggatatcaatgctcttgagcagcacatcaagaacctcctcagcccatccaccccgttcttcttcaacaccctgtacgacccctaccgtgagggtgctgactttgtgcgtggataccccttcagcctcagggagggtgctcacaccgccgtctcccacggcctgtggctgaacatccctgactatgatgctcccacacagctggtcaagcccaaggagaggaatgagaggtatgttgatgctgtcatgacaatccccaagggaaccttgttccccatgtgtggcatgaaccttgccttcgacagggatctcattggccctgctatgtactttggtctcatgggtgatggccagcccatcggtcgcta

SEQ ID NO: 79007 - DNA, 439 bp, Zea mays
aagcctctaaattaagtcatatgaaggaattccaaggatacaaaccctcctgatctatatgcaaagtttatgagtgcgctttacaacttgctcgatggttcttctgacaacacaaaatttgaggacgactgccgagctattattgggactcaatcatatgttctctttactttagataaattgatttataaagttgtgaagcagcttcaagcaatagcaacagatgaaatggacaataagcttctgcagctatatttatatgaaaaatcaagatctcccgggaggttttttgacctagtttatcatgaaaatgcccgtgttctactgcatgatgagagcatataccgatttgaatgttgctcaagtccgacaaggttgtctattcagctgatggaatatggtcacgaaaagccagaagttaccgcagtatcaattgatc

SEQ ID NO: 79008 - DNA, 430 bp, Zea mays
tcgacgcaggcctctaaacgaagcaagcagcctaaaaaaaccgtatcgtctcgcctgttcagtttccttctcctcttcccgcagcccggtttgccgaccaggttccaccgttccagagtagccaagcgaatcccgtgtctggttcgcgcgatggcggaggagcagtccaacccccagcaccagcaagcggaggagagggaggttatggtggagcagcagcagccgaggagggccccgaagctgaggtacctggacttcgtccaggtggcggctgcccaggccgcggtgtgcctcgctgggctctacggcctcgccaaggaccacgccggcccgctccgccccagcgttgacgccgtcgagtctgccgtcaagggcgtcgttagccccgtctacgaccgcttcggcggcctgccgctcgacgtcctcgcct

SEQ ID NO: 79009 - DNA, 415 bp, Zea mays
  unsure (1)..(415): unsure at all n locations
ttacaagcctctaaactgagtcgtattaagcttctcctctcgcgtatcctaccaggagggtgggagacccagggagcggaggtgtgcgaagctcgcctcgcaccacgcgctgcggcctgcggggcgagagatcggggcctgagctagggtctggtggcggagatgtcgacgccggcgaggaagcgcctgatgcgggacttcaagcgcctgcagcaggacccgcccgccggcatcagcggcgcgccgtacgacaacaatatcatgctctggaacgccgtcatattcgggccggatgacacgccgtgggatggaggcacgttcaagctgactctgcaatgtacagaagattaccccaacaaacctccaactgttcggtttgtttcgaggatgtttcatccanacatctatgcggatg

SEQ ID NO: 79010 - DNA, 451 bp, Zea mays
  unsure (1)..(451): unsure at all n locations
gggtcgagacaagcgtctacactaattcgtcatatacacacttcncggctgcctcnctaggtagcagcttctacaatggaggcatccaacaagctcgcagtcttgctcctgtggctggtcatggcagctgccactgccgtgcacccttcctactctgagaattcgcctcaagactacctcactccccaaaacagcgcccgtgccgccgtcggtgttggcccggtgacctggagcacgaagctgcagcagttcgcagagaagtacgccgcacagagggccggcgactgccgtctccagcactcgggcgggccctacggggagaacatcttctgggggtccgccggcttcgattggaaggcggtggacgcagtgcgatcgtgggtagacgagaaacagtggtacaactacgccaccaacagctgcgccgccggcaaggtgtgtggccactaca

SEQ ID NO: 79011 - DNA, 423 bp, Zea mays
agtcgtattatcacacttcccggctgcctccctatgtagcagcttctacaatggaggcatccaacaagctcgcagtcttgctcgtgtggctggtcatggcagctgccactgccgtgcaaccttcctactctgagaattcgcctcaagactacctcagtccccaaaatagcgcccgtgccgccgtcggtgttggcccggtgacctggagcacgaacctgcagcagttcgcagagaagtacgccgcacagagggccggccactgccgtctccagcactccggcgggccctacggggagaacatcttctgggggtccgccggcttcgattgaaatgcagtggacgcagtacgatcgtgggtagacgagacacagtggtataacgacgccaccaagaactgcggcgcgggaaaggtgtgtgccacta

SEQ ID NO: 79012 - DNA, 438 bp, Zea mays
tcgcgtttcgatgcacgcctctacagtgagtcggattcacttcgtgatccttacctgccgcacccaagagcagaaaagcagcgtcgcaaatggagcaggaagcgagcccgagtggaacgagaccttcgtcttcaccgtctccgacgacaccccgcagctccacctcaagatcatggacagcgacctcaccaacgacgatttcgtcggcgaagcaaccatccccctggaggccgtgtttcaggaaggcagccttcccccggcggttcacccggtcgtcaaggaggagaagtactgcggagaggtcaagctcgcgctcaccttcactccagcagcggaaactcgccaccgccctgatgacaacgaggaggggccgccttacagcagctggagttgatctatctgccatgggatgcatgcatcatatatatccaccaagag

SEQ ID NO: 79013 - DNA, 437 bp, Zea mays
tcgccggtcgatacaagcctctagcatgagtcgtcttacctaaactaaagaacagtagtagtccctgtgtacgtctagcaacgatccgcaccgagctcgccagttttgctcgttagtttggggacggcgatggcgtccggtcaggaaagcagggaggagctggcgcgcatggccgaggaggggcagaccgtcgtccccggcggcaccggcggcaagaccctcgaggcgcaggagcacctcgccgaagggcgcagtcacggcgggcagacccggagtgagcagctgggccatgaggggtacagcgagatgggcagcaagggcgggcagacccgcaaatagcagctgggccacgaagggtacagcgagatggggaggaagggcggcctgagcaccatgcaggagtccggcggcgagcgcgccgcccgggaaggcatcga

SEQ ID NO: 79014 - DNA, 400 bp, Zea mays
tcgatacaagcctctaaaatgagccgcatcagctagccccaagtttagtcggccgatcattcactgaagtagtaatggcctccgtcaacagctggaccctcgagatcgcgtcgccggtggctccgcagcgcctgttccgcgccgccgtgatggactggcacaccctggcgcccaaggtcgcctcccacgtcgtcgccagcgcgcagcccgtggagggcgacggcggcgttggcagcgtcaggcagttcaacttcacctcagtcatgccgttcagcttcatgaaggagcgtctcgagttcctggacgcggacaagtgcgagtgcaagaacacgctcatcgagggcggcggcatcggcgtcgccatcgaaacggcgacgtcgcacatcaaggtggagcccgc

SEQ ID NO: 79015 - DNA, 413 bp, Zea mays
cctccgctccgcacacggttccactccaactctccgatctccaggaatccgcggctgaggcgccggcgatggcggctcccatggtcgacgccgaatacctgcgccaggtcgacagggcgcgccgccacctccgcgccctcatctccaacaagggatgcgccccgatcatgctccgcctcgcatggcatgatgctggaacttatgacctgaagacaaaaactggtggtgcaaatggttcgattagatatgaagaagagtacacccatggttcaaatgctggtttaaagattgctatcgatctccttgagcctatcaaagcaaagaatccaaagataacatatgcagacctgtatcagcttgctggagtggttgcagtcgaagtgactggggggccaactgttgaatttattcct

SEQ ID NO: 79016 - DNA, 431 bp, Zea mays
tcgatacaggcctctaggaagttcacaaagagatactagctagtccctaccaaagcatacttcctgaaacactcttgcaatccactgagttctgtttgttgagacgcatagagctagagtcgacaatgtcgctcgtgaggcgcagcaacgtgttcgaccccttctccatggacctctgggaccccttcgacaccatgttccgctccatcgtcccgtcggcgacctccaccaactccgagactgccgccttcgccagcgcccgcatcgactggaaggagacgcccgaggcgcacgtgttcaaggccgacctccccggcgtcaagaaggaagaggtcaaggtcgaggtcgaggacggcaacatgctggtcatcagcgggcagcgcagcagggagaaggaggacaaggacgacaagtggcaccgcgttcagcgc

SEQ ID NO: 79017 - DNA, 426 bp, Zea mays
aggcctctaaaatgaggtatcctattgacctcttcgacaccaggaagaaactgaacaacatcaagctctatgtgcgccgtgtcttcatcatggacaactgtgaggagctgatcccagagtggctgagctttgtcaagggcattgttgactctgaggaccttcccctcaacatctcccgtgagaccctccagcagaacaagatcctcaaggtcatccggaagaacctggtgaagaagtgcattgagctgttctttgagattgctgagaacaaggaggactacaacaagttctatgaggccttctcgaagaacctgaagcttggcatccacgaggactccacgaacaggaacaagattgcggagctgctgaggtatcactccaccaagagcggagatgagctgacaagcctcaaagactatgtgacta

SEQ ID NO: 79018 - DNA, 407 bp, Zea mays
cttacaacactctgacgtgagtcgtattatcagtgagtacagcagcagcagctgagagcgtgcgaagcaggagggaggacaagaagaagccgatggcggttgtgagcggcagcggcgggaagctgaacccctgggcggagcccttcgttccttccggggcgcggtaccgcggcctgcggaccatggaggcgacgccggagcaggaggtggaggacttctcccccgagtggtggcgcctggtgtccgcctccccggccttccgcgaccgctggctgcgcgagtactgcgcgctcggcctactcgacgccgaggacgacctggacgacgacgtcgacagcttcctccccgacgacttcttctcgcccccggccccgcgccacgagagcgagcgggaggacgccgcgggc

SEQ ID NO: 79019 - DNA, 416 bp, Zea mays
cgggtcgatacaagactctagattcactcctcactcaccggttcgggttcgggttcgtgaggttctccggggttcggtttcgtgggtgggcggatcgagatggcggcgtcggatgttgagtaccgctgcttcgtcggcggcctcgcctgggccacggacgaccactccctccacaacgccttcagcacctacggcgaggtcctcgagtccaagatcatcctcgatcgggagacgcagaggtcccgcggcttcggcttcgtcaccttctccacggaggaggcgatgcggaacgccatcgagggcatgaacggcaaggagctggacggccgcaacatcaccgtcaacgaggcccagtcccgcggcggccgtggaggcggcggcggcggctacggtggtggccgtggaggcggcggcta

SEQ ID NO: 79020 - DNA, 431 bp, Zea mays
  unsure (1)..(431): unsure at all n locations
gagtcgtagtacgatctgctaacacanacagcagcagctcctcctcactagctagccttctctatttgtgctactgcaagtggtcaagtctgcgacgacgtccgagatgtcgacggtgagccgtgcatcgcttgaccagaagcttgccctcgccaagcgctgctcccgagaggcgactcttgccggagctaaggcggcagcagtggcgactatcgcctccgcgattcccaccctcgcgagcgtgcggatgctgccgtgggccaaggccaacatcaaccccagcggccaggcgctcatcgtctccacggtggccgggatggcctacttcatcgccgccgacaagaagatcctgtcgctggcgaggcgccactcgttcgaggaagctccggagcacctcaagaacacctccttccagggcaccggacgccccc

SEQ ID NO: 79021 - DNA, 424 bp, Zea mays
aggccggtggccgggagttccagctctacaaatcgggtgtcttcagcggaagctgcaccacgaaccttgaccatggtgtcgtcgcggtcggctacggcgccgagaacgggaaggactactggatcgtccgcaactcgtggggcccgaagtggggcgaggctggttacatccgtatggagaggaacgtcaacgccagcactgggaagtgcgggatcgcgatgatggcgtcctacccgacgaagaagggcgcgaaccctcccaggccgtctccaaccccgccgacaccgccggctgcccctgacaatgtctgcgacgagaacttctcgtgctccgcgggcagcacctgctgctgcgcgtttggcttcaggaacgtctgcttggtctggggctgctgcccggtcgaaggcgccacctgctgcaagga

SEQ ID NO: 79022 - DNA, 442 bp, Zea mays
ctctacactaaatccgttgcagagaataacgatcagggagatcaggaaccacccctggttcctgaagaacctgcccagagagctcacggaggctgcgcaggccatgtactacaagaaagacaacagcgccccgacctactccgtccagtccgtggaggagatcatgaagatcgtggagaaggcgcggacgccgcctccttcctccacccccgtggctggcttcggttgggcggaggaggacgagcaggaggacagcaaggaaccagacgaggaacacgaggacggcgaggacgagtacgagaagcaggtgaagcaagtccacgccagcggggagtttcatctcagctgctgagggttttcgccggcctgctagtctgtggtaccagccgatgatggacctgctagtctgtggtcttgttttcaagttttctttcattttttt

SEQ ID NO: 79023 - DNA, 425 bp, Zea mays
ttaggttctaccaggagaccttcggcgtccctccggccacgcgagctcgccgaaatggtcgcccacaggttccatcagtaccaggtggtgggtcgcgcgctgccgaccccaaccgatgagcaccccaagatctaccgcatgaagctctgggccaccaacgaggttcgcgccaagtccaagttctggtacttcctgagaaagctcaagaaggtgaagaagagcaatggccagatgcttgccatcaacgagatctttgagcgcaacccgaccaccatcaagaactatggcatctggctgcgctaccagagcaggactggttaccacaacatgtacaaggagtaccgcgacaccaccctgaacggcgcagtggagcagatgtacaacgagatggcctcccgccaacgcgtgagggtcccctgcataca

SEQ ID NO: 79024 - DNA, 384 bp, Zea mays
atctggttggaaggtttggagaaactccccggctcgaggagatcgtgacattgagaggacgatgggagggcgcgcgctcctcctcctcctcctggtctcggcgttggtctttcagatccacgcctccgacccgctgctgtacgagccgttcgatgaggactttgaggggagatgggtcgtctccaagaaggatgaataccaaggtgtgtggaggcatgccaagagtgatggtcatgaggactatggcctccttgttagtgagaaggcaaggaaatacgccataatcaaggagcttgatgagccagttaccttgaaggatgggacagtggtcctgcagtttgaagtgagacttcagaatggccttgaatgcggaggtgcctacat

SEQ ID NO: 79025 - DNA, 426 bp, Zea mays
tcgatacaagcctctagactgggtcgtatcaactccaatccaatcctggggcgggcgactgcctccttccctcgatctattctccatcttgtcctccctttgctaaaaataacgaggcagaggcatcttcgatttgacgtgcgcttcctcttcctcgctcgctctcggtcgcagtgatggctgatgtcgacgagtaccgttgcttcattgggaacctgtcctggtcaacgactgatgaaagcctcaaggatgcgttcagcaaattcggcaacctcactgaggcaaaggtggttcttgacaaattttcaggacgttctcgtggtttcggctttgtaacttttgatgagaagcaagccatggaggatgctattgagggaatgaatggactggacttggaccggaagaacatcactgttgaataagctc

SEQ ID NO: 79026 - DNA, 400 bp, Zea mays
tacaagcctctaaacagacgtcctgaggatcctatctggtataggacggagctgagcttctagcaacgtacagtgtatccgccatgagtcctttcggggcggtgatcacgccagaaaccctcaagtacatgtccaagtaccagggacgtgagatcacgcaggtggactgcgcacgggaggcgatgaggctgatccacgcggaagacaagaacctcaaggccgaggactcagcgtgggagctgaagaagaagttcggcaacggcgtgagcaccatggtcctcgtctacaacgccaccggggccagcctgagcctggtggacgacgggaaagactggatgggctccgtctacagctcgccgattccggacaccttccacaacgggcagtggatcgccttcct

SEQ ID NO: 79027 - DNA, 401 bp, Zea mays
ctcgctagtcgacacaagcctctagagacattcgcattagaccaaccccgtcgatccggctgcggcccggcgtgctagatcgctaccgatcatggtggtggaggagatcgccgagggggtgaagaacctcaccgttaccggagacgcggcggcttcaggcggagaggggcagaggaggggcggcggcggcagcagcaaccgcatccaggtgtccaacaccaagaaacccctcttcttctacgtcaacctcgccaagaggtatatgcaacagcacgaagatgtagagctatccgctcttggaatggccatagcaacagttgtgaccgtggcagaaattctgaagaacaatggatttgctgttgaaaagaaaattaggacctctactgttgaaataaacgacg

SEQ ID NO: 79028 - DNA, 428 bp, Zea mays
aaaagcttgctgatgaacgacttctacgcgggtgaaggcacggaccacagcggcgttccaacaaaattggtcacaacaaactgttctctgcacatagctgtctacaaccctgccacaatgtttggaattcatgtcacttctggccccatccacctgatgtattcagagatcccaatagcagtcggtcaggttcggaggtattaccaaccgaggaagagccaccggatggtgacggcggtcatccacggcgagaaggtgccgctgtacggcgccgggggcagcctgatgctgtcgacgagcacgggcggggcggtgcccctgacgctggacttggacctgacctcgcggggctacgtgatcggcaagctcgtgcgggtgacgcacaaggtgcacgtgacgtgccccgtcgtcgtggacgccaagaagac

SEQ ID NO: 79029 - DNA, 440 bp, Zea mays
attaatctcactggacgatctgctaacacaaacagcagcagctcctcctcactagctagccttctctatttttgctactgcaagtgtccaagtctgcgacgacgtccgagatgtcgacggtgagccgtgcatcccttgaccagaagcttgccctcgccaagcgctgctcccgagaggcgactcttgccggagctaaggcggcagcagtggcgactatcgcctccgcgattcccaccctcgcgagcgtgcggatgctgccgtgggccaaggccaacatcaaccccaccgggcaggcgctcatcgtctccacggtggccgggatggcctacttcatcgccgccgacaagaagatcctgtctctggcgatgcgccactcgttcgaggaagctccggagcacctcaagaacacctcctttcacggcaccggacgcccccatccg

SEQ ID NO: 79030 - DNA, 426 bp, Zea mays
  unsure (1)..(426): unsure at all n locations
atcactaatggagaagtggcagatttgccactggaattcccagatggtacaacccctgttacttgtcgggtttgtatatatgatagctcgacagatagcaaggttggggttggatctttgatggacaaagcaatggtacctgcactgcctgcaggcagcctgtatatggaggaggtgcacgcgaagcttggtgaagaactttggttcacaataggggggcaacatattccttttggtgcatcaccacaggatgtctggactgacttgggtcgtccttgtggtatccatcagaagcaggtggaccaaatggtcatacactccgcatcagaagccaggcctcggacgaccctttgtggagattacttttacaactacttctcgcgtggaattgatatcttatttaatggacagacacatangataaag

SEQ ID NO: 79031 - DNA, 426 bp, Zea mays
atccgcacctctctccatctccctgctcctccgccttcttcttgatccagccaagccagggatcgccatgtcggactcggaggagcaccacttcgaatcgaaggccgacgccggagcgtccaagacctacccgcagcaggctggcaccgtccgtaagaacggcttcatcgtcatcaagaaccgcccctgcaaggttgtggaggtttctacctcaaagactggtaagcatggtcatgccaaatgccactttgttgccatagatatattcaacgggaaaaagctcgaagatattgttccttcgtcacacaactgtgatattccgcatgtgaaccgtactgagtatcagctgattgatatatcagaggatggatttgtgagccttcttacttcagatggcaacactaaggatgaatctagactcccaac

SEQ ID NO: 79032 - DNA, 451 bp, Zea mays
gatacacgcatctacacacactctcctcaagctcagggtccggcggcgaagggaaggcaagatgtacaccgcgaggaagaagatccagaaggagaagggtcttgagccctccgagttcgaggactccgttgcccaggctttctttgatctggagaacgggaaccaggagctcaagagcgacctcaaggacctgtacatcaacaatgctatccagatggatgttaccgggagtaggaaggctgttgtcattcacgtcccataccgcctgcgcaaggccttcaggaagatccatgtcagactcgtcagggagctggagaagaaattcagcggcaaggatgtggtaattgttgctacacggaggattgtgaggccacccaagaagggttcagctgttctgcgccctcgcaccaggactctgactgctgttcacgatggcatcttggaggatgtt

SEQ ID NO: 79033 - DNA, 415 bp, Zea mays
tcgatacaagcctctagattcagtcagattattcagagagtgcagcggagcattttgcactctgacattcaatcgaaggcagacaagactcctgttacagttgcggattatggatcacaggtactggtatgtctggtcctgaagaaggaattgccttctcactctttctcaatcatagctgaagaggattcaaaagacttgagagaagatggtgcccaagaaattatagaacacattaccaccctcattaatgaaaccatcgtaaatgatggttcatacaacatgtcgttatctaaggaagatgtgctttctgcaattgatggtggtaaatctgagggaggtccatctgggcgacattggatattagacccaatagatggcactaaagggttctgcaaaactaagcctgccaaat

SEQ ID NO: 79034 - DNA, 337 bp, Zea mays
aagccgcacggcttccggaaggtcgatccggaccggtgggagttcgcgcacgtgtccttccttcgcggccagacgcatctcctgggccagatcgtccgccggagcagcggcggcaagcgcaaagacgacggcaacggcgccggcgccggctccgccgacgacgaggacgcggtggccatggaggtggtccggctgaggcgggagcagcgggccatcgaggagcaggtggccgcgatgtggcgccgcgtgcaagagacggagcgccggcccaagcagatgctcgcgttcctcgtcaaggtcgcgggcgacccgcaggtgctgcgccgcctcgtctcca

SEQ ID NO: 79035 - DNA, 407 bp, Zea mays
taccattgctcatggtatggcgtttggcacgggtagtgccatggcacacagggctgttgatgctgtattaggtccccggaccattcagcatgagactgttgcctcagaagctgctgctgctgcccctgcccctccagtgatgaatgctgatgcttgcagcatccattctaaggctttccaagattgtctcaacaactatggcagcgagatcagcaattgccagttctacctagacatgctgaacgagtgccgccgtggtggtgtgtctgcctaagctgcctctgggattattcatggattttctttcggtgatgttatctcattaataagataccgtgaaacttttgtctccacagcttgaagctaaacttcctgggattaatacattttgttatcctatgctgttg

SEQ ID NO: 79036 - DNA, 407 bp, Zea mays
aaagcaacatcgcatcagcacaagcaagaaccacacctcctcccttcgcctgtgatcatgtcgtcttgctgcggcggcaagtgcgggtgcggctccagctgctcctgcggcagcggatgcaacggctgcggtatgtaccctgacgtggagaccgccgccaccagcagcgtcaagaccacggtcctcgccgcgccgaccaccaaggccagcgccggcggcttcgaggcggccaccgatggcggcggctgcgactgcaacacctgcaagtgcggcaccagctgcggctgctcctgctgcagctgcaactgagctggcccggcccggcgatggcgcacgagagtcgagaggacgacgacgacgacgacgcgtataaatataatagcggcgtccagtaaataagatcctgt

SEQ ID NO: 79037 - DNA, 427 bp, Zea mays
tcgcgggtcgacacaagcctctacaatacatcataccaagcaacaattgagcgatcgatccttcgcctctctctcactctctctcagcaatctatccgcaacaactaagcattcgattctccgacaacaacaagcagggcaatggcgtctgcggacgtgcacatggctggcggtgcggagacggagaccttcgcattccaggccgagatcaaccagctgctctccctcatcatcaataccttctactcgaacaaggagatcttcctcagagagctcatctccaacgcatcggatgcgcttgacaagatccgcttcgagagcctgacggacaagtcgaagctggacgcgcagccggagctcttcatccggctcgtctcggacaaggccagcaagacgctgtccatcatcgactccggcgtgggcatga

SEQ ID NO: 79038 - DNA, 405 bp, Zea mays
agccgccgtcgccgcagccgtgacggaaggaagaggaggagcaaggagcacgacgcgatgggccactccaacgtgtggaactcgcaccctaagaactacggccctggctcccgcgtctgccgggtctgcgcgaaccctcacggtctgatcaggaagtacgggctcatgtgctgcaggcagtgcttccgcagcaacgccaaggacattggtttcatcaagtaccgttgaagaggccactgtgctgctgtggagaacttcctacatcaaagaaatgggtccttcattagaaggcctaatttatgcgctttagctttttgttcagaacttgagactcatgtgttaaactcgacttgttaaagttttgatggctactttgtgcttgttggaccagctataatcagaaga

SEQ ID NO: 79039 - DNA, 430 bp, Zea mays
ctcgcgggccgacccacgcctctaaggtaagtaataagagagctgctgaaagttccgtgctgaaaactcctctatctgataagaaagcaaaggttgccacaccgtcatctcagaagacaggtggcaagaagggcgccgcggtccatgtggcaactccacacccagcaaaaggcaagaccattgtaaacaatgacaaatcggtcaagtctccaaaatctgcgccaaaatctggtggctcggtcccttgcaaatcgtgcagcaagtcattcatcagtgagacggcacttcaggctcactcgaaggcgaagcatgggggcaagtgagtcgcaggtccaatagagtccgcaacaaatgcgaaacatgggagaggagggtaagcgagagtctcgaaagagtgtcggtggaagtaggcctaaccttattttgttta

SEQ ID NO: 79040 - DNA, 412 bp, Zea mays
ctctacactgagtcgtcatcatctcgcgtatcctaccaggagggtgggagacccagggagcggaggtgtgcgaagctcgcctcgcaccacgcgctgcggcctgcggggcgagagatcggggcctgagctagggtctggtggcggagatgtcgacgccggcgaggaagcgcctgatgcgggacttcaagcgcctgcagcaggacccgcccgccggcatcagcggcgcgccgtacgacaacaatatcatgctctggaacgccgtcatattcgggccggatgacacgccgtgggatggaggcacgttcaagctgactctgcaatgtacagaagattaccccaacaaacctccaactgttcggtttgtttcgatgatgtttcatccagacatctatgcggatggaagcctcggttt

SEQ ID NO: 79041 - DNA, 282 bp, Zea mays
acacacgcatctaaaatcagtctctatatggtgctccgtctcaggggtggtatgcagatctttgtgaagacactcactggcaagacaatcacccttgaagtggagtcttcggataccattgacaatgttcaggccaagattcaggaccaggaagggatcccaacccaacaacaaggcctaaacctcgccgggcacccatctaaaagaggcgcgcaccctggcagattacaagacccagagggagaacactctaccccgggcgctcccccacaggtgtgacat

SEQ ID NO: 79042 - DNA, 421 bp, Zea mays
acgggccgacacacgcgtccaccaaaaattccgaggttttcacctcttggagcgcaccaacaccacccggagaccggagcgactcgccaccggcgcggaaaaggagggcggaggctcgatggcggatgagaatcaggctggaaagaaagaggaggaggaatttagcacaggccctctgtcagtcctaatgatgagtgttaagaacaacacccaggtcctcatcaattgccgcaacaacaagaagctgcttggccgtgttcgtgcttttgatcgccactgtaacatggtgctcgagaacgtgcgtgagatgtggacagagatccccaagactggcaagggcaaaaagaaggctctgcctgtgaacaaggatagattcatcagtaagatgttcctcaagggcgactcggtcatcatagtgctg

SEQ ID NO: 79043 - DNA, 374 bp, Zea mays
caattccctagaatgagtcgtctcacttactacttttcttggttcatccatggtataggatgtgactgtcagcctgggccctaacggcgagctccggtacccaccatacccgccggggaaccagggcgccgatggctacgccggcatcggcgagttacagtgctacgacaagtacatgctggcccggctgaagcggcacgccgagttgtcggggcagccactgtggggcctgtcaggcccacacgacgggccgcggtacgacgagtcgccggagacgtccgccttctttacggagccggggggctcgtggaactcggcctacggcgagttcttcctgtcctggtactccggggagctgctgggcgcacggcgac

SEQ ID NO: 79044 - DNA, 429 bp, Zea mays
ctcgcgggccgacccacgcctctacccacacgtctggaacggctccgctaccggcggcggagccggcaacggggcgggcgccgcgtcgaacggaggaggtgttgagaggaggctgaggtcctcggctgcgcccgcgtcgtgggcagcccagcttcccctggaggtgggcacacgcgtgatgtgccggtggcgcgaccagaagctccaccctgtcaaggtcatcgagcgccgcaagggctccgcttcctcttcccccgctgactacgagtactacgtccattacaccgagttcaatagaagacttgacgagtgggttaagcttgagcagcttgatcttgctactgtcgagaccgatgttgatgagaaagtcgaagataaggcaacaagcttaaagatgacacggcaccagaagcgtaaaattgatgaaac

SEQ ID NO: 79045 - DNA, 391 bp, Zea mays
tatccaaacgtaagcaaaccagtccggcaaagccttcgcctccgctccccagtcccacccgcaccctagccctcagcaaaccctaaccgctcgtcgccatgaaggacacctcgttcaaggccaccggcgccaagcgcaagaaggtcggcggcgccaagcgcgggctcacccccttcttcgcgtttttggctgagtttaggccgcagtacctggagaagcaccctgagctcaagggcgtagaggaggtgagcaaggccgctggggagaagtggcgctctatgtcggatgaggagaaggccaagtatggcggtagcaagaatcatgatggcaaagcaagcaagaaggagaacactagctccaagaaggccaaagctgatgttccggagggaga

SEQ ID NO: 79046 - DNA, 413 bp, Zea mays
agcgccgtggctggaacgcgaaggaggacgaggaggcgctgcacctgagggtggacatgccgggcctggggaaggagcacgtcaaggtgtgggcggagcagaacagcctggtgatcaagggcgagggcgagaaggaggatagcgaggacgaggccgccccgcctccgagatacagcggtcgcatcgagctcgcgccagaggtttacaggatggacaagatcaaggcggagatgaagaacggcgtgctcaaggtggtcgtgccgaaggtgaaggagcagcagcgcaaggacgtgttccaagtcaacgtcgagtagatgtttccaaatagaagcaagtgccggtacgggatggaggattggagcctggaggggcactgccaaactaagattcctctctctcaatctgatctggat

SEQ ID NO: 79047 - DNA, 401 bp, Zea mays
agagcagcgatccgaagctcaatcaattcactcaaacctcttccccaaatcttcgattagattctcgttgacaagaagactagaaccgaacctgaccatgtcgctgatccgccgcagcaacgtgttcgatcccttctccctcgacctctgggacccctttgagggcttccccttcggctccggcagcagcagcagtctcttcccctcgttcccgcggaccagctcggagaccgcggccttcgctggcgcgcggatcgactggaaggagactccagaggcgcacgtgttcaaggccgacgtaccggggctgaagaaggaggaggtcaaggtggaggtcgaggacggcaacgtccttcagatcagcggcgaacgcaacaaggagcaggaggagaagacggaca

SEQ ID NO: 79048 - DNA, 428 bp, Zea mays
acgccggcgacgagcactccaccagacgagaggggattccaagatgccgagggccaccagcgacgcgaagctcctgatccagtccctcggcaaggcgtacgctgccacaccaacaaatctcaagattattgacctctacgtgggttttgcggttgccactgcccttattcaggttgcttacatgggattggttgggtcgtttcccttcaactccttcctctcaggagttctttcatgcataggaactgcagttcttgctgtttgcctccgcattcaagtgaacaaagacaacaaagaattcaaggaccttcccccagaaagggcctttgctgattttgtcctatgcaatctggtgctccacctggtgatcatgaatttcctcggataagcaactgctgcaccatgttggttaaaggttttgtagcccc

SEQ ID NO: 79049 - DNA, 401 bp, Zea mays
  unsure (1)..(401): unsure at all n locations
acaacacactatcgagaaccaaggttttataccaaggtatttaaagagggccattcatttgatcaagatggaggttcgtttgaactttctctagtgacctgtaaatgtattggggcttatgtcaaaaacaagaagaatcaaaaccagatatgctggttatgggaaaaggtaaaatcaacagaagacagagattttcaaagattcctggacaacgtgcaatacaaaacaagtgggatattacgttatgagcgtgtctttggtgaaggttttgtgagcactggtggaatcgagactacaaaggaatttgtgggcatgctcgatcttaaaccgggccagaaagtacttgatgtcngatgtggaattggaggcggcgacttttacatggctgcaaactatgatgt

SEQ ID NO: 79050 - DNA, 405 bp, Zea mays
accaacgcgtccggggttttgctgctctccgaccccgagctccgaaggccgcagcatcaggcgcggcccccctcgcgtgtgaccgagatggcgctgccgaatcaggggaccgttgattaccccagcttcaagctcgtcatcgtcggcgatggtggaactggtaaaactacatttgtgaagaggcatctcactggagagtttgagaagaaatatgaaccaaccattggtgtggaagttcatccgttggatttcaccactaactgtggtaagatcaggttctactgctgggataccgcagggcaagagaagtttggtggcctcagggatggatactatatccatggccagtgtgcgatcatcatgtttgatgtaacctcaaggcttacttacaagaatgttcctacg

SEQ ID NO: 79051 - DNA, 408 bp, Zea mays
atcacacatctggacaacaggcagcttctgatcaaatcaaaccccggcgaagttgttaaacctgaccaattcaaggcgataaacgacgaggggatgcctatttaccagaggcccttcatgaaggggaagctctacattcatttcacagtggagttccccgactcgctggcgccagagcagtgcaaggctctcgagtcggtacttccgccaaagccttcgtccaagctgacagacatggagatcgatgaatgcgaggagacgaccatgcatgatgtgaacaacatcgaggaagagatgcgcaggaagcaggctcatgctgctcaggaggcctacgaggaggatgacgagatgcctggcggagcccaaagagtgcagtgcgctcaacagtaagcagactaccataatggg

SEQ ID NO: 79052 - DNA, 403 bp, Zea mays
agtcatatcaagccacagtatgcatcttggtgttcttgcaacagcatggcatgcagtgaacactgggagtatgttcactgtctactacaaaccaaggactagtccagctgaatttgtggtctcgcgagctaggtactgtgaatcactgaaacgaaattattcaatagggatgaggtttaggatgagatttgaaggtgaagaagcggcagagcaaagattcactggcacaatagttggaatatgtgtttctgatccatctggctgggctgactcaaaatggcgttcccttaaggtgagatgggatgaagcttcttctgttcctcgtcctgaaagagtttctccttggcaaatagaacctgctgttagcccatctcctgtgaaccctcttccagtcagattcaag

SEQ ID NO: 79053 - DNA, 386 bp, Zea mays
atcttaccaagtcctcctcgggttagggttccttagggttttgtggaggggcaatggcggcggctgatgtggagtaccgttgcttcgtcagcgggcttgcctgggccaccagcaacgattcgctggagaatgccttcgcctcctacggcgagatcctcgactccaaggtcatcaccgaccgggagacggggaggtctcgcggcttcggcttcgttaccttctcctccgagaactccatgctcgacgctatcgagaacatgaacggcaaggagctcgactgccgtaacatcaccgttaaccaggcccagtcccgtggcggtggccgtggcggcggtggctacggccgctgtcgcagccgccgctgctatggtggcgggcgccgtgac

SEQ ID NO: 79054 - DNA, 434 bp, Zea mays
acactccctgacatcgagaccggctgcccgaccccggtccggcgatccctctgcacccctttctttgcgctgccagccccaatctctcgcatccctgtcaaccatggcggcgtcagcaggcggaggcgcggtgcgcgcgctgtcccagaaggagcaggacatacagatgatgctcgcggccgacgtccacctcggcaccaagaactgcgatttccagatggagcggtatgtctttaagcgtcgcaccgacggcatctacatcatcaacctgggcaagacatgggataagctccagctcgcggcgagggttattgttgccattgagaacccacaagacatcatcgtccagtcggcccgcccctacggccagcgtgctgtcctcaagttcgcgcagtacactggcgcccatggcatcgctgggaggcaaaccctgg

SEQ ID NO: 79055 - DNA, 381 bp, Zea mays
gataaaaccctagctcgtaccgggcagcacgctgttatttggggatgtaaagttcttgagagtagacggaggagtctaatcaagacacatcaaggtgacacagcactgcgcaggtgtacgcatgaaccgcatgcaccagtagtcttgtagctaggcgaaggagaacttaaagagcatgtcatggctatacaccttgcccggcctcacgatctgcgacgggaagctcgggtggttgacggcatcggggaacccctgcgtctcgaggcacagcgcggcgtaccgccggtacacgctaccgcccttgcccctgacgccagcgagcccgttgctggtgtagaactgcaccccgggctggtccgcccacagctccatggcccgccc

SEQ ID NO: 79056 - DNA, 363 bp, Zea mays
atattgtgaagcctgattctttcaaggcgatcaacgacgaaggcatgcccatgtaccagaggccgttcatgaagggcaagctgtacatccacttctcggtggagttcccagactcgctaagcccggagcagtgcaaggccctggaggctgtgctcccgcccaagccggtgtcgcagtacaccgacatggagctggacgagtgcgaggagacgatgccctatgacgtgaacatcgaagcggagatgcggaggcggcagcagcagcaccaggaggcctacgacgaggatgaggacatgccgggcggcgcgcagagggtgcagtgcgcccagcagtaggcagcagcttggtagcagtgataaaata

SEQ ID NO: 79057 - DNA, 436 bp, Zea mays
  unsure (1)..(436): unsure at all n locations
accggtctagtattcccgggcccgcaaggacgacgtgatccccaccttccgctccaacttctcctcgctcctcgccaccgtggaggcggagctggccaagggcggcaaggccgagttcaacaagctcaacgacgtcacctccttcgacttcatcggcgaggcctacttcggcgtgcgcccctcggcgaccgagctcggcaagggcgggccgagcaaggcggccaagtggctcatctggcagctccacccgctggtcacgctcggcctccccatggtcctggaggagccgctgctccacacgttccacctcccgcctttcctcgtcaagggcgactacagggcgctgtacaagtacttctccacggtggcgaagcaggcgctggacaccgccgagggcctgngcctgtcgcgcgaagaggcctgccacaacctcctc

SEQ ID NO: 79058 - DNA, 406 bp, Zea mays
agcagcctccaaagccactcccaaacccccgcttccagaaccttctcgaagctccccgccgcctcctccactcgcaccgatggcgaaggaaccaatgcgcgtgctcgtcactggcgccgcaggacaaattggatatgccctggttcccatgattgctaggggtgttatgcttggtgcagaccagcctgttattctgcacatgcttgacattccgccagcagctgaagcccttaatggtgttaagatggagttggttgatgctgcgtttcctcttctgaagggagttgttgctacaactgatgttgtggaagcctgcactggggtcaatgtggccgtcatggttggtggattcaccaggaaggagggaatggaaaggaaagatgttatgtcgaaaaatgtttcaatc

SEQ ID NO: 79059 - DNA, 402 bp, Zea mays
agcaacagccaagtgcaagtgatcgagctcccccctcctcatcagtcgctaggcacagcgcacttgcaggatggcgcaggtctctaagacgcttctccttgtggccctggtgttcgtgtcgtcggcggcggtggagctgtgccgcgcgatcgacttcgacgagcgggacctggcgtcggacgaggcgctgtgggacctgtacgagcggtggcagacgcaccaccgggtgcaccggcaccacggcgagaagggccggcggttcgggacgttcaaggagaacgtgcgcttcatccacgcgcacaacaagcgcggcgaccggccctaccgcctccgcctgaaccggttcggcgacatggggcgggaggagttccggtccacgttcgccgactcccgcatcaacga

SEQ ID NO: 79060 - DNA, 417 bp, Zea mays
ctcgcgggccgacacacgcctctacggtcactcgggccaattctccgtggacctcttcgaccccttcgacagcgtgttccgctccatcgtgccgtcgtcgtcgtcggcggcggcggcctccgagaccgccgccttcgccagcgcccgcatcgactggaaggagacgcccgaggcgcacgtgttcaaggccgacctccccggcgtgaagaaggaggaggtgaaggtggaggtggaggacggcaacgtgctgctcatcagcgggcagcgcagcagggagaaggaggacaagggcgacaagtggcaccgcgtggagcgcagcagcggccagttcgtgcggcgcttccgcctccccgagaacgccaagaccgaggaggtgagggccgcgctggagaacggcgtgctcacggtcaccgtgcc

SEQ ID NO: 79061 - DNA, 430 bp, Zea mays
gcccgggtcgatacacgactctacatcgcgtcctaggatgccctgctcatactgcttgccctcgccgtatcgtccacccgcaacgcacaggaggattccatggccgacaacaccgggacgttggcgggcggcatcaaggacgtgccggggaacgagaacgaccttcacctccaggaactcgcccgcttcgccgtcgatgagcacaacaagaaggccaatgctcttctggggttcgagaagcttgtgaaggccaagacacaagtggttgctggcacgatgtactatctcactattgaagtgaaggatggcgaagtgaagaagctctacgaagctaaggtctgggagaagccatgggagaacttcaaggagctgcaggaattcaagcctgttgaagagggtgctagcgcctaaggatctctccttctccatg

SEQ ID NO: 79062 - DNA, 432 bp, Zea mays
  unsure (1)..(432): unsure at all n locations
aggggacatgcctgcgacaacaggaagcggatgcttcgaatgcaacatctgccttgattttgcatcagaaccagtggttactttctgtggtcatctctactgctggccttgtatctacgagtggctgcgccctggggtggagtcagctgccagcgacaacagcagttcggcaaggcggcaatgtcctgtatgcaaggcaacactctcaacggacacccttgtgccactatacggccgtggaggcaactcaaagaagtcacttgatggcatggccatcncgcgccgccccatggtacaccgggagactgttgangagcaacagaatgcacagagcaatgtcaatgaccagcactaccaacagagcatggaagacaactctcagcgccagccattgctgcaagcgcaccancatcccattcccactgggtttga

SEQ ID NO: 79063 - DNA, 402 bp, Zea mays
acggacgcgtggggcgccggtcgtgtctgccgcggcggccctttctccgcctcccccgccgctggcgccgccgcggggcggccgttcccgccgctcaccgcgtcctcctcatctccttcatcggccccttctgagacagcgtccacgtcggtcaccaagacggtgaacggctcccaccacttcaagatcgcgggctactccctctccaaggggatcggcgtggggaagttcatcgcctccgagtccttcaacgtggggggattcgactgggcgatctacttctaccccgacgggaagagcggcgaggatggcgctgcctacgtctcgctcttcatagccctggccagcgaaggcaccgatgtgcgcgcgctgttcgagctcacgctcgtcgaccagagcggc

SEQ ID NO: 79064 - DNA, 412 bp, Zea mays
atcagcaggattcaggacgcggcgaggccaccatgagcactctcaagttctgccgggaatgcaacaacatgctgtacccgcgggaggacaaggagacgcgcaccctcctgtacgcgtgccaaacgtgcgagcatgaggagattgccactgatacttgtgtgtacaaaagggttatccgtaagcctggtggtgagcccaaagatgtcctgaaggatgcagcaactgatcctagcctgcctcgcaccagaagcgtcagatgttacaactgcaaccatccagaagctgccttttttcaggccccgactaagggagaacaagccatgacgctgtacttcatctgctgcaacccaagctgcgggcacaggtggagggactgagaaggatctggcttggtcttcgctgcaaacctgcc

SEQ ID NO: 79065 - DNA, 394 bp, Zea mays
taggataagcaggagatatgctgggtttcctcggttgtttgtccccgcgcacaggaaagtgttcgtcctcatggagccgccgcagccgaagtcgggcctcatcgtgggcatcaacatgggccatgtcgtcaccaagcgcgagctgcctctgcgcccgtccgagcgcacggggaaagcaacgaagagggtgtccatggtcatgggcctgatcacagaggttgctggctttgctccttatgagaagcgtatcatcgagcttctgaaggttggcaacgacaagcgcgctctgaagcttgccattagaaagcttgggactcacaagagggcaaagaaggagatataggacattcatgggcgtcatcaggtagatgagatcggctggtaaccacactga

SEQ ID NO: 79066 - DNA, 401 bp, Zea mays
acccacgcgtccgctacctccccggcgtcgcgcccaatgacttcgagaagaaagatccacttcctgtgaaagtcaacaagctgacctcaatcaagacacaacttccctactcctactattctctcccattctgcaagccggataccatagttgacagtgcagaaaatctcggtgaagttcttcgtggagatcgcattgaaaactctccctatacgtttgaaatgagggagcctcagatgtgtcaagtagtctgcaagatatctgttggggagaaagaagcaaagcttctcaaggagaagattgaagatgaataccgtgttaacatgattcttgacaacctacctttagtcgttcctattcaaagagtggatcaagaaggtgcatatttctatcaacatgga

SEQ ID NO: 79067 - DNA, 407 bp, Zea mays
accacagcagcacaagcaagaaccacacctcctcccttcgcctgtgatcatgtcgtcttgctgcggcggcaagtgcgggtgcggctccagctgctcctgcggcagcggatgcaacggctgcggtatgtaccctgacgtggagaccgccgccaccagcagcgtcaagaccacggtcctcgccgcgccgaccaccaaggccagcgccggcggcttcgaggcggccaccgagggcggcggctgcgactgcaacacctgcaagtgcggcaccagctgcggctgctcctgctgcagctgcaactgagctggcccggcccggcgatggcgcacgagagtcgagaggaggaggacgacgacgaggcgtataaatataatagcggcgtccagtaaataagatcctgtcaactgca

SEQ ID NO: 79068 - DNA, 407 bp, Zea mays
acgctcctgagtcctgtccaccctgccaccgccgacgccgcgccgccgcagcaattgtcaccgtcgctatggcccgtatcaaggtgcacgagctccgggggaagagcaagacggacctgcaggcgcagctcaaggagctgaagtctgagctctccctcctccgcgtagccaaggtcaccggcggcgcacccaacaagctctccaagatcaaggtggtgcgcacctcgatcgcgcgcgtgctcacagtgatctcgcagaagcagaagtcggcgttgcgggaggcgtacaagaagaagaacctgctccccctcgacctccgccctaagaagacccgtgccatccgccgccgtctgaccaagcaccagctctctctgaagaccgagagggaaaagaagcgtgagaagtac

SEQ ID NO: 79069 - DNA, 396 bp, Zea mays
  unsure (1)..(396): unsure at all n locations
cataatacgctcgtgaagatgatgatctggaatcacttgagcgagatgttaatgaagaatccgggtggaagcttgtccatggtgatgtgttccggcctcctcgtggccaggtgtttctttctgccctagttggtattggcactcagctggcggctcttatcctgcttgtgattgtgttggccattgttgtcatgttatatgttgggcgaggggctatcatcacaaccttcattgtgtgctacgctcttacatctttcatctctggatatgttagtggtggtctctattcaaggaatggtggaaaaaactggataaaggctatgatccttacagcatcactttttccattcttgtgtntctcgattggattgttgttaaacactattgctatcttct

SEQ ID NO: 79070 - DNA, 402 bp, Zea mays
aaactgcagcttgcagcgagggttatcgttgccatcgagaacccgcaggacatcatcgtccagtccgcccgcccctatggccagcgtgctgtcctcaagttcgctcagtacactggcgctcatgccatcgctgggaggcacacccctggtaccttcactaaccagctccagacctccttcagcgagcctcggctgctcatccttaccgacccaaggactgaccatcagccaattaaggagtctgctctggggaacatccccaccattgccttctgtgatactgactctcccatgcggtatgtcgatatcggcatcccagcgaacaacaaggggaggaacagcattggatgcctgttctggcttttggccaggatggttctgcagatgaggggcactatcctc

SEQ ID NO: 79071 - DNA, 415 bp, Zea mays
  unsure (1)..(415): unsure at all n locations
atacgaagggcattgaaccttggtgttagtgtaaaaatgatcacaggtgatcagctagcaattgggaaggaaacaggacgtcgcttaggcatgggtactaacatgtacccttcctctgctttgctgggacagaataaggatgagtctattgctgctttacctgttgacgatttaattgagaaagcggatggttttgctggcgtattccctgagcacaaatatgagattgtaaaacgtttgcaagcacgaaaacacatttgtgggatgactggtgatggagtaaatgatgcncctgccctaaagaaagctgatattggtatagcagttgctgatgccactgatgcagccaggagtgcttctgacattgtcctgacagaacctggcttgagtgtgataattagtgccgtttcttaac

SEQ ID NO: 79072 - DNA, 433 bp, Zea mays
cacgcgtccaaaaaatctgttccaatggaaactgatgcaaaggttgagccatcgaaaaggaaaattaagaaaacttctgttccgatccatgagttggtctacggcgcattgtctgccactgacctgcagaaggctgtagagaaagagtatgagatggctctgcaggacagagtaatggaagagaccaaagaaaagaaaaatgctgtggaagcttatgtctatgacatgcgtaacaagctgtacgacaagtataacgattttgtcacacccgaggagaaggaagggttgattgcaaagcttcaagaggttgaagattggctgtatgaagatggtgaggatgagacaaagggagtatatatttctaaactggaagagcttaaaaagattggcgatccaattgaggcacggcacaaggagtggacggaaaggggtt

SEQ ID NO: 79073 - DNA, 360 bp, Zea mays
aaggaaactgatgcaaaggttgagccatcgacgacgaaaattaagaaaacttctgttccgatccatgagttggtctacggcgcattgtctgccagtgacctgcataaagctgtagataaacagtatgagatggctctgcaggatagagtaatggaagagaccaaggaaaagaagaatgctgtggaatcttatgtctatgacatgcgtaacaagctgtacgacaagtataacgattttgtcacacccgaggagaaggaagggttgactgcgaagcttcaagaggttaaacattggctgtatgaagatggtgaggatgacacaaagggagtatatagttctaaactggaagagcttagaaag

SEQ ID NO: 79074 - DNA, 426 bp, Zea mays
gccgacacacgcgtctacagaatttcatcataaggtgggagatatacagaagaagatgccagagcgatcattgtacagattttgagcgtagtggccttctgtcatcttcagggagtagtgcatcgtgatttgaagccagagaattttctcttcacaacaagagatgaaagcgctcctatgaagttgattgactttggtctgtcagattttattagaccagatgaaaggctcaatgatattgttggaagtgcttattatgttgctccagaggttctacacagatcatacagtatggaagcagacatttggagtataggtgttataacatacattctgctctgtggcagtcggccattctgggcaaggacagaatctgggatcttccggtccgtattgagggctgatcccaattttgacgattcacca

SEQ ID NO: 79075 - DNA, 418 bp, Zea mays
acgctcgaaccagaggagccaagcagaggaagcgaggcggcggggggcggagatgtcggcgggactggtgaccgacgaggccaccgtggggcggctgtaccggatccggcgcacggtgatgcagatgctccgtgaccgtggctacctggtggtggaccacgagctcgccaccagccgccgcgacttcctccgcaagttcggcgagtccttccaccgcgaggacctcctcatcaacaagtacaagaagaacgacccatccgaccagatatatgtcttcttccccaacgatgacaaggtagggatgaagcacatcaagaagtacgtcgaaatgatgacgcacgagaacgtctccagagctgtgctggttctccagcagaacctaactccgtttgcgaagtcgtttctcatagagctggag

SEQ ID NO: 79076 - DNA, 421 bp, Zea mays
ttctctaaactgagtcgtaataagctctggcgagaagaacgtgctcatctttgaccttggtggtggcacgtttgatgtgtccctcctcaccatcgaggagggcatcttcgaggtgaaggccaccgcgggtgatactcaccttggaggcgaggatttcgacaatcgaatggtgaaccacttcgtccaggagttcaagcgcaagcataagaaggacatcagcggcaaccctcgtgcactgcgccggctgcgcacggcgtgcgagcgcgccaagcgcacgctgtcatcgaccgcccagacgaccattgagatcgactccttgttcgagggcatcgacttctactctacaatcaccagtgctcgctttgaggagctcaacatggacttgttccgcaagtgcatgaaacctgtggagaagtgcctg

SEQ ID NO: 79077 - DNA, 419 bp, Zea mays
  unsure (1)..(419): unsure at all n locations
tacgatgcatcgtattacctcctccccctgaagtcgcgaagctcgcggaagcgccgagatgtaccatcccacgagaggcggcgtccgcggcggcagagatcaattcaaatgggacgatgtgaaggttgacaagcatcgggagaattaccttggtcatagtgttaaggctccggttggtagatggcagaaaggaaaggatctttactggtatactcgggataagaaatccgacacggaagatgctcttaaggaagaaatcaggagagtgaaggaagaggaggaacaggctatgcccgaggctcttggcttagctcctaagcgcagcaatcgaactcagggtaatcgcttggataagcatgaatatgctgagctgattaagagaggatcaacntgcgatgacttgggagcagggcacgctg

SEQ ID NO: 79078 - DNA, 407 bp, Zea mays
  unsure (1)..(407): unsure at all n locations
tacgctaaggcgaaattgcaaacctgtcactagcgaagcatacttcgtcgagcacactcttgcaattaatccaccgagttcggtttagtggtttactctcagacgtacgcataaatatagcatagcatcatcgacaacaatgtcgctcgtgagtcggcgcagcagcaacgtgttcgaccccttctccctcgacctctgggaccctttcaacatgttccgctccatcgtcccgtcggcggcctcctccggcggcggttccgagaccgccgccttcgccaacgcccgcgtcgactggaaggagacgcccgaggcgcacgtgttcaaggccgacctccccggcgtcaagaaggangaggtcaaggtcgaggtgganggcggcaacgtgctcgtcatcagcggcaagcgca

SEQ ID NO: 79079 - DNA, 429 bp, Zea mays
gcaagcctctagactgagtctgattacgccaaaagcagcagcagctccagccgtcgccgtctccactctccagtctccagcactgctccgcgcgcgccggatcgagggagggcaggcggacgatgaggagagatgagtctcttcgggcttggacgaaaccagaagacattccgccccaagaagagcgctccatcaggtagcaagggagcacagctccgaaagcacatagatgccactctcggcagtggaaaccttagggaagctgtgaggttgcctcctggagaggatatcaatgaatggcttgcggtgaatactgtggatttctttaaccaagttaatatgctgtatggcacactcacagaattttgcacacctgagagctgtccgacaatgacagctggcccagagtacgagtacagatgggctgag

SEQ ID NO: 79080 - DNA, 416 bp, Zea mays
  unsure (1)..(416): unsure at all n locations
gggtcgacccacgcctctagctagactcatatcagtctccttcncctctctagtgctcaccggctccttccgtcgccatggacgtcctcttctgctgctgcctgctgcttctcctggcctccgccgcgtccgccggcagcgagcggtgcgtgcggcaagggaaggcggcctactctccctcgctctccccggcccctcacggtagcagcggagcgtgcgggtacggcgccatggccgccgagattaatgggggcttcctcgccgccggcgggcccaggcagcaccgcgggggcctcggctgtggccgctgtttccagatgagatgccgagacgcaaggctgtgcagcgccgggggagtgcgggtggtgctgaccgacttccacaggagcaaccgtacggacttcctgctcgcccgg

SEQ ID NO: 79081 - DNA, 422 bp, Zea mays
  unsure (1)..(422): unsure at all n locations
ctctagttcctgtcgaggatcctgaccggcgggggcggcctggcggccctgagggcggcgcgcgccgtgaaggagacgacggggatcgtgggccttgaggtggtgcctaacgcgcgagaggttctggtanggctctacgagcgcacgctcaaagagatcaaggccgtccccgaagacgagggttaccgcaaggccgttgaatccttcaccggtcaccgcctccagatctgccaggaggaggaggactggaagcgcatcgaggaccgaatcggatgcgggcaggtcgaggagctcatcgaggaggccgaggacgagctcaagctcatcgctaaaatgattgaatgggatccatggggtgttcccgatgactacgaatgtgaggtgattgaagacgacaccccaattcctaagcatgttcctca

SEQ ID NO: 79082 - DNA, 373 bp, Zea mays
gaagttaatcggggcaacgagccatttcgttactccagaacttgatgctgggccaatcattgatcagatggttgaacgagtctctcaccgagacacgttacagagttttgttgtcaagtctgagaaccttgagaagcagtgcttagcagaggctatcaagtcatattgcgagcttcgtgtcctaccatatgaactcaggaagactgtcgtgtgctgatcagagcgcccttaatggtctgtcttagtgtacttgtatatggattgataaaatgaattttttagcgtacatatatccatcccctcgacattactttaggtaagaaattccgaaagtgctttgattatgaagaacttgtacgagggaccccttgat

SEQ ID NO: 79083 - DNA, 438 bp, Zea mays
ctcgcgggccgacacacgcgtctaggtgtactctgggaagcagtcgccgggagggcacaacgtcgtctggggcctccatgacgcacttaaagcctacaatcctcagagcttgctctacggattcgtcggtggcacggagggactgtttgcaaacaagacgttggagatcacagacgatgttcttgcttcctataagaaccaaggtggtttcgatttgctcggtaggagtatcgatcagatccgcactactaagcaagtgaatgctgcaatgacaacatgccacagtctgaacttggatgggttggtcatcattggaggtgtgacctccaattcagatgctgcacagcttgcggagacccttattcagaataactgtaagaccaaggttgttggtgtgccagtttcattgaatggtgacctcaagaaccagtttgttga

SEQ ID NO: 79084 - DNA, 409 bp, Zea mays
accgcgactgcttctccatccttccacgaactagacgagggaagagcgctgaagctgtggaggaaaacgaaggatctccccgtgcttgtgtatgccaggtcgcctgctctccgtccgcatcccgtccctcgcgaaactcggcgctcccagcaggtgtgcaaaatccatggcttcagacactggcaagaagctcatccagatcgatgtgagctcggacacagtatgcccttggtgctttgtcggcaaaaagaacctcgagaaagcgatggagcaaagcagggacaagtttgacttcgaggtccgctggcatccgttctttctaaaccctgatgcgcctaaggacggcgtcaggaaatctgacttctacaaggcgaagtttggtcctgttcagtatgagcgtgtcatttct

SEQ ID NO: 79085 - DNA, 423 bp, Zea mays
gcacgcctctacagtgactcgtgctaacgcgtgggccagaccaccaaacaagtgccagcgccctctcgcagtcgccgcaatggagagcaccttcatcatgatcaagcctgacggcgtccagaggggcctcattggtgagatcatcagccgttttgagaagaagggcttctacctcaaggccttgaagcttgtcaacgtggagaggtcgtttgccgagaagcactacgccgatctcgcctccaagcccttcttccagggcctcgttgactacatcatctctggccctgtggtggccatggtctgggagggcaagagcgtcgtcacaactggccgcaagatcattggcgccactaaccccctggcttctgagcccggcaccatccgtggcgactttgctgtcgacattggcaggaatgtcattca

SEQ ID NO: 79086 - DNA, 434 bp, Zea mays
cgggccggcccacgcgtccagaaagtttgttgcatgttcttctcttgtctttgtcttaatcagcgggatatggatagtcattttcataagaacccatgttgcagtattttgtatagcatcttggcattgtttttgagcactaatgttgtttggatgtcatgtatgcagcatgtgcaggaattccttaattatgctaaatttgtgtcgtggtgggtttcattaggtgtggcttcatcaattggactaggttctggtttgcatacatttgtgctgtatctgggtcctcatattgctctgttcactattaaggctgttcaatgtggtcgaattgatctaaaaattgctccatatgataccatacagctaaaggttgggccatcatggcttgacaagaaatgttcagaatttggaccgcctgtgtatccagcatcagc

SEQ ID NO: 79087 - DNA, 428 bp, Zea mays
ccacgcgtccagataaaactaagatgatggagaggctatggggtgagaacttctttgaccctgccacaaagaagtggaccaccaagaacacaggttctcctacctgcaagagaggatttgttcagttctgctatgagccaatcaagcaaatcatcaagacctgcatgaatgaccagaaggagaaattgtggcccatgctgcaaaagctcaatgttaccatgaaggctgatgagaaggagttgattggcaaagctttgatgaagcgtgttatgcaaacgtggcttccagctagcactgctctgcttgagatgatgatattccaccttccttccccagcaaaggctcaaaagtatcgtgtggagaacttgtacgagggaccccttgatgatgtgtatgcaactgctatcagaaactgtgatccagagggt

SEQ ID NO: 79088 - DNA, 435 bp, Zea mays
tcgtgggccgatacaacactctacattgagtcgtattaaccggcatatcctgcacaagtattcaaatgaagatgtatcatttggctcttggttgatcgggttggaagttgagcatgttgatgagagaagcctttgctgtggtactcccccagactgcgaatggaaagggcaggccgggaacccatgtgcggcgtccttcgactggaactgcactggcatctgcaatccggtggagaggatgacagaggtacaccgacgatgttgggaaggccttggagccgaatggcacgcacagtctttgacttttgacagccaatagttggcgcttggcggatcattgtcgcaccattttcttcctcttctttatggccctgtaattaatatgcggagatgaacttgtatgcaatggctcggtttttcagatgtacagcaatg

SEQ ID NO: 79089 - DNA, 427 bp, Zea mays
acaaccccctacactcagtcgtactatgctcatactgcttgccctcgccgtatcgtccacccgcaacgcacaggaggattccatggccgacaacaccgggacgttggcgggcggcatcaaggacgtgccggggaacgagaacgaccttcacctccaggaactcgcccgcttcgccgtcgatgagcacaacaagaaggccaatgctcttctggggttcgagaagcttgtgaaggccaagacacaagtggttgctggcacgatgtactatctcactattgaagtgaaggatggcgaagtgaagaagctctacgaagctaaggtctgggagaagccatgggagaacttcaaggagctgcaggaattcaagcctgttgaagagggtgctagcgcctaaggatctctccttctccatgtgcgagcctgaagc

SEQ ID NO: 79090 - DNA, 419 bp, Zea mays
acccacgcatccagggagtccttgcgctttggaagggtgcaggtccaactgtggtgagagctatggcactcaatatgggtatgcttgcttcctatgaccagagtgtcgagctatttagggacaaatttggcgcatgagaaatttctactgttgttggagccagcgctgtttctggattctttgcctcagcatgcagtttgccctttgactatgtgaagacacagattcagaagatgcaacctgatgcgaatggcaagtacccatatacagggtctttggactgtgctgtgaagaccttcaagatcggtggcgcattcaagttctacactggtttcccagtgtactgcgtcaggattgcaccccatgtcatgatgacctggatattcttgacgcagatccagaagtgtgagaagaagatc

SEQ ID NO: 79091 - DNA, 370 bp, Zea mays
attcttcttcttcctcctcctcctagcacagctagcgcctgctccccttcgcctgtgatcatgtcttgcagcagcggcaagtgcgactgtggctccagctgctcctgcggcagctcatgcaactgcatgtcccctaacgtggagaccgccgccgccagcagcatcaagaccacggtcctcgccgcgccgaccaccaaggccagcgccggcggcttcgaggcggccaccgagggcggcggctgcgactgcaacacctgcaactgcggcaccagctgcggctgctcctgctgcagctgcaactgagccggtcaggcgatggcgcacgagagtcgagaggacgacgacgagtcgtataaatataatagcggcg

SEQ ID NO: 79092 - DNA, 412 bp, Zea mays
aggacggagctgagcttctagcaacgtacagtgtatccgccatgagtcctttcggggcggtgatcacgccagaaaccctcaagtacatgtccaagtaccagggacgtgagatcacgcaggtggactgcgcacgggaggcgatgaggctgatccacgcggaagacaagaacctcaaggccgaggactcagcgtgggagctgaagaagaagttcggcaacggcgtgagcaccatggtcctcgtctacaacgccaccggggccagcctgagcctggtggacgacgggaaagactggatgggctccgtctacagctcgccgatcccggacaccttccacaacgggcagtggatcgccttcctccacgtcaagcccggctcgctggcgcaaggcagccaggccgccagggtgttccg

SEQ ID NO: 79093 - DNA, 418 bp, Zea mays
acttacaatcacaacgaacaaaagctctcgatctcaccgacaccgaggaagaatagatcaatggcgtccgagcagggagtcgtgatcgcgtgccacagcaaggctgagttcgacgcccacatgaccaaggcccatgaagccggcaagctggtggtcatcgacttcactgccgcctggtgcggtccatgccgcgccatcgccccactgttcgtcgaacacgccaggaagttcactcaggtcgtcttcctgaaggtggacgtggacgaagtgaacgaagtcaccgcggcctacgaggtcgaggcgatgccgaccttccacttcgtcaagaacggcaagactgtcgcgaccatcgtgggtgccaagaaggacgagctcctggccctgatcgagaagcatgccgcgcctgcgcctgcgtctg

SEQ ID NO: 79094 - DNA, 386 bp, Zea mays
atgaggcgcaagttgtggagtcaaaggatggaaccatctcggttgcttctgcatttgctggttatcaggaagctgtgcaagacagggatcacaaattcttgacaaaagcagtggaagaagcatatcgaggagtcgattgcggtgacggaggtccattcggagcagttgtcgtctgtaatgacgaagtagtagtcaactgccataacatggttctgaagcacactgaccctactgcgcatgctgaagtaactgcaattagataggcttgcaaaaagcttgggaaaattgagctctcagactgcgaaatttacgcgtcgtgcgagccaggcccaatgtgctttggtgcagttcatctgtcccgaatcaagaggctggtttatggggcc

SEQ ID NO: 79095 - DNA, 420 bp, Zea mays
ctcgcgggtcgatacacgcctctagctgccatcgaccatacaggtgatcatcagagccatcccgttcaagagcaggtcttaagctgccgtggccgtgccgagacatgccagtccgaagaacgggcgtcttcctgtgatgtcttcttgtctgcccacgcctagtttctctgtcgattcctattcgtcgtctcttcagggctggtgctcactgctgcgccgttctgttaaccgaaacaagaactctgtgtattcctgtaccgagctgtgcatgttttttttttctttccatcgtggagaatttaagttattatccgtttgctgcaaggtttgccgtctcattttatgcgttgggatgttggcaagaaagggcagatgtcatgtgagaatttaaattaagtgaaatcgattcagggttttctt

SEQ ID NO: 79096 - DNA, 411 bp, Zea mays
actcgtgggatcgatacaagcctctacactgattcctattatcgtcgccttcgatcggcggctgcctccttcctccacttccgtcccttcaccgagccgccgccgccactatgaagggacccggcctcttctccgacatcggcaagaaggccaaggatctactcagtaaggactacacttacgaccagaagctgaccatctccaccgccagcgcctctggactgggcctgacttccacagctgtgaagaaaggagggctttattctcttgatgtcagttcagtttacaagtacaagaataccactgttgatgttaaagtggacactgaatcaaatatctctactacattgaccgtgttggacgccttgccatgcacaaagcttgtcacttctgtgaagctgcctgactaca

SEQ ID NO: 79097 - DNA, 371 bp, Zea mays
tacaagcctctaaactgacgtcgtgctatccttttgctcggaacgcacacacagcccggtccccgatctccgatcccctcgtcgatccaagatgcagatcttcgtcaagaccctcactggaaagactatcaccctcgaggtggagtcttctgacaccattgacaacgtcaaggccaagatccaggacaaggagggcattcccccggaccagcagcggctcatcttcgctggcaagcagctcgaggacgggcgcacacttgccgactacaacatccagaaggagagcaccctccaccttgttctccgcctcaggggaggcatgcagatcttcgtcaagaccctcactggaaagacgatcaccctcgaggtgg

SEQ ID NO: 79098 - DNA, 349 bp, Zea mays
gagtgagtcgtattacactcagacctcttccccaaatcttcgattagattctcgttgacaagaagactagaaccgagcctgaccatgtcgctgatccgccgcagcaacgtgttcgatcccttctccctcgacctctgggacccctttgagggcgtccccttcggctccggcaacagcagcagtctcttcccctcgttcccgcggaccagctcggagaccgcggccttcgctggcgcgcggatcgactggaaggagactccagaggcgcacgtgttcaaggccgacgtaccggggctgaagaaggacgacgtcaaggtggacgtcgaggacggcaacgttcttcagatca

SEQ ID NO: 79099 - DNA, 393 bp, Zea mays
ggcggccccctatcccgccggccctgtgtgtgtcccccgctaccagccatggcgtcgccgttctccgtgccttcgctgatcatggaggatgaagggcggttcgaggcggaggtggcggaggtggagtcgtggtggggcacggagcggttccggctcaccaagcgcccctacaccgcccgcgacgtggtcctcctccggggcacgctccggcagagctacgcgtcgggggagatggccaagaagctgtggcgcacgctcaaggcgcaccaggccggcggcaccgcctcccgcaccttcggcgcgctcgaccccgtccaggtcaccatgatggccaagcacctggacaccatctacgtctccgggtggcagtgctcgtccacgcagacctccacc

SEQ ID NO: 79100 - DNA, 423 bp, Zea mays
gttgcaacacccaatagtgagtcatatcatccggcgacgctggcgctggccgtgctcctggcggcgaccgtggtggctcccccggccgcggtgcgcgcggcgatgtcgtgctccaccgtgtacagcacgctgatgccgtgcctgccgttcgtccagatgggcggggccatgccgccccagccgtgctgcggcggcatccgcagcctgctgcagcaggccaacaacacccccgaccgccgcaccatctgcggctgcctcaagaacgtcgccaacggcgccaacgggagcggcacctacatcagccgcgccgccgcgctgcccagcaagtgcggcgtcgccctgccgtacaagatcagcaccaacgttaactgcaacacgattaattaagtgaggcgtcctgtgcgcgtcccgggcgaggaatgc

SEQ ID NO: 79101 - DNA, 437 bp, Zea mays
ctcgcgggtcgatacaagcctctagagtgagtcttattagcctggggaaggagcacgtcaaggtgtgggcggagcagaacagcctggtgatcaagggcgagggcgagaaggaggatagcgaggacgaggccgccccgcctccgagatacagcggtcgcatcgagctcgcgccagaggtttacaggatggacaagatcaaggcggagatgaagaacggcgtgctcaaggtggtcgtgccgaatgtgaaggagcagcagcgcaaggacgtgttccaagtcaacgtcgagtagatgtttccaaatagaagcaagtgccggtacgggatggaggattggagcctggaggggcactgccaaactaggattcctctctctcaatctgatctggattctggaatcagatttctcttctttcatttttctcgtctatcttctatc

SEQ ID NO: 79102 - DNA, 423 bp, Zea mays
ttacaacactctagactgagtcatgttatcagctcaccgccgagcggaagcggcgccgagcaaccaacccctctcctcgtccgccgccgtctccccggaccatggccatggccgccgcctcctcccggctgctctgggcgtcccgcgccgccgcctacctcaggatctccaccttccccagggccttctccaccgtgctgaaggatctgaagtatgctgacactcatgaatgggtgaaagttgagggtgattcagcaaccgtggggattactgaccatgcccaggaccatttgggtgatgttgtttttgtggagctaccagaagttggcatcagtgtatcccagggaaagaactttggtgctgttgagagtgtgaaggcaaccagcgatatcaattcaccagtgtctggagaggtggttgaag

SEQ ID NO: 79103 - DNA, 363 bp, Zea mays
actctgcgagtccaggagatttttttccccttcttcacgatactctcgacgagagtgtctccatggccggaaaaggagacgggccggcgatcggcatcgacctcggtacgacctactcgtgcgtcggggtgtggcagcatgaccgagtcgagatcatcgccaacgaccagggcaaccgtacaacgccgtcttatgtcgcgttcaccgattcggagaggctcgtcggcgacgccgccaagaaccaggtcgccatgaaccccatcaacaccgtcttcgacgcgaagcggctcatcggccggcgcttctctgacacgtcggtgcagagtgacgccaagctatggcctttcaaagtgattccgggct

SEQ ID NO: 79104 - DNA, 413 bp, Zea mays
aacgcgttggacgctttaatctggactggactgatccagaccagtcacttgagaaggagaatgcggcatttgaacaggcaatggtactagctggaagtgaatttatggagagcgttcgcttccatgttaaatcatggttaccggcaaggtctattgtcctggagtgtttgttatcaaaaggaaacattgatccaagtggagaaatcatggttttggatagattctgcccgtggaaacttcatttatttgagcttgaagaggagctgaagactgatcctctgaccaagtatgtgctgtatcaggatgagaggagcaagagttggcgagtccaagcagtcgcagttgctcctgacaggttcgagagccgaaaggctctgccagagaagtggaggggcatgagagacgacgaactt

SEQ ID NO: 79105 - DNA, 409 bp, Zea mays
cgggccaagcctctagcatgattcgccatatttgcactcaagcaagtgagcagctcccccgccctccagcaacatggagacggccaacgttgtcatcctctcgttcttcttcatctttgcaatccaccgcctcttcaaccgcctccatagcaggagcacgaagatgaagccgctgccaccgggccctctagccatcccggtcctcggccacctgtacctcctcctcgagaagaatattcaccacatgttcacgcgcctcgccgcgcgctacgggcccgtgctctacctccgcctcggctcacgtaacgccgtgatcgtgtcctctgtcgactgcgccagggagtgcttcacggagcacgacgtgaccttcgcgatacgcccgaccttccccacgctgcatctcatgacc

SEQ ID NO: 79106 - DNA, 386 bp, Zea mays
ctaaactgagtcgtgattatccatttccagccatggcggtgtcgatcgagctcaccaaggagtacggctacgtcgtgctggtgctggtggcctatgtcttcctcaacctttggatgggcttccaggtcggcaaggcccgcagaaactacaaggtgttctaccccaccatgtaggccatcgagtcggagaacaaggacgccaagctcttcaactgcgtgcagagggggcaccagaactctctagagtggatgctcgttttcttcgtcatactgctgctgggcggtctgcagcacgcgaccatcgccgccggtctgggcggcatctacatcgtcgcgaagttcttctacttcaacggatacgccatcggcgttccggacaaccgtctc

SEQ ID NO: 79107 - DNA, 304 bp, Zea mays
  unsure (1)..(304): unsure at all n locations
acaagactctatactgatcatattaacgaccgatggctttcatgcgctcccgctcaaatgcatcttctggcatgggagttgctcctaacattanggagacattcgtcgagcttcaaatgaagaaggcattccgatatgttatcttcaaaatcgaagagaagcaaaagcaagtggttgtggagaagacaagggctactactgaaagctatgatgactttttggcctctctcccagagaatgactgccgatatgcgctgtatgattttgattttgttactggggagaatgtgcagaaaagcaagat

SEQ ID NO: 79108 - DNA, 421 bp, Zea mays
cgggccgacccacgagtccacgataccccaagcaccagcgcggcggcggcgaccatggctgtcggaaagaacaagaggatctccaagggaaagaagggtggcaagaaaaagaccgtcgaccctttctctaagaaggattggtatgacatcaaggcaccgtcggtgttcagtgtgcgcaacatcgggaagactctcgtatccaggacacagggtaccaggattgcttctgagggtctgaagcacagagtctttgaggtttgcctagctgatcttcagggcgacgaggatcaagcttacaggaaaatcaggctccgtgctgaagatgtgcagggcaggaatgtgctcacaaacttttggggtatgaattttaacaatggaataacctgatatccctagtgaagaagtggcagacattaatcga

SEQ ID NO: 79109 - DNA, 395 bp, Zea mays
ctatcaacaaatacccacagatacaattcgatttggttttcaataaagagtttgagctgtcacacacatcgaaaactaccagtgtatttttctctggttacaaggttgagcagccaattgagggagatgaaatggatcttgattctgaggatgaagaggaggagctaaacattccagtaatcaaggaaaatggcaaagctgatgggaaggaggagcagaaaaatcaagagaaggcagtagctgctacagcttcaaaatcaagtcttggccttgaaaagaaaagcaaggatgactctgatgattctgatgaggatgagtctgatgattctgatgaggattaatccgaagaatccggataaaggcaagggattatctcctgacgaaggcgatgatga

SEQ ID NO: 79110 - DNA, 336 bp, Zea mays
tacacgactctggagcgtgtcaaactagagcatcttcagtatctggaactttataagaataacattcaaggaacaatcccttctgagcttggcaacttgaagaatctaataagcttcgacttgtacaagaacaacatttcggggacaatacctcctgcccttggaaagttgaagtcccttgtattcttgcgtctcaatggcaatcatttgactgggcccatcccaagggaactcgctggaatatctagtctcaaagttgttgatgtttcaagtaatgatttgtgcgggacaattcccacgtctggaccatttgagcatattcctctgagcaacttt

SEQ ID NO: 79111 - DNA, 331 bp, Zea mays
atggtccgtgagctgagggaaaatacacaggagcttaagctatttgtggagttgtacaagcatgagtccactgattccagacagctgatggaatcgagagatagggaactcgctgaatgggctcgagttcacattctcaaatattctcttagtgaaagtaaattagagcaacgtgtaatttcagccaatgaagctgaagcagtctctcagcagaggttggcaactgctgaagctgagattgctgaattatggcagaagctagaaacttctaggagagatctagtgaaacaatctgatatactgaagtctaaacatgaaggaatgttaagcg

SEQ ID NO: 79112 - DNA, 409 bp, Zea mays
acccatctcttcgactcctttctggagcagctagggttccgtcctcgatccgatccgccgagtgcacaccacctttccccactccgatcgaatcgatggccgccgagggcgagaagaagatgataaccctcaaaagctccgatggcgaggagttcgaggtggaagaggcggtggcgatggagtcgcagaccatccgccacatgatcgaggatgactgcgccgacaacggcatccctcttcctaacgtcaactccaagatcctatccaaggtaatcgagtactgcaacaagcacgtacatgccgccgcagccgcagccgccgcctcgaaggccggtttcgaagaacttggtggccgcttcggccaaagacacgccgcctccggtgaggacctcaagaactgggatgcgga

SEQ ID NO: 79113 - DNA, 340 bp, Zea mays
cgggccgacccacaagtccaaccgtggcggcggctacggcaactccgacgggaactggaggaactgagcggtggggcccgcgcggccaagttatcctgttcgctaccgtgatgtttaccctagtccagagggtttatcttcgttcgtctcgtttgttgttgcccatctgtgtttttgattgcaaggtcgctctgtgtcagttgttagtgctgtgttcatcctcggctccagcagacccatgcatcaaccagcatggactgtggatcgatggatgctgttactcctgtcaggatttgttctaagttaatcctaaggaaaaaatggtgcttcttggtgctgc

SEQ ID NO: 79114 - DNA, 419 bp, Zea mays
caacactctagagtaagtcgtattagatgataataaggtgctgattaaggcaataaaggttgctgaggctattgtgaggaaaaaccgcaacttagttgtattgtacaaatcggttataaatgatggatttaagctggatttggagcatgctcaagcacttgagaaggaaagaggtcacaactattacaatggaatgacaaaggaacagttcacgaatatgcagaaattcatccagggccggagttctaagaaaacaccatcaaagctgtaggttgctggtgacattttctgtggtccgtgtacgatgtacagctactgaaagcgtgttcagtagtctgaaaaataaagatgtcggtgtggcaatatatacagttaccgtcttctcatacttttacgtaagtttatgtttaattaacgtt

SEQ ID NO: 79115 - DNA, 405 bp, Zea mays
aagtcagtgcaattctcatccgaacccgatcatctccggccgccgctccctccggaccctccgtcgacatgggcaccgtcactgccgcagatccgcacccgtccttcctcgccgacaaggacgccaaggtcttcgtcgccggccaccggggcctcgtcggctccgccatcgtgcgccgcctcctctcgctaggcttcacctccgtcgtcgtccgcacccacgccgagctcgacctgactcgccaggcggacgtcgaggccttcttcgccgcagaacgcccgcgctacgtggtcctcgccgccgccaaggtcggcggaatccacgccaactccaccttccccgccgacttcatcggcggcaaacttcaaattcaagaccaacttcgtcgacgccgcgctgcgctgc

SEQ ID NO: 79116 - DNA, 388 bp, Zea mays
aaagtacctataatggatccctcaaaagcatcaaaaaggcctgttggaattctacttgtgaaggttgtgagagcccaaaatctgcggaagaaggatctgctgggtaaatctgacccatacgtgaaacttaagatgtcagatgataaacttccatccaagaagacaactgtaaagcgcagcaatctcaatccagagtggggtgaagacttcaagtttgttgtgacagatccagaaaaccaggctcttgaagttaatgtcttcgactgggaacaggttgggaaacatgaaaagatgggaatgaacatgatcccacttagagaactcctaccagaagggaacaaagtttacaaccttcaacttgcttaagaccatggacccaaacgatgta

SEQ ID NO: 79117 - DNA, 192 bp, Zea mays
tacagtacgtcgtattaggacaagcactacaagaaaatgttgaaaaattgtcagttaattaaaaaatgtctgggcccacactcttaatcgaagtaaaagtgtgggttttgttgcaccgacactcctaatttaagagtgtcggggtcccgcagaaaccgacacttttaatttaaaagtgtgagttttttctac

SEQ ID NO: 79118 - DNA, 424 bp, Zea mays
cgggccggcccacgcgtccagccctacctcggcacggccaacctgtgggactacctgccgttcctgcggtggttcgacgtgttcggcgtgaggaaaaagctcatggccgccgtgaggtggagggacgcgttcctgcggcggctcatcgacgcagagcgccggaggatggacggcgacggcgacggcgagaagaagagcatgatcgccgtgctgctctctttgcagaagtcggagccggagctgtacacggaaaccatgatcatggcgctgtgcggggacttgtttggagctgggacggagaccacatcggtcacgacagaatgggccatgtcgcttctcctgaaccacccggaggctctgaagaaggcacaaggcgaaatataacccggtggtgggcaactcccgccgcctgatcaccgccgac

SEQ ID NO: 79119 - DNA, 317 bp, Zea mays
actcaaatggaaggccaagtacgggatcgaagagatgtgcatagatctgtggaactgggcgagcaagaacccgtacgggtacgctgggtcacgcgacaacagcaaatgaaccacccatccatgcatcccatcctgcagtaggagcaagcagcagccttatagcctatgctaccataattagtaactcatcaatcatgcatacataatcagccagtcatctgattatgggtactgcgatgggcctcgcttcttcagtgtatagagggaggaggaggggggtcatcatgatattcatttttttatcattcccgaatgat

SEQ ID NO: 79120 - DNA, 419 bp, Zea mays
  unsure (1)..(419): unsure at all n locations
gggccgacccacgcgtctagaataactactcgaacgtgagcgccgagtacagcgaggctgtggagaaggccaggcgcaagctccgagccctcatcgccgagaagagctgcgccccgctcatgctccgcctcgcgtggcactccgcggggacgttcgacgtgtcgtcgaggaccggcggtccattcggcacgatgaagcatcagtcggaattggctcacggcgctaacgcggggctggacatcgcggtgcggctgctcgagcccatcaaggaggagttcccaatcctctcttacgccgatttctaccagctcgcgggagttgtggccgtggaggtcaccggtgggcctgagattcccttccaacccggtatggaagagangcttaaacccccacctgagggccgccttcctgacgccact

SEQ ID NO: 79121 - DNA, 356 bp, Zea mays
cgcccgggtcgatacacgactcagcaacgtatcatacaagtatccatccttattgagtacagtgttgatccatggactcggaaggagttgtagcagcaaaggtggcagatgagactactaaaccggcaatccaagaagacggcgccgagagcaaggccgggatgactgatctgctgatgctgaccgacaagtcgcagctgcaggcgctggcgatgctgctgcggaacaacgaggagctcatgatgagccaggcgatcaagtcggagacggagcgcattgagtacctcaagacggtgagcgactgctacacgcggacgatgaagctcctcgacgattccatggcggccaggaccacc

SEQ ID NO: 79122 - DNA, 352 bp, Zea mays
gggccgacccacgcgtctgtggaaaggccgccgatgtttggtcatgtggagttactctgtatgtgatgcttgttggtgcctatccctttgaggaccccgacgaaccgaagaatttccgcaagacgcttactcggattatcagcgtccagtacgcggttcctgattttgtccgagtttcaatggagtgcaggcatctgctgtctcggatctttgtggcgaaacctgagcaacggataaccatcccagagatcaagaaccacccatggttcctgaagaacctgcccatcgagatgaccgacgagtaccagatgaacctacagctagtcgacatgaatgtcccctcgcaaagcct

SEQ ID NO: 79123 - DNA, 299 bp, Zea mays
aaactgcacttggatctcagatcggtgatcacagatacaatggtaaacgctgttgctgtgcttggtagcagcgatggtgtcaagggcagcagcgtcttcagccaagagggatatggccctgcgactgtcaccggaagtgtctctggcctcaagcctggcctccatgggttccatgtgcatgcacttggtgacaccaccaatggctgcatgtcaactggaccacactacaatcctgcgagcacggaacatggagcaccagaagatgagaaccgccatgccggtgatcttgggaatgtgag

SEQ ID NO: 79124 - DNA, 401 bp, Zea mays
ctctagatgcagtctcacaaccgtgctgttcgcaatgctggactgattgtcacatggattactgatcctatgcatggaaacaccatcaaggccccttgtggcctgaagactcgtccatttgactccattctggctgaagtgcgtgccttcttcgatgtgcatgaccaagaaggaagccaccctgggggcgtccaccttgaaatgactgggcagaacgtgaccgagtgcatcggtggatcacggaccgtgaccttcgacgatctgagcgaccgctaccacacccactgcgacccaaggctgaatgcctcccagtccctggagctcgcctttatcatcgcagagaggctgaggaagaggacgatgcgatcggggctcaacagcagcctgccactgccgccact

SEQ ID NO: 79125 - DNA, 420 bp, Zea mays
gggtcgagacacgcgtctacgcatccacatacaagaaaaagaaaagaaaacccctgttgccagcgacagaagaagaaggggccccttctccttggttgcgttgcgcctccctcctgtctgcgtgcgtgcaatcgacgcagaggcgcgggcgctcgcaccaccacaaccacgacccgatggctttcatgcgctcccgctcaaatgcatcttctggcatgggagttgctcctaacattagggagacattcgttgagcttcaaatgaagaaggcattccgatatgttatcttcaaaatcgaagagaagcaaaagcaggtggttgtggagaagacaggggctactactgaaagctatgatgattttttggcctctctcccagagaatgactgccgatatgcgctgtatgattttgattttggta

SEQ ID NO: 79126 - DNA, 323 bp, Zea mays
gttcccgacgctggacccgcgcaccggcgaggtcatcgcgcgcgtcgccgagggcgacagcgaggacatcgaccgcgccgtggccgccgcccgcagggccttcgacgagggcccgtggccgaggatgaccgcctacgagcgctgccgcgtgctgctgcgcttcgcggacctgatcgagcggcacgcggaggaggtcgcggcgctggagacgtgggacaacggcaagacgctggcgcaggcggcgggggccgaggtgcccatggtggcgcggtgcgtccggtactacgccggctgggcggacaagatccacggcctggtggcgc

SEQ ID NO: 79127 - DNA, 334 bp, Zea mays
aacacagcatcagctcaaaaacctaacacacctcaacaagcagagcaaagacccgggattcgccggcgcggtagcgagagcgagagatggacgggaggatgttcggtctcgagacccccctgatggtggcgctgcagcaccttctggacgtgcccgacggcgacgccggcgcgggcggcgacaaggcgagtggtgccgcggcgggcggcgggcccacgcgcacctacgtccgcgacgcgcgcgccatggcggccaccccggccgacgtcaaggagctcccgggcgcgtacgcgttcgtggtggacatgccggggctgggcacgggcgacatcaa

SEQ ID NO: 79128 - DNA, 305 bp, Zea mays
  unsure (1)..(305): unsure at all n locations
aattgcagttggntctcagatcggtgatcacataaacaatggtgaaggctgttgctgtgcttggtagcagcgatggtgtcaagggcaccatcttcttcacccaagagggatatggccctaggactgtcaccggaagtgtctctggcctcaagcctggcctccatgggttccatgtgcatgcacttggtgacaccaccaatggctgcatgtcaactggaccacactacaatcctgcgagcaaggaacatggagcaccagaagatgagaaccgccatgccggtgatcttggaaatgtgacagctgga

SEQ ID NO: 79129 - DNA, 407 bp, Zea mays
atttcttttgtaggttttcatgttgatgattcagaagttacattaaatgtttgccttggaaaacaattctttggtggtgaattatactttcgaggtattcggtgtgagaatcatgtgaattcagagacacaacatgaggaaatgtatgactacacacatattcctggttgggctgtactccaccatggtcgacacaggcatggtgctcgagctacttcatctggtctcagaataaatctgcttttgtggtgccggagctctgtgttcagagagatgaagaaataccagaaggattttccgagctggtgtggtgaatgccagcgcgaaaagagggaaaggcagagtcagtgtgttaaagcaacgaagatggcctttctcaggggttctggaagttcaaccaattaaat

SEQ ID NO: 79130 - DNA, 241 bp, Zea mays
ggcggccgaggaagcgcccgtggtggagaccccgccgccggccgtcgtgcccgaggagtctgcccccgccgaggccgaggccgaggccgaggctgctgctcctgctgatcccgaggagcttcccgcggccgagcagcaggcagccgccgaggcggaagccgcggctcctgctggtgccgaggagcccgtcgcggccgaaccggccgccgaggccgaagctgctgctcctgctggtccccaa

SEQ ID NO: 79131 - DNA, 317 bp, Zea mays
acatctctctctgctcctccgcctccgcctgatccatccaagacagggatcgccatgtcggactcggaggagcaccacttcgaatcgaaggccgacgctggggcgtccaagacctacccgcagcaggctggcaccgtccgtaagaacggcttcatcgtcatcacaaaccgtccctgcaaggttgtggaggtttctacctccaggactggcaaccatggccacgccaaatgccactttgtcgccatagacatattcaatgggaaaacgcttgacgatattgttccttcatcacacagctgtgacattccgccagtgaa

SEQ ID NO: 79132 - DNA, 294 bp, Zea mays
aactctctcgacctcatcggcgttggcggagcgcgtgttgaccggagatggcgccgagcgggtggaggaggagcgcggcggcgcgggtcgcctggcgcccggccacggtttgcctgtggctcgcgctcgccgccgccgcactgacgctcgcccaggctaagaaggacctgacggaggttacccacaaggtctacttcgacatcgagatcgacggcaagcccgcaggccggattgtcatggggctttttgggaagactgttcctaagacggcagagaacttccgagctctttgca

SEQ ID NO: 79133 - DNA, 326 bp, Zea mays
acgccgctcgtccctcgccccatcgcgatggcccggatcaaggagcacgagctgcgggggaagagcaaggcggatctgcaagcgcagcttaaggagtttaagtcggagctctccctgctacgcgtagccaaggtcaccggcggggctcccaacaagctctccaagatcaaggttgtgcgcacctccatcgcgcgcgtgctgaccgtcatctcgcagaagcagaagtcggcgctgcgtgaggcgtacaagaacaagaagctgctcccgctcgacctccgccccaagaagacccgcgccatccgcaagcgcctcaacaagcaccagct

SEQ ID NO: 79134 - DNA, 334 bp, Zea mays
acagtcccaccgaccccgccgccggtcgccctccatctcctcgccgctgcctctcgtttctcttttcaataatcaagatgagccgtggtggtagtgccggtggtggtcaaagttctctgggttatctctttggaagcggtgagccccccaaaccagcagtggcaccagctgcaagtgctccacctgttgagaaaccatctgctgcaaagactgatgcggccaagcaggttgctgctggggttaccagccaaaccaataactaccacagggctgatggtcagaacactggcaacttccttacggaccgtccttcaaccaagggccaagctgctcc

SEQ ID NO: 79135 - DNA, 368 bp, Zea mays
agcctcggcgtcgctgcgctgtccgtgttctcctggatgtacaagtacctgacgggcaagcacccgccgggcgccgaccagctggaccacgccaaggcgaggctggcgtccaaggcccgcgacatcaaggatgcagcacagcaccgcatcgaccaggcgcaggggtcttgagagaagaaccacactcgagcggaccgcgcgcgcgacctccttgaaccactgccggcgcggcggcatatggcccttaaaggcggtggctgctgctacgtacgctgccgtagagtctcggtcgccgcgatagctctagctagtcgtttatgtgttgtgctttgtgtgtgcatgcttgtgtctgggggcatgcactgcag

SEQ ID NO: 79136 - DNA, 333 bp, Zea mays
cataccggctgagcaggacatggtcaccgaggacagcctccccggaaggaacaatctcatcgtggttttcattgacactctcagcatggacgttcctctaccttctcctcctcggacaatattatctgaacgtctgcgacgtcccggactagatcatccctgacgacagtcgcattctcctgaaggcctggtcgctacgccaccagagctgctactggaagctcaaaaacgagttcgtcccggagaggttcctcaccgggagatatagccggcggcatcgagctcaagactaagcagttccaattccggtctttcatatcttccctgatgatc

SEQ ID NO: 79137 - DNA, 373 bp, Zea mays
aaacccaaacggagagagacaatcgagagagatggcaaactgttttggtgacgtcgtggacaattacaagctagacacaatgccaagatatatcggcaaaaagaagactcgagaagaccgggcacgagaggcctcctatctcagtaatgagaatgagaagtacaagaaagctaaagactatgtgaacatgctgaaggactggtacggcaatggagcgtcgacgctgtgcgtgatctacaaccagacgggcggaaccctgcggtacgtcgacgacaaggactggctgggctacccggggccgacgccctacccgacggagatcggcaacgggcagtgggcgtccttcctccacgtccacaagaccggcgcctcg

SEQ ID NO: 79138 - DNA, 376 bp, Zea mays
ataggttgcagaaagaatgccaaaaccaccagttactgagcttttcactgatgtttacgacaagatcccttccaacctgcatgaacaagagcaattgctgcgggatacaatcatgaggcaccctgcagactacccaactgatgtacctgttggggtcgtgcttcggtatgccgaaggtctcacacgaagaagcagcttcggccaaagtcgtttctaagagatggccgaaggtcccttttcatggagcttcggcgttttaaaccgacatagaggcagaatgacctttttatacatgtatgtccgagtcaatgttgtaaacttccgcaaggggcataattgtaatttgtcacaggctgcgacctgtgtccataaatag

SEQ ID NO: 79139 - DNA, 428 bp, Zea mays
ctcgcgggtcgatacaagcctctaggctaagtcgcgataggcgtgaccaaggaggacgtcgaggcggccatcacctccgctctcagcccttccaatctcgtggtgacggacacgtccggagggtgtggcgcgagctacgagatcgaggtggtgtcggagaagttcgaggggaagcggctgctggagaggcaccggatggtgaacaccgcgctggcgtctcacatggcggagatccacgccgtctccatcaagaaggcgctcaccccggctcaggcccagccccagccccagccccagcctgagccggctgccgataagccccaggcttaagtgcttaacacccccaaaacggtttggtcccatatgccgatgcacgattacattggctatctgctagaataatgcggcgggatgcaatgctaaattgc

SEQ ID NO: 79140 - DNA, 387 bp, Zea mays
cactcaccggacaatgcatccgtactaaaatgcgacggaacacggctgccaatcgcggataaatggacatgccttcctggtcaagattaaaaaacggcggattcaaaaccaaggccaataacccttcaatgggcaacaacggaacttgcaatctcaaactgaaaaatacaagggttgtatccataaattcgttcgagcgtgtgcccatcaactacgagagagcgctgcagaaggccgtggcgcaccagcctgttagtgccagcattgaagcatctcggcgcgcgttccagctctacagttctggcatcttcgacgggagatgcgggacgtacctggaccacggtgtgacggttgtggggtacggcagcgagggcggcaaggactact

SEQ ID NO: 79141 - DNA, 413 bp, Zea mays
ctcgtgggacgatacaagcgtctacactgacgtcctaataggattcaactccagaaactacagaggaagagacagaagaagacgaagacgaagagaaagagaaaaagcccaagaccaagacaataaaggagactacttctgagtgggaacttctgaatgatgtgaaggctgtatggcttcgcagcccaaaggaggttactgatgaagaatactcgaagttttaccactcactagccaaggacttcggtgatgacaagcctatgggttggagccacttcactgccgaaggagatgttgagttcaaagctttgctctttattcccccgaaggctccacatgatctctatgagagttactacaacagtaacaagtcaaacctcaagttgtatgttaggagagttttcatctctgac

SEQ ID NO: 79142 - DNA, 422 bp, Zea mays
cgcgggatcgacgcacgcgtccgcacacgcgtccgcccacgcgtccgcttgtgaccctccctcagccgcgtcgcgtcgcatcctacgatccaaagctctctctgctcgcagccatggcgaagaactacccgaccgtgagcgccgagtacagcgaggctgtggagaaggccaggcgcaagctccgagccctcatcgccgagaagagctgcgccccgctcatgctccgcctcgcgtggcactccgcggggacgttcgacgtgtcgtcgaggaccggcggtccattcggcacgatgaagcatcagtcggaattggctcacggcgctaacgcggggctggacatcgcggtgcggctgctcgagcccatcaaggaggagttcccaatcctctcttacgccgatttctacaagctcgcggggattgtg

SEQ ID NO: 79143 - DNA, 354 bp, Zea mays
cactgacgtcgtgactaacgcgtgggcggacgcgtgggggacggtgtggacacggatggggaccatggcagcaccctcattgcggtactcgactgtcacccctgagcagtaccttgacgagaagaccatcttccaccttaacccatctggccgctttgtcattggtggacctcacggcgatgctggcctcactggccgcaagatcatcattgacacctacggtggctggggagcccatggtggtggcgctttctccggcaaggacccaaccaaggttgaccgcagcggagcctatgtcgcaaggcatgctgccaagagcatcgtcgccagcggccttgctcgccgcgccatcgt

SEQ ID NO: 79144 - DNA, 391 bp, Zea mays
ctcgcgggtcgacacacgcctccaaagtgactcgtgctaacgcgtgggcggacgcgtgggtcaccaagtgcgtgcgccggcggcaccgcctcccgcaccttctgcgcgctcgaccccgttcaggtcaccatgatggccaagcacctggacaccatcgacgtctccgggtggcagtgctcgtctacgcacacctccatgaacgatcccggcccggacctcgccgactacccctacgacaccgtgcccaacaaggtggagcacctcttcttcgcgcagatctaccatgaccgcaagcagcgggaggcgcgcatgtcgctgcaccgcgccgagcgcgcgcaggcgccgtacgtcgacttcctcaagcccatcagcgccgacggcgacacaggct

SEQ ID NO: 79145 - DNA, 385 bp, Zea mays
acgactcgtcagacgtcagccagcagttcgaaaccaaggattgatccaggagcttccggaaggcgaggcgcgcgcgcagcgtcgaggtgctggtgccggtgccgcccatggatcgggctcgcggatccgcgttcctgctcggcgtcctgctcgcaggatccttgttcgcgttttcagttgccaaagaggagaccaagaagctcgggaccgtgatcggtatcgatctcggtaccacctactcctgtgtcggtgtgtacaagaacggtcatgtcgagatcatcgccaatgaccagggtaaccgtatcacaccctcatgggttgccttcaccgatagcgagaggctcatcggtgaggctgccaagaaccaggcaaccgtcaaaccctg

SEQ ID NO: 79146 - DNA, 425 bp, Zea mays
accacgcgtccgagttggtgttgagaagcacagcacagaggtcattgtaaaaaaatctggaagcctgcgtataaattctggaattcaaggatactcgctgctaaagacaactcagtctgggtttgaagggtttgtgacggatcgctataggcttcttcctgatacaagggaaaggatagtagcaacagaagttactgcttggtggaggtatccctttgaacatgtttcgcagctcccatcgaagccattctgcttcacgcagagatatcaggatgtaaagaaagtccttgcagagacgttctttggtcctccggatgttggtgtgtatagtccatccgtacaaaatacgctatacctcatggccaaggaagtccttacaaagtccccagatatatcgtcagtccagcttagaatgccgaaccttc

SEQ ID NO: 79147 - DNA, 373 bp, Zea mays
tacactaaatctgtcaatactcgcccgagacgccctagccgaaccagtcagcccgagccttccgctgatgagcaaaagaataagacaagacgcctccggcgagtatccagttttgatgaggacgccggtaccttaactcctgctgctgaagaagtgcctgcaactggtcttactgacactgatcccgatgggtgtgcccaaactgttgctgatcccaatgggtgtgcttcttgcgttgccgctgtggaggatgaagacgaagaatatgaagctcccttaactcggaaaaacagtcggtagttcatcgccagcggtggaagtagtggagttccgtcacctgctttgtctgcccttattggtctgcaagaactgt

SEQ ID NO: 79148 - DNA, 344 bp, Zea mays
  unsure (1)..(344): unsure at all n locations
cgtttcaaccttttccatcgctcctaatcctaacaaccaaaaaatctgagccgtaattattggccccaaaggcggaaaaaagcccggcgcaaaaaagtgcggangagaaccctcggaaaagcggctccgcggagaaagcccccgcggggaagaagccaaagcggagaagcggctacctgcgggcaagtccgccggcaaggaggcggcaacaaaaggtagaagaagcgaagaagagcgtggagacctacaagatctacatcttcaaggtcctgaagcangtgcaccccgacatcggcatctcctccaaggccatgtccatcatgaactccttcatcaacgacatc

SEQ ID NO: 79149 - DNA, 295 bp, Zea mays
tagaaagcgggcaatgcaggaaaacggcgccgagagcaaggccgggatgacggatcggcggatgctgaccgaaaagtcgcagctgcaggcgctggcgatactgcctgcggaacaacgaggagctcattatgagccatgcgatcaagtcggagacggagcgcattgagtacctcaagaccgtgagcgactgctacacgcggacgatgaatctcctcgacgattcgatggcggccagtaccacgtaagagcgttcgggccgaatgaggagcctcgtccgccgggacattgacgacta

SEQ ID NO: 79150 - DNA, 420 bp, Zea mays
tcgtgggacgacgcaagggtccaaattcagtcgtagcatagcagaagcatacttcccgaagcactcttgcaatccactgagttctgtttgttgagacgcatagagctagctgctagcgtcgacaatgtcgctcgtgaggcgcagcaacgtgttcgaccccttctcgatggacctctgggatcccttcgacaccatgttccgctccatcgtcccgtcggcgacctccaccaactccgagactgccgccttcgccagcgcccgcatcgactggaaggagacgcccgaggcgcacgtcttcaaggccgacctcgccggggtcaagaaggaggacgtcaaggtcgatgtccaagacggcaacgtgctggtcatcaacggccagcgcagcagggagaaggaggacaaggacgacaagtggcaccg

SEQ ID NO: 79151 - DNA, 377 bp, Zea mays
ctcgtgggtcgatacacgcctccaatcagagtacgatattcacacagcgaaccgagaaaccaacacagcaacaagcaaagcagcgatccgacatccgagagatggacgcggtgatgttcgggctggagactcccctgatggcggcgctgcagcacctgctggacgtgcccgacggcgacgccggcgcgggcggcgacaacaagacgggcagcggcggcagcgccacgcgcacctacgtccgcgacgcgcgcgccatggcggccaccccggccgacgtgaaggagctgcccggcgcgtacgcgttcgtggtggacatgccggggctgggcacgggcgacatccgggtgcaggtggaggacgaacgggtgctggtggtc

SEQ ID NO: 79152 - DNA, 289 bp, Zea mays
ctaccgctgctcatctcacatccctcgagaagacgcctgctcctcgccgatcgatacgatggccgtcttctccgacctccacaccgccgacaggctcaagtccctcgaggctcacctcgccggcaaaacctatgtgtccggtgactccattactaaggatgacattaacgtcttcgacgcggtgccgtcgaagcctggcgctgagtttcctaatgccgcccgctggtacgaaaacgtctcaggggctgttgcctcaagattccctggtaaggctcttggtgtaaatctc

SEQ ID NO: 79153 - DNA, 397 bp, Zea mays
gagaatatcttataaatgtacaatgagatatgcaacaccattcaccacagcatcagttgacgttattgcacaacagttgcacatggctggttattcacgatggggatctgagaacgtgctaaatgggcgaacaggtgacagagtgcaagccttggttttcatgggccctaccttttaccatatgctgattcatatgtccgaatataatgtgaaattccgtatcactgggccggtgcatcccctcacgaggcagcctgttgccgacaggaaaaggtttggtggacttaactttggagaaatggagcgtgactgcctcgtcacccatgggtcatctgccaacctgcatgaacgcctcttcatgcttactgacatctcccagatgcacatctgccagaca

SEQ ID NO: 79154 - DNA, 367 bp, Zea mays
gtctaaagtcactcgtaatagagaaaaaaaacaggcaaggaaaatggctccgaccgccgccaaggacagtggctccgccgatcgctggcgcgaggtgcaggcgttcgaggacagcaagctgggtgtgaagggcctggtcgactccggcgtcaagtccatcccggccatgttccaccacccgccggagtccctcaaggatgtcatttctccaccagctctgccctcctccgacgatgcgccggccatcccagtggtggacctgtccgtggcgcggcccgaggatctggtggcccaggtgaagcacgcggccgggacggtgggcttcttctgggtggtgaaccacggcgtgccggacgaactgatggcc

SEQ ID NO: 79155 - DNA, 425 bp, Zea mays
  unsure (1)..(425): unsure at all n locations
caaatatttacatccaacgaggatcgaacacatgctcctgcaagagataacacagcanacaaatcttatgctatgcctgcccctaatctggatcattcattctccactatacagttaagagagccaccagtcgtcctgaagccttcagaacaccagtctgagcaggaggcacttgaaatagcaattacaaagttgctattgaagtcatattacaatattgtcaggaaaaatgtggaggacttcataccaaaagcaattatgcatttcctggttaatcacacaaaaagggcactgcataattacctcataacanaactttatagagatgatcttttggaagacttgctcaaagaacctgatgagctaaccataaagaggaagcagatacgtgaaaatcttagggtccttcaacaagcttacaaaac

SEQ ID NO: 79156 - DNA, 378 bp, Zea mays
gacacccgagagtgagtcgtattacaggcaaggaaaatggctccgaccgccgccaaggacagtggctccgccgatcgctggcgcgaggtgcaggcgttcgaggacagcaagctgggtgtgaagggcctggtcgactccggcgtcaagtccatcccggccatgttccaccacccgccggagtccctcaaggatgtcatttctccaccagctctgccctcctccgacgatgcgccggccatcccagtggtggacctgtccgtggcgcggcgcgaggatctggtggcccaggtgaagcacgcggccgggacggtgggcttcttctgggtggtgaaccacggggtgccggaggagctgatggccagcatgctcagcggggtg

SEQ ID NO: 79157 - DNA, 340 bp, Zea mays
cggccgaaggcccaacgaagcccaaaacgttcccaaaggaaaggaacaacccccccccaaggtaaaccaccgccggcggcggcaggaatgaggcaggatgtctccggtatccgtgcttgaccccccaacaaagggaaaggtggtggtgcagacgacggccggcccgctcgatatcaagctgtggcccaaggaggcccccaaggcggcgcgcaacttcgtgcagctctgcctcgagggctactacgacggcaccctcttccaccgcgtcatcaagaatttcctcgttcacggtggcgaccccactggctccggcactgggggtgagagcatctaatgggct

SEQ ID NO: 79158 - DNA, 364 bp, Zea mays
aaaagatagatgcccacagtgcaacggtgataaagttgtgcacgagaagaaggttcttgaagtgtttgtggagaaaggcatgcacaatgggcagaagatcacattccctggtgaagctgatgaagcgcctgacactgtcactggagatatcatttttgttctccagcagaaggagcatcccaagttcaagagaaagggcgatgacctcttctacgagcacaccctgaccttgactgaatctctgtgtggcttccagtttgttgtgactcacttggataacacgcagctgctgatcaaatcaaatccgggccaagttgtgaagcctgattctttcaaggcgatcaacgaccaaagcatgcccatg

SEQ ID NO: 79159 - DNA, 378 bp, Zea mays
aggcaacccccacgaaaaccttcaaacccacaagactcgctacttcgcatttggcaaactcgcccgcaccaagccgctagcaaccaaccagaaatgtcgctggtgaggcgcggcagcgtgttcgacccattctccgtggacctcttcgaccccttcgacagcgtgttccgctccatcgtgccgtcgtcgtcgtcggcggcggcggcctccgagaccgccgccttcgccagcgcccgcatcgactggaaggagacgcccgaggcgcacgtgttcaaggccgacctccccggcgtgaagaaggaggaggtgaaggtggaggtggaggacggcaacgtgctgctcatcagcgggcaacgcaacaaggagaaaggagacaag

SEQ ID NO: 79160 - DNA, 366 bp, Zea mays
tcgtaggaccatacaagagtctatactgagtcggaggagcttaaatggagaaaaatgatgacgaacaagagcagttcgctcccggtccagcccagtcaggatctggtcaagtttttgcctttcatatcgaagaaattaataatttatgtatgagaatttttccaacattcgttttgggcggagacattgatctcaaaacactcgtaactgtcctactaagtggtggcatgggtccccaaaacatggtcatatggtgtgtctagtctgcccttcgttgcagccgggcaattttccttacatatattgcctttaatcaagtatcagatgagtgtcaagtcgctgcggttaattgtttgtttttctaaa

SEQ ID NO: 79161 - DNA, 352 bp, Zea mays
aacatgctccgcctcaggcgcctccccgctgtctccggccgcctcgcgccggaggtcacctccgtctctgcggcctcctcccacagcgccgtcttctttcgcaccctccaaatcctcgtccagcaggggcccgtccgcctccaaaagctctctgctccggacaccgggatcgtggagctgaggctggagcggccggaggccaagaatgccatagggaaggagatgctccaggggctgcggagcgcgatccaggaggtggaggccgacacggctgcaaacgtcgtcttggtgacgagctcggtgcccaaggttttctgcgcgggcgctgatctcaaggaaaggaggttgatgg

SEQ ID NO: 79162 - DNA, 308 bp, Zea mays
  unsure (1)..(308): unsure at all n locations
aaggtgtcaatcatgaatgatggttccatcgctgtcaaggttggaggaattgagataggtcaaggattgtggactaaagtgaaccagatgacggcctttggactgggacagctgtgtcctgatggtggcgaatgccttctggacaaggttcgggttatccaggcagacacattaagcctgatccaangaggtatgactgctgggagcaccacttctgaaactagctgtgaagcagttcggcaatcgtgtgttgcacttgttgagaggctgaagcctatcaaggagagtctcgaagctaagtccaacac

SEQ ID NO: 79163 - DNA, 439 bp, Zea mays
  unsure (1)..(439): unsure at all n locations
gggaccacccacgcgtccggagaactctgtcttccactgcccagaccaccattgagattgactcgctgtacgagggcattgacttctactccaccatcacccgtgccaggtttgaggagctcaacatggacctgttcaggaagtgcatggagcctgttgagaagtgcctgagggatgccaagatggacaagagcagcgtccatgatgttgtccttgttggtggctccactaggatccccagggtgcagcagctgctccaggacttcttcaacggcaaggagctgtgcaagaacatcaatcctgatgaggccgttgcctatggtgctgccgtccaggccgctatcctcagtggtgagggcaacgagaaggtgcangacctgcttctgcttgacgtcactcctctctctctgggtctggagactgccggaagagtgatgac

SEQ ID NO: 79164 - DNA, 402 bp, Zea mays
gtccaaagtgtgctctaaaatgcgtcctattaagtactccagaatgaggtcaggacggcgacgcccgacggtcgcatggtgatggaggaggacctgagccggatgccatacctgaaggccaccatcaaggagtccatgcgcatccacccgccggcgccgttcctcctgccgcacttctccacccacgactgcgagatcaacggctacacgatccccgccggcacgcgcgtcatcgtcaacgcgttgggcgctcgccagggacccgacgtgctgggacaaggccgatgagttcttcccggaacgctttcctggaaacaggccgcaacgccgatgtcgacatgtacggctaggacatccggtttcgtgccgttcggggctgggcgcaggatctgcccgggggcc

SEQ ID NO: 79165 - DNA, 365 bp, Zea mays
agctgctccgcgcccccgacgccggtgattaggagcaggagcaagaagggttcggaatggccaagtctaagaaccacacggcgcataaccagtcgttcaaggcgcacaagaacggcatcaagaagcccaagcgccaccgccagacctccaccaaggggatggaccccaagtttctgaggaacttgaggtactcaaggaagggcaataagaagagttgtgaggctgagtcagaggagtgagatgatgcctgagtttgtggcgacaaatgcatctcttgtatcgttagggtcttagttgtgaacttaattttcacatctgtatgattaaaagagattcatcaattggtactgaagtgttgttttttt

SEQ ID NO: 79166 - DNA, 298 bp, Zea mays
actctacactgcaatcactctatagtgagtcataatactgcctgaccagacctacctgattgcaacagccaacagcagctggtctgactgacatggcaaaggacatcgaggcatcggggcccgaggcgggcgagttctcggccaaggactacaccgaccctccgccggcgccgctggtcgacgcggaggagctcacccagtggtccctgtaccgcgcggtcatcgccgagttcatcgccacgctgctcttcctctacatcaccgtggccaccgtgatcgggtacaagcaccagacgga

SEQ ID NO: 79167 - DNA, 423 bp, Zea mays
cgggccgacccacgcgtctagttcgcgcagccacaagaatgtgatatccctcgttggtttctgcttcaagaatgatgaccttctgttagtgtatgagtatttgcaacgaggcagcctggaagagatactgcatggtaaaaaagaatgcaagagcatatttggttggactgagaggttcagcgtggctatgggagttgctcgtgctctggattatctccatagtgataacaacagtcgtccagtgatccatagggatgtcaagtcatcaaatatcctcatttcaaaatgctttgaaccaaagttatcggactttggtctcgcagtctgggctgctgatgtgacatctcagatgacatgcaatgatgttgcaggaactttcggatacttggctcctgaatacttcatgcatggcaaggtgggcaa

SEQ ID NO: 79168 - DNA, 364 bp, Zea mays
cattgtacaactaagtcgtaaaacgtaaatcgtctactttggattacgagatgtttttcatttcaatataatatacatttgaacataagttatcgtgatattatatgttaccgttgcaacgcacgggcactcacctagtaaagaccaaagagtaattgtcactcgcgcgcggcacccaattttttctggcgcccaaaattggccgtagaggcccacctccagttgaactatggaccaaaccctatttcctcttttccaccacccggagttccgccgccagaagcaaggccccttcgtcgcctccgtccgccgcgctctcaactccatcgccatcctcctctgactcctccgacgacggctcctc

SEQ ID NO: 79169 - DNA, 197 bp, Zea mays
gggcttattcaaaaatggttcccgaacaaaaggtggtaaaaaaggccccggcggggcttcccggcggggccggccccaaaaaaaacccggtctctcgctccttgaaggccggcctcaatttccccttaggccttatcggccgcaacctcaaccaggttcgctagtccaaccttgtcggaaccggggcccccttcaac

SEQ ID NO: 79170 - DNA, 428 bp, Zea mays
cgatccaacaccctagattgagtcgtatcacctccccctccggttcgggttcgggttcgtgaggttctccggggttcggtttcgtgggtgagcggatcgagatggcggcgtcggatgttgagtaccgctgcttcgtcggcggcctcgcctgggccacggacgaccactccctccacaacgccttcagcacctacggcgaggtcctcgagtccaagatcatcctcgatcgggagacgcagaggtcccgcggcttcggcttcgtcaccttctccacggaggaggcgatgcggaacgccatcgagggcatgaacggcaaggagctggacggccgcaacatcaccgtcaacgaggcccagtcccgcggcggccgtggaggccgccggcgccggcggttacggtggtggccgtggaggcggcggctacggcgg

SEQ ID NO: 79171 - DNA, 277 bp, Zea mays
tcacgggtcaacacacgcctccaaaatattcatcacacaacaaggaacccccccttagccaaaccccaacaataagaactcccaattggaacccaagaaacattacctgggcgggctaacccaaaaaattgtgaaggcttttgcaaacaaccccaatttcggcttcaacccttccggaaacagggtgaaaaccgggttaaccttcaacaacccaaggtgcgtccctgccctgggctacgacaatggctgcacgcaccgggaaagtgtcccgggtgcc

SEQ ID NO: 79172 - DNA, 311 bp, Zea mays
tactatccatcattcgccaacttgcagagatcagggaaccggaattccatccactgactgaccgctcatggcgaaggtccacctctacttcgccgcggcctgcgccgtcgtcctcgcgctcgccaccccggccctcgccggtgaccccgacatgctgcaggacttctgcccggctgactactcctccccggtgaagctgaacgggttctcttgcaaggcgaacttttcggcggacgacttcttcttcgacgggctgaggaacccgggcaacaccaacaacccggcgggctccgtggttacggcggccaacg

SEQ ID NO: 79173 - DNA, 329 bp, Zea mays
ctcgtgggcagatacaagcctcaagaatgagtcgtagtatgctgttgctgtcgagacagactactcatacccacatgctgacaaaatcaaggagtacctcaaggacccaagcaagtttgctgttgccgccccggttgctgctggggactctggcgctgcagctgctcccaaggaagaagagaatgctgcggagcctgaagaggagtcggacgaggaaatgggcttcagcctcttcgacgactagagctgctgttttcgtcaaactgctgcaagttttggctttttttatcatctacaagtactgtttcctaaattttttagcagacaaa

SEQ ID NO: 79174 - DNA, 383 bp, Zea mays
ctcacgggccgacacacgcgtcaacacacacttctggcaatcttgaacggaacctagctgcattggctcgtgcagctgctgttaaggttgcagagcaagttaaaactcttagacttggcaaggaaatacaaccaattactacaacccttcttgattcaaggcttgctgatggtggtgaagttgaaatggaagttattcctatggagcatgatatatcaaacacttacgaaaatccatctcctatgattgttgatgaggctatgctagaaaaagtacttgggcctcctagatttgatgacagagaaactgcagatcgtgtagcaagcccaggagtctcagttggccttgtctggacttcggttggtggggaagttcagtttgtg

SEQ ID NO: 79175 - DNA, 318 bp, Zea mays
caagcaagaaccacacctcctcccttcgcctgtgatcatgtcgtcttgctgcggcggcaagtgcgggtgcggctccagctgctcctgcggcagcggatgcaacggctgcggtatgtaccctgacgtggagaccgccgccaccagcagcgtcaagaccacggtcctcgccgcgccgaccaccaaggccagcgccggcggcttcgaggcggccaccgagggcggcggctgcgactgcaacacctgcaagtgcggcaccagctgcggctgctcctgctgcagctgcaactgagctggcccggcccggcgattgcgcacgag

SEQ ID NO: 79176 - DNA, 370 bp, Zea mays
tcgtgggccgacccacgcgtcaacgatgtgtcctccatatcaacacagcaagtcagcaacaagcaaagcagcgacccgagagatggacgcgaggatgttcgggctggagaccccccgggtggcggcgctgcatcacctgctggacgtgcccgacggcgacaaggcgggcggcggcgccacgcgcacctacgtccgcgacgcgcgcgccatggcggccaccccggccgacgtcaaggagctcgcgggagcgtacgcgttcgtggtggacatgccggggctgagcacgggcgacatcagggtgcaggtggaggacgagcgggtgctggtgatcagcggcgagcggccccgggaggagcgcgaggacgccaag

SEQ ID NO: 79177 - DNA, 421 bp, Zea mays
  unsure (1)..(421): unsure at all n locations
ccaagcctctagcgagaatcgcgataagagcaggagcaggcaacgcgcaccgaaatcttccaatccacaagactcgctacttcgcagttggcagactcgcccgcagcgagccgctagcaaccaagcagaaatgtcgctggtgaggcgcggcagcgtgttcgacccattctccgtggacctcttcgaccccttcgacagcgtgttccgctccatcgtgccgtcgtcgtcgtcggcggcggcggcctccgagaccgccgccttcgccagcgcccgcatcgactggaaggagacgcccgaggcgcacgtgttcaaggccgacctccccggcgtgaagaaggangaggtgaaggtggacgtggaggacggcaacctgctgctcatcagcgggcaacgcagcacggagaaggaggacaagggcgac

SEQ ID NO: 79178 - DNA, 339 bp, Zea mays
attaagggccaaaaagggcttgaaggtgttggggatttgggcaagccccatggtgatcagggtggagtgggcgctgcggctgaagggcgtcgagtacgagtacgtcgacgaggacctcgccaacaagagcgccgacctgctccgccacaacccggtgaccaagaaggtgcccgtgctcgtccacgacggcaatccggtcgcggagtccaccatcatcgtggagtacatcgactaggtctggaacggcggctaccccatcatgccgggcgacccctacgagcgcgcccaggcgaagttctgggccaggttcgcggaagacaagtgcaacgctgctctgta

SEQ ID NO: 79179 - DNA, 402 bp, Zea mays
ctcacgggccgacacacgcgtcaaatcaaaatgcttgcagaaattaaagaggagcagggacagatttacgaggctgctgatttgatgcaagaagttgctgttgaaacatttggctctatggcaaagacggagaaaattgctttcattcttgagcaggtccggctatgcctggatcggcaagattttgtcagagcacaaattttatccaggaaaatcagtactagagtatttcacgcagatccatcaaaggaaaaatagaaaccaaaggaaggtgacagtattgttcacgatgctcctgcagatattccttcccttctagaattgaagcgcgtctactacgaactgatgattcgttattactctcacaacaatgattacttggaaatctgccgttgttacaag

SEQ ID NO: 79180 - DNA, 360 bp, Zea mays
  unsure (1)..(360): unsure at all n locations
cacaagcctcaagattgagtcgcatcaccctcttatcaagtcctcctcgggttagggttccttagggttttgtggaggggcgatggcggcggctgatgtggagtaccgttgcttcgtcggcggacttgcctgggccaccagcaacgagtcgctggagaatgccttcgcctcctacggcgagatcctcgactccaaggtcatcaccgaccgggagacggggaggtcccgcggcttcggcttcgttaccttctcctccgagaactccatgctcgacgctatcgagaacatgaacggcaaggagctcgacggccgtaacatcaccgttaaccaggcccagtcccgtggcggccgcngcggcgg

SEQ ID NO: 79181 - DNA, 375 bp, Zea mays
cgggtcagcccacgcgtccagctccgatgaaatccaccaccgcggccggggcctcccagatctcgctggaggcagcggcagcggcggcggtggggggcgatggcgctcaacatgaagaccctgacgcaggcgctggcgaaggcgtcggctgtcatcgagaagacggtgtccacgacggtgcaggaggtgacgggcccgcgcccgctgcaggactacgagctgctggaccaggccgggtccggcgggccgggactcgcgtggcggatctacacggcgcgaccgcgggacggcgccccctcggcgccctaccccgtcgtctccgtctgggtgctcgacaagcgcgccctcgccgaggcacgggcccgggccgggctg

SEQ ID NO: 79182 - DNA, 311 bp, Zea mays
ctcagggttgggacttaatagatcatgtcgggcaaacaggctcgagcttccaagcaatatgagaaggcagcccagtacattgactaccacacttcgttcagtgaagatgagaagaagcatccaagacatctgcaattcagcggcaacctatacactgctgcctgcaatctgaagttgaccgattacaaggaaactgcaaatctttgcacaaacgttctggaactacacagcagcatgtcaatgctcactacaggaaggtgcaagcttacattcagcttactgacctagatctagcataggccgatatcaaa

SEQ ID NO: 79183 - DNA, 414 bp, Zea mays
cgggccggcccacgcgtccacatagatggaaagactctggatggacggaacatacgggttaatcatgctaacgagaggacaggtggcttccgcagcagcggtggttatggtggtggcggctatggtggtggtggtggcggctatggtggcggtggctatggcggcggctatggtggtggtagcggtggctatggcggcggcggcagcggtgactatggtggcggcagcggtggatatggtggcaactacggcaacagggctggtggtggctatggtggtggtggtgattatggagttgcaggtggggctgaaggcagttttgctgctggaggtagcgacagctttggcagcagtaactttgctgacagtggttttggtgaaaaccctgcctgtagctttggcgcaacgggtggt

SEQ ID NO: 79184 - DNA, 429 bp, Zea mays
cgggccgacccacgcgtctacaaagcgacactagctagtccctaccaaagcatacttcctgaaacactcttgcaatccactgagttctgtttgttgagacgcatagagctagagtcgacaatgtcgctcgtgaggcgcagcaacgtgttcgaccccttctccatggacctctgggaccccttcgacaccatgttccgctccatcgtcccgtcggcgacctccaccaactccgagactgccgccttcgccagcgcccgcatcgactggaaggagacgcccgaggcgcacgtgttcaaggccgacctccccggcgtcaagaaggaagaggtcaaggtcgaggtcgaggacggcaacatgctggtcatcagcggccagcgcagcagggagaaggaggacaatgacgacaagtggcaccgcgtcgagcgcagc

SEQ ID NO: 79185 - DNA, 427 bp, Zea mays
ggccgacccaagcctctacactaagtcgcatcaccgcgtcacctcctcttcgccgccgccgacgcttcacccggcagccagccatggatgaggagtacgacgtgatcgtactaggcacggggctcaaggagtgcatcctcagcggtctcctctctgtagacggcctcaaggttttgcatatggacagaaatgactactatggaggagattccacctcactcaaccttaatcagctctggaagaggtttagaggggaagacaagcccccagcacatctaggtgcaagcagagactacaatgtggacatggtgccaaagtttatgatggcaaatgggacattggttcgaaccctcattcacaccgacgtgacaaagtacttgtcattcaaagctgtttgatgggagctatgttttcagcaaatggaaga

SEQ ID NO: 79186 - DNA, 257 bp, Zea mays
aacgatccttgagttgacgagcacatacacagctgctagctaatcctgccgtgagtgcaatgcatgcaaagatgacgaagcccgcagccatcgttgttgctgctatcgccgtcctctccgtcagcctgctggctgggtcgtcgtgccttgcccttgcgcggcccagcggcgacttctccatcgtgggctactcagaggatgacctgtcgtcgcacgagaacctgacggagctgttcgagcgctggctgtcccgccac

SEQ ID NO: 79187 - DNA, 425 bp, Zea mays
cgggccgacccacgcgtctaagcaaaatcgaaccaaaacggagagagacaatcgagagagatggcaaactgttttggtgacgtcgtggacaattacaagctagacacaatgccaagatatatcggcaaaaagaagactcgagaagaccgggcacgagaggcctcctatctcagtaatgagaatgagaagtacaagaaagctaaagactatgtgaacatgctgaaggactggtacggcaatggagcgtcgacgctgtgcgtgatctacaaccagacgggcggaaccctgcggtacgtcgacgacaaggactggctgggctacccggggccgacgccctacccgacggagatcggcaacgggcagtgggcgtccttcctccacgtccacaagaacggggcctcgtcggggtccatggccgctgtcgt

SEQ ID NO: 79188 - DNA, 400 bp, Zea mays
atctgctagtatagcgggtgatatggttcttgcttctgcctactctcatgagttgccacgatatggtcttgaagttggtctgaccaactatgcagctgcctactgcactggacttctgttggctcgccgtgtgctaaagatccgtggtttggataaggagtatgagggcaatgttgaggccactggtgaggacttctctgttgagccagctgatgagaggaggccattccgtgctctcttggatgttggccttatcaggactacaacagggaaccgtgtctttggtgccctcaagggagctttggatgggggcctggatattcctcacagcgagaagaggtttgctggattcaagaaggatgacaagcagttggatgctgatacccaccgcaggtacatc

SEQ ID NO: 79189 - DNA, 374 bp, Zea mays
tacggacgcttgggcgcgggcggacaaggagcaggcggaggaggagctgtgccaagccacaatgggtatctcgcgtgactcgatgcacaagcgccgggccaccggtggaaagcagaaggcctggaggaagaagcgaaagtatgagcttggtcgccagccagccaacaccaagttgtcaagcaataagacagtgaggagggtccgtgttcgtggaggtaatgtgaaatggagggctcttcgccttgatactggtaactactcatggggaagtgaagctgttacccgcaagacccgtatcctcgacgtggtctacaatgcatcaaacaatgagcttgtgaggacacaaacccttgtgaagagtgccattgtgcaag

SEQ ID NO: 79190 - DNA, 365 bp, Zea mays
ttcccgggccagaactcgcggctcgacctcacgcgtccacagacgcgtacgcacgacggtattacgcactcaagcttatttagtttagcacacaccatcagccaaagcatactagggatcatatgcatgccaagatgttattacagcatcagattcagagctccagaagaagatggcgcatagctgcacgaggcttgcacgtggcctccaacgggacggctttgggcagagtgagcccgccgcccgcggccatgtcgatctcgtggccgtccactcggtcccagtcgaagcactggatcagcgtgccgagcaccaggctgatggtccgcagcgcgagggtctccccagcgcacttgctccgcccc

SEQ ID NO: 79191 - DNA, 388 bp, Zea mays
cgggtcatcccacgcgtccaaacaactcctgtataccaggaagaccgaacctgttgaaggagcccagtggacgggaatagtgacaacaatcgctgtcgagatgctgaaagcaaacatggttgatgctgtggtttgtgtacaaagtgatcctgacgacaggcttgctccaagacctgttttggccaggacaccagacgaagtaattgcagccaaaggtgtgaagccaacattatcaccaaatctcaatacacttgccttagtcgagctggtgtaaagcggcttcttttctgcggtgtgggctgtcaagtgcaagctttgagatctgtagaaaagtaccttggtttggaaaagctttatgtgcttggaacaaactgtgttgacaatggta

SEQ ID NO: 79192 - DNA, 386 bp, Zea mays
acggacgcgtgggctccgccgccgacccgccgcggtccgtggactggcggcaggagggcgcggtgacgggcgtgaaggaccagggccactgcggaagctgctgggccttctcgacggtggtggccgtggagggcatcaacgccatccggacgggcagcctggcgtcgctgtcggagcaggagctgatcgactgcgacacggacgagaacgggtgccagggcgggctgatggagaacgccttcgagttcatcaagtccttcggcggcatcaccaccgaggccgcgtacccgtaccgcgcgtccaacggcacctgcgacggcgatcgggcccggcgcgggggaggcgtcgtcgtggtgatcgacggccaccagatggtgccggccggc

SEQ ID NO: 79193 - DNA, 410 bp, Zea mays
actcccggcggcggcggcggcggcgcagcagcggcagcagcatccgaagatggtgaagttcctcaagcccggcaaggccgttatcctcctccagggccgcttcgccggcaggaaggcagttatcgtgcgcgtgttcgaggagggcacccgcgaccgcccctatggccactgcctcgtcgcaggcctcgccaagtacccaaagaaggtgatccgcaaggactccgccaagaagactgcgaagaagtcgcgcgtcaagtgcttcatcaagctcgtcaacttcactcacctcatgcccacccgctacaccctcgacgtcgatttcaaggatgtcgccaccggtgggcccgacgcactctctacccacgacaagaaggtcgccgcctgcaagacggccaaagcgcgccttgaag

SEQ ID NO: 79194 - DNA, 420 bp, Zea mays
aacaccacacctcttcctcctcttcctcctcctagcacagctagcgcctgctccccttcgtctgtgatcatgtcttgcagcagcggcaagtgcaactgcggctccagctgctcctgcggcagctcatgcaactgcatgtcccctgacgtggagaccgccgccgccagcagcatcaagaccatggtcctcgctgcgccgaccaccaaggccagcgccggcggcttcgaggcggccaccgagggcggcggctgcgactgcaacacctgcaactgcggcaccagctgcggctgctcctgctgcagctgcaactgagccggcccgcccggcccggcgatggcgcacgagagtcgagaggacgacgacgacgaggcgtataaatataatagcagcgtctaaataagatcctgtcaactgcacccg

SEQ ID NO: 79195 - DNA, 417 bp, Zea mays
acagcagcaccagtagagtctccttcctctccggcggcgatgtctgggcgcggcaagggcggcaaggggctgggcaagggcggcgccaatcggcaccgcaaggtgctccgcgacaacatccaacggatcacgaagccggcgatccggaggcttgcgaggaggggcggcgtgaagcgcatctccgggctcatctacgaggagacccgcggcgtgctcaagatcttcctcgagaacgtcatccgcgacgccgtcacctacactgagcacgcccgtcgaaaaaccgtcaccgccatggacgtcgtctacgccctcaagcgccagggccgcaccctctacgggttcggcagctaagcgcgccctctccatctgggggtgggcctaatactggtggcgtttctcccttgggttccctggtcc

SEQ ID NO: 79196 - DNA, 398 bp, Zea mays
atggagcgtcgaagctgtgcgtgatctacaaccagacgggcggaaccctgcggtacgtcgacgacaaggactggctgggctacccggggccgacgccctacccgacggagatcggcaacgggcagtgggcgtccttcctccacgtccacaagaccggcgcctcgtcggggtccatggccgctgtcgtctaccgcggcaaggacggcggcggcagcgagcgcgacttcgccatggcctggagcaccccctggggcgcctccaagaacagggcctactgcgagatcggcaacgtcggctccttccagtcgcagtgggacaatctctacaaaaaactcaacaaggccggatacactaccaacgcaagtggtaccagctcgtctatttccgccgcaactgcc

SEQ ID NO: 79197 - DNA, 390 bp, Zea mays
agcgcgactgacatgtcgatgctcaccagcatactgggccgcaagcatcagcagccgccgccgccgccgcagcagcagcagcagcagcagaagggcggcggcgcgcgcactggcaccggcgccggcgccggcacggaggcggcggcagtggagccggtgagcatcgacatcgcggagcaggggccgctagtggacgccatcacgctggcggcgttcgcggcgccggcgctaggcctgccgccgttcgcgacggccagcatggactggaaggagacgccgacggcgcacgtgttcatggccgacctccccgggctgcgccgcgacgaggtgaaggtggaggtggaggaggagaggctgctccggattagcgggcagccgcagcgcgccgcc

SEQ ID NO: 79198 - DNA, 418 bp, Zea mays
gccttcccggttacatgttcactaacaaggtcgggacggcatggcccttggagctgcgtaccatcactacctgcagctcgccggcgaccatggcaccgccacacacgcactgctcctcggcgtacttatcttcctcgtcatccgcctagtatccgcaaggcgaaccggcacaacctcagccaacaaacgtaagcagcaacagcggcttccgctcccgccttcgcccccgggcaagctgcccatcatcggccacctccacctcatcggcgccgagacccacatctcgatccgggacctggacgccaagcacgggcgcaacggcctgctgctcctccgcatcggcgccgtgcccaccctgttcgtgtcctcgcccagcgccgccgacgccgtcctgcgcacccaggaccacatcttcgcg

SEQ ID NO: 79199 - DNA, 404 bp, Zea mays
tacatccctctagactgagtcgtaatattcgctgcgatcatccctaggaacacgacggttccagcaaggagggacatgctgttcacaacgacacacgacaagcagaccgaagccctaattgctgtgtatgaaggagaatgggaacgtgctgaagataaccatctgttagggtacttcaagattactggaattccggcagcccctaagggagcagttgatatcagtgtatgcatggatatcgatgctgccaatgtcctcagggtgttcgcaggggtcgtcaagcctcaaggcccagccattccaccgttcatcgaggtgaggatgccaacgctggacgatggccatggttggtgtgggcaagctctagcaaagatgtatgggaagattctcgaccttgctgttct

SEQ ID NO: 79200 - DNA, 415 bp, Zea mays
aaagttagcgccgctaatccgctccctattcaccatccaatccaatcggcttcccccaggcacccatggcgacggcggtggaggttcccgtggaggcgccggtgaggacagtgaaggtcaccaatgtctctcttagtgcaactgtgcaagacattaaggagttcttttccttttcaggagatattgatcatgtggagatgcagagtggtgatgagtggtcccaagttgcatatgtcactttcaaagatgcacaaggcgcagaaacagcacttcttctttcgggtgccacaatagttgatctttctgtcatcattgcacctgctccagagtatcagccacctcctactgcctctgctccaccaatgagtggaaccagagttccagttggtggtggagacaacaacgttgttcacaa

SEQ ID NO: 79201 - DNA, 395 bp, Zea mays
gccacatggcgggcaaggtgctcgtcgccgtctccgagcacgtgaaccgcctcgtcgccgcgcggctccagttcgacgtcatgggcgtcgagaccgtcctcgtcgcgcgcaccgacgccgtcgccgccacgctcatccagaccaacgtcgacgcgcgcgaccaccagttcatagtcggcgccaccaacccgggcctcaggggccagagcctcgcggccgtgctgtcggccggcatgtcggcgggcaagagcggcagggagctccaggccatcgaggacgagtggctggccgcggcgcggctcaagaccttctccgagtgcgtcagggacgccatcgcgggcctcggcgtcgcgggccaggagaagcagcgcaggctccaggagtgggaccgcgcc

SEQ ID NO: 79202 - DNA, 409 bp, Zea mays
  unsure (1)..(409): unsure at all n locations
agtctcctcctttccacttcctctcccgttgccaggcatggggttggcctagttgtgcccgttgagcactagcagcctccttgaaacctccagatctgtgcctccaaggcccccgttcctcggcaacaagggtcctatctgtggtgtgccagacttcaagatgaggggaaagaagagtgatgagctcgaacctgtcgatgctggcgatgaagatgatgatggtggtgacgatggggacgaggatggtgactttggggaggagggtgaagaggacgtctcagaaggggagggatatgacaacccaaagggcaatgagaccaagaagcaaagaggtgatcctgaggaaaatggtgaggaagatgaggaagaaccagaagatcagganggtggcggcgacgacgatgatgac

SEQ ID NO: 79203 - DNA, 432 bp, Zea mays
actcgtgggtcgatacaagcctctagagtgagtcgtactaggcaggcgccggtgcgcccgcagttccccaggccggtcgcccagcccccaacttcgacgtcatcgtggtgggcgccggcatcatgggcagctgcacggcgcacgcggcggcgtctcgcggcgcccgcgtcctgctgctggagcgcttcgacctgctccacccgctgggctcctcgcacggcgactcccgcatcatccgggacgcctacgcgcagccgcggtacctccgcatggtgcgcctcgcccgctgcctctgggccgccgccgaggcggaggccggctaccgcgtgctcaccccgacgccgcacctctccatgggcccgcggagcagcgcctcgctcgccgccgccatcgctaacatcggtgccgaggaggtggacgtggacgaccttc

SEQ ID NO: 79204 - DNA, 415 bp, Zea mays
acgttagcttcggaagggaacattggtcaagttgagttactagaggaagggaaagcattactcgatgaggacttctatgaagataagaaaatccttctcaggggataccagagatcaatggtcaaatcaatgagcctggcagcaaaagttccacattttcattatctagaggagataaattgtgattctcttgtgcaactaaaaaccacatttcaaaatgagaacaaggatcaaactatcaagcacactttccttccgttcctcataaagtcactttctatggcactgagtaaataccctatgttgaacagttctttcattgaggaaactaacgaagttgtgttcaaggggcctcacaacattggggtggcgatggctacaacacatggattagtcgtgccaaacatcaagaaag

SEQ ID NO: 79205 - DNA, 392 bp, Zea mays
gccagcgaaaactcagagtctcgagtttcctcggagcggaggcgatggctgggaagggagggaaaggcttgctcgccgcgaagactacggcggccaagtccgccgagaaggacaaggggaagaaggccccaatctcacgctcctcccgcgccggcctccagttccctgttggacgtatccaccgtcagctgaagcagaggactcaggcaaatggtcgtgttggtgccaccgcagccgtctactccgctgccatcctggagtacttgactgccgaggttctggagctggctgggaatgctagcaaggatctgaaggtgaagcgtatcacccctcgccatttgcagctagccattcgtggagacgaagagctggacaacctcatcaaagggcac

SEQ ID NO: 79206 - DNA, 397 bp, Zea mays
accatcttcgaggacgagtcgctctccaacccgcaccgcgccaccggcggcgcccccaagttcatccgcaagcttgtggaagggattgaggataccgtgggtatcggcaagggcaccaccaagatatacgccaccgttgatctggagaaggcccgcgtggggcgcacccggatggtctccaacgagcccgtgaaccctcgctggtacgagtccttccacatctactgcgcgcacatggccgccgacgtagtattcaccgtcaagatcgacaaccccatcggggcctcgctcatcgggagggcttacctgcctgtcgaggacatcctgggcggagacgagatcgacaagtggcttgagatatgcgatgagaagcgcgagcctattggggacagcaaga

SEQ ID NO: 79207 - DNA, 391 bp, Zea mays
aactggcttctcctccccctcttaccaagtcctcctcgggttagggttccttagggttttgtggaggggcgatggcggcggctgatgtggagtaccgttgcttcgtcggcgggcttgcctgggccaccagcaacgagtcgctggagaatgccttcgcctcctacggcgagatcctcgactccaaggtcatcaccgaccgggagacggggaggtctcgcggcttcggcttcgttaccttctcctccgagaactccatgctcgacgctatcgagaacatgaacggcaaggagctcgacggccgtaacatcaccgttaaccaggcccagtcccgtggcggtggcggtggcggcggtggctacggcggcggtcgcggcggcggcggctatggtgg

SEQ ID NO: 79208 - DNA, 416 bp, Zea mays
cgcgggtcatcccacgcgtgccacctcctctgctcacccccacctcccggtccggcagcagagagcgggggtgcagagagatcgagatccggaggccgcgagtgggagcgccaccaccagcgactgcggcaatggcgggcacggtgacggtcccggggtcgtcgaccccctccacgccgctgctcaaggacgagctcgacatcgtgatcccgacgatccgcaacctcgacttcctggagatgtggcggcccttcttccagccctaccacctcatcatcgtgcaggacggcgacccgaccaagaccatcaaggtgcccgagggcttcgactacgagctctacaaccgcaacgacatcaaccgcatcctcgggcccaaggcctcctgcatctccttcaaggactccgcctgccgctgc

SEQ ID NO: 79209 - DNA, 407 bp, Zea mays
ttcacgggtaaacccacgcggccggacgttctgagcaaggaggagacatttctggcctgcacccttggctggtgtattgaatggcttcaagcttattttcttgtgcttgatgatattatggacaactcccagacacggcgtggccagccttgctggtttagagtgccacaggttggtctcattgcagtaaatgatgggattatccttcgcaatcatatctcacgaatccttcaacgccacttcaaaggaaagccatattatgttgatatcattgacttgttcaacgaggttgagttcaagacagcttcagggcaaatgttggatcttatcactacccacgagggtgaaaaggatctaactaaatataacttgacagttcaccgccgcatcgttcagtacaagacagc

SEQ ID NO: 79210 - DNA, 353 bp, Zea mays
acttctttactcctgcgcatgtgatgccacttctggaaatagttcgtactcagcacacttcaccacaagttgttgttgacttgctggatgttgggaagaagattaagaagacaccaatagtcgtcgggaactgtactggctttgcagttaataggatgttctttccatacactcaatcagcactcttttatgttgatcttggtatggatgtttataagattgatcgtgcttgtaccaaatttggaatgcctatgggtcctttcagactggcagatctggttggttttggtgtggctgtggccactggtatgcaataccttgaaaatttcccagagagggtctacaaatcaatg

SEQ ID NO: 79211 - DNA, 385 bp, Zea mays
ctcgcgggcagatacacgcctcagaattgattcgtaggagacaatgttgcgtatgccctgtctcatggactaacggtcattgcatgtgttggtgatacccttgatcatagggatgctgagtctaccatggatgttgttgctgcacatccagaagcaattgctgataacatcaaggactggatcaacgtaattgttgcctatgaaccactttgggctattggaactggtaaagttgccaccccagctcaggctcaggaagtgcacgcctccctgaaggattggctaaagaccaatgccatccctgaggttgctgaatctactaggatcatctacggaggctctgtaactgctgcgaactgcagatagctagcagcacagcctgatg

SEQ ID NO: 79212 - DNA, 343 bp, Zea mays
acttgagcgatcaggacattgttgccctctctggtggccacaccttgggaaggtgccacaaagagcggtctggtttcgagggggcctggactacaaaccctttggtctttgacaactcttacttcaaggaacttctgagtggtgataaggagggccttcttcagctcccaagtgacaaagccctgctgagcgaccctgttttccgccctcttgtcgagaaatatgctgtggatgagaaggctttctttgatgactacaaagaggcccacctcaagctctccgaactggggtttgctgatgcttaaatagaccctatcttggagtgatacattctgctgcctgt

SEQ ID NO: 79213 - DNA, 386 bp, Zea mays
ttttaatataattgctatgcttagtgtgtgactcgttagttttttctttagggtcaaaaatggaaaaaaacttagtaatgatagaaaattaactaataaccaacctattgcttcgtattgtcgagatcctaactaagaaacagtcactatgtgaataaatacatctatcaaaaatgagtagatctatcatatagttgtagcaactgcatttttttctctacaaaagaaacctgattctaggctgtgaagcaaaactaaagggatgtggataaaaggagggatgatagatagaaggaagaagaataagaaagatataggattcccatatgtatggtctatgaattacatcataaaaaaaaggcaatgtgataaagcatcaatattat

SEQ ID NO: 79214 - DNA, 412 bp, Zea mays
acaccgccggaccaccaccgaccctccttccctctcgcgctatggcccagactgttgtgctcaaggttggcatgtcctgtgagggctgtgttggagctgtcaagcgggtcctgggcaagatggaaggcgtcgagtcctacgacgtagacatcatggaacagaaggtcaccgtgaagggcaatgtgacacctgacgccgtcctgcaaactgtttccaagactggcaagaagacttcgttctgggaggctgaggccgtgacaagtgaatccgccacacctgccggcgccaccgcctgacaggttcgatgatctggaagtgcccagcaaaaaaatgtgaatgtatttagcttggatctgttacaaataattgcaaactgctagctcggtctgtacattttacagttgctatttgt

SEQ ID NO: 79215 - DNA, 415 bp, Zea mays
agacgttggctgcgggtggcaagcgatggttgcctacatcaacgtcggatgctactacttcatcggcatacccctcggcgtgctcctcggattcaagttcggtttcgggatcaagggactgtggggaggcatgattgggggtaccctcatccaaacacttgctttgatctggatcacgttaaggactgactggaacaaggaggtaatttttaagccaccgtaaatttccttggttaccgtgccgtgtcactgacagatggtcctcaaatccaccgcgcgtgccgatgtgttcgtcttcgtccatatgctcggttattccttccaagctcaggcttctgttgtgtgggcattttttctctgtgttttgcttccttttttcttgggcactaatttaaccgttttccccccccctttt

SEQ ID NO: 79216 - DNA, 382 bp, Zea mays
  unsure (1)..(382): unsure at all n locations
gcagcagacacctccgccacctccaccctcgaatcgttccccaccatggcgtcgcagggatcctccgtcttcgccgcactcgagcaggccccggaggaccccatcctcggagtgaccgttgcctacaacaaggatcccagccccgtgaaggtcaacctcggggtcggcgcctaccggaccgaggaagggaagcccctagtgctgaacgtggtcaggcgcgccgagcaaatgttgatcaataatccgtcacgtgtcaaggagtacctaccaatcaccggtctggctgaattcaataagctgagcgctaagcttatctttggcgctgacagccctgctattcaggagaatanggttgctaccgtgcagtgcctatcgggtactg

SEQ ID NO: 79217 - DNA, 340 bp, Zea mays
agtgagtcgtcataatccgtggtccgtgtccgcgtcgagtgtgtccgctagtccgctccccctcagtcctcagttcctcacctagcggtagcgtgcgcgcgggatacgtagatggcggcttcggacgcggcagcggcggcggcaacaccggtgacgccgacagaggggacggtgatcgcgatccacagcctggaggagtggagcatccacatctacgacgccaacagcgccaacaagctggtggtgattgacttcactgcaacatggtgtcctccgtgccgcaccatggctccaatttttgctgatatggccatgatctccccaaatgtggttttcccga

SEQ ID NO: 79218 - DNA, 385 bp, Zea mays
cccacgcgtcaaaggacgcgtgggtcctgttagaatttctgtgcgtcgttcatatattcttgaggactcctacaatcagcttaggatgcgctctcctcaggacttgaagggtagactcactgttcattttcaaggagaagaaggaattgatgctggtgggctgacaagggaatggtaccaatcgctttcacgagtcatttttgacaagagtgcccttctatttacaacagtcgggaatgatttgacgtttcaaccgaatcctaattctgtatatcaaactgagcacctctcatactttaaatttgctggacgagtggttggcaaagctctcttcgatggtcagcttttagatgctcattttactagatctttctacaaacacata

SEQ ID NO: 79219 - DNA, 378 bp, Zea mays
acacgcgtctacgtcgcctcacatgaaaccaccgcctccccgatctcgtcgagaggaagcccaatcccgaaaccgccgccctattccaatggcgcccaaggccgagaagaagcccgccgccaagaagcctgcggaggaggagccggcggcggagaaggccacggcggggaagaagcccaaggccgagaagcggctccccgcgggcaagtccgcaggcaaggagggtggcgagaagaaggggaagaagaaggcaaagaagtcggtggagacgtacaagatctacatcttcaaggtgctgaagcaggtgcacccggacattggcatctcgtccaaggccatgtccatcatgaactccttcatcaacgacatcttcgagaa

SEQ ID NO: 79220 - DNA, 333 bp, Zea mays
gccttcacccctcgtcgccgccgccgccaccgccgtcgccgtcgcaagcgacgatgctcaacatcaacttgttccgcactgacaagggcgacaacccagaccttattcgcgagtcccagcgtagtcggttcgcctcccgtcgagctcgtcgacgaggtcatcgccctcgacaaggcatggcgcgaaaggcagttcgagctggataagatccggcaggagcttaacgctaccagcaagaagatcggcaagctcaaagccagcaagcaagaagaggaagcgaagaagctcatggagagcacagacgaaattaagaaaaggttgacaggcaaagaa

SEQ ID NO: 79221 - DNA, 380 bp, Zea mays
ctctaggcagctgcgcctgactgaggcccgacggcaagacccaggtgacggtggagtacgtgaacgagggcggcgccatggtgcccgtccgcgtgcacaccgtgctcatctcgagccagcacgacgagaccgtcaccaacgacgagatcgccgccgacctcaaggagcacgtcatcaagcccgtgatccctgagaagtacctcgacgagaagaccatcttccacctcaacccgtccgggcgcttcgtcatcggcgggccccacggtgacgccggcctcaccggccgcaagatcatcatcgacacgtacggcggctggggagcccacggcggtggcgccttctccggcaaggaccccaccaaggtggaccgcaacggcgcc

SEQ ID NO: 79222 - DNA, 382 bp, Zea mays
  unsure (1)..(382): unsure at all n locations
gcgtccgcncacgcgtccggggcattcacattaacttgaagggttttgctattggcaacggactaacagatccagcaatacagtacaaggcataccctgattacgcattggatatgggattaattacaaaaacacaatttaacaggatcaataaaatagttccaacttgtgaattcgcggtcaagctttgtggtacttctggaactgtatcttgccttgctgcgtactttgtctgcaatacaatattcagtgccatcaggacaatcataggcaataaaaattattacgacatcaggaaaccatgcatcggaagcctatgctatgatttctctaatttggagaaatttctcaacctcaaatctgtcagagagagcctaagggt

SEQ ID NO: 79223 - DNA, 396 bp, Zea mays
  unsure (1)..(396): unsure at all n locations
caatccaagcccctagagcggttctaagtacgagtcgtcgcatcaggtcncctcgattcgccggcggcgccaccaaccaagctcatacatctgaattgactagtcaaactcagtgatctctttggggactaatcaaactcaagaactaagtttcatgtctgatctcgacgtccagcttccatctgcttttgatccgtttgcagaggcaaatgctgaggactccagtgctggtgctggattaaaggactatgtgcacgtgcgtattcagcagcgcaacggaaggaagagtctgacaactgttcagggcttgaagaaagagtacagctacaacaagatcctcaaggatctcaaaaaagagttctgctgcaatggtactgtagtccaagattcagagct

SEQ ID NO: 79224 - DNA, 428 bp, Zea mays
tcactactaggacgcgtgggtcgttacaagcctctacaatgagtcgtactagcaggcggccgggcaggtcggcatggagcctcacatggagagcgcgctgcggcagggcctgtcggaggcggagcagcgggagctggagggcgtggtgcgcgcgcaccacacgttcccggggcgcgcgccggggacgtgcacgtcgctggtgacgcagcgcgtggacgcgccgctggccgccgtgtggcccatcgtgcgcggcttcggcagcccgcagcggtacaagcacttcatcaagtcgtgcgacctcaaggccggcgacggcgccaccgtgggcagcgtccgcgaggtcaccgtcgtctcgggcctcccggcctccaccagcaccgagcgcctcgagatcctcgacgaccaccgccacatcctcagcttccgcg

SEQ ID NO: 79225 - DNA, 403 bp, Zea mays
tcgtgggtcgttacaagcctctaaagtgagtcgtactatccggaagctgaaaatagcagaagaatccagaggcgactccaggtttgtcggcgatgctgcgagcgggaggcaggcggctcctcgccccggggctccgtcggctcggcctgggcacaggcgcctccggcgaggcgggtcctgccgcggcggcggcgggggtgagggcgtaccacgagcgggtggtggaccactacaacaacccgcggaacgtaggttccttcgacaaggacgaccccaacgtcggcactgggttggtcggcgcgccagcctgcggcgacgtcatgaagctgcagatccgcgtcgacgagaactccggcaagatcgtcgacgcctgcttcaagacttttggctgcggctccgccat

SEQ ID NO: 79226 - DNA, 433 bp, Zea mays
actcgtgggtcgatacaaccctctacactgagtcgtctcacgactctctcctcgccggcgacgccgcggagtaggtgcaacagaaactgctcgaggcggaggcggagcctgcggctgcacagacatgggtgatcacgaggcgcgcggtgatgacttcgagaagaaggcggagaagaagctctcgggctggggcctcttcggctccaagtacgaggacgccgccgacctcttcgacaaggctgcgaactccttcaagctcgccaagaactggagcagagctgcatcagtttacatcaagattgctaactgtcatttgaagggagatagcaagcatgaggctgcctcagcgtacgtcgaggcagcaaattgctacaaaaagttttcacctcaggaagctgcgcaagccctaaaccagtctgttaatcttttcctg

SEQ ID NO: 79227 - DNA, 385 bp, Zea mays
  unsure (1)..(385): unsure at all n locations
acaacactctagaatgagtcgtcttaatcttcttcctcctcctcctagcacagctagcgcctgctccccttcgcctgtgatcatgtcttgcagcagcggcaagtgcgactgtggctccagctgctcctgcggcagctcatgcaactgcatgtcccctaacgtggagaccgccgccgccagcagcatcaagaccacggtcctcgccgcgccgaccaccaagggcagcgccggcggcttccaagggggcaacgagggcggccgctgcgactgcaacacctgcaactgcgggaccaactgcggctgctcctgctgcaactgcaactggaccggtcaagggatgggncacgagagtccagaggacgacgacgagtcgtataaatataat

SEQ ID NO: 79228 - DNA, 384 bp, Zea mays
tcgtgggtcgttacaatcctctacagtgagtcatattagatgcaaactagttgccaagcagattgcggatgacggaagggtgttcagcatatggaggcctctctgccctaatgggtatgtctcaattggtgatattgcgcatgttggcatccatccaccgcattttgctgctgtatacaagaatatcaatgggaactttgcactgcctcttggctatgacctggtttggagaaattgtgctgaggattacaagagccctgtatcaatatggcttccaaggccaccggggggatacgtagctcttgggtgtgttgctgtcccttcattcaatgagcccactcttgactgtgctttctgtgtggatgaaagactccccgatgatgc

SEQ ID NO: 79229 - DNA, 358 bp, Zea mays
acaacgcaacagcacaatcatgataccacacctcctcccttcgcctgtgatcatgtcgtcttgctgcggcggcaagtgcgggtgcggctccagctgctcctgcggcagcggatgcaacggctgcggtatgtaccctgacgtggagaccgccgccaccagcagcgtcaagaccacggtcctcgccgcgccgaccaccaaggccagcgccggcggcttcgaggcggccaccgagggcggcggctgcgactgcaacacctgcaagtgcggcaccagctgcggctgctcctgctgcagctgcaactgacctggcccggcccggcgatggcgcacgagagtccagaagaagaggacgacgacg

SEQ ID NO: 79230 - DNA, 420 bp, Zea mays
gactcgtgggccgatgcaagcctctacactgagtcgtatcacagtcccctctagccgccgcctaccgctcgcgctctcctcgcgttcgggaaggtcgtttcgccatggcctcggagacggagacgttcgccttccaggcggagatcaaccagctgctctcgctcatcatcaacaccttctactccaacaaggagatcttcctcagggagctcatctccaactcctccgatgccttggacaagatcaggtttgagagtttgacggacaagaccaagctggatgcacagccagagctgttcatccacattgtccccgacaaggccaacaacacgctgacaatcatcgacagcggcattggtatgaccaagtcagaccttgtgaacaaccttggtaccattgcgccgtcaggcacgaaggaat

SEQ ID NO: 79231 - DNA, 377 bp, Zea mays
caccccgccccaacttgtcaggactcaagaggctcccctcctccctcgccgcggaacacgcgcgccgtcgtcgccagcccgggttcagttctccgttccttggtgcggtggtagccgagcgctccggccatggcgttctatcggggcctcaccgcagtctcgagactgcgatcacgcatggcgcaggaggccaccacgctggggggtgtgaggtggctgcagatgcagagcgcgtccgatctcgatcttaagtcccagttgcaggaattgattccggaacaacaggatcgcttaaagaagctcaagtcagagcatggaaagacccagcttggaaacataactgtggatatggtccttggtggaatgagagggatgac

SEQ ID NO: 79232 - DNA, 392 bp, Zea mays
tcgcggatcgatacacgcctctaggctgactcatataccatggtggacgttgcttgaagaagctgtgaaaagcgctgacggcaaactcggcaagccggagatattcccagcctctactgacgctcgctacttccggaaaatcggattaccagcatttggcttttcacctatggcgaacaccccgatactgctccatgaccataacgagtttctgagcaaagacgagtacctcaagggaatcgggatatacgagtccatcatcagggcactggccactcatgaagatggcggcaaagatgacgaatccagggcagagctgtgagcctgtgactgaggagaaccttgaaccttacctcgcttttgccgcagaccaaatggagcactggaagtca

SEQ ID NO: 79233 - DNA, 351 bp, Zea mays
agcgcgccacgccgaacctgcgagccatcagcccatcacccacccaacccctcgccacgcagatctagggagcttgccctcccaccgggcggtgattcttccgtcccatcaccgatgcggacgccggcgatgctccggtgggccgcggcgctcgcggtcctgctcgccgtcgccgcgccggccgccgggttctacctccccggcgttgccccgagcgatttcgcgaagggtgatccgcttccagtgaaggtgaataagttgacatctatcaagactcaactcccgtatacatattattcccttccgttctgcaagccagataccatagtcgacagtgccgaaaatcttggg

SEQ ID NO: 79234 - DNA, 420 bp, Zea mays
acagcctccaaagccactcccaaacccccgcttccagaaccttctcgaagctccccgccgcctcctccactcgcaccgatggcgaaggaaccaatgcgcgtgctcgtcactggcgccgcaggacaaattggatatgccctggttcccatgattgctaggggtgttatgcttggtgcagaccagcctgttattctgcacatgcttgacattccgccagcagctgaagcccttaatggtgttaagatggagttggttgatgctgcgtttcctcttctgaagggagttgttgctacaactgatgttgtggaagcctgcactggggtcaatgtggccgtcatggttggtggattccccaggaaggagggaatggaaaggaaagatgttatgtcgaaaaatgtttcaatccacaaatcccaagca

SEQ ID NO: 79235 - DNA, 239 bp, Zea mays
accacctcgccgtccctcacgttcctttcacggactcgccagcgcctctccgcgccgtgatctagatgcaggttgttcagcatgggtctggtgaaggaaggcgtcgacatggaggagggaaccctagagatcaggatggagtagaggactgtaactggtgtggccgggcctctggttaacctggggaaagtaataggcccacagtaccaataatctgtgaacatccgacctggagatgg

SEQ ID NO: 79236 - DNA, 375 bp, Zea mays
tactgtgtctcaatataaccctcctccagtgctcttctcttctagccgccgccgcaaccgcttgctagcgctctgcgctctcatcctcgcgtccgtggaaggtcgtctcgccatggcctccgagacggagacgttcgccttccaggcggagatcaaccagctgctatcgctcatcatcaacaccttctactccaacaaggagatcttccttagggagctcatttcaaactcctccgatgccttggataagatcaggttcgagagtttgacggacaagagcaagctggatgcccagccggagctgttcatccacatcgtccctgacaaggccaacaatactctgacaatcattgacagtgggattggtatgaccaa

SEQ ID NO: 79237 - DNA, 349 bp, Zea mays
aaaaggaggaggagaagtcggtggagcatgaatatggcgaaggcgatgagaaggcgatcaacaagaaggataaaaaggagaaagacaagaaaaagaaggaagatgatggagattcagggaaggcagagaaagataagaaggataagaaggctaaagagaacgacggatcagagttgaagggttcaagtggtgagaaacaagagaaaatcaaagataagaaagagacaggagatggcaaagatgtgggggaggaagataaacgcaagaagataggaaacaaggacaaagataagaaggataaaaaggccaaagaaaaggatggatcggaaccaaagggtgacaaggatga

SEQ ID NO: 79238 - DNA, 367 bp, Zea mays
  unsure (1)..(367): unsure at all n locations
ccaagactcgcggatcgacacacgcctctagtacgtatcacagtccattattgccgtctcccttttgcgtgagcaaagaaagagagcgagaagcagtcgccatgtctggcatcatccacaagatccaagagaaactccacatggggggcgaccacaagaataaggaggaggagcaccacaagaaagccgaggagcaccacaagaagganganggggagcaccacaagaaggacggcggggagcacaaggaaggcatcgtggagaagatcaaggacaagatcaccggcgagcacggcgacaagtccggcgaccacaaggagaagaaggacaagaagaagaaagataagaagaagcaccgcgagggcca

SEQ ID NO: 79239 - DNA, 342 bp, Zea mays
ctcgcgggtcgatacacgcgtccaatgttgcacatcgaagtcgacaccgagaaaggaggcctggctgtctaccccaacttcttcgtcgattttggcaccgagcctgatggtcctgccctggcccacgagatgagatatcctggtggggactgcacctctgatatatggatctgaggtcaaggattcggcgtaattaacaggctgctggagaatccctgttgttgtatgcactgtaattaacatggtatccgtgcggtgttctgtcttgtactgcgactgttgccagtggaataaggcatggtttcatgagaactctagattaataaaagaagtcctgattct

SEQ ID NO: 79240 - DNA, 410 bp, Zea mays
agtgccactgcgtgcaaccggggttctacggcaacaagggcgcctgcccctgctacaacaactggaaaaccaaggaaggagggcccaagtgcccctagaataagatccaccgcagctcccgtccgccattgtccccccttctccgaatctggaacgtgttgttcatcttcgaccaccccctaggcttggcattttattactagtataatgctagtgtccgcccgttgcttaatctggaatgctaccagccagatctccatgctctcctgtgagccactcggcagagtgaggattactaggtagggtggcatgtcatgtgctccaccctccactggtacgagtcaatcaactaaagctacccccggattgatgaggaacatcccgcgcgattagtggggcatgtcaataca

SEQ ID NO: 79241 - DNA, 421 bp, Zea mays
  unsure (1)..(421): unsure at all n locations
tcgtggatcgatacaagcctctacactgcgtcgtatcattgcaaccgattgcctatccccctcccaaccaaagaccgatggcgcccaaggccgagaagaagcccgcggcgaagaagccggcggaggaagagcccgccgccgagaagacgacgcccggaagaagccaaggcggagaagcgggtccccgcggggcaagtccgccggcaaaganggcggcgaaggcaagcgtggcaagaagaagggcaagaagagcgtggagacgtacaagatctacatcttcaaggtgctgaagcaggtgcacccggacatccgcatctcctccaagggcatgtccatcatgaactccttcatcaacgacatcttcgagaagctggccggcgaagccgccaagctcgcgcgctacaacaggaagccaacatca

SEQ ID NO: 79242 - DNA, 317 bp, Zea mays
cccgtcccgcacactaacccaaggcagataagatcggataagggtcgcagatcgaagcggtgccagggtgcctgcaaatgacattcagctctcgccgtaagacccttcatcagcaacgactacatgacctacatgttcaagtacgacactgtgcacggacagtggaagcaccatgaagtcaaagtgaaggactccaaaacccttctctttggtgagaaagaggttgctgtgtttggctgcaggaaccctgaggagatcccgtggggttcggttggtgctgaatatgtggttgagtctactggtgttttcactgacca

SEQ ID NO: 79243 - DNA, 254 bp, Zea mays
aatcctagcacctggcctccgtcgcgcatcagcgcatccccatggcccaacatcaagatcgggatcaatgtggttcggcacgatgagcacgctggacgccaaagtagcccggcacagtgacgatgtccagctcgtcgccgtggaggaccccttcatcaacaccgactacactgacctacatgttcaagtacgacattgtgcacggacagtgggaagccacaggaactcaaggtgaaggaccccaaaacccttct

SEQ ID NO: 79244 - DNA, 390 bp, Zea mays
tacaagactctagagtgattcgaaccaccgccgctagaagaagagctcggcgattcccaggtcccgcgagaatatgccgaagcagatccatgagattaaggacttcctcctcaccgcgaggaggaaggatgcccgctcagtgaagatcaagaggagtaaggatgttgtcaagttcaaggtgcgctgctccaagtacttgtacacgctctgcgtcttcgatgctgagaaggcaaacaagttgaagcaatctcttcccccaggtttgaccgtcgaggaggtctgattggatacatggcaacgccgagttgaactacccaagcttctttatcagtagcagagcatgctactctatgtacttttggaacctaagctattagacctgtcagtgtt

SEQ ID NO: 79245 - DNA, 428 bp, Zea mays
tcgcgggtcgacaaacgcgtctaccgttgctcgcctcaggtcaaaccctaagcagggagttgatttatccgctgcagccatgagtaagttgcagtctgagtctgtcaaggatgccatctcccagattgttggggatgccaaggagaagaataggaagttcactgagactgtggaacttcagattggtctgaagaattatgatccacagaaggacaagcgtttcagtggctctgttaagttgccccatatccctcgtcccaagatgaaggtgtgcatgcttggtgatgcccagcatgttgaggaggccgagaagatgggacttgactacatggatgttgaggctctcaagaaaatgaacaagaacaagaagcttgttaagaggcttgccaagaagtaccatgctttcttggcatcagagggcatcatca

SEQ ID NO: 79246 - DNA, 394 bp, Zea mays
acaagactctaaaatgagtcgtactagcggacaaggagcaggcggaggaggagctgtgccaagccacaatgggtatctcacgcgactcgatgcacaagcgccgtgccaccggtggaaagcagaaggcctggaggaagaagcgaaagtatgagcttggtcgccagccggccaacaccaagttgtcaagcaataagacagtgaggagggtccgtgttcgtggaggtaacgtgaagtggagggctcttcgccttgatactggtaactactcatggggaagtgaagctgttacccgcaagacccgtatcctcgacgtggtctacaatgcatcaaacaatgagcttgtgaggacacaaacccttgtgaagagtgccattgtgcaagttgatgctgcccc

SEQ ID NO: 79247 - DNA, 373 bp, Zea mays
ctatcctctcccgacgacagctacacctcacaaccgtgagctcgcgaaggaacgctgttcgcaattccggcgccggcaccatgagtaagctgcagagtgattctctgagggacgcgattgcctcaattaccaatgattcccgtgagaagcagcgcaaatttgttgaaaccattgagctacaaattggactgaagaactatgaccctcaaaaggacaagcgcttcagcggttctgttaagctgcctcacatccctcgccctaagatgaaggtttgcatgcttggtgatgctcagcatgttgaggaggcagagagaatgggtatagacaatatggatgtggaagccctcaagaagatgaacaaaaacaagaagct

SEQ ID NO: 79248 - DNA, 402 bp, Zea mays
ggtcgatgacaagcctctaatcagagtcgcatcatgatgatgagattgaggttgaaattgatagtatggatgctgagacactttgggagcttgaccggtttgtggccaactacaagaagaacctgagtaagcaaaagaggaaggccgagcgagcgatgcttgccagacaagatgcagagttgcgtgcgcagcgccttatacaacaaccgcaaccaaccccagtcccccaagaacctgttggtgaaaaatctctaaagcaagttgcaaaaggtgagcaactaccaacatctgcatcagagaaaaacgacgagaatagacagaacgtgagtggttcaagcaattcaagcagctccagcagtgactcaggatcatcgtccagtgactcagacagtgataactcct

SEQ ID NO: 79249 - DNA, 410 bp, Zea mays
aacactctacagtgaatcatcatatgcaagaaccacacctcctcccttcgcctgtgatcatgtcgtcttgctgcggcggcaagtgcgggtgcggctccagctgctcctgcggcagcggatgcaacggctgcggtatgtaccctgacgtggagaccgccgccaccagcagcgtcaagaccacggtcctcgccgcgccgaccaccaaggccagcgccggcggcttcgaggcggccaccgagggcggcggctgcgactgcaacacctgcaagtgcggcaccagctgcggctgctcctgctgcagctgcaactgagctggcccggcccggcgatggcgcacgagagtcgagaggaggaggacgacgacgaggcgtataaatataatagcggcgttcagtaaataagatcctgtc

SEQ ID NO: 79250 - DNA, 419 bp, Zea mays
ctcgcgggtcgacacacgcctctagagcggttctacgtacgagtcgtcgcatcaggtcccctcgattcgccggcggcgccaccaaccaagctcatacatctgaattgactagtcaaactcagtgatctctttggggactaatcaaactcaagaactaagtttcatgtctgatctcgacgtccagcttccatctgcttttgatccgtttgcagaggcaaatgctgaggattccagtgctggtgctggatcaaaggactatgtgcacgtgcgtattcagcagcgcaacggaaggaagagtctgacaactgttcagggcttgaagaaagagtacagctacaacaagatcctcaaggatctcaaaaaagagttctgctgcaatggtactgtagtccaggatccagagctaggccaggtcattc

SEQ ID NO: 79251 - DNA, 344 bp, Zea mays
tgcggacactcgtgcggacgcgtgggtggaagggcagccaataaggtaaggggtgacgaaaatggctccaacgaccgccaccaaggacgacagtggctacggcgacgagcgccggcgcgagctgcaggcgttcgacgacacgaagctgggggtgaaaggtctggtggactccggcgtcaagtccatcccgtccatcttccaccacccgccggaagccctgagcgacataatttctccggcgcctctgccgtcgtcgccaccctccggcgccgccatcccggtggtggacctctcggtgacgcggcgcgaggacctagtcgagcaggtgaggcacgcggccggga

SEQ ID NO: 79252 - DNA, 388 bp, Zea mays
gcgggtccatacaagcctctaatctaagtcatagaaggcatccctccggaccagcagcggctcatttttgccggcaagcagctcgaggacgggcgcacgctggccgactacaacattcagaaggagagcaccctccacttggtgctgcgtctcagaggtggcatgcagatcttcgtgaagacacttactggcaagacgatcacccttgaggtggagtcctcagacaccattgacaacgtcaaggccaagatccaggacaaggagggcattccaccggaccagcagcggctgatcttcgccggcaagcagctggaggatggtcgcaccttggctgactacaacatccagaaggagagcaccctccacctggtgctccgcctcaagggtg

SEQ ID NO: 79253 - DNA, 384 bp, Zea mays
atatttctcaaagcctgctagttttgaggggatggagaagtttgatactgatttaattacacttcatccaattttaaccgaatgtcgtgtgattaaatctgatctggagcttgctctcatccggtatgctaatgatgtcagttctgaagctcacattgaggttatgagacgagcaaggccaggcatgaaggaatatcaattagaaagtatcttccttcaccatgtttatatgtatggaggttgccgacattgctcttatacatgtatatgtgctactggagataatagtgctgttctacattatggacatgcggcagctccaaatgaccggactttgaatgatggagacatggcactaatggatatgggagctgaataccattt

SEQ ID NO: 79254 - DNA, 433 bp, Zea mays
tgggtcgatacaagactctagagtgactcgtctcatctcacttcctcagtcctcgtccgtctctgctccctcctctctctacctagcaagctagccagccttcctgtagcgcggcagagatggctgcccctgcctccaccacggcggcggcggcggcggcgctgctgctgctgctgctcgtgtcgctcgccgcggcggcggacatgtcgatcgtgtcctacggggagcgcagcgacgaggaggcgcggcggatgtacgcggagtggatggcggcgcacggccggacctacaacgccgtcggcgaggaggagcggcggtaccaggtgttccgggacaacctccgctacatcgacgcgcacaacgccgccgccgacgcggggcgtcactccttccgcctcggcctcaaccgcttcgccgacctcaacaacgacga

SEQ ID NO: 79255 - DNA, 378 bp, Zea mays
ggttcagatgttgctataaagagaatcaacgatcgatgctttgctgggaaggcttctgagcaagagcgtatgaggactgatttctggaacgaggcagacaagcttgcatctttgcaccatccaaacgtagtagccttctatggtgttgttgtagatggacctggtggatctgttgcaacggtaacagaatacatggctaatggctcactccgacaagcattacaaagacatgaaaagatctttgatcggcgtaggcgtctactaattgcaatggatgttgcatttggaatggaatatctccatgggaagaatatagtgcattttgacttgaagagtgacaatctgcttgtcaacctaagggatcctcaacggcctata

SEQ ID NO: 79256 - DNA, 415 bp, Zea mays
ctcgcgggtcgacacacgcctctacactaaatctccatatcgatctcatttgaaatcaacccatcctcgtttcctccgtctagcagcctctcaccctcatggccaagatcaagatcgggatcaatgggtttggcaggatcggaaggctggtggccagggtggccctgcagagcgacgacgtcgagctcgtcgccgtgaacgaccccttcatcagcaccgattacatgacctacatgttcaagtatgacactgtgcacggacagtggaagcaccatgaggtcaaggtgaaggactccaagacccttctctttggtgagaaggaggttgctgtgtttggctgcaggaaccctgaggagatcccatggggttcggttggcgctgaatatgttgttgagtccacgggtgttttcactga

SEQ ID NO: 79257 - DNA, 342 bp, Zea mays
aacgatctcatttgagatcaacccatcctcgtttcctccgtctagcagcctctcaccctcatggccaagatcaagatcgggatcaatgggtttggcacgatcggaaggctggtggccagcgtggccctgcatagcgacgacgtcgagctcggcaccgtgaacgaccccttcagcagcagcgattacatgacctacatgttcaagtatgacactgtgcacggacagtggaagcaccatcaagtcaaggtcaatgaccccaacacccttctctttggtgagaaggacgttgctgtatgtggctgcaggaatccgcaggagatcccatggggttcggttggcgct

SEQ ID NO: 79258 - DNA, 391 bp, Zea mays
tcgcgggtcgacacacgcctctacagtcactcgtgcgaacgcgtgggcggacgcgtgggctacctactactcaagtatccatccttattgagtacagtgttgatccatggactcggaaggagttgtagcagcaaaggtggcagatgagactactaaaccggcaatccaagaagacggcgccgagagcaaggccgggatgactgatctgctgatgctgaccgacaagtcgcagctgcaggcgctggcgatgctgctgcggaacaacgaggagctcatgatgagccaggcgatcaagtcggagacggagcgcattgagtacctcaagacggtgagcgactgctacacgcggacgatgaagctcctcgacgattccatggcggccaggaccacg

SEQ ID NO: 79259 - DNA, 426 bp, Zea mays
gtcgggacaagcctctacactaactcgcactcttcgcaagccagtaggtcaccactcaccactcaaaagcttgtgaagcaggtgagatgggcaaggaggtggatgtgtccactctagaggtcggcggcgtccgtgaccgtgactacgcggaccctccgccggcaccgctgatcgacatcgacgagctcggcaagtggtccctgtaccgcgccgtgatcgccgagttcgtggccacgctgctgttcctgtacatcacggtggccacggtgatcgggtacaagcaccagacggacgcgtcggcgtcggggcccgacgcggcgtgcggcggcgtgggcatcctgggcatcgcgtgggcgttcggcggcatgatcttcaccctcgtctactgcaccgccggcatctcgggcgggcacatcaacccgggcg

SEQ ID NO: 79260 - DNA, 359 bp, Zea mays
ctcgccggtcgacacacgcatccagacaaaatcataccaccaaacaagtgccagcgccctctcgcagtcgccgcaatggagagcaccttcatcatgatcaagcctgacggcgtccagaggggcctcattggtgagatcatcagccgttttgagaagaagggcttctacctcaaggccttaaaccttgtcaacttggaaaggtcgtttgccgagaaccactacgccgatctcgcctccaagcccttcttcaagggcctctttgacaacatcatctctggccctgtggtggccatggtctggaaggacaaaagcctcttcacaactggccgcaatatcattggcgccactaaccccctggc

SEQ ID NO: 79261 - DNA, 380 bp, Zea mays
taaactgactcgtcatacacgaggactcgcagaacaggaccaagatcgccgagcttctgacataccactccaccaatagtggtgatgagctgaccagcctcaaggactacgtgaccaggatgaaggatggacagaatgacatatacgacatcactggtgagagcaagaaggcagtggagaactcccccttccttgagaagctgaagaagaggggctatgaggttctgtacatggttgatgccattgacgagtatgctgttggtcagctcaaggagtttgagggcaacatgcttgtctctgccaccaaggagggtctgaagcttgatgagactgaggacgagaagaagaggaaggaggagctgaacgagaagtttgagggg

SEQ ID NO: 79262 - DNA, 75 bp, Zea mays
ggcatactgtaagggttgttttacgctattgataatacactgtactgttcagctgttgaactctatttcttagcc

SEQ ID NO: 79263 - DNA, 428 bp, Zea mays
tgggtcgttacaagcctctagcgtgagtcggctgacggcgcgccacgaccgcttcgtcgcgggcctccgcgaggtcggcatcgcgtgcctgccgggcaacgcgggcctcttctcgtggatggacctgcggggcatgctccgggagaggacgcacgacgcggagctcgagctgtggcgggtcatcgtacacagggtgaagctcaacgtgtcgcccggcacgtcgttccactgcaacgagcccggctggttccgcgtctgctacgccaacatggacgacgacaccatggaggtcgcgctcgaccggatccgccgcttcgtgcgccagcaccagcacagcaaggccaatgccgagcgctgggcggccacgcggccccttcgtctcagcttgccgcgccggggagcaaccagcggtttccatctcgccatct

SEQ ID NO: 79264 - DNA, 359 bp, Zea mays
tgggtccatgcaagcctctacactgacttctgctacaccaccgccttcttcttgatccagccaagccagggatcgccatgtcggactcggaggagcaccacttcgaatcgaaggccgacgccggagcgtcgaagacctacccgcagcaggctggcaccgtccgtaagaacggcttcatcgtcatcaagaaccgcccctgcaaggttgtggaggtttctacctcaaagactggtaagcatggtcatgccaaatgccactttgttgccatagatatattcaacgggaaaaagctcgaagatattgttccttcgtcacacaactgtgatattccgcatgtgaaccgtactgagtaacagctg

SEQ ID NO: 79265 - DNA, 404 bp, Zea mays
gggtcgatacaagcgtctacactgactctcacaaccgactcgtcagacgtcagccagcagttctaaaccaaggattgatccacgagcttccggaaagcgaggcgcgcgcgcagcgtctaggtgctggtgccggtgccgcccacggatcgggctcgcggatccgcgttcctgctcagcatcttgctcgcaagatccttgttcgcgttttcaattgccaaataggagaccaacaagctcgggaccgtgatcggtatcgatctcggtaccacctacacctgtgtcggtgtgtacaagaacggtcatgtccagatcatcaccaatgaccagtgtaaccgtatcacaccctcatgggttgccttcaccgatagcgaaacggtcatcggtgaggctgccaaaaaacaggg

SEQ ID NO: 79266 - DNA, 363 bp, Zea mays
acaatcctctaaattcagtcgtactgatgttcagccactcccagactgtggttgtgtgcccaggctgccaaactgttctgtgccaacctaccggtgggaaggccaggctcaccgaggggtgctccttccgtcgcaagggcgattaggtcctgcttctcttaacgtgagaagagataaatttggtgttttgcaactttctcaggatatgtactgtactcggtgaggattttgttaattattatggctgttagcgtggcctgacaatgcttgtgtgtaaacctgcactttgtttgagcgtagtgacatctattatggtgctgtttggcttttgctgacggagtggctatgcaaattaaatcagct

SEQ ID NO: 79267 - DNA, 396 bp, Zea mays
tgggtcgggccaagcctctagcataactcgtatgtagcaatggcgggggagacgaagaagggcctggtgctgctggacttctgggtgagcccgttcgggcagcgctgccgcatcgcgctggcggagaagggcatcgcctacgagtactcggagcaggagctgctgggcggcgccaagagcgacatcctcctccgctccaacccggtgcacaagaagatccccgtgctcctccacgacggccgccccgtctgcgagtccctcgtcatcctcgagtacctcgaggaggccttcccggaggcctcccccaggctgctccccgacgccgtctacgcgcgcgcgcaggcccgcttctgggcgggctactccgacaaggtctacgaagccggcatgcggctg

SEQ ID NO: 79268 - DNA, 350 bp, Zea mays
aaatgtctggaatcccagctatcttctcccactttgtcaccaatctgcctgcgtttcaccaggtactggtattcctatgtgtcaaatcagttcctgtgccacatgtgcaaccggaggaacgatttctggtgggtcgcattggtccaaaagagtataggctatacagggtcattgtcagatatggttatcgcgatgtgcagaaggatgacctggagttcgagaaggagctagtcagcaacattgcagagttcatccgcagcagtggggaatatgacaagaatggcttcgtcgaggacgcagataagctcttcgagaagctgtccaccatcagtactggaatcagtatgttg

SEQ ID NO: 79269 - DNA, 352 bp, Zea mays
cctaaactaagtcatactatcggccagctgctgagtttctggcatcttacccagacatatgtacctatggtgttgatgaccatgatgcagatcaaattcatgttatcgtggcatctttgtatcaaaaagatgcagaagagacagttgatggtattgaaaatacaactgctacccagcttgatgttgctgatagtggaagcctttcagatcgtgtttctcatgttgaggttgtaattagcttgctgcctgctagttttcatgctgccattgcaggagtatgcatagagttgaggaagcacatggtaatggcaagctatgttgatgaatccatgtcagacttgagccaagctgc

SEQ ID NO: 79270 - DNA, 369 bp, Zea mays
ttccgcgtccacccacgcgtccgacaatgtcggcaacctccatacatatatatgtgctactggagataatagtgctgttctacattatggacatgcggcagctccaaatgaccggactttgaatgatggagacatggcactaatggatatgggagctgaataccatttctatggatctgatatcacatgctcataccctataaatgggaaattcaacagaagtcagacaatagtatacaatgctgtgcttaaggctcataatgctgttatatcagacatgcggcctggagttaattggatggatatgcacagattagcagaacgggcaatacttgaatctctcaggaaggaacaaattgtacaacggga

SEQ ID NO: 79271 - DNA, 315 bp, Zea mays
agaattctagggttttgctgctctccgaccccgagctccgaaggccgcagcatcaggcgcggcccccctcgcgtgtgaccgagatggcgctgccgaatcaggggacagttgattaccccagcttcaagctcgtcatcgtcggcgatggtggatctggtagaactacatttgtgacgaggcatctcactggagagtttgagaagagatctgaaccacccactggtgtggaagttcatccgtcggatttcatcactaactgtggtaagatcaggttctactgctgggatgccgcagggcaagagaactttggtgggc

SEQ ID NO: 79272 - DNA, 376 bp, Zea mays
gggtccagacacgcgtccggagaaagtgatggaagacgaggaggaggggacggtgtggcacgtggcggagcgcggcaagccggagttcgcgcgggccgtggcgctgccggagaacgtgcgcgtggacgggatcagggccggcttggagaacggggttctcaccgtcgttgtgcccaaggaagtcgccccggcccggcccaagcccaggtccatcgccgtctccagcaagctctgatgagtctgaggcgatgagtggcagagtgtacggtgcagtgttaaaccatgccgcaaatggcgggtacatctgaattctggtcgtgtgtgtgtccgtgtcacctagaaaatgcgcacctcgtgtaaattgtgatacaatttc

SEQ ID NO: 79273 - DNA, 389 bp, Zea mays
ggtccttgcaagcctctacagtgatgtcatcggatcatgaaagcccaggcgctgagggactccagcatgtctgggtacatgtcctccaagaagacgatggagatcaaccccgagaacgccatcatggaggagctccgcaagcgtgccgaggctgacaagaacgacaagtccgttaaggaccttgtcatgctgctgttcgagacggcgctgctcacttctggctttagcctcgacgatcccaacacctttggcagccgcatccaccgcatgctcaagctgggcctgagcatcgacgaggacgaggaggctccggaggctgacaccgacatgccccctctggaggatgacgctggcgagagcaagatggaggagggtctacaagctggggt

SEQ ID NO: 79274 - DNA, 390 bp, Zea mays
catacaagacactaaactgggtcggattaaggagacctgcgccgcccctccggccacgcgagctcgccgaaatggtcgcccacaggttccatcagtaccaggtggtgggtcgcgcgctgccgaccccgaccgatgagcaccccaagatctaccgcatgaagctctgggccactaacgaggttcgcgccaagtcgaagttctggtacttcctgagaaagctgaagaaggtgaagaagagcaatggccagatgctcgccatcaacgagatcttcgagcgcaacccaaccaccatcaagaactacggcatctggctgcggtaccagagcaggacggggtaccacaacatgtacaaggagtatcgcgacacgagcctgaacggcgccgtggagc

SEQ ID NO: 79275 - DNA, 334 bp, Zea mays
tactacaccctaaatcgttcgataaagtgttgggcacgaatacatggacgatttcttcggctgctgcgagtcccttttggctcaagacggcatatttgtcctgcagttcatctcaatcccagaagaacggtatgaggaatacaggcgcagctcagacttcatcaaggaatacatcttccctgggggttgcctgccttcgttagcccggatcacgtctgccatgtctgcagcatcaatgctctgcatcgagcaccttgagaatattgggtaccattactacccaacgctgatacagtggatggacaacttcatggccaataaggatgcaattttg

SEQ ID NO: 79276 - DNA, 382 bp, Zea mays
ctctacactgagtcttatgatgctcgccttgaagcttcaaatcccagtgacatgacgggcgaaactggaacgcttggttacatggcacctgaggttctcaatggaaatccctacaacaggaaatgcgatgtttacagcttcgggatctgtttgtgggagatatactgctgtgatatgccatatcctgacttgagcttttctgaggtcacgtctgcggttgtccgtcagaacctgaggccggagataccacgctgctgcccgagctctctatcgaacgtgatgaagcgctgctgggacgccaaccccgactagcgacctgagatggccgaggcggtgtccatgctggaggcgatcgacacgtcgaatggtggaggcctgatcc

SEQ ID NO: 79277 - DNA, 380 bp, Zea mays
gtcgttgcaagactctacaatcaatcgtactacccggtcgctagcacagccggccactgcacacgacggtgctggtaggttgcaagcacttgcaggatggcgcaggtcgctaagacgcttctccttgtggccctggtggtcgtgtcggcggtggagctgtgccgcgccatcgagttcgacgagcgggacctggcatcggacgaggcgctgtgggacctgtacgagcggtggcagacgcaccaccgggtgcaccggcaccacggcgagaagggccgccggttcgggaccttcaaggagaacgcgcgcttcatccacgcgcagatcaagcgcggcgaccgaccctaccgcctccgcctgaagcgcttcggcgacatgggccg

SEQ ID NO: 79278 - DNA, 367 bp, Zea mays
acaagcctctaaaatcagtcgtaataggcagcagcacaagcaagaaccacacctcctcccttcgcctgtgatcatgtcgtcttgctgcggcggcaagtgcgggtgcggctccagctgctcctgcggcagcggatgcaacggctgcggtatgtaccctgacgtggagaccgccgccaccagcagcgtcaagaccacggtcctcgccgcgccgaccaccaaggccagcgccggcggcttcgaggcggccaccgagggcggcggctgcgactgcaacacctgcaagtgcggcaccagctgcggctgctcctgctgcagctgcaactgagctggcccggcccggcgatggcgcacgagagtccagaggagg

SEQ ID NO: 79279 - DNA, 399 bp, Zea mays
tccttacaagcctctacagtgactcgtagcagatctcgtggttatgttatattgttatgtttcttcctcttggtgtgacgcagggaaccgcgcctccggccggacgccgctggactgggagacgcggtcggcggtcgcgctggcggcggctcgcggcgtggcgcacatccactccacggggcccacggcgtcgcacggcaacatcaagtcctccaacgtccttctcaccaagaactacgaggcgcgcgtgtcggaccacggcctccccacgctcgtcggcccctccttctcgcccaccagggtgtccggctaccgcgcaccggaggtcaccgacatccgccgcgtctcgcagaaagcccacgtctacagcttcggcgtcctcctgctggagctgctcac

SEQ ID NO: 79280 - DNA, 283 bp, Zea mays
acaacaggcagcagcacaagcaagaagcagacctcctcccttcgcctgtgatcatgtcgtcttgctgcggcggcaagtgcgggtgcggctccaactgctcctgcggcagcggatgcaacggctgctgtatgtacgctgacgtggatagcgccgccaccagcagcgtcgataccacggtcctcgccgcgcctaccactaaggccatcaccggcggcgtcgaggcggcgaccgattggcggcggctgcgactgtaacagctgcaaggtgcggcaccaactgcggg

SEQ ID NO: 79281 - DNA, 340 bp, Zea mays
gtgggtccatacaagactctgaagcgcgtcatggggttcgacctcggcaatgagagctgtatcgtggcggttgcgcggcagcgtggcatcgacgtggttctcaacgaggagtccaagcgcgagacacccgccatcgtttgcttcggggacaagcagcggttcatcggcatcgccggcgccgcgtcctccaccatgaaccccaaaaactccatctctcagattaagcgcctgctcggccgcaagttctcagatcccgagctgcagcgcgatctcgcctccttcccattccgagtcacggagggccccgatggttttcccctggtccatgtaccgtacctgg

SEQ ID NO: 79282 - DNA, 396 bp, Zea mays
gggtcgatacaagcctctaggatgagtcggagaacgacgctgacgaggtcatcccgaacggtggtgtcgagcacagccatggcgcaaacgggtttcgtgtcgcggctgctggcgaagcccgtggcgaggaggatgaggacgtggaggaagatgacgacgacgacgatgactttgaggaggaggatttgggggaggagattgatgaggatgttgatgacgaggatgctgttgtggaggtgcatgatgtaccaagtagtgacgacgaggaagatggcgtggaggaggatgaggaagaagaggatgaggacgaagatgatgaagaagaggaggaggttgaggatgaaggtgaagaggcggagccacagagcagtggtagggttgccatgatgacaggcg

SEQ ID NO: 79283 - DNA, 361 bp, Zea mays
agacgagtgcatggtgctcgacaacgaggcgctgtacgacatctgcttccgcacgctcaagcttaccacgcccagcttcggcgacctcaaccacctcatctccgccaccatgagcggcgtcacctgctgcctccgcttcccggggcagctcaactcggacctccgcaagctggccgtcaacctgatcccgttcccgcgcctgcacttcttcatggtggggttcgcgccgctcacctccaggggctcccagcagtaccgcgccctgacggtgccggagcttacccagcagatgtgggacgccaagaacatgatgtgcgccgcggacccgcgccacggccggtacctgacggcgtccgccatg

SEQ ID NO: 79284 - DNA, 392 bp, Zea mays
atctactgacctgtgacctccgcatttccaaacagcccgagcgagctagagctagcagagcggcaggcacctccctcctcaaggaacatggcccgcacgcagcagttggcagtagtggcgaccgccgtggtggccttggtgctgctggcggcggcggcgacctcggaggcggccatcagctgcgggcaggtggcgtcggccatcgcgccctgcatctcctacacgcgcggccagggctcggggccctccgccggctgctgcagcggcgtcaggagcctcaacaacgccgcccgcaccaccgccgaccgccgcgccgcctgcaactgcctcaagaacgccgccgccggcgtcagcgggctcaacgccggcaacgccgccagcatccccttcaa

SEQ ID NO: 79285 - DNA, 386 bp, Zea mays
atatccctcgtcccaagatgaaggtgtgcatgcttggtgatgcccagcatgttgaggaggccgagaagatgggacttgactacatggatgttgaggctctcaagaaaatgaacaagaacaagaagcttgttaagaggcttgccaagaagtaccatgctttcttggcatcagaggccatcatcaagcagattccccgtctccttggtcctggtctcaacaaggcaggcaagttcccgaccctggttactcaccaggaatccctcgagtccaaggtgaacgagactaaggcaaccgtcaagttccagctcaagaaggtcctttgcatgggtgtcgccgtccgcaacttggcgaaggaggaaaagccaatccagcataacatccagatg

SEQ ID NO: 79286 - DNA, 452 bp, Zea mays
ctcgcgggtcgatacacgcgtctaaatcacactctggcagccgagcgatcgagctccccggtcgctagcacagccggccactgcacacgacggtgctggtaggttgcaagcacttgcaggatggcgcaggtcgctaagacgcttctccttgtggccctggtggtcgtgtcggcggtggagctgtgccgcgccatcgagttcgacgagcgggacctggcatcggacgaggcgctgtgggacctgtacgagcggtggcagacgcaccaccgggtgcaccggcaccacggcgagaagggccgccggttcgggaccttcaaggagaacgcgcgcttcatccacgcgcacaacaagcgcggcgaccgaccctaccgcctccgcctgaaccgcttcggcgacatgggccgtgaggaattccgttccgggttcgccgactcccgcatcaacgacctccg

SEQ ID NO: 79287 - DNA, 453 bp, Zea mays
gggtcgatgcaagcctctagagagactcctccgaggcacctcatctccggcgaagggaaatggcgaccgttccaggggatctgatctggcagattgtgaggaagaacaactccttcctggtgaagcagtttggcaacggcaatgccaaggtgcagttcaccaaggagcccaacaacctctacaatgtacactcctacaagtactctggcttagcaaacaagaaaactgtaacgatccagccagctgctggaaaggactcggctgtggtcctctctactaccaagaccaagaagcagaacacacccgcgaagctcagccacaagtctgtaatgcgcaaggagttccgcaagatggccaaggctgtgaaaaaccaggttggcgaaaactattacaagcctgatctgaccaagtcgggccttggtaagctgagctccgtgtaccgcaacctccaag

SEQ ID NO: 79288 - DNA, 399 bp, Zea mays
aagcctctaaagtgaatcgtctcatactactcaaatccatccttactgagcttactgtttgatccatggactcggaaggagtagcagcaaaggtggcagatgagactactaaaccggcaagccaagaagacggcgagagcaatgccgggatgactgatctgctgatgctgaccgacaagtcgcagctgcaggcgctagcgatgctgctgcggaacaacgaggagctcatgatgagccaagcgatcaagtcggagacggagcgcgttgagtacctcaagacggtgagcgactgctacacgcggacaatgaagctccttgacgactccatggcggccaggatcacgtacgagcgttcgggcggaacgaagagcctcgtcgcccgggacatggacgactacg

SEQ ID NO: 79289 - DNA, 442 bp, Zea mays
tcgccggtcgatacaagcctctacaccgcgtcgtcctattcctcctcctagcacagctagcgcctgctccccttcgtctgtgatcatgtcttgcagcagcggcaagtgcaactgcggctccagctgctcctgcggcagctcatgcaactgcatgtcccctgacgtggagaccgccgccgccagcagcatcaagaccatggtcctcgctgcgccgaccaccaaggccagcgccggcggcttcgaggcggccaccgagggcggcggctgcgactgcaacacctgcaactgcggcaccagctgcggctgctcctgctgcagctgcaactgagccggcccgcccggcccggcgatggcgcacgagagtcgagaggacgacgacgacgaggcgtataaatataatagcagcgtctaaataagatcctgtcaactgcacccgccatta

SEQ ID NO: 79290 - DNA, 444 bp, Zea mays
  unsure (1)..(444): unsure at all n locations
tcgtgggtcgatacaagcctctacactgacgtcctgactacgcgtccgcagttctcactctagcgctctctctccctcgctctctctctacacatatatatcagtataggatggatgtgcaaacctagcttgctgctgcctttctagctgagaactgagctgtagctgttggtacggttttcctcctcgctcttcttctcctccttcttgctgctggttgccgggagctgagatcgatcgagagcactgctgttgttcgtgcggccggcggcggcggcgcgcggcagtgggcggagacgacgaccgatcggtcagaaggaatgtcgtcggcccaaatcgtgccggcggaccatgtgtgctatgtgcactgcaacttctgcaacacagttctcgcggtgagtgtcncggggaacagcatgctcagcatggtgacagttcggtgtg

SEQ ID NO: 79291 - DNA, 416 bp, Zea mays
aacaccctatactgacgtcgtactactcacagcaaggcccaagggcagtgtgcatcatttcagcaactggagctatttctacagcaacccttcaccaggattcagactccggtggtgtggttacatatgagggccgatttgagatcctgtgcctttctgggtcatacttggtggtagaggatggtggcacacggacccgaagcggaggtctttgcatagctttgtgtggtcctgaccacagggttattggtgggagtgtaggcggagtcctgacagcagctggaacagttcaggtgatagtggggagcttcatgtacggaggttcgaagaagaacaatgttaaagcggaggtggacatggaacccgaggaggtggcacccgcgggagcacagtggcatggtccctcctgcgatgag

SEQ ID NO: 79292 - DNA, 420 bp, Zea mays
acaacaccctacactgacgtcgtgagtacacactccggcagccgagcgatcgagctccccggtcgctagcacagccggccactgcacacgacggtgctggtaggttgcaagcacttgcaggatggcgcaggtcgctaagacgcttctccttgtggccctggtggtcgtgtcggcggtggagctgtgccgcgccatcgagttcgacgagcgggacctggcatcggacgaggcgctgtgggacctgtacgagcggtggcagacgcaccaccgggtgcaccgacaccacggcgagaagggccgccggttcgggaccttcaaggagaacgcgcgcttcatccacgcgcacaacaagcgcggcgaccgaccctaccgcctccgcctgaaccgcttcggcgacatgggccgtgaggaattccgttc

SEQ ID NO: 79293 - DNA, 415 bp, Zea mays
aacaccctagactgagtcgtatcacccagcgcagcagccgccgcagcacatcgctatctcgatctcagccatggcggaggtggagcagcaacaggacacgccgaagctgttcaaccgctggaccttcgatgatgtccaggtgaacgacatctcgctgaacgactacctcgctgtgaacgcgacgaagcacgcgatgtacctgccgcacaccgcggggcgttactccaagaagcggttccgcaaggcgcagtgcccgatcgtcgagcgcctcacaaactccctcatgatgcacgggcgcaacaacggcaagaaggtcatggctgtccgcatcatcaagcataccctggagatcattcacctgctcaccgatgccaaccccatccaggtcgtcgtcgacgcgattatcaacagtgga

SEQ ID NO: 79294 - DNA, 412 bp, Zea mays
gggtcgatacaagcgtctacaatacaactgataatgatatagcggttatagacaagtcatttggttttgatactgctgtagaagaagcccagcgtgccattaatgcagctcatgtggaagcttcaagtgctgaaaatggaataggtttagtgaagcttatgggtcgctatagtggatttattgccatgtatgctactcttgcaagcagagatgtggactgctgtttgattcctgagtcacccttttatttggaaggggagggtggactatttgagtatatagataggaggttgaaggagaacaatcacatggttattgttgtcgcggagggagcaggacaggatcttattgctcaaagtatacctgctgcagatcagcaagatgcatctggaaataagctgcttcttgatgt

SEQ ID NO: 79295 - DNA, 425 bp, Zea mays
acccaaggcgaggcgttgaaacccttaaccctcttccacctcgaagcggcgcgaggagggagagtgtgagtggactcaggaggcggcgggcgaaatgaagcttaacgtcaagaccctcaagggcaccaacttcgagatcgaggcgagccccgatgcgtcggttgctgaggtgaagaggatcatcgaaactactcagggtcagagtacctacccagcagaccagcaaatgctcatataccaagggaaaattctgaaggatgagaccactttggaaagcaacggagttgctgagaacagcttccttgttataatgctgtccaaggctaaggcatcgtcaagtggagcttccaccgctactgctgcaaaagctcctgcaactccagcccaacctgctgcccctgccacatcagttgtaagaacaccta

SEQ ID NO: 79296 - DNA, 422 bp, Zea mays
accacgcgtccggtagcctccaccaacagtctgccccgggtcgatcgaggtagcacgacgcccgaaatcacttgactctccgggaccgttgacgtgatcatcgccgggaggaccgagggacgtgtggagtcttcgcccttaccccctaactccaagcgatccaatgactgccaaacttcaaggtgtccaacgtcgacaattatgaacccaagcaagacccgggcggctggctagctgtctacacgaccgctgcccgggccgctacggcgatggaagatgtcttgatagcgtacatacccattgtcctatggcaggacacgctgcaatggctccgacatctacctcgacattgcatcgacgactaggacgacatcagccgctggtttgtcgctaactttcaatccctttctgataaaccgacg

SEQ ID NO: 79297 - DNA, 228 bp, Zea mays
gggtcgatacacgcgtctacatcgtcttcgacgcggagccgctgggcgagcccgggcggcacgcgctggacgcctgcgcgctctgcgccaagccgctgagccgcaacagcgacatcttcatgtacaagggcgacaccccgttctgcagcgaggactgccgctacgagcagatgcaccacgacgcggcgtacgcgcggcaagcggccaacaaccggcggaagcagcagc

SEQ ID NO: 79298 - DNA, 243 bp, Zea mays
gtccatgcaagcctctacactgagtcgtattaattgtctgtttgctacaggttgcactgtgtgtgaggttggatcatttggattcatatgttcgtggagacatgtgatcgacaagaattcggtggcagaaacttcagtttggcagattatgtagagcataattttgattcattcttaggccttttttgtttgtgccagattggtgggttggaacgattactaaccagattgtttctctaattt

SEQ ID NO: 79299 - DNA, 444 bp, Zea mays
gggtccagccacgcgtccgcgatcactcatcaatcgccagaggagttgttgatcgaggtgagtgaggttgaaaagcacaccatcgtcatggacggcggatactacggcggtcgcgatcagcgctacagcggcgggtactacggcggcggtggcatcgcaacgccggggtacgctccggcggtcccgtacgggatgtcgcaggtgaacatcgagggcaacgggtgcgggcgggcgctgccgccgcagccgaccgtgaaggtgtactgccgcgccaaccccaactacgccatgagcgtccgcgacgggaaggtggtgctggcgccggcgaaccccaaggacgagtaccagcactggatcaaggacatgcggtggagcacgagcatcaaggacgaggaaggttacccggcgttcgcgctggtgaacaaggcgaccggggaagccatc

SEQ ID NO: 79300 - DNA, 447 bp, Zea mays
cgggtcgtgtaagttaccaaaggtctttgcatgaacattcaccatttacaaagtggtgatagcggttaacatctcttatgataatttcacgctgctcaatctgtgaaatcagcttgatgacaacatggcagtcctcacaaactcgaagattctttgtcacaagcaactttgtcctaggcggtgtactaatgagtccaaatgcaatggccaacctctcgctgtggccccataccatgttcctcttttcatcatcttccacattatggaaaaccggcgtggtgtcaggcacatagccagtttgactgatgagaccttccaatcgctccaactcttcatatatatcatctgatctaggatgagaagcatcacccacaagaaaaccatgggacttccctttcaattcgatccagctacaagcaatgatctttttcaagcctctattggtca

SEQ ID NO: 79301 - DNA, 422 bp, Zea mays
  unsure (1)..(422): unsure at all n locations
accacgcgtccgaaccactcccaaatactccaaggcacgttatgaagagattgtgaaggaagtctcatcctacctcaagaaagttgggtacaaccctgataagattgcctttgttcccatttctggttttgagggcgacaacatgattgagaggtccaccaaccttgactggtacaaaggcccaaccctgcttgaggctcttgaccagatcaccgagcccaagaggccttcagacaagcccctgcgtctgcccctccaggatgtgtacaagattggtggtattggaactgtaccggttggtcgtgtggagactggtgtcatcaagcctggtatggtagtcacctttggtccaactggcctgactaccgaagtgaagtctgttgagatgcaccacgaggcacttcangaggctcttccgggtg

SEQ ID NO: 79302 - DNA, 428 bp, Zea mays
gggtccagacacgcgtctaaataaaatcatctgcttcagccttcagctagccccaagtttagtcggccgatcgatcactgaagtagtaatggcctccgccaacagctggaccctcgagatcgcgtcgccggtggccccgcagcgcctgttccgcgccgccgtgatggactggcacaccctggcgcccaaggtcgcctcccacgtcgtcgccagcgcgcagcccgtggagggcgacggcggcgttggcagcgtcaggcagttcaacttcacctcagtcatgccgttcagcttcatgaaggagcgtctcgagttcctcgacgcggacaagtgcgagtgcaagaacacgctcatcgagggaggcggcatcggcgtcgccatcgaaacggcgacgtcgcacatcaaggtggagcccgcggccggcggccggg

SEQ ID NO: 79303 - DNA, 412 bp, Zea mays
agctctgcaacgttgtccatggcatatgctggtgctgtttttgcagatgcatgtttgaagggtctgaatggagttccagacattgtagagtgctcttttgtgcaatcaactgtgacagagttgccattctttgcctccaaggttcggctcggcaagaatggagtggaggaagtgcttggtctgggtgagctcaacgagttcgagaagaaggggctggaaaacctcaagggcgagctcaagtcttccatcgacaagggtatcaagtttgcccacgggaactaggcaccttgcccggcttgtaacaattgatgccccttgcatttttgtttgactgcctatttttcctgccccccgtatggttggggcaatgaggcgtagtggtcgataataaaacccagcgggacaaagaaaa

SEQ ID NO: 79304 - DNA, 422 bp, Zea mays
aggcgtcttcacaaacgccggcgcaaactctcgcccgagcccgacagatcttcaattccccattccgcccaccgatcgaccttcacgccagtctcggtctcttccggaggcgtcgcgcgcggttgtttgagaggagaggaggaagatgagggagtgcatctccgtccacatcgggcaggccggcatccaagtcggcaacgcgtgctgggaactttactgcctcgagcacggcatccagcctgatggccaagtgcctggagataagaccgcgggacatcacgatgatgccttcagcaccttcttcagccagactggtgctgggaagcacgttccccgtgcaatcttcgttgatctagaacccactgtgatcgatgacgtgcgcactggcacgtaccgccagctccttcaacctgagcagctca

SEQ ID NO: 79305 - DNA, 422 bp, Zea mays
acgcccgggccgacacacgcctctaatctaaatcatggatccctcagtatacacgtttctgatggcagggaaggttggccagaactggcaccctatgaagccatccatgttggagctgcagcaccgcagatccccgaggcgctgatcgagcagctgaagcccggcggcagaatggtgatccctgtcgggacagtcttccaggagctgaaggttgtggacaagaagttggatggcactgtcagcataagagacgaaacgtctgtgcgctatgtgccgctcactagcaaggacgcccagttgcacgcaagctgagtgatctatcatgtcaaaaaaatgttatcctcacctgacaaggtgaggcattcaatcgaatcgctacccttgtaaatgtattaatcctactgtctcagtaaatgcgctgg

SEQ ID NO: 79306 - DNA, 402 bp, Zea mays
gggtccagccacgcgtccgcagacacgtgggcggacgcgtgggcggacgcgtgggctctggaggaatttgagaaaataagagaggagaagaggaaagcactacttgcattgaaggctgaggagaggaaagttgaagttgacaaggatttgcagtctctgcagccactttcaaacaagaaagaaaatgatgaagttttcattaagctggttagtttccctgtaattaatgctttgataccttaagtttgctgagctttgcacgggttcttcgatgttcttttgttctcgtagggttctgacaaggataagaagaaggaaaatgctgagcgtgatgagcgtgccaagaagtcggtgagcatcaacgagttcctgaaacctgctgaaggagaaaggtactatggc

SEQ ID NO: 79307 - DNA, 423 bp, Zea mays
agacactacacagcgcgcgactgacatgtcgatgctcaccagcatactgggccgcaagcatcagcagccgccgccgccgccgcagcagcagcagcagcagcagaagggcggcggcgcgcgcactggcaccggcgccggcgccggcacggaggcggcggcagtggagccggtgagcatcgacatcgcggagcaggggccgctagtggacgccatcacgctggcggcgttcgcggcgccggcgctaggcctgccgccgttcgcgacggccagcatggactggaaggagacgccgacggcgcacgtgttcatggccgacctccccgggctgcgccgcgacgacgtgaaggtggaggtggaggaggagaggctgctccggatcagcgggcagcggcagcgcgccgccgaggaaaaaggcgaccgctg

SEQ ID NO: 79308 - DNA, 426 bp, Zea mays
actcggcagcatgccctacctcaaggcgaccatcaaggagacgctgcgcctgcacccgccggcgccgttcctcctcccgcactactccaccgccgactccgagatcgacggctacttcgtcccagccgggacgcgcgtcctcgtcaacgcctgggcgctcgggagggaccgcacgacgtgggagaagccggaggagttcatgccggagcggttcgtgcaggaaccgggcgccgtggacgtccacatgaagggcaaggacctcacgttcatcccgttcggctccggccggaggatctgccccgggatgaacttcggattcgcgaccatggagatcatgctgggcaatctcatgtaccattttgattgggaggttcctggctctgcagcaggggtgtccatggacgagtcctttgggctgacgcttcg

SEQ ID NO: 79309 - DNA, 422 bp, Zea mays
accacgcgtccgcttctcgatcgcttgctacttccactcgcgctacaagtcagggcagtcaagcacttacaagaagaacggaaaacctgctgccatacgctatggaactggttccattgctggttttttcagtgaggatagcgttacattaggtgatctggttgtgaaggatcaggaatttattgaagctacaaaggagccagggcttaccttcatggttgcaaaatttgatggcattcttgggctaggctttcaagaaatctctgttgggaatgcaacaccagtgtggtataacatggtgaaacaaggtctcatcagcgaccctgttttctctttctggtttaaccgacatgctgatgaaggagaaggtggtgaaattgtgtttggtggaatggattctagccactacaagggtgatcaca

SEQ ID NO: 79310 - DNA, 413 bp, Zea mays
gggtcgatacacgactctacaccacatcagtgataggagaaagcagaccaacctagccacccagggagaaaggccaaaagggaggggagagtgtcgtcatggcttccattgtcgcttccaggagggccgttcctctagttcgcgctctggagaagctcatcgcagcgtcctccgcgcccgggactggctccgccctcaggccggtggcagtcgccggcggcctccgtggctacaacaccggcgctccgctccgacgctacgagggggccgagtcggaagacgatagcgtccgcgagtacgatgggcggcacggcggccgggactacgccgtgcccagcctgttctcagatattttccgtgatccgcttagtgcgccgcacagcattggccgcctgctgaacctgatgggcgac

SEQ ID NO: 79311 - DNA, 439 bp, Zea mays
gtccatacaagcctctaaagtgactcgtaggattctcctccccctccggttcgggttcgggttcgtgaggttctccggggttcggtttcgtgggtgggcggatcgagatggcggcgtcggatgttgagtaccgctgcttcgtctgcggcctcgcctgggccacggacgaccactccctccacaacgccttcagcacctacggcgaggtcctcgagtccaagatcatcctcgatctggacatgcagaggtcccgctgcttcagtctcgtcaacgtctccacggaggacgcgatgcggaatgccatcgagggcactaacgggaatgagctggacggccgcaacatcaccgtcaacgatgcgcagtcccgcggcggccgtgtaagctgctgcagttgctaccgtggatgccgtggaggcggcggctagggcagtggcgggcg

SEQ ID NO: 79312 - DNA, 421 bp, Zea mays
attaagttaaacgatgttcaaatcgattggaattctgaggatctgagctaccttagggaggataagttttcaaccaaatttggaaaagaggtggctagtgccactcctctccgtggatcagatgctgtgttgaaagcccacaatatggctgaggatgtaaggatccaatacgacgaccaagaaggtttcgagcagatagctcgtcaatttggaatattcgaagaatggaaggatggcatcccaagaacggcttacaaaggagtggtggtcttccggtacaacagtagtcaaaggcgaatatttctcgtcagcccagattctcttcgtcagctgggggtgtagcatgttgagaaggtagatttttacccttggaatggcaaatatcatggaattgcttaactggtttctgtgaacatggagg

SEQ ID NO: 79313 - DNA, 426 bp, Zea mays
gaccatgcggccaggatggcaacccatcaggacgaggacgacgataaggacttcatatacgtattgctgtctcttcagaaggagtatggcctcaccagagaccatatcaaggctatcttgatagacatgttcgaggccggaaccgacacctcgtacatgacgttggagttcgccatgacggagctcatacggaagccacacctgatgaagaagctgcaggaagaagtgcggcggaacgtgccggcggggcaggagatggtcaccgaggacaacctccccggcatgacctacctcaaggccgtcatcaaggagacgctccgcctgcacccgccggtcccgctcctcctcccgcactactccctggacgcctgcgaggtcgccggctacaccatcccggccaacacccgcgtcgtcgtcaacgcctgg

SEQ ID NO: 79314 - DNA, 412 bp, Zea mays
cgcgcgggtcgatacaagactctaggggaaggcgtaataaatagacacggtgctcggatctcgggcagacgacgacgacgacgacaagacgtgcagggagacgtatgtgttggatctccacatactgagcttcgtgaacggggcggagcgggaggagcacgagtggaggaggatcttcctggcggctgggttccgtgactacaagatcacgcacacccgaggcatcccgtccatcatcgaggtcttcccgtgatgatcatggatcgagagtcgatcatatatgcatgtttgtacgtgtttgtgtcataataaatcgatcgatcatgttgtttaccctttttatttcggtatctagttgcatctgtgggcgggctaaaataaatcacggccggccgggcttcatcaagcccat

SEQ ID NO: 79315 - DNA, 417 bp, Zea mays
atgcctcccagtccagtcccccacccaccaccaccactcctcccctcgccgccgcccgttcccgaccgatccggccggatcgccccgccatggaccagtacgagaaggtggagaagatcggggagggcacgtacggggtggtgtacaagggcaaggaccgccacaccaacgagacgatcgcgctcaagaagatccgcctcgagcaggaggacgagggcgtcccctccaccgccatccgcgagatctccctcctcaaggagatgcagcaccgcaacatcgtcaggctgcaggacgtcgtgcacaacgacaagtgcatctacctcgtattcgagtacctcgacctcgacctcaagaagcacatggactcctccacggacttcaagaaccaccgcatagtcaaatccttcctctaccaga

SEQ ID NO: 79316 - DNA, 438 bp, Zea mays
ctcgccggtccacacacgaaactgactcgtgtcaactcaagtatccatccttattgagtacagtgttgatccatggactcggaaggagttgtagcagcagaggtggcagatgagactactaaaccggcaatccaagaagacggcgccgagagcaaggccgggatgactgatctgctgatgctgaccgacaagtcgcagctgcaggcgctggcgatgctgctgcggaacaacgacgagctcatgatgagccaggcgatcaagtcggatacggagcgcattgagtacctcaagacggtgagcgactgctacacgcggacgatgaagctcctcgacgattccatggcggccaggaccacgtacgagcgttcgggcgggacgaggagcctcgtcgccacggacatggacgactacgtcgtctacaggctcaacgcgtgcttg

SEQ ID NO: 79317 - DNA, 393 bp, Zea mays
acgctcgtggctgccctgctcatactgcttgccctcgccgtatcgtccacccgcaacgcacaggaggattccatggccgacaacaccgggacgttggcgggcggcatcaaggacgtgccggggaacgagaacgaccttcacctccaggaactcgcccgcttcgccgtcgatgagcacaacaagaaggccaatgctcttctggggttcgagaagcttgtgaaggccaagacacaagtggttgctggcacgatgtactatctcactattgaagtgaaggatggcgaagtgaagaagctctacgaagctaaggtctgggagaagccatgggagaacttcaaggagctgcaggaattcaagcctgttgaagagggtgctagcgcctaaggatctctc

SEQ ID NO: 79318 - DNA, 410 bp, Zea mays
cctggccgacccacgacgtctagtcggcttgaacaaaacagaacgtgttcgaggcagccatcgagacctcatatctggtgctggagtccgccatggccgagctcatgaaccacaggcgcgtcatgaagaagctgcaagcggaggtacgggcgtacggagcggagaagaagctggacatgatcagggaggacgacctgagcagcctgccgtacctaaaggcgtccatgaaggaagcgctgcggctgcacccaccggggcccctgctgctgccgcactactccaccgccgactgccagatcgacgggtaccacatccccgccaacacgcgcgtcctcgtgaacggctgggccatcggcagagacccggcggtctgggagaagcccgaggagttcatgccggagaagttcatg

SEQ ID NO: 79319 - DNA, 419 bp, Zea mays
cgcccgggccgttacaacaccctagactgagtcgtatgaggcgcgcggcagtgggcggagacgacgaccgatcggtcagaaggaatgtcgtcggcccaaatcgtgccggcggaccatgtgtgctatgtgcactgcaacttctgcaacacagttctcgcggtgagtgtcccggggaacagcatgctcagcatggtgacagttcggtgtgggcactgcacaaatctactgtcagtgaatctgagagcactcatgcactcagtcccagaacaagatcagctccagcaggagaacatcagggtccatggcacgttgcgtgagcatcatcagtgcggcggcggccaccatctggagctgggctcttcgtcgtcctcaaggttccggttgccgatgatgatgtcgtacgcgccgcagaacgaaca

SEQ ID NO: 79320 - DNA, 424 bp, Zea mays
  unsure (1)..(424): unsure at all n locations
agatgcaatctgacaaggaaaaactttggattacaaataagattgcacattcttgggttactgttccattggagacgaataaagaggaatggtttgtaaagcaaggtgatatggtcaagcaggtcattggcagttccccagttcatttccaaacaaactacaaggagagcatgggcgaagataaaattatattctgtggtagtgaactattctacgtgccccggcggtttgttgaggactttggtgaccttgtgggtcttgtcggcaatttggatttgcatcacaagattgcggtcccaatgttcttcttggcaatggactcgactcaaaattttgactctgatgctctggctggaacagtgttcaggccacagttgccagctaatgcgacgttctcgtcnatttatacagctcaagcacctgc

SEQ ID NO: 79321 - DNA, 399 bp, Zea mays
gtaaaacggctgggcaggaaaggtaccaagcaattacaattgcttactaccgaggagctgtcggggcgttgctagtcaacgatgtcactaaattaataacatttgaaaatgtgaaaaggtggttgaaggagctccgggaccatgctgactcgaacatagtcgtaatgctcattggcaacaagactgaccttaggcacctgcgctctgtcgccgttgaggatgctgcaagctttgcacatagcgaatgtttgttcttcatcgagacctctgcgctcgatgcgacaaacgtcgagaaggccttccacaccgttctagccgagatctaccggataatcagcaagaagcccctgtcttcggaggagtctggtttggggtccggtaacctcagacaaggacagt

SEQ ID NO: 79322 - DNA, 418 bp, Zea mays
acaacgcgctagctagttctattgccgcaccccagatctccaggagggactcgttctttcagctaactacactgcacgcaatggccaccacggcgaccgaggcggcgccggcgcaggagcagcaggccaacggcaacggcgagcagaagacgcggcactccgaggtcggccacaagagcctgctcaagagcgacgacctctaccagtacatcctggacacgagcgtgtacccgcgggagccggagagcatgaaggagctccgcgaggtcaccgccaagcacccatggaacctgatgacgacctccgccgacgaggggcagttcctgaacatgctcatcaagctcatcggcgccaagaagaccatggagatcggcgtgtacaccggctactccctcctcgccacggcgctcgccctccg

SEQ ID NO: 79323 - DNA, 426 bp, Zea mays
aagctgtctcccgaccactccgccgcccgctccaatggcggcgccggccagctcctcatgcttccacccacgcgcgaccgccagcccgccgtcttctctcagcgtcggcaccaaggtcttcgtcgggctcagggcgcagaccaagctcggttcgtcggagtcgtcatgcccgaatgtcagcgctgggttccacactgcggtcaaccggagaatctctctcaggttgtccaaaaagaaggcgaccagagcccgcatctcgatgatgcctattggtactccacgtgtgccttaccgaacacctggtgaaggaacctggcaatggcttgacatatggaacgctctgtaccgtgagcggattatcttcattggggacaatatagatgaagaattcagcaaccaagtgttggcaagcatgctctatcttga

SEQ ID NO: 79324 - DNA, 415 bp, Zea mays
actctggcctgtcgttggtatcgttgtcgccggcaaccaaggcggcggtgccgatttctcctccggtggtggctgccagcggtactaccaccagcgccagattttgtggcaccaccatgccaccatctggctccgaggtcatcaacatgcactcgcaggctcagcagcaagccagcaggaaggcaaggcggtgctggtcaccggagcttcaccggcggttcgttgccgctttgcacgaactcggtggccctcaagtggctactccgaaacagatcagggaggtgatgcaagtggacgggcttacaaacgatgaagtgaaaagccatctccagaagtaccggttgcacaacagaagatcctcccccggcgcggcggcggctccggtgagccagtcgatcatgctggtggatggcgt

SEQ ID NO: 79325 - DNA, 372 bp, Zea mays
taggcagggtcatagcttacgctgctggggttatgggcgagcccgttcgtgctccgggcgcgcatcgcgctcagcctcaaaggcctcacctacgcttactccgaggagaacctcgacgacaagagcgagtttctcctcagctccaaccccgtgctcaagaaggtgcccgtgctcatccaccacggcaagcccgtctgcgagtcccagatcatcgtgcagtacgtcgacgaggctttccccgccgccgcacctaatttccttccatccgacccctacgaccgcgccattgctcgcttctgggcctcctacgtcgacgacaagttctacagcgcgtggatacccgtgttcaggggcaggacggcggaggagatg

SEQ ID NO: 79326 - DNA, 422 bp, Zea mays
  unsure (1)..(422): unsure at all n locations
aatcaagttttcatgtctgatctcgacattcagatcccaactgccttcgatcccttcgctgaggccaatgctggggactctggtgcggcagcagggtcaaaggactacgttcacgtgcgcatccagcagcgtaatggtcgcaagagcctgactaccgtccagggattgaagaaggagttcagctacagcaagatcctcaaagatctcaagaaagagttctgctgcaatggtacagtggtccaggacccagaacttggacaggtcattcagctccagggtgatcagaggaagaacgtctcgaatttcctcgtccaggccggcattgtgaagaaggagcacatcaagattcatggtttctgagcaaccgccgggtccataacanaccaaccctgcatgcagggccagcttattatatataatat

SEQ ID NO: 79327 - DNA, 427 bp, Zea mays
acaagcctctagcatgagtctcactaccactgctatccctgatgactggatgggtcttgatgttggccctgatgccacgaaaaccttcaacgaagcattggacaccaccaagactgttatttggaacggccccatgggagtgtttgagttcgagaagtttgcagctggaactgaggcgattgccaagaagctagctgagcttacaaccacgaagggtgtcactaccatcatcggcggcggcgactctgtcgctgctgtcgagaaggctgggctggcggacaagatgagccacatttcgaccggcggcggtgcgagcttggaactcttggaaggcaagactctacctggtgtccttgccctcgatgacgcctaaatccgctgctgctgctgctgctgctactcaggttctgccagctttgcgtgtcat

SEQ ID NO: 79328 - DNA, 382 bp, Zea mays
tatactgactcataacaatctgcttcagctagccccaagtttagtcggccgatcattcactgaagtagtaatggcctccgtcaacagctggaccctcgagatcgcgtcgccggtggctccgcagcgcctgttccgcgccgccgtgatggactggcacaccctggcgcccaaggtcgcctcccacgtcgtcgccagcgcgcagcccgtggagggcgacggcggcgttggcagcgtcaggcagttcaacttcacctcagtcatgccgttcagcttcatgaaggagcgtctcgagttcctggacgcggacaagtgcgagtgcaagaacacgctcatcgagggcggcggcatcggcgtcgccatcgaaacggcgacgtcgcacatc

SEQ ID NO: 79329 - DNA, 405 bp, Zea mays
accagttcatagtcggcgccaccaacccgggcctcaggggccagagcctcgcggccgtgctgtcggccggcatgtcggcgggcaagagcggcagggagctccaggccatcgaggacgagtggctggccgcggcgcggctcaagaccttctccgagtgcgtcagggacgccatcgcgggcctcggcgtcgcgggccaggagaagcagcgcaggctccaggagtgggaccgcgccaccggcggctacgacaggtgcgtgtccaacgaccaggcgcgcgacatcgccgccagcctcggcgtcacgtccgtgttctgggactgggacctgccgcggaccagggaagggttctaccgcttcagggggtccgtggcggcggccgtggtccggggccgcgccttcgcgccgc

SEQ ID NO: 79330 - DNA, 385 bp, Zea mays
agaactacacaacttctgatggatcggtgaaaattcaaaaagagagtgaggtgcggctgaagattattggtactcgtgtcgatgctacagaaattttttgcattggcacaataaaggatgattttctgggtgttatcagcgatcctggtgcggcagtgtaaatggtctaagaagcgagattgtactccattgttctgacttctgagtactatcgcagacgtgtgtaatcgctggtccgttaaaactgcaatggctgtactgactgcggaacttgttgagaatgatgtgactaggaccttgtttagggcctgtttggttctttagtatggccctgattggcacaactgctgtttattgaaaaaacagcttatctgataagctggtg

SEQ ID NO: 79331 - DNA, 418 bp, Zea mays
acaaggcaccacacctcttcctcctcttcctcctcctagcacagctagcgcctgctccccttcgtctgtgatcatgtcttgcagcagcggcaagtgcaactgcggctccagctgctcctgcggcagctcatgcaactgcatgtcccctgacgtggagaccgccgccgccagcagcatcaagaccatggtcctcgctgcgccgaccaccaaggccagcgccggcggcttcgaggcggccaccgagggcggcggctgctactgcaacacctgcaactgcggcaccagctgcggctgctcctgctgcagctgcaactgagccggcccgcccggcccggcgatggcgcacgagagtcgagaggacgacgacgacgaggcgttaaaattatataccaacgtctaaataagatcctgtcaactg

SEQ ID NO: 79332 - DNA, 414 bp, Zea mays
aggagaaccctccgagcatcctagtgactcccatggctccggccatgtcggcgcagttcacaagaatcaccttcagcaacctgtttgtccgtcgggctggcccaggcagcacggagctgaccgtggagggaaggccatccgaccagctgggtaggagaaacctcactgacagccccgtatttgacggccgtggccctgacgccagcctcgtggctcgcgtacagggagtcgctacccagatgggcgacgtgcgccagttgtacaccgtcgtgttccaggagaggccgctcaagggctccacgctcgtcaccgaaggcgcgatgacggaagggtcagacgagtgggcgatctacggcggaactggagtgttcgcgatggcgagaggcgtcataaggagaacgtttcttgccgaca

SEQ ID NO: 79333 - DNA, 365 bp, Zea mays
acccacgcgtccggtcttcgataacaggaccaaggaccgaaggctccaagcgcagcaacttgacaaattgctctatgtagtggactcggtttgtgcaaacaatggaggaaaaccatttacagatcaaatgttcactcgcatcaaggaggtgcatgatagggaaaaagaggtgcataccttgggatattcagatgagcagatatctgagttgaaggaggagattcatagaactagggatgaacagcttgcacagataaccagcatggtcgaggaaaagctaaaccgcactgtggagaagctgcaacagcagctcatggaggaacagaacgcaaggctggaggccgagaaggtggcgcatgaagcta

SEQ ID NO: 79334 - DNA, 237 bp, Zea mays
cggacacgtgggtctgccgccgccaccgcacaagaagctagctcctgcctgtaccaccccggcatggcgatgctatcccgcgcagcctcctccgcggcccggcgcccgctgctgccgccgcctaggcttctggcggtgagggcgatggcgtcgtcgctcttcggccacgtcgagccggcgcccaaggaccccatcctcggcgtcaccgaggctttcctcgccgacccctcgtccgac

SEQ ID NO: 79335 - DNA, 392 bp, Zea mays
  unsure (1)..(392): unsure at all n locations
acccacacgtccggcgagagacgggcaggggagaggaaaaaaaaatctaaccctagcatccgcagcgctagggttcgggggttgcgatggcggcggcggcgagacagcgggggacggtgaagtggttcaacgacaccaagggcttcgggttcatctcccccgaggacggcagcgaagatctcttcgtgcaccagtcgtcgatcaagtcggagggcttccgctcgctcgcggagggcgaggaggtggagttttccgtctcggagggtgacgacggccgcactaaggccgtcgacgtgaccggccccgacggatccttcgtcaggggcggcggaggcggangaagangcggcggcggctacggctcccgcggcggtggcggatctggcggccgc

SEQ ID NO: 79336 - DNA, 412 bp, Zea mays
actcatccgaagagatccgtcacactgcaagttttgaaaactgaactgtaagatggcatcagcagagctttcccgtgaggaaaatgtgtacatggcgaagctcgccgagcatgcagagaggtacgaggaaatggttgagttcatggagaaggtagcgaaaactgttgactcggaggagctcactgtggaggagcgcaacctcctgtctgttgcatacaagaacgtcattggagcccgccgtgcctcatggcgcatcatctcctccatcgagcagaaggaggagggtcgaggcaatgaggaccgtgtaacactcatcaaggactaccgtggcaagattgaaactgagctcaccaagatctgtgatggcatcctcaagcttctcgaatctcaccttgtgccgtcttccaacgct

SEQ ID NO: 79337 - DNA, 285 bp, Zea mays
tagcgcaacatcccagtacgtggactggtgcccgacggggttcaagtgcggcatcaactaccaggcgccaactgtggtgccgggtgccgacctcgccaaggtgcagcgtgccgtgtgcatgatctccaactccaccagcgtcgtcgaggtgttctcccgcatcaacagcaagttcgacctcatgtacgccaagcgcgcgttcgtgcactggtacgtcggcgagggcatggaggaaggggagttctccgaggcacgcgaggacctggccgccctggagaaggacta

SEQ ID NO: 79338 - DNA, 394 bp, Zea mays
ctctgctaagcgaagcgaagcttcaagctagtctcggcggctctagaagacgatgggcaaggacgacgtgatcgagagcggcgctggcggcggcgagttcgctgccaaggactacacggaccctcccccggcgccgctgatcgacgcggccgagctggggtcctggtcgctgtaccgcgccgtgatcgccgagttcatcgccacgctgctgtgcctgtacatcacggtggccaccgtgatcgggtacaagcaccagacggacgcgtcggcgtcgggcgccgacgcggcgtgcggccgcgtgggcgtgctgggcatctcctgggccttcggcggcatgatcgtcgtcctcgtccagtgcaccgccggcatctcggggggccacatctgccccgcc

SEQ ID NO: 79339 - DNA, 418 bp, Zea mays
agtataaggaggcagatgcccattcactatgggtcgaaccgtctgaactatttcacagtctcgtcacctatcgcaacacagctcccgcatgctgttggagctgcctactctctgaagatggacaagaaggacgcgtgtgccatcacatactttggggacggtgggacaagtgagggagacttccatgcagcgctcaacttcgcggctgttatggaggcaccggtgatcttcttctgccgcaacaatggctgggccatcagcactccgactactgaacaattcagaagtgatggagttgtcatccgtggccaggcttatgggatccgtggcatccgagtagatggcaatgatgctcttgctgtgtacagcgcaatccatgctgcccgagaaatggctgtaactgaaggaagaccaattt

SEQ ID NO: 79340 - DNA, 407 bp, Zea mays
  unsure (1)..(407): unsure at all n locations
acaataagtcacacaagaaggacatcagcggcaacccgagggcgctccggcggctgcgtaccgcgtgcgagagggcgaagaggacgctctcctccaccgcccagaccaccattgagatcgactcgctctacgagggcatcgacttctacgcgaccatcacccgggccaggttcgaggagcttaacatggacctcttcaggaagtgcatggagcccgtggagaagtgcctccgcgacgccaagatggacaagtcacagatccacgacgtcgtgctcgtcggaggttccacccgtatccccaaggtgcagcagctgctccaggacttcttcaacggcaaggagttgtgcaagagcatcaaccctgacgaggccgtcgcgtacggcgccgctgtccangccgccatcctc

SEQ ID NO: 79341 - DNA, 376 bp, Zea mays
aggatttgttgctttcaaatctgctgaagatgctaaccgagctcttacggagatgaatggcaaaatggttggaagcaagcccctttatgtagctcttgcgcagcgtaaagaagacagaaaggcaaagctacaggcacagttttcacaaatgcgtcctgttgcaatggcgccttcagtaggtcctcgcatgcccatgtttccacctggtgtccctggagttggtcagcagctgttctatggtcagccaccaccagccttcatcaaccctcaggctggatttgctttccagcaacctctgatgcctggtatgaggcctggtggtccaatgccgaactttatgatgcctatggttcagcaaggacagcaaccacagcgt

SEQ ID NO: 79342 - DNA, 371 bp, Zea mays
atgcagagtccagacgccagacgccctctacttctctctagttagtgtacatttcaaactcttggccgccgcctcgctctctgttcgccgcgccccgccgcagaaatggcgctgccgaatcagcaggttgtggattaccccagcttcaagctcgtcatcgttggcgacggtggaactggcaaaaccacatttgtgaagaggcatcttactggcgagtttgagaagaaatatgagcccaccattggtgttgaagttcagcctctcgattttagcactaactgtggcaaaattcgtttctattgctgggacactgctgggcaagaaaagttcgggtggcccacggatggctactacattcatgggcagtgtgc

SEQ ID NO: 79343 - DNA, 428 bp, Zea mays
acgcgtccacaaatgtttgttgtgaacgctgggagtggatttaagtggatctggaacagcgtgaagggcttccttgacccaaagacttcatccaagattcatgtgcttggttcgaactaccagagcaggcttcttgaagtaatggattcgagtgagctgccagaattccttggcggttcatgcacatgtagtgacaagggtggttgtcttggatcgaacaaagggccgtggaatgatccttatatattgaagctgatccacaatttggaagctggatgcgtgagggaaatcaaacctgtttctgagggggaagaaagaaacagctcatcctttcggttggaacagatgaaatggcagggcttgctaagtgatacatcaaatgctgaatctggatctgatgttgatgaatttggtgcatcatttgttca

SEQ ID NO: 79344 - DNA, 397 bp, Zea mays
cgtctaaccacacgtctgccaacgcgtccgccactgcctcgtgtggccgtcgtctcccgttcggaacgccaagcccccctccggcgaaatggcccccaagcgaggtggcagggcgccggtgccggccaagaagaagacggataaagtgacgaaccctctgtttgagaagaggccgaagcagttcggcatcggcggcgcgttgccgcccaagaaggacctgcaccggttcgtcaagtggcccaaggtcgtgcgtatccagcgccagcgccgcatcctcaagcagcgcctcaaggtaccaccggcgctcaaccagttcacccgcaccctcgacaagaacctcgctacgaacctgtttaagatgcttctcaagtaccggcctgaagacaaggctgccaag

SEQ ID NO: 79345 - DNA, 379 bp, Zea mays
acttcgccactccgcatctctagctggcctgtcgaggaccctcgccatcctccccaggcgcaccaccaaacggtccaaacccccagcggcggcgctaggatttgagtctcagcgcgccggcaccgccaccgccaccggcggtgatggcagggcaggagcgtaggacaatcgatctggaggagggatgggcgtttatgcagaagggtatcaccaagctgaagaacatcctcgagggcaagcccgagcctcagttcagctccgaggactacatgatgctctacacgacgatatacaacatgtgcacgcagaagccgccgcacgactactcgcagcagctctacgacaagtatcgggagtcgttcgaggagtatatcacctc

SEQ ID NO: 79346 - DNA, 411 bp, Zea mays
  unsure (1)..(411): unsure at all n locations
cgggtcgatgcaagcgtctaaatcgagtccgaatatcgcgatcagagcaggagcaggcaacgcgcaccgaaatcttccaatccacaagactcgctacttcgcagttggcagactcgcccgcagcgagccgctagcaaccaagcagaaatgtcgctggtgaggcgcggcagcgtgttcgacccattctccgtggacctcttcgaccccttcgacagcgtgttccgctccatcgtgccgtcgtcgtcgtcggcggcggcggcctccgagaccgccgccttcgccagcgcccgcatcgactggaaggagacgcccgaggcgcacgtgttcaaggccgacctccccggcgtgaagaaggangaggtgaaggtggaggtggaggacggcaacgtgctgctcatcagcgggcagcgc

SEQ ID NO: 79347 - DNA, 423 bp, Zea mays
tatctctaaagtgagtcgtatctatcatcttcttcctcctcctcctagcacagctagcgcctgctccccttcgcctgtgatcatgtcttgcagcagcggcaagtgcgactgtggctccagctgctcctgcggcagctcatgcaactgcatgtcccctaacgtggagaccgccgccgccagcagcatcaataccacggtcctcgccgcgccgaccaccaaggccagcgccggcggcttcgaggcggccaccgatggcggcggctgcgactgcaacacctgcaactgcggcaccagctgctgctgctcctgctgcagctgcaactgagccggtcaggcgatggcgcacgagagtctagaggacgacgacgagtcgtatacatataatagcggcgtctaaataagatcctgtcaactgcacccgcc

SEQ ID NO: 79348 - DNA, 399 bp, Zea mays
atggactgccacacctcgcacattgctgtcaagtttgcggagctcattaccaagattgataggcggtctggcaaagagcttgagaaggagcccaaattcctcaagaatggtgatgctggtatggtgaagatggttcccactaagcccatggtagtggagaccttttctgaatatcctcctcttggtcgctttgctgtccgtgacatgaggcaaacggtggctgtcggagtcatcaagagtgtggagaagaaggatccaactggagccaaggtgaccaaggctgccgcaaagaagaaatgatgtgtctggctggttctgtgtttgcttgagggatacctagtggaaacgtaaaatatctcgtcctgttcacgtcattgtctgaactatgctcgcaacgtt

SEQ ID NO: 79349 - DNA, 410 bp, Zea mays
acttctccctccgccgccactcccctcccattcaccgccaccgccaattccataccgtcctccgccacctctgctgagagcgagaagagatggcaggcaagggtgatgggccggcaatcggcatcgatctcggcacgacgtactcttgcgtcggcgtctggcagcacgaccgtgtcgagatcatcgccaacgaccagggtaaccgcaccacaccctcgtacgtcgccttcaccgactccgagcgcctcatcggagatgcggccaagaaccaggtcgccatgaaccccatcaacaccgtctttgatgccaagcgtctcattggcaggaggtttagtgatgcctctgtccagagtgatattaagctgtggcccttcaaggtcattccagggcccggtgagaagccaatgata

SEQ ID NO: 79350 - DNA, 160 bp, Zea mays
agaagatgcgccagaaccgccccatcccctactggatccgcatgcgcaccgacaataccatcaggtacaacgccaagcgcatgcactggcgacgcacgaagctcggcttctgagcggtggaagagatgatggccagcgaatcttgtggaggatagagctc

SEQ ID NO: 79351 - DNA, 407 bp, Zea mays
  unsure (1)..(407): unsure at all n locations
atgatgatgatgacttctggtgaggctgtcaagtacaagagctcattggacgcattccagcagatccttaagaaggaaggccccaagtccctgttcaagggtgctggtgctaacattcttcgtgccattgctggcgctggtgtgctttctggctacgaccagctccagatcctcttcttcggaaagaagtacggctccggcggtgcttaaatggagaaaaatgatgacgaacaagagcagttcgctcccggtccagcccagtcaggatctggtcaagtttttgcctttcatatcgaagaaattaataatttatgtaggagaatttttccaacattcgttttgggcggagacattgatctcaaaacactcgtaactgtcctactangtggtggcatgggtccccaaaa

SEQ ID NO: 79352 - DNA, 443 bp, Zea mays
  unsure (1)..(443): unsure at all n locations
ccgggtcgatacacgactctacagacactccgtatactgtaccccaagcaccggcgcggcggcggcggctaccatggcagtcgggaagaacaagaggatctccaagggaaagaagggtggtaagaaaaagaccgtcgatcccttctctaagaaggactggtatgacatcaaggccccatcggtcttcagtgtgcgcaacattgggaagactctcgtgtccaggacacagggtaccaggattgcctctgatggtctgaagcacagagtctttgaggtttgtctagctgatcttcagggtgacgaggatcaggcttacaggaaaatcaggctccgtgctgaagatgtgcaaggcangaatgtgctcacaaacttctggggcatgaattttaccaccgataagctcagatctctagtaaagaagtggcagacattgattgaagccc

SEQ ID NO: 79353 - DNA, 436 bp, Zea mays
  unsure (1)..(436): unsure at all n locations
ctcgcgggtcgatacaagactctatatcaactctgactaatttgatgatcttcttcccaagtacctgagctttttgaagggtattgttgactcggacacgctgcccctgaatgtgtcacgagaaatgcttcaacaacatagcagtctcaagaccatcaagaagaagctgatccgcaaagcccttgacatgatcaggaaacttgctgaagaagaccctgatgagtacagcaacaaggataagacagatgaagagaaaagcgagatggaggagaagaagggccagtacgccaagttctggaatgagtttggcaaatcaatcaagctgggtatcatcgaagacgcgactaacagaaaccgccttgcgaagcttcttagatttgagagtaccaagtcggatggcaaacttgcctcncttgacgagtacatctcacggatg

SEQ ID NO: 79354 - DNA, 423 bp, Zea mays
atctgggacaggacggagctgagcttctagcaacgtacagtgtatccgccatgagtcctttcggggcggtgatcacgccagaaaccctcaagtacatgtccaagtaccagggacgtgagatcacgcaggtggactgcgcacgggaggcgatgaggctgatccacgcggaagacaagaacctcaaggccgaggactcagcgtgggagctgaagaagaagttcggcaacggcgtgagcaccatggtcctcgtctacaacgccaccggggccagcctgagcctggtggacgacgggaaagactggatgggctccgtctacagctcgccgatcccggacaccttccacaacgggcagtggatcgccttcctccacgtcaagcccggctcgctggcgcagggcagccaggccgccagggtgttccgcg

SEQ ID NO: 79355 - DNA, 439 bp, Zea mays
cgcgcgggtcgatgcaagcctctacactgagtcgtataagatcatgcaggcgcagaccctgtcggactcgagcaagcaggcgtacatgcgcggcaagagggtgctcgagatcaaccccaggcaccccatcatcaaggagctccgcgacaaggtcgcccaggacaacgagagcgaggagctgaagcacacggcgaggctggtgtaccagacggccctgatggagagcgggttcaacctccccgaccccaaggagttcgcgtccagcatctacaagtcggtgcagaagggcctggacctgagccccgacgcgaccgtggaggaggagaacgaggccgaggagcagccggaggtggagaaggagccggagccggagccgtcgtcctacgacaaggacgagctttaggctttcggatttgtttcaggtctagctagctcccgc

SEQ ID NO: 79356 - DNA, 406 bp, Zea mays
  unsure (1)..(406): unsure at all n locations
gacattgatgatcctccctgcgctattgctgcaggagctcttttatttgttttggcaagtgatgtccaagacaataattcgctggattcagaaacttgtgtccatttccttcttaaattattaaaccctccagtgaatgttgttgatgccaaagcgccatcaataggttccaaacttcttggaatcagtaaatttcagatgcttaacagttccaataaggatgcagattctagttcagaggacatacttttaaaagttgaagaaatcctcttaagctgcaaagagatcaagccactagacagtgatgataagaaaacaacaaggccagaactatgttcaaagtggcttgctttgttgacaatggaaaaagcgtgcttgtctgctgttgcattanaggatacatctg

SEQ ID NO: 79357 - DNA, 406 bp, Zea mays
cacgcggcaagagcttcccggcccgaaaccgaaagcaccaccaccaccaccaccaccaatctctgcgttttccgtctgcggcggcggcggcagcagcggaggaggtggacgagatgctgtccgccgacatccccccaaaccagaccatctacctcaacaacctcaacgagaaggtcaagaaagaagagttgaagagatcgctttatgccctgtgctcgcagtatggaaggatactggatgtggtggccctgaaaacacagaaactgagagggcaagcatgggtggtgtttagcgagattacagctgctaccaatgctttccgtggattgcaagactttgatttctacggcaaaaaaatgcgagtacaatatgcaaaaacaaaatcagattgtattgcaaaagaaga

SEQ ID NO: 79358 - DNA, 447 bp, Zea mays
  unsure (1)..(447): unsure at all n locations
ggtcgatgcaagcctctaaaatgactcctacgtagtgggctctagatcccgatggcctcgcgccgccgcaccctgctcaaggtcatcatcctcggcgacagcggggttgggaagacgtctttgatgaaccaatatgtgaacaagaagttcagcaaccagtacaaggctacgattggggcggatttcctcaccaaggaggtgcagttcgaggacaggctcttcactctgcaaatatgggacactgctggtcaggaaaggtttcagagtcttggcgttgcattctaccggggagcagattgttgtgtcctagtctatgatgttaattctatgaaatcgtttgataatcttcacaactggcgtgaagagtttctaattcaggcgagcccatcagatcctgacaatttcccttttgttctgttgggtaacanagttgatgtagatggtggg

SEQ ID NO: 79359 - DNA, 412 bp, Zea mays
gtagccaaagaattccctcccctagccgccgccgccgctcgtctccctgagaggtgccgggaccgaggaactggccgagttctaggtagagaatcggttttgcttgtctcagcacggggtctgctgcgtctggtggtggtgaaggggagaaattcgtgagatctgttccggatcaggcgtgcgagctcgggaatcaggggtttcacacatagcttcgtcgatttgaatttgatgtactaatggagtctaagggtggcaaaaagtctagcagtagtcgttccatgatgtatgaagctccccttggctacagcattgaggacgttcgacctgccggaggcgtgaagaagttccagtctgctgcttactccaactgcgccaagaagccatcctgatatcccttttgggcttctca

SEQ ID NO: 79360 - DNA, 404 bp, Zea mays
ttttcctactcaggggtggcatgagaagtgtagaattcaaagtcatagagactgatcctgcagagtattgtatcgttgcaccagatacagaaatattttgtgagggtgagcctattaagagggaggacgaggaaagactcgatgaggttggctatgacgatgttggtggagttagaaagcagatggcccaaatcagggaactggttgaacttccattgcgtcatccccagcttttcaagtctattggtgtgaaaccaccaaagggcatattgctgtttgggcctcctggctccggcaagacccttattgctagagctgtagctaatgagacaggtgcattcttctttttgatcaatggaccagaaatcatgtcaaagctagcaggagaaagtgaaagcaatctc

SEQ ID NO: 79361 - DNA, 392 bp, Zea mays
aaaaaggcactggagaactcccccttccttgagaagctgaagaagaggggctatgaggttctgtacatggttgatgccattgacgagtatgctgttggtcagctcaaggagtttgagggcaagaagcttgtctctgccaccaaggagggtctgaagcttgatgagactgaggacgagaagaagaggaaggaggagctgaaggagaagtttgaggggctgtgcaaggtcatcaaggaggttctgggtgacaaagttgagaaggtggtggtgtctgatcgcgttgtggactcaccgtgctgccttgtgactggcgagtatggctggaccgccaacatggagaggatcatgaaggcacaagcccttagggactcgaacatggcgggctacatgtc

SEQ ID NO: 79362 - DNA, 396 bp, Zea mays
atacgacggagctgagcttctagcaacgtacagtgtatccgccatgagtcctttcggggcggtgatcacgccagaaaccctcaagtacatgtccaagtaccagggacgtgagatcacgcaggtggactgcgcacgggaggcgatgaggctgatccacgcggaagacaagaacctcaaggccgaggactcagcgtgggagctgaagaagaagttcggcaacggcgtgagcaccatggtcctcgtctacaacgccaccggggccagcctgagcctggtggacgacgggaaagactggatgggctccgtctacagctcgccgatcccggacaccttccacaacgggcagtggatcgccttcctccacgtcaagcccggctcgctggcgcagggcagcca

SEQ ID NO: 79363 - DNA, 443 bp, Zea mays
cgcgcgggtcgatacaagactctacagtggatcatgatatcaagaagaaggtggacgccaagaacgcgctcgagaattatgcctacaacatgaggaacaccatcaaggacgacaagatcgcctccaagctccccgctgaggacaagaagaagatcgaagatgccgttgacggcgccatcagctggctggacagcaaccagctggctgaggtggaggagttcgaagacaagatgaaggagcttgaggggatctgcaaccccatcatcgcgaagatgtaccagggcgagggcgcgggcatgggcgctgctgctggcatggatgaggatgccccgtctggtgggagcggtgctggtcccaagatcgaggaggtggattaagttggttagtgttcgaggtttggtttggtgaggtgtgaagtgcctgaactctgatggttgtttgtg

SEQ ID NO: 79364 - DNA, 427 bp, Zea mays
tcgtgggtcgatacaagactctagaatgagtcgtatcatttcttggctggacaagtatgggttggtggtcttcttcagaagggcagtgatgtcgtctatgttactgatgatggtcaggaacagcagtacaatgtgcctcaagtcaagggtcatcgacttagaggtgggccacagatgattcagctgagcttggatggcaagaggatatacgtgacaaactcacttttcagccgatgggatgagcagtttttcggtgatgatcttgtcaagaagggctcccacatgttgcagatcgatgtcgacaccgagaaaggaggcctggctgtcaaccccaacttcttcgtcgattttggcaccgagcctgatggtcctgccctggcccacgagatgagatatcctggtggggactgcacctctgatatatgga

SEQ ID NO: 79365 - DNA, 385 bp, Zea mays
  unsure (1)..(385): unsure at all n locations
aagcacgcaatccaatttccctccatttctctagatctcgagttgctctgctacttcttttagattccttctttcgttcgggagagcgattctctagctggtggcaatggcgaagggcgagggtccggcgatcgggatcgatctcggcaccacctactcgtgcgtcggcgtgtggcagcacgaccgggtggagatcatcgccaacgaccagggcaaccgcaccacgccgtcctatgtcgccttcaccgacaccgagcggctcatcggtgacgccgccaagaaccaggtggccatgaaccccaccaacaccgtcttcgatgccaagcggttgatcggcangaggttctctgacncgtcagtgcagagtgacatgaagctatggccg

SEQ ID NO: 79366 - DNA, 435 bp, Zea mays
tagtttggatcatctcaccggctcgaggagatcgtgacattgagaggacgatgggagggcgcgcgctcctcctcctcctcctggtctcggcgttggtctttcagatccacgcctccgacccgctgctgtacgagccgttcgatgaggactttgaggggagatgggtcgtctccaagaaggatgaataccaaggtgtgtggaggcatgccaagagtgatggtcatgaggactatggcctccttgttagtgagaaggcaaggaaatacgccataatcaaggagcttgatgagccagttaccttgaaggatgggacagtggtcctgcagtttgaagtgagacttcagaatggccttgaatgcggaggtgcctacattaagtacatccgccctcaggatgctggatgggatgccaaggagtttgataatgagactccat

SEQ ID NO: 79367 - DNA, 406 bp, Zea mays
atgttagtgttcgtcctcatggcgccgccgcagccgaagtcgggcctcttcgtgggcatcaacaagggccatgtcgtcaccaagcgcgagctgcctctgcgcccgtcccaccgcaaggggaaagcaacgaagagggtgtccatggtcaggggcctgatcagagaggttgctggctttgctccttatgagaagcgtatcaccgagcttctgaaggttggcaaggacaagcgcgctctgaagcttgccaagagaaagcttggaactcacaagagggcaaagaagaagagagaggagatgatgggcgtcctcaggaagatgagatcggctggtacgcacactgacaagaagaaataaagcatttcaagttcatgaatgtggcaaccagagattatcaactgtgtttttt

SEQ ID NO: 79368 - DNA, 453 bp, Zea mays
ctcgttggtcgttacaacactctagattcactcgtattaaccgaatctgtgagccatgtcgaccaacaagggcagcgcggccaagggcggcggagggaagaagaaggaggtgaagaaggagacgaagctcgggatggcctataagaaggacgacaacttcggggagtggtactccgaggttgttgttaacagtgaaatgattgagtactatgacatttctggttgttatatattgaggccatgggcgatggaaatctgggagctactgaaagaattctttgatgcagaaattaaaaagctgaagctcaaaccatattatttccctttgtttgttactgagaatgttctacagaaggaaaaggaccacattgagggctttgcacctgaggtagcttgggttactaaatctgggaaatctgacctggaagcaccgattgcaatccgccccacaag

SEQ ID NO: 79369 - DNA, 424 bp, Zea mays
taaacctgtgctccaaaatcactggtcaaatccttgcgagcctcgtcatgaatccaccaaaggttggggacgaatcatatgcttcctacaaggcagagaaagatggaatccttcagtctttagctcgccgtgcaaaggcactggaagatgcattcaacacgcttgagggattttcatgtaacaaggctgaaggagcaatgtaccttttccctcagatccatctgccacataaggcaattgaggctgctaaagctgccaagaaagcacctgatgcattctatgcgctccgtctccttgaatcaactggaattgttgtggttcctggatctggatttggccaagttcctggaacatggcacgtcagatgcacgatcctgccgcaggaagataaaatccccgcggtgatcacccgcttcaaggcttt

SEQ ID NO: 79370 - DNA, 382 bp, Zea mays
aaacactggtcaaatccttgcgagcctcgtcatgaatccaccaaaggttggggacgaatcatatgcttcctacaaggcatagaaagatggaatccttcagtctttagctcgccgtgcaaaggcactggaagatgcattcaacacgcttgagggattttcatgtaacaaggctgaaggagcaatgtaccttttccctcagatccatctgccacataaggcaattgaggctgctaaagctgccaagaaagcacctgatgcattctatgcgctccgtctccttgaatcaactggaattgttgtggttcctggatctggatttggccaagttcctggaacatggcacgtcagatgcacgatcctgccgcacgaagataaaatcccc

SEQ ID NO: 79371 - DNA, 360 bp, Zea mays
attctccaccggcaccagtccaccacctcctgccaccgcgcggccccaaccaaccacaccgcagcgcagcaatggcgggcaacggcgccatcgtggagagcgacccgctgaactggggcgcggcggcggcggagctggccgggagccacctggacgaggtgaagcgcatggtggcgcaggcccggcagcccgtggtgaagatcgagggctccaccctccgcgtcggccaggtggccgccgtcgcctccgccaaggacgcgtccggcgtcgccgtcgagctcgacgaggaggcccgcccccgcgtcaaggccagcagcgagtggatcctcgactgcatcgcccacggcggcgacatctacg

SEQ ID NO: 79372 - DNA, 414 bp, Zea mays
ggtcgacgcacgcctctagcgagtgtcattgtagaagcgtcgagcttttttcttctttgtcttgctgcgcaagaagaagggaaacgagaggagggcggcgatggcgaagaggctgctcccgtcgctgaaccgggtgctggtggagaagctggtgcagcccaagaagaccgccggcggcatcctcctcccggaaacatccaagcagctgaatgctgctaaagtggtggctgttggccctggtgagcgcgacaaggcaggcaatctgatcccagttgctctgaaggaaggcgacactgttcttctgcccgagtatggtggatctgaagtcaagcttgcggctgataaagagtacctcctcttcagagaggatgacattttgggcacacttgtggactgattcagatcgcgggcaag

SEQ ID NO: 79373 - DNA, 419 bp, Zea mays
atgattcacaaagttttcacaagtccaagtctgttccaaacattccgaaggaccatgtatgcactgttgatgagctgtcagttaatcggggtgactggtactaccttgatggcactgggcatgatcaaggcccattttcttattccgaattgcaagaattagttaaaaaggacactatcattgaacaaagtagcgtgttccgtaagatcgataacacatggtttccagttcttaaggatttaaaacctggaagctctgttcccagtgcagcaccaagctcaaacttaattgctgcttttacgcacccagaccaatataattttggtgtgaaccaaggatcaagtagcttccatgagttacacccccagttcgcgggttatacacgtggcaaattacatgaactagtcatgaaatatttc

SEQ ID NO: 79374 - DNA, 440 bp, Zea mays
  unsure (1)..(440): unsure at all n locations
ggtcgatgcaagcgtctacagtgacgtcgtgttaatccccattcgttccccttctcgcctccacgagccttcacaaattgccctctcagctcttctcctaatctcactctagccctagccaaatcccagacccatcccagccctagcgacaccaaccagctcgccagcgaccatggggaacccggagaagctgatgaatcagatcttcgacctcaagttcacctccaagtcgctgcagcggcaggcgcgcaagtgcgagaaggaggagaaggagcagaagctcaaggtcaagaaggcgatcgagaagggcaacatggacggcgcccgcatctacgccgagaacgccatccgcaagcgcaccgagcacatgaactacctccgcctcgcctctcgcctcgacgccgtcgtggcccgcntcgacacgcaggccaagatgcagg

SEQ ID NO: 79375 - DNA, 418 bp, Zea mays
gtattatcggcatcttgaagatattttcaacagatataaagaacctgatgctgatatgataatggtggaaggaatatctcaattttgcaatgatctgcaggttgatcctcaggatattgtcatgcttgtcatatcatggcacatgaaagccgccacaatgtgtgaatttactcgtcaggaattcattggtggactgcagtcaattggggtagattcaatcgagaagtttcgtggaaaattaccatcattacgagctgagctaaaagatgacaataaattccgtgatatatacaactttgcattcacttgggcaagggaaaagggtcaaaagtctctctcactggagacttctattggaatgtggcagttgctatttgctgaaaggaactggcctcttccggatcattggtgtcagttt

SEQ ID NO: 79376 - DNA, 305 bp, Zea mays
aatgcgtccgcccacgcgtccgagcaactctctcgagtcgattcctaagcagctagccagtgactcgatcttagcgtgctacaatggcggcagctgctagtgccctgctcctcctgctctgctcagccttctgctcccttgcccaccgggcggccggcgtcgactacggctcgtggcagagcgcccacgccacgttctacggcggcggcgacgcgtctggcacgatgggcggcgcgtgcggctacgggaacatgtacagcacggggtaccgcaccaacacggtggcgctgagcacggtgctgttc

SEQ ID NO: 79377 - DNA, 393 bp, Zea mays
accgaccccgagctccgaaggccgcagcatcaggcgcgccccccctcgcgtgtgaccgagatggcgctgccgaatcaggggaccgttgattaccccagcttcaagctcgtcatcgtcggcgatggtggaactggtaaaactacatttgtgaagaggcatctcactggagagtttgagaagaaatatgaaccaaccattggtgtggaagttcatccgttggatttcaccactaactgtggtaagatcaggttctactgctgggataccgcagggcaagagaagtttggtggcctcagggatggatactatatccatggccagtgtgcgatcatcatgtttgatgtaacctcaaggcttacttacaagaatgttcctacgtggcatagggacctg

SEQ ID NO: 79378 - DNA, 393 bp, Zea mays
aggttgtgcgatgctttgaggatggtgatatagttcatgtcaatggcaaggtccatcccagatcacacattgatgtcattaacctagagctgatattttcggatcttgaacaaatagagaagaggttagataagcttagcatgagcaaaactaaagatacacacgtacgagtgaaggaacaagcagagaaatcacgattggaaaaaattcagcaggcacttatggaaggaaaaacctgcaagatcgatctagttggctgagcatgagaaacaagctataaaacatctttatctgctaactatgacacctgtcatttatgttgctaaggttacagaatcttatcttgctgaacctgatatcaatcctcatgttaaagaggtgtctaaaccaaca

SEQ ID NO: 79379 - DNA, 396 bp, Zea mays
gcgctgcccatggaagtggaggccgcgcgcgcggccgtggagaacggcagccctctggtccccaacaggatcaaggagtgccggtcctacccgctgtaccggttcgtgcgcgaggaggtcggcaccgagtacctgaccggcgagaagacgaggtcgcccggcgaggagctgaacaaggtgctcgtggccatcaaccagcgcaagcacatcgacccgctgctcgagtgcctcaaggagtggaacggcgagcccctgccgctctgctgagctgcaccagcagagaaagacaatgtatacagaaggaaaacaagtagtatagcagcacaggacagagcgtttcaaggtcgttgtgaagtgctttaccatcagaccagcacgagaacccctatcttaccg

SEQ ID NO: 79380 - DNA, 384 bp, Zea mays
acccacgcgtcaggtccttcctccgtcttcctcctctgccgactggacatgctgggcgtcgcgcggaggcggctcggatccggatgcgtgctcgcccagctggcgcaggccctccgcgccgccgccgctcccgccaggacctactccgccgcggccaaggagataactgtacgggaagcattgaatactgcattagatgaagaaatgtcagcagacccttctgttttcttgatgggagaagaggttggcgagtaccaaggtgcatacaagatatccaagggtttgcttgacaagtatggcccggatagggttctcgatactccgatcactgaggcgggcttcactggcattggtgttggtgccgcttaccatggtcttcgacct

SEQ ID NO: 79381 - DNA, 379 bp, Zea mays
ccacgcgtccgcgtgcaactaggaaaaggcacaaggttccgtcccactgcatgcgtcaagagactgtctggttttcttgttctgatttgtcatttgctggtgctcaaagccggcttggtttcctcgaaggatcagcatctactcttgattgtggactttgtcgcatctgatatcaacttcataaatctttatccaagatggcgctgcaaaacattggtgcttcaaacagggatgatgccttctacaggtacaagatgcccagaatgattaccaagatagaaggccgtggtaatggtatcaagacaaatgttgtgaacatggttgacatagcaaaagcacttgccaggccagcttcctacacaaccaagtactttggatg

SEQ ID NO: 79382 - DNA, 425 bp, Zea mays
acgaaatcgaacgtgtggaggcgtaccggaaggtcctcaagacatggtctagatgggtagaggcgcacgtagatcccaagagaacaacggtcttattcatgagcgtgtcaccagtacatatgcagagcgaaggttggggcagccccaacgccgtaaaatgcttctccgagacacagccggcgatcagctacaataagaaactggaggtgggcacggactgggacctcttcgcgaccgcccagcgcgtgacgaggtcgatgaagaaggtacccgtgcacttcgtcaacataactgcgctgtcggagatccgcaaggacgcgcacacctccgtgcacacgctgcggcaggggaagctcctgacgccggagcagaaggcgaacccgaggaagttcgcggactgcatccactggttgctccccggtgtg

SEQ ID NO: 79383 - DNA, 359 bp, Zea mays
gtcgtatcatcagtcgccagaggacttgttgatcgacgtgagtgaggttgaaaagcacaccatcgtcatggacggcggatactacggcggtcgcgatcagggcgacagcggcgggtactacggcggcagtggcatcgcaacgccggggtacgctccggcggtcccgtacgggatgtcgcaggtgaacatcgacggcaacgggtgcgggcgggcgctgccgccgcaaccgaccgtgaacgtgtactgccgcgccaaccccaactacgccatgagcgtccgcgactggaaggtggtgctggcgccggcgaaccccaaagacgagtaccagcactggattaaggacatgcggctggagcacg

SEQ ID NO: 79384 - DNA, 376 bp, Zea mays
acggacgcgtgggtggcaaagggggaggggccggcgatcgggatcgacctgggaacgacgtactcgtgtgtcggcgtgtggcagcacgaccgcgtcgagatcatcgccaacgaccaggggaaccgcaccacgccgtcctacgtcgccttcaccgacaccgagcggctcatcggcgatgccgccaagaaccaggtcgccatgaaccccaccaacaccgtatttgacgcaaagcggttgattggtaggaggttctcggacccttccgttcagagtgatatgaagctatggccattcaaggtcgtggcgggccctggcgacaagccgatgatcgtggttagctacaagggtgaggataagcagttctctgccgaggaga

SEQ ID NO: 79385 - DNA, 374 bp, Zea mays
acaaatgcgtgcgccggccgccccctatcccgccggccctgtgtgtgttccccgctaccagccatggcgtcgccgttctccgtgccttcgctgatcatggaggacgaagggcggttcgaggcggacgtggcggaggtggagtcgtggtggggcacggagcggttccggctcaccaagcgcccctacaccgcccgcgacgtggtcctcctccggggcacgctccggcagagctacgcgtcgggggagatggccaagaagctgtggcgcacgctcaaggcgcaccaggccggcggcaccgcctcccgcaccttcggcgcgctcgaccccgtccaggtcaccatgatggccaagcacctggacaccatctacgtctc

SEQ ID NO: 79386 - DNA, 367 bp, Zea mays
agcgatcgctcatcaatcgccagaggagttgttgatcgaggtgagtgaggttgaaaagcacaccatcgtcatggacggcggatactacggcggtcgcgatcagcgctacagcggcgggtactacggcggcggtggcatcgcaacgccggggtacgctccggcggtcccgtacgggatgtcgcaggtgaacatcgagggcaacgggtgcgggcgggcgctgccgccgcagccgaccgtgaaggtgtactgccgcgccaaccccaactacgccatgagcgtccgcgacgggaaggtggtgctggcgccggcgaaccccaaggacgagtaccagcactggatcaaggacatgcggtggagcacgagcatc

SEQ ID NO: 79387 - DNA, 381 bp, Zea mays
acccacgcatcaacgatcgctcatcaatcgccagaggagttgttgatggaggtgagtgaggttgacaagcacaccatcgtcatggacggcagatactacggcggtcgctatcagcgctgcagcggcggctacgacggcggcggtggcatcacaacgccggggtacactccggcggtcgcgtacgggatgtcgcatgtgaacatcgatggcaacgggtgcgggcggtcgctgccgcctcagccgacaatgactgtgtactgccgcaccgatcctaactacgccatgatcgtccccaacgggaatgtggtcctggtgccagcgaataccaacgacgagtactaacactcaatcaaagacatccggtggaacacgagcatcaat

SEQ ID NO: 79388 - DNA, 414 bp, Zea mays
caacttcactggtgctggaggagttgccttgtctatgtacaacaccgacgagtcaatccgagcttttgctgaggcttctatgacaactgcttatgagaagaaatggccactctaccttagcaccaaaaacacaatcctgaaaaaatatgatggcaggtttaaggacattttccaggaggtctatgaagctgactggaagtccaaatttgaggctgctggaatatggtatgagcatcgtcttattgatgacatggttgcgtacgcgcttaagagcgaaggaggctatgtgtgggcttgcaagaactacgatggagatgtgcagagtgatttcttagctcaaggttttggatctttgggtttgatgacatcagtgttggtgtgccctgatggaaaaaccatcgaagctgaagctgc

SEQ ID NO: 79389 - DNA, 388 bp, Zea mays
accgggaatggcaacgctcaaggtcccagccactgttcctcccgtcgccgatgactgcgaccagctgcgcaaagcattccaagggtggggcacgaacgaggcgctcatcatctccatcctcggccaccgcgacgccgcgcagcgccgcgccatccgccgcgcttacgccgaggcctacggcgaggagctcctccgctccatcacggacgagatctccggcgacttcgagagggccgtgatcctgtggacgctggacccagcggagcgcgacgcggtgctggccaacgaggcggcgcggaagtggaagcccgggaaccgtgtgctcgtcgagatcgcctgcacgcgcacctccgcgcagatcttcgcgaccaggcaggcttatcacgag

SEQ ID NO: 79390 - DNA, 389 bp, Zea mays
cccacgcgtccggcacaaggtgcctttgggaagctctacaggggaacatacaatgggatggatgttgctattaagcttttggagcgacctgaggctgaccctgagaaagctcaactgttagagcagcagtttgtccaagaagttatgatgcttgcaacactgaggcacccgaatattgtcaagttcattggtgcgtgcaggaagccattggtttggtgtattgtgacggagtatgcgaagggtggatctctcaagaatttcttgagcaagaggcagaacaggtctgtcccgctgaagttggcagtcaagcaggcattggatgttgcacgtggcatggcctatgtccatggccttgggttcattcatagagatcttaagtcggacaacct

SEQ ID NO: 79391 - DNA, 427 bp, Zea mays
acaggtatttggcgaccaacatggaaatgcgatatacctttatgagagagactgcagtctacagagaaggcatcagaagatcagcgaggaagctccagctccaaatgtgccagctgagtttcggtctcatattggtggagctgctgtatctgcagcaaagggtcatttattggattgtttgtgttgaaggcagttggttactacaatgctggaacagtggagtttattgtggacactctttctggagagttctacttcatggagatgaatactcgactccaggttgaacacccagtgacagagatgattgttggtcaagatcttgtggagtggcaaatacgtgttgcgaatggagaacgactaccattatctcaggagcaggttccaataaaatggacatgcatttgaaccacggatatatgctgaa

SEQ ID NO: 79392 - DNA, 409 bp, Zea mays
ctgctgccttatacgaaacatagctactcctactactcaaatccatccttattgagcttagtgtttgatccatggactcggaaggagtagcagcaaaggtggcagatgagactactaaaccggcaagccaagaagacggcgagagcaaggccgggatgactgatctgctgatgctgaccgacaagtcgcagctgcaggcgctagcgatgctgctgcggaacaacgaggagctcatgatgagccaagcgatcaagtcggagacggagcgcgttgagtacctcaagacggtgagcgactgctacacgcggacaatgaagctccttgacgactccatggcggccaggatcacgtacgagcgttcgggcggaacgaagagcctcgtcgcccgggacatggacgactacgtcgt

SEQ ID NO: 79393 - DNA, 396 bp, Zea mays
caactatcatctctgcatttctgttagcaaatgtaatgggccgtttccaatggttgacatgcccaagaaaggatctgtcaactgggtggctttattgtgatcctggtccaatgtttaagccagagcattactcattgggagagtcggtgccacattggttcccatggaaagatctagccattatgcctgtgcagtggcatgctttagccctaggtttatttgcgtcaataatagcaccatttggaggattttttgcgagtggcttcaagagggctttcaaaataaaggattttggtgacagcatacctgggcatggtggaattactgatagaatggattgccaaatggttatggcagtgtttgcatacatataccaccagtcattcattgcacctc

SEQ ID NO: 79394 - DNA, 412 bp, Zea mays
agcgaatccccaatccgttcggcggcgagccgaccggcgatgcgtccgccggcgccgaaggtcccatccgccgcttcctcgtcctcccacagccagcgcgagccccgcccggagaaccctctcctcctcctcccctcctctcgcttcaccaagctctcactcggctgtcccctcctcgaccgcctcctctgcggcggcctccccgccgcctccgttaccgagatagccggcgagtctgcctctggaaagactcagctctgtcttcagctcgccctcctggcgcccctgtccccgctctccgcctcctccctcttcctccactccgacctcccattcccccttcaccgcctccgccgcctagcccccaaatcccgccccgatatcctccgacaagtcctcgtggcggccgcgc

SEQ ID NO: 79395 - DNA, 323 bp, Zea mays
aggtctcacctccgcaggcaagaagttccgtggcctgcgtggcaagggccacactcaccacaagaataggccgtcgaggagggccacctggaagcgcaaccagaccctttccctccgccgctaccgttgagcacatacaacttgatgttctgctactgtggaacctacctcatgcatgctctgatagtatttggtatttttgttgcatcgttaaattttgctacccatgttacaagctccttgaactctgttatcagtgtaccatggagaaattgaagcgaactatgtttgtggttaaaaaaatcataattcagaaacaaaaa

SEQ ID NO: 79396 - DNA, 398 bp, Zea mays
acaaagcataaatgggcatcacaagaacataaccttcaggtgtgctgatgtgacatctaacgacttgaagattgaagataactctgttgatctgatattttcaaactggctattaatgtacctttcagatgaggaggtccaaaagcttgtggggaaaatggtaaaatggctaaaggtcggaggccatattttctttagagaatcatgttttcaccaatctggagattccaaaaggaaggtgaacccaacacactatcgagaaccaaggttttataccaaggtatttaaagagggccattcatttgatcaagatggaggttcgtttgaactttctctagtgacctgtaaatgtattggggcttatgtcaaaaacaagaagaatcaaaaccagatatgct

SEQ ID NO: 79397 - DNA, 395 bp, Zea mays
gcccactcctccggctcttcttctccaccggcaccagtccaccacctcctgccaccgcgcggccccaaccaaccacaccgcagcgcagcaatggcgggcaacggcgccatcgtggagagcgacccgctgaactggggcgcggcggcggcggagctggccgggagccacctggacgaggtgaagcgcatggtggcgcaggcccggcagcccgtggtgaagatcgagggctccaccctccgcgtcggccaggtggccgccgtcgcctccgccaaggacgcgtccggcgtcgccgtcgagctcgacgaggaggcccgcccccgcgtcaaggccagcagcgagtggatcctcgactgcatcgcccacggcggcgacatctacggcgtcaccaccggctt

SEQ ID NO: 79398 - DNA, 396 bp, Zea mays
aatcctcactcgccgccgccgccgctcgtccctcgccccatcgcgatggcccggatcaaggtgcacgagctgcgggggaagagcaaggcggatctgcaagcgcagcttaaggagtttaagtcggagctctccctgctacgcgtagccaaggtcaccggcggggctcccaacaagctctccaagatcaaggttgtgcgcacctccatcgcgcgcgtgctgaccgtcatctcgcagaagcagaagtcggcgctgcgtgaggcgtacaagaagaagaagctgctcccgctcgacctccgccccaagaagacccgcgccatccgcaggcgcctcaccaagcaccagctctccttgaagaccgagagggaaaagaagcgtgagaagtatttccccatgagg

SEQ ID NO: 79399 - DNA, 407 bp, Zea mays
  unsure (1)..(407): unsure at all n locations
ccggcccacgcgtccaaccatcttcccgcgccagtacgcgttcgagatgtcctccgtcatctacaaggactggaacttcacagagcaggctctccctgacgacctaatcaagagaggcatggcggtcgcagacccgtcgagcccgtacaaggtacggctgctggtggaggactacccgtacgcgtcggacgggctggccatctggcacgccatcgagcagtgggtgacggagtacctcgccgtctactaccccaacgacggcgtgctgcgggcggacgtggagctgcaggcgtggtggaaggaagcgccccaggtccggcacgccgacctcaaggacgcgccctggtggcccaagatgcagacggtggccgagctggtcaaggcctgcnacaccatcatctggattg

SEQ ID NO: 79400 - DNA, 385 bp, Zea mays
aggaaacgagagggccggagcagccgcagtcccggcgatcccgccgccggtcgccctcatacttcctcgtcactgccttcgtttctctttccaacaatcaagatgagccgtggcggtagcgcgggtggtggtcaaagttctctgggttacctctttggaagcggtgagccccccaaaccagcagtggcaccagctgtaagtgctccagctgctgctgcaggtgctccacctgctgagaaaccacctgctgcaaagcctgatggcaccagtcagattgctgctggggttaccagccaaaccaataactaccacatggccgacggtcagaacaccggaaacttccttacggaccgtccttcgaacaatgtctacgctgctcctggcg

SEQ ID NO: 79401 - DNA, 425 bp, Zea mays
agcacacaacagcagctcaaaaacctaacacacctcaacaagcagagcaaagacccgggattcgccggcgcggtagcgagagcgagagatggacgggaggatgttcggtctcgagacccccctgatggtggcgctgcagcaccttctggacgtgcccgacggcgacgccggcgcgggcggcgacaaggcgagtggtgccgcggcgggcggcgggcccacgcgcacctacgtccgcgacgcgcgcgccatggcggccaccccggccgacgtcaaggagctcccgggcgcgtacgcgttcgtggtggacatgccggggctgggcacgggcgacatcaaggtgcaggtggaggacgagcgggtgctggtgatcagcggcgagccgcgcccggaaggagcgcgaggacgccaagtacctgcgcatggag

SEQ ID NO: 79402 - DNA, 338 bp, Zea mays
accgcaaccgcaagcaagcgaagcgcagagcctgcctgaccagagctagctgagctacagccaacagcagctggtctgactgacatggcgaaggacatcgaggcatcggggcccgaggcgggcgagttctcggccaaggactacaccgaccctccgccggcgccgctggtcgacgcggaggagctcacccagtggtccctgtaccgcgcggtcatcgccgagttcatcgccacgctgctcttcctctacatcaccgtggccaccgtgatcgggtacaagcaccagacggacgcgtcggcgtcgggccccgacgcggcgtgcggcggcgtcggcatcct

SEQ ID NO: 79403 - DNA, 410 bp, Zea mays
  unsure (1)..(410): unsure at all n locations
agcctcctgcccccgccgtcgtcgggggtgccggaggtcatctggctgccgacgagcgggggagcggggcccttgtcctgcgcgccgccggaccccgccgtgtatgaccgccccgtcatcggcatcgtctcgcacccaggggacggtgcgggcggcaggatcagcaacaccaccgcgacctcctacatcggcgcctcctacgtcaagttcgtcgaggccgccggcgcgcgcgtcatcccactcgtctacaacgagcccgaagaccgcctcctcgagaaattgagtttgttgaatggagtgctgttcactggtgggtcagagaacgaacgtgtatattttgacacgataaaaagagtatttcagtatgttttggacaagaatgatgcaggtganacatttcctttgtttgc

SEQ ID NO: 79404 - DNA, 394 bp, Zea mays
acgactctcctctctcgcatccgcagcctctcgagctctactccatcccctcgatctcgaagcgcagcagcagcagtcaggcggccatggacgcgagcgcagccggagccggcgggaaggcgaagaagggcgcggccgggcgcaaggccggcgggccgaggaagaagtcggtgacgaggtccgtcaaggccgggctgcagtttcccgtcggccgcatcgggcggtacctgaagaagggccggtacgcgcagcgcgtcggcacgggcgcccccgtctacctggccgccgtcctcgagtacctggccgccgaggtgctggagctggccggcaacgctgccaaggacaacaagaagacccgcatcatcccgcgccacgtgctccttgccatccgcaa

SEQ ID NO: 79405 - DNA, 394 bp, Zea mays
agggtcttcttgttcaatccccatctcgatcggggaggccaccaaccaccatatggcgggagggaaggtttactcgttcgaggaggtgaggaagcacagcgaccgcaaggactgctggctcatcatcgccggcaaggtgtacgacgtcacgccgttcatggaggagcaccccggcggcgacgaggtcctgctggcgtccgtcggcaaggacgccaccgcggacttcgaggacatcggccacagcgcctccgccaaggagctcatgccccagtactgcatcggcaaggtcgacgcggctaccttcccggccaagcccgcctacgtcgtcaccaaggacgacgccaggtcgtccgagaaggccgcgacgagcgccggcgcttgggccacgctcctg

SEQ ID NO: 79406 - DNA, 379 bp, Zea mays
tccaagactctacactgagtcgtattacgagcgcgcgccaagcaagtcttccggccggccgcgaagagcgcaatcaagcaagacaagatggtgaagctcgccttcggaagcgtcggcgactccttcagcgccacctccatcaaggcctacgtggccgagttcatcgccaccctcctcttcgtcttcgccggcgtcggttccgccatcgcctacgggcaactgacgaatggcggcgcgctggacccggcgggcctggtggcgatcgcgatcgcgcacgcgctggcgctgttcgtgggcgtgtccgtcgcggcgaacatctcgggcggccacctgaacccggccgtgacgttcgggctgggcgtgggcggtcacatcacca

SEQ ID NO: 79407 - DNA, 422 bp, Zea mays
acctaaagcccatacaccagaagcgcaccaactccccaaccaccggagaccgcaccccagcacaggatggcatctgactccacggccgccgtgacggtggacggcagcgcgcttgcggggcgcgcgctggccgcggcgggcacgcggcacatgttcggggtggtgggcatccccgtcacctccctcgcgtcccgtgccgccgcggccggggtccgcttcctcgctttccgcaacgagcagtccgcggggtacgccgccgccgcctacggcttcctcacgggctccccgggcgctctactcaccgtctccggcccaggatgcgtccacgggctcgcgggcctctcccacgccaccgccaacgcctggccgctcctcatgattcccggattctgcgatcaggctgacgccggcaggggcgactt

SEQ ID NO: 79408 - DNA, 397 bp, Zea mays
gcgtccacggacgcgtgggggagagtatccacaagtccaaggctgagaaggccagagagaagacactttctgatcagtttgaggccaagcgtgcaaagagcaaggcaagccgtgagaggaagattgctaggagggaggagaggctggcccagggcccaagagaaccaacagcacctgtcgcagccccagctccatctactggggtgccaaagaaagcaaagaagtgaagtatggaaacaaagctgtagctttttggtactatataagcatgactttggagcacctgaagtattttgctgttatatagttcgtgtctcaatattctgagtcttgtatctctaccgttctgttggataatgcatgccgtaagagttgtttatggagcttttgttgttac

SEQ ID NO: 79409 - DNA, 437 bp, Zea mays
  unsure (1)..(437): unsure at all n locations
gggtcggcccaacccacacgtcaagttggacatgcttcgcctatatgcacctgtgcttgccgtccttcgggtcggtgctctttggttaatgttcaaccacctcactatggtgaatggcaacgatggtaggccgacgatatacatacactacaatacaatacgatgatcctagatggatcagggatacacacgacgaccaacaacaaatccaagggaacaatggcgcccaggaacgactttcttgagacgccagtcgggtggacgagcaggaaagcgttcgtcagcccatcgcgtacttctgcgtccagctgcgggccgtcgactcgtacttcggccggtccgtcttgtacatgtgggcaatctccgggacaagaaggtcgtccgggttggggtcggtcagcanggagcagatggagagcaggaccttagaaattgtc

SEQ ID NO: 79410 - DNA, 391 bp, Zea mays
gaccgtgaggcgacacgacgccgagagatcacccgccccccgcatcgtgtccgccccgcttgggattgtgaggtaaagcgtgatggcagcgccgccggcgagggctcgagccgactacgactacctaatcaaactgctcctcatcggagacagcggcgttggaaaaagttgcctcctgttacggttttcagatggatcattcaccactagcttcattaccactattggcattgacttcaagataagaactgttgagttggatggcaaaaggattaagttgcagatctgggatactgcaggccaagaacgtttccgcacaattaccactgcctactacaggggagcaatgggcatcttacttgtgtatgatgtcacagacgagtcatctttc

SEQ ID NO: 79411 - DNA, 364 bp, Zea mays
gaggcgacacgacgccgagagatcacccgccccccgcatcgtgtccgccccgcttgggattgtgaggtaaagcgtgatggcagcgccgccggcgagggctcgaggggactacgactacctaatcaaactgctccgcatcggagacagcggcgttggaaaaagttgcctcctgttacggttttcagatggatcattcaccactagcttcattaccactattgggattgacttcaagataagaactgttgagttgggtggcaaaaggattaagttgcagatctgggatactgcatgccaagaacgtttcggcacaattacaactgcctacttcatggggagcaatgggcatcatacttgtgtatga

SEQ ID NO: 79412 - DNA, 376 bp, Zea mays
  unsure (1)..(376): unsure at all n locations
ccacgcgtccaagccacatctctccactgctccgtccagcgcgtccacctcccaaacccctactcccccaggaagcaatggcttcccccacccagggccaggtcatcacctgcaaagcggcggtggcgtacgagccgaacaagccgctcgtgatcgaggacgtgcaggtggcgccgccgcaggccggcgaggtccgcgtcaagatcctcttcaccgcgctctgccacaccgaccactacacctggagcggcaaggatcctganggtctttttccttgcattcttggccacgaagctgccggaattgtgggaagtgtcggtgaaggagtaactgatgtgcagcctggggatcatgtcattccttgctaccaagcaga

SEQ ID NO: 79413 - DNA, 363 bp, Zea mays
gggcacgcgtccggcgaagcaaagcaatcggaattctctgcgatttctctagatctcgactaccccccactagttttggttcctcctttcgttcgagagagcgattctggtggcaatggcgaagagcgagggtccggcgatcgggatcgacctcggcaccacctactcgtgcgtcggcgtgtggcagcacgaccgggtggagatcatcgccaacgaccaggggaaccgcaccacgccgtcctatgtcggcttcagcgatactgaccatcgcaatcgcgcacgcgctggcactgttcgtgggcgtgtccgtcgcggcgaatatctcgggcggccacctgaatccggccgtgacgttcgggctgg

SEQ ID NO: 79414 - DNA, 386 bp, Zea mays
gcgaagcatcgagttggaattcagcgcgatttctctagatctcgagtacgcccgcaaagagtttggttcctccttacaagatggtgaagctcttctggtggcaatgtcgagaatccatgatcgcgacctccggatcggcctacgtagccgatactcgtgcgtcggtgttcttcatcatcgccggcgtcgagatcagccatcgcctacaggcaactgacgaatggcggcgcgctggacccggcgggcctggtggcgatcgcgatcgcgcacgcgctggcgctgttcgtgggcgtgtccgtcgcggcgaacatctcgggcggccacctgaacccggccgtgacgttcgggctggccgtgggcggccacatcaacatcctgacgggcgt

SEQ ID NO: 79415 - DNA, 396 bp, Zea mays
tccatcgacccacccaacccccccctccgccccgcgcttcgcctgggtaccggcgtccgccgcgccccgtcccgtccaggaacaggaagagcagtaacccatccatcggggatcaccaggggagcaagatgtcgactgccgccgccccaagattgcccgctcccagatccggggcaagctatcactatcagacgaccgcggctccggtggccaacaccctctccttcgccggccacgcgaggcaagcggcccgcgcgtccgggccacagctgtccagcaggttcgtggcgtccgcggcggccgtgctgcacaaggtgaagctggtcggcccggacgggacggagcacgagttcgaggcccccgacgacacctacatcctcgaggcggccgagaccg

SEQ ID NO: 79416 - DNA, 388 bp, Zea mays
cgtcaaagccgcagcaagtgcccagaaggccagaaccagaaccaagcagctcgttgcaacctcatatcatcccctgccacgcacctccgtccgccgcgccatggaatcgaggaggagggccgtgcccaccgtgaggatcgacgtcggcaccacctactcgtgcgtcggcgtgtggcagcacgaccgggtggagatcatcgccaacgaccaggggaaccgcaccacgccgtcctatgtcggcttcaccgacaccgagcggctcatcggcgacgctgccaagaaccaggtcgccatgaaccccaccaacaccgtcttcgatgccaagcggttgatcggcacgaggttctctgactcgtcagtgcagagtgacatgaagctatggccgttc

SEQ ID NO: 79417 - DNA, 390 bp, Zea mays
accgcatcccgttcgcgagcgcgacacacgctgacagctcacggctgaccttcccgagtcccgacggcctccagctccatcttgattcttgaggcgaagccccggtgcgtaagagtctgccatggccagcgagaataaggtctttgggttcgaggaagtcgccaagcacaacgtcaccaaggactgctggatcatcatcgccggcaaggtgtatgacgtcactccgtttatggatgagcatcctggtggagacgaggttttgctagctgtaactgggaaagatgctacagctgatttcgaagatattggccacagtgattccgcaagggacatgatggagaagtaccacatcgggcagatagatgcttcaacaatcccagcaaagcgtgc

SEQ ID NO: 79418 - DNA, 286 bp, Zea mays
cacgcgtccagacaaatgtcgtggttcgggcaccaccaccacaaccagccggctcccccggcgtcgggccccaaccaggtgttcaagatcttctgccgcgccaacgagaactactgcctggccgtccgcgacggcgccgtcgtgctggccccggtcaaccccaaggacgaccaccagcactggtacaaggacatgcgcttcagcacccgggtcaaagacgatgaacgcatgccggcgttcgcgctcgtcaacaaggccacggggctcgccatcaagcactccctcg

SEQ ID NO: 79419 - DNA, 398 bp, Zea mays
  unsure (1)..(398): unsure at all n locations
atgaagttatccaccccggccgcgccaacgtctccaaggcggatttaaaggaaaggcttgccaaaatgtacgaagtgaaggacccaaacaacatcttcgtcttcaagttccgcacccactttcngtgggnggcaagtccactggctttcggctcatctacgataaccctcagtccgccaagaagttccacccaaatacgccccatcaagaatggtcttgccactaaggtttaaaagtcccgcaagcacaattaaagaagcggaaaaacagggccaagaaagattcgtggtgtcaagaaagaccaaaggctggtgaccccaagaagaagtaaacagtcatttatatttctgtattactgtcctgaactctgggtggtcgtctagttgcaatgtcataat

SEQ ID NO: 79420 - DNA, 370 bp, Zea mays
atgctgggaagcagcttgaggacgggcgcacgcttgccgactacaacatccagaaggagagcaccctccacttggtgctgcgcctcaggggaggcatgcagatcttcgtgaagaccctgaccggcaagactatcacccttgaggtggagtcttcagacaccatcgacaacgtcaaggccaagatccaggacaaggagggcatcccaccggaccagcagcgtttgatcttcgctggcaagcagctggaggatggccgcacccttgcggattacaacatccagaacgagagcaccctccacctggtgctccgtctcaggggtggcatgcagatctttgtgaagacactcactggcaagacaatcacccttga

SEQ ID NO: 79421 - DNA, 367 bp, Zea mays
aaaccggtccgagcggaccgctgaaaccagcacaacacgcaaagcagcgatccgacatccgagagatggacgcggtgatgttcgggctggagactcacctgatggccgcgctgcagcacctgctggacgtgccctacggcgacgccggcgcgggcggcgacaacaagacgggcagcggcggcagcgccacgcgcacctacgtccgcgacgcgcgcgccatggcggccaccccggccgacgtgaaggagctgcccggcgcgtacgcgttcgtggtggacatgccggggctgggcacgggcgacatccgggtgcaagtggaggacgagcgggtgctggtggtcagcggctagccgcgccgggaggagcg

SEQ ID NO: 79422 - DNA, 375 bp, Zea mays
aagacactaggtgacacagcgcgacggtcatgggtgacagccaatactccatcgctctcagcactttcagcccgtcgggaaagcttgtgcagatagagcacgcgctcacggctgtcggatcagggcagacctccctacggatcaaagctgccaacggtgtactgattgccaccgagaagaaactgccttctattttagtggatgaaacatctgtgcaaaagattcaggcactaacaccaaatattggagttgtccacagtgggatgggtccagattttcgtgttctggtgagaaaaagtcgagagcaggcacagcagtattaccggttgtacaaggagcatatacctgtaacacagcttgtgcgggagactgctg

SEQ ID NO: 79423 - DNA, 306 bp, Zea mays
aagactctagattgagtcgtattagcagcagcagcatgaagctgagcttgcagctgccgctgcgcagcccctccccgatgacgatgatgacctgatcgaatagatatgttatacatggcccttgttgatgactcttgttaaaaatctgtggtggttcaatccttgttagtgttaggcggtacctgaatgttctcttgatgtatccgaagagttgagaaggaagttaatgactcagtatcctgttggcttgttgacttggttttttggtgaacctgtccttgagggaatacagaggtattgtcaggc

SEQ ID NO: 79424 - DNA, 326 bp, Zea mays
actacatgttcaagtacgacaccgtgcacggccaatggaagcacagcgacatcaccctcaaggactccaagacgcttctcttcggcgagaagccggtcaccgtctttggcatcaggaaccccgaggagatcccgtggggtgaggctggtgctgagtatgtcgtggagtccaccggtgtcttcactgacaaggacaaggctgctgcacatctgaagggtggtgccaagaacgttgttatctctgccccaagcaaagatgcacccatgtttgttgttggtgtcaatgaggacaagtacacctccgatgttaacattgtttccaatgct

SEQ ID NO: 79425 - DNA, 375 bp, Zea mays
cacgactctacactgagtccctataaaaagcatacttcccgaagcactcttgcaatccactgagttctgtttgttgagacgcatagagctagctgctagcgtcgacaatgtcgctcgtgaggcgcagcaacgtgttcgaccccttctcgatggacctctgggaccccttccacaccatgttccgctccatcgtcccgtcggcgacctccaccaactctgagactgccgccttcgccagcgcccgcatcgactggaaggagacgcccgaggcgcatgtgttcaaggccgacctccccggcgtcaagaaggacgaggtcaaggtcgaggtcgaagacggcaacgtgctggtcatcagcggccagcgcagcaaggaga

SEQ ID NO: 79426 - DNA, 391 bp, Zea mays
gcaagcctctacaatgagtctgcttaacccctgccaagatccatctttccggttccgccgcctgatcgaagtgaacaagcaaggaagagccatggcgagcgagcacgcggcggggggcgatgctaagcatcaccagaagcagagcctgatggacaaggcgaaggggttcgtcgcggagaagatcgcgcacatccccaagcccgaggccacgctggacggcgtgacgttcaagggcctgagccgggagtgcatcacgctgcacagcagcgtgaacgtgtccaacccctacgaccaccgcctccccatctgcgaggtgacctacacgctccggtgcgccggcaaggaggtggcgtccggcaccatgccggaccccggctggattgccgccagc

SEQ ID NO: 79427 - DNA, 384 bp, Zea mays
aaaagatgacgcaaatcatgtttgaaaccttcagtgttcctgctatgtatgttgctattcaagctgtcctttccctatatgctagtggccgtaccactggtatcgtcctggattctggagatggtgtcagtcacactgtcccaatctatgaaggctacgccctcccacatgccattcttcgtctcgatcttgctggcagggacctcactgattccctcatgaagatcctcaccgagaggggctactctttcacaaccactgccgagcgggaaattgtacgtgacatcaaggaaaagcttgcatatgtcgcgctagactatgaacaagaactcgagaccgccaagagcagctcatcagttgagaagagctacgagctgcctgatg

SEQ ID NO: 79428 - DNA, 349 bp, Zea mays
caagcctctacagtaagtcgctatataatccccaatcaacacagcaagtcagcaacaagcaaagcagcgatccgagagatggacgcgaggatgttcgggctggagaaccccctggtggcggcgctgcatcacctgctggacgtgcccgatggcgacgccggagcgggcggcgacaaggcgggcggcggcgccacgcgcacctacgtccgcgacgcgcgcgccatggcggccaccccggccgacgtcaaggagctcgcgggagcgtacgcgttcgtggtggacatgccggggctgagcacgggcgacatcagggtgcaagtggaggacgaacgggttcttgtgatcagcg

SEQ ID NO: 79429 - DNA, 398 bp, Zea mays
tagagtgagtcatattaatggcgatggcgactgcgaaatgatgctgcaggaacagatggactcgctggtggccgacgacgtcagcatcggaggagggtcgcctgaagaaggggccatggacgtccgcggaggacgccatcctggtggactacgttaagaagaacggcgagggcaactggaacgcggtgcagaagaacaccgggctgttccgctgcggcaagagctgccgcctccggtgggcgaaccacctcaggcccaacctcaagaagggggccttcacccccgatgaggagcccctcatcatccagctccacgccaagatggggaacaagtgggcgaggatggctggtcacttgccaaggggtactgaccatgagatcaagaactactggaacact

SEQ ID NO: 79430 - DNA, 427 bp, Zea mays
ctactaggacacgtaggacgatccaagcctctagagagagtcattatagcagcagcagctgagagcgtgagagcgtgcgaagcaggagggaggacaagaagaagccgatggcggttgtgagcggcagcggcgggaggctgaacccctgggcggagcccttcgtgccttccggggcgcggtaccgcggcctgcggaccgtggaggcgacgccggagcaggaggtggaggacttctcccccgagtggtggcgcctggtgtccgcctccccggccttccgcgaccgctggctgcgcgagtacggcgcgctcggcctactcgacgccgaggaccacctggacgacgacgtcgacagcttcctccccgacgacttcttctcgcctccggccccgcgctacgagagcgagcgggaggacgccgcgggcaggag

SEQ ID NO: 79431 - DNA, 349 bp, Zea mays
tactctctctctattcattccccgcctcaccccgagccagccgtctcgctagggtttctccgccgccgccgccgccgccatgcctcgccgcagctcaggaaggtctgccccacgcccagctccccgtgctgctccagtgaggaacccgccacagccagcacgccaggctcctcctccagctcctgttcgagatggtggtggctccatgtttggaggaattgggtccaccattgctcaaggtatggcgtttggcacgggtagtgccatggcacacagggctgttgatgctgtattaggtccccggaccattcagcatgagacggttgcctcagaagctgctggtgctgcc

SEQ ID NO: 79432 - DNA, 390 bp, Zea mays
agtcaaaaactcctgaggcacctcctggggcgagggtggctacatccggatgcagcgcggcgccggcaacggcggcctctgcggcatcgccatggaggcgtccttccccatcaagacctcgcccaaccctgcagacccgccgcgcaagccccgccgcgcgctcatcgccagggacacctcttcttcccagtgacacacacgaccacaactggcacgtaagtacacgttgccaggaatgacatgctatgctactagtgtttgcttgaactattatcgattgggtttgtactagtgatgacagtttcatcgattgcgcggtcgatctccatcagagacagagacgatataatcagaatgaagtatagcagcgcgtgtgcgcaacagggtaag

SEQ ID NO: 79433 - DNA, 423 bp, Zea mays
acatgattctgggtaaaagattctttgtgacaccatcggactctgttgccattatagcggccaatgctgttcaatcaattccttactttgcttctggcctgaagggagttgccaggagcatgccaacatcagctgcccttgatgttgttgcaaagaatttgaatctcaagttctttgaggtgcctactgggtggaaattttttgggaatttgatggatgctggaatgtgctcaatctgtggtgaagaaagctttggcactgggtctgaccacattcgtgagaaagatggcatctgggctgtgcttgcatggctttctattattgctttcaagaataaggacaaccttggaggagataagcttgtcactgttgaagatattgtccgtcagcattgggccacatatggtcgccattattacacac

SEQ ID NO: 79434 - DNA, 353 bp, Zea mays
acacagcatcagctcaaaaacctaacacacctcaacaagcagagcaaagacccgggattcgccggcgcggtagcgagagcgagagatggacgggaggatgttcggtctcgagacccccctgatggtggcgctgcagcaccttctggacgtgcccgacggcgacgccggcgcgggcggcgacaaggcgagtggtgccgcggcgggcggcgggcccacgcgcacctacgtccgcgacgcgcgcgccatggcggccaccccggccgacgtcaaggagctcccgggcgcgtacgcgttcgtggtggacatgccggggctgggcacgggcgacatcaaggtgcaggtggaggacgagc

SEQ ID NO: 79435 - DNA, 383 bp, Zea mays
gcgtccagaaccactccgcctccacccgcaccacaccaccggcgatgtccacagcggcggcgcagggcggcagcgacaagccggcgctccggaggcccgtcttcaccaacgtcgaccagctcaggccgggcaccaacgggcacaccctcaccgtcaaggtcgtcagcgccacccccgtgcctgggcgcgcgcgcccaggcgcacccgccgccgccccatcccgcgcgccgcgcatcgccgagtgcctcgtcggggacgagaccggcgccatcgtcttcaccgcccgcaacgaccaagttgacttgcctgaacccaatgcgacagtgatcttgcgcaatgccaaaatagacatgttcaaacggataatgaggcttgcagtggac

SEQ ID NO: 79436 - DNA, 358 bp, Zea mays
agaagcctacagcagccaagaaaagcacatacccgagtcgccgaaacaacaacaatcccaatcccccctcgtcactcaaaactcgaccaacaatgtcgctgattcgccgtggaagcgcattcgaccccttctcccttgacctctgggaccccttccagggctttcccttcggctctggaagcagcagcagcagcagcctgttcccctcgttcggaggcaccaccagctctgagacggccgccttcgccggcgctcgcgtcgactggaaggagacgccggaggcgcacgtgttcaagaccgacgtgccggggctgaagaaggatgaggtgaaggttgagctggaggacgggaacgtgct

SEQ ID NO: 79437 - DNA, 396 bp, Zea mays
tacacggactagacgcacaagtcgatcgccatggcgatgaagccggcggcggcggctccccctaccccggccgcggcgcacagcgtgttcgtctacggcagcctgatggcggacgaggtggtccgcaccatcctcaagcgcgtcgcgcccgccgccccggccctcctcccaaactaccaccggttcaacatcaagggccgcatttacccggcgatcctgcccgttgagagcaagagagttgctgggagggttatcatgggtgttactgatgaagagctccagcttcttgacgcgtttgaagacgtggagtacacgaggacaagagttgagatagcactggctgactcttccgagaacatgctggctgacacttacgtgtggagtgatgcagaggat

SEQ ID NO: 79438 - DNA, 387 bp, Zea mays
cgcgtccacaccaatcatcgccgctgcgccgtctcctccgctcccgtcgtccggaaagatggcgtcccacattgttggataccctcgcatgggccccaagagggagctcaagtttgcacttgagtctttctgggatgggaagagcaccgctgaggatctggagaaggttgctaccgacctcagggccagtatctggaagcagatggctgatgctgggatcaagtacatccccagcaacaccttctcgtactatgaccaggtccttgacaccactgccatgctcggcgctgtccccgaacgctactcatggactggaggagagattgggtttgacacctacttctccatggccaggggcaacgccactgtccctgctatggagatgac

SEQ ID NO: 79439 - DNA, 390 bp, Zea mays
gcgtccagctagatctagatcgcgatctagaactagtcccgacatcgtcccttcgtccccacgagcaaccgataatccgccggcgttgagatgttggtttatcaggatctcctatctggcgacgagctcctgtcggattcattcacctacaaggagctcgagaacggcgtcctgtgggaggtcgagggaaagtgggtcacccaaggtcctgttgatgtggacattggtgccaatccatccgccgagggtggtgaggacgaaagcgttgatgacacagctgttaatgtggttgatattgttgacacattccgtctacaagagcaacctccttttgacaagaaatcatttgtgtcttacatcaaaaaatacatcaagaatctcactgctgtg

SEQ ID NO: 79440 - DNA, 449 bp, Zea mays
  unsure (1)..(449): unsure at all n locations
actcgtgggtcgttgcaagcctctatagtgacgtcgtattaacgcgtggcggacgcgtggggcctgccctgtcctgccttgttaagcaacacagcgagacatcacgagagctagagagagatggcggccacggtttcctccttcccggtggtgaacatggagaagctggagacagaggagagggccacggccatggaggtcatccgcgacggctgcgagaactggggcttcttcgagctgctgaaccacggcatctcgcacgagctgatggacgaggtggagcggctgaccaaggcgcactacgccaccttccgggaggccaagttccaggagttcgcggcccggacgctggaggccggcgagaagggcgccgacgtcaaggacgtggactgggagagcancttcttcgtccgccacctcccggcctccaacttcgcgacctccccgag

SEQ ID NO: 79441 - DNA, 436 bp, Zea mays
caagactctagactgagtcgtactacctcctcttcctcctcctagcacagctagcgcctgctccccttcgtctgtgatcatgtcttgcagcagcggcaagtgcaactgcggctccagctgctcctgcggcagctcatgcaactgcatgtcccctgacgtggagaccgccgccgccagcagcatcaagaccatggtcctcgctgcgccgaccaccaaggccagcgccggcggcttcgaggcggccaccgagggcggcggctgcgactgcaacacctgcaactgcggcaccagctgcggctgctcctgctgcagctgcaactgagccggcccgcccggcccggcgatggcgcacgagagtcgataggacgacgacgaccaggcgtataaatataatagcagcgtctaaataagatcctgtcaactgcacccgccatta

SEQ ID NO: 79442 - DNA, 355 bp, Zea mays
ctctaaaatgggacatagaaagagagaagagagagagaagagagagagagagagaggagtgggagacccgcgagaggctgccgtgtagggaccgtacactcagcgactgcgaaggagggataaggggatggccgggatcggaccgatcaggcaggactgggagccggtcgttgtgcggaagaaggcacccaccgccgccgccaagaaggatgagaaggccgtcaacgccgcgcgccgcgccggtgcggagacgataccatgaagaagtacaacgctggtacgaacaaggcggcatccagcggtacatccctcaacaccaagcgcctcgacgacgacaccgaaaacctcccccatg

SEQ ID NO: 79443 - DNA, 426 bp, Zea mays
  unsure (1)..(426): unsure at all n locations
taccccgttgcaagtaaagtctctctgctaagcgaagcgaagcttcaagctagtctcggcggctctagaagacgatgggcaaggacgacgtgatcgagagcggcgctggcggcggcgagttcgctgccaaggactacacggaccctcccccggcgccgctgatcgacgcggcggagctggggtcctggtcgctgtaccgcgccgtgatcgccgagttcatcgccacgctgctgttcctgtacatcacggtggccaccgtgatcgggtacaagcaccagacggacgcgtcggcgtcgggcgccgacgcggcgtgcggcggcgtgggcgtgctgggcatcgcctgngccttcggcggcatgatcttcgtcctcgtccactgcaccgccggcatctcggggggccacatcaaccccgccgtcaccttcg

SEQ ID NO: 79444 - DNA, 431 bp, Zea mays
gggtcgatacacgagtctaaagcctttcgtccgacgaatttgagcaactgcacccagagcgcgatccattgccggggaagaagcaacttgttgcgagcctcctctatggcgagctccgaccatggttccaccaccgcccccaaggacgtgccgggcagctacggcctgccgctggtgggcgccgtgcgcgaccgcctcgacttctactacttccaggggcatgacaagtacttcgagtcccgcgtggagcgctacggctccaccgtggtgcgcatgaacgtgccgccgggccccttcatggcgcgcgacccgcgggtggtggcggtcctggacgccaatagcttccccgtgctcttccacatggaccaagtggataaaaaggacctgttcacgggcacctacatgccgttcacgtccctcacggggggcta

SEQ ID NO: 79445 - DNA, 410 bp, Zea mays
tacaagactctagaatgatgtcatcattattctccgcctcaggggtggtatgcagatctttgtgaagaccctgactggaaaaaccataaccctggaggttgagagctcggacaccatcgacaatgtgaaggcgaagatccaggacaaggagggcatccccccggaccagcagcgtctgatcttcgccggcaaacagctggaggatggccgcaccctagcagactacaacatccaaaaggagagcaccctccaccttgtgctccgtctccgtggtggtcagtaagtcatgggtcgtttaagctgccgatgtgcctgcgtcgtctggtgccctctccatatggaggttgtcgaagtatctgctgttcgtgtcagtgttggtttaataatggacccgttgtgttgtgtgtgcg

SEQ ID NO: 79446 - DNA, 379 bp, Zea mays
ggtcgacgcacgcctctacagcgatgtgccatcaactgacctgtgacctccgcatttccaaacagcccgagcgagctagagctagcagagcggcaggcacctccctcctcaaggaacatggcccgcacgcagcagttggcagtagtggcgaccgccgtggtggccttggtgctgctggcggcggcggcgacctcggaggcggccatcagctgcgggcaggtggcgtcggccatcgcgccctgcatctcctacgcgcgcggccagggctcggggccctccgccggctgctgcagcggcgtcaggagcctcaacaacgccgcccgcaccaccgccgaccgccgcgccgcctgcaactgcctcaagaacgccgccgccggcg

SEQ ID NO: 79447 - DNA, 382 bp, Zea mays
tgcaagcctctacactgagtcgtattaaacaaagaggaagccgcggtagcactggtagcggcagcagtcagggggagatgtcgtcggcgttcagcggcgatgagacggcccctttcttcggcttccttggcgcctccgctgcgctcgtcgtcgcatgcatgggggcggcgtacgggacagccaacagtggcgtcggcatcgcgtccatgggtgtcatgcgcgcagagctcgtcatgaactccatcgtgcgcgtggtcatggctggtgtgctccgtatctacggcctcatcatcggcgtcatcatcagcactgggatcaaacccaaggccaagccatagtatgtctttgacggatatgcccagctgtcgtccggccttgcctg

SEQ ID NO: 79448 - DNA, 407 bp, Zea mays
acgccgcgcgcgcattcacaagcttctagacgttccgaggaggaggggaggtacccgccgccgcagccatggcgtcgactaaggtccagcgtatcatgacccagcccatcaacctcatcttccggttcctacagagcaaagcgcgcatccatatctggctcttcgagcagaaggacctccggattgacggtcgcattatcggattcgatgagtacatgaacttggtcatcgaatacgctgacgaaatcaacgtcaataaatacactatgaaatcactgggccggatactcctcaaaggtgacaatatcactttgatgatgaacagtggcaagtgaagattcctatggcaggaacgatgtctggtgctcgctttcattatctgtgacacaatgtactccatccatccg

SEQ ID NO: 79449 - DNA, 400 bp, Zea mays
ggctcctatctggtataggacggagctgagcttctagcaacgtacagtgtatccgccatgagtcctttcggggcggtgatcacgccagaaaccctcaagtacatgtccaagtaccagggacgtgagatcacgcaggtggactgcgcacgggaggcgatgaggctgatccacgcggaagacaagaacctcaaggccgaggactcagcgtgggagctgaagaagaagttcggcaacggcgtgagcaccatggtcctcgtctacaacgccaccggggccagcctgagcctggtggacgacgggaaagactggatgggctccgtctacagctcgccgatcccggacaccttccacaacgggcagtggatcgccttcctccacgtcaagcccggctcgctggcgc

SEQ ID NO: 79450 - DNA, 343 bp, Zea mays
cttagcaagtcctcctcgggttagggttccttagggttttgtggaggggcgatggcggcggctgatgtggagtaccgttgcttcgtcggcggacttgcctgcgccaccagcaacgagtcgctggagaatgccttcgcctcctacggcgagatcctcgactccaaggtcatcaccgaccgggagacggggaggtcccgcggcttcggcttcgttaccttctcctccgagaactccatgctcgacgctatcgagaacatgaacggcaaggagctcgacggccgtaacatcaccgttaaccaggcccagtcccgtggcggcggcggcggccgccgcggccgtggct

SEQ ID NO: 79451 - DNA, 371 bp, Zea mays
acactgctcaacgcacaagtgcacgctcacctcacacactcagataagtagctaactccgtaggcgagaacaagaaaaagctcgacatggccgaggagaagaagcagggcctgcatctgctggacttctgggtgagcccattcgggcagcgctgccgcatcgcgctggactagaagggcctggcctacgagtacctggagcacgacctgaggaacaagagcgagctgctcctccgcgccaacccggtgcacaagaagatccccgtgctgctgcacgacggccgccccgtctgcgagtccctcgtcatccttcagtacctcgacgaggcgttcccggatgccgcgcccgagctgctccccgccgaaccctac

SEQ ID NO: 79452 - DNA, 339 bp, Zea mays
agccaccacgtgccaagcggcacgatgctgctcaccaacgcatacgccatccacagagaccctgcggcgtggacggaaccggacgccttcaggcctgaacgattcgaggatggcagcgccgaagggaagctcctgataccgttcgggatggggcggcgcaagtgtcccggagagaccatggcgctgcggactctagggctggtgctggggactctgatccagtgcttcgactgggccactgttggaggcgtccccaaagttgacatgaccgaagcgtccgggctcactctcccgagggccgttcccctcgaggccatgtgcaaaccgcgccaagccatg

SEQ ID NO: 79453 - DNA, 428 bp, Zea mays
ttccaactccctgatgtgagtcgtattacaagccgtctcgcgcagccacagcctccatttctcctccgacggcggtgcggctagctcaaccatggcggactccaaggccacctcggcggtcaccctccgcactcgcaagttcatgaccaaccgcctgctggcccgcaaacaatttgtgcttgaggttatccaccccggccgcgccaacgtctccaacgcggagttgaaggagaggcttgccaagatgtacgaggtgaaggaccccaacaccatcttcgtcttcaagttccgcacccacttcggtggaggcaagtccactggcttcggcctcatctacgataacctctagtctgccaagaagttcgagcccaaataccgcctcatcaggaatggtcttgctactaaagttgagaaatcccgcaagcaaa

SEQ ID NO: 79454 - DNA, 406 bp, Zea mays
gcttcctccgcgaggagggcagcaagctgctgcagtacgtgtactggtccaacggccgtgagaccgagaaccccagcgtcgacaacaagcagtgccccgggaagaacttcgtggtgctggtcggcaggctcctcctcgtcgagctcttcctccgctacgacacattcaccgccgaggtcggcaaggagctgctcggcaccagcgtcatcttcaccggtgtcacgaaagctacctccggtccgggcagcgagtaaaccgcccggccggcgcgcgtcgttggatatatgatgagtggacgtgacagagtgtcgcattatttcttaatttcgtcattttcctccttccttctaataagacttctctctcacgctcggccaccaccttcacgtgtgattggaggtgtttg

SEQ ID NO: 79455 - DNA, 394 bp, Zea mays
cccacacgtcaaaaagcagcaatgcaacagcacaagcaagaaccacacctcctcccttcgcctgtgatcatgtcgtcttgctgcggcggcaagtgcgggtgcggctccagctgctcctgcggcagcggatgcaacggctgcggtatgtaccctgacgtggagaccgccgccaccagcagcgtcaagaccacggtcctcgccgcgccgaccaccaaggccagcgccggcggcttcgaggcggccaccgagggcggcggctgcgactgcaacacctgcaagtgcggcaccagctgccgctgctcctgctgcagctgcaactgagctgggccggcccggcgatggcgcacgagagtcgagaggaggaggacgacgacgaggcgtataaatataatag

SEQ ID NO: 79456 - DNA, 385 bp, Zea mays
atgcagagcaagccagtgaggtctctcagagcgtagccagccagctacaatggcggggaacgcgctagccaactatgtccaggtctacgtcatgctcccgctggatgtcatcactgtcgacaacacgttcgagaaggaggacgagacgagggcgcagctgaagaagctgacggaggcgggcgccgacggggtcatgatcgacgtctggtgggggctggtggaagggaaggagccgggagtctacgactggagcgcctacaggcaggtgttcaagctggtgcacgaggccgggctgaagctgcaggccatcatgtcgtgccaccagtgcggcggcaacgtcggcgacgtcgtcaacatcccgattcccgcagtgggttcgggacgt

SEQ ID NO: 79457 - DNA, 349 bp, Zea mays
aagaagggatgcagcagccgatgcacatgcagccgcaggcgccggcgataaccccagctgccggaatcaccacggagcagatccaaaagtatctggatgagaataagcagcttattttggctattttggaaaatcagaacctaggaaaattggcagaatgtgctcagtatcaatcacaacttcagaagaacctcttgtatctcgctgcaatcgcagatgcccaaccgcagactgctgtaagccgccctcagatggcgccgcctggtggatcgcctgaagtacggcagtacatgtcacaggtgcctatggtcccaccgacgacaactctaacaccccagcagatgcagga

SEQ ID NO: 79458 - DNA, 405 bp, Zea mays
cacctctagcccgacaggtgaagccgccgccgctgcagtgtccatagccaccgcaggagactgagatggggggttttgtcaagacccacaagagcaatgcatacttcaagcgtttccaggtgaagttcaagagaaggcgcgctggcaagacagactacagggccaggataaggctgattaaccaagacaaaaacaagtacaatacacccaaatacagatttgttgtgcgatttaccaacaaggacatcacagcacaaatcatatctgctagtatagcaggtgatatggttcttgcttctgcttactcgcatgagttgccacgatatggtctcgaagttggtctgaccaactatgcagctgcctactgcactggccttctgttggctcgccgtgtgctcaagaccc

SEQ ID NO: 79459 - DNA, 417 bp, Zea mays
atccaggcttctcctccccctcttaccaagtcctcctcgggttagggttccttagggttttgtggaggggcgatggcggcggctgatgtggagtaccgttgcttcgtcggcgggcttgcctgggccaccagcaacgagtcgctggagaatgccttcgcctcctacggcgagatcctcgactccaaggtcatcaccgaccgggagacggggaggtctcgcggcttcggcttcgttaccttctcctccgagaactccatgctcgacgctatcgagaacatgaacggcaaggagctcgacggccgtaacatcaccgttaaccaggcccagtcccgtggcggtggcggtggcggcggtggctacggcggcggtcgcggcagcggcggctatggtggccggcgccgtgacggccgttatggc

SEQ ID NO: 79460 - DNA, 438 bp, Zea mays
gtcgacccacgcatccatggaaatcaacccggagaacccaatcatggatgagctccgtaagcgcgccgaggctgacaagaatgacaagtcagtcaaggatcttgtgatgttgctgttcgagacagctctcctgacctccggcttcagcctggatgaccccaacacctttggcacccggatccatcgcatgctaaagctcggtctgagcatcgatgaggacgagtctgctgaggccgaagctgagatgcctccgctggaggatgacgccggcgaaagcaagatggaggaggtcgactaagcttcggatcactgtcgtttatccctaattacatatgataagctaaatcttgactactgtttgaggttttccgcacgttaacggttctcctgccggccaggcaatgagtttgttgtatagctatatggtactctgtttta

SEQ ID NO: 79461 - DNA, 400 bp, Zea mays
atccgaaaataaataggttgattatgttgcatgggtttgcgatcaggatgcttatgcttgtagcggtcagaaatgctctgctcagtctgttctattcatgcacaaggtaaagactgtcaaatgtgtgttactttgctaattatctaggattgttattgtggactgttcatcgctgatgaagcatataatgttcctggttggttgatctatgacttgtgatcggtcctttggtgttttattttctagtaagttggtcaatctcctagggttgttacctctctaatcatattgatctaaaagttttggatcattatatatctgctcaagaggattagaaaagaaaagaaaaaggcatcgatcgctggtactgggagcgggtgacagttattgtgaatgcatg

SEQ ID NO: 79462 - DNA, 397 bp, Zea mays
agcaacagccaagtgcaagtgatcgagctcccccctcctcatcagtcgctaggcacagcgcacttgcaggatggcgcaggtctctaagacgcttctccttgtggccctggtgttcgtgtcgtcggcggcggtggagctgtgccgcgcgatcgacttcgacgagcgggacctggcgtcggacgaggcgctgtgggacctgtacgagcggtggcagacgcaccaccgggtgcaccggcaccacggcgagaagggccggcggttcgggacgttcaaggagaacgtgcgcttcatccacgcgcacaacaagcgcggcgaccggccctaccgcctccgcctgaaccggttcggcgacatggggcgggaggagttccggtccacgttcgccgactcccgcatc

SEQ ID NO: 79463 - DNA, 407 bp, Zea mays
gggccgacccacaagtctatatggagcccgcttagggtgcgagaggtcgcgagttcgtttctcgcaacaccccccaccccagtccccagacaagtcgctcgcgcgccagaagttcgtcgatgactgcgaggccgccctcaacgagcagatcaacgtggagtacaacgcctcgtatgcataccactccctcttcgcctatttcgaccgcgacaacgtggctctcaaaggatttgccaagttcttcaaggaatccagcgacgaggagagggagcacgctgaaaagctcatggagtaccagaacaaacgtggaggcagggtgaggctccaatcgattgtgacgcctttaaccgagtttgaccacgctgagaaaggagatgctctgtacgctagggagctggctctggccc

SEQ ID NO: 79464 - DNA, 380 bp, Zea mays
gtgagtcgtagtagttatgaaggctagtgtcatgcttgagagaaagaaagaatatgcaactatcttggcctttgatgtcaaagtgatgcctgatgcccgcgatctcgcagaagagtccggtgtgaggatctttgtggcagatataatataccatctgtttgatcaatttacagcatacattaagaacctcaaggaagagaagaagaaagaaagcgctgaagaagctgtgttcccttgtgttcttaagattatgccaaactgtgtcttcaacaggaaggacccaatcgttttgggtgttgatgtccttgaaggaatagccaaggtgggaactcctctctgcatacccagtaaagaatttagtgatattgggaagattgcct

SEQ ID NO: 79465 - DNA, 394 bp, Zea mays
actcgccggtcgacccacgcgatccagagcgggtcataatggggaaggtggagcttttgctttgtactcacttctttgcaggcatgcaaaattcagtctgctgccaaaccagcaagcagcagatgaagagctgtcaacttattaccatccaggcactgatcgagctgtggtttcctctccattcacaaggtttctggagaagcacaggaagctgcggacctgtttacttctttttgtactgtttggtgcctgcatggtgataggtgatggtgtctttacaccagctatatctgttctgtcagccatctctggattacaagatcctgccacaagtggactaggagatggatggatcgtattcatcgcatgtgttatgcgtgttggtctctttgct

SEQ ID NO: 79466 - DNA, 389 bp, Zea mays
acgttgtgctctctctcttcattcgttcccggcctcaccccgagccagtcgtctcgctagggtttcgccgccgccgccatgcctcgccgcagctcaggaaggtctgccccacgcccagctccccgtgctgcttcactgaggaacccgccacagccagcacgccaggctcctcctccagctcctgttcgagatggtggtggctccatgtttggaggaattgggtccaccattgctcaaggtatggcgtttggcacgggtagtgccatggcacacagggctgttgactctgtattaggtccccggaccatccagcatgagactcttgccacagaagctcctgctgctgcccctgctgctccagcgatgaatgctgatgcttgcagcttcca

SEQ ID NO: 79467 - DNA, 371 bp, Zea mays
aaacaatcaaccagcaacactcttctcgtataacataatacagcgaaggtaactcacatggcaacttccatgggttgtctcgtcttgctctgccttgtttcgtctctccttcccagtgccgtccttggccacccatggggtggcttgttcccacagttctatgaccattcgtgccccaaggcgaaggagattgtgcagtccattgtggcacaggctgtggccaaggagaccaggatggcggcatctttggtcagactgcatttccatgactgctttgtcaagggctgcgatgcttcggtgctgttggacaacagcagcagcatagttagtgagaaagggtccaacccgaacaggaactccctcacggggtt

SEQ ID NO: 79468 - DNA, 404 bp, Zea mays
tacacctacctctctacgaactacctgccgccggaaaaccctagagcgctcgaccatggatccgcagcagccggagcctgtcagttacctctgcggagattgcggagctgagaacaccctgaagcccggagatgtcatccagtgccgtgaatgtggctaccgcatcctctacaagaagcggacccgccggattgtccaatatgaagcgcgctgaagagtgaagacaagggaaaacactgaagatggttgatctattactcgccacattacctatgtaaacagtcttctgggggaaatgaagatgtcagacttaacgtttgtatgtcgtgtgcctcctttgaacctgagctgtataatttgtaacgcttgaactggggactgatttgagaactgagacactgcag

SEQ ID NO: 79469 - DNA, 299 bp, Zea mays
aaagagtcctctcgtataacataatacatcgaaggtaactcacatgggaacttccatgggttgtctcgtcatgctctgccttgtttcgtctctccttcccagtgccgtccttgtccacccatggggtggcttgttcccacagttctatgaccattcgtgccccaaggccaaggagattgtgcagtccattgtggcataggctgtggtcaatgagaccaggatggcggcatctttggtcagactgcatttccatgactgctttgtcaacggctgcgatacttctgtgctgttggacaaca

SEQ ID NO: 79470 - DNA, 442 bp, Zea mays
cgccggtcgacacacgcatccaaacgcatgtcgctgccccgcgccgagcgcgcgcgggcgccgtacgtcgacttcctcaagcccatcatcgccgacggcgacacgggcttcggcggcgccacggccaccgtcaagctctgcaagctcttcgtggagcgcggggcggccggggtccacctcgaggaccagtcctccgtcaccaagaagtgcggccacatggcgggcaaggtgctcgtcgccgtctccgagcacgtgaaccgcctcgtcgccgcgcggctccagttcgacgttcatgggcgtcgagaccgtcctcgtcgcgcgcaccgacgccgtcgccgccacgctcatccagaccaacgtcgacgcgcgcgaccaccagttcatagtcggcgccaccaacccgggcctcaggggccagagcctcgcggcgcggctcaagacc

SEQ ID NO: 79471 - DNA, 270 bp, Zea mays
tgagtcgtattacccgcgccgagcgcgcgcgggcgccgtacgtcgacttcctcaagcccatcatcgccgacggcgacacgggcttcggcggcaccacggccaccgtcaagctctgcaagctcttcgtggagcgcgggggggccggggtccacctcgaggacgagtcctccgtcagcaggaactgcggccacatgtcggtcaacgtgcgcgtcgccgtctccaagcacgtgaaccgcctcgtcgccgcgcggctccagttcgacgtcatgg

SEQ ID NO: 79472 - DNA, 415 bp, Zea mays
ggtcgacgcacgcgatccaggccattcctctcgccttactccctcacagaacccagtaaaatattgccagtcccgccgtcgagatggccccacgccgcctgctcgtcctcgccgtcgtcgccctcgcggccaccgccgccgcggccaactccggcttcgcggactcgaacccgatccgccccgtcaccgaccgcgcggcctccgcgctcgagtccacggtcttcgccgcgctcggccgcacccgcgacgcgctccgcttcgcacgcttcgctgtgaggtacggcaagagctacgagagcgcggcggaggtccacaagcggttcaggatcttctccgagagtctccagctcgtccgctccaccaatcggaaaggcctctcctaccgcctcggcatcaaccgcttcgcggacatgag

SEQ ID NO: 79473 - DNA, 354 bp, Zea mays
acaaggcgaccgcgccgcggaggctgctccccgcgctcctcaaggccctagctccagccggcgcgcgcggcctctccaccgagaaggctgtcggcgccgccgccgtcgctgtcgtgggcagccacaccgctaagtggatgcaggacacgagcaagaagtcaccgatggaactgatcaacaaggtacctccgatcaaggttgatggccgcatcgccgtttgtgaaggggctgctgaaggtgttgggcttggccacccaatcgagtatatctgccttgatctggaggcacccaacgtgtgcaaatactgtggcctccgttatgttcaaattcaacatcactaaatagggaagatac

SEQ ID NO: 79474 - DNA, 380 bp, Zea mays
agcacacccaagctcgcgcccaccttccacgtcgaggtccgagtcctgctttgatggcgaccgacgtggctgagactcccgcgccgttggtggatgcggccccagaggcgcccgccgacgccccggcggcgcctgctgccgacgcgaagccggccaaggccaagaaggccaccgcgccgaagaagcgcgccagcccgactcacccgccgtacgccgaggtaattggtgccctccctttgatccttctgccgtgccgtgctgtgcgtgcgtctccgccgcgtcgggatcgtactgagtagtggatggtcggtgcgcaggatggtctcggaggcgattacgtcgctcaaggagaggacggggtccagcaggcggtgccagtg

SEQ ID NO: 79475 - DNA, 446 bp, Zea mays
cgggtcgagcccgcgtccacaacccaccatgccaagccagcgaaccaccccgcccgcagccgcaagcaagcagccaagcagtgtgaactgaccgtccgttccgtccagcccaccatggaggcgccgccggtaccggagctcatggatctggacgcgccccctcccgccggttccccccgccgtcagcgacaagaagaaggaaggggaagggggagacactgttacgggtcacatcatctccaccaccatcggtgggaagaacggcgagccgaagcggaccatcagttacatggcagaacgtgtcgtgggtacgggctcatttgggatcgtcttccaggctaagtgtttggagactggagagaccttcgccattaagaaggtgctgcaggatcggcgttacaagaaccgggagctgcaacttatgcgtgccatggagcaccccaacg

SEQ ID NO: 79476 - DNA, 381 bp, Zea mays
agggtcgtgcagccctactacgccctggtagtatcggcggagggcggcagcagccggccgcggaccatcccggcgcgcaacgccggcgtgtgcagcggccacacgctggggcagtactaacggcctggggtccgaaacccggggcacggcaacttgggtgcccgacccgtacggcatcgagatcggcgacccggccgcggcgcccgccagcgagggctacgagcagcgctggctgctcaacgtgcacgccatcgacacgcgcggcgccgccgaccggacgatggcgtgcaccgagtgccgctgcgacgtgtacaacgtgacggcggactggcgcgggcacgccatcgagcccgggtacgccggcggcctgcgctgctgcta

SEQ ID NO: 79477 - DNA, 372 bp, Zea mays
aagcggctctttggaatacttagtcaatgactggagacagggtcgagactcgccgccgagatctggactcagaatgtatagctccgtaactcaggtgtccatgtgggcagatttacatcgtattccactggcaagggtagatgccgaatcgtagactgacgagtccttggacagtttgtcaacgtaatgaacctttcaagtgggagcaccagaatggatgagaaccaatgcacataaatgatcgcggtcgctgcctacggcgagatgggttcaccgcctaccatcccgcccaatgccacactccagttccatgttgagctcctttcttgggccagcgtcaaagacatatgcaaagacggtgcgacttttaag

SEQ ID NO: 79478 - DNA, 369 bp, Zea mays
aaggcggccattaattcatcgaagggttaagggcccccttaaccaccgggaccctcaaattccctcgcccggtgggacggaacctctggtgcaccgcggcgttgaaggactggcaaaccctgccgcccaaagtcgcctcccagctcatcgccagcgcgcagcacgtggagggcgaccgcggactgggcagcgtcaggcagttcaagttcacctcactcatgccgttcagcttgatgaaggagcgtcacgagttcctgcacgcggacaagtgcgagtgcaagaacaggctcatcgagggcggcggcatccgcgtcgccatcgaaacggcgacgtcgcacatcaaagtggagcccgcggccggcggcggga

SEQ ID NO: 79479 - DNA, 419 bp, Zea mays
  unsure (1)..(419): unsure at all n locations
acccacacttccgagctaagctaagccgagctaagaagcacagcaagtctcaccagactagcggctancgcgagaatggccaacgacatcgaggccgcngcggtgcacgaaggcaacgactactctgacacgctcccggcgccgctggtggacgcggacgagctgaccaagtggtcgctgtaccgcgcggtgatcgccgagttcgtggccacgctgctcttcctctacatcacggtggccacggtgatcgggtacaagcaccatacggacacggcggcctcgggccccgacgcggtgttccgcggcatcggcgtgctcggcatcacctgggccttcggcggcatgatcgtcatcctcgtctactgcaccgccgaggtgtcgggtgggcacatcaacccggtcgtcaccttcggcctctt

SEQ ID NO: 79480 - DNA, 419 bp, Zea mays
agcgtcacacgcggaaaggtatcaccggatcaggtagaacgctgcacaatctccttcgccgccgccaagatggtgaacgttcctaagaccaagaagacgtactgcaagaacaaagagtgcaagaggcacacactccacaaggtgactcagtataagaagggcaaggatagcctgtctgcccagcgaaagcgccgttatgaccgcaagcagtcaggatatggtggtcagaccaagcctgtcttccacaagaaggtcaggaccaccaggaagattgttctgaagctgcagtgccagagctgcaagcactactcacagcacgccatcatgagatgcaagcattttgagattggtggagacaataacggcaagggcacatctcgtatctaagcttctcgtccacctgtcaggttgttgagttg

SEQ ID NO: 79481 - DNA, 417 bp, Zea mays
  unsure (1)..(417): unsure at all n locations
acccacgcgtccgcccacgcgtccggaaattgcaaacctgtcactagcgaagcatacttcgtcgagcacactcttgcaattaatccaccgagttcggtttagtagcatagcatcgacaataaatgtcgctcgtgagtcggcgcagcagcaacgtgttcgaccccttctccctcgacctctgggaccccttcgacatgttccgctccatcgtcccgtcggcggcctcctccggcggcggttccgagaccgccgccttcgccaacgcccgcgtggactggaaggagacgcccgaggcgcacgtgttcaaggccgacctccccggcatcaagaaggatgaggtcaaggtcgaggtggangacggcaacgtgctcgtcatcagcggcaagcgcagcagggaagaggaggacaagaacgaca

SEQ ID NO: 79482 - DNA, 319 bp, Zea mays
taagttggacggcttccccttccccgcctaacaattcctcccccggttaagggttcctaaggttttgttgaagggccaatgccgatggcgatgttgaataacgttgcctccgccggggggcttcctggggcaacaacaaccaattcccgggaaaatgcctccgcgccatacggcgagatcctcgactccaatgtcatcaacgaccgtgatacagtgacgtctcgcagcttcagcatcgttaccttcgcctctcacaactccatgctcgacgctatctagaacatgaacagcacggagctcgacggccgtaacatcaccg

SEQ ID NO: 79483 - DNA, 373 bp, Zea mays
  unsure (1)..(373): unsure at all n locations
agcctctagagtaattcctattactctccctcgatgcctttgccggcgatgagcgcccattcgcccatcaaactgattagatggaactctctctgtctcaactgagctgtaaggacattancgagctcattgctgctggcaaggataattttgcatcagtctcatgtagcggtggcggtgtggctgttccagcagctgtccctgctgctggcagcgctcctgcagctgaggcgaagattgaagataatgtggacgacaaggaataaagtgatgacgacatgggctgtcagcctcttcgactaagcctgtgcaatattcaggagtattgtttttgagtcacggaagcaaatcgactacaagtcctagtcatgtt

SEQ ID NO: 79484 - DNA, 422 bp, Zea mays
aggcaaacaacgatgaaggcatgcccatgtatcagaggcccttcatgaagggcaagctgtacatccacttctcggtggagttctcggactcgttgagcccggagcagtgcaaggccttggaggctgttctcccgcccaagccagtatcacagtacactgacatggagctggacgagtgcgaggagacaatgtcgtacgacgtgaacatcgaagaggagatgcggaggcggcaacagcagcaccaggaggcctacgacgaagatgatgatgtgccaggcggtgggcagagggtgcagtgcgcccagcagtaggcagcttgcggtaagtctacccgcttgtattggcctgatgatacttcggttacacgagtgcagttatcggtctgttagttcaagttctgcgtttggggtgttagatccacc

SEQ ID NO: 79485 - DNA, 413 bp, Zea mays
acaccagtctgccgcagtgccgcaccccgcacgagacgcgtccttgaggggcacgtccgagatcggtggcgcctgcctctcgccgccgatactgtgcctctcgcggtctcgctccccctcgcaggtcttttggtttttttagttcctccctttgcttcttggaggtgtttgttgccgtctcagccgcagttcttgagacatgcagagccagatagtgtgccacgggtgcaagacccttctgttctacgcaaaaggtgctccgaacgtgtgttgtgcggtatgccatgtggtcaacaatgtgcagcctccagcaatggacatggctcgacttatatgtggtggctgccagacattattgatgtatgctcgcagtgcaacaactgtaagatgctcatgttgtgacacagtcaatc

SEQ ID NO: 79486 - DNA, 409 bp, Zea mays
agggttttgctgctcaccgaccccgagctccgaaggccgcagcatcaggcgcggccccccctcgcgtgtgaccgagatggcgctgccgaatcaggggaccgttgattaccccagcttcaagctcgtcatcgtcggcgatggtggaactggtaaaactacatttgtgaagaggcatctcactggagagtttgagaagaaatatgaaccaaccattggtgtggaagttcatccgttggatttcaccactaactgtggtaagatcaggttctactgctgggataccgcagggcaagagaagtttggtggcctcagggatggatactatatccatggccagtgtgcgatcatcatgtttgatgtaacctcaaggcttacttacaagaatgttcctacgtggcatagggacctg

SEQ ID NO: 79487 - DNA, 355 bp, Zea mays
accttcagtgaaaccgttcttgataagtcctgccgcactgtcataagcaagtcacctaacaagcagaacggtctgtacatggaagcgcgccccctgaaggagggtcttgctgaggcaattgatgatggccgcattggcccacgtgatgatcctaaagtgcgctcccagatcctctctcaagagtttgggtgggacaaggatcttgccaagaagatttggtgcttcggacctgataccaccggcccaaacatggttgttgatatgtgcaagggagtgcagtatctcaatgaaatcaaagattctgttgtggctggtttccagtgggcatcgaatgaaggtgcactggctgaagaga

SEQ ID NO: 79488 - DNA, 393 bp, Zea mays
tctactacacctcgagtaaccacagcgagaaccaatcgccaagcaaaaagcccgagaaagaaagaacacacaggagacacacatggcggctgcagcgaaggcgtcgtggatggtggcgatgagcgtcggggccgtggaggcgctcaaggaccacgcgggcctgtgccgctggaactacgcgctgcgctccgtccaccgcgccgccaaggccaacgctcccagcttcgcgcaggccacgaagctggcgccgcccgccgcggacaaagccgccgcggaggatgggatgaggaccgtcatgtacctcagctgctggggccctaactagctagggcctctgctagtttcggcttcctgcaaccgtaccgagctcggcttcaaatctgattcatgact

SEQ ID NO: 79489 - DNA, 317 bp, Zea mays
tctcactaccccctccggtccgggtccgggtccgtaaggtcctccggggttcggtttcctgggtaaccggatcaaaatggcggcttcggatgttgattaccgcggcttcatcggcggcctcccctgggccacggacgaccactccctcaacaacgccttcagcacctacggcaaggtcctcgagtccaagatcatcctcaatcgggagacgcagaggtcccacggcttcagcttcgtcaccttctccacggaagaggcgatgcggaacgccatcgacggcatgaacggcaatgagctggacggacgcaacatcaccg

SEQ ID NO: 79490 - DNA, 427 bp, Zea mays
gggtcgagacacgcgtccaacgaaacgtacgtcacacagtccattattgccgtctcccttttgcgtgagcaaagaaagagagcgagaagcagtcgccatgtctgggatcatccacaagatcgacgataagctccacatggggggcgaccacaagaataatgatgacgagcaccacaagaaggccgatgagcaccacaagaatgatgagggggagcaccacaagaaggacggcggggagcacaatgaatgcatcgtggagaagatcaaggacaacatcaccggcgagcacggcgacaagtccggcgaccacaacgagaagaatgacaagaataacaatgataagaagaagcacggcgagggccacgaccacgactgcggccacagtatcagcagcagcgacagcgactgagatctggtgtcgcagcac

SEQ ID NO: 79491 - DNA, 417 bp, Zea mays
agccgcggtccgtggactggcggcagaagggcgcggtgacggccgtcaagaaccagggccgctgcggcagctgctgggccttctccacagtggtggccgtggagggcatcaacgccatacggacggggagcctggtgtcgctgtcggagcaggagctgatcgactgcgacacggacgagaacgggtgccagggcgggctcatggagaacgccttcgagttcatcaagtcccacggcggcatcaccaccgagtccgcgtacccgtaccacgcctccaacggcacctgcgacggcgcgcgggcccggcgcgggcgggtcgtggcgatcgacggccaccaggctgtgccggccggcagcgaggacgcgctggccaaggcggtggcgcaccaaccggtgtccgtggccatcgacgcggggg

SEQ ID NO: 79492 - DNA, 408 bp, Zea mays
acccacgcgtccgaaacacacagaagcgaggagcactacttgttggttggattctcttcagtctagcagctagtccagttaagtttcagacacacatggggagcattggcagaggcacggccaactgcgccaccgtgccgcagccgccgccgtcgacagggaagctcatcacgatcctgagcatcgatggcggcggcatccgcggccttatcccggcgaccatcattgcgtacctcgaggccaagctccaggagctggacggcccggacgctcggatcgccgactacttcgatgtgattgccgggacgagcaccggcgccctgctcgcgtcgatgctggcggcgccggacgagaacaatcggccgctgttcgccgccaaggacctcaccacgttctacctcgagaacg

SEQ ID NO: 79493 - DNA, 373 bp, Zea mays
acaagcctctagactgactcatctaatcaacccaatccccctcaaccccaacaaccccgagttccccaacccgaatggccccaaaggccgaaaaaaagcaagcggagaaaaaacccggcggccgaggagaaagcggagaagacgaccgcaggcaagaagcccaagtccgagaagcgcctgcccgcctcgaagtcctccggcaaggaaggcggcgagaagaaggggaagaagaaggccaagaagagcgtggagacctacaaaatctacatcttcaaggtcctaaagcaggtgcaccccgacatcggcatctcctccaaggccatgtccatcatgaactccttcatcaacgacatcttcgagaagctcgccggcg

SEQ ID NO: 79494 - DNA, 397 bp, Zea mays
aggagacgtttcaaggactgcgagcgataggatgtggactcactgtatcattcgcgttctccatactgatcaacctcttcctcagttatcccactcagccgggatggttaccttctcctttgctgtccatccgtatagacaacatccacaagggtaagcacgggagtgattctgaaacttacgacactgaagggaggtttgatccatcaaagttcgatgctatattcagtaagtacggtcgaacccatcctaatgctctaacaaaagacgagttgagctcaatgcttcaaggaaaccgcaatacgtacgatttccttggctggttggccgctgccggtgaatggctcttactctacagcttggcgaaagacaaggatgggctcttgcagcgcgaaac

SEQ ID NO: 79495 - DNA, 389 bp, Zea mays
aaccctctagactgagtcctattaaaatcctccggatttccttaatttggtttgtgtgaaatacacagttttgggggaaaattttttgaagctgaaaaaatggtgctgaaaacggaactcggccgcttcattggccacaagatctaccctgggaaaggcatccggtttattcgtgctgattctcaggttttcctttttgccaactctaaatgcaagcgctacttccacaaccgcctgaagcctgcaaagcttacctggacagcaatgtacaggaagcagcacatgacggacatccatgctgaagctgtcaagaagatgcgccgtgccaccatgaagccatactcgaggtccattgtgggtgcttccttggaagtgatccacaagaagag

SEQ ID NO: 79496 - DNA, 423 bp, Zea mays
acccacgcgtccgcgtcggcgaaggcaaggccgtgcgccgccgccgcgcccgtgaatctccccagggcctcctccgccaccagctcgacatgtgctcccgcaacgccgacctcaccaccgcgctccgcctctacgacgacgccctctccccggacaaccccatcccgctctccctccaccactacaactgcctgctctacctctgctccaacgccgccgctaccgactctgacagccatatctccgccaccgccgctcagcgcggcttcgacatcttcgccaggatggaggccgacggcgtccagcccaacgaggccaccctcaccagcgtcgcgcgcctcgccgccgccacccgcgaccctgccatggccttctccgtcgtccgccgcatggccgctgcgggcaccccgccgcgcctccgca

SEQ ID NO: 79497 - DNA, 391 bp, Zea mays
acggaaggtcaaagaatagcagcagcaggcggcgccgagtagcggctccccacctcgagcttgccaccatggctagaggattgaagaagcatttgaagaggctcaatgcgcccaagcattggatgctggacaagcttggcggagcttttgctcccaagccatcttctggacctcacaagtctagggagtgcctgccactgatcctcatcatcaggaacaggctcaagtatgctcttacataccgtgaggtcatttccatcctgatgcaacgccatgtacttgttgattgcaaggtcaggacagacaagacctaccctgctgggttcatggatgtcatttccatccccaagaccaatgagaactacaggctgctgtacgataccaaaggccg

SEQ ID NO: 79498 - DNA, 417 bp, Zea mays
  unsure (1)..(417): unsure at all n locations
cacacactcgagaactccatttcgatcgcatttgaaatcaacccatcctcgtttcctccgtctagcagcctctcaccctcatggccaagatcaagatcgggatcaatgggtttggcaggatcggaaggctggtggccagggtggccctgcagagcgacgacgtcgagctcgtcgccgtgaacgaccccttcatcagcaccgattacatgacctacatgttcaagtatgacactgtgcacggacagtggaagcaccatgacgtcaaggtgaacgactccaagacccttctctttggtgagaacgacggtgctgtgtctggctgcaggaaccctgaggagatcccatggggttcggttggcgctgaatatgttgttgagtctactggtgtnttcactgaccaggagaaggctgcagctc

SEQ ID NO: 79499 - DNA, 412 bp, Zea mays
cttcccggctccagcgatgtcgggggcgatcgggggcgccgaggtccacggcttccggggcgcagcggcgcagctcccgcggtcgcgggtgctcgggaggccgatccgggtggcgccacccgccgcggcccggccgggcggcgcgtccgcgggtagcatacgcgccgtctccgcgcctgcgaagaaggatgcttctgaagttaagcgaagcaaggttgagataatcaaggaaaagagcaacttcctccggtaccctttgaacgaggagttggtctcagaggccccaaatatcaacgagagtgctgttcagctgatcaagtttcatggaagctaccagcaaactgaccgagatgtccgtgggcagaagaattactcgtttatgctccggacaaagaacccttgtgggaaagtt

SEQ ID NO: 79500 - DNA, 424 bp, Zea mays
  unsure (1)..(424): unsure at all n locations
aagcctctagagcaactcgcagtagccgtgcgcggcggggcagaagtactacgggcgcggcccgctgcagatctcgtggaactacaactacgggcccgccgggagggacatcggcttcaacgggctcgccgaccccaacagggtggcgcaggacgccgtgatcgcgttcaagacggcgctctggttctggatgaacaacgtgcaccgtgtgatgccgcatggcttcggcgccaccatcagggccatcaacggcgccctcgagtgcaacgggaacaaccccgcccagatgaacgcgcgcgtcggctactacaagcagtactgccagcagctccgcgtcgacccaaggcccaacctcacttgctangcgacngcgtccacgttgtacccatggctcctgctagtgctagctcgtccacaataaatg

SEQ ID NO: 79501 - DNA, 411 bp, Zea mays
  unsure (1)..(411): unsure at all n locations
acactaattcgcagtgggcatctggatgaccggtcaaagcccaccctcttctccatggcaagactcgacagggtgaagaacataacggggctggtcgaagcttttgctaagtgcgctaagctgagggagctggtaaaccttgtcgtcgttgccgggtacaatgatgtcaacaagtccaaggacagggaagagatcgcggagatagagaagatgcatgaactcatcaagacncacaacttgttcgggcagtccgctggatcctgccagacaacaggcccgtaacgcgagctctatcgctacatcgctgataccaatggtgctttcgtacacccgggcctctatgaagcgttcggtctcaccgtcgttgaggccatgnactgtgggcttcctactttcgcgacgctccatgga

SEQ ID NO: 79502 - DNA, 418 bp, Zea mays
acgcagactgacatgatcgcgctctcaggtgggcacacgatcggggtgacgcactgcgacaagttcgtgcggcggctgtacccgttcaagggcgccgccgccggcccgccgatgaacctctacttcctgcggcagatgcggcggacgtgcccgctgaactacagcccgtcggcgttcgcgatgctggacgccgtgacgccccgcgcgttcgacaacggctactaccggacgctgcagcagatgaagggcctgctggcctccgaccaggtgctcttcgccgaccgccgctcccgcgccaccgtcaaccgcttcgccgccaaccagaccgccttcttggacgccttcgccaacgccatggccaagctcggccgcgtcggcgtcaagaccgccgccgcggacggccaagtccgccgggtat

SEQ ID NO: 79503 - DNA, 362 bp, Zea mays
  unsure (1)..(362): unsure at all n locations
caagcctctaatctgagtcgcattaacgtgaggaaaatgtgtacatggtgaagctcgctgaccangccgcgaggtacgatgagatggttgagttcatggacaatgtacccaaaactgttgactcggaggagctcactgtgcatgagcgaaacctcttgtctgttgcatacaggaacgtcattggagcccgccgcacctcatggcacatcatctcctccatcgagcagaaggaggatggccgaagcaattaggaccgagtaacactcatcaaggattaacgtggcaagattgagactgagctgaccaagatctgtgatggcatcctcaggctgcttgagagccatcttgtgccgtcttctact

SEQ ID NO: 79504 - DNA, 295 bp, Zea mays
ttaatcaattcactcaaacctcctccccaaatcctccattagattcccgttgacaagaagactagaaccgaacctgaccatgtcgctgattcgccgcaacaacgtgttcgattccttctccctcgaactccgggaaccctttgagggcttccccttcggctccggcagcagcagcagtctcctcccctcgttcccgcggaccagctcggagaccggggccttcgctggcgcgcggatcgactggaaggagactccagaggcgcacgtgttcaaggcagacgtaccggggctgaag

SEQ ID NO: 79505 - DNA, 363 bp, Zea mays
gggtcgagacacgcgtctagaggaagtcgaaccaagagatcaagaaccacccatggttcttgaagaacctgcccaacgaagatgaccgacgagtaccagatgaacctacagctagtcgacatgaatgtcacgtcgcaaagcctggaggagattatgtccatcatactggaagcccggaagcccggcgacaggctgaagcatgcgggacagctccccggccttgggagcatggagctggatgacattgatgttgacgacatagacgttgacgacagtggcgactttgtacgtgccttgtgacgcggttcaggctgtccggcaccgttgctgcggtggactctcacccactctcctgggtcttgt

SEQ ID NO: 79506 - DNA, 413 bp, Zea mays
  unsure (1)..(413): unsure at all n locations
aggcaaacctcagcaacccgtacatcgtcgagtacaaggacggatgggtggacgaggggacctccgtctgcatcgtcacaagctactgcgaaggangggacatggccgagaggatcaagaaggcaaggggcatcctattctcagaagagagggtgtgtcagtggttcacgcaattgctcctcgccctcgactacctgcactgcaaccgtgtgctccaccgtgatctcaagtgttccaacattttattgacaagggataacaatatcagactcgctgactttgggctggcaaaactgctcatggaggaccttgcctcatcggttgtaggaaccccaaactatatgtgcccagaaatactagcagacataccttatggatacaaatccgatatatggtcacttggttgctgtatg

SEQ ID NO: 79507 - DNA, 399 bp, Zea mays
  unsure (1)..(399): unsure at all n locations
acaatttcatctgtgggaccaaatgcagcagttattcactataaacctgaagcaagcacatgttcggaaatggatgctgataaaatatatctttgtgactctggggcacagtacctggatggtacaacagacattacaagaactgtacattttggtaaaccctcagcacatgagaagtcatgctacacagcagttttgaaaggccacattgcactagacattgctgtgtttcctaatgggacgacaggacatgctcttgatattctttcacgagcaccactctggagagagggtcttgactatcggcatggtacaggccatggaattggatcntatttgaatgtccatgaaggtcctcatctaattagcttcagaccttctgctcgaaatgtaccgctg

SEQ ID NO: 79508 - DNA, 371 bp, Zea mays
acggacgcgtgggtgcggatcctcgtggcggacgcggacgcgtacgtggccgtcgtcgacgagaaggtcatggtgaagatcgggacaaggtacgacgtgagcagcgtggtcccgtcggatttccacccggcggcgcacggcaaggactactgcgtctgggagaaagcgagcctccgcgtcccagcggggcgccacctctagcagctcagactgctcagtcttgtgctgcattgcaaacacagcagcacgacactgcataacgtcttttccttagtttcctaaattttaccttttcctagttcaatttcatatatgtatttctacatgtacacactatcacaatcagataaataaacaagcttagtcacctg

SEQ ID NO: 79509 - DNA, 428 bp, Zea mays
cacgactctacactcacgtcctactaacgcgtccggtgctcatctggaccttggtcacatttcctttgcttgttttgggaggtattgctggcaaaaacagcacaagtgaattccaagctccttgccgtaccacaaaataccccagggagattcctccacttccgtggtaccggagaactattccacagatggctatggccgggtttttgcctttcagtgccatatacatcgagctgtactacatctttgctaatgtttggggccacaggatttacacaatctacaagcattctgtttattgtctttatcatcctccttattgtcactgcattcatcacagttgcactgacatacttccagcttgctgctgaagaccatgagtggtggtggaggtcattcctatgcggacgatcaactggatttttcgt

SEQ ID NO: 79510 - DNA, 259 bp, Zea mays
aacctcttccgccgcttcaacgcaggcgagctcggctccggtcacccgtcgatccacgcaaccatgtctgcagcagcggcaagtgaaaccgcgggggaagacgttccccctggacccaatgtccgtggaggagagtttgtccttggtgttgctcacatctttgcatccttcaatgacaccttcattcatgtcactgatttgtctgggagggaaactttgggtcggatcactggtggcatgaaggttaaggctgatcgtg

SEQ ID NO: 79511 - DNA, 406 bp, Zea mays
cgcgggccgacacaagcgtcaagaggaactcgcgggatcgaggagatcgggacgatgatgggagggcgcgctctgctgctgctcctggtctcggcgctgctcgttcagatccgcgcctctgacccgctgctgtacgaaccgtttgatgaggacttcgagggtagatggatcgtctccaagaaggatgaataccaaggtgtatggaagcatgccaagagtgatgggcatgaggactatggcctccttgttagtgacaaggcaaggaaatacgccataatcaaggagcttgatgagccagttaccttaaatgatgggacagtggtcctgcaatttgaagtgagacttcagaatggccttgaatgtggaggtgcctacattaagtacatccggcctcaggatgctggat

SEQ ID NO: 79512 - DNA, 414 bp, Zea mays
acgcgtccgcggccgttgccgcgagctcgctccgacccaccgccgatggcgacggcgatgggcgcgatggccgccacctgcatggcctcgatcccggccgccgctacgttccccggtgatctcggcgtcggacgacgccgagcggttgtaccagggtggcgcgccggtgggagacggctgcgtgcgacgccgcctgcccggaggccgttcctgttctcgccgaagggcgtttcggactcgcggagctcgcaaacgtgccttgatccggacgccagcacgagtgttcttgggatcatccttggagggggtgctgggacaaggctgtatccactgacgaagaagagggcgaaaccagcagtgccgttgggcgccaactacaggctcatagatatccctgtcagcaactgtctcaac

SEQ ID NO: 79513 - DNA, 407 bp, Zea mays
  unsure (1)..(407): unsure at all n locations
ctcgcgggccgatacaagcctctaaactaagtcggcataccgaattctctgcgatttctctagatctcgaccacccctactagttttggttcctcctttcgttcgagagagcgtttctagtggcaatggcgaagagcgagggtccggcgatcgggatcgacctcggcaccacctactcgtgcgtcggcgtgtggcagcacgaccgggtggagatcatcgccaacgaccaggggaaccgcaccacgccgtcctatgtcggcttcaccgacaccgagcggctcatcggcgacgctgccaagaaccaggtcgccatgaaccccaccaacaccgtcttcgatgccaagcggttgatcggcangaggttctctgacccgtcagtgcanagtgacatgaagctatggccgttc

SEQ ID NO: 79514 - DNA, 410 bp, Zea mays
agtatgcatcattctcaggaaccctagcgccgccgcacccgcaggaatgggtatcgacctcgtcgccggtgggaggaataagaagaccaagcgcactgcgcccaagtctgacgatgtctacctcaagctcctcgtcaagctctaccgtttcttggtcaggaggaccaagagcaatttcaacgctgtcattctcaagaggcttttcatgagtaaaaccaaccgaccaccaatctccatgcgccgccttgtcaagtttatggaaggaaaggagaagaacattgctgtcattgttggcacagtcacagatgacaaaaggatccaggaggttccagcaatgaaggttactgccctgaggttcacggagacagcaagggccaggattgtcaatgctggtggcgagtgcctcacat

SEQ ID NO: 79515 - DNA, 411 bp, Zea mays
tctacactgagtcgtattaatgacagaaggacagaagctgaaacaaattcagggaacgctagcaagtctgctgataaaaagcctgcacctaaagagccaccaaaagactacatccatgtgagggctagaagaggtcaagcaacggacagccatagcctcgcagaaagagcacgacgagagaagataagtgaacggatgaaagttcttcaagatattgtccctggatgcaacaaggttatcgggaaagcatcagtccttgatgagataataaattacatccagtctttacagcgtcaagtagagtttttgtccatgaaacttgaagcgattaatgctcatgtgagcaatgcaactgtagcttttccaaccaaagattttggtgttgcgccatataatactgctcctagcctg

SEQ ID NO: 79516 - DNA, 367 bp, Zea mays
  unsure (1)..(367): unsure at all n locations
aaacngccagacgctggnccncgttcagggaacgctagcaagtctgctgataagcagcctgcacctaaagagccagcagacgactacggccatgttacggctataagaggtcaagcagcggacagccatagcctcgcagaaagagcacgacgagagacgataagtgaacggatgaaagttcttcaagatattgtccctggatgcaacaaggttatcgggaaagcatcagtccttgatgagataatacattacatccagtctttacagcgtcaagtatagtttttgtccatgaaacttgaagcgattaatgctcatgtgagcaatgcaactgtagcttttccaaccaaggattttggagttgcgccat

SEQ ID NO: 79517 - DNA, 428 bp, Zea mays
ctcgcgggtcgacacacgcctctacgttctggctcaatacttcattgaaagtgtgattaagaagaaccaaagcataaatgggcatcacaagaacataaccttcaggtgtgccgatgtgacatctaacgacttgaagattgaagataactctgttgatctgatattttcaaactggctattaatgtatctttcagatgaggaggtccaaaagcttgtggggaaaatggtaaaatggttaaaggtcggaggccatattttctttagagaatcatgttttcaccaatctggagattccaaaaggaaggtgaacccaacacactatcgagaaccaaggttttataccaaggtatttaaagagggccattcatttgatcaagatggaggttcgtttgaactttctctagtgacctgtaaatgcattggggctt

SEQ ID NO: 79518 - DNA, 372 bp, Zea mays
gagtaaggtagcaccggagcaggtagaacgctgcacaatccccttcgccgccgccaagatggtgaacgttcctaagaccaagaagacgtactgcaagaacaaagagtgcaagaagcacacactccacaaggtgactcagtataagaagggcaaggatagcctgtctgcccagggaaagcgccgttatgaccgcaagcagtcaggatatggtggtcagaccaagcctgtcttccacaagaaggccaagaccaccaagaagattgttctgaagctgcagtgccagagctgcaagcactactcacagcacgccatcaagagatgcaagcattttgagattggtggagacaagaagggcaagggcacatctctttt

SEQ ID NO: 79519 - DNA, 357 bp, Zea mays
aaagtagcaccggcgcaggtagaacgctgcacaatccccttcgccgccgccaagatggtgaacgttcctaagaccaagaagacgtactgcaagagcaaagagtgcaagaagcacacactccacaaggtgactcagtataagaagggcaaggatagcctgtctgcccagggaaagcgccgttatgaccgcaagcagtcaggatatggtggtcagaccaagcctgtcttccacaagaaggccaagaccaccaagaagattgttctgaagctgcagtgccagagctgcaatcactactcacagcacgccatcaagagatgcaaggcattttgagattggtggagacatgaagggaagggc

SEQ ID NO: 79520 - DNA, 404 bp, Zea mays
acggaagcttgggcttcgaggcaattgtcttcttgttcgtgatgcatccctttgatgtcggtgaccgctgcgaaattgaaggtgttcagttggttgttgaggaaatgaatctcatgacaacggtgtttctccgatctgataacatgaagatatattatccgaacagtgtactcgcaacaaaaccaattatgaatttctacagaagtcctgatatgggagaagcaattgacttctccattcatgttgcaactcctgccgagaaactggccctgatgaaggaacggatactgcgctacattgacaacaagaaggaacattggtacccgggcgcgatggttgtactccgggacgtcgatgataccaacaaactgaaagtatcaatatggctgcgacacacactcaac

SEQ ID NO: 79521 - DNA, 423 bp, Zea mays
gggccgacccacgcgtctagtttgtctcatcatcaccgctcaccgcggtttggctttctcccctcttctgcaccacttctcgctccggattccggattccctctgctctttccctaacgaaggtagccatggcggggagaggtaaggcgatcggctcaggcgccgccaagaaggccacgtccaggagctccaaggctggcctccagttccccgtgggaaggatcgccaggttcctcaaggccggcaagtatgccgagagagtcggcgccggcgcccctgtctacctcgctgccgtgctcgagtatcttgctgctgaggttcttgagctggccggcaatgcggcacgtgacaacaagaagacccgcatcgtaccgcgccacatccagctcgccgtccgcaacgacgaagagctctcccgcttgc

SEQ ID NO: 79522 - DNA, 430 bp, Zea mays
  unsure (1)..(430): unsure at all n locations
tcccgggccgacacacgcctctagcatcttcacatgcgaatcatcgttttccatcgctcctactcctatcatccagaaaatctgagcggtattgatggcgcccaaggcggagaagaagccggcggcgaagaaggtggcggaggaggagccctcggagaaggcggctccggcggagaaggcccccgcggggaagaagcccaaggcggagaagcggctacctgcgggcaagtccgccggcaaggagggcggcgacaagaagggtangaagaaggcgaagaagagcgtggagacctacaagatctacatcttcaaggtcctgaagcaggtgcaccccgacatcggcatctcctccaaggccatgtccatcatgaactccttcatcaacgacatcttcgagaagctcgccgcggaggccgccaagctcgcccgg

SEQ ID NO: 79523 - DNA, 391 bp, Zea mays
acgcgcgggccgatacaacaccctatactgacgtcgtgagtacaaacatacagctagatagcctctgcatgcctacgtacagcatggccaaggccgagctgctcctcgccctcgtggcttcgctcgtcgtgcggccattctcctccctcgccgtgtaccaggacttctgcatcgccgacctatccgccgccgccacgccgggcggctacccgtgcaagcccccgaaggacttgaccgccgactacttccactacggtagcctcgccacacctggtatggcgctgaaacccttcaagatcgctctgcgctcgggcgtcggcacaactttccccggactgaatgggctgggcatctctgctgcgagagttggtgattgaccctggccgggtcg

SEQ ID NO: 79524 - DNA, 378 bp, Zea mays
agcacaagttgtctaatcgaaatatgcaggcacagaattgaaattcaatgacgccgaccatctcattttgaaagaagatgacataattggtattcttgacagtgatgatgtgaaggatatgaaaccactgaatgatcgcattctgattaaggttgctgaagctgaagaacgaactgctggtggtttgctattgacgcaggcaactaaggagaaaccttctgttggatcagtggtagccgttggcccagggccgttgggcgaggacggcagcaggaatcccctgtcgatcactcctggaagcaacgtgatgtattccaagtatgcggggagtgagttcaagggcgaagacggtgagtacatcgtgctcaaggcgtctga

SEQ ID NO: 79525 - DNA, 408 bp, Zea mays
agcgcgagatcgccgccttcttcgcgcacgtcacgcacgagaccggacatttctgctacatcagcgagatcaacaagagcaacgcctactgcgacgcgagcaacaggcagtggccgtgcgcggcggggcagaagtactacgggcgcggcccgctgcagatctcgtggaactacaactacgggcccgccgggagggacatcggcttcaacgggctcgccgaccccaacagggtggcgcaggacgccgtgatcgcgttcaagacggcgctctggttctggatgaacaacgtgcaccgtgtgatgccgcacggcttcggcgccaccatcagggccatcaacggcgccctcgagtgcaacgggaacaaccccgcccagatgaacgcgcgcgtcggctactacaagcagtact

SEQ ID NO: 79526 - DNA, 422 bp, Zea mays
gggccggcccacgcgtccaaagcgaatcagagcaatcggaattctctgcgatttctctagatctcgactaccccccactagttttggttcctcctttcgttcgagagagcgattctggtggcaatggcgaacagcgagggtccggcgatcgggatcgacctcggcaccacctactcgtgcgtcggcgtgtggcagcacgaccgggtggagatcatcgccaacgaccaggggaaccgcaccacgccgtcctatgtcggcttcaccgacaccgagcggctcatcggcgacgctgccaagaaccaggtcgccatgaaccccaccaacaccgtcttcgatgccaatcggttgatcggcatgaggttctctgacccgtcagtgcagagtgacatgaagctatggccgttcaaggtcatcccagggcc

SEQ ID NO: 79527 - DNA, 405 bp, Zea mays
ctctccgcacataccctccctacctcgccgtcgccgtcgcatctgccatgggggcgtacaagtacgtctcggagttatggagaaggaagcaatccgacgtgatgcggttcgttcaacgcgtgcgctgttgggagtacaggcagcagccggccatcgtccgcctcacaaggcccacccgccccgacaaggcccgccgcctcggcttcaaggccaagcaggggtatgttgtttaccgcgtccgtgtgaggcgtggtggcaggaagaggcctgtgccgaagggtattgtctatggcaagcccaagcaccagggtatcacccagctcaagttccagaggaacaagagatctgttgctgaggaacgggctggacgaaagcttggtggactcagggttctcaactcctact

SEQ ID NO: 79528 - DNA, 406 bp, Zea mays
gctacctactactcaagtatccatccttattgagtacagtgttgatccatggactcggaaggagttgtagcagcaaaggtggcagatgagactactaaaccggcaatccaagaagacggcgccgagagcaaggccgggatgactgatctgctgatgctgaccgacaagtcgcagctgcaggcgctggcgatgctgctgcggaacaacgaggagctcatgatgagccaggcgatcaagtcggagacggagcgcattgagtacctcaagacggtgagcgactgctacacgcggacgatgaagctcctcgacgattccatggcggccaggaccacgtacgagcgttcgggcggaatgaggagcctcgtcgcccgggacatggacgactacgtcgtctacggcctcaacg

SEQ ID NO: 79529 - DNA, 406 bp, Zea mays
  unsure (1)..(406): unsure at all n locations
agcaagatgttcgggcgcgcgccgaagaagagcgacaacaccaagtactacgagatcctcggggtgcccaagtcggcgtcccaggacgatctcaagaaggcctaccgcaaggctgctatcaagaaccaccccgacaagggcggtgaccccgagaagttcaaggagctcgcacaagcctatgaggttttgagtgatccagagaaacgtgagatttatgatcagtatggtgaagatgcccttaaggaangaatgggcggtggaggatcccatgttgatccatttgacatcttctcatcattttttggaccctcttttggaggangaggtggaagcagcaggggaagaaggcaaangangggagaagatgtagttcacccacttaaagtttctctggaagatctttaca

SEQ ID NO: 79530 - DNA, 403 bp, Zea mays
ggacaagttctcccttacaaatttcacgacatggagaaacatacgaaagtacatcactgcgaggattatatccaactggggaaggtgctggctatgctgggggcatcttaagtgctgctgtggatggtatgtattgtggttttgctttagctaaacaactttctttattccatggcgatatagagccatttctaggcaaaacacaaaaacaaacaggttttataaagtattgaatggactagtgcttggtattttgttgttccaattttttgggggaaaagatcgatgtcattatagctttaaccataggatatttttgtcatgtttagagcagctgtgattgccttactaaattcatcagctaatttgtgcacggttgatgtagaagggtagagcaaggcat

SEQ ID NO: 79531 - DNA, 425 bp, Zea mays
gggccgagccacgcctctacgacacatcatgacagaaacagtactgctgccagtagagctctcagaactcgggaaaaaaaatgtcagaggccgccgtgcgtgtgatcggcctatggccgagcccgttcgggatccgcgtcctgatcgccctgaagctgaagggcgtcgagttcgagttcgtggaggaggtggtgggcatgaagagcgagctgctgctgaggtcgaacccggtgcacaagaagatccccgtcctgctccaccacggcaagcccatctccgagtctctgatcatcgtccagtacatcgactaggtctggtcctccggcgcgccggccttcctcaccgccgacgctcacgcccgcgccctccagcggttctgggcgcagtacgtcgacgacaaactgccttgggcgatccgcatactg

SEQ ID NO: 79532 - DNA, 413 bp, Zea mays
  unsure (1)..(413): unsure at all n locations
ccaagcctctactgtaaatctgataagattctgctttgcaaaatgagtttgaaactgtgaataagcgaatggatgatgaagctaacaaggcttctcggcttgagcagaacattaagcttctgacacaaggatatcatatacgggctggaaaactgtggtcacaggtccaagatacattcaagcagatggacactgccgcaacagagctcgaatgcttccaagagctgcagaaacaggaacatctcgctgcttcatatcgaatccaaaatttgtctgaagaagtgagtaaacagaaggcactagaaaggaccctccagagccgctacggcgagctggtttctggtttccagaggatccaagaacaagtctatgagcacaagangcaactcaaggtacaagangcggtataagcc

SEQ ID NO: 79533 - DNA, 394 bp, Zea mays
cgggccgacccacgactcaacatcgcccctgcaaatatagtctcggcggctctagaagacgatgggcaaggacgacgtgatcgagagcggcgctggcggcggcgagttcgctgccaaggactacacggaccctcccccggcgccgctgatcgacgcggctgagctggggtcctggtcgctgtaccgcgccgtgatcgccgagttcatcgccacgctgctgttcctgtacatcacggtggccaccgtgatcgggtacaagcaccagacggacgcgtcggcgtcgggtgccgacgcggcgtgcggcggcgtgggggtgctgggcatcgcctgggccttcggcggcatgatcttcgtcctcgtctactgcaccgccggcatctcggggggccacatc

SEQ ID NO: 79534 - DNA, 391 bp, Zea mays
acggaatgacatcaacagagcgcttcacttgttccgtgagatcgcaatggggcatgatctgaagaagtttttgggtgtgatcgtggggctgtgggttctctccggagttggaagcagctgtgacttcctcacgttgacatacattgccgtcctgatgctccacacggtgccaatcttgtacgacaagtaccaggacaaggtggaccatttcgctggaagggcacacaccgaggccctcaagcagtacaaggtgctggatgccaaggtcctgagcaaaatccccaggggtgcggtcaaatccaagaagcagaactagttaggataagccgcagattgtgaatgcccgtatcctgagtatcgggcttgtggttttgcatggcatatgtcaatc

SEQ ID NO: 79535 - DNA, 406 bp, Zea mays
accatcaccagctcttctccatcaagagtaacaggccatcgccttaccagttctgatcccaaatcatttacggcgtaggtgcctcttgctcaaaacccagccccacagcaatggagtgcgagaacggccgcgttgctgcaaccaacagcgattccctgtgcatggcgacgccccgcgccgacccgcttaattgggggaaggcggcggaggagctgatgggcagccacctggacgaggtcaagcggatggtggccgagtaccgccaacccttggtgaagatcgagggcgcaagcctcagcatcgcgcaggtggccgctgtggccaccggcgctggcgaggcccgggtcgagctggacgagtcggcccgtagccgggtcaaggcaagcagcgactgggtcatgagcag

SEQ ID NO: 79536 - DNA, 370 bp, Zea mays
aacggcggcgtaggtaacggcggtctcaaccccaggcgagctcggctccggtcacccgtcgatccacgcaaccatgtcgaggaggaagaccagggagcccaaggaggagaacgttacccttggacccactgtccgtgaaggagagtttgtctttggtgttgctcacatctttgcatccttcaatgacaccttcattcatgtcactgatttgtctgggagggaaactttggttcggatcactggtggcatgaaggttaaggctgatcgtgatgagtcgtctccttatgctgctatgcttgctgctcaagatgttgcacagcgttgcaaggagctcggtatcaccgcgctgcacattaagcttcgtgcaact

SEQ ID NO: 79537 - DNA, 367 bp, Zea mays
acggcggtctcaaccccaggcgagctcggctccggtcacccgtcgatccacgcaaccatgtcgaggaggaagaccagggagcccaaggaggagaacgttacccttggacccactgtccgtgaaggagagtttgtctttggtgttgctcacatctttgcatccttcaatgacaccttcattcatgtcactgatttgtctgggagggaaactttggttcggatcactggtggcatgaaggttaaggctgatcgtgatgagtcgtctccttatgctgctatgcttgctgctcaagatgttgcacagcgttgcaaggagctcggtatcaccgcgctgcacattaagcttcgtgcaactggagggaacaaga

SEQ ID NO: 79538 - DNA, 380 bp, Zea mays
gacccaaacgtccaaggcaccacacctcttcctcctcttcctcctcctagcacagctagcgcctgctccccttcgtctgtgatcatgtcttgcagcagcggcaagtgcaactgcggctccagctgctcctgcggcagctcatgcaactgcatgtcccctgacgtggagaccgccgccgccagcagcatcaagaccatggtcctcgctgcgccgaccaccaaggccagcgccggcggcttcgaggcggccaccgagggcggcggctgcgactgcaacacctgcaactgcggcaccagctgcggctgctcctgctgcagctgcaactgagccggcccgcccggcccggcgatggcgcacgagagtcgagaggacgacgacga

SEQ ID NO: 79539 - DNA, 287 bp, Zea mays
  unsure (1)..(287): unsure at all n locations
aaattcactcaaactccttcccaaaatcttcgattagattcccgttgacaagaagactagaaccgaacctgaccatgtcgctgatccgccgcagcaacgtgttcgatcccttctccctcgacctctgggacccctttgagggcttccccttcggctccggcagcagcagcagtctcttcccctcgttcccgcggaccagctcggagaccgcggccttcgctggcgcgcggatcgactggaaggagactccagaggcgcacgtgttcaaggcanacgtaccggggctg

SEQ ID NO: 79540 - DNA, 367 bp, Zea mays
attccagtgtccgccgtcgtgcgctcgctacccctctccctcgaggcctttgccggcgaagagcgcccagtcgcccaccaggatgaagtttgttgctgcctatctgcttgctgtcctcgctgggaactccagcccctctgccgaggacttgacatccattctggagtcagttggctgtgaagttgacaatgaaaagatggaactccttctgtcccagctgagcggtaaggacattaccgagctcattgccgccggcagggagaagtttgcttcagtcccatgtggcggtggcggtgtggctgtcgcggcagctgcccctgctgctggcggcggcggcgctcctgcagctgaggcgaagaaagaagag

SEQ ID NO: 79541 - DNA, 366 bp, Zea mays
acggacgcgtgggtgatcggccagggcaacgagaacgtgcaggacgtgctccttctggacgtcaccccgctgtccctgggcctggagactgccggcggcctaacgaccgtgcggctccctcgcaacaccacgataccaacgaacaaggatcatgtgttctccacctactccgacaaccagccgggggtgctgatccatgtgtaccacggagatcgcgccaggaccagggagaataacctccttggaaagttcgagctgtccagcatcccgcctgcgcctcacggcgtgccccagatcaccgtgtgcttcgacatcgacgccaacggcattctgaacgtatcaccggaggacaagactacaagacag

SEQ ID NO: 79542 - DNA, 372 bp, Zea mays
cacgcgtccaagcaccaagaaaaagtaggggagaagtggagcacggttgcaaaactccaggaagagtgggtggaaaatgcagaccgctgggtggctggtttcttagagaagtttgaggaagggtgccactcaatggtcagttaccctctgaccacccttcgcagagagtccactgctttcgattaggagtccactgctcatttatgtattcttgtttccaaaacttcctcaggggacggccatcaaggagaggatccaggagaggctcatcaaggcacaatccagcgactttggcagcctcctatagtacgacagctacgattctgatgaagccaaagaaaacgacgaggacgaagacgaactctttgaaga

SEQ ID NO: 79543 - DNA, 404 bp, Zea mays
acaagactctagattgagtcgtattaaaacaacaacagagcgaggagctgaagcacacggcgaggctggtgtaccagacggccctgatggagagcgggttcaacctccccgaccccaaggagttcgcgtccagcatctacaagtcggtgcagaagggcctggacctgagccccgacgcgaccgtggaggaggagaacgaggccgaggagcagccggaggtggagaaggagccggagccggagccgtcgtcctacgacaaggacgagctttaggctttcggatttgttttcaagtctagctagctcccgctttagtaggaatgtgaatcagtgactgcctggtgtttagtcacgtgatggttctgagagacgcccatttttttttcccatgcaacgtgatagggg

SEQ ID NO: 79544 - DNA, 381 bp, Zea mays
acaacactctagattaattcatattaaaacaacaacagagcgaggagctgaagcacacggcgaggctggtgtaccagacggccctgatggagagcgggttcaacctccccgaggccaaggagttcgcgtccagcatctacaagtcggtgcagaacggcctggacctgagccccgacgcgaccgtggaggaggagaacgaggccgaggagcagccggaggtggagaaggagccggagccggagccgtcgtcctacgacaaggacgagctttaggctttcggatttgttttcaggtcgagctagctcccgctttagtaggaatgtgaatcagtgactgcctgggtgtttagtcacgtgatggttctgagagacgcccattttt

SEQ ID NO: 79545 - DNA, 396 bp, Zea mays
acggacgcgtggggcgagcgagcgaccaaagccatggctctccgcaccctggcatcgaagaaggtcctatccttcccgttcggcggcgcgggccggccgttggcggcggcggcgtctgcgaggggggtgacgacggtcacactccccgacctctcctacgacttcggcgcgctggaaccggccatctcgggggagatcatgcgcttgcaccaccaaaagcaccacgccacctacgtcgccaactacaacaaggcgctggagcagcttgacactgccgtctccaagggcgacgcctccgctgtcgtccagctgcagggcgccatcaagttcaacggcggcggtcatgttgaacattcaatcttctggaagaacctcaagcccattagcgaaggtggc

SEQ ID NO: 79546 - DNA, 106 bp, Zea mays
atttctgctcaacgttgtgcgagggcaagatggggacggacctggtcgtgtgcaaggagtcgtgcgcgctctcccatcagtctatctctggtgctgtccggtagga

SEQ ID NO: 79547 - DNA, 401 bp, Zea mays
  unsure (1)..(401): unsure at all n locations
ctcgcagtccaatacaatactctaaacacattcgtaataagctctggagatgctgagaacgacacaagagatagaaaggcgtctagaagaggtttctttgcccttgatcattttgcacggtgaggctgatatggttactgacccggcggttagtaaggctctgtatgagaaagccaagagccaagacaagaagctgtgcctctacaaaagtgcgtatcacgctatcttggaaggtgaaccggaccagacaatattccaagttctcgatgatatcatatcctggctcgatcagcattccacanaagaacgtatatcgttgtgaatcaggcagcgctgttcgccaggattgggtgaattcctttggcaatgctgtatcgtttccggttggggatcccagattc

SEQ ID NO: 79548 - DNA, 353 bp, Zea mays
agcggaagatctacgacccgctggaggaggaccccttcggccccatctggaacaataacaacgggccaaatttccggctcaagctctcggtcaccaaggccctcgccctcctcaaaatcttcgccgacaaggacaacgcctgatccccatcggttctgtcgtcgggccactcgaagctcggatgcacgaatgaatgaacaaacaataataacgaatggatggagcatgtatatcgtcatgcgcatgtcccacgacgagacgggagtataccacggtggagtagtatattaataattaatatagtatgtccacctttgtttgatactactaagggctatgtattgaggcacgcg

SEQ ID NO: 79549 - DNA, 369 bp, Zea mays
  unsure (1)..(369): unsure at all n locations
aggagaccggggccctcctcttccctgccattaacgtcaacaattccttcaccaaaagcacgtttgacaacctgtatggttgccgcaactcaatccctgatggtctgatgagggccaccgactttatgatcgccggtaaggttgccgtggtctgccgataccgtgatgttagcaagggttgtgccactgcactcaagcangctgatgcccgtgtcattgtgaccgagatcgatgccatctgcgccctccaggctctgatggatggtcttcaagtccttctcttggacgacgttgtctcggaagctgacatcttcgtgaccaccactggcaacaatgatatcatcatggttgaccacatgaggacgatga

SEQ ID NO: 79550 - DNA, 398 bp, Zea mays
  unsure (1)..(398): unsure at all n locations
ctctaggaagactctcaggagctcagccgagaagtttgagttccaagctgaggtttccagactcatggacatcatcatcaactcactctacagcaacaaggatatcttcctgagggagctcatatctaatgcctctgatgctggataagattaggttcctttcccttactgataaggaagttctgggtgaaggggacactgcaaagcttgagattcagattaagttggacaaagagaagaaaatcctctccattcgggataggggtattggtatgaccaaggaagatcttattaagaaccttggaacgattgctaaatctggcacttcaggaacangagctgctcgagtctcttgtcgangctgatacgagaaagcaggaaagagctaaaaagatgga

SEQ ID NO: 79551 - DNA, 342 bp, Zea mays
ctaccccgccattaacgtcaacgattccgtcaccaacagcaattttgataacctgtatggttgccgccactcactccctgatggtctgatgagggccaccgacgttatgatccccggtaaggttgccgtggactgcggatacggtgatgttggcaagggttgtgccgctgcactcatgcaggctggtgcccgtgtcagtgtgacggagatcgaccccatctgcgccctccaggctctgatggaaggtcttcaggtccttcccttggaggacgttgtctcggaagctgacatcttcgtgaccaccactggcaacaaggatatcatcatggttgaccacatgag

SEQ ID NO: 79552 - DNA, 397 bp, Zea mays
agcttagctccactccagctccaatcacagtcgtgaccagagcgcgagagctagctagagggccgtgaaaatgccgatcaataggatcgccctggggagccaccaggaggtgtaccacccgggcgccctcaaggcggcgttcgctgagttcatctccaccctcatcttcgtcttcgccggccagggctccggcatggccttcagcaagctgaccggcggcggcccgacgaccccggcgggcctgatcgcggcggcggtggcgcacgcgttcgcgctgttcgtggcggtgtctgtgggcgcgaacatctccggcgggcacgtgaaccctgccgtgaccttcggcgccttcgtgggcgggaacatcaacctgttccggggggctcctgtactgggtggc

SEQ ID NO: 79553 - DNA, 383 bp, Zea mays
acatttccccttccccgcaccgcaccgcaccgcacccaacccccgtcggagagagagatggcatcggtggcggagatgcagcccctcgcgccggcggggtaccgccgcgcgccggagatgaaggagaaggtggaggcgtcggtggtggacctggaggccgggaccggggagacgctgtacccggggatctcgcgcggggagagcgccctccgatggggcttcgtccgcaaggtctacggcatcctcgctgcgcagctgctcctcaccaccgccgtctccgccctcaccgttctccaccccaccctcaacgccacgctctccgactccccgggcctcgcgctcgtgctcgccgtcctgcccttcatcctgatgatcccattgta

SEQ ID NO: 79554 - DNA, 370 bp, Zea mays
gcgaaggcgaccctccctccttcgctccttccgcgccgcctcccggccgtcgccgccatggtgaagtactcgcaggagccgggcaaccctaccaagtcggctaaggccatgggcagggatctgagggtccacttcaagaacacaagggagacagcctttgcgcttcgcaagttgtctttgaccaaggctaagcgataccttgaggatgttattgctcacaagcaggcaattcccttccggagatactgtgggggtgttggtcgcaccgcgcaagctaagtcgcgccactccaatgggcagggccgctggcccgttaaatcagccaggttcatcctggatttgctgaagaatgctgagagtaacgctgatg

SEQ ID NO: 79555 - DNA, 405 bp, Zea mays
  unsure (1)..(405): unsure at all n locations
aaaaggggagagagagagagagaagagagagagaagagagagagagagagaggagtgggagacccgcgagaggctgccgtgtanggaccgtagactcagcgactgcgaaggagggataaggggatggccgggatcggaccgatcaggcaggactgggagccggtcgttgtgcggaagaaggcacccaccgccgccgccaagaaggatgagaaggccgtcaacgccgcgcgccgcgccggtgcggagatcgataccatgaagaagtacaacgctggtacgaacaaggcggcatccagcggtacatccctcaacaccaagcgcctcgacgacgacaccgaaaacctcgcccatgagcgagttccaagtgatctgaagaagaatctcatgcaagcaaggctcgataag

SEQ ID NO: 79556 - DNA, 403 bp, Zea mays
ggcggcttgttccatcgaggcgggagaccgatgcttggccttgaagaagggcgcggcgtaaaacggcccttcttcacctcgcccgacgagctcctcgaggaagagtactacgacgagcagctgccggagaagaagcgccgcctcaccccagagcaggtgcttctgctggagaggagcttcgaggaggagaacaagctggagccggagcgcaagacggagctggcgcgcaagctgggcctgcagcctcgccaggtggccgtctggttccagaaccgccgcgcccgggtggaagacaagcagctcgagcgcgacttcgaccgcctcaaggcctccttcgacgctctccgagcggaccacgacgccctcctccaggacaacaaccgcctccgctcacaggttgtgt

SEQ ID NO: 79557 - DNA, 378 bp, Zea mays
caagaaagcaacggcagcaagaaaccttgtaaacatcggagcatagatcgcggcggtgatggcggccaaggggaggacggagctggacgtgggcgccgacggcgtggccgtaatcaccatctacaatccgcccgtcaactcgctctccatcgacgtcttacatagcttaaaagaaagctatgaagaagcacttcggagaaacgatgttaaagctattgtcgttacagggaaaggagggaaattttctggaggatttgatattagttcctttggtggtgttcaaggaggccaaacaatgcaaccaaaggttggctacatagcaatagatattctcacagatactgtagaagctgcgacaaagccatcagtggcagcaat

SEQ ID NO: 79558 - DNA, 389 bp, Zea mays
tacggtcgcttgggcgcaggtgacatacatacggtgcgagcgccggaagccggaagcaccggtgacgaagccttccgtgtcatcactcatcaggatctcagggttttgtttcgtttcgcgggcgttgggaatccatccatggcgaggaagatgctcatcgacggggaggtggcggccgtcgcggatggtgggcactatgactacgatctcttcgtcatcggggcgggcagcggcggcgttcgcggctctcgcaccgccgcctccttcggagctaaggttgcgatttgtgagctcccattccaccccatcagctcagagtggctaggaggacatggtgggacttgcgtgatacgtggttgcgtacctaaaaagatactcgtgtatggtgc

SEQ ID NO: 79559 - DNA, 391 bp, Zea mays
ttttcttttccaggtagctgctctctattccgccagcgatcgagagaccaagaggagcaggagcgatggcgaggagctcgttcaagctggagcaccccttcgaaaggaggcaagctgaggctaaccgcatcagggagaagtaccccgatagaattcctgtcattgttgagaaggccgagaggagtgacatcccagacatcgacaagaaaaagtaccttgtccccgccgacctcacagtgggacagtttgtgtacgtggtgcggaagcgcatcaagctcagcgccgagaaggcgatcttcatcttcgtgaagaacaccctcccaccaacagctgccctgatgtctgccatctacgaggagaacaaggacgaggacgggttcctctacatgac

SEQ ID NO: 79560 - DNA, 367 bp, Zea mays
gtcaccggcacgcagacgctcagcaagagccaacaggacatcgtcgctcagcaagaaacaaggggggcaataatggcggagtaccagggcgagtatggacacccgtacccgcgcgtcgaccagtacgggaaccccgtgccgccggtggaccagtacggcaacccgctcccgagggagccggcgtccggtttcggcgccatcgctcccccctacagcgctggcgacagcgccgcggggcacgtggcggcgcctgtcgagtacggtgccgacgccaagtatccgcacgatggcacggggagcggtggcggcggcggcgtcaccgctccgaccggtgtggtggcgtactccagcggtggcgtcgcaccag

SEQ ID NO: 79561 - DNA, 389 bp, Zea mays
acttttacatggctgcaaactatgatgtccatgttcttggtattgatctttcggtgaacatggtttcatttgcaattgaacgtgccattggacgcaagtgctctgttgaattcgaagttgctgattgcaccacaaaggattacccagaaaatagttttgacgtcatctacagccgtgacaccatccttcacatacaagacaagcctgctctgttcagaagcttcttcaaatggctaaagcccggcggcaaagtcctaatcagcgactactgtaagaatcctggaaaaccatcagaagaatttgctgcgtacattaagcagagaggctatgaccttcacgacgtgaaggcttatggacagatgctgaaggatgctggttttcataatgtc

SEQ ID NO: 79562 - DNA, 388 bp, Zea mays
aggatccctcgacaatggcactccaggcagcctacgagtacctgcagcaggccgtcggccatggcgcgtggtcgtccacgcagacgctgacgctgctgctcatcgccgtacccaccgtactactgctgctagcgtccctcgccaagagcacgtcgtcgtccggtaggggcaagccgccgctccctccctcgccgccgggcaccctccccatcgtggggcacctacaccacatcgggccccagacccacatctcgctccaggagctggtggccaagtacgggcacaacgggttcctgttcctccgcgccggcgccgtgcccaccctgatcgtgtcgtcgcccagcgccgccgaggccgtgatgcgcacccacgaccacatcttcgcgtc

SEQ ID NO: 79563 - DNA, 391 bp, Zea mays
acactcactcgaaccatcttccaaagcacccgaaccctagtgatctcggaaccctagccgcgcgcggatctcggcttttccccttcctccacgccagccatggacgaggacttcgagatgcctcccgccggcgccgatgagatgatgggcgacgacgagatgggcgacttcggcggcgacgagggcccggtgatgaaggtgggcgaggagaaggaggtcggcaaggaggggctcaagaagaagctgctcaaggagggcgagggctgggagactcccgaggtcggcgacgaggttgaagtgcattacacgggcacgctccttgatgggacaaaattcgactcaagccgtgatcgtggagaacccttcaagttcaagcttggacaaggtcaag

SEQ ID NO: 79564 - DNA, 352 bp, Zea mays
acggaagcgtggggcgagcgagcgaccaaagccatggctctccgcaccctggcatcgaagaaggtcctatccttcccgttcggcggcgcgggccggccgttggcggcggcggcgtctgcgaagggggtgacgacggtcacactccccgacctctcctacgacttcggcgcgctggaaccggccatctcgggggagatcatgcgcttgcaccaccaaaagcaccacgccacctacgtcgccaactacaacaaggcgctggagcagcttgacactgccgtctccaagggcgacgcctccgctgtcgtccagctgcagggcgccatcaagttcaacggcggcggtcatgtgaacc

SEQ ID NO: 79565 - DNA, 402 bp, Zea mays
gttcgcagtgggcagtggcagccagccagtgagctagcctcccgagccctatctatccttttctcggcacctcgcgggtctcccgtccgccccgtcccgcattcgtatcctctcctcactctcgccgccgccgcttcccctgcgccccgagccaagatgaatgttgaaaagctcaagaagatggcaggtgctgtgcgcactggggggaagggtagcatgcgcaggaagaagaaggcagtccacaagactacgaccacagatgataaaaggcttcagagcaccctgaaaagaataggagtgaacaccattcctggtattgaagaggtcaacatctttaaggatgatgttgttattcagtttgtgaatcctaaagtgcaagcttcaattggtgctaatacatgg

SEQ ID NO: 79566 - DNA, 395 bp, Zea mays
cactgacgcagaaggaaggctaacacttgctgatgctttggtctatgcttgcaaccaaggtgttgaaaagattattgatttggcaacgctgaccggcgcttgcgttgtcgcactcgggcctagcattgccgggattttcacgccgagcgacgagcttgccaaggaggttgccgctgcttccgaggtatccggcgagaagttctggagactgccgctggaagagagctactgggagtctatgaagtctggcgtggctgatatggtcaacactggcggcaggcagggaggttctattaccgccgcgctgttcctgaaacagttcgtcgacgacaaggtccagtggatgcacatcgacatggccgggccagtgtggagcgacaagaaacgggccgcca

SEQ ID NO: 79567 - DNA, 391 bp, Zea mays
atgagcttctagcaacgtacagtgtatccgccatgagtcctttcggggcggtgatcacgccagaaaccctcaagtacatgtccaagtaccagggacgtgagatcacgcaggtggactgcgcacgggaggcgatgaggctgatccacgcggaagacaagaacctcaaggccgaggactcagcgtgggagctgaagaagaagttcggcaacggcgtgagcaccatggtcctcgtctacaacgccaccggggccagcctgagcctggtggacgacgggaaagactggatgggctccgtctacagctcgccgatcccggacaccttccacaacgggcagtggatcgccttcctccacgtcaagcccggctcgctggcgcaaggcagccaggccgc

SEQ ID NO: 79568 - DNA, 389 bp, Zea mays
ggagcacgacgcacgcagagccgcagagatccgtcacactgcaagttttgaaaactgaactgtaagatggcatcagcagagctttcccgtgaggaaaatgtgtacatggcgaagctcgccgagcaggcagagaggtacgaggaaatggttgagttcatggagaaggtagcgaaaactgttgactcggaggagctcactgtggaggagcgcaacctcctgtctgttgcatacaagaacgtcattggagcccgccgtgcctcatggcgcatcatctcctccatcgagcagaaggaggagggtcgaggcaatgaggaccgtgtaacactcatcaaggactaccgtggcaagattgaaactgagctcaccaagatctgtgatggcatcctcaa

SEQ ID NO: 79569 - DNA, 382 bp, Zea mays
aggtcgccctcaaattcgttccgtccaggcaaggaagaaatcgagcagccaaggagaggagaagatggctcgtacgaagcagaccgcccgcaagtccaccggaggcaaggccccgcgcaagcagctcgccaccaaggcggcgaggaagtctgcgccgacgaccggcggcgtgaagaagccccacaggtacaggcccgggacggtggctctgcgcgagatccgcaagtaccagaagagcacggagctgctgatccggaagttgcccttccagcgcctggtccgtgagatcgctcaggacttcaagacggatctgcggttccagagccacgccgtcctggccctccaggaaagccgccgaggcctacctcgtcggcctgttcga

SEQ ID NO: 79570 - DNA, 381 bp, Zea mays
atgctctcattgacaacagacaacaagcagtctggaaccttcaacctgtctggatccattagacggcaggttctgtctcccgctagttctcttcttagtccatgtagggggtgtttggtttgaggaatcactttatccaaaatgtagtggtgcatcatgggtccattcctcaaatttgttgggatgacctcattcctcatattagtactaactaaataactataaggaatgaggtgatgatggatcaactcaatccattacacaaaccaaacaaaaaattgaggagtgagaagacgatgacctagatcattcttcaaaccaaacagcctagtagtgttaaatgttttgcataccatgggcaccgttttgataaagttgtct

SEQ ID NO: 79571 - DNA, 419 bp, Zea mays
gggccgagccacgcgtccactttcacccagatggtaaaacccttttctgtggattagaccaaagcttaaaggtattctcttgggaaccagtaaggtgccatgatgttgttgacatgggttggagtaatttggctgaccttagtatttatgaagggaaactcttgggatgctcctaccatgagtgccgtgttggtctatgggctgctgatatatcactcattggaccctatgctcttggtgtattgcccaaagcgaatttttttgctgagcttgtgcagtctatggaagataatcctgtgaaaccagttgatagcactgcaaattctcgtcctgcttcagcaatggcacattcaagaagttcatacaaaatcaaggagtctgggattgctcaaagcaaggttcgtggctcacatttgact

SEQ ID NO: 79572 - DNA, 368 bp, Zea mays
  unsure (1)..(368): unsure at all n locations
actctaagaagactctcaggagctcagccgagaagtttgagttccaagctgaggtttccagactcatggacatcatcatcaactcactctacagcaacaaggatatcttcctgagggagctcatatctaatgcctctgatgctggataagattaggttcctttcccttactgataaggaagttctgggtgaaggggacactgcaaagcttgagattcagattaagttggacaaagagaagaaaatcctctccattcgggatacgggtattggtatgaccaaggaagatcttattaagaaccttggaacgattgctaaatctggcacttcangaacaggagctgctcgagtctcttgtcgaagctgata

SEQ ID NO: 79573 - DNA, 390 bp, Zea mays
agccgacgtgcgctcgctacccctctccctcaaggcctttgccggcgaaaagcgcccattcgcccaccaggatgaagtttgttgctgcctatctgcttgctgtcctcgctgggaactccagcccctctgccgaggacttgacatccattctggagtcagttggctgtgaagttgacaatgaaaagatggaactccttctgtcccagctgagcggtaaggacattaccgagctcattgccgccggcagggagaagtttgcttcagtcccatgtggcggtggcggtgtggctgtcgcggcagctgcccctgctgctggcggcggcggcgctcctgcagctgaggcgaagaaagaagagaaggtggaggagaaggaagaaagtgatgacgaca

SEQ ID NO: 79574 - DNA, 400 bp, Zea mays
agagcgtttcagggctgaggatcaaagtcatcagaagaagcaaactgaacctggggaccagcaagaagccccagttactagttcagatagccaaccaacagtgggcacaccatcaacagattatgtggcaccctatgcccctcatgacatgagccatgcaatgggtcaatatgcctatccaaatatggatccatacaagggaatcctttagccgggggcttaggggggcaatccatgggggcacccaaaattagccggaatgcatccggcgggcttacctttgcctaccgatgcaattgaagagccagtgtatgtaaatgcaaagcaatacaatgccatattaagacggcgtcaatctcgggctaaagctgaatcagaacggaagcctgtcaagggccgc

SEQ ID NO: 79575 - DNA, 396 bp, Zea mays
agaacgagcaaaggacaaatatcctcgctcgcagtcgcagctactacgccgccgcacctccgcccgccaccttcttcccggctccagcgatgtcgggggcgatcgggggcgccgaggtccacggcttccggggcgcagcggcgcagctcccgcggtcccgggtgctcgggaggccgatccgggtggcgccacccgccgcggcccggccgggcggtgcgtccgcgggtagcatacgcgccgtctccgcgcctgcgaagaaggacgcttctgaagttaagcgaagcaaggttgagataatcaaggaaaagagcaacttcctccggtaccctttgaacgaggagttggtctcagaggccccaaatatcaacgagagtgctgttcagctgatcaagtttc

SEQ ID NO: 79576 - DNA, 386 bp, Zea mays
attattgcttgcagcaagggatgaagcactattgaagatcttgcggagaagtatcctgatatgattatcaaggttcctgttgatgtatttaaaggaataacagacgaggatgcagctaaagttgttgatggtctagctctaaagtcagcggataggcagtcttctatagaacagattaagaaactgtatgaacttttctgcaagtctgattgcacattgctggagataaatcctctggcggagacagctgacaacaagcttgttgctgctgatgcaaagttgaactttgatgataatgctgcatttagacagaaagaaatatttgcacttcgtgatacaactcaggaagaccccagggaggtcgctgctgccaaagcagatttgaa

SEQ ID NO: 79577 - DNA, 377 bp, Zea mays
aacaatagttcgaggatcctgccgaaggtgaagaagctttggtcggcaaatttaagaaactgtatgatgacctcaccactggtttccgcaatctcgaagacgaggcacggtgaactagtgtagattctgtgtaaacaaggactgccaaatgttttataagatacataaattgtagattgagatcatctgtaagaattattcccaccgttgcaccatctcttcgccaccactgttttagtcatcggtgcctgatgggcaccctgtttatttcatgtatcatttattgctgtcattgtaataagcgatgggcatgattgtagttgaataagtacaatgtccatgtattcagacaccagtatcgtgcttatttgtttgtt

SEQ ID NO: 79578 - DNA, 388 bp, Zea mays
gcgtccgactcaacacagcacaggcagctcgagagagagagagagagaaagatgtcgtggttcgggcaccaccaccacaaccagccggctcccccggcgtcgggccccaaccaggtgttcaagatcttctgccgcgccaacgagaactactgcctggccgtccgcgacggcgccgtcgtgctggccccggtcaaccccaaggacgaccaccagcactggtacaaggacatgcgcttcagcacccgggtcaaggacgaggaaggcatgccggcgttcgcgctcgtcaacaaggccacggggctcgcaatcaagcactccctcggccagtcccacccggtcaagctcgcgcctttcagcccggaccaggaggacgcgtccgtgctgtgga

SEQ ID NO: 79579 - DNA, 420 bp, Zea mays
tcccgggccgacgtccagcaccaggacaccatctacgtctccgggtggcagtgctcgtccacgcacacctccaccaacgagcccggcccggacctcgccgactacccctacgacaccgtgcccaacaaggtggagcacctcttcttcgcgcagatctaccacgaccgcaagcagcgggaggcgcgcatgtcgctgccccgcgccgagcgcgcgcgggcgccgtacgtcgacttcctcaagcccatcatcgccgacggcgacacgggcttcggcggcgccacggccaccgtcaagctctgcaagctcttcgtggagcgcggggcggccggggtccacctcgaggaccagtcctccgtcaccaagaagtgcggccacatggcgggcaaggtgctcgtcgccgtctccgagcacgtgaaccgc

SEQ ID NO: 79580 - DNA, 377 bp, Zea mays
acccacgcgtccgggcacggtgagcgcgcagctcaggacgcacttcgccgagatcagggtggaggccgccggcgagggcgcctgcgtcgccaaggtcaaggtcgactacgagcgcctcgacggcgcgccgctcgcgcccgaggacgaggccaggctcgcgcaggggtacgtccgcctcgtcaggatggtggaggcatacctcgtcgcgcaccccgacgagttcgcctgagccgccacctttcctacgtacgtcagtacgtgtatgatcatgctatatggccgtgagtgttttggtttggaataacgggaggaaaggctcctctgtttggttgcttcaattcgcttcgaatcgagtatagacgtttgtgagtttgtgt

SEQ ID NO: 79581 - DNA, 387 bp, Zea mays
acagcagccaattcgctcgagttcagatcgagcgcgcgccaagcaagtcttccggccggccgcgaagagcgcaatcaagcaagacaagatggtgaagctcgccttcggaagcgtcggcgactccttcagcgccacctccatcaaggcctacgtggccgagttcatcgccaccctcctcttcgtcttcgccggcgtcggttccgccatcgcctacgggcaactgacgaatggcggcgcgctggacccggcgggcctggtggcgatcgcgatcgcgcacgcgctggcgctgttcgtgggcgtgtccgtcgcggcgaacatctcgggcggccacctgaacccggccgtgacgttcgggctggccgtgggcggccacatcaccatcctgac

SEQ ID NO: 79582 - DNA, 342 bp, Zea mays
gggatcgtcgcgtgcaggaagcggaccgacttcggatacgacacggatttcgaggtgcgctactcgcttgggaagctgctgggccaccgccagttcggctacacctttgccgccgtcgatcgcgcctccaccgagcgcgtcgccgtcaagcgcatcgaccagaataagatggtccttcctgttgctgttgacgacgtaaagagagaagtttgcatcttaaaggcattacaagggcacgaaaatgttgtacacttttacaatgcattcgaagatgacaactaggtgtatatactcatggaattatgtgagggtggcgagctacatgatccgatattagccaat

SEQ ID NO: 79583 - DNA, 327 bp, Zea mays
agtgcgtgcctggcaagtggcaaactcgagctgtctagtcctcggttcgcgaatcttccacagagaggcagacggcaggactcgcttcaagctcctcatctcgcgcaggggggtcgcctgagatcacagagacaatggtgaaggcagttgctgtcctcgccggcactgatgtcaagggcaccatcttcttttcacaggagggggatggtccgaccaccgtgactggaagtatctctggcctcaagccagggctccatgggttccatgtgcacgcgcttggcgacaccaccaacggctgcatgtcgactgggccacacttcaatcctg

SEQ ID NO: 79584 - DNA, 341 bp, Zea mays
gcctggcatacgtggcagactccaactgtctactcctcggttcgcgaatcttccacagagagggaaactgtaggactcgcttcaagctcctcatctcgcgcaggggggtcgcctgatatcacacatacaatggcgaatgcagttgctgtactcgccggtactgatgtcaagggcatcatcatcttttcacaggacggggatggtccgaccaccgtaactggaagtatctctggactctgaccacagctccatgggttcaatgtgcacgcgcttggtgacactaccaacggctgcatgtctactgggtcacatttcagtcctgttcgcatagaccatgatgc

SEQ ID NO: 79585 - DNA, 356 bp, Zea mays
cacgaaccaatttctcagcaaccagcagcacgacctgtgagggttcgaaggaagtagcagtgttttttgttcctagagggaggaagagatggcaaagggggaggggccggcgatcggtatcgacctgggaacgacgtactcgtgtgtcggcgtgtggcagcacgaccgcgtcgagatcatcgccaacgaccaggggaaccgcaccacgccgtcctacgtcgccttcaccgacaccgagcggctcatcggcgatgccgccaagaaccaggtcgccatgaaccccaccaacaccgtatttgacgcaaagcggttgattggtaggaggttctcggacccttccgttcagagtgatatga

SEQ ID NO: 79586 - DNA, 393 bp, Zea mays
cgggccgacccacgcatcaaagaaaaagaagatcaaggaggtttctcacgagtggtcattgatcaacaagcagaagcccatctggatgaggaagccagaagagatcacaaaggaagaatatgctgccttctacaaaagcttgacaaatgactgggaggagcatctggctgtgaagcacttctctgtggagggtcagctggagttcaaggctgttctctttgttcctaagagggccccatttgatctcttcgacacaaggaagaagcagaacaacatcaagctctatgtgcgcaaggtgtttatcatggacaactgtgaggaactgatccctgagtggctgagttttgttaagggtactgttgactctgaagaacttcccctcaatatctcccg

SEQ ID NO: 79587 - DNA, 355 bp, Zea mays
acaacaaggcaccacacctcttcctcctcttcctcctcctagcacagctagcgcctgctccccttcgtctgtgatcatgtcttgcagcagcggcaagtgcaactgcggctccagctgctcctgcggcagctcatgcaactgcatgtcccctgacgtggagaccgccgccgccagcagcatcaagaccatggtcctcgctgcgccgaccaccaaggccagcgccggcggcttcgaggcggccaccgagggcggcggctgcgactgcaacacctgcaactgcggcaccagctgcggctgctcctgctgcagctgcaactgagccggcccgcccggcccggcgatggcgcacgagagt

SEQ ID NO: 79588 - DNA, 375 bp, Zea mays
cggacgcgtgggcaaacattggtggacctcttcctattaccaaacctctggaccctccagacagacctgttgcttacatccctgagaacacatgcgatccacgtgcagctatctgtggtgtacatgacagccaagggaaatggttgggtggtatgtttgacaaagacagctttgtggagacatttgaaggatgggcaaaaacagtggttactggcatagcatagcttggaggaattcctgtgggcgtcatagctgtggagacacacaccatgatgcagatcatccctgctgatccaggtcagcgtgagtcccatgagcgatctgtcccgcgtgctggacaagtgtggttcccagattctgcaaccaagatcgcgc

SEQ ID NO: 79589 - DNA, 364 bp, Zea mays
aggaacagagccaagaaacaagcccggaagatggcaggcggcggagtggtgaagcacatcctgctggcaagcttcaaggaggaggtgacgcaggagcgcgtgggcgagctcatccgaggatacgccgcgctcgtcggcgtggtcccctccatgaaggcgttccactggggaactgatgtgagcatagaagacatgcatcaagggttcacgcacgtcttcgagtccacgtttgaaagcacggaaggaatcaaggagtacattgagcaccctgcacacgtcgaattcgcaagtgtgttcttgcctgtgctggagaaggtcctcataatcgactacaaaccgacgtcggccaattaacggtagaaca

SEQ ID NO: 79590 - DNA, 399 bp, Zea mays
cgctgggctcgggcccgcggagccgggatatactccagggaagtcgagcaaggagagcgtggattgtggactacaggggtaaagatcgagtgagcatcgctggaggaggcgcccttctatctgctgtgcacctctttttcttctgctactattacatttggcatttgctagacctctctttcctctaccgagtaagacaaagaatgaagagaagaagcccatacagacgtttcggccatataacattgctcatcgtggatcaaatggggaaattcccgaggaaacagctgctgcatacatgagggctattgaagaaggggcggattttatagagtctgacatccttgctagcaaagatggggccttgatttgttttcatgatgtaacacttgatgatac

SEQ ID NO: 79591 - DNA, 373 bp, Zea mays
aggagccaagactcttgtggttccaggaaacctcccaattggatgcatcccagactatctgatgatattcaagagcaataaggaagaggattatgaaccacagacaggttgtcttaggtggatgaacgagttctcacagtatcacaacaaggttcttgtggagcagctcaagaagcttcgcaagcttcatcctggagcaaccatcatctatgctgattactatggagctgctatggaaattttcctttcccctgaacaatatgggatcgaatatcccctagtggcttgctgtggtggagaaggaccctacggtgtgtccccatctacaggctgtggattcggagaatataagctgtgcgataatccagagaag

SEQ ID NO: 79592 - DNA, 416 bp, Zea mays
acccacgcaaccaggagccatgactcttgtggttccaggaaacctcccaattggatgcatcccagactatctgatgatattcaagagcaataaggaagaggattatgaaccacagacaggttgtcttaggtggatgaacgagttctcacagtatcacaacaaggttcttgtggagcagctcaagaagcttcgcaagcttcatcctggagcaaccatcatctatgctgattactatggagctgctatggaaattttcctttcccctgaacaatatgggatcgaatatcccctagtggcttgctgtggtggagaaggaccctacggtgtgtccccatctacaggctgtggattcggagaatataagctgtgcgataatccagagaagtatggatcatgggatggcttccatccatcag

SEQ ID NO: 79593 - DNA, 378 bp, Zea mays
agttcggaaccaacggcccgtccgcctccctctccgcctcccgtccccaacgccaatagttttcaagtggcaatggcggaccaggctaaccaacccactgtccttcataagctcggtggccagttccacctgcgctcgatcatctctgaaggtgtacgggcccgtaacatatgcccatctgtctcatcttatgaaaggagatttgccacatggaactacatgacccatagcctttggggcccctcactgtctgttagccgtggcatcaatgtcccaatgatgcagactccgctctgtgctaatgctcctgctgagaaaggaggcaagaacttcatgattgatttcatgatgggcggtgtttcagctgctgtttcaaag

SEQ ID NO: 79594 - DNA, 373 bp, Zea mays
agttcggcatcgacggcgcgtccgcctccctctccgcctcccgtccccaaggccaatagttttcatgtggcaatggcagaccatgctaaccaacccactgtccttcataagctcggtggccagttcaacctgcgctcgatcatctctgaaggtgtaagggcccctaacatatgcccatctgtctcatcttatcataggagatttgccacatggaactacatgacccatagcctttggggcccctcaatgtctgttagcggtggcatcaatgtcccaatgatgcaaactacgctctgtgctaatgctcctgctgagaaaggaggcaagaacttcatgattgatttcatgatcggcggtatttcagctgctgttt

SEQ ID NO: 79595 - DNA, 317 bp, Zea mays
acgtcgccgtcctctcccgttcgcaacgccacgctccccaaccgcgaaaatgcccgaaacgagttgaaggcaccgtgccgcaagaaaaacgataagtgacgaaccctctgttcaaaaaaaggccgagccatttcggcatcggcggccctttgcccccaagaaagacctgcaccgattcctcaaattggccaatgtcgtgcgcatccagcgccagcgtcgcatcctcaagcagcgcctcaatgtgcctccggcgctcaaacagttcacccgcaccctcgacaagaacctcgctaccaacctgttcaagatgcttctta

SEQ ID NO: 79596 - DNA, 352 bp, Zea mays
gacccacgcatcaagggagagagagagagagaagagagagagaagagagagagagagagaggagtgggagacccgcgagaggctgccgtgtatggaccgtagactcagcgactgcgaaggacggataaggggatggccggattcggaccgttcaggcaggactggaacccgttctttttccggaaaaaggaaccaacggccgccccaagaaagattaaaatggccttcacgccgccccccgcccccgttccgaaattcattccattaagaagtacaacgctggtacgaacaaggcggcatccagcggtacatccctcaacaccaagcgcctcgacgacgacaccgaaaacct

SEQ ID NO: 79597 - DNA, 366 bp, Zea mays
acccacgcgtccgcggacgcgtgggtcggacgcgtgggcaaggcaccacacctcttcctcctcttcctcctcctagcacagctagcgcctgctccccttcgtctgtgatcatgtcttgcagcagcggcaagtgcaactgcggctccagctgctcctgcggcagctcatgcaactgcatgtcccctgacgtggagaccgccgccgccagcagcatcaagaccatggtcctcgctgcgccgaccaccaaggccagcgccggcggcttcgaggcggccaccgagggcggcggctgcgactgcaacacctgcaactgcggcaccagctgcggctgctcctgctgcagctgcaactgagccggcccgcccg

SEQ ID NO: 79598 - DNA, 415 bp, Zea mays
acgcgtacgtacgtcccaaaccaaaccatgtccgcgagagctcttctcctgacgaccgcgacgctgctcctgctcgtcgccgctgcgcgtgcggggcagccgctcgccggcgggtggagcccgatcaggaacgtcagcgacccgcacatccaggagctcggcggctgggcggtgacggagcacgtcaggcgggccaacgacgggctgcggttcggcgaggtgacgggcggcgaggagcaggtggtgtccgggatgaactacaagctcgtcctcgacgccacggacgccgacggcaaggtcgcggcgtacggggccttcgtgtacgagcagtcgtggaccaacacccgcgagctcgtgtccttcgcgccggccagctgaccaccagctggacgtaattaatcagcggcgccgcaat

SEQ ID NO: 79599 - DNA, 406 bp, Zea mays
  unsure (1)..(406): unsure at all n locations
aattcctcccaacaccacctcgccgcgatctccgtagcctccgtcgcgtcgagcatcgatcatgtcggcctactgcggaaagtacaaggatgagctcatcaagaatgctgcctacattggcacccctggcaagggtatccttgctgctgatgagtccactggcaccattggcaagcgcctttccagcatcaatgtcgagaacgttgaggagaaccgccgtgccctccgtgagctcctattctgctgccctggtgctctccagtacatcagcggtgtgatcctcttcgaggagaccctgtaccagaagaccaaggatggcaagccttttgttgatgtcctcaaggagggaggcgtcctcnctggcatcaaggttgacaaggggcacattgaagttgttggcactgat

SEQ ID NO: 79600 - DNA, 392 bp, Zea mays
agacagcctgaaatacattggcattgagctgtggcaggttaaatcaggcactttgtttgacaacatcatcatcactgatgatcctgcgttggccaagacttttgcagaggagacatggggcaagcacaaggaggcagagaagactgctttcgatgaggctgagaaaaagaaggaagaagaggaagccgccaagggtggcgatgatgacgatgatgacctagaggatgaggcagacgatgacaaggcagacgatgacaaggccgactctgatgccgaggatgacaaggactctgaggagcacgacgagctctagatgatgagtatgatagaggtggccactgacattggtgccgttggcctggatttatcagctcttccattttgttctcctt

SEQ ID NO: 79601 - DNA, 374 bp, Zea mays
  unsure (1)..(374): unsure at all n locations
agttatactgctgggataccgcagggcaagagaagtttggtggcctcanggatggatactatatccatggccagtgtgcgatcatcatgtttgatgtaacttcaaggcttacttacaagaatgttcctacgtggcatanggacctgtgcagggtctgtgaaaacatccccattgtcctctgcggtaataaggttgatgtgaagaacaggcaggtcaaagccaagcaggttactttccacaggaagaagaatctgcagtactatgaaatttctgccaagagcaactacaactttgagaaacctttcctgtaccttgcaaggaagctggctggtgatccgaaccttcactttgttgaagctgttgctcttaagcct

SEQ ID NO: 79602 - DNA, 366 bp, Zea mays
acaaaaaccaaaataatcgccaccgctctccgcaccgaaccgaagcagcggcgatggcagcggagaagccggctcccgtgcgcgtgctctactgcggcgtctgcggcctcccggccgagtactgcgagttcggccccgacttcgagcgctgcaagccctggctgcgcgcgcacgcgcccggcgtctaccccgacgaccttgtcgccgcctcctcctcacccggaggcggcgacaaggacgtcgacaaggtcggggatcgcctccagggcgtcggaatctccgacggctccacaagcgccgcaggggatgcttccgcgtctaagccccaagaggcgaaacgcctgcctggtggtaagctcaagaaaa

SEQ ID NO: 79603 - DNA, 395 bp, Zea mays
accacgcgtccagtgaatgcactactagctctagcttcgcactactagctctagcttcgccattgcattcgcttactggagtacgtctggtacttgcacaactggctatcatggcgccccacattgtcgtcaacaaaaccgtgatcacattcacagcggtggccctgacgattcttgctgtgacaaccatgatggccgaggcccgagacctgtcatccacctccaccggtggctatggcgaggaagccatgaaagtgaggcatcagcagtggatggcggagcatggccgcacctacagggacgaggctgagaaggcgcaccggttccaggtattcaaggcgaacgccgattttgttgacgcgtccaatgccgcaagtgacgacaagaagagctat

SEQ ID NO: 79604 - DNA, 329 bp, Zea mays
aggttcctcaggtgctgagcagtcgccggcggcgaccgccggtgtcggagatgaaggagagaagcggctccagggcggcggtggacgagcgctacgcgcagtggaagtcgctcatccccgtcctctacgactggtttgccaaccacaacctcgtctggccatccctctcctgccggtgggggccacagtttgagaaagctacctacaagaatcgtcagcgcctgtacctatctgaacagacggatgggagtgtgcctaatactctggttatcgcaaattgtgaagttgtgaaacctaaggttgcaactgctgaacatatctcacagttc

SEQ ID NO: 79605 - DNA, 378 bp, Zea mays
ggccgacccacgcatccaatcacaatacgaaacgaattaatccccaatcaacacagcaagtcagcaacaagcaaagcagcgacccgagagatggacgcgaggatgttcgggctggagaccccccgggtggcggcgctgcatcacctgctggacgtgcccgacggcgacaaggcgggcggcggcgccacgcgcacctacgtccgcgacgcgcgcgccatggcggccaccccggccgacgtcaaggagctcgcgggagcgtacgcgttcgtggtggacatgccggggctgagcacgggcgacatcagggtgcaggtggaggacgagcgggtgctggtgatcagcggcgagcggcgccgggaggagcgcgaggacgccaag

SEQ ID NO: 79606 - DNA, 408 bp, Zea mays
atctctgccttcctgcctgcttccctccctccgtcagatccccgctcgggttgccatggcggaccagctcaccgacgaacagatcgccgagttcaaggaggccttcagcctcttcgacaaggacggcgacggctgcatcaccaccaaggaacttggcactgtgatgcgctcattggggcagaaccctactgaggctgagcttcaggacatgatcaatgaggttgatgctgatggcaatggaaccatcgactttcctgagtttctcaacctgatggcacgcaagatgaaggacaccgactctgaggaggagctcaaggaggccttccgtgtgttcgacaaggaccagaacggcttcatctccgctgctgagcttcgccatgtcatgaccaacctaggcgagaagctgac

SEQ ID NO: 79607 - DNA, 352 bp, Zea mays
acccacgcgatcaaatatgatacaggaattattaccacaacaaactaagggggtgtttggttttagagacgactttttagtccctagtaaacaaactctacctattcatggaggctaactgactcatagacatagataggtacagctgcagcactactaatgaggttgtaaatgttatgcagcacattggggtagaacgttactgaggctgatcttcaggacatgatcaatcaggttgatgatgatggcaatggaatcatcgtctttcctgagtttctcaaacttatggtacgtaagatcaatgacaacgactctaaagatgagctcaaggaggccttccgtgtgttcgaca

SEQ ID NO: 79608 - DNA, 359 bp, Zea mays
catccttattgagcttagtgtttgttccatggactcggaaggagtagcagcaaaggtggcagatgagactactaaaccggcaagccaagaagacggcgagagcaaggccgggatgactgatctgctgatgctgaccgacaagtcgcagctgcaggcgctagcgatgctgctgcggaacaacgaggagctcatgatgagccaagcgatcaagtcggagacggagcgcgttgagtacctcaagacggtgagcgactgctacacgcggacaatgaagctccttgacgactccatggcggccaggatcacgtacgagcgttcgggcggaacgaagagcctcgtcgcccgggacatggacgact

SEQ ID NO: 79609 - DNA, 363 bp, Zea mays
atccacaagacgtggcccgaggacgcgttcccgctgcagcccgtgggccgcctggtgctcaaccgcaacatcgacaacttcttcgcggagaacgagcagctggccttctgcccgggcctcatcgtccctggtatctactactccgacgacaagctgctgcagaccaggatcttctcctactccgacacgcagcgccaccgcctcggccccaactacctgctgctaccggccaacgcgcccaagtgcgcacaccacaacaaccactacgacggatccatgaacttcatgcaccgccacgaggaggtcgactacttcccctccaggtacgacgccgtcaggaacgcgccgaggtacccgattccg

SEQ ID NO: 79610 - DNA, 409 bp, Zea mays
acaatcacaacgaacagaagctctcgatctcaccgacaccgaggaagaagagatcaatggcgtccgagcagggagtcgtgatcgcgtgccacagcaaggctgagttcgacgcccacatgaccaaggcccaggaagccggcaagctggtggtcatcgacttcactgccgcctggtgcggtccatgccgcgccatcgccccactgttcgtcgaacacgccaagaagttcactcaggtcgtcttcctgaaggtggacgtggacgaagtgaaggaagtcaccgcggcctacgaggtcgaggcgatgccgaccttccacttcgtcaagaacggcaagacggtcgcgaccatcgtgggtgccaggaaggacgagctcctggcccagatcgagaagcatgccgcgcctgcgcctgc

SEQ ID NO: 79611 - DNA, 402 bp, Zea mays
acacatccatccttattgagcttactgtttgatccatggactcggaaggagtaccagcaaatgtggcacatgagactactaatccggcaagccaagaagacggcgagagcaaggccgggatgactgatctgctgatgctgaccgacaagtcgcagctgcatgcgccagcaatattgctgcgtaacaacgaggagctcatgatgagccatgcgatcaagtcggagacggagcgcgttgagtacctcaagactgtgagcgactgctacacgcggacaatgaagctccttgactactccatggttgccaggatcacgtactagcgttcgggcggaacgacgagcctcgtcgcccgggatatggacgactacgtcttctacggcctcaacgcgtgcttgcagaacg

SEQ ID NO: 79612 - DNA, 406 bp, Zea mays
  unsure (1)..(406): unsure at all n locations
agaagaagaagaaacaagccataccatagcacacaccaaaggttactcagtcacatggcaacatccagcacgggctgtctcgtcttgctctgccttgcgtctcccctcctcctccttcccagtgcggtggtccttggccacccatggggtggcggcggcggcttgtccccacagttctacgaccactcgtgccccatggcggagaagattgtgcagtccgttgtggcgcaggctgtggccaaggagaccaggatggcggcgtccttggtcaggctgcatttccatgactgctttgtcaagggctgcgacgcttcggtgctgctggacaacagcagcagcatcgttagtgagaaagggtccaacccgaacaggaactccatcanggggttcgaggtggtagaccaga

SEQ ID NO: 79613 - DNA, 341 bp, Zea mays
ggggttcaataaagctgtattttctgttttccaagacttggatttctcatttcttgagatgaacccattcaccttggtaaatggtgaaccgtatcctctggatatgagaggagaactacatgacacagctgctttcaaaaacttcaataagtggggcagtattgtgtttcccctaccatttggtagagttctcattacctccgaaagttttatccatcaactggttgataagacaagtgcttctctgaaattcatggtactgaacccaaaaggacgcatctggacaatggttgcatgtggtggtgctagtgtcatatacgcagacactgttggtaatttgg

SEQ ID NO: 79614 - DNA, 371 bp, Zea mays
  unsure (1)..(371): unsure at all n locations
acgttcaaccgctctgtcggcgctcacagccggccacgccaccatgctgccaccggccgcgcgccttgcggcccgccgcctcctcggcctcgcctccgcatctgcgtcggaagccgccggccgccgggtagcttcctctccgatcgcttccgcaggctactccgccgccgcgtccaggggctccgtctccagcaccaggcccttctccacggctcttaactaccaccttgattccccggagaacaagccggacatgaaatgggagttctcacaggcgaatatgaagaacgtcaatgagattctgtctcactatccaagcaactacaagcaatctggtattattccgctgcttgatcntgcacagcagcagc

SEQ ID NO: 79615 - DNA, 347 bp, Zea mays
agcggcgggtctgggaacgtgtaccgcgtgaagctcggcaacggcgcggtggtggccgtgaagcacgtcacgcggggggtggcgacgagcacggcgccgtccgccgccatgctgcggccggcggcgtcggtgcggtgccgcgagttcgactcggaggtggggacgctgagcgccatccggcacgtgaacgtggtgaagctgctgtgcagcatcaccagcgcggacggcgcggcgagcctgctggtgtacgagcacctccccaacggcagcctgtacgagcggctgcacggggcggcggggcggaagctgggcgcgctcgggtgggtggagcggcacgacgtggcggt

SEQ ID NO: 79616 - DNA, 382 bp, Zea mays
actcatttctgcatccccctcccgccgcgccgcctcaccgccgccggagaagatgggtcgcgtgatccgcgcgcagcgtaagggtgcggggtccgtgttcaagtcccacacccaccaccgcaagggccccgcccgcttccgctccctcgacttcggcgagcgcaacgggtacctcaagggcgtcgtcaccgacgtcatccacgaccccggccgtggcgcgccgctcgccaaggtcactttccgccacccattcaggtacaagcaccagaaggagctctttgtcgcagccgagggcatgtacacgggccagttcgtctactgcggtcgccgcgccaacctctccatcggcaacgtgctgcccctccggcggatccccgagggt

SEQ ID NO: 79617 - DNA, 341 bp, Zea mays
tgcaacagccaagtgcaagtgatcgagctcccccctcctcatcagtcgctaggcacagcgcacttgcaggatggcgcaggtctctaagacgcttctccttgtggccctggtgttcgtgtcgtcggcggcggtggagctgtgccgcgcgatcgacttcgacgagcgggacctggcgtcggacgaagcgctgtgggacctgtacgagcggtggcagacgcaccaccgggtgcaccggcaccacggcgagaagggccggcggttcgggacgttcaaggagaacgtgcgcttcatccacgcgcacaacaagcgcggcgaccgggcctaccgcctccgcctgaaac

SEQ ID NO: 79618 - DNA, 402 bp, Zea mays
agagccggagctggaaaagaaggtgaaattcgtgtacactgacaatcctgagagccagaggataatggccgacatgtttgacatggagaagctggactccgcatttggtggccgcagcgcgtctggcatcgacgttgccaagtattccgagagaatgcgaacaggagatcagattaggggtcttcgctaacggcaaatggaatactgctatctcacagttcgtcaagaaactgttcagataacaagataattaaaatggatcactacggaattctagtggttacatcacaacagaccaggatgaattatgatgtctgctagatatattattagctctgaatgattgggataccaggtttttgatgatccgtgtaatgagatgacatgacaatataaaaaaca

SEQ ID NO: 79619 - DNA, 411 bp, Zea mays
gacccacgcatccacccacgcgtccgggctgtgcaaggtcatcaaggaggttctgggtgacaaagttgagaaggtggtggtgtctgatcgcgttgtggactcaccgtgctgccttgtgactggcgagtatggctggaccgccaacatggagaggatcatgaaggcacaagccctgagggactcgagcatggcgggctacatgtcgagcaaaaagacaatggagatcaacccagagaaccctatcatggatgagctccgcaagcgtgccgaggctgacaagaatgacaagtcagtcaaggatctcgtgatgctgctgttcgagactgctctcctgacctccggcttcagcctggatgaccccaacaccttcggcaaccggattcaccgcatgctcaaactcggtctgagcat

SEQ ID NO: 79620 - DNA, 295 bp, Zea mays
atgtgctgtgtcatcaatgtggttctggctgacacagttgagaacgtcgtggtgtctgatctcgttgtggactcaccgtgctgtcttctcacgggtcactacggctagaccgctcccatggataggatcatcaacgcacaggccttcacggactcgggtatagaggtctagatgtcttcacactaggcaatggccatcaacccatagaatcctatcgtcactgagctgccgaagcttgcccacgctgacatcagtgacaagcctgtctgggatcacgtgatgctgctgttccata

SEQ ID NO: 79621 - DNA, 407 bp, Zea mays
gacccacgacatccacgtgccgcgtagggcgggtagtaacagtcacatcctggccgggacgggatctcactgagggttgggaaatctttcacttgcatcgttcgctttgacactgaggtggagctggcgtacttcaaccatggaggcatcctcccttatgtcatccgcaacttggcagctgcgcataactgaggcaagatcacacaccgtttgacccacaatggcagtggcaggctccatgttcccagggctagcgacctggttctcaatgtagtgacatttgtgatggatctaggggtctctttgtcgattcagcccataaataaagtgtgaaataaaagccgcaggtggaggcaggaacctgctgattgagggaacagttttgcctgtgtttggttacatgaaaa

SEQ ID NO: 79622 - DNA, 393 bp, Zea mays
ggaaattttcacttcgccccaggcaaaggattttatgaatcaaacatagatgtgcctgagctgtcattacttgagggtggtttcaacattagccacaaaataaacaaactgtcctttgggacagaattccctggtgttgttaatccacttgatggtgctcagtggacacagccagcttcagatgggacataccagtatttcataaaagttgtccctacaatatacactgatattagaggacgcggtattcattcaaaccagttctcggtaacggaacattttagagatggaaatgttcgtccgaaatcccaacctggagtatttttcttctatgatttctcacctataaaggtgatattcacagaagaaaatagattcctactccactacctg

SEQ ID NO: 79623 - DNA, 395 bp, Zea mays
acggacgcgtgggcggacgcgtgggttccccgccccaccaggtacccacgcgttcctcagatcagatcggcaaggccaatccgaaatctcgagcgctcgcgccggcgaccacagcaaagaggaggccgcagcacgacagcgccccagggttcctactctcgtcgcagcggcagcactggtagcggcagcagtgaggggaagatgtcgtcggtgttcagcggcgatgagaccgcccccttcttcggcttccttggcgccgccgccgcgctcgtcttctcatgcatgggggcggcgtacgggacggccaagagtggcgtcggcgtggcgtccatgggtgtcatgcgcccagagctcgtcatgaagtccaccgtgcccgtggtcatggctggtgtgcc

SEQ ID NO: 79624 - DNA, 359 bp, Zea mays
gcaaagcggccaagtggctcatctggcagctccacccgctggtcacgctcggcctccccatggtcctggaggagccgctgctccacacgttccacctcccgcctttcctcgtcaagggcgactacagggcgctgtacaagtacttctccacggtggcgaagcaggcgctggacaccgccgagggcctgggcctgtcgcgcgaggaggcctgccacaacctcctcttcgccaccaccttcaacagctacggcggcctcaaggtgctgttcccgggcctgctggccaacgtggccagcggcggcgagaagctccacgagcggctggtggccgagatccgcggcgccgtggccgacgccggc

SEQ ID NO: 79625 - DNA, 415 bp, Zea mays
acgaaaccaagcaacaattgagcgatcgatccatcgcctctctctctctcagcaatctatccgcgacaactaagcattcgattctccgacaacaacaagcagggcaatggcgtctgcggacgtgcacatggctggcggtgcggagacggagaccttcgcattccaggccgagatcaaccagctgctctccctcatcatcaacaccttctactcgaacaaggagatcttcctcagagagctcatctccaacgcatcggatgcgcttgacaagatccgcttcgagagcctgacggacaagtcgaagctggacgcgcagccggagctcttcatccggctcgtcccggacaaggccagcaagacgctgtccatcatcgactccggcgtgggcatgaccaagtccgaccttgtcaacaac

SEQ ID NO: 79626 - DNA, 386 bp, Zea mays
atcagaaccagtgccaagctgcccaaattggtttcctccaaaggaataaacatcaccatctacggatgtacatacagtgtgccacagacccgcggcaacgtcttgcatcttggatcccaggatagaggatacacacgttggacttaaaacatcatctgtattcccttgtccgcactgtccatacagcccccacccaaatgtaagaagagctcctgaatctgttactgcagcactgtgacgacctccacaagcaatggccctcacacaatttcccaagactttactgacatgtccttcagcagccttgttacctttcatagctgatgggcgatccttgctgtatagtgctgattcaatgcacggtacaagatggggagaagaaacag

SEQ ID NO: 79627 - DNA, 385 bp, Zea mays
  unsure (1)..(385): unsure at all n locations
ccccagaccacagcgcgacagtgagtacagcagcagcagctgagagcgtgagagcgtgcgaagcaggagggaggacaagaagaagccgatggcggttgtgagcggcagcggcgggaggctgaacccctgggcggagcccttcgtgccttccggggcgcggtaccgcggcctgcggaccgtggaggcgacgccggagcaggaggtggaggacttctcccccgagtggtggcgcctggtgtccgcctccccggccttccgcgaccgctggctgcgcgagtacggcgcgctcggcctactcgacgccgaggacgacctggacgacgacgtcgacagcttcctcnccgacgacttcttctcgcctccggccccgcgctacgagagcgag

SEQ ID NO: 79628 - DNA, 366 bp, Zea mays
  unsure (1)..(366): unsure at all n locations
cgcgtctcgtccccgtccgcatccgcgtccgcgccgccttttcgtcnccgcgtcggcgtcgcggctccactgggcgtacgcgtcaccggcggaaggcgagggcaggcggtggtcgcgatggcgtccgccgacgcgcgcttggcggggattgcctcctccatccgcgtcatccccgacttccccaagccagggatcatgttccaggacatcacgacactgctgctcgaccccaaggcgttccgtgacaccatcgacgtcttcgttgagcggtacaaggaccaagggatcaccgtagttgctggtgtggaagctagagggttcatttttggtcctcctatcgctctagccatcagtgcgaaatttgta

SEQ ID NO: 79629 - DNA, 421 bp, Zea mays
aaagcctccggttgcccgaagcagtcgcatctgctcttcgtggcaccgaactcttggagcaatcaacttttgaatcgtcgacaggacagccgcgcgcgtcgtggcgaaggctgcaggatggagcagcagacgaagacgacgacacagcaagagggcaaaggcctcgccaccatggagcggtcgatcgtggacaagccgccattcacgctagcggacctcaggaaggccatcccgccgcactgcttccagcgctcgctcatcaggtcctgctcctacctcgcccacgacctcgccatcgccgcggggctcctgtacttggctctggccgtcatccccgccctcccgggcgtcctcctccgcgccgccgcctggccgctctactgggcggcgcagggcagcatcatgttcggcgtgtgggtga

SEQ ID NO: 79630 - DNA, 364 bp, Zea mays
gaaaaactagccgaagcaaacccattccacaagcacctggtgggatcatctcatcatcagaaacaaagagagagattccgtgcccacttgttgtagtagattgtgaggattgaggagtagcaaagagaagcagccatgaatccggacaacttcacccacaagacgaacgaggcgatcgtgggggcgcacgagattgcggtggaggccggccacgcgcagctcacgccgctgcacctggccgcagtgctggctgcggacaagggcggcatcctgcggcaggccatcacgggggcgtcggggggcgacggagcggccggggactcgttcgagcgcgtgctgaacaactcgctcaagaagctgccgt

SEQ ID NO: 79631 - DNA, 407 bp, Zea mays
acccacgcgtccgcaaggaccttcggcgcccgttcaggatccacatcttcccgagcgagttcttggttgacctcttcccccttcggaccacctccaaggctcttggtgtagcttgccactctcaccaatcaagttttcatgtctgatctcgacattcagatcccaactgccttcgatcccttcgctgaggccaatgctggggactctggtgcggcagcagggtcaaaggactacgttcacgtgcgcatccagcagcgtaatggtcgcaagagcctgactaccgtccagggattgaagaaggagttcagctacagcaagatcctcaaagatctcaagaaagagttctgctgcaatggtacagtggtccaggacgcagaacttggacaggtcattcagctccagggtga

SEQ ID NO: 79632 - DNA, 309 bp, Zea mays
cagcgatccgaagctcaatcaattcactcaaacctcttccccaaatcttcgattagattctcgttgacaagaagactagaaccgaacctgaccatgtcgctgatccgccgcagcaacgtgttcgatcccttctccctcgacctctgggacccctttgagggcttccccttcggctccggcagcagcagcagtcacttccccgcgttcccgcggaccagctcggagaccgcggccttcgctggcgcgccgatcgactggaaggagactccagaagcgcacgtgttcaaggccgacgtaacggggctgaag

SEQ ID NO: 79633 - DNA, 373 bp, Zea mays
agggagaatcacctcgaggacgacagtgaggtggacgaagatgacgatgtcatctacaagatacatgttgccgccaacagatatgatttgcgatgttttgaatgactagcaagagctcttcgtgttttcactgggactgaaacaagccctgtattccaagtttcatcaatccctcggggttcaatgcttcagatgcatgttaaaccagagacttcaaaaattagaccgtacatagtttgtgctgtcctaagatgggtaacttttgatgacgcaagatacaacagcttcattgatcttcaagacaaactccaccagaatatctgccggtagaggacactcgttgctattggcatccatgatctggacactctgc

SEQ ID NO: 79634 - DNA, 349 bp, Zea mays
  unsure (1)..(349): unsure at all n locations
agctggacatgctcaccgcgtggagcaacttcagccgccggggcaagcctgaagtggaccatcacgctcttctccctctccaccctgcccaacacgctcgtcatgggcatcccccggctcaagggcatgtacggcgacttctccggcagcctcatggtgcagatcgtcgtgctccagtgcatcatctggtacacgctcatgctcttcatgttcgagtancgcggcgcgcggatgctcatcaccgagcagttcccggacaacgccggggccatcgcctccatcgtcgtcgacccggacgtggtctccctcgancggcgcagggacgccatcgagacggaggccaaggtca

SEQ ID NO: 79635 - DNA, 383 bp, Zea mays
gtcgccatggccgagatctgctcctccttcccgaccactggttctctgtatttctgggctgcacatttggcaggtccagtctggggtccgttggcgtcttggtgctgcgcttggctggaggccatcggcctcattgccgggattggcacacaggcatacgcaggatcccaggtactgcagagcatcatcctgctctgcaccggcaccaacatgggcggtggctacctggcccctcgctggctgttcctggtcatgtacatcgggctgacactgatctgggccgtgctcaacactttcgcgctcgaagtcatcgcgttcctcgacgtgatctccatgtggtggcaggtgatcggtggcaccgtcattgtggtgatgctcccgct

SEQ ID NO: 79636 - DNA, 384 bp, Zea mays
acttggaacttcttgctgaccttccttggcaaaaggtcagtgaagaaagggagcttgaccttagagttgcgaaagagagccttgaccaggatcattatggactaacaaaagttaagcaaaggattattgagtatttggctgttcgtaagcttaaacctgatgccaggggtccagtgctgtgttttgttggaccacctggtgttgggaagacatctttggcctcctccatagcaaaggccctgaacagaaaattcataagaatctctcttggtggtgtaaaggatgaagctgatattaggggccaccgaaggacatacattggaagcatgccagggagacttattgatggactaaagagggtatctgtgagcaatccagtgatgc

SEQ ID NO: 79637 - DNA, 419 bp, Zea mays
atcagcttgggctagatagatcaattgtttgtggtttgttggatgaacttgaacaacttcttaagggaattgctatgatgaaagagctgactcttaggacacgagattatctagtttcatttggtgaatgcatgtctacaagaatatttgctgcacttttaaacaaaattggagtaaaagctcggcagtatgatgcatttgatcttggctttataactaccgatgatttcacaaatgcggatattctggaagcaacttatcctgctgttgcaaggaggctacatgtggaatggattaatgatcctgctatacctatagtcactggctttcttggcaagggatggagatctggtgcaataactaccttgggcaggggtggtagtgacttgacagctacaaccattggcaaagccttggga

SEQ ID NO: 79638 - DNA, 400 bp, Zea mays
aggctcaaggctgaccccaagaagtaccgcaagatgaaggagaggcttgtcggcgtctctgaggagaccaccacgggtgtcaagaggctctaccagatgcaggagaccggcgccctcctcttccctgccattaacgtcaacgattccgtcaccaagagcaagtttgacaacctgtatggttgccgccactcgctccctgatggtctgatgagggccactgacgttatgatcgccggaaaggttgccgtggtctgcggatacggtgatgtcggcaagggttgtgctgctgccctcaagcaggctggtgcccgtgtcattgtgaccgagatcgaccccatctgtgccctccaggctctgatggagggtcttcaggtccttcccttggaggacgttgtctctg

SEQ ID NO: 79639 - DNA, 417 bp, Zea mays
gggctcgagcacgcgtcaacgtcgacctcctttactcttttctcctcgtgtccgccgctacacgcgccgccggaaccctagcctccgccgccacaggcagccgggatggagaaaggagcctcggaggcgtcgcccccttgcgctcgctgcggcaagcccgctcagcttcaatgccccaagtgtgtcgaacttaagttaccgcgtgagaacgcagctttctgcacacaggattgttttagggcagcatggagctctcacaaatctgttcacccaaagcctggtgcaccggcatcccagcagtctccagaaggttggaaatattgtttgagaaaagggcgggaacgtgcattgcaacttcctcgttttgattggacaggtccattgagaccacatccaatatcaaagattcgtgtggtg

SEQ ID NO: 79640 - DNA, 372 bp, Zea mays
agcagaccaacctagccacccagggagaaaggccaaaagggaggggagagtgtcgtcatggcttccattgtcgcttccaggagggccgttcctctagttcgcgctctggagaagctcatcgcagcgtcctccgcgcccgggactggctccgccctcaggccggtggcagtcgccggcggcctccgtggctacaacaccggcgctccgctccgacgctacgagggggccgagtcggaagacgatagcgtccgcgagtacgatgggcggcacggcggccgggactacgccgtgcccagcctgttctcagatattttccgtgatccgcttagtgcgccgcacagcattggccgcctgctgaacctgatggacgac

SEQ ID NO: 79641 - DNA, 409 bp, Zea mays
accgttgcggcgcggcaccacctgaacccgatcaccacccacaccatgttgtcccgattgccggcgacggtgagccttcttcgccggtcgctccgagaaccgcgcggcttcagctcctctgtgctggcttcatctaaggaaacggccgacggaaagctggtggcgtcggtgcttttcgagcgtctccccgtcgtcatccccaagatccaccccgttgtctacgctttccaagaattctcatttcggtggaggcagcagtacagacggcaataccccgaggaggtcctcggcaaggccgacgcgaggggtaagggtgattatcatattgattatgtgcctgctccaagaattaccgaggccgacaaaacaaatgactggaagttcttacaacgagctcctgataataaac

SEQ ID NO: 79642 - DNA, 417 bp, Zea mays
agttttacgtcccggtagatttggaaagaaacattatgtacctttacctggtgcagacgagagagtttcaatattaaaggcacatgctcgtagcaagcccatctcgactgatgttgatttggatgcacttggtcgtcgtgctgagtgcaacaatctcactggtgccgacctagcatcactggtcaatgaagcagccatggcagcactggaagagagactggaattccgtgacaaggggacatcctcactgagttcgtctagcttgattgagatgccgcacttcgaacatgctctatcgaagatcaagccatcagtatctgaacagcaaatcaagaattatgaggcgttgtcaatgagatactcgtcaaactgattcatcaccagctgtccacatgttagtgtgtatacgaggacaac

SEQ ID NO: 79643 - DNA, 420 bp, Zea mays
  unsure (1)..(420): unsure at all n locations
ggacaagtgcgagtgcaagaacacgctcatcgagggaggcggcatcggcgtcgccatcgaaacggcgacgtcgcacatcaaggtggagcccgcggccggcggcgggagcgtggtgaaggtcgaatccacttacaagctgctgccgggcgtggaggtgaaggacgagatcgccaaggccaaggagtccgtcaccgccatcttcaagggtgccgaggcctacctcgtcgccaaccccgacgcctacaactaaaccagtggactgggatgagcttcatttcccttgcggcttgtttggatatagaagggtattgtgtacggagattgggttttctttccccttctttttttttcatacanaataaaataaagctgctctaaagcagcgtgcggtttttggactcgagatggtatgagtatatg

SEQ ID NO: 79644 - DNA, 428 bp, Zea mays
tgcaaatcctttgaacctttttcctcagggtgttccaagtggtgggtccaacccaggtgttgttccaggtgcaggatctggtgctcttgatgccttgcgacagcttccacagtttcaagcactccttcagttagtccaggctaatcctcaaatcttgcagccaatgcttcaagagctaggtaaacaaaacccacaaattctgcggttgattcaggaaaatcaagctgagtttctccgcttggtgaatgaatctcctgagggtggtcctggagggaacatactaggtcaactggcagctgctgtgccacaaacgctgacagttaccccagaggaacgggaggctatccagcggctcgagggaatggggttcaaccgtgagcttgtgctagaagttttctttgcatgcaacaaggacgaagagcttacag

SEQ ID NO: 79645 - DNA, 403 bp, Zea mays
cccacgcgtccgcccacgcgtccgcccacgcgtccgcccacgcgtccgcaaacttggcattcttgcctgttcttaattattgccaggacaggagaaacaaagatgaggcctcagctgatactcgtcggcactctggctgttctcgccatcctcgcagctctcggcgaaggctcgtcgtcctggccctgctgcaacaactgcggtgcttgcaacaagaagcagccgccggagtgccagtgcaatgacgtgtcggtcaacgggtgccatccggagtgcatgaactgcgtcaaggtcggtgcaggaattcgtcccggcatgggccatggccccgtcgtcacctaccgctgtgacgacgttctcacaaacttctgccagagcagctgcccggaggcgccggcgccat

SEQ ID NO: 79646 - DNA, 386 bp, Zea mays
  unsure (1)..(386): unsure at all n locations
tgcacttcatgaaattacccctgcatttggtgcttccaccgatgatctcgaaagatgcagattgcgcggtattgttgattgtggcaaggcacataagcacatttatcaaagagctatgctcctcgtagagcaagttaaagttagcaaaggtagcccactcgtgacttgcctattggaaggtcctgctggaagtgggaaaacggctatggcagcaagtgttggcattgacagtgattttgcatatgtgaaaattatatcagcagaaacaatgattggtttcagtgaaagcagcaaatgcgcacagatttgcaaggtttttgaggacgcatacaagtctcagttcagcatgataattcttgatgatatcganaggttactggagtatg

SEQ ID NO: 79647 - DNA, 403 bp, Zea mays
ggcaccacacctcttcttcttcttcctcctcctcctagcacagctagcgcctgctccccttcgcctgtgatcatgtcttgcagcagcggcaagtgcgactgtggctccagctgctcctgcggcagctcatgcaactgcatgtcccctaacgtggagaccgccgccgccagcagcatcaagaccacggtcctcgccgcgccgaccaccaaggccagcgccggcggcttcgaggcggccaccgagggcggcggctgcgactgcaacacctgcaactgcggcaccagctgcggctgctcctgctgcagctgcaactgagccggtcaggcgatggcgcacgagagtcgagaggacgacgacgagtcgtataaatataatagcggcgtctaaataagatcctgtcaac

SEQ ID NO: 79648 - DNA, 421 bp, Zea mays
gcaccccacgacttccgtccgagtctgagctcatctccacgcgccgccgccgccgctcgacgcccaccgcgcagccatggcggaacagactgagaaggctttcctcaagcagcctaaggtgttcctcagctcaaagaaatctggcaagggtaagaagccaggcaagggtggcaatcgattttggaagagcattggccttggtttcaagactcccagggaagcaattgaagggacctacattgacaagaaatgtccattcactggaaccgtttctatcagaggcagaattattgctggaacatgccacagtgctaagatgaacagaaccatcattgttcgcaggaactatctccactttgttaagaaataccagaggtatgaaaagaggcactccaacattccagctcacatctccccatgc

SEQ ID NO: 79649 - DNA, 407 bp, Zea mays
gtttcattgattcttgaagagatcgagcttcttttgcaccacaaggtcgaggatgtcttgcaactgcggatcaagctgcggctgcggctcaagctgcaagtgcggcaagaagtaccctgacctggaggagacgagcaccgccgcgcaggccaccgtcgtcctcggcgtggccccggagaagaaggccgcgcccgagttcgtcgaggccgcggcggagtccggcgaggccgcccacgcctgcggctgcggtagcagctgcaagtgcgacccctgcaactgctgatcacatcgatcgacgaccatggatatgattattatctatctagcttgtggtggtggttgaacaataataagcgaggccgagctggctgccatacataggtattgtgtggtgtgtgagagagaga

SEQ ID NO: 79650 - DNA, 380 bp, Zea mays
agctcaaggctgaccccaagaagtaccgcaagatgaaggagaggcttgtcggcgtctctgaggagaccaccacgggtgtcaagaggctctaccagatgcaggagaccggcgccctcctcttccctgccattaacgtcaacgattccgtcaccaagagcaagtttgacaacctgtatggttgccgccactcgctccctgatggtctgatgagggccactgacgttatgatcgccggaaaggttgccgtggtctgcggatacggtgatgtcggcaagggttgtgctgctgccctcaagcaggctggtgcccgtgtcattgtgaccgagatcgaccccatctgtgccctccaggctctgatggagggtcttcaggtccttccc

SEQ ID NO: 79651 - DNA, 349 bp, Zea mays
caccgaggtgcgcaagaacggcacctgcgcctggctgaggcccgacggcaagacccaggtgacggtggagtacgtgaacgagggcggcgccatggtgcccgtccgcgtgcacaccgtgctcatctccacccagcacgacgagaccgtcaccaacgacgagatcgccgccgacctcaaggagcacgtcatcaagcccgtgatccctgagaagtacctcgacgagaagaccatcttccacctcaacccgtccgggcgcttcgtcatcggcgggccccacggtgacgccggcctcaccggccgcaagatcatcatcgacacgtacggcggctggggagcccacggcggtggc

SEQ ID NO: 79652 - DNA, 387 bp, Zea mays
cactcatcattagctctgtgggtatcatagcttgcttgataaccactctttttgcaactgatttctttgagatcaaggctgtagatgaaattgagccggctctcaagaagcagcttataatttccactgctgtgatgactgttggcattgcacttgtcagttggttagggcttccatatacattcacaatcttcaactttggtgtgcagaagacggtgtataactggcaattattcctatgcgtggcagttggtctgtgggcaggactagttattggatttgttacggagtattacacaagcaatgcatacagtcctgtacaggatgttgctgactcctgcagaactggagctgctacgaatgtcatctttgggcttgctctgggat

SEQ ID NO: 79653 - DNA, 376 bp, Zea mays
cggacgcgtgggatcgataccatgaagaagtacaacgctggtacgaacaaggcggcatccagcggtacatccctcaacaccaagcgcctcgacgacgacaccgaaaacctcgcccatgagcgagttccaagtgatctgaagaagaatctcatgcaagcaaggctcgataagaagctgacacaggcacaacttgctcagatgataaatgagaagccacaggtgattcaggagtatgaatcaggcaaggcaatccccaaccagcagatcattagcaagctcgagagggccctgggaaccaagttgcgtggcaagaaatagctttcctacgagtttgtgtcccggagcatcataatagggggaaagacaagcaagctgt

SEQ ID NO: 79654 - DNA, 395 bp, Zea mays
acaggtcaccaggctatggtgtatcgttagttgctgagaccactacgggatgcctgctctctgtagatgtcactgtgagttatcctagtgttgatgaaataaatgaagaatctgagaagcctgagctgacttctccggaggatcttggtgttcaagctgcatcaatgctactagaagaggtggctcaaggaggtgttgttgattctacacatcagggcctcctatttattctgtgtgctttatgcccaccggatgtatcaaaggttcgtgtgggacagttgactccatatggtatagagacacttcgaaacatcagagattttcttgacgtcaagttcatcatcaagcctgatcccaattcaaacacggttacttttaaatgtgttggcgcggga

SEQ ID NO: 79655 - DNA, 409 bp, Zea mays
cccaccccgcagccgccctagcacccgcgacgagcaggatctgcccagttgctcttgcggtagttcccccaactgtcaccatgcagaacgaggagggtaagactgtggacctctatgtccccaggaagtgctcggccacaaacaggatcatcactgccaaggaccatgcctctgtccagatcaacattggccacttggatgcgaatggcctgtatgatggtcacttcacaacgtttgctctctctgggtttgtccgtgctcagggtgacgcagacagctccttggacaggctgtggcaaaagaagaaggctgatatcaagcagtagattttacatctagtttaccaagaattggacaccgccttagctatgttttgaattcatgtcactatatgcaatgttgtgatttc

SEQ ID NO: 79656 - DNA, 404 bp, Zea mays
cccacgcgtccgcccacgcgtccgctttgaccgcagacaggactgtgacaagcttcaaaatagattcttatcacgcaatccagcaaaggttatcttgtcaagcatggaggttgttgcgcaatcaatgggatttaagacacacattcgcaattataagatgagggtggaaggtctaaatgccgacaagactagtcatctctcagttatggttgaagttttcgaagttgctccatcaatcttcatggtagaactacaaagagcagcaggagatacttcagagtataacacgttcgtaaataactactgcggcaaattagatgatatcatctggaaatttccaactgagaagggaaaatcaaggataccccggttatcaaagtctcattcataatctagtgctgtgt

SEQ ID NO: 79657 - DNA, 399 bp, Zea mays
ggaaggtctcgccatggtcaacggcacggccgtgggctctggccttgcgtccaccgtgctcttcgaggccaacgtgctcgccgtcctggccgaggtcatctccgcagtgttctgcgaggtcatgacgggcaagccggagttcaccgaccacctcacgcacaagctgaagcaccaccccggacagatcgaggccgccgcggtcatggagcacatcttggaaggcagctcctacatgaagctggcgaagaggctcggcgagctcgacccgctgatgaagccgaagcaggacaggtacgcgctccgcacctccccgcagtggctcggcccacagatcgaagtcatccgcttcgccaccaagtccatcgagcgcgagatcaactccgtcaacgacaacccgct

SEQ ID NO: 79658 - DNA, 390 bp, Zea mays
ttccatcatcccccttgcaagtatagtctcggcggctctagaagacgatgggcaaggacgacgtgatcgagagcggcgctggcggcggcgagttcgctgccaaggactacacggaccctcccccggcgccgctgatcgacgcggctgagctggggtcctggtcgctgtaccgcgccgtgatcgccgagttcatcgccacgctgctgttcctgtacatcacggtggccaccgtgatcgggtacaagcaccagacggacgcgtcggcgtcgggtgccgacgcggcgtgcggcggcgtgggggtgctgggcatcgcctgggccttcggcggcatgatcttcgtcctcgtctactgcaccgccggcatcctcgggggccacatcaaacccgccg

SEQ ID NO: 79659 - DNA, 398 bp, Zea mays
  unsure (1)..(398): unsure at all n locations
tgattggtgaagtcttgtagttgcatatggttgttcattttctttcttaacacttgctttagacttgaatgaattaagaagggggaaacacttttgtgggtgtaaataatttagttcaagcaataggtaatccaacgatcatgatgcttgttatggtttagtagtagcttatctatgcttttgtgctcgcttttacctgtggttgcatatcaagtattattaaaatgccttgttgtctaaatatgatatattgtgttgggggccttcggcttccgaaggtcctcaaaaacatgatttaacaatgtttctggagtataatgtgtgaacaggtatcttcggacttgaatcagaaagggagaagctcanaagatacgaaagttgacacagtgccgaagctg

SEQ ID NO: 79660 - DNA, 357 bp, Zea mays
attcactcaaacctcttccccaaatcttcgattagattctcgttgacaagaagactagaaccgaacctgaccatgtcgctgatccgccgcagcaacgtgttcgatcccttctccctcgacctctgggacccctttgagggcttccccttcggctccggcagcagcagcagtctcttcccctcgttcccgcggaccagctcggagaccgcggccttcgctggcgcgcggatcgactggaaggagactccagaggcgcacgtgttcaaggcagacgtaccggggctgaagaaggaggaggtcaaggtggaggtcgaggacggcaacgtccttcagatcagcggcgagcgcaacaaggag

SEQ ID NO: 79661 - DNA, 399 bp, Zea mays
gttcgcagtgggcagtggcagccagccagtgagctagcctcccgagccctatctatccttttctcggcacctcgcgggtctcccgtccgccccgtcccgcattcgtatcctctcctcactctcgccgccgccgcttcccctgcgccccgagccaagatgaatgttgaaaagctcaagaagatggcaggtgctgtgcgcactggggggaagggtagcatgcgcaggaagaagaaggcagtccacaagactacgaccacagatgataaaaggcttcagagcaccctgaaaagaataggagtgaacaccattcctggtattgaagaggtcaacatctttaaggatgatgttgttattcagtttgtgaatcctaaagtgcaagcttcaattggtgctaataca

SEQ ID NO: 79662 - DNA, 426 bp, Zea mays
acccacgcgtccgcaaggaccttcggcgcccgttcaggatccacatcttcccgagcgagttcttggttgacctcttcccccttcggaccacctccaaggctcttggtgtagcttgccactctcaccaatcaagttttcatgtctgatctcgacattcagatcccaactgccttcgatcccttcgctgaggccaatgctggggactctggtgcggcagcagggtcaaaggactacgttcacgtgcgcatccagcagcgtaatggtcgcaagagcctgactaccgtccagggattgaagaaggagttcagctacagcaagatcctcaaagatctcaagaaagagttctgctgcaatggtacagtggtccaggacccagaacttggacaggtcattcagctccagggtgatcagaggaagaacgtctcg

SEQ ID NO: 79663 - DNA, 428 bp, Zea mays
  unsure (1)..(428): unsure at all n locations
gggagggtgaagcaccgccgctgaccgctgtccccggctccccgccgccgcacaaagacgagaggaagaggttcccggcggcgccacgactatgtcgtcgatgatgaacgcgctggcgaactggctggcgaacccgcgccgcaacccgctggcgcgcctccacatgcacgccgtctcctcgcgcctcaggaaatacggactgaggtacgacgacctctacgacccctacttcgatctggacatcaaggaggcgctcggtaggctgcctanggaggtggtcgacgcccgcatccagcgcctcaagcgtgccatggacctctccatgaagcaccagtacctcncggaggacctccaggcacagcaggttccattcagaggatatttgagtgacatgttggcgttggtgaaaaaggaaagcgccgagcgtc

SEQ ID NO: 79664 - DNA, 388 bp, Zea mays
  unsure (1)..(388): unsure at all n locations
acggacgcgtgggttgcaaaagcgaagcaagcaatccgaattctctgcgatttctctagatctcgaccacccctactagttttggttcctcctttcgttcgagagagcgtttctagtggcaatggcgaagagcgagggtccggcgatcgggatcgacctcggcaccacctactcgtgcgtcggcgtgtggcagcacgaccgggtggagatcatcgccaacgaccaggggaaccgcaccacgccgtcctatgtcggcttcaccgacaccgagcggctcatcggcgacgctgccaagaaccaggtcgccatgaaccccaccaacaccgtcttcgatgccaagcggttgatcggcangaggttctctgacncgtcagtgcagagtgacatg

SEQ ID NO: 79665 - DNA, 391 bp, Zea mays
gcacgacctgtgagggttcgaaggaagtagcagtgttttttgttcctagagggaggaagagatggcaaagggggaggggccggcgatcgggatcgacctgggaacgacgtactcgtgtgtcggcgtgtggcagcacgaccgcgtcgagatcatcgccaacgaccaggggaaccgcaccacgccgtcctacgtcgccttcaccgacaccgagcggctcatcggcgatgccgccaagaaccaggtcgccatgaaccccaccaacaccgtatttgacgcaaagcggttgattggtaggaggttctcggacccttccgttcagagtgatatgaagctatggccattcaaggtcgtggcgggccctggcgacaagccgatgatcgtggttagctac

SEQ ID NO: 79666 - DNA, 354 bp, Zea mays
gcgaaggagaaagcagaccaacctagccacccagggagaaaggccaaaagggaggggagagtgtcgtcatggcttccattgtcgcttccaggagggccgttcctctagttcgcgctctggagaagctcatcgcagcgtcctccgcgcccgggactggatccgccctcaggccggtggcagtcgccggcgggctccgtggctacaacaccggcgctccgctccgaagctacgagggggcctagtcggaagactatatcgtccgctagtacgatgggcggcacggtagccgggactacgccgtgcccagcctgttcacagatattttccgtgatgcgcttagtgcgccgcatagca

SEQ ID NO: 79667 - DNA, 371 bp, Zea mays
aggcgcccttggcagcaagtgcagacctcaaaacgcgacgtcgtcgaagctggacatctacatagaggacatccggagagggaagcacgggagcgactccggctcgtacgacgcccaaggaaggttcgttcccgagaagttcgaggagatattcgccaggcacgcgaggactgtccccgacgccctgacctcggacgagatcgaccagctgctccaagcgaacagagagcccggggactacagcggctgggctggcgcggaagcggagtggaagatcctgtacagtctcggcaaggacggggacggcctcctccgcaaggacgtcgcgaggagcgtctacgacgggacactgttccaccggctcgcgccca

SEQ ID NO: 79668 - DNA, 405 bp, Zea mays
cggggccgaccaacgcgtcgacttacttgtcacctgaacctggacctgacaatggaataccacctcaccccttcacaacggttccttctcgcaaaattgcccgccgtcgccgtccctctccttcggctccggcttcaccaaggctcatcaattcgccgccgtcgtcgcagcagcagcagcagatcggccaagcagggaggacagctcctgccgccttcgcccccggcgctgcccatcatcggccaccttcacctcgtcagcgacctcccgcacgtctccctccgtgacctcgccgccaagcatggtggggacgacggcctgatgctgctccgtctcggcgctgttcccacctcgtcgtgtcatcgccgcgggccgcggaggcgatcacgcgcacgcacgaccacg

SEQ ID NO: 79669 - DNA, 412 bp, Zea mays
  unsure (1)..(412): unsure at all n locations
caaaattatggcaagattcaaaccttccaaaggtgtcaagaatggctggggtgttccggtcctggtggttgtgcaacataaggaccctgatttcaagacccacccgatgaacttcctgaacgaaaggaccctgaaggggaccttctttggcaactataagccacgcactgatctgccaaatgtggtggagctgtacatgaaaaaggacctggaggtggagaagttcatcacgcacagcgtcccgttcgccgagatcaacaaggcgttcgacctgatggccaagggggaaggcatccgctgcatcatccgcatggagaactagatttcgctgtctagtttgtgatctggcctgngcttggggttaataaaagaagcaatgctagcctgccctttcgatgangaagtacataca

SEQ ID NO: 79670 - DNA, 264 bp, Zea mays
cacgcatctacgatgagtcggtcaacaacgacgagatcgccgctgacctcaaggagcacgtcatcaatcacgtgatgcctgataagtacctcgacgagaagaccatcttccacgtcaagcagtctgggcgctttgtcataggtcggccttacggtaactccggtctcagcggacgcgcgatcatcaatgacacttcccgccgcttgggaacccagagtggtggctccttctcacgctgtgacggcacattagtcgacggcagtg

SEQ ID NO: 79671 - DNA, 368 bp, Zea mays
actttgtacctgagggccagccgctggaaagcgagccaaatgagccactgcgagtgaatgtgctcttcaagcacgtccagaagatgttgactggtgatagcgcggtgattgctgagactggtgactcctggttcaactgccagaagcttaagctgccagaaggctgtgggtatgaattccaaatgcagtatggttcgattggatggtcagtgggtgcattgctcggatatgctcagggtgcgaaccacaagcgtgtgattgccttcattggtgatgggagcttccaggttacagcacaggatgtgtcaactatgctgcgatgtgagcagaacagcataatcttcctgatcaacaacggtgggtacacg

SEQ ID NO: 79672 - DNA, 386 bp, Zea mays
gatggagaggagaggaacagagccaagaaacaagcccggaagatggcaggcggcggattggtgaagcacatcctgctggcaagcttcaaggaggaggtgacgcaggagcgcctggacgagctcatccgaggatacgccgcgctcgtcggcgtggtcccctccatgaaggcgttccactggggaactgatgtgagcatagaaaacatgcatcaagggttcacgcacgtcttcgagtccacgtttgaaagcacggaaggaatcaaggagtacattgagcaccctgcacacgtcgaattcgcaagtgtgttcttgcctgtgctggagaaggtcctcataatcgactacaaaccgacgtcggccaattagcggtagaacatgctctgtac

SEQ ID NO: 79673 - DNA, 399 bp, Zea mays
  unsure (1)..(399): unsure at all n locations
ggcccgggcccccggacccggaaaacaccaagggaatccaaccaaggaaaccttggattgtggactacaggggtaaagatcgattgagcatcgctgcaccatgcgcccttcaatctgctgtgcacctctttttcttctgctactattacatttggcatttgctagacctctctttcctctaccgagtaagacaaagaatgaagagaagaagcccatacagacgtttcggccatataacattgctcatcgtggatcaaatggggaaattcccgaggaaacagctgctgcatacatganggctattgaagaaggggcggattttatagagtctgacatccttgctagcaaagatggggccttgatttgttttcatgatgtaacacttgatgatacaaccga

SEQ ID NO: 79674 - DNA, 355 bp, Zea mays
  unsure (1)..(355): unsure at all n locations
tgctctccgaccccgagctccgaaggccgcagcatcaggcgcgccccccctcgcgtgtgaccgagatggcgctgccgaatcaggggaccgttgattaccccagcttcaagctcgtcatcgtcggcgatggtggaactggtaaaactacatttgtgaagaggcatctcactggagagtttgagaagaaatatgaaccaaccattggtgtggaagttcatccgttggatttcaccactaactgtggtaagatcaggttctactgctgggataccgcanggcaagagaagtttggtggcctcagggatggatactatatccatggccagtgtgcgatcatcatgtttgatgtaacctc

SEQ ID NO: 79675 - DNA, 420 bp, Zea mays
gggccgacccacgcgtctaggctgttccggacgacgacggcggagaaggcggcggaggcgctcggcgtcgtcgtccccgtggtggagacgctggagcaggcgttcagggagtgctccaaagggaaacccttcttcggcggcgacgccgtcgggctcgtggacatcgcgctcgggagcttcgtggtgtggatcagggtggtcgacgaggcggccggcgtaaagcttctggacgaggccaagttcccggccttgacggcgtgggcggagcgcttcttggcagtggacgccgtgaaggaggtgatgccggacgccggaaggctgttggagcactacaagggatttctggctaaacggtctccacctgctggttactgatcgctgtaactgtaagcctgtaacagcaagctcagtgttcgtgta

SEQ ID NO: 79676 - DNA, 393 bp, Zea mays
aaaactccttcccttcgctggtgataaggtctccttgctgcggcggcaattgcggttgcggctccagctgctcctgcggaaccggatgcaacggctgcggtatgtaccctgacgtggaaaccgccgccaccagcagcgtcaagaccacggtcctcgccgcgccgaccaccaaggccagcgccggcggcttcgaggcggccaccgagggcggcggctgcgactgcaacacctgcaagtgcggcaccagctgcggctgctcctgctgcagctgcaactgagctggcccggcccggcgatggcgcacgagagtcgagaggaggaggacgacgacgaagcgtataaatataatagcggcgtccagtaaataagatcctgtcaactgcacccgccatt

SEQ ID NO: 79677 - DNA, 358 bp, Zea mays
  unsure (1)..(358): unsure at all n locations
agcaggctagcagcacagcagcagccagagccatcccctctcctcgctacgcttcgcttcctcggcgccgattcctcctcctcctcctccaccctcgtccgtcncgttccggcgcgcgagctcgcccgagatggcgaacgcgagatcgggtgtcgctgtgaacgatgagtgcatgctgaagtttggcgagctgcagtcgaagaggctgcaccgcttcataactttcaagatggacgacaagttcaaggagatagttgtggaccaggtcggggatcgcgctaccagctacgatgacttcacaaacagcctccctgagaatgactgccgatacgcgatctatgatttcgactttgttact

SEQ ID NO: 79678 - DNA, 370 bp, Zea mays
aacaccggccaattccaaatcccctcccgaagccaaaacccaaaaccaaaacctttaaccggcggcggcggcaacaacaagaatggcaatccggcaacaacggtcccaaagccccttccaagggccatcgacttcaccccggattgaaccaatgtcttcggacaatgaggtcagggaggaaaaggagctcgacctctcctccaacgacgttgtcaccaagtacaaggctgccgccgaaatcctcaacaacgctctgaagattgttgtgtctcagtgcaagccaaaagtcaagattgttgacctttgcgagaagggcgactctttcataagagagcaaactgggaatgtttacaagaacgcaaagaggaag

SEQ ID NO: 79679 - DNA, 375 bp, Zea mays
taaaatgaatgatgaaaaagtcgtttctacaatactgtagctggcagtgatgaggaggccccatctcgttgcaccccggaagtagtgcacttcattgttcagcagcattttgatgctccatcaatgtgggcaatctttccacttcaggacctccttgcactgaaagacaagtacaccaaaagaccagcgccagaggaaacaatcaatgaccccactaacccaaagcactattggagattccgtgtccacgtgacattggagtccctgctgaacgacaaggacatccaggcaaccatcaaggacctggtcacaagcagcgggaggtccttccccggaaagaatgcggaaggtgccgacaagagcggcgagaagctg

SEQ ID NO: 79680 - DNA, 407 bp, Zea mays
ctcgcgggtcgacacacgcctctagcgacagtcatagaaagaccgacgcgccggcagatcccaagctcaccggagagggggaagagggcgaccgaaggcggcgatgggtttcatcatggacttcgcggagaatctgatcctccgtctgatggaggacccggacaagcgcgaccaggttcggcgggagcatgtctacaagatgaaggagcggtgcgagcgcactaaggcggcgtggagcctccctctgcgcccctacggcttctggaccttcgaccgcttcaactcgcagctctcctgggatccccagatcagccaggccgccggccgtcgggacccctacgacgacctcatcgcccgccactctggctcgccgccgtcttcctgaacacccgttccgatccttgccc

SEQ ID NO: 79681 - DNA, 357 bp, Zea mays
  unsure (1)..(357): unsure at all n locations
acatgctgttcacaacgacacacgacaagcagaccgaagccctaattgctgtgtatgaaggagaaggggaacgtgctgaagataaccatctgttanggtacttcaagattactggaattccggcagcccctaagggagcagttgatatcagtgtatgcatggatatcgatgctgccaatgtcctcagggtgttcgcangggtcgtcaagcctcaaggcccagccattccaccgttcatcgaggtgaggatgccaacgctggacgatggccatggttggtgtgggcaagctctagcaaagatgtatgggaggattctcgaccttgctgttcttccgaagaagctgcagccatgatatg

SEQ ID NO: 79682 - DNA, 358 bp, Zea mays
  unsure (1)..(358): unsure at all n locations
tgaccgggcctccggggcacaataaatttggttgctgccaacttgcttgcggtcctcgctgggaacgccagcccctccgctgaggatttgactgccattctggagtcagttggctgtgaagttgacaatgaaaggatggaactcctgctgtcccaactgagcggtaaggacatcaccgagctcattgccgcgggcagggagaagtttgcttcagtcncatgtggtggcggtggtgtcgctgttgcggcagcttcacctgctgctggcggagctgctcctacagctgaggcaaagaaagaagagaaggtggaagagaaggaagaaagcgatgatgatatgggcttcagcctcttcgact

SEQ ID NO: 79683 - DNA, 396 bp, Zea mays
tcgccggtcgatacacgcctctacactgcgtcctaataaagcagaccacagcaagaagcgtagtcgtcgccggaaggaaaggcgcggagcaagatgtcgtggcaggcgtacgtcgatgagcacctgatgtgcgagatcgaaggacaacatctcagcgccgccgccatcgtcggtcacgacggcagcgcttgggcgcagtccgagagcttccccgagttaaagcctgaggaggttgctggtatcataaaggactttgatgaacctggtactcttgcaccaactggtcttttcgttggaggtacaaagtacatggtgatccaaggtgaacctggagttgtcatccgaggaaagaagggcactgggggcattactatcatgaaaaccggcatgtccttg

SEQ ID NO: 79684 - DNA, 346 bp, Zea mays
atggcagaccacagcaagaagcgtagtcgtcgccggaaggaaaggcgcggagcaagatgtcgtgggaggcgtacgtcgatgagcacctgaggtgcgagatcgaaggacaacatctcagcgccgccgccatcgtcggtcacgacggcagcgcgtgggcgcagtcagagagcttccccgagttaaagcctgatgaggttgctggtatcatacaggactttgatgaacctgatgcgcctgcaccaactggtcttttcgtaggaagtactcagtacatggggatccacggtgaaactgcagttgtcatccgaggaaagaagggcactgggggcattactatcagcagaac

SEQ ID NO: 79685 - DNA, 353 bp, Zea mays
aaacgcggcgacctcaggaaccggatcgggctcggaaggatcggcgcggagcaggatctcgtgtcaggcgttcgtcaaggaggacctgaggtgcgagatcgacggacaccatcgcagcgccgccgccagcatcggtcacgacggcagcgcttgggcgcagtccgagagctgcgccgacttcgagcctgaggaggttgctggtatcatagaggactttgatgaacctggtagtcttgcaccagctggtcttttcgttggaggtacagagtacatggagatccaaggtgaacctggagttgtcagccgaggaaagagaggcactgggggcattacgatcaggagaggcggcaggt

SEQ ID NO: 79686 - DNA, 380 bp, Zea mays
aacggaagccctaacgggttcgtcaagaactcctggggcacctcctggggcgagggtggctacatccggatgcagcgcggcgccggcaacggcggcctctgcggcatcgccatggaggcgtccttccccatcaagacctcgcccaaccctgcagacccgccgcgcaagccccgccgcgcgctcatcgccagggacacctcttcttcccagtgacacacacgaccacaactggcacgtaagtacacgttgccaggaatgacatgctatgctactagtgtttgcttgaactattatcgattgggtttgtactagtgatgacagtttcatcgattgcgcggtcgatctccatcagagacagagacgatataatcaggataaag

SEQ ID NO: 79687 - DNA, 431 bp, Zea mays
gggcggcacggcacccggattgatcgggtggtggccggccaaggccgtcaccttcgtcgacaaccacgacactggctccacgcagcacatgtggccgttccccgccgacaaggtcatgcagggctacgcctacatcctcacgcaccccgggaacccatccatcttctacgatcacttcttcgactggggcctcaagaacgagatcgcgcacctggtgtccatcagggaccgccacgggatccaggcggacagtgagctgcgcatcatcgaggccgacgccgacctctacctcgctgagatcgacggcaaggtcatcgtgaagattggatcaagatacgactgcgggcacctcatcccagaaggcttccaggtcgtggcgcacggagatggctatgccgtctgggagaaaaactgagccaaatctgtgcctg

SEQ ID NO: 79688 - DNA, 396 bp, Zea mays
tttggtcaaaccttgggaatccaacccgatttccaagttaaggaaagtaatggtttaagggaggacaattgatctaagaagcataattactcagagaatgaacaaaatattcagggaaaatattgactttcaacttgagcgctttgaaaatggaaatctttgtggtgttgtggaactgcaacaactgctggatattttggagcttacacaccaatcaatatcaagatttcttgaattggattcttactctcttatgcttagcgagatgcaagaaaatctgtcattggtttcttattcaagtcgcatctcttctcagatatggagtgagatgcagacagatttcttgccgaatttcatcttatgtaataccacacagcggtttgtccggtccgcaaa

SEQ ID NO: 79689 - DNA, 338 bp, Zea mays
  unsure (1)..(338): unsure at all n locations
aaccatatttccgaagaaaccctggaaaccaacgaatttcggttggttgaaaccaataaacctaccggcaacctccaacattgtcccccttaaggccaacaaactttttcaaccccttctcgatggacctctgggaccccttcgacaccatgttccgctccatcgtcccgtcggcgacctccaccaactctgagactgccgccttcgccagcgcccgcatcgactggaaggagacgcccgangcgcatgtgttcaaggccgacctccccggcgtcaagaaggangaggtcaaggtcgaggtcgaagacggcaacgtgctggtcatcagcggccagcgc

SEQ ID NO: 79690 - DNA, 396 bp, Zea mays
acggacgcgtgggcgactcgtcagacgtcagccagcagttcgaaaccaaggattgatccaggagcttccggaaggcgaggcgcgcgcgcagcgtcgaggtgctggtgccggtgccgcccatggatcgggctcgcggatccgcgttcctgctcggcgtcctgctcgcaggatccttgttcgcgttttcagttgccaaagaggagaccaagaagctcgggaccgtgatcggtatcgatctcggtaccacctactcctgtgtcggtgtgtacaagaacggtcatgtcgagatcatcgccaatgaccagggtaaccgtatcacaccctcatgggttgccttcaccgatagcgagaggctcatcggtgaggctgccaagaaccaggcagccgtcaaccctg

SEQ ID NO: 79691 - DNA, 348 bp, Zea mays
aaacgtcagacgtcagccagcagttcgaaaccaaggattgatccaggagcttccggaaggcgaggcgcgcgcgcagcgtcgaggtgctggtgcgggtgccgcccatggatcgggctcgcggatccgcgttcctgctcggcgtcctgctcgcaggatccttgttcgcgttttcagttgccaaagaggagaccaagaagctcgggaccgtgatcggtatcgatctcggtaccatctactcctgtgtcggtgtgtacaagaacggtcatgtcgagatcatcgccaatgaccagggtaaccgtatcacaccctcatgggttgccttcaccgataccgagaggctcatcggtg

SEQ ID NO: 79692 - DNA, 376 bp, Zea mays
actaaatcgaattacgccgtcgcgatgaggccggcgctgctcaagtccacggcctagctcctccgccgcatccgcggctacgcctcctcggtcaacccggagcggaaggtggccatcctgggcgctgcgggcggcatcgggcagccgctctccctcctcatgaagctcatcccgctcgtctcctcactctccctctatgatatcaccgggacccccggcgtcgctgctgacgtctcccacatcaactcccccgccctgatgaatgggttcatgggggacgaccagctcggggaggcgctctagggctccgacgtcgtcatcatctcagctggggttcccattcatcccggcattaatcgggactacctctttaaaa

SEQ ID NO: 79693 - DNA, 430 bp, Zea mays
  unsure (1)..(430): unsure at all n locations
ccgggccaagcgtcaaactaatgcctgcctgcctgcctgcgtctctcctccaggctccaggaatccaccccccacctcctcggattctttccccctctccagctcccccgtcctgcagccgcctgcactgtgctgccgccccgttcgcctcccggcctccagcctcctcggttcccgcgggagggccatgaagttaaggacaaaacgacctgaatggaagtcccttgtgcctctacaactgagcagattgagcaggaaatctgccatgcgtttctttttgttccccaaggttcagtcggctggtcaatcgccagatgataccccagtttatcttaatgtgtatgatttgacgccaatgaacggttatatatattgggcaggcctgngcatatttcactcaggaattgaagttcatggtgttgaatatgca

SEQ ID NO: 79694 - DNA, 387 bp, Zea mays
tacacacacgtctgcgccggagctcccaagaagaggacgttccgcaagtacagctaccgcggcgtcgacctagatgcgcttctcgacatgtccacggacgacctcgtccagctcttccccgcgcgcgccaggagaaggttccagaggggtctgaagaggaagcccatggcgctcatcaagaagctgcgcaaggcgaaaaaagatgctcctgctggtgagaaaccagagccagtcaagacacatctccgtaacatgatcattgtccctgagatgattggaagcattgttggtgtctacaacggcaagaccttcaaccaggttgagatcaagcctgagatgatcggccactaccttgctgagttctccatctcctataagccggtcaag

SEQ ID NO: 79695 - DNA, 357 bp, Zea mays
aaaggcaccacacctcttcctcctcttcctcctcctagcacagctagcgcctgctccccttcgtctgtgatcatgtcttgcagcagcggcaagtgcaactgcggctccagctgctcctgcggcagctcatgcaactgcatgtcccctgacgtggagaccgccgccgccagcagcatcaagaccatggtcctcgctgcgccgaccaccaaggccagcgccggcggcttcgaggcggccaccgagggcggcggctgcgactgcaacacctgcaactgcggcaccagctgcggctgctcctgctgcagctgcaactgagccggcccgcccggcccggcgatggcgcacgagagtcgagag

SEQ ID NO: 79696 - DNA, 382 bp, Zea mays
tttaagtattagaaccttcactttgttgaagctgttgctctgaagccaccagaagtgcagattgatatggccctgcagcagcattaagctttccagctcttcctttgatttctggcaacagcaaaaattagccgtgcaaatgttgtcctgaaagtacttgacttaaattccattgggattagcaccacgtaccattgctaactgcaccttttcccatgatcttaagcatgaagctgagcttgcagctgccgctgcgcagcccctccccgatgacgatgatgacctgatcgaatagatatgttatacatggcccttgttgatgactcttgttaaaaatctgtggtggttcaatccttgttagtgttaggcggtacctgaatgt

SEQ ID NO: 79697 - DNA, 408 bp, Zea mays
  unsure (1)..(408): unsure at all n locations
aattcacaaagcgcctagcaaaagcatacttcccgaagcactcttgcaatccactgagttctgtttgttgagacgcatagagctagctgctagcgtcgacaatgtcgctcgtgaggcgcagcaacgtgttcgaccccttctcgatggacctctgggaccccttcgacaccatgttccgctccatcgtcccgtcggcgacctccaccaactctgagactgccgccttcgccagcgcccgcatcgactggaaggagacgcccgaggcgcatgtgttcaaggccgacctccccggcgtcaagaaggaggaggtcaaggtcgaggtcgaagacggcaacgtgctggtcatcagcggccagcgcagcagggagaagganngacaggacgacaagtggcaccgcgtcgagcgca

SEQ ID NO: 79698 - DNA, 449 bp, Zea mays
gtgcggtccagtcgagaagtgccgggtcgacgacccgtccacacagtagcagcaccaggcggcgccgagtagcggctccccacctcgagcttgccaccatggctagaggattgaagaagcatttgaagaggctcaatgcgcccaagcattggatgctggacaagcttggcggagcttttgctcccaagccatcttctggacctcacaagtctagggagtgcctgccactgatcctcatcatcaggaacaggctcaagtatgctcttacataccgtgaggtcatttccatcctgatgcaacgccatgtacttgttgatggcaaggtcaggacagacaagacctaccctgctgggttcatggatgtcatttccatccccaagaccaatgagaactacaggctgctgtacgataccaagggccgctttcgccttcaaccaatcaaggaatga

SEQ ID NO: 79699 - DNA, 427 bp, Zea mays
cgggtcgagacacgcgtctagccacaattttccgaaaaggataatggacgggagcattcaaacattggaccaaattcttacaatatgttcaaaacggatttcaaattgctaaaggaaatgggcatggacccatataggttctctatcctcttggcctagaatactgcctaagggaacggtcgaaggaggttataacaggatggcatcgattactacaaaaagctcatcaacttgttgctagagaatggcatagagccatatgtaacaattttccactgggatgtccctcaagcactagaagagaagtacggcggattcttagataagactcataagaggattgtaaatgattacaaaaacttcgctaaggtgtgcttcgacaactttggtgacaaggtgaagaattggttgacctttaatgaacccc

SEQ ID NO: 79700 - DNA, 429 bp, Zea mays
ctgagccgcacccacgctcaccgtacctcctccgaatccggccgacggcggggaagcccctcctcctccacgacacgcgcttccccggctatcatggattcagatccatcatcacagaacccaacagatatgactgcatttgtccagaacctccttggacagatgcaaacaaggttcgagtccatgtcgcagaacattgtgtcaaagatagatgaaatgggaaccaagattgatgagctcgagcagagcatcaacgatctcaaagctgagatgggcactgagacgccggtcaagaagcctgatgagccaaagcctgctgactctgcctaacttgggtgtaacccagagattgttgtgtgaagatttgatgatggtgtgacaaatttcagcagtacgtgatcgtatccgttttcatgagtcctggcagtt

SEQ ID NO: 79701 - DNA, 374 bp, Zea mays
ctcaagcaagcgagcaagcttaagccccacctcctagcaacatggagacggcctacgttgtcgttctgtcgttcttcttcatcgttgctatccaccgccttctcaaccgcggcgaaagcaagaatatgagcaagcagccgctgccaccgggccctcgcgccatcccggttctcggccacttacacctcctcgagaagccgtaccacctggcgtttatgcgcctcgccgcgcgctacgggcctgtgttctccctccagctgggctcgcgcgccgccgtggtcgtgtccaccgcggactgcgccagggagtgcctcgcagagcacgacgcgacgttcgcgaaccggccgacctaccccacgctgcacctgatgacc

SEQ ID NO: 79702 - DNA, 421 bp, Zea mays
ggtacctagtctagcgggccgagccacgcgtccgcagcgatctaggccgccgcctctcctactgcatctccctcgctctcgtcgcctcgttcgcttcgcctcctccccgccccgccccgagccgagcagagcgcagccctatccggagctgggatggcggacgcgaagcagcagcagcagcagccacagcaggcggcagcggcagccaccggcgtgtggaagacggtcaagcccttcgttaacggcggggcctctgggatgctcgcgacctgcgtcatccagcctatcgacatggtcaaggtgaggatccaattgggtgagggctccgctggtcaggtcacaaggaacatgcttgcagatgagggtgtccgttctttctacaagggtttgtctgccggattgctgaggcaagcgacgtaca

SEQ ID NO: 79703 - DNA, 385 bp, Zea mays
cacgaccccctgggtgcactgctcatactgcttgccctcgccgtatcgtccacccgcaacgcacacgaggattccatggccgacaacaccgggacgttggcgggcggcatcaaggacgtgccggggaacgagaacgaccttcacctccaggaactcgcccgcttcgccgtcgatgagcacaacaagaaggccaatgctcttctggggttcgagaagcttgtgaaggccaagacacaagtggttgctggcacgatgtactatctcactattgaagtgaaggatggcgaagtgaagaagctctacgaagctaaggtctgggagaagccatgggagaacttcaaggagctgcaggaattcaagcctgttgaagagggtgctagcgcct

SEQ ID NO: 79704 - DNA, 425 bp, Zea mays
aacgctgctctcgtcaccatctctccgactcacccctctgtcctcgcaagccgccgccggccaagtcctgtccctctcccttgtctggttcggatcgtcgttgctagccaggtgctggatccgtagcggcggcggcggccatggacaagagcatgctcggcgacctggacggcctccccgaggaggacaagatgcggatggccgccatgatcgaccagctccagatccgcgacagcctgagaatgtacaattcgctggtggagaggtgcttcacggactgcgtggacacgttccggcgcaagaacctggacaagcaagaggagtcgtgcgtccgccggtgcgcggagaagttcctgaagcactccatgagggtcggcatgaggttcgccgagcttaaccagggtgtggccacgccggactaagaa

SEQ ID NO: 79705 - DNA, 367 bp, Zea mays
acccacgcgtccgctgctcctccgccttcttcttgatccagccaagccagggatcgccatgtcggactcggaggagcaccacttcgaatcgaaggccgacgccggagcgtccaagacctacccgcagcaggctggcaccgtccgtaagaacggcttcatcgtcatcaagaaccgcccctgcaaggttgtggaggtttctacctcaaagactggtaagcatggtcatgccaaatgccactttgttgccatagatatattcaacgggaaaaagctcgaagatattgttccttcgtcacacaactgtgatattccgcatgtgaaccgtactgagtatcagctgattgatatatcagaggatggatttgtg

SEQ ID NO: 79706 - DNA, 341 bp, Zea mays
gtgcgggatgacctcgtccgcgccctcctcaacgccgacctcgtcggcttccacaccttcgactacgcgcggcacttcctgaccgcctgctcgcggctgctcggactcgactaccagtccaagcgcggctacatcggcatcgagtactacggccgcaccgtcacggtcaagattctccccgtcgggatcgacatgggccagctcagatcggtggtctcggcgccggagacggaggatgcggtgcggcgggtgaccgaggcgtacaagggacggcgcctcatggtcggcgtcgacgacgtcgatctgttcaaggggatcgggctcaagttcctggcgatgga

SEQ ID NO: 79707 - DNA, 355 bp, Zea mays
gcgtccagcattagtgtaccgaaacagggtaacctcgtgctaactgggccatcattggccacctcggcatacagtccaattgctttcttcctctagctccatgatggcagcccgcaagccggagaagccaccgaggacgacgaggatatcgggaggatactctgcgactgcatcggcgacgacttctccaactataacagggccatagtcgagattgtccaaaccggctatggccacgctgaagtgctcgatgccgtcctgagcaacggcgtccaaagcctggtcaccgtcgtacttgctcgaccgccatcgtacacagctggtgtagaagacgccaccagcattcttgggagga

SEQ ID NO: 79708 - DNA, 409 bp, Zea mays
ccttcctccacttgccttcgtgttcgtgattcgtgatttcgccgccggaaagccgagggagagggagcgatatggggttcgtcggagacacgatggagtcgatccgctccatgcagatccgccaagtgctcatgcagatcatcagcctcggtatgattgttacctctgcattaatcatatggaagggtttgatagttttcacggggagcgagtcaccagttgtagtggtgctctcgggtagcatggagcctggatttaaaaggggtgatatcctgtttttgcatatgagcaaagatcctattcgcacaggagaaatagttgttttcaatatcgatggtcgtgagattccaattgtccaccgagtgattaagggtcatgaacgtcaggacactgcagaagtggacatcct

SEQ ID NO: 79709 - DNA, 371 bp, Zea mays
atcgcttccagccgccgccgccgcgtccgcctcgcccagcgcagcagccgccgcagcacatcgctatctcgatctcagccatggcggaggtggagcagcaacagtgacacgccgaagctgttcaaccgctggaccttcgatgatgtccaggtgaacgacatctcgctgaacgactacctcgctgtgaacgcgacgaagcacgcgatgtacctgccgcacaccgcggggcgttactccaagaagcggttccgcaaggcgcagtgcccgatcgtcgagcgcctcacaaactccctcatgatgcacgggcgcaacaacggcaagaaggtcatggctgtccgcatcatcaagcataccctggagattaatcacct

SEQ ID NO: 79710 - DNA, 426 bp, Zea mays
aaccgattgccttcccccctcccaacccaagaccgatggcgcccaaggccgagaagaagcccgcggcgaagaagccggcggaggaggagcccgcggcggagaagacgaccgccgggaagaagcccaaggcggagaagcggatccccgctggcaagtccgccggcaaggagggcggcgagggcaagcgtggcaagaagaagggcaagaagagcgtggagacgtacaagatctacatcttcaaggtgctgaagcaggtgcacccggacatcggcatctcctccaaggccatgtccatcatgaactccttcatcaacgacatcttcgagaagctggccggcgaggccgccaagctcgcgcgctacaacaagaagcccaccatcacctcccgcgagatcccagactccgtgcgcctcgtgctccccggcg

SEQ ID NO: 79711 - DNA, 392 bp, Zea mays
aaaaccactaatgctccaaccctagccgcgatccgacaacgcctccatccctagccgactgctgcaagcttcagagctcaagagtcagggcgccatggcgacagagacggagaccttcgcctttcaggctgagatcaaccagctgctctcactcatcatcaacaccttctattccaacaaggagatcttcctccgggagctcatttccaactcttccgatgcgttggacaaaatcaggttcgagagcctcactgacaagagcaagctcgatgcgcagccggagctgttcatccacattgtaccagacaaggcttcgaacacgctctccatcatcgacagcggcatcggcatgaccaagtccgaccttgtcaacaacctcgggtacatcgcca

SEQ ID NO: 79712 - DNA, 397 bp, Zea mays
  unsure (1)..(397): unsure at all n locations
cttagtcgcacaacgcgcctccctgctccagttttccattccttgcgcccccttcagatccgatctgatccacgccggcgagacaccggaggaccgccatgacgctcagcctccgtcgcaagcagctcgatgttatcgtgcggatgctgcacctgaaccagcagcagttgccgaacggcggcgagggacagggagaggacgatgcgtacaagatcctggttatggatccgccctgtatctccatcctctcgcctgtgctcaagctcggcgacctccgccaccaaggtgtcaccctcaccctcgccatcgatcgtccgcggcaggcggtgcccgatgcgccggccgtctacttcgtccggcccanccccgggaacgtggaccgagtagcggccgacgc

SEQ ID NO: 79713 - DNA, 440 bp, Zea mays
ctgcacctgcattctgcaagcctcgtctggagctcttcccgttgcattggcggcggagatggcggcgaatctggaggacgtgccgtcgctggatctgatgcacgagttgctccgccgcatgaagtgcagctccaagcccgacaagcgcctcatcgtcatcggcccacctggctctggaaagggaacccagtctcccattattaaggatgaatattgcttgtgccatttagccactggtgatatgctgagggctgctgtggcggccaagacacctctaggtatcaaggcaaaagaagctatggataagggagagcttgtttcagatgacatggttgtggggattattgatgaagctatgaagaaaccttcatgccagaaaggtttcattcttgatggctttcctagaactgtcactcaagcacagaagctcgatgaaatgt

SEQ ID NO: 79714 - DNA, 300 bp, Zea mays
agtgattgccttcattggtgatgggagcttccaggttacagcacaggatgtgtcaactatgctgcgatgtgagcagaacagcataatcttcctgatcaacaacggtgggtacacgattgaggtggaaatccatgacgggccatacaacgtcatcaagaactggaactacactggctttgtggacgccatccacaatggcttgggcaagtgctggacctccaaggtgaagagcgaggaggagctgacggctgccattgaaacagccctagggaaaaaaaaggattgctggtgctcaaccaa

SEQ ID NO: 79715 - DNA, 420 bp, Zea mays
  unsure (1)..(420): unsure at all n locations
attgtgaccctccctcagccgcgtcgcgtcgcatcctacgattcaaagctctctctgctcccagccatggcgaagaactacccgaccgtgagcgccgagtacagcgaggctgtggagaagggcaagcgcaagctccgagccctcatcgccgagaagagctgcgccccgctcatgctccgcctcgcgtggcactccgcggggacgttcgacgtgtcgtcgaggaccggcggtccattcggcacgatgaagcatcagtcggaattggctcacggcgctaacgcggggctggacatcgcggtgcggctgctcgagcccatcaaggangagttcccaatcctctcttacgccgatttctaccagctcgcgggagttgtggccgtggaggtcaccggtgggcctgagattcncttccaccccggt

SEQ ID NO: 79716 - DNA, 339 bp, Zea mays
  unsure (1)..(339): unsure at all n locations
attcccagtaacatgcagtggtggtgaatggaaaatcgttcaaggcctcncgattgatgagttctcaaggaagaagatggatgccactgcccaagagctgacggaggagaagacgcttgcttactcatgcctcgagtaaattctaccacatccagagagcaattgccaccccaatgttttgaatataaaaagaaactccaactccattcatagattctcactcagaactgctgcacgtcgcagtgcangcgtgttgctggcttcgcccagcttctttttttgcctgtgatttgcacgacatttatatttattgaaatcttgcagaatcgcttgacgatg

SEQ ID NO: 79717 - DNA, 406 bp, Zea mays
agtacaattttatgctgcagatgaaagatgtatcaggtgctttcagaatgcatgatggtggcgaaattgatgtccgtgcttcctacaccgctatatcggttgccagccttgtgaatattcttgattttaaactggcaaaaggtgtaggcgactacatagcaagatgtcaaacttatgaaggtggtattgctggggagccttatgctgaagcacatggtgggtatacattctgtggattggctgctttgatcctgcttaatgaggcagagaaagttgacttgcctagtttgattggctgggtggcttttcgtcaaggagtggaatgcggatttcaaggacgaactaataaattggttgatggttgctactccttttggcagggagctgccattgctttcacacaaaa

SEQ ID NO: 79718 - DNA, 385 bp, Zea mays
gttgggaagaagattaaaaagacaccaatagtcgtcgggaactgtactggctttgcagttaataggatgttctttccatacactcaatcagcactcctttatgttgatcttggtatggatgtttataagattgatcgtgcttgtaccaaatttggaatgcctatgggtcctttcagactggcagatctggttggttttggtgtggctgtggccactggtatgcaataccttgaaaatttcccagagagggtctacaaatcaatgctacttcctctgatgatggaggacaatagggcaggtgaagccacccaaaaaggattttacaagtatgagggcaagaagaaagcgactcctgatcctgaaattatgaaatatattgaaaaat

SEQ ID NO: 79719 - DNA, 386 bp, Zea mays
actacctctggcgtttaagtagggaaagaagcaggacaaaaggctggaatctctttctgccttagaagagaaaataagagtagttctctctgttctaggattgctaccttcaagttatcatgaggctttgcaacagctgcgggataaggcactgagacgagcttccatcaccgaggagcttgtggtgcagaagattgaagagaggactgcagcatggaaggcaaagcagtatgaaaaatctgacgagatccggaaagaactggctgccataggaattgccctcatggatggccccgacggaaccacttggagaccatctttgccaattttagaggaagcggtggttgcgaaaacatgatctgtgcaagggattccaattggaacca

SEQ ID NO: 79720 - DNA, 146 bp, Zea mays
agatactcacagatctcggagaacaaaacagccaattgtgttctgcaatactaagaagacagcggacatgcgtgctaaggatctggacaagtcaggcttccgcgtcacaacccttcatggtgggaagtcacaagaccagagagaga

SEQ ID NO: 79721 - DNA, 382 bp, Zea mays
accaccgccgagcccaaccgcacaagcgcgcgaggcatgagagagagagaggcggggagcaaaacaatggaggggaaagaggaggacgtgcgcctgggcgccaacaagttctcggagcgccagcccatcgggacggcggcgcagggcgccgctgacgacaaggactacaaggagcccccgccggcgccgctgttcgagcccggggagctcaagtcctggtccttctaccgcgcgggcatcgccgagttcgtcgccaccttcctcttcctctacatcaccatcctcaccgtcatgggcgtctccaagtccacctccaagtgcgccaccgtcggcatccagggcatcgcctggtccttcggaggaatgatcttcgcgctcgtct

SEQ ID NO: 79722 - DNA, 408 bp, Zea mays
agacgcctgagaaaaacgcaacccttttttgggctttggctttttgctgcaaacaaaaggcgacgccgctgggatctagcacgcgagcgagcgagagagccgcgcacctatctggcaagcgacgccgcggcctcgatcggagtcggaggcgaacacccccatggcggcggctggcggcggcgcaggagggaaggtatccttcaagatcatcctcacctccgaccccaagctccctttcaaagtgttcagcgtgcccgaggcggcgcccttcaccgcggtgctcaagtacgccgcggaggagttcaaggtcccgccccagaccagtgccatcatcaccaacgatggaattggcatcaacccccagcaaagtgcaggcaacgtgtttctgaaacatggttcggagctgcg

SEQ ID NO: 79723 - DNA, 390 bp, Zea mays
gggccgacccacacgtccattcaaatccatccatcctcgtctcctccgtcccgcagcatctcaaccccatggccaagatcacgatcgggatcaatgggttcggcaggatcggaaggctggtggccacggtggccctgcagagtgactatgtcgagctcgtcgccgtgaacgacgccttcatcagcatcgactacatgacctacatgttcaagtacgacactgtgcacggacagtggaagcaccatgaaatcaacgtgaaggactccaaaacccttctctttggtgagaaggaagttgctgtgtttggctgcaggaaccctgacgagatcccgtggggttcggttggtgctgaataggttgttgagtctactggtgttttcactgaccagg

SEQ ID NO: 79724 - DNA, 428 bp, Zea mays
  unsure (1)..(428): unsure at all n locations
aacaattcacacagcgaaccgagaaaccaacacagcaacaagcaaagcagcgatccgacatccgagagatggacgcggtgatgttcgggctggagactcccctgatggcggcgctgcagcacctgctggacgtgcccgacggcgacgccggcgcgggcggcgacaacaagacgggcagcggcggcagcgccacgcgcacctacgtccgcgacgcgcgcgccatggcggccaccccggccgacgtgaaggagctgcccggcgcgtacgcgttcgtggtggacatgccggggctgggcacgggcgacatccgggtgcangtggaggacgagcgggtgctggtggtcagcggcgagcggcgccgggaggagcgcgaggacgacgccaagtacctgcgcatggagcggcggatgggcaagttcatgcgcaag

SEQ ID NO: 79725 - DNA, 427 bp, Zea mays
  unsure (1)..(427): unsure at all n locations
agcacctcatgatcctatgcaatcgagccttctcaatgctacactagaggataaaaacctttcagaaatcccaaatttcaggttattgctgaagcagctggttaccatggaggtcatccagtggacagcattgtgggaattctctaagcacgaatttgaaaacgagaagaatctgctaggaggagctttgggtgccaaagctgcagaagatttgaagctaagaataattgaacataatatcttggttgtgtctaagtactattcgagggttaccataaagaggcttgctgatctgctctgcctgagtttgcangaggcagagaagcatctttcagacatggtgaactcaaaatctctgactgcgaagatcgacaggccgatgggagttgtgagcttccgggtagttcaagactgcaacggcacactt

SEQ ID NO: 79726 - DNA, 382 bp, Zea mays
  unsure (1)..(382): unsure at all n locations
aggagggacatcttgggaaatacaattacggtggtaatacatttgaagcatcaggctcaccttctggtgctagttattccaagtgcagggctcttgcagttagagctcttaaagttgatgagccagcatgcacacacatgaaatgcacatttggtggtgtgtggaatggtggtggtggagatggacaaaagaatctttttgtggcctcctttttcttcgatagggctgccgaggctggttttgtggacccaaaagcagcagttgctaaggttaaaccttcagactttgaagaaactgcacgccgggtttgtaaattgaacttgaaggatgcacatgcaacctaccctgatgtctcagangagaacattccctacctttgcat

SEQ ID NO: 79727 - DNA, 425 bp, Zea mays
aacaatacgaaacgaattaatccccaatcaacacagcaagtcagcaacaagcaaagcagcgacccgagagatggacgcgaggatgttcgggctggagaccccccgggtggcggcgctgcatcacctgctggacgtgcccgacggcgacaaggcgggcggcggcgccacgcgcacctacgtccgcgacgcgcgcgccatggcggccaccccggccgacgtcaaggagctcgcgggagcgtacgcgttcgtggtggacatgccggggctgagcacgggcgacatcagggtgcaggtggaggacgagcgggtgctggtgatcagcggcgagcggcgccgggaggagcgcgaggacgccaagtacctgcgcatggagcggcggatgggcaagttcatgcgcaagttcgtgctgccggacaacgccgacg

SEQ ID NO: 79728 - DNA, 453 bp, Zea mays
  unsure (1)..(453): unsure at all n locations
atccgcatagagcttgttccgtccaggcaaccaaaaagcaagttgccccgccgcgcagaggaagaagagagcagaagaggatggctcgtacgaagcagaccgcccgcaagtccacgggaggcaaagccccccgcaagcagctcgccaccaaagccgcgaggaagtcggcgccgacgaccggcggcgttgaagaagccccacaagtacangcccggaaccgtggcgctgcgcgagatccgcaagtaccagaagagcacggagctgctgatccgcaagctgcccttccagcgcctggtgcgcgagatcgcgcaggacttcaagacagacctccggttccagagccacgccgtgctggcgctccaggaggccgccgaggcctacctcgtccgtcccctcgaggacacaannctctgcgcatcaaagctaagcgcgttcacatcatgcccaaggaca

SEQ ID NO: 79729 - DNA, 356 bp, Zea mays
agatccgtccaggcaaccaacaagcaagttgccccgccgcgcagaggaagaagagagcagaggacgatggctcgtacgaagcagaccgcccgcaagtccacgggaggcaaggccccccgcaagcagctcgccaccaaggcggcgaggaagtcggcgccgacgaccggcggcgtgaagaagccccacaggtacaggcccggaaccgtggcactgcgcgagatccgcaagtaccagaagagcacggagctgctgatccgcaagctgcccttccagcgcctggtgcgcgagatcgcgcaggacttcaagacagacctccggttccagagccacgccgtgctggcgctccaggagggcgc

SEQ ID NO: 79730 - DNA, 384 bp, Zea mays
acgttccccgaaacttcaggctattagaggagctcgagcgtggagagaagggcattggtgatggaacagtgagctatggaatggatgatgccgatgacatctacatgcggtcatggactggtaccatcattggccctcacaatactgtacatgagggtcgcatctaccagctgaagttgttttgtgacaaggactatccggagaagccaccatctgtcagattccactcaagaatcaacatgacatgcgttaatcacgagacaggaatggttgatccaaggaagtttggtttgctagcgaactggcagcgggactacacgatggagaacatcctcacccagctcaagaaagagatggctgcctcgcagaatcgaaagttagtgc

SEQ ID NO: 79731 - DNA, 432 bp, Zea mays
  unsure (1)..(432): unsure at all n locations
gggttgtacagcggnctcaagccctctctcatcggcactgccgcgtcgcagggaatctattactacttctaccagatcctcaagaacaaggtggaagatatagcggttgctcgtagcaagaagggccttggggatggtactgtcgggatgctttcttggcttggtattgcagctgttgctgggtcaatcaatgttcttctaaccaatccaatatgggttcttgtgacacgtatgcagacacatactcaagcgaaaagaaaaatattggagtctaagagggagcttttactgaaagaaatgtctagggcgaattcgttggaggttgcagttctgaaggatangctggttaaattggagtcagaaaaagctcgtccatatggtactcttcaagcgattcaaagaggtttacatgaatctggtgtaagaggattt

SEQ ID NO: 79732 - DNA, 412 bp, Zea mays
tcgcgggtcgatacacgcctctacacctcgtcgtcataccacctcgcggagatccagtccagccctagggtttcgccagcggcgagccaaactccacgagcgggggaagaggggaaagcagggacgacgagggggcagccatggggcagcagtcgctgatctacgcgttcgtggcccgtggcacggtcatactggccgagtatacggagttcaccggcaacttcaccaccatcgcctctcagtgcctcatgaagctccccgcaagcaacaacaagttcacctacaactgcgacggtcacactttcaattacctcgtggaagacggattcacatactgtgttgttgctgttgaatcggtggggcaacaaattcctattgctttcatggatagggttaaagaggatttcacaaa

SEQ ID NO: 79733 - DNA, 422 bp, Zea mays
  unsure (1)..(422): unsure at all n locations
tacaacactctatactgactcctagtacctccgagcccaagagcaaccccgcgccaagaagaaatttggtcctttaacaataagttcaaggaaggaaatgtttaaaatggcaaatttgctgaacaaggctaaaaggtataaggaaatggttaattaaatgaaaaaggtggtaaaaacggtaaatgtggaagagctcaatgtttaaggagcgtaaaccttctgtctgtttgcatacaaagaatgtgattgggggctcgccgcgcttcatggcgcattgtttcatccaatgaacaaaaggangagtcccgtaagaacgaagagcatgtgaatcttatcaaggaatatcgtggcaagatcgaggctgaactgagcaatatctgtgatggcatcttgaagctgcttgactcccacctagtgccttc

SEQ ID NO: 79734 - DNA, 467 bp, Zea mays
  unsure (1)..(467): unsure at all n locations
gacccacgcctccacactcccacgccagtacccacagtcctacgagcagtcgcacgcaagtgtcaagagacaaaacggtcgacatggctcgcacgcaatctgccgtagcggtcgccgtggtggccgcggtgctgctgctggcagcggcggcgacgacctcggaggccgccatcacctgcgggcaggtgagctccgccatcgcgccctgcctctcctacgcccgcggcacggggtccggcccctccgcgtcctgctgtagcggcgtcaggaacctcaagagcgccgccagcaccgccgccgacaggcgcgccgcctgcaactgcctcaagaacgccgccaggggcgtcagcggcctcaacgccggcaacgccgccagcatcccctccaagtgcggcgtcagcaatccctacacaatcaagcactcccacgactgctccagggtgaactanaacctagaccacgcgcga

SEQ ID NO: 79735 - DNA, 375 bp, Zea mays
  unsure (1)..(375): unsure at all n locations
gcgagcacagcagcagcgcagaaaaaaaattctggaataatttttcttccctttggctccgtgaggttccggtgctcgctcgctcgcctgagcttcgatcgagcccggtcggcgaggcangcgcccgatcgccgctctccgggagcttccggggggccgtcggatggagccgtacgcggcggcgaagagcggcggggccgacgccggcaccggcaccggactggaagactcgatgcggaggctggggctcggcgacgacggggaagcangggaggagaagcttccggagcggccgggcgaagcggactgcgcctactacctccgcacgggcgcctgcggctacggggagcgctgccgctacaaccacccccgcga

SEQ ID NO: 79736 - DNA, 391 bp, Zea mays
acaaccagctgctctcactcatcatcaacaccttctattccaacaaggagatcttcctccgggagctcatttccaactcttccgatgcgttggacaaaatcaggttcgagagcctcactgacaagagcaagctcgatgcgcagccggagctgttcatccacattgtaccagacaaggcttcgaacacgctctccatcatcgacagcggcatcggcatgaccaagtccgaccttgtcaacaacctcggtaccatcgccaggtccgggaccaaggagttcatggaagcccttgctgctggcgctgatgtgtctatgattgggcagttcggtgtcggtttctactctgcctacctcgtcgccgagagggtcgtcgtgaccaccaagcataacga

SEQ ID NO: 79737 - DNA, 387 bp, Zea mays
acgctctctctctcctagtccccttctatcgtggcatcgacgagcgacagtcgctgccgccctacggcaggtgcccaggtcttcttcggtcccttcgccgtcgacgagcactaccaggaacttgatcttataatacatacttcaatatgttctctgctccaggcaacagttctatggctcttgtagccccacggccagggatggagctggctaatattcaacatcatccaaatcaggctcctgggcctggaggaaaacaacgcagatctagcctggaggcaccaataatgctacttacaggtcaccagagtgctatctactgcatgaaattcaatcctgcgggaactgtgatagcatcaggttcccatgacaaggatatcttcctat

SEQ ID NO: 79738 - DNA, 399 bp, Zea mays
aaacacacgtctgcccacgcgtccgcggacgcgtgggcccgccgccgctgcgccctcctctcggtcctgccgtccgtcgaggtaaaaggacagcatggtgagggtcagcgtgctcaatgatgctctcaagtccatgtacaatgctgaaaagatacggaaacgtcaggtcatgatcaggccgtcatccaaggtgatcatcaagttcctgacggtcatgcagcgccatggctacattggcgagttcgagtacgtggatgaccacagagctgggaagatcgtggtggagctgaatggaagactgaataaatgtggtgttattagcccacgttttgatgtaggtgttaaggagatcgagggatggacggcgaggcttcttccatctcgccagtttggctacat

SEQ ID NO: 79739 - DNA, 401 bp, Zea mays
atgacataatggcagaggtctacaaaaatggtcctgtagaagttgctttcacagtttacgaggatttcgcacactacaaatctggagtgtacaagcacatcaccggtggcattatgggtggccatgccgtcaagttgattggatggggaaccagtgatgctggagaggattactggcttctggcaaatcagtggaatagaggctggggcgatgatggatacttcaagatcataaggggcaaaaatgaatgtggcatcgaggagggcgttgttgctggaatgccatcgacaaagaatatggttccaaacttcggcggtgccgttggaagagctatagtttaattggttacgtttgcatggcctcaaatgctgttggaattaactaaagtaattttaaaatgc

SEQ ID NO: 79740 - DNA, 383 bp, Zea mays
ccacgcgtccgatcaagtcccacggcggcatcaccaccgagtccgcgtacccgtaccacgcctccaacggcacctgcgacggcgcgcgggcccggcgcgggcgggtcgtggcgatcgacggccaccaggctgtgccggccggcagcgaggacgcgctggccaaggcggtggcgcaccaaccggtgtccgtggccatcgacgcggggggccaggcgctgcagttctactcggagggcgtgttcacgggcgactgcggcacggacctggaccacggcgtggcggcggtcggctacggcgtcagcgacgacggcacgccctactggatcgtcaagaactcgtggggcccttcctggggagagggcggctacatccggatgcagcgc

SEQ ID NO: 79741 - DNA, 441 bp, Zea mays
gtgactgtgatctatactataaggtgaacaagatctctttgtctactgtagttgcagcaccagcagcagcagcagaagagcagcgcctgagctccagcaataatggccgagaagggcgtgaaggtgttggggatgtgggcgagccccatggtgatcagggtggagtgggcgctgcggctgaagggcgtcgagtacgagtacgtcgacgaggacctcgccaacaagagcgccgacctgctccgccacaacccggtgaccaagaaggtgcccgtgctcgtccacgacggcaagccggtcgcggagtccaccatcatcgtggagtacatcgacgaggtctggaagggcggctaccccatcatgccgggcgacccctacgagcgcgcccaggcgaggttctggggcaggttcgcggaagacaagtgcaacgctgctctgtacccg

SEQ ID NO: 79742 - DNA, 383 bp, Zea mays
cctctctcgtttagtttgcctccgcattcaagtgaacaaagacaacaaagaattcaaggaccttcccccagaaagggcctttgctgatttcgtcctatgcaatctggtgctccacctggtgatcatgaatttcctcggataagcaactgctgcaccatgttggttaaaggttttgtagccccaggttgtggtcgctgattgttgcctttaaatgtttggaactgttgtgatcgtgatgtcgaatatccatatgatctgttgaaggattacttgtgtaagctgagtattcccggagggaactattagtcgaatggacagtttgcccagcgctgagaatgtgacctagcatgttctttatttgaagaagatataattcatttttc

SEQ ID NO: 79743 - DNA, 399 bp, Zea mays
gccgcggagggatgggcggcaggagggaggccatagagcgggagctgaagaagcttcgggcagagcgggaggagctcgacggccggatacggctgctggaatcgcagctcgaggcagggcctgcgggattcaacggtgcggcggcggggaaaggagtaggggacgatgcgtgcggcgggagtggagcgtgccagagccgcgtgggtaacgagtttgctccggacggtagcctcccggcggatatgatctaccggtacagccgccacctccttctcccggacttcggggtcgaaggccagcggaagctgtcacagtcgtcgattttagttgttggggctggaggtttgggctctcccctggcattgtatctagcagcttgtggtgtcggtcgcttgggca

SEQ ID NO: 79744 - DNA, 383 bp, Zea mays
gagccggagcctggggatcccggtgaagttgctccatgaggcagcgggtcacgtggtgacggtggagctcaagaccggcgaagtgtatcgggggtcattggtcgagtgcgacgataactggaattgccagctcgagaacataaccttcactgccaaggatgggaaggtttcgcagctggagcacgtcttcatcagaggaagcagagtgagatttatgattatacctgatatgctcaagaacgctcccatgttcaagcgcttggaagcgacgattacgggcaaaggatcagctattggagttggtcgtggacgtgctgttgcaatgcgtgctcaggctgctgctggtcgtggtggtggtcctgttggacgatgtagcgcgcctc

SEQ ID NO: 79745 - DNA, 373 bp, Zea mays
ctcgcgagtcgacacacgcctctacacctactgatgccagggccagtacaaggacaagtgcccgcccacggactactccaggttcttcaagaggctgtgcccggacgcctacagctacgccaaggacgaccagaccagcaccttcacctgcccacagggctccaactacgatgtcgtgctctgcccgtgagccacatgttcgagagatcaacgaccatgcattcgcagctcgcaacaagtgcacactagtacaactatacacaagaaataagagtcgcgatatttattattatcgcgcgtggagtagttggtaaataaatcgcttattgcgagtattttggcccatgaataaggccttacttactggccatca

SEQ ID NO: 79746 - DNA, 469 bp, Zea mays
  unsure (1)..(469): unsure at all n locations
tcacgggtcgatacacgcctctagaataactctatatagcaatagtgctgaatccactctcagcaatcatgtatggtactagagcatctgtgtttataaaaatgaagaaaccagctgctgccattcgtgatgccaatgctgctctagagatcaacccagactctgcaaaaggctataaaactcgtggaatggcatatgccatgcttggcaaatgggaggaagctgctcatgatctgcacacagcatctaacatggattacgacgaggagatcaatgctgtgctcaagaaggtggagcctaatgctcacaagatagtggaacatcgcaggaagtatgagaggttgagaaaagagagggaggaaaagagagcgcagcgtgatcggcttcgtcaacgtgcagaggcgcaggctgcttacgacaanggcaaanaggaaagagcaatcgtcaagtcgctcatcaggaggtgcat

SEQ ID NO: 79747 - DNA, 451 bp, Zea mays
  unsure (1)..(451): unsure at all n locations
cccacgcgtccgcggatcgctaggcaagcttgcgtcgcgcgccctctccgtcgccgggagatggcagcaccagcagcttcgccgcctcaacatccacgagtaccagggtgcggagttgatggggaagtacggtatcaacgtacccaggggtgcggcggcggggtccgtacaggaggtcaatgacgccttgaagaacatgttccccagtgagaaagagatagttgttaaaagtcaaatccttgctggtggccgagggctgggaactttcaaaagtgggctgcaaggaggtgtccatattgttaaggctgaggaagctgaaagcattgcacgtaaaatgttaggccagattctggtaacgaaacaaactggtccgganggaaagattgtgagcaaggtctacntgtgtgagaaactgtctcctactaatgagatgtattttgccatcaccctt

SEQ ID NO: 79748 - DNA, 440 bp, Zea mays
aggccactgcagatactggggtacggctgggctgggttgctgaggaggtacctggtcgaccctgccgagatgtggtggccttctaaccttgcccaggtctcactcttcagggcgctgcacgagaaagaagaggagggcggcaagtcccgtggcccgtcgcggatgcgcttcttcctcatcgtcttcttcgcgagcttcgcgtactacgcgctgccggggtacctgctgccgatcctgaccttcttctcgtgggcgtgctgggcgtggccgcacagcatcacggcgcagcaggtcgggtccgggtaccacggcctcggcgtcggcgcattcacgctcgactgggcgggcatctcggcgtaccacggcagcccgctggtggcgccgtgggcgtccatcgccaacacgggcgtgggaatcgtcatgttcatctacgtcatcgt

SEQ ID NO: 79749 - DNA, 401 bp, Zea mays
  unsure (1)..(401): unsure at all n locations
cagccaattcgctcgagttcagatcgagcgcgcgccaagcaagtcttccggccggccgcgaagagcgcaatcaagcaagacaagatggtgaagctcgccttcggaagcgtcggcgactccttcagcgccacctccatcaaggcctacgtggccgagttcatcgccaccctcctcttcgtcttcgccggcgtcggttccgccatcgcctacgggcaactgacgaatggcggcgcgctggacccggcgggcctggtggcgatcgcgatcgcgcacgcgctggcgctgttcgtgggcgtgtccgtcgcggcgaacatctcgggcggccacctgnaaccggccgtgacgttcgggctggccgtgggcggccacatcaccatcctgacgggcgtcttctactgggt

SEQ ID NO: 79750 - DNA, 409 bp, Zea mays
gacgatccaacactctagactcagtcctagtataaggacggacctaaccttcaaccaacttaaattgtacccgccataattcctttcggggcggtaataacccaaaaaaccctcaattacatgtccaattacaagggacttaaaatcacgcaggtgaactgcgcacggaaggcgataaggctgatccacgcggaagacaagaacctcaaggccgaggactcagcgtgggagctgaagaagaagttcggcaacggcgtgagcaccatggtcctcgtctacaacgccaccggggccagcctgagcctggtggacgacgggaaagactggatgggctccgtctacagctcgccgattccggacaccttccacaacgggcagtggatcgccttcctccacgtcaagcccggct

SEQ ID NO: 79751 - DNA, 450 bp, Zea mays
  unsure (1)..(450): unsure at all n locations
gccacgcctgctgcagcacctcgctctccgctccgttggccccatggagtccgtcgcgtccgccgcgatcgccaccacctcccgctctctcccgctccccttctcttctaccccggtccaccgccggcgccgtgccgccttcctccccgttgccgcctccaagcgtcacgacgacgacaaggaggccgcgaaagggtccggctcggaaccacggcgcgagcctaccagcctcgcgccgtacggactctccatctcgccactctccaaggacgcggccatggggctggtggtgagcgctgccacggngagcggctggacgacgggatcggggatggagagcccgccgacggcgagcanagccggtggggctggcaggccggaggtgtcgacgctgccttggtccctcttcacgannatcacgcggcggcgcatgcgggtggcctttcactg

SEQ ID NO: 79752 - DNA, 382 bp, Zea mays
ctatccccgcgtggacgcgtgtagtcctagtctctcgccagcaccatcatcatcaatcacggcggcgatcccgccccgcctcgatcgcccacgctgcccgactggaaccggacgctgctgctgctgctgctatgctgacagcgacgacgatggggccatggctcatatcttgctccacggcacgctccacgccagcatcttcgaggccgaatcgctctccaatccgcaccgcgccacctgcggcgcccccaagttcatccgcaagccggactactgttctagcatgctcaagagaacgctcctgcactgcactagttccctttgatcactctaccctaagctcgtctccaacttgtggaacggattgacgataccgtgggta

SEQ ID NO: 79753 - DNA, 441 bp, Zea mays
  unsure (1)..(441): unsure at all n locations
agtccatcaccttcaatggcggcggcggcggctgctgccacctccttcaccaccctcgccgtcgcgcgttcggcggggcagcggtcccttcttgcctccaaggccgcaccttcgccgctcctctccctccgtggcgcccgcatcccctcgcaggccgtctccttctccgggggccttgcggcgtcgccctctcacagccgcgcgcgcttcgctacatccgccagcgccgagcccaaggaagcagatcttcagtctaaaatcaccaataaggtgtattttgacataagcattgggaaccctgtggggaagaatgttgggaggattgtcatcggcttgtatggggatgatgttccacaaacagcagagaactttcgtgctctttgcactggagagaaagggtttggatacaagggatccagtnttcaccgtgtcatcagcgac

SEQ ID NO: 79754 - DNA, 402 bp, Zea mays
tcaatgtgcaggttttggatctttgggtttgatgacatcagtgttggtgtgccctgatggaaaaaccatcgaagctgaagctgcccatggcacggttacccgtcatttccgtgtccaccagaaaggaggcgaaaccagcacgaacagcattgcttcgatctttgcatggacaagaggacttgcccacaggtacaactggtgtttgcttttttacgaccttctataacattataatatagtcggggggggggggagttttacggctagctgattcgcttggggtactcccttaattatgcgccgcagggcaaagctcgacgacaacgctagactactcgacttcgctctcaaactcgatgctgcttgcgttgagaccgtggagtccgggaagatgactaaaga

SEQ ID NO: 79755 - DNA, 419 bp, Zea mays
gggtcggcccacgcgtctaaatcactcctcgtcaaaaagacccaaaccttcggtgacctcggtccggcggccgcctcgggtcaacatctctctaccccgcggccccgccgtcaaccgataccgcagcgctgggaaggatcacgggggaccggagcgaggcggggggcccgcggttttgtcgcccggatggcggcgcagcgatgacactggcggcgggagcggcgcggcgttgggatgcggacgatctgcgatgtgtgcgagagcgcaccggcggtgctcttctgtgcggccgacgaggctgcgctttgccggccttgcgacgagaaggtacacatgtgcaacaagcttgctagtcggcatgtgagagttgggcttgcagaccctaataaactggcacgttgtgatatatgcgagaattc

SEQ ID NO: 79756 - DNA, 385 bp, Zea mays
gacagggcgtactccgacggcacggggaaccccgacaccggcgccgacttcggcggcgcgccggacatcgaccacctgaacccgcgcgtccagcaggagctcaccggctggctcaactggctcaagacggacgtcggcttcgacgcgtggcgcctcgacttcgccaagggctactccgccgacgtcgccaaggtctacatcgacggcacccagccctgcttcgccgtcgccgagatatggacctcgctggcctacggcggcgacggcaagcccttctacgaccagaacgcgcaccggcaggagctggtgagctggctggaccgcgtcggcggcaaggccagcccggccaccacgttcgacttcaccaccaagggcatcctcaacg

SEQ ID NO: 79757 - DNA, 442 bp, Zea mays
  unsure (1)..(442): unsure at all n locations
gtttataacaacacttctagtcactttagtaatggttatgatatggaagacaagcctgctgtggattgcactctttctagtaataattggtggagcagagctcgtatacttatcttccgcattctacaagttcactcaaggtggctacttgccattagcttttgcaggaattttgatgtttataatggccacatggcattatgtccatgttcatcgatacaactatgagctccagaacaaagtatcaagtaactatgtggcagaattgtccgcaaggagaaatctggccaggttgccaggaataggctttttgtactctgagcttgtacaaggcatcccacccatacttcctcacttgatagaaagggtaccttccatccattcagttctcgtgattatctcaataaagtacttaacgatcagcanaatagaaacaagcgag

SEQ ID NO: 79758 - DNA, 394 bp, Zea mays
tacactaatctccattaggatctcgcattcagcgcagcgcaggtgtgaaggaagggggacccggaggaagatggggctcgcgttcgggaagctcttcagccggctcttcgccaagaaggagatgcggatcctcatggtcggcctcgacgccgccggtaaaaccaccatcctctacaagctcaagctcggcgagatcgtcaccaccatccccaccatcggtttcaatgttgaaactgttgagtacaagaacattagcttcactgtctgggatgtcgggggtcaggacaagatcagacctctttggaggcattacttccagaacacccagggtcttatttttgttgtggacagcaatgaccgtgaccgtgttgttgaagccagagatgagctccac

SEQ ID NO: 79759 - DNA, 412 bp, Zea mays
gtcgacacaagcctctaggctgatgctcatcaccaaccccgcgcgcgggggagcgataaaccctagtcttcgccgtcgtcgcaggaggacccgcgatgtcgcacttcgggaggtcaggcccgccggacatccgcgacaccttctcgctcctcgtcctcaacatcagcttccgtgagggagatctaaccctagccccaccctctctcactctctccctaatcgcttccttctcgtgtccgtctccccccgcttcacaggcaccacggccgacgacctcttcccgctcttcgagcgctacggcaaggtcgtcgacgtcttcatcccgagggacaggaggaccggggactcgaggggtttcgcgttcgtgcggtacaagtacgccgacgaggcgcagaaggctatagatcggctc

SEQ ID NO: 79760 - DNA, 354 bp, Zea mays
  unsure (1)..(354): unsure at all n locations
caatacgaaacgaattaatccccaatcaacacagcaagtcagcaacaagcaaagcagcgatccgagagatggacgcgaggatgttcgggctggagaaccccctggtggcggcgctgcatcacctgctggacgtgcccgatggcgacgccggagcgggcggcgacaaggcgggcggcggcgccacgcgcacctacgtccgcgacgcgcgcgccatggcggccaccccggccgacgtcaaggagctcgcgggagcgtacgcgttcgtggtggacatgccggggctgagcacgggcgacatcanggtgcangtggaggacgagcgggttcttgtgatcagcggcgagcggcgccggg

SEQ ID NO: 79761 - DNA, 451 bp, Zea mays
agagtcactgcattcatcacagttgcactgacatacttccagcttgctgctgaggaccatgagtggtggtggaggtcattcctatgcggaggatcaactggatttttcgtatacggctactgcctgtactactactatgcgcgatcggatatgtctggcttcatgcagacatctttcttctttggctacatggcctgcatctgctatgcattcttcttgatgcttgggatggtgggcttccgtgcctccttgttctttgtccgccacatatacaaatctatcaagtgtgagtgagctgttgttggaagatcaagagcagcagagctgtacccgtttttggtgccaccgagaagtcccaaatatagaaaaaaaatggtttgctctcgcgtgcaacaagagcagctagtgattgccatgtttcagattaggccattatttatagtaacagcta

SEQ ID NO: 79762 - DNA, 454 bp, Zea mays
cacgcgtccacacaaagcgcctagcaaaagcaaagttcccgaagcactcttgcaatccactgagttctgtttgttgagacgcatagagctagctgctagcgacgacaatgtcgctcgtgaggcgcagcaacgtgttcgaccccttctcgatggacctctgggaccccttcgacaccatgttccgctccatcgtcccgtcggcgacctccaccaactccgagactgccgccttcgccagcgcccgcatcgactggaaggagacgcccggggcgcacgtgttcaaggccgaccccccggcgtcaagaaggaggaggtcaaggtcgaggtcgaagacggcaacgtgctggtcatcagcggccagcgcagcagggagaaggaggacaaggacgacaagttggcacgcgtcgagcgcagcagtgggcagttcgtcaggcgcttccgcctgccggagaac

SEQ ID NO: 79763 - DNA, 441 bp, Zea mays
cccacgcgtccgagcgaagaagaatcgccatcacagcaagctacgcgcactgaaatcctccaatccacaggacacagctctacttccacagttcgcagactcgcacgcaccgagcggctagcgatcaacgagaaatgtcgctggtgaggcgcagcagcgtgttcgacccattctctgtggacctcttcgaccccttcgacagcatgttccgctccatcgtgccgccgtcgttgtcgtcgtcggcggcctccgagaccgccgccttcgccagcgcccgcatcgactggaaggagacgcccgaggcgcacgtgttcaaggccgacctccccggcgtgaagaaggaggaggtcaaggtggaggtggaggacggcaacgtgctgctcatcagccggcagcgcaacaaggaaaaggaggacaagggcgacaagtggcaccgcgtgg

SEQ ID NO: 79764 - DNA, 444 bp, Zea mays
  unsure (1)..(444): unsure at all n locations
gcgcgggacaacacaccagtctaaactgaatcatatcaggggaccaacctggccaccaagggcatgggcccaacctcttcgaccggccgcagcccaactcccccaccgtctacgactggctctacagcgacgagaccaggagcaaccaccgctagatcgggcgagatggatggacagtgaagaggccatgtttgctggtccttgtggttatctaaaacgcacgcatgctctattatagctagtcatcactatatatatacttgtgtttgtgtattgttgttcttgttctgctggtgtctccgccgtttaatttgacctatgttatggagtgagtgatatatgtgccgtcactcctagtatatagtagtgagtgactagttggtatgtgtagtactgtactatcttttctccatatgcatngtttgccagcgcgtaatgaatgta

SEQ ID NO: 79765 - DNA, 431 bp, Zea mays
  unsure (1)..(431): unsure at all n locations
gaccgaagcatcaatcagcgagcgaaccggccagaaaagcacaaagtagtcctccatttcgaatcgcgctcatagtcacagggctttagcagagatggcgggcaagggcggcaacaagggagagggcccggcgatcggcatcgacctcggcacgacctactcctgcgtcggggtctggcagcatgaccgggtggagattatcgccaacgaccagggcaaccgcaccacgccgtcgtacgtggcgttcaccgacaccgagaggctcatcggcgacgccgccaagaaccaggtcgccatgaatcccaccaacaccgtcttcgatgccaagcgactcatcggccggcgcttctcggacccgtccgtgcangcggacatgaagatgtggcattcaaggtccttccaaggccccgccgacaagccaatgatcgtgg

SEQ ID NO: 79766 - DNA, 381 bp, Zea mays
tgaaaacctaaggcgatctgttctgtccacctcatggatcagcgcacaggcacgcaacgttcacaggggttcggtttcgtgggtgagcggatcgagatggcggcgtcggatgttgagtaccgctgcttcgtcagcggcctcgcctgtgccacggacgaccactccctccacaacgccttcagcacctacggcgaggtcctcgagtccaagatcatcctcgatcgggagacgcagaggtcccgcggcttcggcttcgtcaccttctccacggatgaggcgatgcagaacgccatcgaaggcatgaacggcaaggagctggacggccgcaacatcaccgtcaacgacgcccagtcacgcggcggccgtggacgccgcagcggc

SEQ ID NO: 79767 - DNA, 234 bp, Zea mays
  unsure (1)..(234): unsure at all n locations
aatcnccgccgccgcaggcggtcacccatcgccaccaagatgcagatctttgtgaagactctgacggggaagacgatcactttggaggtggggtcgtcggacaccattgagaatgtgaaggcgaagatccacgacaaggagggcatccccgcggaccagcagcggctcatcttcgccggcaagcagctcgacgacggtcggaccctcgcgggcgacaccattcacaaggagtcg

SEQ ID NO: 79768 - DNA, 379 bp, Zea mays
gtgccacatgaccaagagtactacctttcgattgtatctgaaaggcttggcaacaccattagtttctcagaatgtggaggtattgagatcgaggagaactgggacaaggttaagactatctttcttcccacagagaagcaaatgacacctgacgcatgtgctccattgattgccaccctgccattggaggtccgcacaaagataggtggtttcattagagctgtattttctgttttccaagacttggatttctcatttcttgagatgaacccattcaccttggtaaatggtgaaccgtatcctctggatatgagaggagaactagatgacacagctgctttcaaaaacttcaataagtggggcaatattgtgtttcccc

SEQ ID NO: 79769 - DNA, 296 bp, Zea mays
gtattggcttctcctccccctccggttcgggttcgggttcgtgaggttctccggggttcggtttcgtgggtgagcggatcgagatggcggcgtcggatgttgagtaccgctgcttcgtcggcggcctcgcctgggccacggacgaccactccctccacaacgccttcagcacctacggcgaggtcctcgagtccaagatcatcctcgatcgggagacgcacaggtcccgcggcttctgcttcgtcatcgtctccacggaggaggccatgcgcaacgccatcgagggcatgatcggc

SEQ ID NO: 79770 - DNA, 425 bp, Zea mays
cgcagcagccaaaacctacctagccgccgccgcaggcggccccccatcgccgccaagatgcagatctttgtgaagactctgacggggaagaccatcactttggaggtggagtcctcggacaccattgacaatgtgaaggccaagatccaggacaaggagggcatccccccggaccagcagcggctcatcttcgccggcaagcagctcgaggacggtcgcaccctcgccgactacaacattcagaaggagtccaccctccacctggtgctccgcctccgcggtggcgccaagaagcgtaagaagaagacgtacaccaagcccaagaagatcaagcacaagcacaagaaggtgaagctctccgtgctgcagttctataaggtggacgacgccacaggcaagggtgaccgcctccgcaaggagtgccc

SEQ ID NO: 79771 - DNA, 356 bp, Zea mays
atcgcagcagcgaagtgtcgaagcggcggcatggcggagagcaaggcgcgtgtcgcgctgttcctggcggcgctcgcggcggcgagcctgctggcgctggccccggccggcgccgcgacgacgtgcgcgccgacgcagctgaccccgtgcgcgcccgccatcgtcgggaacgcggcgcccaccgcggcgtgctgcgccaggctcatcgcgcactcggcgacctgcttctgccagtacatgaggaaccccagcatgcagcgctacgtcaactcccccaacggcaagatggtcttcgccgcctgtaaggtgtccctgcccaggtgctgatgctgagtgagtcgtctgccggcccatca

SEQ ID NO: 79772 - DNA, 384 bp, Zea mays
  unsure (1)..(384): unsure at all n locations
cccacgcgtccggctctctgttcctacgccgtttcctctcccgactctctcctcgccggcgacgccgcggagtaggtgcaacagaaactgctcgaggcggaggcggagcctgcggctgcacagacatgggtgatcacgaggcgcgcggtgatgacttcgagaagaaggcggagaagaagctctcgggctggggcctcttcggctccaagtacgaggacgccgccgacctcttcgacaaggctgcgaactccttcaagctcgccaagaactggagcagagctgcatcagtttacatcaagattgctaactgtcatttgaagggagatagcaagcatgaggctgcctcagcgtacgtcgaggcagcanattgctacaaaaagtttt

SEQ ID NO: 79773 - DNA, 413 bp, Zea mays
ctcgtgcggtcgacacaagcctctagacagcgtcgctagatccacaccgatcccggcctcctccaccatgaccaccgagttcatcttctgctccgcgtacatacgccagcaaagcatatgcactccggccgtgaccgcctcgatcaccgagttccacccgcagtgcgtcacgaacgcacctgtggccctgtggttgagcacgttcacctgcggcgcccatagcttgacaactacgccgcgagctctggtcctctccaataacccggccggcaggagcgcacagaggtcgaagtcggcgcgcgggtcgaacagcctctctgggtccatgccctcggtggggagaggagccctcaccacccacaggaaccggtgcccggacctctccaggccgacggcaatctccttgagctgct

SEQ ID NO: 79774 - DNA, 437 bp, Zea mays
ctcgcgggtcgacacacgcctctacaggcatccccaccacctcttatcaagtcctcctcgggttagggttccttagggttttgtggaggggcgatggcggcggctgatgtggagtaccgttgcttcgtcggcggacttgcctgggccaccagcaacgagtcgctggagaatgccttcgcctcctacggcgagatcctcgactccaaggtcatcaccgaccgggagacggggaggtcccgcggcttcggcttcgttaccttctcctccgagaactccatgctcgacgctatcgagaacatgaacggcaaggagctcgacggccgtaacatcaccgttaaccaggcccagtcccgtggcggcggcggcggcggcggcggcggtggctacggcggcggtcgcggcggcggccgctatggtggcgggccccgttacggcgg

SEQ ID NO: 79775 - DNA, 414 bp, Zea mays
ctcgcgggtcgacacacgcctctacatcgaccctgcatatatagtctcggcggctctagaagacgatgggcaaggacgacgtgatcgagagcggcgctggcggcggcgagttcgctgccaaggactacacggaccctcccccggcgccgctgatcgacgcggctgagctggggtcctggtcgctgtaccgcgccgtgatcgccgagttcatcgccacgctgctgttcctgtacatcacggtggccaccgtgatcgggtacaagcaccagacggacgcgtcggcgtcgggtgccgacgcggcgtgcggcggcgtgggggtgctgggcatcgcctgggccttcggcggcatgatcttcgtcctcgtctactgcaccgccggcatctcggggggccacatcaaccccgccgtcacct

SEQ ID NO: 79776 - DNA, 390 bp, Zea mays
cccacgcgtccgatcgtcgtctcccacaacacgctccactaaccctagcgacagcctcgggtcgtcgtttgatccccgcggggagctctagttccgccaagcgtgcgtaccggcgtccggatccgggaccgaagatgacggagtccctggtgcggaacaagccggggatggccagcatcaaggagatgccggtggtgcaggacgggccgccgccgggcggtttcgcgcccgtgcgcttcgcccgccggatccccacctcggggcccagcgccaccgccatcttcctcaccaccttcggtgctttcgcatatggcatgtaccaggtcggccaggggaacaaggtccgccgggcgctcaaagaagagaaaattgctgctcgcagtgctatac

SEQ ID NO: 79777 - DNA, 401 bp, Zea mays
ggcttccatagcgctgaagcgaggcgtgccgcattgggttgttcgagagctcctagtgttgccctactacatgatggagggcgatctccccacgcccgcgaacgctagggttgttgccgtggtcaccggcggcaacaaggggatcgggctggaggtgtgccggcagctggcctgcagcggcgtcaccgtcgtcttgacagccagggacgacgcgaggggcgcggcggccgtggagaacctcagaggcctggggctctccgatgtcctcttccaccgactggacgttaccgacgctccgagcatcgctcgactcgctggtttcctcgagacccgtttcgggaagctagacatcctggtaaataatgccgcgattggcggggttgagtatgttcatgaccaag

SEQ ID NO: 79778 - DNA, 426 bp, Zea mays
cgagagagaacccaaacggagagagacaatcgagagagatggcaaactgttttggtgacgtcgtggacaattacaagctagacacaatgccaagatatatcggcaaaaagaagactcgagaagaccgggcacgagaggcctcctatctcagtaatgagaatgagaagtacaagaaagctaaagactatgtgaacatgctgaaggactggtacggcaatggagcgtcgacgctgtgcgtgatctacaaccagacgggcggaaccctgcggtacgtcgacgacaaggactggctgggctacccggggccgacgccctacccgacggagatcggcaacgggcagtgggcgtccttcctccacgtccacaagaccggcgcctcgttcgggtccatggcccgctggtctctaccgcgggaaggacggcggc

SEQ ID NO: 79779 - DNA, 420 bp, Zea mays
agggccatggaaaggcagggtcttgatatgaaagttgcagctctggttaatgacactgtaggcacattggctggtgggagatatgctgataatgatgttgttgctgctgtaatattgggcactggcacaaatgcagcttatgtggaacatgcaaatgcgattcctaaatggaccgggctgctacctagatcagggaacatggtaatcaacatggagtggggaaacttcagatcagataaacttccaaggtcggagtatgataaatccttagacttcgaaagtttgaaccctggtgagcagatatatgaaaagatgatttctggaatgtatcttggagaaattgtccggaggatcctgctgaaactggctcatgatgcttcattgtttggggatgttgttcctccgaaactggaacagcta

SEQ ID NO: 79780 - DNA, 406 bp, Zea mays
gctgtggacacacagaccatgatgcagatcatccctgctgatccaggtcagcttgattcccatgagcgatctgtccctcgtgctggacaagtgtggttcccagattctgcaaccaagaccgctcaggcattattagacttcaaccgtgaaggattgcctctgttcatcctggctaattggagaggcttctctggtggacaaagagatctctttgaaggaattcttcaggctgggtcaacaattgtcgagaaccttaggacatataatcagcctgcttttgtgtacattcctatggctggagagcttcgtggaggagcttgggttgtggtcgatagcaaaataaatccagaccgcattgagtgttatgctgaaaggactgccaaaggtaatgtcctcgaacctcaag

SEQ ID NO: 79781 - DNA, 398 bp, Zea mays
accgtcgtccgccgccgccgaaggacggaaggagaagagggtacggccgtctcctcgcccccatggcccacgagaagaagctgtccaacccgatgcgggagatcaaggtgcagaagctcgtcctcaatatctccgtcggggagagcggcgaccgtctcacccgcgccgcaaaggtgctcgagcagctcagcggccagacccccgtcttctccaaggcgaggtacacggtgcggtcgttcggcatccggcgtaacgagaagatcgcctgctacgtcacggtgaggggcgagaaggccatgcagctgcttgagagcggcctcaaggtcaaggagtacgagctgctcaggaggaacttcagcgacaccgggtgctttggtttcggcatccaggagcacatc

SEQ ID NO: 79782 - DNA, 394 bp, Zea mays
cccacgcgtccgccttcactcagtcttaggctcttagctctaggctctagctagccgcgccactccttcgtgtagccatcagccttctcatcgccaccaatggccactgccgaggtccagaccccgaccgtcgtggcggccgaggaagcgcccgtggtggagaccccgccgccggccgtcgtgcccgaggagtctgcccccgccgaggccgaggccgaggccgaggctgaggctgctgctcctgctgatcccgaggagcttcccgcggccgagcagcaggcagccgccgagcccgaggccgctgctcctgctggtgccgaggaacccggcgcggccgatccggccgccgaggctgaggctgctgctcctgctggtcccgaggagactcccgcgg

SEQ ID NO: 79783 - DNA, 398 bp, Zea mays
gaaatcgggggcaatgactacaacggacctcttctttctggagttcccatggagaaaatccgtgccatcactccgagtgttgttgcaaaaatttcttctacaatcagcgaattgattcggctaggagccaagactcttgtggttccaggaaacctcccaattggatgcatcccagactatctgatgatattcaagagcaataaggaagaggattatgaaccacagacaggttgtcttaggtggatgaacgagttctcacagtatcacaacaaggttcttgtggagcagctcaagaagcttcgcaagcttcatcctggagcaaccatcatctatgctgattactatggagctgctatggaaattttcctttcccctgaacaatatgggatcgaatatcc

SEQ ID NO: 79784 - DNA, 372 bp, Zea mays
gcgtggagcgcagcagcggccagttcgtgcggcgcttccgcctccccgagaacgccaagaccgaggaggtgagggccgcgctggagaacggcgtgctcacggtcaccgtgcccaaggccgaggtcaagaagcctgaggttaagagcatccagatctccggctgaagaagacatggacgcgaggtgaatggtcgcgtcgcgttcgcgtcgcggcgtcgggtcttgggtttcagcgacgcgactcgtgtgtgtggtactgtggttgctctgctttggtatgtctggtgtgtacgtgtgctgttcagtgtttcgtggtcatcgtctgtacattgtgctgttcggtgagctccccgactcagtgtgttgtgttctg

SEQ ID NO: 79785 - DNA, 388 bp, Zea mays
  unsure (1)..(388): unsure at all n locations
cccacgcgtccgcaaccgttgtcgttgtctctgttcctccgcttcctgctctcttggcttgctgcttgccctcggagcagtgccttccgccgccgccgccgccgcctgttgtgagaaggagaggccggggctgggaggagatgagcgtgaccaagttcatcaagtgcgtcacggtgggggacggcgcggtgggcaagacctgcatgctcatctgctacaccagcaacaagttccccacggattacatccccacggtgttcgacaacttcagcgccaacgtctccgtggacggcagcatcgtcaacctgggcctctgggacactgcaggacaagaggactacagcagattgcggccactgagctacangggcgcggacgtgttcgtgct

SEQ ID NO: 79786 - DNA, 373 bp, Zea mays
acccacgcgtccgcccacgcgtccggcgtgcgctccacgcctcctccaggaaagcgagagcttctgcataagaacaacaaatcaaaagcgtgatcagctcggtgccaacaaaacctcaacaaccaagtttcatgtctgatctcgacgtccagcttccatctgcctttgatccgtttgctgaggcaaatgctgaggactctggtgctggtcctggaacgaaggattatgtgcatgtgcgcatccagcagcgcaacggcagaaagagtctgactacagtccagggtctgaagaaggagttcagctataacaagatcctcaaggatctgaagaaggaattctgctgcaatggtactgtagttcaggacccagagct

SEQ ID NO: 79787 - DNA, 390 bp, Zea mays
cgcagcagccaaaacctacctagccgccgccgcaggcggccccccatcgccgccaagatgcagatctttgtgaagactctgacggggaagaccatcactttggaggtggagtcctcggacaccattgacaatgtgaaggccaagatccaggacaaggagggcatccccccggaccagcagcggctcatcttcgccggcaagcagctcgaggacggtcgcaccctcgccgactacaacattcagaaggagtccaccctccacctggtgctccgcctccgcggtggcgccaagaagcgtaagaagaagacgtacaccaagcccaagaagatcaagcacaagcacaagaaggtgaagctctccgtgctgcagttctataaggtggacgacgcc

SEQ ID NO: 79788 - DNA, 416 bp, Zea mays
ggacttgtttcttgctcatatctccggaatggacaccctggcccgtggcctccgcaacgccgccaagctgatcgaggatggttccctagatgctctcgtccgcaagcggtaccagagctttgatagtgagattggtgccttgatcgaggctgggaaaggagactttgaggcgctagagaagaaggtccttgagtggggtgagcccactgttccgtccggcaaacaggaactggcggagattctgttccactctgctctatagatggcgccatgtccgtagcggtagctcctggaataagcaagcactgagcctgcgccctcccaacgcgcgcggtcgtcctcaccagtcaccaccaagggaatgtttctggttgcgcgcgaatgaacatgtacaatacaccgttggaactgaaata

SEQ ID NO: 79789 - DNA, 396 bp, Zea mays
aaaaggcactgaagaagccagtcaatagcgagttctactactagtagctagcctgctgatctgttctgttgtttagttcgcaaagccttctgtttcggcgaccatggaggatgagaggaacacccagcagcaccagggcggtgaggcccagcaggacgccgccgatcaggtggacgtgaaggatagggggctcctggacagccttctcggcaggaagaagcacgacgacgaccaggagaagaagaagcagacggatgagctggcgaccggcatggagaagaaggacaagaagaagaaggataagaagaagcacggcgagggccacgaccacgacggcggccacagtagcagcagcagcgacagcgactgagatctggtgtcgcagatgtcgatgct

SEQ ID NO: 79790 - DNA, 418 bp, Zea mays
  unsure (1)..(418): unsure at all n locations
gcctcggctcgtttgatccccgcggggagctctagttccgccaagcgtgcgtaccggcgtccggatccgggaccgaagatgacggagtccctggtgcggaacaagccggggatggccagcatcaaggagatgccggtggtgcaggacgggccgccgccgggcggtttcgcgcccgtgcgcttcgcccgccggatccccacctcggggcccagcgccaccgccatcttcctcaccaccttcggtgctttcgcatatggcatgtaccaggtcggtcaggggaacaaggtccgccgctcaccagtcttagctacatgggggtggaatcatgcatgcanggcgctcaaagaagagaaaattgctgctcgcagtgctatactgccgatgctccaagcagaagaggatgaaagatttgtcaaag

SEQ ID NO: 79791 - DNA, 424 bp, Zea mays
acccacgcgtccgggactttggctaaaggacaagacaccttcaccccaattagtgcagtagttccaaaatcagctgtcactaatcccgatgatctcgagctctggctgaaggtagatgatgaactaaggcagaaaggaccgacaagcgacatgctattcaagattccttttctgataagctatatcagttccatcatgacattaatggagggtgatgtgatattaacaggtactcctgagggtgtgggtcctgtcagagtaggtcagaagattacagctggtataactgacctaattgatgttgagttcgatgttcagaggcgaaatcggtcattttccacatgatgcaataagcaagaaagtaatggtgaatacaaagtggcagtactcgtcctcgaccttgaatcgcattactggacctgca

SEQ ID NO: 79792 - DNA, 389 bp, Zea mays
ggcgcgctgcagcgcctcccacggatcatcggctacggcaacgctgctgacctcgcgctcaccggacgcaagatcaccgccatggaggccaaggagatggggttggttaccagggtattcgattccaagcaagacttggatgcgggcgtcgcaaagatcgccaaagaaatagctgacaagtcggcatgggcggtgatgggaaccaaggccgttctgctgagaagcagggatgcgaccatagaacaaggcctggagcatgtagccacatggaacgcgggtatgatgaggtcgaacgatctgaacgaggccatcagagccttcctggagaagcggaagcctgtgttctccaagctgtaatgatcagataccatcataccatacctctgtgt

SEQ ID NO: 79793 - DNA, 380 bp, Zea mays
actgtcgggcgccacatccgtgttcggcgccgcgcccgtggaggtctccgtgaaggtggccggcatccactggcactacggcagccggtcccacgccccggagctcaccgcgggctactacaacacgcggcgccacgacgggtacctcaccatcgcgcgcctcctggcgcgccacggcgccgtgctcaacttcacctgcgtggagatgcgggaccacgagcagccgcaggaggcgcggtgcatgccggaggcgctggtccggcaggtgggcgccgcggcgcgcgccgccggggtgggcctcgcgggcgagaacgcgctgccgcggtacgacggcacggcgcacgaccaggtggtcaccacggccgccgagcgcgccgccg

SEQ ID NO: 79794 - DNA, 380 bp, Zea mays
ctccagtctctgggcaccaaatttccggcggcgatggcggcggatgtggcgaggtcagggttccggcacatgttcgccgtctctgccttcgcgccgacgaaagagcccgccgcgcgcaccaatgacgatccagcccccaacctcgtcgactccggcttaaccaagcgtaccacaagtgaaggacttagagatgcctttgcggagtttggtgaagttttgcatgctcgagttgtgatcgatcgtgtcagtgggttttctaatggatttggctttgtaaggtatgctatgaacgatcaggcatccaaagcaatacaatgaaacgatggcaagttccttgatggatgggttagttttgcagaatacgctaaatccagaccacc

SEQ ID NO: 79795 - DNA, 296 bp, Zea mays
tacacgcaactaaaatgcgtccgtatagcttggttttgccgaaatattgtgggggaggagtgataaggtcggtggggtttctatgttaaagtcgtggtctcgggcaatatgcgatttttctttatgccatgttttgggaaattttgtagctgcctaggcctcgtgctgttgtggtggttcattagtatgaagacgaaggctctgctggctatgggagtcctttttctttttgttagtattttgtttaaaactatgtatgaccgaattatttgtcatccttgactcaattctgctgc

SEQ ID NO: 79796 - DNA, 392 bp, Zea mays
gccaattcgctcgagttcagatcgagcgcgcgccaagcaagtcttccggccggccgcgaagagcgcaatcaagcaagacaagatggtgaagctcgccttcggaagcgtcggcgactccttcagcgccacctccatcaaggcctacgtggccgagttcatcgccaccctcctcttcgtcttcgccggcgtcggttccgccatcgcctacgggcaactgacgaatggcggcgcgctggacccggcgggcctggtggcgatcgcgatcgcgcacgcgctggcgctgttcgtgggcgtgtccgtcgcggcgaacatctcgggcggccacctgaacccggccgtgacgttcgggctggccgtgggcggccacatcaccatcctgacgggcgtcttct

SEQ ID NO: 79797 - DNA, 399 bp, Zea mays
acggagcatgacgcaagcagagccgcagagatccgtcacactgcaagttttgaaaactgaactgtaagatggcatcagcagagctttcccgtgaggaaaatgtgtacatggcgaagctcgccgagcaggcagagaggtacgaggaaatggttgagttcatggagaaggtagcgaaaactgttgactcggaggagctcactgtggaggagcgcaacctcctgtctgttgcatacaagaacgtcattggagcccgccgtgcctcatggcgcatcatctcctccatcgagcagaacgaggagggtcgaggcaatgaggaccgtgtaacactcatcaaggactaccgtggcaagattgacactgagctcaccaagatctgtgatggcatcctcaagcttctcg

SEQ ID NO: 79798 - DNA, 384 bp, Zea mays
  unsure (1)..(384): unsure at all n locations
gcgagcgacgaggcggtctccgccgttcctgcgatggctatcgtcggacgcagcctcctctaaggcgccgcggcagcgcgtagcggcgctgtgggggaacggtgactacgggcggctggggctgggctcgctggagtcgcggtggagccccacggtttgccccttcttcctcgcccgcgccgccgacccgcccgcctccctcgcctgcggcggcgcacataccctctttctcacccagaatgggcgagtgttcgctacagggctgaacgactttgggcagctggggatangaacctctgttacacatatgctggagcctgttgaaatttctggatttcacganagagttgtagaagtttcagctggcaaccatcattcttgtgc

SEQ ID NO: 79799 - DNA, 197 bp, Zea mays
ggcactatgcgagtttgcgttatgccatgttttgggaaattttgtagctgcctaggcctcgtgctgttgtggtggttcattagtatgaagacgaaggctctgctggctatgggagtcctttctctttttgttagtactttgtttagaactatgtatgaccgaattatttgtcatccttgactcaagtctgctgcaga

SEQ ID NO: 79800 - DNA, 402 bp, Zea mays
  unsure (1)..(402): unsure at all n locations
tcggcccacgcgtccgatcacaacgaacagaagctctcgatctcaccgacaccgaggaagaagagatcaatggcgtccgagcagggagtcgtgatcgcgtgccacagcaaggctgagttcgacgcccacatgaccaaggcccaagaagccggcaagctggtacgcgtccccgtgcctcgtcttcctcgatccccattcccgtgattttgtttggaaagctgtttaagggattccgcggttcaaatcgattcgtctttggtttccttattatgcggtcgcccccctgttcaaatttgctctgaatcgcatctgggatgcttgtgttcgggggtgattaaggtgcggcgcgtgtantgggcaagattttanggattttagcgggtccgtacagtccgtctccgt

SEQ ID NO: 79801 - DNA, 402 bp, Zea mays
  unsure (1)..(402): unsure at all n locations
aggcggcttccctggccctcagggtccttactactgtggaatcggcgcggagaaatcgttcgggcgtgacatagtcgacgcccactacaaggcctgcctgtacgcaggcatcaacatcagtggcatcaacggggaggtcatgccggggcagtgggagttccaggtcggaccgtccgtcggcatctcttcgggcgatcaggtgtgggttgctcgctacattcttgagaggatcaccgagatcgccggcgtggtggtgacgttcgacccgaagccgatcccgggcgactggaacggcgcgggcgcccacaccaactacagcaccgagtccatgangaagganggcgggtacgaggtgatcaaggcggccatcgagaagctgaagctgcggcacaaggagcacat

SEQ ID NO: 79802 - DNA, 397 bp, Zea mays
acaaggcaccacacctcttcttcttcttcctcctcctcctagcacagctagcgcctgctccccttcgcctgtgatcatgtcttgcagcagcggcaagtgcgactgtggctccagctgctcctgcggcagctcatgcaactgcatgtcccctaacgtggagaccgccgccgccagcagcatcaagaccacggtcctcgccgcgccgaccaccaaggccagcgccggcggcttcgaggcggccaccgagggcggcggctgcgactgcaacacctgcaactgcggcaccagctgcggctgctcctgctgcagctgcaactgagccggtcaggcgatggcgcacgagagtcgagaggacgacgacgagtcgtataaatataatagcggcgtctaaataaga

SEQ ID NO: 79803 - DNA, 407 bp, Zea mays
  unsure (1)..(407): unsure at all n locations
taaacacacttctggcagagatgcttcccactgaatcactgatcgttgatcagtgttccaatattttggcaagtgcagctttgaataaattgaacagattggcctcgtggccattttcctgtatttatctgtagtcaggtccaattcttttctgttggtgagcgcaagttattcatagatgactcggtcatgggaatatttgtaatattatgtcatgtatcgttaaatttcagttgttttgtttcagctgccagaactgttagcaagagtattctggagctggaagctcgaacgcaactggttgtatctatatccttgaatgccgaataaaggaagggcaataaactgcagcgaaatatgtgctgtcagacattgttganaaaaaaaaaaaaaagggcggccgctct

SEQ ID NO: 79804 - DNA, 429 bp, Zea mays
  unsure (1)..(429): unsure at all n locations
acaataatctataatgaatcatatcactgcgctgataattattggatcaatttcgataattattagtagatctatgagatatgccgcctggaagaggcgaggtaagctgcagcatgtaaaaaagagaaaaaagatgtgacatcctagaggaggaggcctttgccatgatgggtgcgctcgcatggcaggccaggcaataataaaaagatgattattgcgtgccgggggaggagatcgcacgggggttgatgtttttggccccgggttctcctccctcatcttgttccgtgttcctgtatgcgttgcttccgctcctgttggtccgctacgcacgccggatttttgcatcgagcacggagatctacaacanaaacatggagctacgacgcgattcccaaggtacaatcgtaattatgttcaaacaatttt

SEQ ID NO: 79805 - DNA, 421 bp, Zea mays
cgggtccaggacgcgtacgcgtccgcttgggtcagcaccggtgatgcttttcatgaagggcactcccgatgctcctcgctgcggcttcagttcgaaggttgtgaacgccttgaagaaggaaggggtcagctttgggtccttcgacatcttatctgacgaggaagttaggcaaggtttgaagacgtactccaactggcctaccttcccccagctctactacaaatcggagctgattgggggatgtgatatcgttcttgagatggagaagagcggagagctgaagtcgaccctgtcagagtagacacctagcattcttgcttcgctggcgtttttaccatattgcctgcattggatcactctactctggtattcatgccattgtattcatagatccacgttggtacttgtctgcagtgccaca

SEQ ID NO: 79806 - DNA, 389 bp, Zea mays
ctactaccccaacgacggcgtgctgcaggccgacgtggagctgcaggcgtggtggaaggaggcgcgcgaggtcgggcatgccgacctcaaggacgagcactggtggcccaagatgcagacggtgccggagctcgtgaaggcctgcaccaccatcatctggatcgcgtcggcgctacacgccgccgtcaacttcgggcagtacccgtactgcgggtaccacccgaaccggccgtccgtgagccggcggcccatgccggtgccgggctccgacgcgtacaaggagctggagaagaacccggagaagttcttcgtgcgctccatcaccgcccagttccaggccgtcgtcggcatctcgctgctggagatcctgtccagccactcctccgacg

SEQ ID NO: 79807 - DNA, 347 bp, Zea mays
gctcgccgtggaatttggcccacgcatcgtggtgatggcgttcgtggggactgccatcgcgttcgcctgcgtcaccggcgcggacatggtggccaagcgcagggagtacctctacctgagtgggctgctctcgtcggggctctccatcctgctctggctgtagctacccggctccatcttcggctactccgcagccagcttcatgttcgaggtctacatcgggctgctcatcttcttgggctacgtggtgtacgacacgcaggatatcatccatagggcgcaccgcggagacatggaccacgtcacgcacgccctcacactcttcacaaacttcatggccgtcctcg

SEQ ID NO: 79808 - DNA, 358 bp, Zea mays
agaatcgcaacgacagcgagaacgtccaaacgagcgcgagtctccggcgataaccaagagcgcgggcacgcaaagcggcgaagcgggaaggaagcagtaacgatggggcttgactattacaagatcctaggcgtcgacaagggcgccaccgatgacgacctcaagaaggcctaccgcaagctcgccatgaaatggcaccccgacaagaaccccaacatcaagaaggaggccgagaacaagttcaagcagatctcggaggcgtacgaggtgctgagcgacccgcagaagcgcgcggtgtacgaccagtacggcgaggaaggtcttaaggggcaagtgccgccgccgggcgccggccggg

SEQ ID NO: 79809 - DNA, 404 bp, Zea mays
acgcgtacggcaacgtccagtggacaatgaccgctatgtcaggaactgccgcaacgggaggtcgccgaaggagaccagatggtggttccatgacgacacggtgtaattgagcgcctgtcagccttccttgctgtggtatatctcgtcaaggggagattggggatgatttaggcctatttgtaagcatccctctatcggattgcgaagcttaccttcctgtggcggtgtgttaaatgagttgcacacatgtgtcgagtctgagaatacatattaccatcatcaatgatataagtaatatagaataagcatgagtgtaccctgcctgaatcactggaacgagctcaaaaggaattaactgtgcaggtttaactatgacttgctttgctcaatgtgcctttgtatca

SEQ ID NO: 79810 - DNA, 395 bp, Zea mays
cccacacgtccgtcatcctctccgccgcctgccgcccgccgcatcagcaccgaccgggcaagatgaagactatcctgtcgtcggagacgatggacatctcggagggcgtcacggtcacggtggccgccaagctggtcacggtggagggctcccgctgcaagctcacccgcaacttcaagcacctcaacctcgacttccagctgcatgaggccggccgcaatgctcaaggtggacgcctggttctgcacactccgcaccatggccgccatccgcaccgccatctcccacgtccagaacctcatcagaggggtcaccaatggctaccgctacaagatgacgttcgtctacgcccacttcgccatcaacgcctccatcatcaacagcaacaccgccat

SEQ ID NO: 79811 - DNA, 319 bp, Zea mays
agctcctcacgccgccgccgccgccgccgccgccgtcgccgccaccacatccgtagcgcccagccgccggagaagaggagggagccagcaccagccaccatgggtcgcgtccgcaccaagaccgtgaagaagacctccaggcaggtgatcgagaagtactactcccgcatgaccctcgacttccacaccaacaagaaggtgctggaagaggtctcgatcctcccctcgaagcgcctccgcaacaaggttgccggcttcaccacccacctgatgcgccgcatccagcggggccccgtccgtggcatctcgctcaagctgc

SEQ ID NO: 79812 - DNA, 344 bp, Zea mays
cagaggtgggttggcttctcctccccctccggttcgggttcgggttcgtgaggttctccggggttcggtttcgtgggtgggcggatcgagatggcggcgtcggatgttgagtaccgctgcttcgtcggcggactcgcctgcgccacggacgaccactccctccacaacgccttcagcacctactgcgaggtcctcgagtccaagatcatcctcaatcgggagacgcacaggtcccgcggcttcggcttcgtcaccttctccacggaagaggcgatgcggaacgccatcgagggcatgaacggcaaggagctggacggccgcaacatcaccgtcaacgatgccca

SEQ ID NO: 79813 - DNA, 361 bp, Zea mays
actacgtggacacgacgggcgaggagggacggttccacggccctcacagccacagcaccagcacgaccccgacgggcggcgcggcggcggcggcggcatcgtccgcgcaacttccggcgcagcttctcctccgcgtcctccgcgggccacatccaccgcggcggcggcggcgaagacattggagctaaattggtcacgcaagctgcagctaagaccaacgatcttgctggagatgggacaaccacctctgtggtccttgctcaggggctgattgctgagggtgttaatgtcgtggcagctggtgctaatcctgttcagattactcgtggtattgatagaacagctaaagcactagttgaag

SEQ ID NO: 79814 - DNA, 378 bp, Zea mays
agcatcgcttccacttcggtctcagcgacggtcgccaccaccgctcccctccctctccccctcctcgcccagcggcaattaccacagcctccccagcaagccgggatggctgcactcaaggcatcgttccggggtgagctcagcgccgcttccttcctcgactccagcaggggacctctcgtccagcacaaagtggattttacgtttcaaaggaagggcaaacgagctatttcactgagaaggacatgctgttctatgcaacaggctccaccaccagcatggcctgggcgagctgttgctgagcctggccggaggtcatgggatggcccaaagcctatctcgattgttggttcaactggttccataggaacacagaca

SEQ ID NO: 79815 - DNA, 411 bp, Zea mays
  unsure (1)..(411): unsure at all n locations
accacctcgaacagtaagcacacagaaccctacacgcgcatcgcagcatgggtatcgacctcgttgcccggttggagggaaaangaagacaaagcgcacagcgcccgaagtcccgacgatgtttatctcaagctccttgtcaagctctaccgtttcttggtcanganngacaagagcaacttcaatgctgtcattctcaagaggctcttcatgagcaaaaccaatcgcccaccaatctccatgcgccgccttgtcaagttcatggaaggaaaggagaagaacattgctgtgattgttggcacagtcacagatgacaagaggatccaagaggttccagcaatgaaggttactgccctgaggttcaccgagacggcaagggccaggattgtcaatgctggtggggagtgcctc

SEQ ID NO: 79816 - DNA, 381 bp, Zea mays
ggcaagtgcaactgcggctccagctgctcctgcggcagctcatgcaactgcatgtcccctgacgtggagaccgccgccgccagcagcatcaagaccatggtcctcgctgcgccgaccaccaaggccagcgccggcggcttcgaggcggccaccgagggcggcggctgcgactgcaacacctgcaactgcggcaccagctgcggctgctcctgctgcagctgcaactgagccggcccgcccggcccggcgatggcgcacgagagtcgagaggacgacgacgacgaggcgtataaatataatagcagcgtctaaataagatcctgtcaactgcacccgccattatcgatccatggtcgctcctggggttcatgttcatctgtg

SEQ ID NO: 79817 - DNA, 377 bp, Zea mays
agcaagtgtgactgaggctctcgctgctcctgcggcatctcatgcaactgcatgtcccctgacgtcgtgaccgccgccgctagcaccatcgataccatggtcctcgctgctccgaccaccaatgccatcacctgcaggttcgaagcagccacccacggcggaggctgctactgcaacacctgcaactgcagcacgagctgcggctgctcctgctggagctgcaactgacccggcacgcccggcacggctatagcgcacgtagactctagaggacgacgacgacgaggcgtataattataatatcagcgtctaaataatatcctgtcaactgcacccgccattagcgatccatggtccctcctggggttcatgttcat

SEQ ID NO: 79818 - DNA, 375 bp, Zea mays
gaaaggcactcgggtcagaacccttggctctagggaatttatgcgctactatcgccagaaaccacggccttctgttgcaccagaccgtgcgcttgcactttcactagcttccagctacaagagcatgggtttggtgacagtgcagtctaaggagcagatggtgaggctgaaagttctccgtgctatgaacaggaccggggtcgagactatgcggaacaagatcggaatgaagagcaatgtgatccggaacctccctaagaattgcccgcactagacaacactgccttctcctgcaccctatctggagcttctcctggcatttatatggtgtcttatggtttcttgtctgtcgctgacaacgttggcgcttaagat

SEQ ID NO: 79819 - DNA, 416 bp, Zea mays
  unsure (1)..(416): unsure at all n locations
acctgtttcgctgctcgcccgatctcgcgctgccggcagcgatctgagatcgagcgaagctaagctttttcatcgagatggtgcttgtactgcatgctaacagtggtaacaaaaatgcattcaaaacactaattgccgcagaatacagcggtgtcaaggttgagttggtgaaggactttcaaatgggtgtctccaacaaaactccagagttcctcaagatgaaccctattgggaagattcctgtcctggagactcctgatggtcctgtttttgagagcaatgcaattgcaagatatgttactcgcttgaaggctgataacccactttatggatcttcactgattgattatgcccatattgagcaatggattgactttgctgcaacagagattgatgcanacattggaaagtggttg

SEQ ID NO: 79820 - DNA, 413 bp, Zea mays
aaaagcgccaggagcttaagaacatggcgaacaggggcttgcatctggctctgttcctcgtccttctcgggctgtcgtccaatttggcagccgggcagatcctgttccagggcttcaactgggagtcgtggaagcagaacgggggatggtacaacttcctgatgggcaaggtggacgacatcgccgaggccggcatcacgcacgtctggctccctccggcgtcacactctctcgccgagcaaggctacctgccggggcgcctgtacgaccttgacgcgtccaagtacggcaacgaggcgcagctcaagtccctgatcgaggcgttccacagcaagggcgtgaaggtcatcgccgacatcgtcatcaaccaccgcacggcggagcaccaggacgggcgcggcatctactgcatc

SEQ ID NO: 79821 - DNA, 414 bp, Zea mays
  unsure (1)..(414): unsure at all n locations
gggctggcttctcctccccctcttatcaagtcctcctcgggttagggttccttagggttttgtggaggggcgatggcggcggctgatgtggagtaccgttgcttcgtcggcggacttgcctgggccaccagcaacgagtcgctggagaatgccttcgcctcctacggcgagatcctcgactccaaggtcatcaccgaccgggagacggggaggtcccgcggcttcggcttcgttaccttctcctccgagaactccatgctcgacgctatcgagaacatgaacggcaaggagctcgacggccgtaacatcaccgttaaccaggcccagtcccgtggcggcggcggcggccgcggcggcggtggctacggccgcggtcgcggcggcngcggctatggtggcgggcgccgtgacggc

SEQ ID NO: 79822 - DNA, 371 bp, Zea mays
cacaggttgtccttaccaccaagtcgacatcaattgtcgttcatagcaacatccagtaacaagttactaaaagggttgcacagatcaaaagtctcattaatgcagcacaccaagaatattaaaaggaaaagctcactgatacgatagagattcttgctgacgatgttgctgtcattcatgtatcgtggttaatcatacttcatgtatcgcgtagcttgactcgtgcgagcaatgacacaaactgatctataatacatgaacttgagatttgtggataccctatatgcaactaaggatgccgttcaagaacgtattatagtacgcgtaggatgcactcttttgctgcttgcatctatagtcaactccatcaa

SEQ ID NO: 79823 - DNA, 366 bp, Zea mays
cagcgaaggagaaagcagaccaacctagccacccagggagaaaggccaaaagggaggggagagtgtcgtcatggcttccattgtcgcttccaggagggccgttcctctagttcgcgctctggagaagctcatcgcagcgtcctccgcgcccgggactggctccgccctcaggccggtgggagtcgccggcggcctccgtggctacaacaccggcgctccgctctgacgctacgagggggccgagtcggaagacgatagcgtccgcgagtacgatgggcggtacggcggccgggactacgccgtgcccaacctgttctcagatattttccgtgatccgcttagtgcgccgcacagcattggccgcct

SEQ ID NO: 79824 - DNA, 394 bp, Zea mays
cgtttgcctcttctccctcttgccggtcccgaataaagagcagcagcgcaagaggtcggtagagcgagaagaaggcaatggcggccgagagcttccttttcacctcggagtccgtgaacgaagggcaccccgacaagctgtgcgaccaggtgtcggacgccgtgcttgacgcatgcctcgcgcaggaccccgacagcaaggtggcctgcgagacctgcaccaagaccaacatggtgatggtgttcggcgagatcacgaccaaggcgaccgtggactacgagaagatcgtgcgcgacacctgccgcgagatcgggttcacctccgacgacgtgggcctcgacgccgaccgctgcaaggtgctggtgaacatcgagcagcagtcccccgacatcgc

SEQ ID NO: 79825 - DNA, 420 bp, Zea mays
  unsure (1)..(420): unsure at all n locations
aagcgaaagtatgagcttggtcgccagccagccaacaccaagttgtcaagcaataagacagtgaggagggtccgtgttcgtggaggtaatgtgaaatggagggctcttcgccttgatactggtaactactcatggggaagtgaagctgttacccgcaagacccgtatcctcgacgtggtctacaatgcatcaaacaatgagcttgtgaggacacaaacccttgtgaagagtgccattgtgcaagttgatgctgccccattcaagcagtggtacctcactcactatggagttgacattggtaggaagaagaaaacccctgctgcaaagaaggataatgctganggacaagaggttgaggcagcagctgaggaaacgannaagagcaacatgtcacgaagaagcttgagaagcgcaaggagg

SEQ ID NO: 79826 - DNA, 417 bp, Zea mays
  unsure (1)..(417): unsure at all n locations
gaaccacacctcctcccttcgcctgtgatcatgtcgtcttgctgcggcggcaagtgcgggtgcggctccagctgctcctgcggcagcggatgcaacggctgcggtatgtaccctgacgtggagaccgccgccaccagcagcgtcaagaccacggtcctcgccgcgccgaccaccaaggccagcgccggcggcttcgaggcggccaccgagggcggcggctgcgactgcaacacctgcaagtgcggcaccagctgcggctgctcctgctgcagctgcaactgagctggcccggcccggcgatggcgcacgagagtcgagaggaggaggacgacgacgaggcgtataaatataatagcggcgtccagtanataagatcctgtcaactgcacccgccattatccatggtcgctcgctcct

SEQ ID NO: 79827 - DNA, 417 bp, Zea mays
  unsure (1)..(417): unsure at all n locations
cccacgcgtccggcgagagacgggcaggggagaggaaaaaaaaatctaaccctagcatccgcagcgctagggttcgggggttgcgatggcggcggcggcgagacagcgggggacggtgaagtggttcaacgacaccaagggcttcgggttcatctcccccgaggacggcagcgaagatctcttcgtgcaccactcgtcgatcaagtcggagggcttccgctcgctcgcggagggcgaggacgtggagttttccgtctcggacggtgacgacggccgcactaatgccgtcgacgtgaccggccccgacggatccttcgtcaggggcggcggatgcggaggatgatgctgcagcggctacggctcccgcggcggtggcggatctggccgcggcggtcgcagctacngtggtagctgggg

SEQ ID NO: 79828 - DNA, 423 bp, Zea mays
gaaatcttccgttctcaaaccaacctaggcaattcgccgcagcctctcaccctcgcgagtcccgacctcccgcagccgccgcacagatggcacccaaggcggagaagaagccggcggccaagaagcccgcggaggaggagcccgcgacagagaaggtggagaaggctccggcggggaagaagcccaaggccgagaagcgcctcccggcgggcaagtccaaggagggcggcgagggcaagaaggggaaaaagaaggcgaagaagtccgtggagacctacaagatctacatcttcaaggtgctgaagcaggtgcaccccgacatcggcatctcgtccaaggccatgtccatcatgaactccttcatcaacgacatcttcgagaagctcgcggccgagtccgccaagctggcgcgctacaacaaga

SEQ ID NO: 79829 - DNA, 422 bp, Zea mays
gggaagccgagtctatctctaggaagactctcaggagctcagccgagaagtttgagttccaagctgaggtttccagactcatggacatcatcatcaactcactctacagcaacaaggatatcttcctgagggagctcatatctaatgcctctgatgcgttggataagattaggttcctttctcttactgataaggaagttctaggtgaaggggacactgcaaagcttgagattcagattaagttggacaaagagaagaaaatcctctccattcgggataggggtattggtatgaccaaggaagatcttattaagaaccttggaacgattgctaaatctggcacttcagcttttgtggaaaagatgcagtctggaggttgactcaatcttattggacagtttggtgttggcttctactctgtg

SEQ ID NO: 79830 - DNA, 417 bp, Zea mays
  unsure (1)..(417): unsure at all n locations
agcttgccctcgccgtatcgtccacccgcaacgcacaggaggattccatggccgacaacaccgggacgttggcgggcggcatcaaggacgtgccggggaacgagaacgaccttcacctccaggaactcgcccgcttcgccgtcgatgagcacaacaagaaggccaatgctcttctggggttcgagaagcttgtgaaggccaagacacaagtggttgctggcacgatgtactatctcactattgaagtgaaggatggcgaagtgaagaagctctacgaagctaaggtctgggagaagccatgggagaacttcaaggagctgcaggaattcaagcctgttgaagagggtgctagcgcctaaggatctctccttctccatgtgcgagcctgaagctcanagcanagttgcagaataagga

SEQ ID NO: 79831 - DNA, 363 bp, Zea mays
cggtcgcttgggtcatggtgtaccttgccactctcaccaatcatgttttcatgtctgatcgcgacattcagatcccaactgccctcgatcccttcgctgaggccaatgctggggactcgggtgcggcaacgtggtcaaaggactacttacacgtgggcatccagcatcgtaatggtcgcaagagcctgactaccgtccagggattgaagaatgagttcagctacagcaagatcctcagatatctcaggaaagagttctgctgcaatggtacagtggtccaggacccagaacttggacaggtcattcagctctagagtgatcagaggaagaacgtctcgagtttcctcgtccaggtacgcatca

SEQ ID NO: 79832 - DNA, 455 bp, Zea mays
  unsure (1)..(455): unsure at all n locations
ccggtccagaattagcgggccaccgctgcctccgcagtttcgcttccccccgtcttcccaagcctttgcttcgctcttcgcttcggattccctctgctcatggccgggagagggaaggcgatcggctcaggggccgccaagaaggccatgtccaggagctccaaggccgggctccagttcccagtgggaaggatcgccaggttcctcaaggccggcaagtacgccgagagggtcggcgccggcgcccccgtctacctcgctgccgtgctcgagtaacttgctgctgaggttctcgagcttgccgggaacgcggctcgggacaacaagaagacccgcatcgtcncgcgccacatccagctcgccgtccgcaacgacgaggagctctcncgcttgctgggcacggtgaccatcgccagcggtggtgtcatgcccaacatccataacctgctgttgcc

SEQ ID NO: 79833 - DNA, 437 bp, Zea mays
taaggtctacagttcccaggccgcgtccgcgtccaactcctttactcttttctcctcgtgtccgccgctacacgcgccgccggaaccctagcctccgccgccacaggcagccgggatggagaaaggagcctcggaggcgtcgcccccttgcgctcgctgcggcaagcccgctcagcttcaatgccccaagtgtgtcgaacttaagttaccgcgtgagaacgcagctttctgcacacaggattgttttagggcagcatggagctctcacaaatctgttcacccaaagcctggtgcaccggcatcccagcagtctccagaaggttggaaatattgtttgagaaaagggcgggaacgtgcattgcaacttcctcgttttgattggacaggtccattgagaccacatccaatatcaaagatgcgtgtggtgccagatgaaa

SEQ ID NO: 79834 - DNA, 369 bp, Zea mays
  unsure (1)..(369): unsure at all n locations
cttcaaccaacgtacagtgtacccgccatgagtcctttcggggcggtgatcacgccagaaaccctcaagtacatgtccaagtaccagggacgtgagatcacgcangtggactgcgcacgggaggcgatgaggctgatccacgcggaagacaagaacctcaaggccgaggactcagcgtgggagctgaagaagaagttcggcaacggcgtgagcaccatggtcctcgtctacaacgccaccggggccagcctgagcctggtggacgacgggaaagactggatgggctccgtctacagctcgccgatcccggacaccttccacaacgggcagtggatcgccttcctccacgtcaagcccggctcgctggcg

SEQ ID NO: 79835 - DNA, 332 bp, Zea mays
cgctcgtggctgccctgctcatactgcttgccctcgccgtatcgtccacccgcaacgcacaggaggattccatggccgacaacaccgggacgttggcgggcggcatcaaggacgtgccggggaacgagaacgaccttcacctccaggaactcgcccgcttcgccgtcgatgagcacaacaagaaggccaatgctcttctggggttcgagaagcttgtgaaggccaagacacaagtggttgctggcacgatgtactatctcactattgaagtgaaggatggcgaagtgaagaagctctacgaagctaaggtctgggagaagccatgggagaac

SEQ ID NO: 79836 - DNA, 212 bp, Zea mays
acgcatatccgctcacctacctctccagcatcctcccgtctccgtcgtctcgtctccgctcctcacctcgccagccatgggcaagatcaagatcggaatcaacggtttcggaaggatcggcaggctcgtggccagggtcgccgtgcagagcgaggatgtcgagctcgtcgccgtcaacgacgccttcatcaccacggactacatgacgtaca

SEQ ID NO: 79837 - DNA, 366 bp, Zea mays
gtagccgccgtcgccgcctcgctttctcctcttccgccccaccccggtgaggcgctgatccatcgcctcggacagcggctccagaacctccgcgttgcagtggttggggttggcttcgtgctattcagaaacacagtagcgagaactattcggtggggccgaagatggtgtcgctgaaggtgccaaagcgcctcgccgcaagcgttctcaagtgtgggaaaggcaaagtgtggcttgaccccaatgaagttagtgagatctccatggcgaactcccgccataacatccggaagttggttaaggatgggtttatcatcaagaagcctcagaaaatccactctagatctcgtgcaagaagggcgcacg

SEQ ID NO: 79838 - DNA, 377 bp, Zea mays
  unsure (1)..(377): unsure at all n locations
gttctggaacaagaacaagtccatggaacgtctatcggcaaaatctgtggttctgaattttgtgtgtcaactaattgttttcctgtaccttcttgacaatgacacttcatggatgatccttgctaactctggaattggtgtgtgcattgaattttggaagattggtaaaggcaatgcatattgaagttgataaaaattggaanaattcccatgttgaaggttccgagaacgtgaatcatatgcacagaatatgactaaaaagtacgatgccattgcaatgaagtaccttacctatgtacttttcctccttgtggtcggtttctctatctattcacttaagtatgataagcacaagagctggtactcatggatacttt

SEQ ID NO: 79839 - DNA, 155 bp, Zea mays
acggaagtggaaagacaaagagggatagggagctcgcctccttcttttttgtaatcgccgaaatggaaattgtatgacgacccttcttgttccaggcatacgaccctgagacgtgacggtgtcacttttccggcccggtaaagtgacagttatat

SEQ ID NO: 79840 - DNA, 334 bp, Zea mays
aaagcaacaaggcagcagcacaagcaagaaccacacctcctcccttcgcctgtgatcatgtcgtcttgctgcggcggcaagtgcgggtgcggctccagctgctcctgcggcagcggatgcaacggctgcggtatgtaccctgacgtggagaccgccgccaccagcagcgtcaagaccacggtcctcgccgcgccgaccaccaaggccagcgccggcggcttcgatgcggccaccgagggcggcggctgcgactgcaacacctgcaagtgcggcaccagctgcggctgctcctgctgcagctgcaactgatctggcccggcccggcgatggcgca

SEQ ID NO: 79841 - DNA, 407 bp, Zea mays
  unsure (1)..(407): unsure at all n locations
ctcatccgaacccgatcatctccggccgccgctccctccggaccctccgtcgacatgggcaccgtcactgccgccgatccgcacccgtccttcctcgccgacaaggacgccaaggtcttcgtcgccggccaccggggcctcgtcggctccgccatcgtgcgccgcctcctctcgctaggcttcacctccgtcgtcgtcncgcaccacgccgagctcgacctgactcgccaggcggacgtcgaggccttcttcgccgccgaacgcccgcgctacgtggtcctcgccgccgccaaggtcggcggaatccacgccaactccaccttccccgccgacttcatcgccgccaacctccagatccagaccaacgtcgtcgacgccgcgctgcgctgcggctccgttcgcaagct

SEQ ID NO: 79842 - DNA, 376 bp, Zea mays
cggacgcgtgggagcaggccattctgctcgccttactccctcacagaacccagtaaaatattgccagtcccgccgtcgagatggccccacgccgcctgctcgtcctcgccgtcctcgccctcgcggccaccgccgccgcggccaactccggcttcgcggactccaacccgattcgccctgtcaccgaccgcgcgggcttcgcgctcgagtccacggtcttcgccgcgctcggccgcacccgcgacgcgcttcgcttcgcacgcttcgccgtcaggtacggcaagagctacgagagcgcggcggaggtccataagcggttcaggatcttctccgagagcctccagctggtccgctccaccaaccgcaaaggcctctc

SEQ ID NO: 79843 - DNA, 393 bp, Zea mays
  unsure (1)..(393): unsure at all n locations
cgcaagtgctatgcacgcctgcaccccagggctgttaactgccgcaagaagaagtgtggccacagcaaccagctgagggcaaagaagaagatcaagaactgaagcttgccaaatcggttccttgcatggtttgcgtcaacaagacgtagaagtttcaaagcttttgtatgccataggctgctgcaacgtttttaagtcggaactcttgtgttcctgttcagggtcttcagcatgacatanatcgtttcagaagtctagtaataatattactataatggggtcatgtcgtatttgtggctctccctttttgtttgctggtggtgctgcagtagaaggaaacattcccgttaatttcctcaaccgcaaatttaaccctgcttaattaactcagct

SEQ ID NO: 79844 - DNA, 392 bp, Zea mays
cacaacagcgaaggagaaagcagaccaacctagccacccagggagaaagaggccaaaagggaggggagagtgtcgtcatggcttccattgtcgcttccaggagggccgttcctctagttcgcgctctggagaagctcatcgcagcgtcctccgctcccgggactggctccgccctcaggccggtggcagtcgccggcggcctccgcggctacaacaccggcgctccgctccgacgctacgagggggccgagtcggaagacgatagcgtccgcgagtacgatgggcggcacggcggccgggactacgctgtgcccagcctgttctcagatattttccgtgatccgcttagtgcgccgcacagcattggccgcctgctgaaccttgtggacgac

SEQ ID NO: 79845 - DNA, 347 bp, Zea mays
  unsure (1)..(347): unsure at all n locations
cagatcctgagatccggcaccggccccaagccgataaagggccagaaggtcaccgttcactgcaccggctacgggaaggatcgtgatctgtccaagaaattttggagcaccaaggaccctgngcagcagccattcagtttcagcattggtcagggttcagtgatcaaaggatgggacgagggagttatgaccatgcaagtgggtgaagttgctcgtatccagtgcacgcctgattatgcttatggagccggcgggttcccagcctggggaattcaaccaaactcagtgcttgtgttcgagattgaagtcctcagtgcccagtaattcgcatctgtcagctatggaaa

SEQ ID NO: 79846 - DNA, 335 bp, Zea mays
ggtgggctggcttctcctccccctcttaccaagtcctcctcgggttagggttccttagggttttgtggaggggcgatggcggcggctgatgtggagtaccgttgcttcgtcggcgggcttgcctgggccaccagcaacgagtcgctggagaatgccttcgcctcctacggcgagatcctcgactccaaggtcatcaccgaccgggagacggggaggtctcgcggcttcggcttcgttaccttctcctccgagaactccatgctcgacgctatcgagaacatgaacggcaaggagctcgacggccgtaacatcaccgttaaccaggcccagtcccg

SEQ ID NO: 79847 - DNA, 408 bp, Zea mays
cgcggcctgctcgttctatctgtccagcagacttgaggttccgagcggccggaaaccagcggcaaccgtcggcatggcgctcgtattgcattctggggctggaaacaaaaatgccttcaaggcacttattgctgcagaatacagtggggtcaaggttgagttgaccaaggattttgagatgggtgtctcgaacaagacccctgagtttctaaagatgaacccccttgggaaggttcctgttctggagactcctgatggccctgtttttgagagtaatgctattgcgcgctatgttgctcgcttgaaggatgacaaccctcttttcgggtcttcccgtattgaacaagcccacgttgagcagtggatggactttgctgcaacagaagttgatcctgggtgttgatggta

SEQ ID NO: 79848 - DNA, 381 bp, Zea mays
gcaaaaattgtggggatattgttcatcaacagattgttgagcgcgacatattgagtgaaatggttaagatagtaaagaaaaagccagacttgagcgtccgagagaagatattgagtttgattgacacatggcaagtggcttttggaggtccatctggaaaatatcgacagtatcatgcggcttaccaagaactcagggctgctggtgttgattttccgcctcgcgaggaaaattcagtcccgttgtttacaccacctcaaactcaaccattaagacatccacatctatatacacctccaggtcaaagctatgaagatgctgctatacaagcttctcttcagtctgcccctcctgcatctgccctcagtctgagtgagattc

SEQ ID NO: 79849 - DNA, 414 bp, Zea mays
cttcggagtcctgatcttggagatcatcacaggaaagagggctgtgagcttccactgtcacgaggactccttgaacatcgctggatatgcgtggcggcaatggaacgaagacaatgctgcggagctgatcgatccagtgataagagcatcgtgctcagttcggcaggtgctgagatgcatccatattgcgttgctgtgcgtgcaagatcacgcagatgagcgacctgacatccccactgtcatccttatgctgagcaacgacagctcgagccttcctaatccgaggccgcctacgctgatgcttcgaggccgtgagatcgaatccagcaagtcaagcgagaaggaccggagccactccattggcactgtgacaatgacacagttgcatggaagatgaagtatacacgaaaatat

SEQ ID NO: 79850 - DNA, 394 bp, Zea mays
ctcaaatgattagctctgcaactggagtacgtgttgaaaatatactctatcttggaggaccaaacatcgcctcggaaatttataacaaagaatatgcaaacgctcgaatctgtggatccaacaagtggaggaagcctcttgctaagtttttgaggcagccacatttcattgtctgggacaacagtgatcttgtcacccatgaggtgatgggtggcctgaagaatgtctatgcaatcggtgctggaatggtggcagctttaacaaacgagagtgcaacaagcaaatctgtatattttgctcattgcacgtcagagatgatattcattactcatttgctgacagagcaacctgagaaactcgctggtcctctgctggctgacacgtatgtaactct

SEQ ID NO: 79851 - DNA, 352 bp, Zea mays
gggtcgagcccgcgtccgaacaaagcagcagcacaagcaagaaccacacctcctcccttcgcctgtgatcatgtcgtcttgctgcggcggcaagtgcgggtgcggctccagctgctcctgcggcagcggatgcaacggctgcggtatgtaccctgacgtggagaccgccgccaccagcagcgtcaagaccacggtcctcgccgcgccgaccaccaaagccagcgccggcggcttcgaggcagccaccgagggcggcggctgcgactgcaacacctgcaagtgcagcaccagctgcggctgctcctgctgcagctgcaactgaactggccccggccggcgattgcgcacgaga

SEQ ID NO: 79852 - DNA, 353 bp, Zea mays
cggacgcgtgggcagatgggaggcggaaatgaagagaaggctcgggtggttcagaccatactgttcgttgctggcataaacaccctgttccagacgttattcgggacgcgccttccggtcgtgatgggcggctcgtacgtcttcgtcgggccgaccatctcgatcgtcttggctggacggtacagcaacgaagcagaccctcacgagaaattcctgcggacgatgagggggacgcagggcgctctcctcgttgcgtcgacgattcagatcatacttgggttcagtggcctctggcgcaacgttgtcaaattactgagtccgctggcagctgttcctctggtatcactggtccg

SEQ ID NO: 79853 - DNA, 360 bp, Zea mays
  unsure (1)..(360): unsure at all n locations
acgcttcactcgtttccttccgatccatacacaccgcgcacgtacgcgtactccatcgtcccggtgcaggcgggttcacgtcacgacctcgggcgagacgagatggcgacgccgaacgggcttgctcggatcgagacgaacggggcgaccaagcccgacaacggcgtgtgccacgacgacagctcggcgccggtgcgcgcgcagaccatcgacgagctgcactcgctgcagcggaagcggtcggcgccaaacacgcccatcaaagacggcgccgcctcgaccttcgccgccgcgctctccgangangagcgccacaggcagcagctgcagtccatcagcgcgtcgttggcgtctctgaca

SEQ ID NO: 79854 - DNA, 365 bp, Zea mays
  unsure (1)..(365): unsure at all n locations
gctcaatcaattcactcaaacctcttccccaaatcttcgattagattctcgttgacaagaagactagaaccgaacctgaccatgtcgctgatccgccgcagcaacgtgttcgatcccttctccctcgacctctgggacccctttgagggcttccccttcggctccggcaacagcagcagtctcttcccctcgttcccgcggaccagctcggagaccgcggccttcgctggcgcgcggatcgactggaatgagactccagaggcgcacgtgttcaaggccgacgtaccggggctgaagaaggangaggtcaaggtggaagtcgaagacggcaacgtccttcagatcagcggcgagcgcaacaagga

SEQ ID NO: 79855 - DNA, 348 bp, Zea mays
  unsure (1)..(348): unsure at all n locations
agcgaaagtatgagcttggtcgccagccagccaacaccaagttgtcaagcaataagacagtgaggagggtccgtgttcgtggaggtaatgtgaaatggagggctcttcgccttgatactggtaactactcatggggaagtgaagctgttacccgcaagacccgtatcctcgacgtggtctacaatgcatcaaacaatgagcttgtgaggacacaaacccttgtgaagagtgccattgtgcaagttgatgctgccccattcaagcagtggtacctcactcactatggagttgacattggtaggaagaagaaaanccctgctgcaaagaaggataatgctganggacaag

SEQ ID NO: 79856 - DNA, 374 bp, Zea mays
gcaccacacctcttcttcttcttcctcctcctcctagcacagctagcgcctgctccccttcgcctgtgatcatgtcttgcagcagcggcaagtgcgactgtggctccagctgctcctgcggcagctcatgcaactgcatgtcccctaacgtggagaccgccgccgccagcagcatcaagaccacggtcctcgccgcgccgaccaccaaggccagcgccggcggcttcgaggcggccaccgagggcggcggctgcgactgcaacacctgcaactgcggcaccagctgcggctgctcctgctgcagctgcaactgaaccggtcaggcgatggcgcacgagagtcgagaggacgacgacgagtccgtataatataat

SEQ ID NO: 79857 - DNA, 364 bp, Zea mays
ggtcgagcacgcgtccgatgatacttgccgtgagattaattcctctatcaaggtagtagagtatcaccatactctgaagccatgcaatgctttggaggttgcacggaaatatgatatagttgttgatgcaactgacaaccttcctactaggtatatgatcagcgattgctgtgttttgctgaacaagccacttgtatctggtgcggcattaggcttagaagggcagttgactgtttatcatcataatggaagcccatgctatcggtgcctctttccaactccaccacctgtggcagcctgccagagatgctcagacagtggtgtccttggggttgttccgggagtgattggttgcttacaagct

SEQ ID NO: 79858 - DNA, 390 bp, Zea mays
  unsure (1)..(390): unsure at all n locations
acgccgcttcgttctctaaccttggctcccgctccctccgcaggagcatctcaacaccgccttgaggaccccccaactcgccggctgcagccatggtgaaatattcgacggagccaaccaaccccaccaagtcaaccaaggccatgggccgtgacctacgtgttcacttcaagaacacccgtgagacagcttttgcccttaggaagttgtcactcaccaaggccaaaaggtaccttgaggatgtgattgcccacaagcaggccatcccgttccgcaggtattgtggcngtgttggacgtaccgctcaagctaagtctcgtcactcaaatgggcaaggacgctggcctgtcaaatctgctagattcattctagaccttctcaagaatgctg

SEQ ID NO: 79859 - DNA, 385 bp, Zea mays
aaaaaaaaacaaaaagggtaccggaagcggcgaaagcctcgccccccgccgctctcgcatcgtctccggagcgcacgtcagatcaggtgcgccgcgcccccctcgcctaagctgcgacgaccatccatcgaacaggaaggatgacgggctccatggatctcccggccaagggcgggttcagcttcgacctgtgccgccggaacaacatgctggagaagaacgggctcaaggtcccgggattcaggaagaccgggacaaccatcgtcggcctcgtctttcaggatggggttgttcttggggcagacacaagggcaactgagggccccatagttgctgataagaactgtgagaaaatccactttatggcaccgaatatatactgctg

SEQ ID NO: 79860 - DNA, 369 bp, Zea mays
gtccgcgaagggaagggaggactcctcgagttcgtcgagaggcggctcaaggacaacggccacatggtcatcgtggtggccgagggtgctgggcaggacctcatcgcgagaagtatgaatttcgtggacacccaagacgcttctggaaacaagctgcttctggatgtcggcctttggctatcccagaagataaaggatcatttcaagaagaagcccagcttcccgataaccctcaagtacatcgacccgacctacatgatccgcgccgtccggtcgaatgcttctgacaacgtctactgcactctgctggcccacagcgccctccatggcgccatggcggggtacaccggcttcacggtcgctccggtc

SEQ ID NO: 79861 - DNA, 437 bp, Zea mays
  unsure (1)..(437): unsure at all n locations
accaagaacagatacccgagtcgacgaagcaaccgctcacaatcccaatctcccgcgtcactcataacccgaagtaacaaccgtcggtccgaccaacaatgtcgctgattcgccgtggaaacgcattcgaccccttctccctcgacctctgggaccccttcgagggcttcttccccttcggctccggcgacgtccgcagcctcgttccctcgttgccgcgcaccagctcggagaccgcggcatttgccggcgcgcggatcgactggaaggagacccccgaagcgcacgtgttcaaggcggacgtgccggcgctgaggaaggangaggtcaaggtggaggtcgangacggcaacgtcctgcagatcagcggcgagcgcaacaaggagcacgaggagaagaacgacaggtggcaccgggtggaacgcaacaaccggaag

SEQ ID NO: 79862 - DNA, 409 bp, Zea mays
ggagaatacatctgacaaagatttaaaccagggaactcttgttatttttaacttggatccatcggtttctaatgaagaggttcgccagatttttggggcatatggggaagtaaaggagataagagagacaccaaacaagaaacatcataagtttatagagttctatgatgtaagagcagcagaggctgctcttcggtcactgaataaaagtgagatagctggaaaacgaatcaagttggaaccaagtcgtcctggtggaacacgcagaaacttgatgcagcagctcggtcacgatttggacaaggaggagcccagaagctacagacatcctcatgttggttcaactattgctaactctcctccaagggcatgggctcactatagtagtccaaacagatacaatatgctg

SEQ ID NO: 79863 - DNA, 426 bp, Zea mays
gggtccagcacgcgtccgacgcaaatccgctcccctacctctccagcatcctcccgtctccgtcgtctcgtctccgctcctcacctcgccagccatgggcaagatcaagatcggaatcaacggtttcggaaggatcgggaggctcgtggccagggtcgccctgcagagcgaagatgtcgagctcgtcgccgtcaacgaccccttcatcaccacggagtacatgacgtacatgttcaagtacgaaaccgtgcacggcaaatgaaagcaaagcaaaatcggccttcaaggaccccaaaacccttcccttcggcaaaaacccggtcaccgtctttggaatcaggaaccccaaggaaatcccttggggtaaggctggtgctaagtatgtcgtggagtccaccggtgtcttcactgacaaggacaaggctg

SEQ ID NO: 79864 - DNA, 376 bp, Zea mays
ctcgcctcgacgcgcctctgaaagttcggagccgccggcccgtccgcctccctctccgcctcccgtccccaaggccaatagttttcaagtggcaatggcggaccaggctaaccaacccactgtccttcataagctcggtggccagttccacctgcgctcgatcatctctgaaggtgtacgggcccgtaacatatgcccatctgtctcatcttatgaaaggagatttgccacaaggaactacatgacccagagcctttggggcccttcaatgtctgttagcggtggcatcaatgtcccagtgatgcagaccccgctctgtgctaatgctcctgctgagaaaggaggcaagaacttcatgattgatttcatgatgggc

SEQ ID NO: 79865 - DNA, 345 bp, Zea mays
acggacgcgtgggtgactgtggaaaccgaacctgcccaaaaactcagcagaagctccagaacctttcgttgaccccaaactacgtgcttagaagcttaatactgcagtggtgcgaggaaaaggggatggaaccacctagcaggtctaaaagcgacggttctcctcttgaggttgctggcaacagattagcaattgaagcgttagtccgcaacctctcgagcagttcattagatgatcggaaatctgctgcggctgaaataagatccttggccaagaaaagcacagacaaccgtatacttctagcggaatctagcgctataccggctctggtgaaactcctgtcgt

SEQ ID NO: 79866 - DNA, 254 bp, Zea mays
aaggactgtgggaaggtgaaggctggtggtgcttacaccatgaacactgctagtgcggtcaccgtcaggagcacgatccgccgcctgagggagcagactgaagcatgatatagctctttatattattggggtttcctgtagttgctcttgtcaggcatgttgtgggggccttatctagtggaaatgtggaatcactgtactggctgttttgccgagacaatgctccttatatttggtttatgctctaggatctc

SEQ ID NO: 79867 - DNA, 408 bp, Zea mays
  unsure (1)..(408): unsure at all n locations
agcaccgaatcgcaacgacagcgagaacgtccaaacgagcgcgagtctccggcgataaccaagagcgcgggcacgcaaagcggcgaagcgggaaggaagcagtaacgatggggcttgactattacaagatcctaggcgtcgacaagggcgccaccgatgacgacctcaagaaggcctaccgcaagctcgccatgaaatggcaccccgacaagaaccccaacaacaagaaggaggccgagaacaagttcaagcagatctcggaggcgtacgaggtgctgagcgacccgcagaagcgcgcggtgtacgaccagtacggcgaggagggtctcaaggggcaggtgccgccgccgggcgccggcggngcgggccccggcggcgcaaccttcttctccaccggcggcgacgggc

SEQ ID NO: 79868 - DNA, 374 bp, Zea mays
cccggactctaggggcagaagctgcagcgtcgagatggtgaaggggcgcacggggcagcgcgtgaggctctacgtccggggcaccgtccttggatacaagcggtccaagtcgaaccagtacgagactacgtcgctggtgcagatcgagggggtgaacaccaaggaggacgtcgcgtggtactgcgggaagcggatggcctacatctacaaggccaagaccaagagcagcggcacccactaccgctgcatctggggcaaggtcgcccgcccgcatggcaactccggcgtcgtccgcgccaagttcaagtccaacctgccgccggaatccatgggccgtaaggtcagggtgttcatgtaccccagcaacatctaaa

SEQ ID NO: 79869 - DNA, 374 bp, Zea mays
  unsure (1)..(374): unsure at all n locations
aggtgaccgagcatgcccgtcgtcctcttcctcctggtggccggctgcagcaggcaagatgccctttgtaaatatagccataggtgacggtcccgcgtgcgtgcggccgtgcgggagcgtcgtcaaatgggaagaaaaccgcgaggtgtgactgtgatgtaacaccccgtctgtaacattcgccagagtatataggaaatccatgttaatataccctccattccaactgacaaaggcatgcgctggcgcgtggcggcttgctgccggtgcagaacctcttctttctcctcacccgggcctatttggttcagcttttttctgaccagtttttctgagaatctagctgtggaaagaatctggctgtgagaganaaa

SEQ ID NO: 79870 - DNA, 360 bp, Zea mays
cctacatcgccgatcgatcagtgagtcgcctgcatccctgatcgatcagtaacaccggtacaaagacatgaatcggcaacaaataagaagtttcaaaggctggctagagggttcaacctttttgagattggtggtttcgccatcgtcttctgcgtgtatgtctcttggaatatggaaggtttagtggtatgtaggtttaaatatcttgttgtagcttgtactacctccgttctcgaatatttgtcgttggctagtttatttttaaactaaaccgcgacaaataaaaaagaacggagggagtatgttagggatgatttagccttaggaactgcacctacatacctcatggcatctatgcac

SEQ ID NO: 79871 - DNA, 316 bp, Zea mays
  unsure (1)..(316): unsure at all n locations
cccggcagtgccatccgactccctgcacctgccatggctgccgctctcgtgtctgtgcctcgcatcaagttgggctcgcangggctggaggtctccgcgcaaggcctcggctgcatgggcatgtccgccttctacggcccgccaaaacccgagtctgagatgatcaagcttatcgaccacgccgtcgacgccggggtcaccttcctcgacacctccgacgtctacggcccgcacaccaacgaggtcctcctgngcaaggcgctgcaaggcggggtgcgggagaaggtcgagttggccaccaaattcggcgtctcct

SEQ ID NO: 79872 - DNA, 405 bp, Zea mays
aacctctctgggaagatacctccggccatctctggaatgcgaatactgaactacctcaacctgtccaggaaccatcttgatggagagatacctccatccattgcaaccatgcagagcttgacggcggtggacttctcgtataacaacttgtctgggcttgtgccagggactggccagttcagctacttcaatgccacatcttttgttggcaatccaggcctgtgtggaccatacctcggtccatgtggtgcaggcataggtggcgccgaccacactgtccatggccatggctggttgactaatacggtcaagctgctcattgtccttggcttgttgatctgctccattgcattcgctgtggcggcgattctgaaggctcggtcattgaagaaagctagtgaagct

SEQ ID NO: 79873 - DNA, 369 bp, Zea mays
  unsure (1)..(369): unsure at all n locations
accggcaagactatcaccctcgaggtggagtcctccgacaccattgacaacgtcaaggccaagatccaggacaaggagggcatccctccagaccagcagcggctcatctttgctgggaagcagcttgaggacgggcgcacgcttgccgactacaacatccagaaggagagcaccctccacttggtgctgcgcctcagaggaggcatgcagatcttcgtgaagaccctgaccggcaagactatcaccctcgaggtagagtcttcagacaccatcgacaacgtcaagggcaagattcaggacaagganggcattcccccagaccagcagcggctcatctttgctgggaagcagcttgaggacgggcgcacg

SEQ ID NO: 79874 - DNA, 337 bp, Zea mays
agactcatcactagcctctgctcctctgaaatggcggcggcgacttcctcttccacctacctcgccatcggccgcaaaaccctaaaccccgccccctccgtagccacagccgccacctccgtctccttccccgccacgcagcacccatgcctcgtcgccgcctccgcggaccgccgccgcgccgtggctgcgaaggtctcgtcgccgtcggtcatcggcaccgccatgccgtcgctcgacttcgagacctccgtcttcaagaaggaaaaggtgtccctggccggccatgaggagtatattgtgaggggtgggagggatctgttcccgctgttaccgg

SEQ ID NO: 79875 - DNA, 372 bp, Zea mays
gacaatggccccccgatattgcccgaagcctacttggatatctctggaagttctattaaccccagtgagagaacctatccagaggagatgatccaaactgggatatccaccattgatgtcatgaattccattgctcgtggacaaaagattccactgttttctgctgctgggctccctcacaatgaaattgctgctcagatttgtcgtcaggctggtcttgtgaagacattggagaaaggaaagcatgctgagggtggtgaagatgacaactttgctattgtgtttgctgctatgggagtgaatatggaaacagctcaattcttcaaacgtgattttgaagagaatggttccaatggaccggtcaaccttttt

SEQ ID NO: 79876 - DNA, 355 bp, Zea mays
aggcgaagcaaagcaatcggaattctctgcgatttctctagatctcgactaccccccactagttttggttcctcctttcgttcgagagagcgattctggtggcaatggcgaagagcgagggtccggcgatcgggatcgacctcggcaccacctactcgtgcgtcggcgtgtggcagcacgaccgggtggagatcatcgccaacgaccaggggaaccgcaccacgccgtcctatgtcggcttcaccgacaccgagcggctcatcggcgacgctgccaagaaccaggtcgccatgaaccccaccaacaccgtcttcgatgccaagcggttgatcggcaggaggttctctgacccgtc

SEQ ID NO: 79877 - DNA, 385 bp, Zea mays
acaggtcacgaaagcagggaggagctggcgcgcacggccgaggaggggcagaccgtcgtccccggcggcaccggtcgcaagaccctcgaggcgcaggagcacctcgccgaatggcgcagtcacggcgggcagacccggagtgagcagctgggccatgaggggtacagcgagatgggcagcatgggcgggcagacccgcaaatagcagctgggccacgacaggtacagcgagatggggaggaagggcggcctgagcaccatgcaggagtccggcggcgagcgcaccgcccgggagggcatcgagatcgacgagtccaagttcaggaccatgtcccagatctgatgcgtgccgccgcttagcatgtaatacgtagctgccggaaatg

SEQ ID NO: 79878 - DNA, 325 bp, Zea mays
cggacgcgtgggcaagcagcgatccgaagctcaatcaattcactcaaacctcttccccaaatcttcgattagattctcgttgacaagaagactagaaccgaacctgaccatgtcgctgatccgccgcagcaacgtgttcgatcccttctccctcgacctctgggacccctttgagggcttccccttcggctccggcaacagcagcagtctcttcccctcgttcccgcggaccagctcggagaccgcggccttcgctggcgcgcggatcgactggaaggagactccagaggcgcacgtgttcaaggccgacgtaccggggctgaag

SEQ ID NO: 79879 - DNA, 318 bp, Zea mays
cgcgtggcactccgcggggacgttcgacgtgtcgtcgaggaccggcggtccattcggcacgatgaagcatcagtcggaattggctcacggcgctaacgcggggctggacatcgcggtgcggctgctcgagcccatcaaggaggagttcccaatcctctcttacgccgatttctaccagctcgcgggagttgtggccgtggaggtcaccggtgggcctgagattcccttccaccccggtagggaggacaagcctcaacccccaactgagggccgccttcctgacgccactaagggttctgaccacctgaggcaagtttt

SEQ ID NO: 79880 - DNA, 343 bp, Zea mays
  unsure (1)..(343): unsure at all n locations
cgggtcaaaccctaagcagggagttgatttatccgctgcagccatgagtaagttgcagtctgagtctgtcaaggatgccatctcccagattgttggggatgccaaggagaagaatangaagttcactgagactgtggaacttcagattggtctgaagaattatgatccacagaaggacaagcgtttcagtggctctgttaagttgccccatatccctcgtcccaagatgaaggtgtgcatgcttggtgatgcccagcatgttgaggaggccgagaagatgggacttgactacatggatgttgaggctctcaagaaaatgaacaagaacaagaagcttgttaag

SEQ ID NO: 79881 - DNA, 366 bp, Zea mays
agggcacacctcaagctcgcgcccaccttccacgtcgaggtccgagtcctgctttgatggcgaccgacgtggctgagactcccgcgccgttggtggatgcggccccagaggcgcccgccgacgccccggcggcgcctgctgccgacgcgaagccggccaaggccaagaaggccaccgcgccgaagaagcgcgccagcccgacccacccgccgtacgccgaggtaattggtgccctccctttgatccttctgccgtgccgtgctgtgcgtgcctctccgccgcgtctggatcttactgaatagtggatggtcggtgcgcagatggtctcggaggcgatcacgtcgctcaaggagaggacgggtccag

SEQ ID NO: 79882 - DNA, 392 bp, Zea mays
  unsure (1)..(392): unsure at all n locations
acggcggtcaaggggtccgggcatctcgtccgcaagggcaccggagggaggtcttctgtgagtggaattgtagccacggtgtttggagctactgggtttcttgggcgctatcttgtgcaacaacttgccaagatggggtctcaagtgcttgtcccattcagaggttgtgaggattctcctcgccacctgaagattatgggtgacttgggtcagattgtgcccatgaaataccatccgagagatgttgattcaattaaggctgttatggccaagtcaaatgtggttattaacctcatangacgagagtatgaaacaaggaactacagcttcgaagaagtaaaccaccatatgcctgaacagcttgcaacaattgctaaggancatgggggtat

SEQ ID NO: 79883 - DNA, 280 bp, Zea mays
acggggcatctcgtccgcaagggcaccggagggaggtcttctgtgagtggaattgtagccacggtgtttggagctactgggtttcttgggcgctatcttgtgcaacaacttgccaagatggggtctcaagtgcttgtcccattcagaggttgtgaggattctcctcgccacctgaagattatgggtgacttgggtcagattgtgcccatgaaataccatccgagagatgttgattcaattaaggctgttatgggcaagtcaaatgtgggttattaacctc

SEQ ID NO: 79884 - DNA, 320 bp, Zea mays
ggctgttctggtcgacgacggcggagaaggcggcggaggcgctcggcgtcgtcgtccccgtggtggagacgctggagcaggcgttcagggagtgctccaaagggagagccttcttcggcggcgacgccgtcgggctcgtggacatcgcgctcgggagcttcgtggtgtggatcagggtggtcgacgaggcggccggcgtaaagcttctggacgaggccaagttcccggccttgacggcgtgggcggagcgcttcttggcagtggacgccgtgaaggaggtgatgccggacgccggaaggctgttggagcactacaaggga

SEQ ID NO: 79885 - DNA, 315 bp, Zea mays
ggccgaggcacgcgtcagtcccatcgcatcccatcccactaccacccatctcgtcgtccgccgattcgaccggttctccaacccagggctgtgatggcgacgaagaggagcgtgggcaccctcggcgaagcggatctgaaggggaagaacgtgttcgtgcgcgccgacctcaacgtccctctcgacgacgcccagaagatcaccgacgacacccgcatccgcgcctccgtccccaccatcaagttcctcctcgagaatggcgccaaggtcatcctcgccagccacctgggtcgtccaaaaggtgtccacccaaag

SEQ ID NO: 79886 - DNA, 377 bp, Zea mays
  unsure (1)..(377): unsure at all n locations
gtgagccgttggacgggtattccagtgacccggcttggccagaacgacaaggagaggctggtcggcctggctgacaggcttcaccagatggtggtcggccagacagaggctgtgagcgccgtcgcagangcggtgctgaggtcganggccggtcttggcaagccacaacagcccactggctcgttcctgttcctgngtccgactggcgtggggaaaactgagctagccaaggccctagccgaacagctgttcgacgacgagaaccttcttgtccgcatcgacatgtcggagtacatggagcagcactcggttgctcgcctcatcggagcaccgcctggctacgtcggccatgaagagggtgggcagctgactgaaca

SEQ ID NO: 79887 - DNA, 344 bp, Zea mays
gtcgtcgtctcactcaccccgccttcacgcctccctcaccaaataaggtcccgcccttttccgacattcacaggggggacaggaaatcagcggccatggcctcgattccggcgacgaccttcgccgtcatcttatccgtcctcttctgtgccgcggctggcaccgccgtcgacaacgacctccccgactacgtcatccagggccgcgtctattgcgacacctgccgcgccgggttcgtgaccaatgtcaccgagtacatcgcgggcgccaaggtgaggctggagtgcaagcacttcggcaccggcaagctcgagcgctccatcgacggggtgaccgaccggaac

SEQ ID NO: 79888 - DNA, 420 bp, Zea mays
gacaaaccgcttaagggacccctcaccgtccgcctcactaccgagggaggcaccaagtccgtctacgacgatgtcatccctgccaactggaaggccaacaccgcctacaccgccaaataattaactttagtgctgacaatactttaagccggcctatgctagctatactagaattggttggatcccaagcaatgcattacacatgcatgcattggaccgtgatatctatttgctaccactaccctattacgacagtgatgctggcgccaacaatgatggtgtcatcctccttctccatcttcttcatctccatatatagctagagtgagacttctctgttgtttaaaagagaaaagttaagaaatggattgacaagttatataataagtgcctaatgaaatatttgataggccttcattt

SEQ ID NO: 79889 - DNA, 407 bp, Zea mays
ccctccctccctcacacaaataataaggaaaggtcccgcccttttcctccgacatccacaggggggaggggaaaacacgtgcattcacccggcggcaataatggcctcggttccggctccggcgacgacgaccgccgccgtaatcctatgcctatgcgtcgtcctctcctgtgccgcggctgacgaccccaacctccccgactacgtcatccagggccgcgtgtactgcgacacctgccgcgccgggttcgtgaccaacgtcaccgagtacatcgcgggcgccaaggtgaggctggagtgcaggcacttcggcaccggcaagctcgagcgcgccatcgacggggtcaccgacgcgaccggcacctacacgatcgagctcaaggacagccacgaggaggacatctgcc

SEQ ID NO: 79890 - DNA, 415 bp, Zea mays
ccctccctccctcacacaaataataaggaaaggtcccgcccttttcctccgacatccacaggggggaggggaaaacacgtgcattcacccggcggcaataatggcctcggttccggctccggcgacgacgaccgccgccgtaatcctatgcctatgcgtcgtcctctcctgtgccgcggctgacgaccccaacctccccgactacgtcatccagggccgcgtgtactgcgacacctgccgcgccgggttcgtgaccaacgtcaccgagtacatcgcgggcgccaaggtgaggctggagtgcaggcacttcggcaccggcaagctcgagcgcgccatcgacggggtcaccgacgcgaccggcacctacacgatcgagctcagggacagccacgacgaggacatctgccaggtggtg

SEQ ID NO: 79891 - DNA, 417 bp, Zea mays
ctcttggcgacctcagcaaaccgccctcgcgcagacctctcgtactgcatatacgcattgtcaaggagattgtccaagacaaagaactggatagttgcgctcaagacattgatagtggtgcataggcttctgagggaaggcgatcccatgttcaaggaagagttcctggcctactcatccagagggaacatcttgcacatagccaatttcaaggacgactcgagccagtcagcttgggattgctccgcatggattcgcgcctatggatgcttcctggaggaacggctcgagtgcctcagggttctcagatacgacatcgaaaccgaacgtctcgtcagatatccccagacttccagcaaggtacatagtaaaaccaggaccctgcctagcccggaactcttggagcagttgcctgca

SEQ ID NO: 79892 - DNA, 376 bp, Zea mays
  unsure (1)..(376): unsure at all n locations
gcacgacgaggacgaagccgtgcccgaaggaaaaagacgtggcggttgtaagggaggatgtggaagcggatgcggagacagagacagagactgaaagcgaggctgaggcagaggtcgaggccgangtggacgtcgaggtggaagcggaagccggtgcatcgtctgcgaagaagaaccgtatccaggtgtccaccaacaagaagccgctctatttctacgtcaatctcgccaagaggtacatgcagaactacgacgaggttgagctctccgctctggggatggccattggtaacctggttaacgtcgctgagatcctcaaaaacaatggcctcgccactgaaaagaacatcctcacatcaaccatcggcaccaatga

SEQ ID NO: 79893 - DNA, 320 bp, Zea mays
gcgactacttcctcgggcccagcctcgacgccttggtacagcagctcgccgagaacgatgcggcgcggcacgggacgccgccggccaagaaggaggccgtggaggcaatgccgaccgtggcaatcgccggcggcaacgatggcgacgacgcggccagctgcccggtctgcctggaggactacgcggccggcgagcgcgcccgcgagatgccctgcacgcacatgttccacggcaattgcatcatgccgtggctcgagatgcacagctcctgccctgtctgccggttccagctgccggccatcgacgacaagagctcatgc

SEQ ID NO: 79894 - DNA, 390 bp, Zea mays
gaccatttagcgaggcgattgaatggcatcggcatcaaggtgtacgggatggactggactggtcatggtggaagtgatggtctccatggatatgtgcaatctcttgatcatgctgtcagtgatttgaaaatgtacctcaagaaagtgttagctgagaaccctggtcttccatgcttctgcttcggtcactcgactggtggaggtatcattctgaaggctgcacttgatccagaggtagaaactctccttagaggtattgtcttgacatcaccagctgtccgtgttcagcctacacacccaatcatagcggtcatggcaccgatttttgccctcatcgcgccgaggtatcagttcactgcgtcccacaggaacggcccgccggtgtcgcgc

SEQ ID NO: 79895 - DNA, 403 bp, Zea mays
cccacgcgtccgcccacgcgtccgcccacgcgtccgcccacgcgtccgcccacgcgtccggttggagcgttggcaatatattacttgatctcacaggaggggtgctgaatttttgtcagatgggtgtgcagtctatagatcaacatactttggtgaatttctatggaaacattgggaaaacccttctttcattggagacggttttctttgatgtcctgttcattatccaacactacgtgttgtaccctgtcaagaaggacgagaatggtaaggcaatcatttctgaaagggtagccccccttatcaggccttcggacaagcctgaagaagataacgtatgatctagctgtagttatattgcgcacattgcattcacgcgctgtttgcacacaggccacacacg

SEQ ID NO: 79896 - DNA, 394 bp, Zea mays
caggatcgagatcgagaacgtcgagaacctgtccatcaacggccacggcaccatcgacgggcagggagccctggtgtggagcaagaaccagtgccagcattcttacaattgcaagatcctcccgaatagcttggtgctggattttgtgacgaacgtccagatccgcggcatcacgctgctcaacagcaagttcttccacctcaacatcttcgagtgcaagaacgtgctgatcgacaaagtgacggtcaaggcccccggcgacagccccaacacggacggcatccacatcggcgactccagcaacgtgaccatcagcagcaccaccatcggcgtcggcgacgactgcatctccatcggccccgggagcaagatgatccgcatccatggcgtcaag

SEQ ID NO: 79897 - DNA, 413 bp, Zea mays
ggtgggcgccggggacgatggcgcggcggccaaggaggcgaggaggaagaactggtaccggccggccaagtcgtcgtcgtggcgcaggatccggtgctcgcagaaggagtgcgcgctgctgccctacaacacgtgccagagccccagcaaggcggagtcgtgcagctactaccagcagatgcaggacggcacgttgacgatgggcatctacggcaaggagaaggcgacggtgacggtgtcggacgggcgtatggccaagctccctggcctcatccttggctgctccgtcctggaggccggcggcagcgtggacgcccacgacggcgtgctctcgctggggaacggcgagatgtccttcgccgtccacgccgccaagcgcttcggccagcgcttctccttctgcctcctcagcg

SEQ ID NO: 79898 - DNA, 417 bp, Zea mays
atggcatgcacatacaatgcgatgagagccttgttcctcctggtcctcttctgcatcgtgcatggtgagaaggaagagtcaaagggcatcgatgcgaaagcgtccgggcctggtgggtccttcgacatcaccaagttgggcgcctccggcaatggcaagacagacagcacgaaggctgtgcaggaggcatgggcatcggcgtgcggcggcactgggaagcagacaatcctcatacccaagggcgacttccttgtcggacaactcaacttcacaggcccttgcaagggcgacgtgaccatccaggtggatggcaatctgctggcgaccacggacctaagccagtacaaggaccatggtaattggatcgagattctacgcgtggataacctggtcatcatcggcaagggaaaccttgac

SEQ ID NO: 79899 - DNA, 408 bp, Zea mays
  unsure (1)..(408): unsure at all n locations
aaaaatggcaaaggctctcctaggtggcctatcggcgatcctcgtcgtggcggtggtcgtcggtgtggtcgccaccgtcacccgctccggcaagaaggccggcgacaacttcacggtcccgggggaggcttcccttgccacgtccggcaagtcggtcaagtccctgtgcgcgcccaccctatacaaggagtcgtgcgagaagacactgtcccaggccaccaatggcaccgagaaccccaaggaggtgttccacagcgtggccaaggtggcgctggagtcggtccagacggcggtcgagcagtccaagtcgatcggcgaggccaaggccagcgactccatgaccgagagcgcgcgcgaggactgcaagaagctcctggaggacgccgccgacgacctgangggcatgct

SEQ ID NO: 79900 - DNA, 407 bp, Zea mays
ccacgcgtccgtccagcgcagcgaagtaaacatgtctgaccgggcaaagatgtcgtggcaggcgtacgtggacgagcacctgatgtgcgagatcgagggccaccacctcgcggcggcggccatcgtcggccacgacggtgccgcctgggcgcagagcacggcgttccccgagttcaagaccgaggacatggccaacatcatgaaggacttcgacgagccagggcacctcgcgccgacaggcctgttcctcggacctaccaagtacatggtcatccaaggcgagcctggtgccgtcatccgtggcaagaagggatcaggaggcatcaccgtgaagaagacagggcaggcactcgtggttggcatctacgacgagccgatgacgcctgggcagtgcaacatggtggtgg

SEQ ID NO: 79901 - DNA, 414 bp, Zea mays
cccacgcgtccgggtctgtgggtcctccatgaaattataatgccgatcgtgaccaagctccttactgctctctgtgtcccatacgtccttgcaaggggcatcttcccgttgctgggttacccactcatcgtgaactcagcggtgtaccggtttgcctggcttggaagcctgatcttcagcgcactcttcttttggggcaagagatttcatgtctggttcaccaacctccacaactctatcagggatgaccgctatctgattgggcggaggctgcacaactttggcgaggactcacactcacctgagcggagtgaatctggagcaagtatagggtcagatgatcaggacagagatattgtactgcgagatcaggaagaggaagtggggttgaggatgaggcgcaataatatgcat

SEQ ID NO: 79902 - DNA, 416 bp, Zea mays
gctccctcgaaatggaggcgacgagcaaggcgatggcttcaggcctcctcgttctgctgcttctcatcaacacaggctttgtcctgcccgtccattccgaggactgctgggccgacacccgcgtcatctgcaccaagacgcacaactgccgggacgacacttgcgcggggcgcggcatgccggacggccgctgccactgggagttccccaacctggtgcccttctgccagtgcctgcgccccaactgccactagtccgggcgcctcggattggctcacttcgccggcgatgatggatggtgcccaactgcgactgcccagtctgctccattcgttgttgtttaaggcataatatataaactgccaaattcacatgtattttgggatatttgttatcatactatgaaatgactgtga

SEQ ID NO: 79903 - DNA, 412 bp, Zea mays
  unsure (1)..(412): unsure at all n locations
gcagaaacgagagggcaggagcagccgcagtcccggcgatcccgccgccggtcgccctcacacctcctcgtcactgccttcgtttctctttccaacaatcaagatgagccgtggcggtagcgcgggtggtggtcaaagttctctgggttacctctttggaagcggtgagccccccaaaccagcagtggcaccaccagctgtaagtgctccacctgctgctgcaggtgctccacctgctgagaaaccacctgctgcaaagcctgatggcaccagtcagattgctgctggggttaccagccaaaccaataactatcacagggctgacggtcagaacaccggcaacttccttacggaccgcccttcgaccaaggtccacgctgctcctggcggtggctcttccctgngatacctg

SEQ ID NO: 79904 - DNA, 411 bp, Zea mays
accacgcgtccggcggatgccgcgctgccgtcacggcttcttccacgtggtgaacaacgactacacgcactggctcatgtacgccatcggcggcagccggaaccccaccatcatcagccagggcaaccgcttccgcgccgtcgacgacagcaggttcaaggaggtgaccaagcgggagtacacgcagtacagcgagtacaagaactgggtgtggaagtcgcaggacgacctgttcctcaacggcgccttcttcaaccagtccggcggccagaacgagcgcaagtacgacaggctcgacctcatccaggccaagggcggccagtacgccgagtcgctcaccaggtacgccggggcgctcaactggcgcgtcggcaggaagtgctagtgcgtgtgcaactctaggctgcagct

SEQ ID NO: 79905 - DNA, 385 bp, Zea mays
ctcttcgccgcggcggcggatggccctgccgctctacggctgcaggtcctgcgctgtgcatgatgccatcatcttctgccactgctgtgacgccaggctgtgcctgcactgcgacgccgccgtgcacggggctaccgaggcgggggcgctccacccgcgcgcccggctctgcgacgcgtgcggcgccgcgccggccgcgctgcgctgcgacggcaccgtgacgctgtgcgccgtgtgcgtcggccgctgtgctcccggtgtgacccgcacccgcgtggccacgttcaacggctgttccggccctgctgagatggtgggcctcatttccgttgacccaccgcatctggagcaggactttgaggcctggctcgcagacaagctcccg

SEQ ID NO: 79906 - DNA, 415 bp, Zea mays
atggcgtgcacagacaatgcgatgagagccttgttcctcctggtcctcttctgcatcgtgcatggtgagaaggaagagtcaaagggcatcgatgcgaaagcgtccgggcctggtgggtccttcgacatcaccaagttgggcgcctccggcaatggcaagacagacagcacgaaggctgtgcaggaggcatgggcatcggcgtgcggcggcactgggaagcagacaatcctcatacccaagggcgacttccttgtcggacaactcaacttcacaggcccttgcaagggcgacgtgaccatccaggtggatggcaatctgctggcgaccacggacctaagccagtacaaggaacatggtaattggatcgagattctacgcgtggataacctggtcatcaccggcaagggaaaccttg

SEQ ID NO: 79907 - DNA, 404 bp, Zea mays
catgaattgactgtgctggagaaggtccgacaccctaacgtcgttcagttcgtcggagccgtcactcagagcatacctatgatgattgtgtctgaactccatgaagagaaagacttatcagtctgtatccagaagataggaaagttaaagcctcagaaggtgctaagatacggccttgatattgccaggggcatgacctacctccaccagtgcaagccggaccccatcatccactgcgacgtaaagctaaagtgccagacatatcttcctggatagcggaggccagctgaagatcgcggggttcggagtgacaaggatgtccaaagtcgggaccgacaacgtgaggttgattctacatggcgctctcgtcgacagcttcagctaccacaccgcgcctgagctgt

SEQ ID NO: 79908 - DNA, 416 bp, Zea mays
cccacgcgtccgatcgatgaactgccaataaatcccacccccatcttatggaggacgttgctttctgcttgtggaggccatggagatgtcgaacttggcaagcgtgtctttgagaggattcttgagctggacgattctcatggtggtgattatgtaatattctcgaatttgtgtgcaaacactggatactgggaagagatgaatagggtaaggaaactgatgagcgacaaaggtgtggtaaaggtgcctggctgcagctcaatcgagatagataacacggttcatgagttcttcgcaggagatggaaggcaccccaaatcacaagaagcacggaaaatggttgatgaagtgatcgattaactaaagcttgttggttatatccctgatacctcacatgtgtttcatgtcgaaatggg

SEQ ID NO: 79909 - DNA, 418 bp, Zea mays
gggcaccgtggtggtgacggccaccaacgaggccccgccgccggtgagcgggcagaagggcgagcactttgacctcaccataccggcgttcctcaagatcgccgaggagaaggccggcatcgtgcccatcacctaccgcaaggtggcgtgcgagaggaaaggcggcatccggtacacgatcacagggaaccagcactacagcgaggtgaaggtgaccaacgtgggcggcgccggggacgtggtggcgctgtgggtgaagggcaacaagcgcgtcaagtggacgccgatgaagcgcagctggggccagctctggaccacggaggtcgacctcaccggcgagtcgctgacgttccgcgtcatgaccgccgaccaccgcaaggctacctcctggcacgtcacgccccgcgactggcagttc

SEQ ID NO: 79910 - DNA, 444 bp, Zea mays
tccggtactcccgggtgcccccacacgtccggaaataaatagttcgtgaatccctgaagcgtgcatatatatattcctgccaagataaaggtaatggagtcgtcacgcaggttccagccggccgtcatcctgcttctcctgctcattgtgtccaccgatatggcacaggcaagggaatgcgagaagtacagtgagcgatttgttggggcatgcatgatcgcagacaactgcgccaatgtgtgccgcggtgagggcttcttggccggcaggtgcagcaccttccgccgccgctgcatctgcactaggcagtgctaaacaagatcgctcgatcgttcgccatgcatcgacaacctattcttaataacgttcattatctcgttcttatttatgacgaatgtcatgtatgttctggtgactgtcatgtatattctgatgactgtcatg

SEQ ID NO: 79911 - DNA, 421 bp, Zea mays
ctctctcgcgcgcgcattacttgcacgtacgagctcagaaggaacgcagaggcaaaagcagccatggcgaactcgtcgtccggccttgcggtgaacgacgagtgcaaggtgaagttccgggagctgaagtcgcggcggagcttccggttcatcgtgttcaggatcgacgacacggacatggagatcaaggtggaccgcctcggcggaccgaaccagggctacggcgacttcaccgacagcctccccgccaacgagtgccgctacgcgatctacgacctcgacttcagcaccatcgagaactgccagaagagcacgatcatcttcatctcctgatcgcctgacactgcacgcaccaggagcaagatgctgtacgccagctccaaggacaggttcaggagggagctggactgcatccagtgcg

SEQ ID NO: 79912 - DNA, 408 bp, Zea mays
cccacgcgtccgcggagcggatcatcgcggaggtgatgcatacgaagcagatggcgaacccgacgacggccgcgggcatgctgcgcgtcttcttccacgactgcttcgtcaccgggtgcgacgcgtcggtgctgatcgcgtccacccagttccagaagtcggagcacgacgcggagatcaaccactcgctcgccggggacgccttcgacgccgtggtgcgcgccaagctggccctggagctggagtgccccggggtggtgtcctgcgccgacatcctcgcgctggcgtcgggggtgctggtcagcatgaccggcgggccccggtagccgattccgctggggcgcaaggactcgctgtcgtcgtcgcccacagcgcccgacgtcgagctgccgcacgccaacttcaccg

SEQ ID NO: 79913 - DNA, 395 bp, Zea mays
cagagacgttccgctgagcggatcatcgcggaggtgatgcagacgaagcagatggcgaacccgacgacggccgcgggcatgctgcgcgtcttcttccacgactgcttcgtcaccgggtgcgacgcgtcggtgctgatcgcgtccacccgagttccacgaagtcggagcacgacccggagatcaaccactcgctccccggggacgccttcgacgccgtggtgcgcgccaagctggccctggagctggagtgccccggggtggtgtcctgcgccgacatcctcgcgctggcgtcgggggtgctggtcaccatgagcggcgggccgcggtacccgattccgctggggcgcaaggactcgctgtcgtcgtcgcccacagcgcccgacttcgagctgccg

SEQ ID NO: 79914 - DNA, 406 bp, Zea mays
gaaatgatgtccgagagtgaagagcatggctcgctcctagacaagatcaacgacaagatcaacgagaagatccatgagtataagcactcgtcgtcgtcctcctcctcttcggactcagacgatgacaagaagcccaagaagtctaagaagaagaagctttttggaagaaaacatccattgcatcatgtcctcggaggaggcaaagccgccgaccttgtgctgtggaggaacaaacaggcatctgggagcatcttggtaggggtgaccgtgatctggttactgttcgagggcatcggctaccacctccttaccttcctttgccacgcactaattgtgtttctcaccatctggttcatctggtccaatgctgcgtcatttgtcaacaggtcacctccaaagttcccag

SEQ ID NO: 79915 - DNA, 414 bp, Zea mays
cgggggcgatgacttctcctttacgctcaaggagggcccgaccggcacctggacgctcgacaccaaggccccgctcaagtaccccctttgcatccgctttgctgtcaagtccggtggctaccgcatcgccgacgacgtcatccccgccgatttcaaggccggcaccacctataagaccacactcagcatctaatcagcctctgatgatgaattatatttcaaaagagctcacctggcgctcacgttagcaagacaatattttttctatggttattttgtggcgccaaaccacccaagaaatatgtgatgctacatgtcccttatgatgccttgttgtgttgggttgatattattacataaactaaataaattattcatttaagattttaggagaaatatgttgatatggtctac

SEQ ID NO: 79916 - DNA, 412 bp, Zea mays
ggtgcttctgctcgccggcccaaaatcgcctcatcgaccacgcccccttccaggctcccgtctccatgggtctcctctcaaacaggattgggagggagagcctcaaggcgggggatcatatctactcctggagggcggcgtgggtctacgcgcatcagggaatatatgtgggcgatgataaggtgatccatttcacaagaggaagaggacaggaggtctgaacaggaactgtcgtcgatattattcttgtgagttccaccccatcacgaagcaacacgccttgcccggtgtgcaccgacgaaaccagcgacagcagcacagagacgaacggcgtggtatcctcctgcctcagctgcttcctagctgggggtgctctctaccgtttcgagtacgcagtcaacccggcgctctt

SEQ ID NO: 79917 - DNA, 412 bp, Zea mays
cccacgcgtccgcccacgcgtccgggttcagatgccctgaggtcctcttccagccttccttcattggtatggaagctcctggcatccatgagaccacctacaactccatcatgaagtgcgatgtcgacatcaggaaggacttgtatggtaacattgtgctcagtggtggcacgaccatgttccctggtattgcggaccgtatgagcaaggagatcactgcccttgcgccgagcagcatgaaaatcaaggtggtggcaccgcctgagaggaaatacagtgtctggataggaggatccatccttgcctccctgagcaacttccaacagatgtggatctcaaaagctgagtatgacgagtcaggacctgcgattgttcatcggaagtgcttctaagctctgggtcccccttcggc

SEQ ID NO: 79918 - DNA, 413 bp, Zea mays
caagcccttcatcttcgtgaggggcaacggcaaaggccggacctccatctcccacgagtccgcctcttccgacaacgccgagtccgccgcgttcaccgtgaactcggacaacgtcatcgtcttcggcgtcagcttcaggaacagcgcccgcgtcggcctggtgaacgacccggagatccgttccgtggcggcgatggtggccggcgacaaggtggccttctaccactgcgcgttctacagcccccaccagaccctgttcgacagcgccggccgccactactacgagagctgcgatatccagggcaacatcgacttcatcttcggcagcggtcagtctatcttccagtgccccgagattctcgtgatgcctgaccggcggacggagatcggcagctccatcatcgcgcatgtgc

SEQ ID NO: 79919 - DNA, 420 bp, Zea mays
cccacgcgtccgcccacgcgtccggatagcgagcacccggcgtcgggcgacggtggcgccatgggtggctgccactccgccatcgcggccaccaagctgaagattctgcgccgcggaggccggggtgccgctgccgtcctccccgtcaccaaccacgacggcccgtgctgctcctccgaccacggcagcaaggagaagaagaagaaaaagaagggcgccaggaagggcaggaaacgcgcctccatcctgggcgacgccggcaccttcgacccggacttctcgcggcggtaccggctcggcgcggagctcgggcgcggcgagttcggcgtcacgaggcggtgcgaggacgccgccacgggggaggccctggcgtgcaagacgatccggcggaagcggctgctcctgcgcctcgccgggcgc

SEQ ID NO: 79920 - DNA, 413 bp, Zea mays
gaaatgatgtccgagagtgaagagcatggctcgctcctagacaagatcaacgacaagatcaacgagaagatccatgagtataagcactcgtcgtcgtcctcctcctcttcggactcagacgatgacaagaagcccaagaagtctaagaagaagaagctttttggaagaaaacatccattgcatcatgtcctcggaggaggcaaagccgccgaccttgtgctgtggaggaacaaacaggcatctgggagcatcttggtaggggtgaccgtgatctggttactgttcgagggcatcggctaccacctccttaccttcctttgccacgcactaattgtgtttctcaccatctggttcatctggtccaatgctgcgtcatttgtcaacaggtcacctccaaagttcccagaggtcat

SEQ ID NO: 79921 - DNA, 400 bp, Zea mays
ggcgtgtatagacaatgcaatgagagccttgttccttttagcgctcttctgtgtcgtgcatggtgagaatgcaaagtcaaaggacaacgatgcaaaagcgtccgggcccggtgggtccttcgacatcaccaagttgggcgcctccggcaatggcaagacggatagcacgaacgctgtgcaggaagcgtgggcatcagcgtgcggcggcaccgggaagcacacgatcctcatccccaagggcgacttcctcgtcggaccactcaacttcacatgcccatgcaatggcgacgtgaccatccaggtgaatggcaatctgctggcgaccacggacctaagccagtacaaggatcatggtaattggatcgagattctacgcgtggacaaacttgtcatcaccggc

SEQ ID NO: 79922 - DNA, 414 bp, Zea mays
  unsure (1)..(414): unsure at all n locations
gcagttctaccgcaactgcatcatctcaggcactgtggacttcatcttcggcgacgcggcggcggtgttccagaactgcatcctggtgctgcgccgcccgatggacaaccagcagaacatcgcgaccgcgcagggccgcgcggacgcgcgcgaggccacggggttcgtgctccagaagtgcgagttccaggccgaggccgcgctccgggactccgggcgcccgcccatccgcaactacctgggccggccgtggcgcgagtgctcgcgcaccatcgtcatggagtcggagctcccggacttcatcgacaaggcggggtacttgccctggaacggcgactttgggctcaagacgctgtggtacgccgagttcggcaacacanggcccggcgccaacacggccgggcgcgtcagctg

SEQ ID NO: 79923 - DNA, 420 bp, Zea mays
ggacggcgcagaaggtgatcctcatcaacgacatgttcccgggccctaccatcaactgctcatccaacaacaacatcctcgtcaacgtgttcaacatgctcgaccagccgctcctcttcacatggcacgggatccagcagaggaagaactcgtggcaggacggcatgccgggcaccatgtgcccgatccagcccaacaccaacttcacgtaccactggcagcccaaggaccagatcggcagcttcttctactaccccagcaccggcatgcagcgggcggcgggcgcctacgggctgatcagcgtccacagccgtgacctgatcccggtgcccttcgacacgccggccgacgacttcccggtgctcatcggcgactggtacaccaaggaccacgccgtgctggccaagaacctggacgccg

SEQ ID NO: 79924 - DNA, 411 bp, Zea mays
ccgggtagatccaaatgtctgcacaacttcacctgtgtataaagggacgtttctcatggttgctacaagattaaggcgtggtccccatactgagtacattatatctcttgatgcagaggacttatcacaagggagcaattcatacatgggaaaactgagatctgatttctgggggacaaacttcaaaatatatgatagcaagccaccatatgacggcgctaaagcatcaagtagtcgatctagtcgtcgtttcggaagcagaaggattagtccccaagtatcgtctggtaactatgaaattggacaggtttcatacaaatacaacttgctcaaatccagacgccccaggagaatgaattgcactcttgaatgcccttcagcgcaagagacctgggaaaactcactcaagac

SEQ ID NO: 79925 - DNA, 422 bp, Zea mays
cccggcgactactacatggtggcctccacgcggttcatccacgacgccaagtccgcgtccgccgtcatccgctacgccggctccagcgccccgccggcgccgaacatgaccgagccaccggccggctgggcctggtccatcaaccaggccaggtcgttccgctggaacctgacggccagcgccgcgcggcccaacccgcagggctcctaccactacggccagatcaacatcacccgcaccatcaaggtcatggtctcccgcggccacatcgacggcaagctccgctacggcttcaacggcatctcccacagggaccccgagacccccgtgaagctcgctgaatacttcaacgtcaccgacggggtgttcagctacaaccagatgggcgacgtgccccccgccgtgaacgggtccctccatgt

SEQ ID NO: 79926 - DNA, 402 bp, Zea mays
cccacgcgtccgatcagccaagagctatccatacgcacagcgatgcaccagcacgagatactagccatcatgcgcctgtcgtccctcctcctcgtcgtggccgccctctcggcgcgcgccgcggcgcagcaggtgccgccggtgggcggcagcgctctgaagccggactactacagccagtcgtgcccgcgcgcggagcggatcatcgcggaggtgatgcagacgaagcagatggcgaacccgacgacggccgcgggcatgctgcgcgtcttcttccacgactgcttcgtcaccgggtgcgacgcgtcggtgctgatcgcgtccacccagttccagaagtcggaacacgacgcggagatcaaccactcgctcccggggacgccttcgacgccgtggtgcgcg

SEQ ID NO: 79927 - DNA, 421 bp, Zea mays
gccaagcaggtccagagatctcgatcggtcctcttgcagaaacgaggaaagaaaacatgtcttctcgctgggttagggcggaggtgtacccgctgttcgcgacgacaggggtggcggtggggatctgcgtgatgcagctggtgcgcaacatcaccaccaacccggaggtgcgggtgaccaaggagaagcgggcggccggggtgctggacaaccacgacgaggggcggcgctactcgcagcacggcgtgcgcaggttctggctctccaagcgccgcgactacatgcaggccatggacaaggtgcccacggaccctaataagtagacgacgacgatataccccaatgcatggcaagaagatatatatatcagcacaacgcaactgcatgcgatgctgcttgttgctgcaattaatccactata

SEQ ID NO: 79928 - DNA, 363 bp, Zea mays
cgcttcgacccgtcgcgcgtccgcgaccgcatctcgcgctcggtgcgccaggagctggaccagccgctcaactacgcgcgcgtctacctcgccgacacgctgccgcgcgacgtgcgccgcgtcacgtacctcgactccgacgtggtcgtggtggacgacgtccggacgctggcgtccgtggacctcgcgggccacgtggtggcggcgcccgagtactgccacgccaacttcagcaactacttcacggacgccttctggtcgcacccggcgctcaacggcaccttccacgggcgccgcccatgctacttcaacacgggcgtcatggtcatggacgtcgacaagtggcgcgccggcgggtacacg

SEQ ID NO: 79929 - DNA, 396 bp, Zea mays
gcagggcaagagaatccgtacgtcgaggtgcacgtcgtaagtacgatggacgcggaccagcaaggcgtggttgcggcggcggtgaagccggcgctggccaatgggacgccgtcggcgtcgttccggctccgcaacgggagcctgaacgcggtgcgcctccgccgcgtgttcgacctgttcgaccgcaacggggacggcgagatcaccgtggacgatctggcgcaggcgctggatgcgctgggcctggacgccgaccgcgccgggctgtccgccaccgtcggcgcctacgtgcccgacggcgccgcgggcctccgcttcgaggacttcgacaagctccaccgcgcgctcggggacgccttcttcggcgcactgtgatgccaggacgacgccaccgcc

SEQ ID NO: 79930 - DNA, 408 bp, Zea mays
gtcgcgtgtctaggtttcctctctcaccatagcgcccgctctgtcgcccttcgttcacctctccttcctctcctccctgcctgccagggagaggggaagtcagaggcacggagtggcgcagagcagacgcacgtgaaccattgtagctgtccctgtcgtcgtcgtcgtcgtcaacgaatccacacaaggaaaggatggagaagaagccgaccatcctcatgaacaggtacgagctcgggcgcacgctcgggcagggcaccttcgccaaggtgtaccacggccggaacctcgcgtccggcgagagcgtggccatcaaggtcatcgacaaggagaaggtgatgcgcgtcggcatgatcgaccagatcaagcgcgagatctccgtcatgcgcctcgttcgcgacccaacgt

SEQ ID NO: 79931 - DNA, 396 bp, Zea mays
cccacgcgtccggccagctgacggggttcctcgcagatccagatggtgttcttgatgtggtcccggcggacatggtggtgaacgcgacgctggcgtcgatggcgaagcacggcggcggcgcggcggggcccgggatgcacgtgtaccacgtgtcgtcgtcgacggtgaaccctctggtgttcggcgacctgagccggttcctgttccagcacttcacgcggtgcccctacagcgacgcggcagggcagcccatcctggtgccgcccatgcgcctcttcgacaccatggagcagttcgccagctacgtggagacggacgcgctgctgcgcagcgcccggtcgacctcgtcctcgtcgtcgctggcgcagcgggcgcgcgacctgtgcgccaggtccg

SEQ ID NO: 79932 - DNA, 411 bp, Zea mays
cccgcggccacatcgacggcaagctccgctacggcttcaacggcatctcccacagggacaccgagacccccctcaagctcgccgagtacttcaacgtcaccgacggggtgttcagctacaaccagatgggcgacgtgccccccgccgttaacgggccactccatgtcatccccaacgtcatcaccgccgagttccggaccttcatcgagatcgtcttcgagaaccccgagaagagcatagactccctccacctcgacggctacgccttcttcggcgtcgggatggggcctgggacgtggtcgccggagatgaggaagacgtacaacctactggacacggtgagccggcacacgatccaggtgtacccgcggtcatggacggcgatcatgctgacattcgacaacgcgggca

SEQ ID NO: 79933 - DNA, 397 bp, Zea mays
cccacgcgtccggcaggatctaagcaaagacttgatttagttatggacggattggtaggcctcttgaaagttcgcgtggtccggggtatcaaccttgcctaccgcgacgcaagaggcagcgatccgtatgtcgtcctacggcttggcaagaagaaactgaagacaagcgtgaagaagagatccgtgaaccccatatggcaagaggagctaactctgaccgtcacagatcccagccaaccactgaagctggaggtgttcgacaaggacaccttcagcagagacgaccccatgggagacgcggaggtggacgtggcgccactgatggaggcggtgagcatgaacccgcgggaggagagtctgaggaacggcgccatcatcaagtccgaacgggcgaacg

SEQ ID NO: 79934 - DNA, 412 bp, Zea mays
  unsure (1)..(412): unsure at all n locations
ctgaccggcaagactatcaccctcgaggtggagtcttcagacaccatcgacaacgtcaaggccaagatccaggacaaggagggcattcccccagaccagcagcggctcatctttgctggaaagcagcttgaggacgggcgcacgcttgccgactacaacatccagaaggagagcaccctccacttggtgctgcgcctcaggggaggcatgcagatcttcgtgaagaccctgaccggcaagactatcaccctcgaggtggagtcttcagacaccatcgacaatgtcaaggccaagatccaggacaatgagggcatcncaccggaccagcagcgtttgatcttcgctggcaagcagctggaggatggccgcacccttgcggattacaacatccagaaggagagcaccctccacc

SEQ ID NO: 79935 - DNA, 371 bp, Zea mays
ccaacgcgtccgcgacgacggcaccaaggtggcggtgaagcgcgggagcgcggagtcggagcagggcatcaacgagttcaacacggagatccagatgctgtcgaagctgcggcaccggcacctggtgtcgctgatcggctactgcgacgagaaccaggagatgatcctggtgtacgagtacatgcacaacggcgtgttccgggaccacatctacggcagcgaggggaaggcgccgctgccgtggaagcagcggctggagatctgcatcggcgcggcgcgggggctgcactacttgcacacgggcacggcgcatgggatcatccaccgcgacgtgaagaccaccaacatcctgctggacgacaacttcgtgg

SEQ ID NO: 79936 - DNA, 406 bp, Zea mays
accgcctccccgtgtcccctccttctcgcccggcaccgtcgagctcggctgtggaaacagaacaaacccatcaaccatggcgaactcggcgtcggggatggccgtgagcgacgagtgcaagctcaagttccaggagctcaagtcgaagcgaagcttccggttcatcacgttcaagatcaacgagcagacgcagcaggtggtggtggacaggctggggcagccgggcgacacctacgacgacttcaccggctccatgcccgagagcgagtgccgctacgccgtcttcgacttcgacttcaccaccgacgagaactgccagaagagcaagatcttgttcatctcctggtccccggacacctcgagggtcaggagcaagatgctgtacgcgagctccaaggaccggttc

SEQ ID NO: 79937 - DNA, 401 bp, Zea mays
ccacgcgtccggcggccccgggcagggcatcagcgtcggctgcctaggccgctacaaggacgagaaggacgtgagcgacatcacggtgcggaactgcgtgctcaagaacaccaccaacggcgtgcgcatcaagtcgtacgtggacgccgagtccgtgctgacggcctcccatctcaccttcgagaacatcaggatggaggaggtggccaaccccatcgtcatcgaccagtacttctgcccgcagaaggtatgccctggcaagcggagcaactcctcgcatgtctccgtcaaggacgtcacgttccgcaacatcaccggcacgtcgtccacgcccgaggccatcagcctgctctgctcggagacgcagccatgcagcggcgtctccctcatcgatgtcaacg

SEQ ID NO: 79938 - DNA, 404 bp, Zea mays
gaaagatggcattctgtgcccaattcctcagtaccccttgtactcggcctccatagctcttcatggtggagctcttgtcccctattaccttgatgaaaaaactgggtggggtttggagatctctgatcttaagaaacaactcgaagatgctcggtcaaaaggcattgatgttagggccttggtggttatcaatccaggaaatccgactgggcaggttcttgctgaagacaaccaatatgatatagtgaaattctgtaaaaatgagggccttgttcttctagctgatgaggtatatcaagagaacatctatgttgacaacaagaaatttaactctttcaagaagattgcaagatccatgggatacggcgaggatgatctccctctagtatcatttcagtctgtct

SEQ ID NO: 79939 - DNA, 273 bp, Zea mays
  unsure (1)..(273): unsure at all n locations
gatttgcgtttccagagccatgcggtgcttgctctccaggaggctgctgaggcataccttgttggcctgtttgaggacaccaacctgtgcgccatccatgctaagcgtgtgaccatcatgcccaaggacattcagctggcaaggaggatccgcggcgagagggcctaatcgccacctcaaacatcgtgacaaaaaaatgaagtcctgnggttattgttaatctggtgccattgtaaggacatatgagtagggtttgttttgtggatcgcagaa

SEQ ID NO: 79940 - DNA, 320 bp, Zea mays
gtagttgtacatatatcaacgcaagaccacggcatcgaaggcgctgctgatgcataccttgttggcctgtttgaggacaccaacctgtgccccatccatgctaagcgtgtcaccatcatgcccaaggacattcacctggcaatgaggatccgccgcgagagggcctaatcgacacctcgaacatcgtgacaaaaaaatgacctcctgcggttattgttaatctgatgccattgtgatgacatatgagtagggtttgttttgtggatctcaggtcaaaacggcggtccaccagtccaggtcgattcgggaaggcactctca

SEQ ID NO: 79941 - DNA, 371 bp, Zea mays
gctgacgacaccaccgtgtggtcgacaaaatataaaggagagagagagagatggctctgtcgtctcgccgtatggccgccgcaccattcttcgtcgtcgtccttctcgtcctcgtggcggcagagaggacgatgggcagggtggtggtggaagagacgctctgcttgtcgcagagccatgccttcaaaggcgtgtgcctcagcaacaccaactgcgacaacgtatgcaagacggagaagttcacaggcggcgagtgcaagatggacggcgtcatgcgcaagtgctactgcaagaaggtctgctagggcatgaccggcagcaagccccagccgtacggctggttgatccggttgcacaccgtttgggcacgc

SEQ ID NO: 79942 - DNA, 404 bp, Zea mays
cgttgtcacccacccatcgaggttggggccgccagcaggttcagccgttcctgttcttgataaaacgagagaaggatggcagtgtttcagggagctgtcctattcttgtttctcctcctcgtcgcagcagaggtgggaaccatcgatgccaaaatgggagtagccatgcccatgcatgccttgataatggagaaagcgaaacagcaggagacggagaagaaggaggagaaaagcacggagaaggaagagagtcaatgcttatcgccgagtctccagttcgagggcttctgcttcaacagcgacagatgcgccgaggtgtgcatgaatgagagctttcccggtggcgagtgcaagcgggacgtggccatgcgcaagtgcttctgcaagaagcttgctagttcatc

SEQ ID NO: 79943 - DNA, 407 bp, Zea mays
ggctggttcgtggatggcggtgccacaacctctcctgctgtcgctgctggtcgccgtgctagcggtggccgccgatgtcgccaacgccggccacgccaagcccctaacgcctggcgggcgcgtggtacacgacaaccacggcaagttcacggccgggccgtggaaacccgcccacgcaaccttctacggcgggcgtgacgggtccggcaccacggcgggcgcgtgcgggtacaaggacacgcgcacgcaggggtacggcgtgcagacggtggccgtgagcactgtgctgttcggtgacggcgcggcctgcggagggtgctacgaagtgcggtgcgtggacagccctagcgggtgcaagcccgacgcggcagcgctggtggtgacggtgaccgacctgtgcccgccca

SEQ ID NO: 79944 - DNA, 393 bp, Zea mays
gagagccttgttcctcctggtcctcttctgcatcgtgcatggtgagaaggaagagtcaaagggcatcgatgcgaaagcgtccgggcctggtgggtccttcgacatcaccaagttgggcgcctccggcaatggcaagacagacagcacgaaggctgtgcaggaggcatgggcatcagcgtgcggcggcactgggaatcagacaatcctcatacccaagggcgacttccttgtcggacaactcaacttcacaggcccttgcaagggcgacgtgaccatccacgtggatggcaatctgctggcgaccacggacctaagccagtacaaggaacatggtaattggatcgagattctacgcgtggataacctggtcatcaccggcaatggaaaccttga

SEQ ID NO: 79945 - DNA, 408 bp, Zea mays
  unsure (1)..(408): unsure at all n locations
cccacacgtcagctcgatgaggacgttgccgcgcatgtcaacggcgacttccgaaagcttttaatgcctcttgttagtgcgtaacgctatgatggaccacacgtgaacacatctttggctcattctgaagccaaaatacttcatgagaagatccataagaaggcttacagtgatgaggagatcattacaattctcaccacacggagcaaagctcagctacttgcaacattcaatagctacaaggatcagttcactcatgcaatcaacaaggatctgaaagctgaccccaaggatgagtttctttcaacactgcgggcgatcatccggtgcttcacctgccctgacagatacttcgagaaagtcattcgactggctcttggaggcatgggcactgatgangatgacctc

SEQ ID NO: 79946 - DNA, 406 bp, Zea mays
gagaaaggcaagggacgtaagaagtcgtctaattcttggatcgaattagacgacttcatcgtccctctcttcattagcacgctaacttgtaatctgcaggatctaagcagagacttgatttacttatggacggattggtaggcctcttgaaagttcgcgtggtccggggtatcaaccttgcctaccgcgacgcaagaggcagcgatccgtatgtcgtcctacggcttggcaagaagaaactgaagacaagcgtgaagaagagatccgtgaaccccatatggcaagaggagctaactctgaccgtcacagatcccagccaaccactgaagctggaggtgttcgacaaggacaccttcagcagagacgaccccatgggagacgcggaggtggacgtggcgccactgat

SEQ ID NO: 79947 - DNA, 370 bp, Zea mays
ggatccttcacaactcgctggggatggacttcgtgaataatcgggatgtgtctcgggtcacgctgcgtaactccaagttcttccagattaacatgtaccggttcaaggatatgctgatcaaggaagtaactgtgacagcgcccggcgataaccccaacactgatggcatccacatgggcgattcatccgggatcaccagcattaacaacgtcattgtcgtcagcgacgactgtatctccatcagacccgggatctccaacgtgaacatcaccggcgtgacctgcaggcctgaccattgtatcagcatcggaagcctacggaggtacaatgacgaggaacgacatcacggacatcaacatcaacgattgca

SEQ ID NO: 79948 - DNA, 414 bp, Zea mays
ctccccgtcccgtctcccctctcgccctaggggccggggggctagggtttgcttcaccgccggcctccccctccgacgcggcaccggcccccgcgcaccgggcccggatgctatgctgctgagctgcaggaccctctccacctgggtgcgccgcctcgtcgcttgcatgggagcagaggttgctttggatgctgtgctaagccaactccaataatagcagtagacgagccttccaagcggttgaggatccaggggcgatcagtaaggaaggctagcctctcggaggacttttggagcacgagtgcgcatgagatggagaacagcgggatccaatcgcagaggagcatgtcttcgatcagcacgttggctcagtccagcgatcagcatgcgtcaggaagttgcagcaacccgaat

SEQ ID NO: 79949 - DNA, 404 bp, Zea mays
gggacagagagttctgctttctggtttgctcttggagggaaacagagttacacaaataaaaacactcctcaggatattattactagagagcctcacttgtatgcattctcattcaagaacgggagactggaggttactgagatcttcaacttttctcaagatgatttgttaactgaagacatgatggtacttgacacacatggtgaagttttcatttggattggtcagtatgtggaatcaaaagagaaacagaaggcatttgacattggccagaaatacgtggagcatgcaaattctattgaagatctttctccacatgtaccactatataaagtcatgggagggaatgagccatgcttcttcaggacgtacttttcttgggataacacagaatctttggttca

SEQ ID NO: 79950 - DNA, 402 bp, Zea mays
cgacaccagcaagaactccgacgtcatgcgcgccctaagcaacgccgtgcacgcgctctcgtggcgctctggcaccaccggtgccgctgtagaagcgtgccactgggccgacgggtacccgctcaacgtgctcctctactgctccctcctccaggccatctttgatctgagggagagcaccgtcgtgctcgacgaggttgacgagctcctggagctcatcaagaaagacgtggccgacgctcggcatcaacaggatgctgcacagcgtgtgcttgtcgtgggtcttcttccagcagtacgtgatcacgggccaggtcgagccggacctcgccgctgcggcgctcgccatactcgttgacgtggcagccgacaccaagcacgggagccgtgacccgatgtacg

SEQ ID NO: 79951 - DNA, 398 bp, Zea mays
ggaaaggatggagaagaagccgaccatcctcatgaacaggtacgagctcgggcgcacgctcgggcagggcaccttcgccaaggtgtaccacggccggaacctcgcgtccggcgagagcgtggccatcaaggtcatcgacaaggagaaggtgatgcgcgtcggcatgatcgaccagatcaagcgcgagatctccgtcatgcgcctcgtccgccaccccaacgtcgtgcagctgcacgaggtgatggccagcaagagcaagatatacttcgccatggagtacgtccggggcggcgagctcttcgcccgcgtcgcccgcggccggctcaaggacgacgccgcgagaaggtacttccaccagctcgtcagcgccgtcgacttctgccacagccgcggcgtct

SEQ ID NO: 79952 - DNA, 415 bp, Zea mays
cattcctgcctcgcaaggatgagtggccggctaggctagctggtgcttggacgtcataagctgcctcctgcctgccgtttgattcctgtgcaacaagaaggctgacaaaaataaaagggggtgggtcagtgaatggacattttaaaaccagttagcaccggcatctaccgcaagctagtttgaagttggtataataggtgcaagcgaataagacggacacgtatcagtggacactgcaagtaaatccaccgccaaatttgccatcctagggaagaaaaatgattccctggttaacttgtggaacccgatttaatttgagacaagacaacaataccagggttgagcttgccacttggtcatgacacacacgagaatacgagatgaccaagtaaaaactggacagaatgcactcaca

SEQ ID NO: 79953 - DNA, 415 bp, Zea mays
  unsure (1)..(415): unsure at all n locations
cgacaagatggcatgcacaaacaatgcgatgagagccttgttcctcctggtcctcttctgcatcgtgcatggtgagaaggaagagtcaaagggcatcgatgcgaaagcgtccgggcctggtgggtccttcgacatcaccaagttgggcgcctccggcaatggcaagacagacagcacgaaggctgtgcangaggcatgggcatcggcgtgcggcggcactgggaagcagacaatcctcatacccaagggcgacttccttgtcggacaactcaacttcacaggcccttgcaagggcgacgtgaccatccaggtggatggcaatctgctggcgaccacggacctaagccagtacaaggaccatggtaattggatcgagattctacgcgtggataacctggtcatcaccggcaaggga

SEQ ID NO: 79954 - DNA, 395 bp, Zea mays
cccgactacgcaacctgtgtgaagatctccactgatgcttccatcaaggagatgattcctccgggcgctctggtcatgctgactcccctcatcgttggaaccctctttggcgtcgagactctctccggcgttcttgctggtgccctggtttctggagtgcagatcgccatctctgcttccaacaccggcggtgcatgggacaatgccaagaagtacatcgaggctggtgccagcgagcacgcgaggaccctcggtcccaaaggatccgactgccacaagggcggctgtgattggtgacaccattggtgaccccctgaaggacacctccggcccgtccctcaacatcctcatcaagctcatggccgtggagtccctcgtgtttgcccccttctttg

SEQ ID NO: 79955 - DNA, 407 bp, Zea mays
ggcgcaacggcgacggcggcggcgaccagctcgttgtcgccttcgagacgtaccagcagctgagccgcgtgtctatccgggccatgacggccatctccgacctggaaacgatccacgaggacgtcgtcaccagcgcgcaccagaagcgagccgcgctcatcgtgctccccttccacaagctccaccagatcgacggccacatggagtcgcttggcgaccagtaccagcacatcaaccagcgcgtgctccaccacgctccctgctccgtaggcatcctcgtcgaccgcggcctcggcggtgtcgctcaggtggccgccagcgacgtgtcatacaccatcgttgtcatcttcttcggtggccgcgacgaccgcgaggccctggcctacggcatgcgcatggtcgagcac

SEQ ID NO: 79956 - DNA, 219 bp, Zea mays
cccacgcgtccggagatatcaacccatcggctcacatgggcttctactcaaggcttatcgtgtgttgtgcctccgttgcgactacggggatattaggttgtgtgtgtatgtggaccgacaccactgttgagctgtcgacccattagggctatggtcatttgagtctatatattgtaccccatctcctatgcaatacaatcaactactacagattcctgc

SEQ ID NO: 79957 - DNA, 413 bp, Zea mays
cccacgcgtccgcccacgcgtccgagaagatccaggacgacttctgctcgacgctgtgcgagggcaagaaggggacggacctggtcgtgtgcaaggagtcctgcgcgctctcccagcagtccaacctggtgctgtacggcaggatccagtgcaagggcaaatgcaccgagcagaagggcatcacggcgccggccatgaaggtctgccaggaggagtgcgacaaggcgtacgtggtgaaggcggccgatgtcaccaaggcctgcagcgtcacctgcgccaaggagaagaacccgcgcctcagcgagaactgcaagaggtcctgcacccctcctccttcttgaagcgaagccccttgaaatgaatgaaccatgcatgcatgcatgcatgtatgcatgcgccggggtgacgtggcg

SEQ ID NO: 79958 - DNA, 399 bp, Zea mays
gtcatctcctccatcaccaccaccaagctcaacagcagccagctcgcgaaaataatgaagagccgcagcatggcatcatcggccgcgctcttggtgctagccctcgcgctagtggcggccaccgccccacatgtatcggaggcaaagaagaagagagcggcggagagcggcgaggcggcggaggcgaagaagatccaggacgacttctgctcgacgctgtgcgagggcaagaaggggacggacctggtcgtgtgcaaggagtcctgcgcgctctcccagcagtccaacctggtgctgttcggcaagattcagtgcaagggcaaatgcaccgagcagaagggcatcacggcgccggccatgaacgtctgccaggaggagtgcgacaaggcgtacgtggtg

SEQ ID NO: 79959 - DNA, 412 bp, Zea mays
ggaagagtcaaagggcatcgatgcgaaagcgtccgggcctggtgggtccttcgacatcaccaagttgggcgcctccggcaatggcaagacagacagcacgaaggctgtgcaggaggcatgggcatcggcgtgcggcggcactgggaagcagacaatcctcatacccaagggtgacttccttgtcggacaactcaacttcacaggcccttgcaagggcgacgtgaccatccaggtggatggcaatctgctggcgaccacggacctaagccagtacaaggaccatggtaattggatcgagattctacgtgtggataacctggtcatcaccggcaagggaaaccttgacgggcaaggcccagccgtgtggagcaagaactcctggcacaagaagtacgactgcaagatccttccc

SEQ ID NO: 79960 - DNA, 389 bp, Zea mays
cggacgcgtgggcggacgcgtggggtacgcagatggccatggagggtcgtcgtcgtcgtcgtctcgttctgtggctcgtgatatccgcgcaaacaatgctagttgccgccgcggccggcgccaagcggcaggcgccggtgatgttcgtgttcggcgactcgacgctggacgtcgggaacaacaacttcctgtcgggggcggccgtccccagggccaacaagccccactacggcgtcgacttccccggcggccatcccaccggaaggttcagcaatggcgacaacacggctgacttcgtcgcgaagagcatggggttgaagagtagccctccgccgtatctgtcgcttgcacccaacggctccagccctctgctcgcgcagactgctctc

SEQ ID NO: 79961 - DNA, 398 bp, Zea mays
gagttcctccacgagaaggccgatcctcgagtggtccaccgcgacatcaagtcaagcaacatactgctctttgaccatgatgttgcgaagatcggggacttcgacatctcaaaccaggcccctgacatggctgcgcgcctccactctactcgcgttcttggcacctttggctaccatgcaccagaatatgccatgactggacagcttagcacgaagagtgatgtctacagctttggagttgtgctgcctggagcttttaaccggtcgcaagccagttgaccacacactgccccgtggccagcagagccttgtgacatgggctacaccgaggcttagtgaagacaaggtgaggcaatgcgtcgatccaaggctcggagacgaataccctccaaaggctg

SEQ ID NO: 79962 - DNA, 406 bp, Zea mays
atctcctccatcaccaccaccaagctcaacaacagccagctcgcgaaaataatgaagagccgcagcatggcatcatcggccgcgctcttggtgctagccctcgcgctagtggcggacaccgccccacaggtagcggaggcaaagaagaagagagcggcggagagcggcgaggcggcggaggcgaagaagatccaggacgacttctgctcgacgctgtgcgagggcaagaaggggacggacctggtcgtgtgcaaggagtcctgcgcgctctcccagcagtccaacctggtgctgtacggcaggatccagtgcaagggcaaatgcaccgagcagaagggcatcacggcgccggccatgaaggtctgtcaggaggagtgcgacaaggcgtacgtggtgaaggcggccg

SEQ ID NO: 79963 - DNA, 410 bp, Zea mays
  unsure (1)..(410): unsure at all n locations
gcaaaaatggcaaaggctctcctaggtggcctatcggcgatcctcgtcgtggcggtggtcgtcggtgtggtcgccaccgtcacccgctccggcaagaaggccggcgacaacttcacggtcccgggggaggcttcccttgccacgtccggcaagtcggtcaagtccctgtgcgcgcccaccctatacaaggagtcgtgcgagaagacactgtcccaggccaccaatggcaccgagaaccccaaggaggtgttccacagcgtggccaaggtggcgctggagtcggtccagacggcggtcgagcagtccaagtcgatcggcgaggccaaggccagcgactccatgaccgagagcgcgcgcgaggactgcaagaagctcctggaggacgccgccgacgacctgangggcatgct

SEQ ID NO: 79964 - DNA, 390 bp, Zea mays
gatacgcgtacgcttcaatcctcgctccgcgagctggagatggaggatggagaggggacaaggtttccggggccgagtccgagacggaccccgcgccggcacgatccggtggatgaagtgcatcacaccttgagggacgccccttggacagcagtttgtgctgcaaattctatatagctctgtcgcagcatggcctcggtgggcgtggcacgcgcttctttgggatttcagaatggcacaagttctagcagtgacccagatcgtcatcccaacgagttgggcagtatgagcattccggacgacaaggacgttgacgatattgtagtcaatggcaatggggcggaacctgggcatatcatagtgaccagcattgatgggagaaatgggcaa

SEQ ID NO: 79965 - DNA, 409 bp, Zea mays
  unsure (1)..(409): unsure at all n locations
gcaccgcgaaggccaagatgctaaagggcatcggcgtggtcggaatgatcgtggtgaccccggagttgttcggtccggtaatcatcccgaggccgcacgccatcccgacggtgcaagtctctaacgcggcggggcagaagatcaaggcctacatccacaaggcgcgggacccgacggcgacgttcgtcttcaaaggggcagcgttcaacaccccaaggtcgccgatggtggcgcccttctcctcgcggggcccgaacaggaggagccgtgggattctgaaacccgacatcatcggccccggggtgaacatcatcgccggcgtgccctcgatcgangacgtggacctgctgcgcaacgcggaggtgcccacgttcgacatcaagtccggcacgtccatggccgcgccgca

SEQ ID NO: 79966 - DNA, 404 bp, Zea mays
cgcgcgcccacgctgccgtccccaaggtgaacggtggcaagtctgcggtggcggatgtggagcacgagaccataactgtaccttcgtcggtgccgaggactttctacaaccagcttcccgactggagcatgctccttgctgccatcacaaccatcttcttggccgccgagaagcagtggacgatgcttgactggaagcccaggcggcctgacatgctcactgacacttttgggtttggccggatcatacatgatgggctcatgttcaggcagaacttctccattaggtcctatgagattggggctgataggacggcatctatagagacaatgatgaaccatttgcaggaaacggcacttaatcatgtgaagaccgctgggctgccaggtgatggattcggctcc

SEQ ID NO: 79967 - DNA, 290 bp, Zea mays
gcatccgctccacaggatcctctgcgccaccgcaaccgtgtgaccgcccgtgccgccggcgatcccgatccgccgacccgtcccagccccgctcgcagccatgtcgccgtcggagccgacgcgggaggagagcgtgtacatggccaagcttgcggagcaggcggagcggtacgaggagatggtcgagttcatggagcgcgtcgcgcgctacgccgggggcgccggcggcggggacgagctcgcggtggaggagcgcaacctgctgtcagtcgcctacactaacgtcagcg

SEQ ID NO: 79968 - DNA, 400 bp, Zea mays
ctatcatcatcttctccgatccatcaacaatcgccgagagcgatcgagagataaataaagatgaagaaagtggcatcatcgtcagccgttctcttcgtgctagccctgacgctagtttgtgccccgctgatagcagaggcaaagaagaagagagtcgccgccgccgccgccgaggagaagaaggtgcaggacaacttctgctcgacgctgtgcgagggcaggaaggggatggacctggtggtgtgcaaggagtcctgcgacctctcacagcgctccaacctggtgctgtacggccggatccagtgcaagggcaagtgcaccgagcagaagggcatcaccgcgccgcagatgaaggtgtgccaagaggcgtgcgacaacgactacgtggtcaaggcggctg

SEQ ID NO: 79969 - DNA, 392 bp, Zea mays
atcaccggaacgggaaaccttgaccggcagggcccaaccgtgtggagcaggaactcctgcaccaagaagtacgactgcacgatacttcccaactcgctggtgatggacttcgtgaacaacggggaggtgtccgggatcacgctgctcaactccaacttcttccacatgaacatgtaccagtgcgtgaacatgctgatcagcgacatgaccgtgacggcgcccggggacatccccaacacggatggcatcgacatgggcgactcatcagggatcaccatcatcaacaccgtcattggcgtcggctacgactgcatctccatcggccctgagacctccaacgtgaacatcactggcgtgacctgcggcgcctgccacagcatcagcatcggcag

SEQ ID NO: 79970 - DNA, 412 bp, Zea mays
cccacgcgtccggttaccccttcggcctccacctatcaccacccgggacgtcttccatggcctcctcgtagtagaatagttctatctcaccgcaacaactcctcattacatcctttatgagaggctgatcgattggtagatacgtactcgggtggagcagagcaacgagagacatggcgacgacgacgcgtgttgccgccgccgccaccggcgtgctgctggtcctgtcggcgttggcgaccctggcgcgggccgaggacccgtacctgttcttcgagtggaaggtgacgtacgggatcaagtccctgctgggcgtgccccagaaggtcatcctcatcaacggcgagttccccggccccaggatcaactgctcctccaacaacaacatcgtcgtcaacgtcttcaaccagct

SEQ ID NO: 79971 - DNA, 354 bp, Zea mays
gccggatctacagcatccatctgagcgtctgcgcgcggcggctctcacactgaacacacgcatggtgcgcataggcgaggccaaggccaccgcgagggatcgtgtggtcagctgggatggcaatgcgatgcacctccgccgcgctgctcgtgctggcgctcgtcgccaccgtagtgcgcgcggaggacccctaccacttcttcgagtggaacgtgacgtatgggacgaacagcatcatggggactccgcagaaccgtgattctcatcaatgatctgttcctcggacgtaacatcaactgcacattcaataacaagatcgtcatcaatgtcttcaatatgctcgagcaactgctc

SEQ ID NO: 79972 - DNA, 408 bp, Zea mays
ggacgtcacggacatcaacgtcaaggattgcactcttaagaagacgatgttcggcgtccgcatcaaggcgtacgaggacgccgcctccgtgctcaccgtctccaagatccactacgagaatatcaagatggaggactcagccaaccccatcttcatcgacatgaagtactgccccaacaagttgtgtactgccaacggcgcctccaaggtcaccgtcaaggatgtcaccttcaagaacatcaccggcacctcctccaccccggaggccgttagcctgctctgcactgccaaggtcccatgcaccggcgtcaccatggatgacgtcaacgtcgagtatagcgggaccagcaacaagaccatggctatatgcacgaacgccaacggcagcaccaatggttgcctcaagga

SEQ ID NO: 79973 - DNA, 406 bp, Zea mays
cggacgcgtggggcaagaacatggggttccacagcacggccggcgcggagcggcaccaggcggtggcgctccgggtgcagggggacctcgcggcgttctacaactgccggttcgacgcgttccaggacacgctgtacgtgcacgcgcggcggcagttcttccgcaactgcgtggtctccggcaccatcgacttcatcttcggcaactcggcggcggtgttccagaactgcctcatcatcacgcggcggcccatggacaaccagcagaactcggtgactgcgcacgggcgcaccgaccccaacatgaagtccgggctcgtcatccagaactgccgcctggtgcccgaccagaagctgttcccggaccgctcaagatcccctcgtacctgggccgcccctggaaggag

SEQ ID NO: 79974 - DNA, 401 bp, Zea mays
ctaccctcgtcgtcgtctcactcaccccgccttcacgcctccctcaccaaataaggtcccgcccttttccgacattcacaggggggacaggaaatcagcggccatggcctcgattccggcgacgaccttcgccgtcatcttatccgtcctcttctgtgccgcggctggcaccgccgtcgacaacgacctccccgactacgtcatccagggccgcgtctattgcgacacctgccgcgccgggttcgtgaccaatgtcaccgagtacatcgcgggcgccaaggtgaggctggagtgcaagcacttcggcaccggcaagctcgagcgctccatcgacggggtgaccgacgggaacggcacgtacacgatcgagctcaatgacagccacgaggaggacatctgcg

SEQ ID NO: 79975 - DNA, 287 bp, Zea mays
gcctctagctgagttggttaggtggtctgagtagcactcctcaggtcctgggttcgactccccgtgggagcgaatttcaggctgtggttaaaaaaattccctcgtctgtcccacgccaaagcacaggtctaaggctcagccccggtcgtggtcgttctcacataagcttcgatgccgctgtgtatgggtggggcaggggttcgggggttttcttgacctgtgtgagaaggtcttcttcttaatacaatacccgggggctgtcttaccccccgcaggtcaagttttaa

SEQ ID NO: 79976 - DNA, 411 bp, Zea mays
  unsure (1)..(411): unsure at all n locations
ggaggtggccgtgaagcagctcaaggccgggagcgggcagggcgagcgcgagttccaggccgaggtggagatcatcagccgagtccaccaccgccacctcgtctccctcgtaggctactgtatcgccggctcctcccagcgcctgcttgtctacgagttcgtgcccaacaacaccctcgagcaccacctccacgggaagggtgtgccggtgatggcctggccggcgaggcttgccatcgccctcggctccgccaagggcttggcttacctgcacgaagattgccaccccaggatcatccaccgtgacatcaaggcagccaacatccttctggacgagaatttcgaggctaaggtcncgggtttcggactttgccaagctgacacagacaccaacacgcacgtctccacgcg

SEQ ID NO: 79977 - DNA, 382 bp, Zea mays
ctcacgggccgatacacgcctctagagtgagtcatcctatggaagctctcttctttcttcctcctcctcgtcctctcgaattccgtctcttgtctctgtcctcctcgctcggcttccccggttcttgagaggggaaataggaggcggagccgaggagagggatggggagggacgagaggttcccagtgtgggacgccgcgctcggcgctggggtcgccgccgccttcgccgctgggctcgtcggggtttacctttccatgccggactccgactacagcttcctcaagctgccacgtaatctccaggaactccaaatcctcactggccatcttgagaactatactagcgactacaccctacaggtgttggtaggctactgcgc

SEQ ID NO: 79978 - DNA, 401 bp, Zea mays
agctcccctaatttaagccctacattgaaaattggttttggtcatcatgcgtgtgatgacaaaaattgtggcaatgcagattatgttgatgatcttgatgacatttcccaagaagatacctgtggtagttctgatcctggcaatggaattgcggaagataaatttgaggtcaatggatctgctcaaataaagcgtccaaaatttcaaaagggtgtcttacgtacaaactgtatagattgtttggatcgcacaaatgttgctcaatatgcctatggcctagctgctttaggacaccagttacatgcacttggttctgtagaatctccagaagttcatctagactctcctttgtctcgacatttgatgcatttttatgaacgcatgggtgacacacttgcttt

SEQ ID NO: 79979 - DNA, 336 bp, Zea mays
cgcgacatggtgatcgagctctgccaggagctcatcgtgagcagcgacaagaccatcgacgggcgcggagcgcaggtgcacatcgtgggcgcgcagatcacgctgcagaacgtgcgcaacgtgatcctccacaacctgcacgtccacgacgccgcggcgcacggcggcggcgcgatccgggactcgcagcaccactggggcgtgcgcggggagagcgacggcgacggcgtctccgtgatggggtccagcgatatctggatcgaccacctgtccatgagcagctgcgcggacgggctggtggacgcggtggacggctcccacgccatcaccgtctcc

SEQ ID NO: 79980 - DNA, 370 bp, Zea mays
ccgacccaagcgtccaccgccgccgtaatcctatgcctatgcgtcgtcctctcctgtgccgcggctgacgaccccaacctccccgactacgtcatccagggccgcgtgtactgcgacacctgccgcgccgggttcgtgaccaacgtcaccgagtacatcgcgggcgccaaggtgaggctggagtgcaggcacttcggcaccggcaagctcgagcgcgccatcgacggggtcaccgacgcgaccggcacctacacgatcgagctcaaggacagccacgaggaggacatctgccaggtggtgctggtggccagcccgcgcaaggactgcgacgaggtccaggcgctcagggaccgcgccggcgtcctgctca

SEQ ID NO: 79981 - DNA, 378 bp, Zea mays
acaaaaacaaggacggtagtttgtcacttgaagagctgaaggagggtttccggataaacgatcatcctgttccagaggaagagataaagatgttgttacaagcgggcgatatacatggaactgacacattagattgtgaggaatttgtgacagtcttgcttcacattaaaaagatgagtaatgacgagtatctacctaaagctttcgagttcttcgacaaagacgggaatggttttattgaaatgtccgagttaatggagactctaagtgatggtgaactaaagcctgatgagcaattggttaacgacattattcaagaggttgacaaggataaggatggtcgcatcagttacccagagtttgaattgatgatgaaaa

SEQ ID NO: 79982 - DNA, 363 bp, Zea mays
acccacgcgtcggctcatcccctccgtgtcccggagcccagggagcggacgcgggcgggccggcgggcggccatggacgtggactgcgtctcgctgcccgacgccccggcgggcgacgtggatggcggcgccgcccggccgtggcccaaggacgtgaccaacagaggcgtccacgagctgctggagtgccccgtgtgcaccaactccatgttcccgccgatccaccagtgccccaatggacacacgctgtgttccacatgcaaggccagagtacacaaccgttgccctacctgcaagcaagagctgggcgacatcaagtgcctggcgctggagaaagtcgccgagtcgatggagctcccctgc

SEQ ID NO: 79983 - DNA, 365 bp, Zea mays
atgtctaacatcactacaaaataacaacgaagctcaccaacagccagctcgcgaaaataatgaagagccgcagcatggcatcatcggccgcgctcttggtgctagccctcgcgctagtggcggccaccgccccacaggtagcggaggcaaagaagaagagagcggcggagagcggcgaggcggcggaggcgaagaagatccaggacgacttctgctcgacgctgtgcgagggcaagaaggggacggacctggtcgtgtgcaaggagtcctgcgcgctctcccagcagtccaacctggtgctgtacggcaggatccagtgcaagggcaagtgcaccgagcagaagggcatcacggcgccggccatg

SEQ ID NO: 79984 - DNA, 377 bp, Zea mays
  unsure (1)..(377): unsure at all n locations
gtgccgccttcggtggcggacaccttgacccattaccggctgacggcaacggcgggcaccttctgctacatcgacccggagtaccagcagacggggaagctgggcgtcaagtcggacatctactcgctcggcgtgctcctgctgcaggtggtcaccgcgcggccacccatggggctcacgcaccacgtcgagaaggccatcgacgcgggcaccttcgcgcagatgctcgacatcaccgtcaaggactggcccgtcgaggaggcgctcggctacgcanagctcgcgctcaagtgcacggagatgcggccgagggaccggccggacctcgcaaccgtcgtactgccggagctcaaccggttaaggaacttcgccacgcg

SEQ ID NO: 79985 - DNA, 370 bp, Zea mays
  unsure (1)..(370): unsure at all n locations
acgtgnccggccgcgngagcttcgccgacggcatcaccaccatgtcgacagccaccttctccgtcgaagcgtccgggttcatctgcatgaacatggggttccacaacacggacggcgcggagcggcaccatgcggtggcgctccgggtgcagggggacctcgcggtgttctacaactgccggttcgacgcgttccaggacacgctgtacgtgcacgcacggcggcagttcttccgcaactgcctggtctccggtaccatcgacttcatcttcggcaactcggcggcggtgttccagaactgcctcatcatcaccctgcgtgccatcgtcaaccagcagaactcggtgcacatgcacgggcgcaccgaccc

SEQ ID NO: 79986 - DNA, 359 bp, Zea mays
agcagagggagagattggagggaggcccctgcccaaggcaagagaaaccgcggcgcgcggagagggaggaagggcagacgcagacgcagacgggcgaacaagatgagggagatcatcagcatccacatcggccaggccgggatccaggtcggcaacgcctgctgggagctctactgcctcgagcacggcatcgagcacgatggcaccatgcccagtgattcctcggttggcgtcgcacatgatgccttcaacacgttcttcagcgagactggttccggcaagcatgtgcccagggccatcttcgtcgaccttgagcccactgtcatcgacgaggttcgcactggctcgtaccgccagct

SEQ ID NO: 79987 - DNA, 438 bp, Zea mays
acgccgcaagagcacttcgacctcagcatgcccgcgttcctccagatcgcgcaggagaaggccggcatcgtgcccatctcctatcgcagggtggcgtgcgcgaagcagggcggcatccggtacaccatcaccgggaacaagtacttcaacatggtgacgatcaccaacgtgggcggcgccggcgacatcgcggcggtgtcggtgaaggggagcaagcgcgtcaagtggacggagatgaaacgcaactgggggcaagtgtggcagaccggggaagacctcacctgcgagtcgctgacgttccgggtgatgactagcgaccaccgcaaggccacctcatggcacgttctccccgctgactgggagttcggcgtcacgtaccaggcgtccaagaacttctaagtagccactttccctcctcttcttcaacctgcatgcccg

SEQ ID NO: 79988 - DNA, 424 bp, Zea mays
acgggtaagagggctcgcttacaaccccaccctgcactcaaggagtgctttggactatcatgagcaaggtagcagatgcatccaaggaggagatccactccatcgagtcggtgaaggaggcaaatgcacggccggctcagaaaatcaacagccgcgttgttcgctactacaaagcagcaggagccacagaagcgccggcgccggcgccggcgccagaagcaacctgatcgaggagaacgttagaacagtagctcaccctcccgagagtatgggttgaaaatctttggcgaattgatgtctcgatgcaaattaaacaggcatgccatctttgtgtaaacagaaattttacacactaagttccactccctatactactaccataattttagtaatgtaaatactttgaaagaatgcttaaatataa

SEQ ID NO: 79989 - DNA, 415 bp, Zea mays
ggtcgatgcccgcctctacaatgagtcatgtgaacgcggacttcatcgcccacgaggccatctcgtcgagcgtggccgagttcagctgggacctcaagttcccgggcgcgcaggtgctgctggccgagttcaacatgacctcggcgggcggcgcgcagaacttcaagtcgcaggcggacaacttcgtgtgcgcggtgctgccggacacggcgttccaccaggtgttcatcaccccgggcggcgtgatccacctccgcgacggcgccaactcgcagtacgtgaccagcacggcgttcctgctggtggtgtacgcggacctgctgctgcggacggggcagacggtgctgtgcgggaaccagccgctgcccccggcccggttgcacgagttcgcgcggcaacagatggactacctgct

SEQ ID NO: 79990 - DNA, 378 bp, Zea mays
taaagagattcgctatatcttggatcgaattagacgacttcttcgtccctctcttcattagcacgctaacttgtaatctgcaggatctaagcaaagacttgatttagttatggacggattggtaggcctcttgaaagttcgcgtggtccggggtatcaaccttgcctaccgcgacgcaagaggcagcgatccaaactgaagacaagcgtgaagaagagatccgtgaaccccatatggcaagaggagctaactctgaccgtcacagatcccagccaaccactgaagctggaggtgttcgacaaggacaccttcagcagagacgaccccatgggagacgcggaggtggacgtggcgccactgatggaggcggtgagcatg

SEQ ID NO: 79991 - DNA, 339 bp, Zea mays
ctcgcgggccgacacaagcgtcaagtacgtctgccaccagaaggtctgccccggcaagcgaagcaactcctcgcatgtctccatcaagaacgtcaccttccgcaacatctccggcacgtcgtccacgcccgaagccgtcagcctgctctgctccgagacgcagccgtgcagcggcgtctcgctcatcgatgtcaacgtcgagtacgccggcaagaacaacaagaccatggctgtgtgcagcaacgccaagggaaccgccaagggaagcctccaggccctggattgcctcgtctgatcaatgaccttgcatttgcatgcattcttcttccgtttcacttt

SEQ ID NO: 79992 - DNA, 411 bp, Zea mays
  unsure (1)..(411): unsure at all n locations
ctcgcgggtcgacacaagcctctagatcgactcattatagagatctatcgatcgagctttcgttatcctcctcttacattacaggtcatagctaagcaggtctgacaggatgtcgtggcagacatacgtcgatgagcacctcatgtgcgagatcgagggccaccacctgacctccgctgccatagtcggccacgacggcgccgtttgggcccagagcaccgcattcccacagttcaagacagaggagatgaccaacatcatgaaggacttcgacgagcccgggttcctggccccgaccggcctcttcctcggccccaccaagtacatggtcatccaaggcgagcccggcgctgtcatccgcgggaagaagggatctggangcataactgtgaagaagacagggcaagcgat

SEQ ID NO: 79993 - DNA, 393 bp, Zea mays
ggaaatcagcggccatggcctcgattccggcgacgaccttcgccgtcatcttatccgtcctcttctgtgccgcggctggcaccgccgtcgacaacgacctccccgactacgtcatccagggccgcgtctattgcgacacctgccgcgccgggttcgtgaccaatgtcaccgagtacatcgcgggcgccaaggtgaggctggagtgcaagcacttcggcaccggcaagctcgagcgctccatcgacggggtgaccgacgggaacggcacgtacacgatcgagctcaaggacagccacgaggaggacatctgcgaggtggtcttggtggagagcccgcgcaaggactgcgaccaggtgcaggcggacagggaccgcgccggcgtcctgcctcaca

SEQ ID NO: 79994 - DNA, 424 bp, Zea mays
gacccgcccgtccaaccacgcgatcggaaatctcgccctcgttgcggtcgtccacatccttttctctcctcctcgccggcccaacctgattgttcttcaaccaagaggaagaaaggaaggaagggaccggaagcatcagccatgtcgaactcggcgtcgggaatggccgtctgtgatgaatgcaagctcaagttccaggagctcaaggcaaagaggagcttccgcttcatcgtgttcaagatcaacgagaacgtgcagcaggtggtggtggacaggctgggggggccaggagagagctacgacgccttcacggcctgcttccccgccaacgagtgccgctacgccgtgttcgattttgacttcgtcactgacgagaactgccagaagagcaagatcttctttatctcttgggccccggatacat

SEQ ID NO: 79995 - DNA, 376 bp, Zea mays
acgcgatcgcgacagaatggcttgcacagacaatgcaatgaaagccttgttcctcctggtcctcttctgcatcgtgcatggtgagaaggaagagtcaaagggcatcgatgcgaaagcgtccgggcctggtgggtccttcgacatcaccaagttgggcgcctccggcaatggcaagacagacagcacgaaggctgtgcaggaggcatgggcatcggcgtgcggcggcactgggaagcagacaatcctcatacccaagggcgacttccttgtcggacaactcaacttcacaggcccttgcaagggcgacgtgaccatccaagtggatggcaatctgctggcgaacacggacctaagccagtacaaggaacatggtaat

SEQ ID NO: 79996 - DNA, 361 bp, Zea mays
cagacgttgaggtcgagggacacggtatctctgagcttcatcggagagcgacccgccaccgccacgcttggccgcaagccgagaagagtgccgggccgggagaccggacgattattgatccgtagcagattcgctaatggcggatacggcggacatggagcggatcttcaagcggttcgacaccaacggcgacggtaagatctcgctgtcggacctgacggaggcgctacggacgctggggtcaacctctgccgacgaggtgcaacgcatgatggccgagatcgacaccgacggcaacggctgcatcgacttcaacgagttcatcaccttctgcaacgcaaccccggggctcataagggac

SEQ ID NO: 79997 - DNA, 374 bp, Zea mays
aacagcaaccactgcacaggatgtcgtggcagacgtacgtcgatgagcacctcatgtgcgagatcgagggccaccacctgagctctgccgccatagtcggccacgacggcgccgtttgggcccagagcaccgcattcccacagttcaagccagaggagatgaccaacatcattaaggacttcgacgagcctgggtttctggccccgatcggcctcttccttggccccaccaagtacatggtcatccaaggcgagcccggcgctgtcatccgcgggaagaagggatctggaggcataactgtgaagaagaccggacaggcgctggtgatcggcatctacgacgagcccatgacccctggacagtgcaacatggtg

SEQ ID NO: 79998 - DNA, 371 bp, Zea mays
ggtctagaactcgcgggccgacccaagcgtctatggaaaatctgtccatcatctttacaaggtcaattttcgggccatcatcacacgcctactataattttagaagcagttgcttcacaagatttatggatttggcatgctttttttggattacctggctctctcaatgacatcaatgttcttcatcgatctcccctgttcgcaaaattatcaaatggagaaagtccacaagtgaattatagaataaataaccatgactattcaatgggatattaccttgcagatggcatatacccttcttgggcaacattggttaagaccataccagaaccacggggcaataaaagaatctactatgtgaaggcacaaga

SEQ ID NO: 79999 - DNA, 401 bp, Zea mays
acgtgctaacggtggccgccgatgtcgccaacgccggccacgccaagcccctaacgcctggcgggcgcgtggtacacgacaaccacggcaagttcacggccgggccgtggaaacccgcccacgcaaccttctacggcgggcgtgacgggtccggcaccacggcgggcgcgtgcgggtacaaggacacgcgcacgcaggggtacggcgtgcagacggtggccgtgagcactgtgctgttcggtgacggcgcggcctgcggagggtgctacgaggtgcggtgcgtggacagccctagcgggtgcaagcccgacgcggcagcgctggtggtgacggtgaccgacctgtgcccgcccaaggaccagtggtgcaagccaccgcgggagcacttcgacctcagcatg

SEQ ID NO: 80000 - DNA, 303 bp, Zea mays
gcaagactctacactgagtcgtattactacccgcagatgcggcgcgcgcacgtcgccctcatctacctcgccgcgccggtcgtcgcgttctgcgacgcgtacgccttcggcgtgacggacatgaacctgtcgagcacctacggcaagctcgccatggtgctcgtgggctccagcgtggggcgcaacgacggcggcgtcgtcgccggcctcgtggcctgtgggatcgtgatggggaccatgtccaacgccaacaaactgatgcacgaactcaagaacgggtacctgacgctgaactcgccgcac

SEQ ID NO: 80001 - DNA, 412 bp, Zea mays
acgaggtgctagcccgccagatcgacgccggcaagggcgtgggccgccccgcgggcgtgctcatcaacggcaagggcggcaaggacctggaggccgcgcctgccttcaccttcgaggccggcaagacgtaccgcctccgcgtctgcaacaccggtatcaaggcgtcgctcaacttccgcatccagggccactacatgaagctggtcgagctggatggctcccacaccctgcagaacacgtacgactcgctcgacgtccacgtcggccactgcctctccgtgctcgtcgacgccgaccagaagcccggcgactactacatggtggcctccacgcggttcatccacgacgccaagtccgcgtccgccgtcatccgctacgccggctccagcgccccgccggcgccggaacatga

SEQ ID NO: 80002 - DNA, 351 bp, Zea mays
agtgccgcagtcggtggcggacagcgtgacgcagtaccggctgacggcgacggcgggcaccttctgctacatcgacccggagtacaagcagacggggaagctgggcgtcaagtcggacatctactcgctcggcgtgctcctgctgcaggtggtcaccgcgcggccacccatggggctcacgcaccacgtcgagaaggccatcgacgcgggcaccttcgcgcagatgctcgacatcaccgtcaaggactggcccgtcgaggaggcgctcggctacgcaaagctcgcgctcaagtgcacggagatgcggcggagggaccgggccggactcgcaaccgtcgtactgccggagct

SEQ ID NO: 80003 - DNA, 379 bp, Zea mays
aaggtgccacaacctctcctgctgtcgctgctggtcgccgtgctagcggtggccgccgatgtcgccaacgccggccacgccaagcccctaacgcctggcgggcgcgtggtacacgacaaccacggcaagttcacggccgggccgtggaaacccgcccacgcaaccttctacggcgggcgtgacgggtccggcaccacggcgggcgcgtgcgggtacaaggacacgcgcacgcaggggtacggcgtgcagacggtggccgtgagcactgtgctgttcggtgacggcgcggcctgcggagggtgctacgaagtgcggtgcgtggacagccctagcgggtgcaagcccgacgcggcagcgctggtggtgaacgtgaccgacc

SEQ ID NO: 80004 - DNA, 364 bp, Zea mays
agcggggaccttctgctacatcgacccggagtaccagcagacgggcatgctcggcgtcaagtccgacgtctactccttcggcgtcatgctgctgcagatcatcacggcgaagccgcccatggggctgtcgcaccacgtcggacgcgccctggagcgcggcgagctgcaggacatgctggaccccgccgtgcccgactggcccctggaggaggcgcagtgcctcgccgagatggcgctccggtgctgcgagctgcgccgcaaggaccggccggacctcggcgccgtcgtgctcccggagctcaaccggctgcgcgcgctcggcgaggacaacatgcagtactgcggcgccatcatcaggggtggc

SEQ ID NO: 80005 - DNA, 348 bp, Zea mays
ggcggtcacgatcacctgggtgaaggcgaggcagatcttcgacagccgcggcaaccccaccgtcgaggtggacgtgggcctcagcgacggcagctacgcgaggggggccgtacccagcggcgcatccactggaatatatgaggccttggagttgagggatggaggatctgattatcttggcaagggtgttcttaaggctgtcagcaacgtaaacaacattattggaccagcgattgttggaaaggaccccactgagcaggttgagattgacaacttcatggtccaacagcttgatggaacctccaatgagtggggctggtgcaaacagaagcttggagcaaatgccat

SEQ ID NO: 80006 - DNA, 408 bp, Zea mays
  unsure (1)..(408): unsure at all n locations
acccacgcgtccgaacacggccggcgcggagcggcaccaggcggtggcgctccgggtgcagggggacctcgcggcgttctacaactgccggttcgacgcgttccaggacacgctgtacgtgcacgcgcggcggcagttcttccgcaactgcgtggtctccggcaccatcgacttcatcttcggcaactcggcggcggtgttccagaactgcctcatcatcacgcggcggcccatggacaaccagcagaactcggtgacggcgcacgggcgcaccgaccccaacatgaagtccgggctcgtcatccagaactgccgcctggtgcccgaccagaagctgttcccggaccgcttcaagattccctcgtacctgngcccgccctggaaggagttctcgcgcctcgtcatcat

SEQ ID NO: 80007 - DNA, 400 bp, Zea mays
attccagggcgaccacgcgtcgaccacgcgaccgagagcaccctccacttggtgctgcgtctcaaaggtggcatgcagatcttcgtgaagacacttactggcaagacgataacccttgaggtggagtcctcagacaccattgacaacgtcaaggccaagatccaggacaaggagggcattcaaccggaccagcagcggctgatcttcgccggcaagcagctggaggatggtcgcaccttggctgactacaacatccagaaggagagcaccctccacctggtgctccgcctcaggggtggtatgcagatttttgtgaagacattgactggcaagaccatcaccttggaggtggagtcgtctgacacaatcgataatgtcaaagccaagatccaggacaagg

SEQ ID NO: 80008 - DNA, 403 bp, Zea mays
  unsure (1)..(403): unsure at all n locations
tcagaagggtgcggtgcaagtaccccgctgggcagaagatcgtgttccacatcgagaagggctgcaaccccaactacctggccgtgctggtgaagtttgtggcggacgatggcgacatcgtgctgatggaaatccaggacaagttgtcggctgagtggaagcccatgaagctctcttggggcgccatctggaggatggacactgccaaggcgctcaagggccccttctctatccgcctcaccagcgagtccggcaagaaggtcatcgctaaagacatcatcncggcgaactggagacncgatgccgtctacacttccaacgtccaattctactagactttgaattgccttcgattcatccggcgcggcgggctatggacctgcagcagcaagctaattaaagg

SEQ ID NO: 80009 - DNA, 389 bp, Zea mays
agggccagcatctcgcggatcagggaggtgtccggggtcacgctgctcaactccaagttcttccacatgaacatgtaccggtgcaaggacatgctgatcaaggacgtgaccgtgacggcgcccggggacagccccaacacggatggcatccacatgggcgactcatccgggatcacgatcaccaacaccgtcattggcgtcggtgacgactgcatctccatcggccccgggacctccaaggtgaacatcaccggcgtgacctgcggccctggccacggcatcagcatcggcagcctagggcggtacaaggacgagaaggacgtcacggacatcaacgtcaaggattgcactcttaagaagacgatgttcggcgtccgcatcaaggcgta

SEQ ID NO: 80010 - DNA, 393 bp, Zea mays
aactggacgcagccgcgcatctccgcctcaaggctctcctctcggaggtctgataggcaacccaataatggcagaagtcctatcaggatctcatgaacaccgtctaagctctgccttagatggacactacgacgagaagaggaaatccaatgtggaatacacagaggacgagaagaaagccgtgatcgcggctctgaaaaagaaggctttgagcgcctcacagaagtttaggcattccatgaagagggggaggaagagcagcaaggtgatgttcatctcgattctggatgagcgtgaacctgaggaggtgcaggctgtggatgccttccgccagcttcttgtacttgaagagctgctaccatcgcagcatgatgactaccacatgatgctaag

SEQ ID NO: 80011 - DNA, 325 bp, Zea mays
acagagcgcttcatggtgaaaaaacaggacgggctggtgaagctgcaggggtccaagcaagggaggaaggggcagctcgcgatcgacgccgagatcttcgaggtgacaccggcctttcacgtcgtcgaggtgaagaagtcggcaggcgacacgctggagtatgagatgttctgcagcaagggcctaagaccttcactcagcgacatctgctggagcagccgatctgaggagaacatggctccttcagtggttcagccatcataaattgaaaccatccctcttagaccgtctccagcactttatccatatggtccccccctcttag

SEQ ID NO: 80012 - DNA, 335 bp, Zea mays
  unsure (1)..(335): unsure at all n locations
cgcgtccgcaagaacgagccgcgcacgtcgggcgcgctccacgactgccaggagatgctggggtacgccatcgacgagctcaagtcgtccttcgacaagctaggcggcttcgagatgaccaacttcaacaaggccgtggacgacctcaagacgtggctcagcgccgcgctcacgtaccaggacacctgcctggacggcttcgcgaacgccaccaccaccgaggcctccgccaagatgcagaaggcgctcaacgcgtcgcaagagctgacggaggacatcctgncggtggtggaccagttctccgacacgctgggagggctcaacattcggccgcg

SEQ ID NO: 80013 - DNA, 409 bp, Zea mays
cgcggtcatggacggcaatcatgctgacgttcgacaacccgggcatgtggagcgtgcattccaacatctgggagcggtactacctcggggagcagttctacatcagcgtcgtctcgccggcgcgatcactgcgcgacgagtacaacatgcccgacaacgccctccgctgcggcaaggtcgtggggctgccgctgccgccgtcctacgcccccgcgcgctaagacgacgaaggcctcgttttctcctcgtggtctgaccatccaatccaaactcaaaagaacaaatacgaaagaagcgtagtgaaggggaacaaatgaatggatatatgtaatcttgagatgcatgccctctcaaatcactgtactggggttctcaaaaaaatcattgtaatgggagttatatatataac

SEQ ID NO: 80014 - DNA, 332 bp, Zea mays
cgcgtctagcgatggcgacattgtggcggtggacatcaaggagaatggctccgatacgtacgagcctccagtgcactcctgcggctccatctcgtcggtcgcagacagagagatagtgagagagagggagggagagagggaacccggagaccgccaccaagcgtgaggcagaggaggagcatggcggcgccgccgtcgaggtcccggggcgactacgaccacctgattaagctcctgctcatcggcgacagcggagttggaaagaattgcttgctgctgcgcttctctgatgacacattcacaacaagcttcatcaccaccattggcattga

SEQ ID NO: 80015 - DNA, 422 bp, Zea mays
  unsure (1)..(422): unsure at all n locations
cgggccaaccaanccttcgaggcccttgcaagggcgacttgacaatcaagttggatggcaaccggctggcgaccacggacctaagccagtacaaggaacatggtaattggatcgagattctacgcgtggataacctggtcatcaccggcaagggaaaccttgacgggcagggcccagccgtgtggagcaagaactcctgcaccaagaagtatgactgcaagatccttcccaactcgctggtgatggacttcgtgaacaacggggaggtgtccggggtcacgctgctcaactccaagttcttccacatgaacatgtaccagtgcaagaacatgctgatcaaagacgtgaccgtgacggcgcccggggacagccccaacacggatggcatccacatgggcgactcatccggggattcacatcac

SEQ ID NO: 80016 - DNA, 442 bp, Zea mays
  unsure (1)..(442): unsure at all n locations
aatcgccatacgcgcaccgcctccccgtgtcncctccttctcgcccggcaccgtcgagctcggctgtggaaacagaacaaacccatcaaccatggcgaactcggcgtcggggatggccgtgagcgacgagtgcaagctcaagttccaggagctcaagtcgaagcgaagcttccggttcatcacgttcaagatcaacgagcagacgcagcaggtggtggtggacaggctggggcagccgggcgacacctacgacgacttcaccggctccatgcccgagagcgagtgccgctacgccgtcttcgacttcgacttcaccaccgacgagaactgccagaagagcaagatcttgttcatctcctggtccccggacacctcgagggtcaggagcaagatgctgtacgcgagctccaaggaccggttcaagagggagctggagggcatc

SEQ ID NO: 80017 - DNA, 406 bp, Zea mays
cccaacatcaccaccaactacaacggcaagtggctcaccgccagggccacctggtacggtcagcccaacggtgccggcgctcctgacaacggcggtgcgtgcgggatcaagaacgtgaacctgccaccctacagcggcatgacggcgtgcggcaacgtccccatcttcaaggacggcaagggctgcggctcatgctacgaggtgagatgcaaggaaaaacctgagtgctcgggcaatccagtcacggtgtacatcactgacatgaactacgagcctatcgctccctaccacttcgacttgagcggcaaggccttcggctccctggcaaagcccgggctcaacgacaagattcgccactgcggcatcatggacgtcgagttcagaagggtgcgatgcaagtaccccg

SEQ ID NO: 80018 - DNA, 434 bp, Zea mays
agtgagttccaccccaaaacgaagcaacacgccttgcccggtgtgcaccgacgaaaccagcgacagcagcacagagacgaacggcgtggtatcctcctgtctcagctgcttcctagctgggggtgctctctaccgtttcgagtacgcagtcaacccggcgctcttcctcgccaaagcgcgaggagggacgtgcacgctcgctccctctgaccctgacgacacggtggctcgccgcgccagatacctgctgagcaacggtttcaggtgctacaacctgttcaagagcaactgcgaggacttcgcgatatactgcaagactggccttcttgtcgctgagcagggcgttgtcgggcagagcgggcaggctatctccatcatcggtggacctctcgccgcggtggtctcgaccccattccgcttgggttacacgaaca

SEQ ID NO: 80019 - DNA, 399 bp, Zea mays
gaagagagagagagacgcaggcccgccggcgacgatcgaggagggaggaacgccagagacccggcggcggcgacgatggctccgcgcagctcatcggcggcgacgtgcctgtgcctcgctctcgccgcggccacgctggcgctggcccacggggcgcaaggaggaggaccatcggcatcggcggcggacctggacaaggtcacggccgagaccttcctcgacatcgagatcgacggcaagcctgcaggccggatcgtgctgggactgtttggggacaccgttcctaaaacagcagagaacttccgagcactttgcacaggggagaaaggaatggccaagtccggcaagcctctatggtacaaagggtcgacgttccacaggatcatcccggggttcatg

SEQ ID NO: 80020 - DNA, 386 bp, Zea mays
agtccctcgctcctgcgccgcccgtccgatccggtcactggccggggagggctcagaaacctttcatccaatacatacatctatctgagccctttcccgcggtgaggcccgaccggagtccacacacacacggtgtcgatggcggccgtaataaggagccgccgccgcgtgtccgttttcttctacgtcgtcctcgccgcagctgcagctgcagccgcggcgcatgcatccaataacgtcacctccgacgaggagtactgggcggagcgcgccgaggtggctcggtcgcgcaacctcgccgcctacgtcagcgaccccgtggccgccacgaaccgcttcaacgcggacgtgctgagggccacgacgctgcgggcgctggcgatgta

SEQ ID NO: 80021 - DNA, 422 bp, Zea mays
ccgacccttcgatccaccaaattattaaggaaaggcccggccctttccttcggacatcaacagggggaaggggaaaccacttccattcacccggcggcaataatggcctcggttccggctccggcaacaacaaccgccgccgtaatcctatgcctatgcgtcgtcttctcctgtgccgcggctgacgaccccaacctccccgactacttcatcaagggccgcgtgtactgcgacacctgccgcgccgggttcgtgaccaacgtcaccgagtacatcgcgggcgccaaggtgaggctggagtgcaggcacttcggcaccggcaagctcgagcgcgccatcgacggggtcaccgacgcgaccggcaactacacgatcgagctcaaggacagccacgaggaggacatctgccaagtggtgctggt

SEQ ID NO: 80022 - DNA, 449 bp, Zea mays
  unsure (1)..(449): unsure at all n locations
agaaaggactactccgaggcgccctcccgctccgcgaggcacgactccgttcggcggcgacctcaacttcggcccgagcacgcgcttctcctccatggacttcggcgacaacctcgacctcaccgccagccncgctcgggagcccatgtcaccggccaccggcgcgcaacgggatattgaggtcgagatgcggcgcctccggctggaactcaagcagaccatggacatgtacaacgcggcgtgcaaggaggccatcaacgccaagcagcgggccaaggagatgcagctgatgaaactggaggaggagcgtcggctggaggaggccaggcacgccgaggagactgctctggcactggccgagatggagaaggccaagtgccgcgcggccatggaggcagccgaggcggcgcagagactggccgacctgnaggcgcagcggcgccgcaacg

SEQ ID NO: 80023 - DNA, 460 bp, Zea mays
gcgggcccgaccaagcgtccagctggggcagggcgggttcgggtacgtgtacaagggcgtgctcgccggcagcgggaacgaggtggcggtgaagcagctcaagtccggcagcgggcagggggagcgcgagttccaggcggaggtggagatcatcagccgcgtgcaccaccgccacctggtgtcgctcgtgggctactgcatcgcgggcaaccagcgcatgctcgtctacgagttcgtggccaacaacacgctggagcaccatttgtacgccaaggacggccctgtcatggactggagcacccgcatgaagatcgcgctcggctccgccaagggcctcgcctacctccacgaggactgccatcctcggatcatccaccgcgacatcaaggccgccaacatcctgctggacaacaacttcgaggccatggtggcggacttcgggctggtcaagctcacgacg

SEQ ID NO: 80024 - DNA, 412 bp, Zea mays
agcagagcagggttgttgactggaacatggtgaagaaaggggaggatgaggaggagaagaagctgaatgcaacatacataatcagtgttgctaggaagctaggttgcactgtcttcttgctacctgaagacataatggaggtgaacccaaagatgatcctcaccctgacagcaagcatcatgtactggagcctgcagaatcaagggccatacaagagttcaggaccacaggatgctcttctagaggaagaggaaggcgaggaggaggaagaagaagaagaagaggaggaagaggaggaggaggatttcgaaggaggtgtcgaagatggtgtctctgaaacgaccacttgataagaattgtcacgcttgactagccattgccggtaaagtcactggtctattaagggcatata

SEQ ID NO: 80025 - DNA, 385 bp, Zea mays
gggccgaccaacgcgtccacccacgcgtccgctgataatgtcggtgacaatgttggtgacattgctggaatgggatctgatctctttgggtcatacgcagagtcttcttgtgctgcccttgttgttgcgtctatttcatctttcggaatcgaccatgatttcactgggatgtgctacccactccttgttagctctgttggtatcattgtctgcttgatcaccaccctttttgctactgatttctttgaagtcaaggctgtgaaagaaattgagcctgcacttaagaagcagctcatcatctccaccgtcctgatgacttttggtattgctctaatcagctggttggcccttccagctaagttcaccatctacaacttcggtactc

SEQ ID NO: 80026 - DNA, 448 bp, Zea mays
actcggttcagccacgccccaccagccagccagccagggacccgtcgctgccctctggcgatgagggatattacgggtctgccctgaccaccgcccacgcgcagccaggggtagaaacgaccgcgtcaccgtatttgacccctcaccgtcgcacaccagtgtcggcgagtccctcctgtgcctcgtcctccccctttcccctccgagtccagcccggcgccacccactcagccgcggatccgaggcgcagatccgatccggcgatggcgtccacggcggcgaggcggctgcgggagctgcaggcgcagacggggaacaagacctgcgtggactgcgcgcagcggaacccgcagtgggcgagcgtctcctatggggtgttcatgtgcctcgagtgctcgggcaagcaccggggcctcggcgtgcacatcagcttcgtgcgctcggtcac

SEQ ID NO: 80027 - DNA, 401 bp, Zea mays
  unsure (1)..(401): unsure at all n locations
acggacgcgtggggatagcagaggcaaagaagaagagagtcgccgccgccgccgccgaggagaagaaggtgcaggacaacttctgctcgacgctgtgcgagggcaggaaggggatggacctggtggtgtgcaaggagtcctgcgacctctcacagcgctccaacctggtgctgtacggccggatccagtgcaagggcaagtgcaccgagcagaagggcatcaccgcgccgcagatgaaggtgtgccaagaggcgtgcgacaaggactacgtggtcaaggcngctgaggtcaccaaggcctgcaacaccacctgcgcccaagagaagcagcctctgctcagcgagaactgcaggaggtcctgcacccctcctccttcctgaacgcagagcacgcccgccggt

SEQ ID NO: 80028 - DNA, 441 bp, Zea mays
agtcgttatcgtcgtcgtcgtgggccttcatttctcctagaaggtagaaggtcgagaggagaagaaggcgagacgtgcagtccgtcgggcaccgatcgagaacagggaagcaagaggctgctagagatcgagctcatcaaccaaccaagtcgtacgtcgtcagcatcacgaccggatggcgcgtgccgcgtccagctatgtatccaggagggggctctccgcagcgatgacggtggcggaggagtccgtgaagaaggtggaggacaaggcggtgaagctgggaactgtggccaaggacatcgccagcgccatggccaccacgacggaggagaagacggcgttctgggaacctgaccccgagaccggatactaccgtccggtcaccggcacgaaggaggtggacgccgccgacctgcgcgccgagatgctcaagcggaggat

SEQ ID NO: 80029 - DNA, 416 bp, Zea mays
  unsure (1)..(416): unsure at all n locations
aggctcctgcccagggcgtcgactccgaggcgtaccacatgcgcatcctcgccaccgcgctcggcagcgaggagaaagccaagcgggcgctgatctacagctacaaggccgccgctagcgggttcgccgccaagctcacgccggcgcaggtcgccgcgttgcagaagcatcctgacgttgtgcaggcgctgcctgacgtgaagtacacccttgaggacaggaaccacctcaactgaaccgagtgcggctttcaccaacacgatacatagctcggcactagtgccatctcatgttagcaagtgtgcatgtgcccacaccctagggtcagaatttatataagcatgctatgtgtgggctagtgatggtaatttagtctcttcatanagattgaatgctgtacccggagcgtacgtaca

SEQ ID NO: 80030 - DNA, 396 bp, Zea mays
atggccatcgtcgtgtccgcgtcgttcaaggccaggttcccagccccggcctacgccgtcgaccccgccgggtccacgccgccgcaggccgacttcgtgtggcggatcatcctgatgctgggcgcgatgcccgcggcgctcacctactactggcgcaccaagatgcccgagacggcgcggtacacggcgctggttgccaagaacgccaagcaggccgcggctgacatgtccaaggtgctgcaggtggagatctcagccggcgccgccgaggaggacgccgtggctgcgactgcgactgcgcctgcgccggcgtcggcgtcggcgtcctttgggctcttctccggggagttcctccgccggcacgggctgcacctcctgggcacgtcctcgacgtgg

SEQ ID NO: 80031 - DNA, 414 bp, Zea mays
acggacgcgtgggcggacgcgtgggtccccggcaaggtctcgtgcgcagacatcctggccttcgcggcgcgcgacgccgccgtggccgcgggcctcccgagatacgaggtcgcggcggggcgccgcgacggcatgcgctcgaacatggacgacctcccgggcaacttccccgtgccgggccaccacgtgccgcgcctcaccgagctcttcagccagcgggggctctcccaggaggacctcgtcctgctctccggcgcgcactccatcggcggcgcgcactgcttcatgttctccaaccgcatctacaacttctcccaggacgccgacgtcgaccccacgctggacccggagtacgccaagtggctgcgccagatgtgcccgccgcggcagcccggcgacgaacccgagcaagcg

SEQ ID NO: 80032 - DNA, 398 bp, Zea mays
ccaaccctccgagaaatcaaccggcaagggctccaatccggcgaacaacttccgcgtcaacctaaccgtcctcctccgttccgccggttggaacggcgttcaaaaccaacttccccactaagttcatcaagggccgcgtcaattgcaaaacttgcggcgccgggttcgtaacaaatgtcaccgagtaaatcgcgggcgcaaaggtgaggctgagatgcaagcacttcggcaccggcagctcgagcgctccatcaacggggtgaccgacgggaacggcacgtacacgatcgagctcaaggacagccacgatgaggacatctgcgaggtggtcttggtggagagccgcgcaaagactgcgatcaggtgcaggcggacagggaccgcgccggcgtcctgct

SEQ ID NO: 80033 - DNA, 439 bp, Zea mays
aatttcttaactgacactttgactctgaccaatctctctggcctgctgcttcctgataatcgatcagttccccagtcttgctccttgcactcctccctccatctccagcattgtgttctgattcaccttgctccaatggctgttctttctgctgctgatgcttccccggtctcatctatcgggtttgacggctatgagaagcgccttgagatcatattcactgaagcacctgtctttgtggaccctcatgggcgtggtttgcgtgccctctccagagcccagattgagtctgttctggatcttgcaccgtgcacaattgtgtctgagctctccaacacagagttcgactcaaatgtcagttctgagtcaagcttgtttatctatcctctgaagattgttatcaataactgtggcactaccaagctcctgctcaccattc

SEQ ID NO: 80034 - DNA, 438 bp, Zea mays
taaagtcccgcccttttccgacattcacaggggggacaggaaatcagcggccatggcctcgattccggcgacgaccttcgccgtcatcttatccgtcctcttctgtgccgcggctggcaccgccgtcgacaacgacctccccgactacgtcatccagggccgcgtctattgcgacacctgccgcgccgggttcgtgaccaatgtcaccgagtacatcgcgggcgccaaggtgaggctggagtgcaagcacttcggcaccggcaagctcgagcgctccatcgacggggtgaccgacgggaacggcacgtacacgatccagctcaaggacagccacgaggaggacatctgcgaggtggtcttggtggagagcccgcccaaggactgcgaccaggtgcaggcggacagggaccgcgccggcgtcctgctcaccaggaacgt

SEQ ID NO: 80035 - DNA, 422 bp, Zea mays
gggccgacccaagcgtccatgcagtcatctcctccaccaccaccaccaagctcaacaacagccagctcgcgaaaataatgaagagccgcagcatggcatcatcggccgcgctcttggtgctagccctcgcgctagtggcggccaccgccccacaggtagcggaggcaaagaagaagagagcggcggagagcggcgaggcggcggaggcgaagaagatccaggacgacttctgctcgacgctgtgcgagggcaagaaggggacggacctggtcgtgtgcaaggagtcctgcgcgctctcccagcagtccaacctggtgctgtacggcaggatccagtgcaagggcaagtgcaccgagcagaagggcatcacggcgccggccatgaaggtctgccaggaggagtgcgacaaggcgtacgtggtg

SEQ ID NO: 80036 - DNA, 438 bp, Zea mays
agcgtctgcaacaccgggatcaaggcgtcgctcaacttccgcatccagggccactacatgaagctggtcgagctggagggctcccacaccctgcagaacacgtacgactcgctcgacgtccacgtcggccactgcctctccgtgctcgtcgacgccgaccagaagcccggcgactactacatggtggcctccacgcggttcatccacgacgccaagtccgcgtccgccgtcatccgctacgccggctccagcgtcccgccggcgccgaacatgaccgagccaccggccggctgggcctggtccatcaaccaggccaggtcgttccgctggaacctgacggccagcgccgcgcggcccaacccgcagggctccttacactacggccagatcaacatcacgcgcaacatcaaggtcatggtctcccgcgggcacatcgac

SEQ ID NO: 80037 - DNA, 418 bp, Zea mays
gacccgacccgtccacccacgcatccggagagacgcatgaccgccggcgacgatcgacgatggaggaaccagatacccggcggcggcgatcgatggctccgcgcagctcatcggcggcgacgtgcctgtgcctcgctctcgccgcggccacgctggcgctggcccacggggcgcaaggaggaggaccatcggcatcggcggcggacctggacaatgtcacggccgataccttcttggacatcgagatcgacggcaagcctgcaggccggatcgtgctgggactgtttggggacaccgttcctaaaacagcagagaacttccgagcactttgcacacgggagaaaggaattgccaagtccggcaagcctctgtggtacaaggggtcgacgttccacaggatcatcccggggttcatgat

SEQ ID NO: 80038 - DNA, 444 bp, Zea mays
gacccacccgtccacgacaaggccgggtacctgccgtggaatggcgacttcgggctcaagacgctgtggtacgccgagtacgccaaccgggggcccggcgccgacaccgccggccgcgtcacatggcccggctacaagaaggtgatcagcaaggaggaggccgaaaagttcaccgtgcagaacttcttgcacgccgagccgtggctcaagcccaccgggacacctgtcaagtacggcttctgggcgtgagcacatattcttgtggagaccagaggatgtcgatgaagcagaggaagtcatctatgcctagtttgcctatgcatggtggtaaatcactaatcgtccattgttgggagcatgttcatccacggacggacgagataaggtgctgagttgatatgaccataatccatgtacagtgtgtcacctgaacacttgtttgta

SEQ ID NO: 80039 - DNA, 441 bp, Zea mays
acggacgcatgggcggacgcgtgggcgttcatcagcagtgcggcaatgaaggcagccgtggccgctctgctggtgttcgccgcggtgtcgcctgccgcgcgcgcggtggcggcggaggcggaggcgaaggcgaaggctgtgggaagcgcgccgtcggtgcccgctggctcgctggacatcgcgcagctgggcgccaagggcgacggcaagtcggacagcaccccgatggtgctcaaggcgtggaagcacgcgtgcgaagcgacggggcagcagaagatcgtcatccccaagggcaactacctgacgggcgcgctggacctggtgggcccctgcaagtcctccatcatcatccgcctcgacggcaacctgctcggcaccggcgacctcaacgcgtacaagaggaactggatcgagattcagaacgtcgacaacctgtccatc

SEQ ID NO: 80040 - DNA, 398 bp, Zea mays
catccatctcatgcttcggtccacgcacccacccagccccaccagcggcagctccgcggcgccggcgtccagctccgacgccgcggcgatggtcgggggcggcgcggcggcgggcagcggcggcgcaccgagcggcgccaagctgctgcagatcctcaacgtgcgggtcgtgggcagcggcgaccgcgtggtggtgctgtcccacgggttcggcacggaccagtcggcgtggagccgcgtgctcccctacctcacccgcgaccaccgcgtggtgctctacgacctcgtctgcgccggcagcgtcaacccggagcacttcgacttccgccgctacgacacgctagactcgtacgtccacgacctcctcgcaatcctcgacgcgctccgcatcgcgcgct

SEQ ID NO: 80041 - DNA, 427 bp, Zea mays
accggcccggcgaccacatcgagattcagtggagaaggaacaaagaattcccatacggctggtggtatggagttgttgggcacttggagtcatgtgatggaagcgaacacttttgtcggtgccatcttagtgataccgtggtgctggagtttaatcagtacacgccgggctcaaggtggaggcaagcgttggtgaaacggaaggagcatacggaggagggcaacgagggcgacgggttctacggcggcataaggaagctccgcggcaacgatgacatctccaagtggaggcagctgtggccaacagacgtcctggagtaagcaggaaccgcatcccttctcacaccgacattgatccatcgctcaaatgacacgcctttctttcatcatcatattgaccaaattcgtcgtctctgtcgcgctgttgt

SEQ ID NO: 80042 - DNA, 321 bp, Zea mays
aagcgatcttcatccagccttctgctctgctccctcgaaatggaggcgacgagcaaggcgatggcttcaggcctcctcgttctgctgcttctcatcaacacaggctttgtcctgcccgtccattccgaggactgctgggccgacacccgcgtcatctgcaccaagacgcacaactgccgggacgacacttgcgcggggcgcggcatgccggacggccgctgccactgggagttccccaacctggtgcccttctgccagtgcctgcgccccaactgccactagtccgggcgcctcggattggctcacttcgccggcgatgat

SEQ ID NO: 80043 - DNA, 415 bp, Zea mays
acttacattctgcaggatctaagcaaagacttgatttagttatggacggattggtaggcctcttgaaagttcccttggtccggggtatcaaccttgcctaccgcgacgcaagaggcaccgatccgtatgtcgtcctacggcttggcaagaagaaactgaagacaagcgtgaagaagagatccgtgaaccccatatggcaagaggagctaactctgaccgtcacagatcccagccaaccactgaagctggaggtgttcgacaaggacaccttcagcagagacgaccccatgggagacgcggaggtggacgtggcgccactgatggaggcggtgagcatgaacccgcgggaggagagtctgaggaacggcgccatcatcaggtccgagcggccgagcgccaggaactgcctcgccga

SEQ ID NO: 80044 - DNA, 410 bp, Zea mays
agataaggagaccaccacccaaggccatgacgaccttggcaagcgctgcgccaagtactacgaggcaggtgcccgctttgccaagtggcgcgctgttctcaagattggccctaatgagccatcacagcttgccatcgacctgaacgctcagggtctagctcgctacgccatcatctgccaggagaatggtctggtgccaattgttgagcctgagatccttgttgatggccctcatgacattgatcgctgtgcttacgtcactgagaccgtccttgctgcctgctacaaggcgctcaacgagcaccatgtcctcctggagggtaccctcctgaagcccaacatggtgactccaggctccgactccaagaaggtgacccctgaggtgattgctgagtacaccgtccgtaccc

SEQ ID NO: 80045 - DNA, 440 bp, Zea mays
acccacgcgtccggtttacccagcaggagcttccagcatgcaagccaatgttaactcctggaatcgtcatcggtgctttctcgctcatcggtgtcttcttcgtcccgatcggcctcgcttcgctatccgcgtctcataacatcgttgaggtgatagatcgatatgacgccgagtgtgtgtccgccaacgacaaggtcggcttcatccaggacaccaagaccgacaaggcgtgcacaagaaagatcaccgtgccaaagccgatgaaagggccgatacacatatactaccagctcgagaatttctatcagaaccatcgacggtatgtgaagagccgtaacgacatgcagctgcggaacaagggcgacgcaagcacgatcgcgaactgcgagcccgagggcaccagcgaggacggcgggaagcccatcgtgccctgcgggctc

SEQ ID NO: 80046 - DNA, 393 bp, Zea mays
aatcgccgacgccggcttctgggtcatgaaccgcgagttgctggccttctgctcttggtccacctcgaacaggcttgacaggtcgaaccctctggagtgggagatgatgtcaaagctggagcagatcgctgagacagagcgcttcatggtgaaaaaacaggacgggctggtgaagctgcaggggtccaagcaagggaggaaggggcagctcgcgatcgacgccgagatcttcgaggtgacaccggcctttcacgtcgtcgaggtgaagaagtcggcaggcgacacgctggagtatgagatgttctgcagcaagggcctaagaccttcactcagcgacatctgctggagcagccgatctgaggagaacatggctccttcagtggttcagccatc

SEQ ID NO: 80047 - DNA, 397 bp, Zea mays
acggacgcgtgggggaaaaggagcgaagagagagagagagacgcaggaccgccggcgacgatcgaggagggaggaaccagatacccggcggcggcgatcgatggctccgcgcagctcatcggcggcgacgtgcctgtgcctcgctctcgccgcggccacgctggcgctggcccacggggcgcaaggaggaggaccatcggcatcggcggcggacctggacaaggtcacggccgagaccttcttggacatcgagatcgacggcaagcctgcaggccggatcgtgctgggactgtttggggacaccgttcctaaaacagcagagaacttccgagcactttgcacaggggagaaaggaattgccaagtccggcaagcctctgtggtacaaggggtcgacc

SEQ ID NO: 80048 - DNA, 211 bp, Zea mays
  unsure (1)..(211): unsure at all n locations
gcatggtgagaaggaagagtcaaagggcatcgatgcgaaagcgtccgggcctggtgggtccttcgacatcaccaagttgggcgcctccggcaatggcaagacagacagcacgaaggctgtgcangangcatgggcatcggcgtgcggcggcactgggaagcagacaatcctcatacccaagggcgacttccttgtcggacaactcaacttc

SEQ ID NO: 80049 - DNA, 445 bp, Zea mays
atcctccaccaccaccaccaagctcaacaacagccagctcgcgaaaataatgaagagccgcagcatggcatcatcggccgcgctcttggtgctagccctcgcgctagtggcggccaccgccccacaggtagcggaggcaaagaagaagagagcggcggagagcggcgaggcggcggaggcgaagaagatccaggacgacttctgctcgacgctgtgcgagggcaagaaggggacggacctggtcgtgtgcaaggagtcctgcgcgctctcccagcagtccaacctggtgctgtacggcaggatccagtgcaagggcaagtgcaccgagcagaagggcatcacggcgccggccatgaaggtctgccaggaggagtgcgacaaggcgtacgtggtgaaggcggccgaggtcaccaaggcctgcagcgtcacctgcgccaaggagaaa

SEQ ID NO: 80050 - DNA, 449 bp, Zea mays
acgcatttggtgataaactcttgaagcagtatgttgtcgctgaccctgaaatcaaggaggaggtggtcgacagctcccttgaattcctcatccttgctagtgatggactctgggatgttgtcactaatgaggaagctgttgccatggtcaagcctattcaggacccccaggaagcagcaaacaagcttctcgaagaagcgtcccgaaggggaagctctgataacatcaccgttgtcatcgtccgcttcctatatggaactaccggtgataaatcaggcgcagacaaagagaccaccaatgaccaaaactcctaattacctcctgtagggatccctcatgcgtgtgttttcttctggctgttgtatctgatgctcaaagtagatgctccgtgtgtcttccgctgctgttccgcaaggaaactgactcccccgaccgtcgtcgtgatgctg

SEQ ID NO: 80051 - DNA, 438 bp, Zea mays
actagtggcggccaccgccccacaggtagcggaggcaaagaagaagagagcggcggagagcggcgaggcggcggaggcgaagaagatccaggacgacttctgctcgacgctgtgcgagggcaagaaggggacggacctggtcgtgtgcaaggagtcctgcgcgctctcccagcagtccaacctggtgctgtacggcaggatccagtgcaagggcaagtgcaccgagcagaagggcatcacggcgccggccatgaaggtctgccaggaggagtgcgacaaggcgtacgtggtgaaggcggccgaggtcaccaaggcctgcagcgtcacctgcgccaaggagaagaacccgcgcctcagcgagaactgcaagaggtcctgcacccctcctccttcttgaagcgaagccccttgaaatgaatgaaccatgcatgcatgcat

SEQ ID NO: 80052 - DNA, 437 bp, Zea mays
agacgcgacaagaagctttcctacaggaaggtcctccggctcgcgctggacctcgccagagggctgagctacctgcactcgaagaatgtgatgcaccgcgacgtgaaggcggagaacatgctgctggaccggaagcggacgctgaagatcgccgacttcggcgtggcgcgcgtggaggcgcagagctgcgaggtgacggggcagacgggcacgctgggctacatggcgccggaggtgctgcaggggaagccgtacgaccacaaatgcgacgtgtacagcttcggcatcctgctctgggagacctactgctgcgccatggcctaccccaactacagcctcgccgacatctcctaccacgtcgtcaagctgggcatccggccggacatcgcgaggtgctgcccgcgggcgctggtggagatcatgacgcggtgttggga

SEQ ID NO: 80053 - DNA, 361 bp, Zea mays
cccacgcgtccgcagggcggcatccggtacaccatcaccgggaacaagtacttcaacatggtgacgatcaccaatgtgggcggcgctggcgacatcgcggcggtgtcggtgaaggggagcaagcgcgtcaagtggacggagatgaagcgcaactgggggcaagtgtggcagaccggggaggacctcacctgcgagtcgctgacgttccgggtgatgaccagcgaccaccgcaaggccacctcatggcacgttctccccgctgactggaagttcggcgtcacgtaccaggcatccaagaacttctaagtcctccaagcaaatacaccttcggcagtatgatatgcgaactgacacagcatga

SEQ ID NO: 80054 - DNA, 434 bp, Zea mays
cacgcatccgcccggccgcgcgtcaaggaaccgccgcacatttccatgggcaaggtgcgctccttcttctgccgcgcccgcagcggcaagcgcggtggctcccggccaggcttgtcgtcctcgtctctctcgtccccgtgcccctccgcgaggagggcgtcgccgccggccggggacgagacggagcgcgtcttccgcaagttcgacgcgaacggcgacggccagatctcgcggtccgagctggcggcgctgttcgagagcgtgggccacgcggccaccgacgacgaggtgtcgcgcatgatggaggaggccgacgcggacggcgacggctacatcagcctgcccgagttcgcggcgctcatggactcggcgtccggcgacgccgacgccgtcgaggaggacctgcgccacgccttctcggtcttcgacgccga

SEQ ID NO: 80055 - DNA, 419 bp, Zea mays
  unsure (1)..(419): unsure at all n locations
ctcactcaccccgccttcacgcctccctcacaaaataaggtcccgcccttttccgacattcacaggggggacaggaaatcagcggccatggcctcgattccggcgacgaccttcgccgtcatcttatccgtcctcttctgtgccgcggctggcaccgccgtcgacaacgacctccccgactacgtcatccagggccgcgtctattgcgacacctgccgcgccgggttcgtgaccaatgtcaccgagtacatcgcgggcgccaaggtgaggctggagtgcaagcacttcggcaccggcaagctcgagcgctccatcgacggngtgaccgacgggaacggcacgtacacgatcgagctcaaggacagccacgaggaggacatctgcgaggtggtcttggtggagagcccgcgcaaggactg

SEQ ID NO: 80056 - DNA, 438 bp, Zea mays
tgatgtcgacgtcagggaagaagattcctttgaaatcagtcacttcaatcgtcgatgggctaaagaaatcgtacattgagaagttgaggcccttggaaaaaacctatcagttccatgacttcgtgtctcccttgctgactagcagcgatttcgatgcgaagccaatggtcatgctgttgggtcaatactccacggggaaaacaacatttataaagcatttactaaaaacaagttatccaggcgctcatattgggccagagcctacaacggacaggtttgttgtcatcacttctggaccagacgaaagatgcattcctggaaacaccatcgccgtccaagctgacatgccatacagtggcctgtcatcgttcggaacagcatttttgtccaagttcgaatgttctcagatgccacatccactgttagagcacgtgacct

SEQ ID NO: 80057 - DNA, 444 bp, Zea mays
acgccactccatcagcgtcctcgccgactgcgagaccgtcgtcttcggcacccagcacgtgaacgcgcagcacaaccagcggacgttccacttcgcggacgagacggcgcagaacaacgtgtgggagatgttcgacggggagaatgtgcccaagtacaagcaggccaagatcaggctgcgcaaggccggcgacctctacaacctcaccaaggacaagaccgactacgtctggtacacctccagcttcaagttggaggcggacgacatgccgatccgcagcgacatcaagacagtgctcgaggtcaacagccatgggcatgccagcgtggcgtttgtcaacaacaaattcgtaggatgtgggcacgggaccaagatgaacaaggcgttcacgctcgagaagcccatggacctgaagaagggcgtgaaccacgtcgccgtcttggc

SEQ ID NO: 80058 - DNA, 418 bp, Zea mays
aatcgatcacgacaagatggcgtgcacaaacaatgcgatgagagccttgttcctcctggtcctcttctgcatcgtgcatggtgagaaggaagagtcaaagggcatcgatgcgaaagcgtccgggcctggtgggtccttcgacatcaccaagttgggcgcctccggcaatggcaagacagacagcacgaaggctgtgcaggaggcatgggcatcggcgtgcggcggcactgggaagcagacaatcctcatacccaagggtgacttccttgtcggacaactcaacttcacaggcccttgcaagggcgacgtgaccatccaggtggatggcaatctgctggcgaccacggacctaagccagtacaaggaccatggtaattggatcgagattctacgtgtggataacctggtcatcaccggc

SEQ ID NO: 80059 - DNA, 426 bp, Zea mays
acccacgcgtccgcgagcgacgacgagatgatcatcccgcggaagggcacgctgcggcacgccgtgatccaggaccggccgctgtggatcgtgttcgcgcgcgacatggtgatcgagctgcggcaggagctgatcgtgaaccacaacaagacgatcgacgggcggggcgcgcaggtgcacatcatgttcgcgcagatcacgctgcagaacgtgcagaacgtgatcctgcacaacctgcacatccacgactccaaggcgcactcgggcggcatgatccgcgactcgaagcggcactacgggctgcgcacgcggagcgacggcgacggcgtctccgtgctgtcgtccagcaacgtgtggatcgaccacgtgtccatgtccagctgctccgacgggctgatcgacgtggtgaacgggtcgacgggcatc

SEQ ID NO: 80060 - DNA, 416 bp, Zea mays
acgcgtccagcgatggccacattgtggcggtggacatcatggagaagggctccgacacgtacgagcctctaaagcactcctggggcgccatctggaggaaggacagcgacaagccgatcaagggacccatcaccgtccaactcaccaccgagggaggcactaagaccgtctacgacgatgtcatccccgccggctggaagcccaacactgcctacaccgccaaataaactaaccaaataataataagtatcaaatggcacacttgatagacctttattttttattttttatttaataaaaggatataaggagtgtgacaaacaacaacacgaatattgtattgtctatgtatctcctatatatgcaatcccaattttatcatggccacattttaaaatggaatatatgatatatat

SEQ ID NO: 80061 - DNA, 183 bp, Zea mays
aataaaaaggcatgctggcagttactactatccattcaatcgatgaaaaacacacatttgcgtgacattacatttggagttccatcgacggtatatttggaaaaaaaacaattagcttataaaatgtgtgtttttcatcgattgaatggataataataaaaaggcatgctggcagttactact

SEQ ID NO: 80062 - DNA, 211 bp, Zea mays
gaggccgcgtcaaacgtcaacgcatgctggcagttactactatccattcaatcgatgaaaaacacacatttgcgtgacattacatttggagttccatcgacggtatatttggaaaaaacacaattagcttagaaaatgtgtgtttttcatcgattgaatggataataataaaaaggcatgctggcagttactactaaagaaagaaaacaaa

SEQ ID NO: 80063 - DNA, 352 bp, Zea mays
ctccaccaccaccaccaagctcaacaacagccagctcgcgaaaataatgaagagccgcagcatggcatcatcggccgcgctcttggtgctagccctcgcgctagtggcggccaccgccccacaggtagcggaggcaaagaagaagagagcggcggagagcggcgaggcggcggaggcgaagaagatccaggacgacttctgctcgacgctgtgcgagggcaagaaggggacggacctggtcgtgtgcaaggagtcctgcgcgctctcccagcagtccaacctggtgctgtacggcaggatccagtgcaagggcaagtgcaccgagcagaagggcatcacggcgccggccatg

SEQ ID NO: 80064 - DNA, 263 bp, Zea mays
acggaagcatgaggcggacccatcaagtacatggtcatccaaagcgagcccggcactgtcatccgcgggaagaagggatccgcatgcataactgtcacgaacacagggcaagcgatggtggacagcatctacgacgagcccatgacccccggccagtgcaacatggatggtcgagaggctcggcgactacctcgtaaagcaaggcctgtgaatggcttcagttaacctcgcacgctcgcgtgtccatggatcgagcatccagc

SEQ ID NO: 80065 - DNA, 391 bp, Zea mays
gaagcaactgaaaacagccgagcgatctcctctccctctccctctccgatccattctccagcgcagcgaagtagacatgtctgaccgggcaaagatgtcgtggcaggcgtacgtggacgagcacctgatgtgcgagatcgagggccaccacctcgcggcggcggccatcgtcgggcacgacggtgccgcctgggcgcacagcacggcgttccccgagttcaagaccgaggacatggccaacatcatgaaggacttcgacgagccagggcacctcgcgccgacaggcctgttcctcggacctaccaagtacatggtcatccaaggcgagcctggtgccgtcatccgtggcaataagggatcaagaggcatcaccgtgaagaacacagggcag

SEQ ID NO: 80066 - DNA, 236 bp, Zea mays
agctattatgcatcggtaagctcgaccgctccatccacggtgtgactcacgggaatggtacgtacacgatccatctcaacgacagccacgaggatgacatcatgccacgtggtctttgtggggagccctcgcaaggactgcgaccatgtgcacgcagacagggaccgcacctgcgtcgtgctcaccagcaacgtcgatatcagagacaatctgcgccccgccataccgctcagcta

SEQ ID NO: 80067 - DNA, 393 bp, Zea mays
gctcctgcgccgcccgtccgatccggtcactggccggggagggctcagaaacctttcatccaatacatacatctatctgagccctttcccgcggtgaggcccgaccggagtccacacacacacggtgtcgatggcggccgtaataaggagccgccgccgcgtgtccgttttcttctacgtcgtcctcgccgcagctgcagctgcagccgcggcgcaagcatccaataacgtcacctccgacgaggagtactgggcggagcgcgccgaggtggctcggtcgcgcaacctcgccgcctacgtcagcgaccccgtggccgccacgaaccgcttcaacgcggacgtgctgagggccacgacgcggcgggcgctggcgaagtacgatggcccgtgcat

SEQ ID NO: 80068 - DNA, 377 bp, Zea mays
ggctcagccgtcctgaggagccccctgtccgtcctcctctacatcctcgccgccgtgcccgccaccgccgcggcgacgccgaccgacgccgccatcgacgaggcgtacgcgcatctcgtcaacctcaccgctaaccaggagtactgggcggagcgcgcggaggcggcgcacgcgtacaaccgcgcggcgtaccagaccgaccccgtggccgtcgtgcagcgcttcaacgacggcgtgcacagggcgacggcgacgcggtcgcggtcgctggcgcacaaggcgcggggcccctgcacggggaccaaccccatcgaccagtgctgggggtgccgccgcgactgggcccgcgaccgcaagcgcctggccaggtgcgccat

SEQ ID NO: 80069 - DNA, 431 bp, Zea mays
atcgagcttaattgcgccactgctcgttatcctcctcttgcattgcattgcaggtcgtagttgagcagcagcaaccactgcacaggatgtcgtggcagacgtacgtcgatgagcacctcatgtgcgagatcgagggccaccacctgagctctgccgccatagtcggccacgacggcgccgtttgggcccagagcaccgcattcccacagttcaagccagaggagatgaccaacatcattaaggacttcgacgagcctgggtttctggccccgatcggcctcttccttggccccaccaagtacatggtcatccaaggcgagcccggcgctgtcatccgcgggaagaagggatctggaggcataactgtgaagaagaccggacaggcgctggtgatcggcatctacgacgagcccatgacccctggacagtgc

SEQ ID NO: 80070 - DNA, 395 bp, Zea mays
agtcagcttgggattgctccgcatggattcgcgcctatggatgcttcctggaggaacggctcgagtgcctcagggttctcagatacgacatcgaaaccgagcgtctcgtcagatatccccagacttccagcaaggtacatagtaaaaccaggaccctgcctagcccggaactcttggagcagttgcctgcactgcagcagctgcttttcagggttgtcggcgtccagcctgaaggcgctgcctgctcaaattaccttattcagtacgcactagccctggttctgaaggagagcttcaagatctactgctcaattaacgatggcatcatcaatctcgtcgatatgttcttcgaaatgccgaagtacgacgcaatcaacgctctggcgatttacaaa

SEQ ID NO: 80071 - DNA, 408 bp, Zea mays
agatcctcatcctccgccgcctccaaggccaccccaacgtcgtcggactcgagggcctcgtcacctcccgctcgtccccctccatctacctcgtcttcgagtacctcgagcatgacctcgccggactcagctcctcccccgacatcaccttcaccgagtcgcagatcaagtgctacatgcggcagctgctcgaggggctggcgcactgccacgcgcgcggggtgatgcaccgggacatcaagtgcgccaacctgctggtgagcgacggcggcgagctcaaggtggcggacttcgggctggtgaacctcttcgcgccggcgccggcggcgccgctgaccagccgggtggtcactctctggtaccgcccgccggagctgctcctgggcgccacggcgtacgagccctccg

SEQ ID NO: 80072 - DNA, 419 bp, Zea mays
ggcatccacatcggcgactccagcaacgtgaccatcagcagcaccaccatcggcgtcggcgacgactgcatctccatcggccccgggagcaagatgatccgcatccatggcgtcaagtgcggcccaggccacggcatcagcgtcggcagcctggggcgctacaaggacgagaaggacgtggaagacgtgcaggtgacggggtgcacgatcgccggcaccacgaacggcctgcgcatcaagtcgtacgaggactccaagtcgtcgctcaaggccagcaagttcctgtacgagggcatcaccatggacaatgtctcctaccccatcatcatcgaccagaagtactgccccaacaacatctgcgtcaagtccggcgcctccaaggtggccgtcaacgacgtcgtcttcaagaacatccacgg

SEQ ID NO: 80073 - DNA, 432 bp, Zea mays
accgggatcacgatcaccaacaccgtcattggcgtcggcgacgactgcatctccatcggccccgggacctccaaggtgaacatcaccggcgtgacctgcggccctggccacggcatcagcatcggcagcctagggcggtacaaggacgagaaggacgtcacggacatcaacgtcaaggattgcactcttaagaagacgatgttcggcgtccgcatcaaggcgtacgaggacgccgcctccgtgctcaccgtctccaagatccactacgagaatatcaagatggaggactcagccaaccccatcttcatcgacatgaagtactgccccaacaagttgtgtactgccaacggcgcctccaaggtcaccgtcaatgatgtcaccttcaagaacatcaccggcacctcctccaccccggagggccgttagcctgct

SEQ ID NO: 80074 - DNA, 430 bp, Zea mays
agtggcacacggaggacgacctgttcatgaacggcgccatcttcaatccgtccggcggcgcccccaagcaggtcgacaccaacgagtgggtcaagcccaagccaggaacctacgttacaaggctcacccgcttctccggcacactgtcctgctgcacgggcaagccgtgctgaaggccggccggtgggcgtcagaggctgcttcttctagctcatggcctggccatgccaggtcgcgatggctgcgtttcatttcatggaagaaagcaaggatggatcacaggttgtcgttctgctaattaatcgacgtttgccttcaagtactgtgttgtggcattgttacacatcacagtacagtttggccattttttttccacagaggaagtacggattgatttaatcccacacgcgtggtactacgtatacagttt

SEQ ID NO: 80075 - DNA, 397 bp, Zea mays
cccacgcgtccgcgccgaggtcgccgcgcaccgcctcatcttcctggactcgcgccactccttgtaccagggcctgtacgcccgcagcgtggcggacgcccgcatccgccccgcgctccgcctgctgaagcagaacctgtcgttcctggtgtccgtgctcgcggaccgcgcgcagcccgtggcggtgcgggaggtgatgcgcgcctccttcgaggcgttcctgatggtgctcctggcgggcggcaacgagcggagcttcgtgcgcgccgaccacgccacggtggaggaggacttccggagcctgaggcgcgccttctccacgtgcggggaatggctggtccccgagacgtggtggcgcgggatgcagagaccgccgaagccgtcgtggggctcatgg

SEQ ID NO: 80076 - DNA, 423 bp, Zea mays
ctcgccgcccggggagaaggagggctccgccgctcccggggaagagcgcgccattgccgccgccgcgctgactggggaagatggttgtccaggagttcacagttgatctcaacaagccccttgttttccaggttggccatcttgaggaacggtaccaggaatgggttcaccaaccgatcgtcagcaaggagggtccacgctttttcggaaatgatgtcctggagttcttgactcgcacgaagtggtgggctgtgccaactatatggctgcctgttgtctgctgcctgctcgtgaaatctattctgatgggtcataccgttcatgacgtagctatgatggctctgtttgggatatttatttggactctgatcgaatacactttgcaccgcttcctgttccacatcgagaccaagacctactggt

SEQ ID NO: 80077 - DNA, 403 bp, Zea mays
gagtgatagtgtcagccacacagtgccaatctatgaaggttatgcccttcctcatgccatcctgcgccttgaccttgctgggcgtgacctgactgacagcctgatgaagatcctcactgagagaggttactccttcaccacctctgctgaacgcgaaattgtaagagacatcaaggaaaagcttgcatatgtggctcttgaatacgaccaggagctcgagaatgccaagagcagctcatctgtggagaagagctacgagctgcctgatggtcaggtgatcaccattggggcagagaggttcagatgccctgaggtcctcttccagccttccttcattggtatggaagctcctggcatccatgagaccacctacaactccatcatgaagtgcgatgtcgacatc

SEQ ID NO: 80078 - DNA, 377 bp, Zea mays
cccacgcgtccgggctggttcgtggatggcggtgccacaacctctcctgctgtcgctgctggtcgccgtgctagcggtggccgccgatgtcgccaacgccggccacgccaagcccctaacgcctggcgggcgcgtggtacacgacaaccacggcaagttcacggccgggccgtggaaacccgcccacgcaaccttctacggcgggcgtgacgggtccggcaccacggcgggcgcgtgcgggtacaaggacacgcgcacgcaggggtacggcgtgcagacggtggccgtgagcactgtgctgttcggtgacggcgcggcctgcggagggtgctacgaggtgcggtgcgtggacagccctagcgggtgcaagcccgacg

SEQ ID NO: 80079 - DNA, 427 bp, Zea mays
acacaaccgttgccctacctgcaggcaagagctgggcgacatcaggtgcctggcgctggagaaagtcgccgagtcgctggagctcccctgcaggtactactcgctggggtgccccgagatcatgccttactacagcaagataaagcacgaggcgcagtgcggcctgagaccgtacaactgcccctacgccggctccgagtgcggcgcggccggcgacatcccttccctcgtctcccacctgagggacgaccacaaggtggacatgcacagcggctgcaccttcaaccacagatacgtgaaatccaacccgcgggaggtggagaacgccacctggatgctgacggtgttccactgcttcggccactacttctgcctgcacttcgaggcgttccagctcgggatggcgcccgtgtacatgggcttcctc

SEQ ID NO: 80080 - DNA, 401 bp, Zea mays
aggctgattcgtggatggcggtgccacaacctctcctgctgtcgctgctggtcgccgtgctagcggtggccgccgatgtcgccaacgccggccacgccaagcccctaacgcctggcgggcgcgtggtacacgacaaccacggcaagttcacggccgggccgtggaaacccgcccacgcaaccttctacggcgggcgtgacgggtccggcaccacggcgggcgcgtgcgggtacaaggacacgcgcacgcaggggtacggcgtgcagacggtggccgtgagcactgtgctgttcggtgacggcgcggcctgcggagggtgctacgaggtgcggtgcgtggacagccctagcgggtgcaagcccgacgcggcagcgctggtggtgacggtgaccgacctgtgc

SEQ ID NO: 80081 - DNA, 398 bp, Zea mays
aatcgcgagcggccgccctttttttttttttttttttttttttgatcgattgaacagtttgacatcagcattttcagaggaacaaattaaatccacatgccatcagtcgaagtcacatccacagcagagtcggtcagttagaaaaggaaaccaatcgattaatcgagcagagcaggccggatcacgagagggacttggcgacgggggcagttgagaggaggccggagagcaagccgacgacgagcgcgctgttgtacgtggtcggctcgttctgctgcacgttctccctgtcgtcgacgaacgagtcgttcttgaacggcccgccgaccagcgcgcccgtggcgacattcgggttgggctcgggcgacttgagccactcctggccgtcgcagccggtg

SEQ ID NO: 80082 - DNA, 392 bp, Zea mays
acccacgcgtccggccggagcaaaaagcttgtgcgtctggctgtctccggccggccgggcttgtcgtacgtcctccaatccgttgacggtcaggccctctagcttttgctcggtgttctggagacagagcgagagagagagagagagagagaggtagacggagatggagtgcctgctggggctgctcaaggtgcgggtggtgcgaggagtgcacctggcaatctgcgacccgctcacccacagcagcgacccctacgtcgtcctccgccacggaaagcagaaagtgaaatcaagtataaaataccgcacgattaacccagaatggaacgaggagctcaccctgtccatcacgaacatgatgaacccggtcaagattggactctttcgacacg

SEQ ID NO: 80083 - DNA, 337 bp, Zea mays
gccgccgtcatcctatgcctatgcgtcgtcctctcctgtgccgcggctgacgacccgaacctccccgactacgtcatccagggccgcgtgtactgcgacacctgccgcgccgggttcgtgaccaacgtcaccgagtacatcgcgggcgccaaggtgaggctggagtgcaagcacttcggcaccggcaagctcgagcgcgccatcgacggggtcaccgacgcgaccggcacctacacgatcgagctcaaggacagccacgacgaggacatctgccaggtggtgctggtggccagcccgcgcaaggactgcgacgaggtccaggcgctcagggaccgcg

SEQ ID NO: 80084 - DNA, 402 bp, Zea mays
  unsure (1)..(402): unsure at all n locations
gtactgccccaacaacatctgcgtcaagtccggcgcctccaaggtggccgtcaacgacgtcgtcttcaagaacatccacggcacctccaacacgccggaggccatcacgctcaactgcgccaacaacctgccctgccagggcgtgcagctcatcaacgtcgacatcaagtacaacaggtccgacaacaagaccatgtccgtctgcaagaacgccatcggcaagtccattggcatggcgaaggagctcgcctgcgtctgaacctacttgcatccatcactcactcttcgtcacctctctctttctcactctcgccagtctttttttaggcctctggcaatctgcgaactttcttattcattctactagtgtggatctataattccattcaanatatatacatg

SEQ ID NO: 80085 - DNA, 401 bp, Zea mays
tctcctgctggttactccgcgcgccttctctttctctcccggacgtcgatcgtgttcttcagcacgggctagctagctccctccctcccagccatggcgacgccggacaacaaagggcacgggcatccgctgcccaagtttggggagtgggacgtgaagaatccggccacgtccgatggcttcaacgtcagattccacaacgcacgctaccacaagagatccaccagcggccctggagctcggatcgcacactcatgccattcgccggtcttcacgaactgcggaggtgacagtgggtacaggcccgatttcggagacggcaaccattacacgccgcccaaacggtagaagtgggccttctgtcgctgctgaatcgaaactcgctgtgctgctgtgctgac

SEQ ID NO: 80086 - DNA, 281 bp, Zea mays
cggcggcatgacggcttgcggaaacttccccatcttcaaggacggaaagggctgcggctcatgctacaaggtgagatgcaaggaaaaacctgagtgctcgggcaatccagtcacggtgtacatcactgacatgaactacgagcctatcgctccctaccacttcgacttgagcggcaaggccttcggctccctggcaaagcccgggctcaacgacaagattcgccactgcggcatcatggacgtcgagttcaaaagggtgcgatgcaagtaccccgccgggc

SEQ ID NO: 80087 - DNA, 380 bp, Zea mays
cccgaccctacatcgagtcctgctacaacaacatccgcgtcaactccggcgcctccaatgtggccgtcaacgacgtcgtcttcaagaacatcgacggcacctccaacacgccggaggccatcacgctcaactgcgccaacaacctgccctgccagggcgtgcagctcatcaacgtcgacatcaagtacaacaggtccgacaacaagaccatgtccgtctgcaagaacgccatcggcaagtccattggcatggcgaaggagctcgcctgcgtctgaacctacttgcatccatcactcactcttcgtcacctctctctttctcactctcgccagtctttttttaggcctctggcaatctgcgaactttcctactcattccac

SEQ ID NO: 80088 - DNA, 349 bp, Zea mays
gaagcaggccgacccgttgctgggcaagaggtaccccgtgaaggggctgttccaggcgctcgccgtcgcgtccatgtgcttgcaggaggacgctgccagccggccggggatcagcgacgtcgtctcggcgctctcgttcctcgccgatccgcaatactaccctccccaaggcacgggagccgagcagaaggccacagatcgagagagtaaacccaacgacaattctacagacaaggatagcagtcctcataaggccggaatgatcagggcagacgacgaaacgaagcatagatgatgaccgtagggggggaacgctaacgacgggaattaaaagggaggaacactgcag

SEQ ID NO: 80089 - DNA, 428 bp, Zea mays
acccacgcgtccggaaaatgagcctttcacgagaatgatggtgtttgagttcgctccacatggtagtctctcacagcaccttcacgtcaaagagtttgagcatctggactgggctgcgaggatgagggtcatcatgggcgtcgcatactgccttcaatacatgcaccatgagctcagtccacctatggcgatccacgacgtgcggtctgacacaaccttcatttcagatgattatgctgccaagattgcagatgttggtgtatggaacgagcttgctgccaaagcgaaggctggaaaggaggacggcagcagccgtgctgaagctcctccggatctcccaagcaacgcctactgcttcggcgcgctcatgatcgagaccatatccgggagggttcctgacccgtatgatcacaaacccatatgcagct

SEQ ID NO: 80090 - DNA, 372 bp, Zea mays
acccacgcgtccggaaaatgatcctttcacgagaatgatggtgtttgagttcactccacatggtagtctctcacagcaccttcacgtcaaagagtttgagcatctggactgggctgcgacgatgagggtcatcatgggcgtcgcatactgccttcaatacatgcaccatgagctcagtccacctatggcgatccacgacgtgcggtctgacagaaccttcatttcagatgattatgctgccaagattgcacatgttggtgtatggaacgagcttgctgcaaaagcaaatgttggaaacgacgacggcagcaccccgttctgaagctcctccggctctcccattcagcgcctactgcttcggcgcgctcatga

SEQ ID NO: 80091 - DNA, 439 bp, Zea mays
  unsure (1)..(439): unsure at all n locations
aacgtgaagaccaccatgtacgcgccgccgttcaccacgcacggctgctccatgaaccagcggctgctgatcctgcgtgtcaccgcgttcgtcgaggagggccggagctacagggtgaccgtggacgcgccgagaaagccggagctggcgccgcgagggtactacctgttgttcgtggtggcgaagggcgtgccgagcatgggtgcgtgggtgaaggtccggtgagatcgatcagctcacatccaccgtgtgggtcgctgcgggatcgtgtacacaagtggagagccagcctaactctctctctctctctctgtgtgtgtctctttgcgttctttggttttgttttcctgctanggatggatggatgtaaataggatcgatcagattggccagttcaccgctggatcactctnataggttgattggatacctgcccaca

SEQ ID NO: 80092 - DNA, 342 bp, Zea mays
atttcctttcattggccttttcagcaacagcgatccattctcgtaggggggagagagagagagagagagagggagagaaatcaaagaggagagtgatcatggagcatgtgatcggagggaagtataagcttgggaggaagattgggagcggatccttcggagagctatatctcggtgttaatatacagaatggagaggaagtgggaataaaattggtgcctgtgaaaacaaaacatccacagctgcactatgaatctaaagtttatatgctgctgcacggtggaaacggtatcccacacctcaagtggtatggggttgacggggagtacaatgttatggtga

SEQ ID NO: 80093 - DNA, 270 bp, Zea mays
agcggttcgaaacagaactacctccctccgctgccgccgctgacgaggtgcaaccaagactcgggcttcttccgactgtggaagaaggcggcgctgccgacgtgccaggcgccgccggatgccaccccgcgcggcggccgcggttcgcaccacgtcccgcggccgtccatcagccggggcacgcagcggctctacgtccgcctcaacacgctccactacgtgctgacccacctggaggccctcgacagctcgctgtcgtcctcgacctct

SEQ ID NO: 80094 - DNA, 396 bp, Zea mays
tccgggaatacgaacgtcgtacgagaacctttctcgctcctctacctttctccttttcttgcgacggcagaacaccttcgccggcgagagcatggcgatggcgtaccgtgtcctggaggtcaccctggtgtcggcaaatgacctcaagaaagtgtcgctcttctcccggactcgcatctacgccgtggcttccatctccggattcgacctccgcatcccttcccacagcacccaagcagaccacagcaacggctgcaacccctgctggaacgccgtggtacacttccccatcccggctgccgctgacacccgcggcctcgcactccacgtgaggctccgcgcccagcgtctatacctgggcgatcgcgacatcggcgaggtgtttgtgcccatcga

SEQ ID NO: 80095 - DNA, 371 bp, Zea mays
  unsure (1)..(371): unsure at all n locations
aattgtcggtgaaggggaccaaccccgttaattggacggagatgaaccgcaactgggggcaattgtggcagaccggggaggacctcacatgcgagtcgctgacgttccgggtgatgaccagcgaccaccgcaaggccacctcatggcacgttctccctgctgactggaagttcggcgtcacgtaccaggcgtccaagaacttctaagtagccactttccctcctcttcttcaacctgcatgcccgcaagcagccatgcagatgataacatgcatcatgcatgcatattcattctttcgctcatgcactccgatacggtgccggagttaaaaaaatataaatcaatgtgcaaattcanatgacananaaaaa

SEQ ID NO: 80096 - DNA, 410 bp, Zea mays
acgacaagatggcatgcacaaacaatgcgatgagagccttgttcctcctggtcctcttctgcatcgtgcatggtgagaaggaagagtcaaagggcatcgatgcgaaagcgtccgggcctggtgggtccttcgacatcaccaagttgggcgcctccggcaatggcaagacagacagcacgaaggctgtgcaggaggcatgggcatcggcgtgcggcggcactgggaagcagacaatcctcatacccaagggcgacttccttgtcggacaactcaacttcacaggcccttgcaagggcgacgtgaccatccaggtggatggcaatctgctggcgaccacggacctaagccagtacaaggaccatggtaattggatcgagattctacgcgtggataacctggtcatcaccggc

SEQ ID NO: 80097 - DNA, 326 bp, Zea mays
cggacacgtggggcgccgctggccaagcccggcgccaagggcggccaggcggtggcggtgcggctgttcgggaccaagacgcagatctacaactgcaccatcgacggcggacaggacacgctgtacgaccacaagggcctgcactacttcaagggctgcctcatccggggcagcgtcgacttcatcttcggcttcggccgcagcttctacgaggactgccgcatcgagtcggtggtcaaggaggtggcggtgctgacggcgcagcagcgttccaagtccatcgagggcgccatcgacaccggcttctcgttcaagaactgcagcat

SEQ ID NO: 80098 - DNA, 259 bp, Zea mays
agcacagcaatcaacggcccgcggtagcaaccaagatcctctccaatcgcctcccttcgccaaggtccacggcggtgaacctggaaacgggaaaaaaatattccgcacaaagtgcgcgcagtgccaaaccgtggatcgaggtaggtcgcacacgcagggacccaacctgcactgcctcttcggtcgtcagtcaggcaccaccctcggctatgcctactccacggccaacaagaacatggccgtcgtctgggaagagggc

SEQ ID NO: 80099 - DNA, 331 bp, Zea mays
  unsure (1)..(331): unsure at all n locations
cggaaccggaaagctcaaccgctcaatcaacggggtgaccgacgggaacggaacgtaaacgattcaagctcaaggacagccacgaggaggacatctgctaggtggacttggtggaaagcccgcgcaaggactgcgaccaggtgcacgcagacagggaccgcgccggcgtcctgctcaccatcaacgtccgcatcagcgacaacctgcgccccgctaaaccgctcggctacctcaaggacttgccgctgcncatctgcgcctcgctgctcaaacagttggactcggacgacgacgacgatcagtaatagcacatctacgacgactatcgata

SEQ ID NO: 80100 - DNA, 400 bp, Zea mays
  unsure (1)..(400): unsure at all n locations
ccgtccatcccatccccgctcgcctctccagtctcctctcctcgccccgctctagacgatcgatggccgcaacggcggcggaggaaatggaaaggatgttgaaggcggattggaagaagggaataagaaaaggaaccgtaccggctggtggaataacgggcgctgccggcttaactgcgggacaacgagtacatccaccgccactaccgctgcgaatggccgctcccgcacgttctgctctccgccttctccatccacaacgagaccctcaacgtctggacgcatcttatangatttttcatctttctcgctctgaccatatacacagcagcacaagttccaaatgcagtagatatccggagcttgcagcatttgccagatgtactgagaaaggctgata

SEQ ID NO: 80101 - DNA, 430 bp, Zea mays
gggccgacccaaacgtccaatcagcgtggtcagccgcctcctcatcccggtcccgttcgaccagcccccgccggagaacgaccacgtggtgctcatcggagactggtacaccaaggaccacgaggtgctagcccgccagatcgacgccggcaagggcgtgggccgccccgcgggcgtgctcatcaacggcaagggcggcaaggacctggaggccgcgcctgccttcaccttcgaggccggcaagacgtaccgcctccgcgtctgcaacaccgggatcaaggcgtcgctcaacttccgcatccagggccactacatgaagctggtcgagctggagggctcccacaccctgcagaacacgtacgactcgctcgacgtccacgtcggccactgcctctccgtgctcgtcgacgccgaccagaagcccggcgac

SEQ ID NO: 80102 - DNA, 396 bp, Zea mays
gatgcaaaactctaaatgagcgtcgtcatacgcctcctcatcccggtcccgttcgaccagcccccgccggagaacgaccacgtggtgctcatcggagactggtacaccaaggaccacgaggtgctagcccgccagatcgacgccggcaagggggtgggccgccccgcgggcgtgctcatcaacggcaagggcggcaaggacctggacgccgcgcctgccttcaccttcgacgccggcaagacgtaccgcctccgcgtctgcaacaccgggattaaagcgtcgctcaacttccgcatccagggccactacatgaagctggtcgaactggagggctcccaaaacctgcagaacacgtacgactccctcgacgtccacgtcggccactgcctctccgtg

SEQ ID NO: 80103 - DNA, 370 bp, Zea mays
cgggccgacccacagcgtccagccgcatccgcggcacgccgcgccgcatcccgtgcccgcgcaaaaccggatccgccgccgccatggcggtggaccgcgtggacggcgaggaggcgttcgaggaggtggacccgacggggcggttcgggcggtacgcggacgtgctggggctcgggtccgtcaagaaggtgtaccgcgggttcgaccaggaggaggggatcgaggtggcgtggaaccgtgtccggctgcggtcgctggccgaccgcgaccccggcatggtggagcgcctccacgccgaggtgcgcctcctccgctcgctcagccacgaccacatcatcggcttccacaaggtgtggctggaccgcgacgc

SEQ ID NO: 80104 - DNA, 415 bp, Zea mays
aataacacagttgagcgcgacgatgggatccctcgctaataacatcatggtcgtgggtgtcgtccttgcagcgctcgtcgccggcgggtcatgcgggcccccgaaggtgccgcccggtcccaacatcaccaccaactacaacggcaagtggctcaccgccagggccacctggtacggtcagcccaacggtgccggcgctcctgacaacggcggtgcgtgcgggatcaagaacgtgaacctgccaccctacagcggcatgacggcgtgcggcaacgtccccatcttcaaggacggcaagggctgccgctcatgctacgaggtgagatgcaaggaaaaacctgagtgctcgggcaatccagtcacggtgtacatcactgacatgaactacgagcctatcgctccctaacacttcgac

SEQ ID NO: 80105 - DNA, 405 bp, Zea mays
cacttcggccaacgcttcggaaaaaactgccccttggcaacaaaacccttgtaacatgggctacaccgaggcttattgaaaacaaggtgaggcaatgcttcgatccaaggctcggaaacaaataccctcaaaaggctgtagccaagatggctgctgtggccgccctctgcgtgcaatacgaaggtgaattccgtcccaacatgagcatcgtcgtcaaggctctgaaccccttgctgcacagccggtctggcaaccgccctactgcctcgtcggcctcccacgctgccgcagcagcatagcgatccggactgtgatttcccatcgctgcgacaactttgggttcacgaaaaacgaccgtcttgtggagcgttggtgttgctgtgtcgtgactgccaacgccttggc

SEQ ID NO: 80106 - DNA, 413 bp, Zea mays
gaacacaattgagcgcaacgatgggatccctcgctaatatcatcatggtcgtgggtgtcgtccttgcagcgctcgtcgccggcgggtcatgcgggcccccgaaggtgctgcccggtcccaacatcaccaccatctacaagggcaagtggctcaccgccagggccacctggtacggtcagcccaacggtgccggcgctcctgacaacagcggtgcgtgcgggatgaacaacgtgaacctgccaccctacagcggcatgacggcgtgcggcaacgtctccatcttcaacgacggcaaaggctgccggtcatgctacgaagtgagattcaacgaaaaaactgaattctcgggcaatccagtcacggtgtacatcactgacatgaactacgagcctatcgctccctaccacttcgac

SEQ ID NO: 80107 - DNA, 420 bp, Zea mays
agacgaaatctgcagtgaagaagcttgactccagcaaacagcctgatcaagaattccttgtgcaggtttcagctgtctcaagattgaagcatgagaatgttgtccaactcgtcggatactgcgccgaagggagcacccgcgtccttgcttatgagtatgcaactaggggatcattgcatgatatcctccatggtaaaaagggtgtcaaaggagcccagccagggccagtcctgtcatggatgcagcgagctaggattgccgtatgtgctgctcggggtctcgagttcctccacgagaaggccgatcctcgagtggtccaccgcgacatcaagtcaagcaacatactgctctttgaccatgatgttgcgaagatcggggacttcgacatctcaaaccaggcccctgacatggctgcgcgcc

SEQ ID NO: 80108 - DNA, 419 bp, Zea mays
agtgggataggctctcctatgtggcctatccgggatcctcgtcgtggcggtggtcgtcagtgtggtcggcaacgtcacccgctccggcagaaatgccggcgacaacttcacggtcccgatggaggcttcgcttgacacgtccggcaagtcagtcaagtccctgtgcgcgctcagcctatactaggagtcgtgcgataagagactgtcccaggccaccaatcggaccgacaaccgcaatgaggtgttccagatcctggacaaggtggaactgcgctcagtccagacggaggtcgagcagtcgacgtctatcagctaggccaaggctaccgactcgatgaccgacagcgcacgcgaggactgcaataagctcctgtaggatgctgccgacgacctgatgggcatgctcgagatggccggcg

SEQ ID NO: 80109 - DNA, 421 bp, Zea mays
  unsure (1)..(421): unsure at all n locations
agtgaagcggaaggagcatagggaggagggcaacgagggcgacgggttctacggcggcataaggaagctccgcggcaaggatgacatctccaagtggaggcagctgtggccaacagacgtcctgnagtaagcaggagccgcatcccttctcacaccgagattgatccatcgctcaaatgacacgcctttctttcatcatattgaccaaattcgtcgtctctgtcgcgctgttgtaaacgggttagcagaagaacacacagggtgacaacagatccttgttcggttatttctaatacatacggattggatgagattggaaaagattaagacgaagttaaacttgtttgcaattcagacacatccaatctcattcagttcacatggattgacagctaaccgatcaaccctgtagttggacaag

SEQ ID NO: 80110 - DNA, 394 bp, Zea mays
accgagcaccatgcgaggaaataacatgccgcggcacacgtcgccgttcctttttgccttgttggcgtcggcggcgaccctgctcagcgtcggcgacgcgttggtcgtcgacggcctgcaggtggggttctatggcaagacgtgcccggcggccgaaggcgtcatcagcgacatcgtcaacaacgaaatcgctatggaccggggcatctcccctggcctcattcgcctcttctttcacgactgcttcatcacgggttgcgacgcttccattctcctggacgagtcgcccgccggcgacgtcccagagaaggagtcgtccgccaacggcttcaccctggtcgggctcagaaccatcgacatcgccaagtccaccgtacagggcatgtgccccggc

SEQ ID NO: 80111 - DNA, 373 bp, Zea mays
gcatccacgccggcaacttcgcgcaaatgctccacatcaccgtcaaagactggcccgtccaagaagcgctccgctacgcaaagctcccgctcaagttgcacggggatgcggcggaaggaccggccggacctcgcaaccgtcgtactgccggagctcaaccggttaaggaacctcggccacgcgtacgaggcacgcatgagcgccgtcgggaccaacagtggaagtggcgaaagtaatgaccaggtcagcgggagctcgccgacggcgggtggttcatggagaacggcggagagctagcgggtggtacggcgtggccatgagtcagttagagagcgagcttgtgatggggagagttcctttgttggacggagag

SEQ ID NO: 80112 - DNA, 407 bp, Zea mays
cttaattgcgccactgctcgttatcctcctcttgcattgcattgcaggtcgtagttgagcagcagcaaccactgcacaggatgtcgtggcagacgtacgtcgatgagcacctcatgtgcgagatcgagggccaccacctgagctctgccgccatagtcggccacgacggcgccgtttgggcccagagcaccgcattcccacagttcaagccagaggagatgaccaacatcattaaggacttcgacgagcctgggtttctggccccgatcggcctcttccttggccccaccaagtacatggtcatccaaggcgagcccggcgctgtcatccgcgggaagaagggatctggaggcataactgtgaagaagaccggacaggcgctggtgatcggcatctacgacgagccc

SEQ ID NO: 80113 - DNA, 411 bp, Zea mays
aggaggaagaggaggttctggagaaagaagatgaaggccaggaaggagatcggcgggctggtggacctcgtcaacgatatttcggccaagtcagaggagagcctaagggttagcaaccaaaacatgcccagcagggcgctgacgttcagtcagctgagcgccgcaacggacgggttcagttcgcagaacctgctcggagaaggcggctttggacgggtgtacaaagggctcctcgaggacaccggagaggttatcgccgtgaagcagctgaacagggacgggctccagggcaacggcgagttcctcgtcgaggtgctgatgctcagcctcctgcaccacccgaacctcgtcaagctgctgggctacagcaccgactccaaccagcggatcctggtctacgagtacatgccc

SEQ ID NO: 80114 - DNA, 409 bp, Zea mays
cccacgcgtccggaataacacaggtgaccgcaacaatgggatcccccgctaataacatcatggccttgggcgccttccttgcggcgctcgtcgccggcgggtcttgcgggcccccaaaggtgccacccggccacaacatcaccaccagctacaacggcaagtggctcaccgctaaggccacctggtacggtcagcccaacggtgccggcgctcctgacaacggcggtgcgtgcgggatcaagaacgtgaacctgccaccctacagcggcatgacggcgtgcggcaacgtccccatcttcaaggacggcaagggctgcggctcatgctacgaagtgagatgcaaggaaaaacctgagtgctcgggcaatccagtcacggtgtacatcactgacatgaactacgagcctat

SEQ ID NO: 80115 - DNA, 387 bp, Zea mays
aggacatctcagcatcagcttctgttgcatcagggaacaaattctgcaagggtggtgcctgtgatttctctgattccagtaactcctcgaaagatgccaaggagagatccacgtccatgaggaagcttataatcgcagtgatcctttgcatcatattcatgacggtggaagtggtcgggggcatcaaagcaaacagtcttgccatcttaactgatgcggcgcaccttctttctgatgtggcagcatttgccatatcgttattctctctctgggctgctggatgggaagcaacaccgcagcagtcatatgggttcttccggattgagattcttggtgccttggtctccattcagctcatatggctacttgctggcatactggtatatg

SEQ ID NO: 80116 - DNA, 394 bp, Zea mays
cgcacaagtccaggacgtctcagcatcatcttctgttgcatcagggaacaaattctgcaagggtggtgcctgtgatttctctgagtccagtaactcctcgagagatgccaaggagagatccacgtccatgaggaagcttataatcgcagtgatgctttgcatcatattcatgacggtggaagtggtcgggggcatcaaagcaaacagtcttgccatcttaactgatgcggcgcaccttctttctgatgtggcagcatttgccatatcgttattctctctctgggctgctggatgggaagcaacaccgcagcagtcatatgggttcttccggattgagattcttggtgccttggtctccattcaggtcagatggccacttgctggcatactggta

SEQ ID NO: 80117 - DNA, 393 bp, Zea mays
acccacgcgtccgcccacgcgtccgaaactctttgatcttctatctgacagaaggcaactattgatgagggaagatggcaagaaacaagtttgcattgttggtctacaggaatttgaggtttctgatgttcagattgtcaaggaatatattgaaagagggaatgcagccaggagcacagggtcaacaggggccaatgaggaatcatcaaggtcacacgctattctgcaactggctgtgaagaagcatatcatagtaaaagataccaggagacagagagatcgtgatgctaatgaagctaaaaatacaaaggctgtggggaaaatatcatttattgatcttgctggaagtgagcgtggtgctgatactactgataatgatagacagacaaagat

SEQ ID NO: 80118 - DNA, 413 bp, Zea mays
  unsure (1)..(413): unsure at all n locations
cacatcacttgcctcctctttcgcgctgtccggagaggaggggcaggaggaggccgcaccaaatctatctggggatcggagcgcgggcgacaagatgccacgcggcggcaagcccgcggcttcgtcgaagccgaacccgttcgactcggactcggactcggagtccagcaataagccggcgaacaagtccggggcgtcgtcgtaccaggcccccgccgacgccaagaagcggtacaaggacgggttccgggactcgggcgggctggagaaccagtcggtgcaggagctggagcactacgcggcgtacaaggccgaggagacgacggacgcgctcgccggctgcctgcgcatcgccgaggacatcaggcangacgccagcgacacgctgatcacgctgcacaagcagggggagc

SEQ ID NO: 80119 - DNA, 373 bp, Zea mays
aggccccggaaacaagcgcacgccgcatccatccgcgccctacgctccaagatcgaggccgagctcgcccgcatctgcgacggcatcctcgcgctcctcgactcccacctcgtcccatccgccggcggcgccgagtccaaggtcttctacctcaagatgaagggtgactaccacaggtaccttgctgagttcaagtcaggtgcagagaggaaggatgctgcggagagcaccatgaatgcctacaaagctgctcaggatattgctcttgctgatctggctccaacccaccccatcaggctcgggcttgctctcaacttctcagtgttctactacgagatcctcaactcccctgaccgtgcttgcaaccttgcaa

SEQ ID NO: 80120 - DNA, 424 bp, Zea mays
acgacggcgccgtttgggcccagagcaccgcattcccacagttcaagacagaggagatgaccaacatcatgaaggacttcgacgagcccgggttcctggccccgaccggcctcttcctcggccccaccaagtacatggtcatccaaggcgagcccggcgctgtcatccgcgggaagaagggatctggaggcataactgtgaagaagacagggcaagcgatggtggtcggcatctacgacgagcccatgacccccggccagtgcaacatggtggtcgagaggctcggcgactacctcgtagagcaaggcctgtgaatggattcatttaacctcgctcgctcgcttgtccatggttcgagcatccagcagcaacgataccaacatcagcattatttaattggtagcctcctctagctacgcacgca

SEQ ID NO: 80121 - DNA, 420 bp, Zea mays
gcgagcgagcgttcctctccgtccgcttccgccgtttgcccgtcgatcagttgttggctgccggccgggtactaccgcctgcacgagcagcggctagccacagcccacagacagacgacgtcaggtcttggcaggtgtgcaagcagacagagctcgctcggtcgccatgtctttcaccggcacgcaggacaagtgcaaagcctgcgacaagacggtccacttcatcgacctgctcaccgccgacggcgtctcgtaccacaagacctgcttcaaatgcagccactgcaagggcgtcctctcgattagcagctactcttccatggacggcgttctgtactgcaagacgcactttgaacagctcttcaaggaaacggggaacttctccaggaaattccaaggtggaggtggagcatcttcaaa

SEQ ID NO: 80122 - DNA, 419 bp, Zea mays
  unsure (1)..(419): unsure at all n locations
acgcgagatgtaccacggcaggcccgacggcagccccgaggaggtggccaggttccaggagggcgtccggcagggcgccttcggcctgctcctcaactccgtcgtcctcggagccagctccttcctcatcgagcccatgtgccgcaagctcaccgccaaggtcgtgtgggtcatgagcagcttcctcgtctgcgtcgccatggccttggtcaccgtcctcagctcctggtcgctcggcgacatcgggggcaacgtgcaggacgccgccgccgtggataagggcctcaagaccaccgcgctcgccatcttcgtcttcctcggcttcncattcgcggtcctatgcagcgttccgtccgccgtgacggcacagctggcggcggccaagggcggccggcaagggctgtgcacgggggtcctca

SEQ ID NO: 80123 - DNA, 403 bp, Zea mays
acccacgcgtccgcgacatttcgaataacacagttgagcgcgacgatgggatccctcgctaataacatcatggtcgtgggtgtcgtccttgcagcgctcgtcgccggcgggtcatgcgggcccccgaaggtgccgcccggtcccaacatcaccaccaactacaacggcaagtggctcaccgccagggccacctggtacggtcagcccaacggtgccggcgctcctgacaacggcggtgcgtgcgggatcaagaacgtgaacctgccaccctacagcggcatgacggcgtgcggcaacgtccccatcttcaaggacggcaagggctgcggctcatgctacgaggtgagatgcaaggaaaaacctgagtgctcgggcaatccagtcacggtgtacatcactgaca

SEQ ID NO: 80124 - DNA, 408 bp, Zea mays
acccacgcgtccgccgcctcgccgccgcgctcttccgggccgcgccaaccatgttgtacatcacgccgaaccttgtgtcctgcaacatcctgctcaagggccttgttggcatcggtgacctcgattctgcgctgaaggtgctcgacgaaatgactggatgggggatcgtcccggatgtcgtcacttacacgacggttctcactgcctactgtgccaaaggggatctcgagggtgcacagcagctctttgacgatattattgccagtgggcgtaggccagatgctactatgtacacagtgctcatagatgggtattgccatcgtaggaagttgcaagatgcagcaaggatcatggatgagatgggagctgctggggtgcagccaaatgatgttacatactctgtggtga

SEQ ID NO: 80125 - DNA, 356 bp, Zea mays
aaaagaagtcgcctaattctttcgatcgaattaggcgccttcttcgtcccacgctccgtctttatttgtaatctgaagcttacaggaacatttgagtggatcatggacggattggtaggcctcttgaaagtccgggtggtgaggggcatcaaccttgcctaccgcgacgcaagaggcagcgatccgtatgtcgtcctacgacttggcaagaagaaacttaagacgagcgtgaagaagagatctgtgaacccaatctggcacgaggagctaactctgaccgtcaaagatcccagcctacctctgaagctggaggtgttcgacaaggacacgttcagcagggacgaaccgatggggga

SEQ ID NO: 80126 - DNA, 368 bp, Zea mays
acccacacgtccgcacgggccggctggtggcgctcaagaaggtgcggttcgacagcgtggagcccgagagcgtgcggttcatggcgcgggagatcctcatcctccgccgcctccgtggccaccccaacgttgtcggcctcgagggcatcatcacctcccgctcctctccctccatctacctcgtcttcgagtacctcgagcacgacctggccggcctcagctcctcccccgacatcaccttcaccgagccccagatcaagtgctacatgcgacagctgctggaggggctggcgcactgccatgcgcgcggggtgatgcaccgggacatcaagtgcgccaaactgctgggtaacaacagcggcgagctc

SEQ ID NO: 80127 - DNA, 410 bp, Zea mays
acgacaaaatggcgtgcacaaacaatgcgatgagagccttgttcctcctggtcctcttctgcatcgtgcatggtgagaatgaagagtcaaagggcatcgatgcgaaagcgtccgggcctggtgggtccttcgacatcaccaagttgggcgcctccggcaatggcaagacagacagcacgaacgctgtgcaggaggcatgggcatcggtgtgcggcggcactgggaagcagacaatcctcatacccaaaggtgacttccttgtcggacaactcaacttcacaggcccttgcaagggcgacgtgaccatccaggtggatggcaatctgctggcgaccacggacctaagccagtacaacgaccatggtaattggatcgacattctacgtgtggataacctgctcatcaccggc

SEQ ID NO: 80128 - DNA, 351 bp, Zea mays
  unsure (1)..(351): unsure at all n locations
agctaacttgtaatctgcaggatctaagcaaagacttgatttagttatggacggattggtaggcctcttgaaagttcgcgtggtccggggtatcaaccttgcctaccgcgacgcaagaggcagcgatccgtatgtcgtcctacggcttggcaagaagaaactgaagacaagcgtgaagaagagatccgtgaaccccatatggcaagaggagctaactctgaccgtcacagatcccagccaaccactgaagctggaggtgttcgacaaggacaccttcagcagagacgacnccatgggagacgcngacgtggacgtggcgccactgatggaggcggtgagcatgaacccgcg

SEQ ID NO: 80129 - DNA, 369 bp, Zea mays
taaacccctcaaattccaagaagcatgttaagacgccctcaatggccacaatggcaagggattaagttaaagtggaaaattgccaaacaaaattttaacaagaagggggaaatatacaaaagaaaatgccaaagccatcaatggacaaaatttgaacctaatggccctccgtcaacctcaaggaataatgcaacctgaattgaagccagagaattttctcttcacaacaagagatgaaagcgctcctatgaagttgattgactttggtctgtcagattttattacaccagatgaaaggctcaatgatattgttggaactgcttaatatgttgctccagaggttctacacagatcatacagtatggaagc

SEQ ID NO: 80130 - DNA, 417 bp, Zea mays
aaagaagtcgcctaattctttcgatcgaattaggcgccttcttcgtcccacgctccgtctttatttgtaatctgaagcttacaggaacatttgagtggatcatggacggattggtaggcctcttgaaagtccgggtggtgaggggcatcaaccttgcctaccgcgacgcaagaggcagcgatccgtatgtcgtcctacgacttggcaagaagaaacttaagacgagcgtgaagaagagatctgtgaaccccatctggcacgaggagctaactctgaccgtcacagatcccagcctagctctgaagctggaggtgttcgacaaggacacgttcagcagggacgacccgatgggggacgcggaaatcgacttggcgccgctggtggaggcggcgaacgcaagcccggaggcgagcctga

SEQ ID NO: 80131 - DNA, 423 bp, Zea mays
  unsure (1)..(423): unsure at all n locations
ctccttcgtcggcacggaggagtacgtggcgccagagatggtgcgcggcgagggccacggcttcgccgtcgactggtgggccgtcggcgtgctcgcctacgagatggcgttcgggcggacgccgttcaagggccagaaccgcaaggagacgttccggaacgtgctgcagcaggagctcgagttcccgggggacacccggtggcggacgccggagctcgcggatctcatctcgggcctgctggagcgggacccgacgaggaggctcgggtacgccggcggcgccgacgaggtccgggcccacccgttcttcgccggcgtcgcgtgggacatgctcacggaggtgtccaggccgccttacatcccgccgccggccgacgaaggactcncggacgtcgaagggttcgacgtgaggggccacttcaa

SEQ ID NO: 80132 - DNA, 330 bp, Zea mays
atttcaaatgcacagatcaatctgtgggagtatccaaccaacttcaacatcttgcatctattattcaggttcttgacccaaagctacatgaccacctacaaactcttggcggaagtgactacctttttgcgttccgaatgttcatggtgctatttaggcgtgaagtatcatttggagactccttatacctctgggagatgatgtgggctctagaatacgaccctgacattttcttcgcaacatgcgaagaacaaggtgcagtacataaaaataaagtttctaaatccaaactgaaaggactgcgccattttggcaagtgggataaggaca

SEQ ID NO: 80133 - DNA, 316 bp, Zea mays
cggccccggaacctggcaacgggccggctggtggcgctcaaaaaggtgcggttcgacaccgtggaccccgagagcgtgcggttcatggcgcgggagatcctcatcctccgccgcctccgtggccaccccaacgttgtcggcctcgagggcatcatcacctcccgctcctctccctccatctacctcgtcttcgagtacctcgagcacgacctggccggcctcagctcctcccccgacatcaccttcaccgagccccagatcaagtgctacatgcgacagctgctggaagggctggcgcactgccatgccccccggg

SEQ ID NO: 80134 - DNA, 418 bp, Zea mays
gtcttccatggcctcctcatagaataagctctatctcaccgcaacaactcctcattacaatccttcaagagagcagcactacactacactacattagagagaggtcgagcgcccctcctccgatccgccggcccgccgagagctagctgctgatcggtcgaggagagtcatggcgacgtcgacgatgcgcgttgccgccggcgtgctgctggtcgtgtcggcgctggcgaccttggcccgggccgaggacccctacctgttcttcgagtggaaggtgacgtacgggaccaggtccctgctgggagtgccccagaaggtcatcctcatcaacggcgagttccctggccccaggatcaactgctcctccaacaacaacatcgtcgtcaacgtcttcaaccagctcgaccatccgctcctt

SEQ ID NO: 80135 - DNA, 423 bp, Zea mays
acccacgcgtccgccgggccatgcgcggcagggacagccagcagggaaggagccattcaggttgcctaccgtcagctgcctgacattaggaagaccgaggtggtagaacgtacatgaccccggcgtcgtcagggaagtatatggattattacagggggcttcggcttcggcataaaggtcttctcttatggcaaagacatacaatgtgaagatgtaacccgaaggtgataagaatggtcaccgaaggtgtagccgaaagagcttcggcttaatatgatgacgaagaccaaatatgatgctgaccgaaagggggaagaagactatttagtccttaatgattcatgttatgataataaatagatgtcagggacataaatgtacttttacccgggttgcatctcgtgtctataaatagatgaacag

SEQ ID NO: 80136 - DNA, 198 bp, Zea mays
agacaacatccatgttcctcctgggcgtcgtctgaatcatgcatgacgacaaggaagattcatcgggcatcaatgcgacagcgtccgagtctgctgggtcgttcaagatcaccacattgggcacctccggaaatagcaagacagagagcactaaagctgtgcaagaggcatgggcatcagcgtacggctgaactggga

SEQ ID NO: 80137 - DNA, 411 bp, Zea mays
aaagaagtcgtctaattcttggatcgaattagacgacttcttcgtccctctcttcattagcacgctaacttgtaatctgcaggatctaagcaaagacttgatttagttatggacggattggtaggcctcttgaaagttcgcgtggtccggggtatcaaccttgcctaccgcgacgcaagaggcagcgatccaaactgaagacaagcgtgaagaagagatccgtgaaccccatatggcaagaggagctaactctgaccgtcacagatcccagccaaccactgaagctggaggtgttcgacaaggacaccttcagcagagacgaccccatgggagacgcggaggtggacgtggcgccactgatggaggcggtgagcatgaacccgcgggaggagagtctgaggaacggcgcca

SEQ ID NO: 80138 - DNA, 99 bp, Zea mays
cttcaaccggaacccaggacaattgcacggcttccaacaagacggtcaacttcatcgacctcctcacggccgacggcgccatctaccataagacatgct

SEQ ID NO: 80139 - DNA, 323 bp, Zea mays
agttctagatcgcgagcggatgggcgtggtccatcaaccagtgcaggtccttccgctggaacctgacggcgagcgcggcgcggcccaacccgcaggggtcgtaccactacggccagatcaacatcacccgcaccatcaagctcgccatgggccgcggcaaggtggacggcaaggagcggttcggcttcaacggcgtgtcgcacgtcgaccccgagacccccgtcaagctcgccgagtacttcaacaccaccgacggggtgttccagtacgacatcatcggcgacgttccgcccttcaagttcggccccaacaagattggcccc

SEQ ID NO: 80140 - DNA, 410 bp, Zea mays
  unsure (1)..(410): unsure at all n locations
aatcttctccgatccatcaacaatcgccgagagcgatcgagagataaataaagatgaagaaagtggcatcatcgtcagccgttctcttcgtgctagccctgacgctagtttgtgccccgctgatagcagaggcaaagaagaagagagtcgccgccgccgccgccgaggagaagaaggtgcaggacaacttctgctcgacgctgtgcgagggcaggaaggggatggacctggtggtgtgcaaggagtcctgcgacctctcacagcgctccaacctggtgctgtacggccggattcagtgcaatggcaagtgcnacgagcagaagggcatcacggcgccgcatatgaaggtgtgccaagaggcgtgcgacaaggactacgtggtcaatgcggctgaggtcaccaaggcctgc

SEQ ID NO: 80141 - DNA, 279 bp, Zea mays
gagatagatacgcaggaccgccggcgactatcgacgagggaggaaccagatacccggcggcggtgatcgatggctccgcgcagctcatcggcggcgacgtgcctgtgcctcgctctcgccgcggccacgctggcgctggtccacggcgcgcaaggaggaggaccatcggcatcggcggcggtcctggacaaggtcacggacgagaccttcgtggacatccagatcgactgcaagcctgcatgccggatcgtgctgggactgtttggggacaccgttcct

SEQ ID NO: 80142 - DNA, 396 bp, Zea mays
  unsure (1)..(396): unsure at all n locations
aatttgtcaaagagtggaagaagtatcttgaggaggaggcgaagatcatgaaagatgttccagggtggaaggttggcgagagtgtgtacaattccgggaaatggatgcccccggctaccggtgagctccgccctgaggtgtggtaagggcctgttgtaggcattgagaatgcaatcatgtcatgagggcatgaataaggctttcagacatgggcatccttctttgttcactaaggatcagctgttcanatacctgtatctattttgctcttatgaaatctggctggttaataatatgaagccgacgctttgcctcatctatgctcgtgcattgatgtaacgtgtccttgtctgatattaagaaaatatggaatataagaaagaaaaaaacgcctgc

SEQ ID NO: 80143 - DNA, 404 bp, Zea mays
  unsure (1)..(404): unsure at all n locations
acccacgcgtccgcccacgcgtccggaagctgcggaaggtcctagcctgcacagatatagaccacgagcaagcatcctacacttcatatgacggaattctgttcaaagctgatgcaccacaccggcaacgagctcttgcagcggacgcaataacctgccggaaattcgccgagcgggcttacaagtacagaccactcaaagttgttgagtttgatcggccctacccacagtgcatagcatacttggatctcaagcgcgacgagtgctctcgactctttcctgcagggcggatatactcgcaagccttccaccttgcagggcagggtttcttcctctcagctcactgtaacatggagcagcaaagcgcgttctactgcttcgggctcttcctgnggatgcaagag

SEQ ID NO: 80144 - DNA, 421 bp, Zea mays
accacgcgtccgcgacaagcagggcttcaacgtcgaggagatggtcgcgatgctgggcggcgggcacagcatcggcgtctgcaggtgcttcttcatcgagaccgacgcggcgcccatcgaccccaagtacaagaagacgatcagcgacgcgtgcgacggcaaggactcgggctccgtccccatggactccacctcgcccaacgacctggacgggagctacttcggcctggtgctggagaagaagatccgctcaccatcgaccgcctgatggggatggacaagaagacggagcccatagtgaaggccatgtcggacaagaccaccgacttcgtcccgatcttcgccaaggccatggagaagctcagcgtgctcaaggtgctcacggggaacggaaggcgagatcaggaagacgtgctccgag

SEQ ID NO: 80145 - DNA, 379 bp, Zea mays
tcgctccgacaattaataaggacaggtcccgcccttttcctccgacatccacaaggggggaggggaaaacacgtacattcacccggcggcaataatggcctcggttccggctccggcgacgacgaccgccgccgtcatcctatgcctatgcgtcgtcctctcctgtgccgcggctgacgacccgaacctccccgactacgtcatccaaggccgcgtgtactgcgacacctgccgcgccgggttcgtgaccaacgtcaccgagtacatcgcgggcgccaaggtgaagctggagtgcaagcacttcggcaccggcaagctccagcgcgccatcgacggggtcaccgacgcgaccggcacctacacgatcgagctcaaggac

SEQ ID NO: 80146 - DNA, 428 bp, Zea mays
atcacgacaagatggcgtgcacaaacaatgcgatgagagccttgttcctcctggtcctcttctgcatcgtgcatggtgagaaggaagagtcaaagggcatcgatgcgaaagcgtccgggcctggtgggtccttcgacatcaccaagttgggcgcctccggcaatggcaagacagacagcacgaaggctgtgcaggaggcatgggcatcggcgtgcggcggcactgggaagcagacaatcctcatacccaagggcgacttccttgtcggacaactcaactttacaggcccttgcaagggcgacgtgaccatccaagtggatggcaatctgctggcgaccacggacctaagccagtacaaggaccatggtaattggatcgagattctacgcgtggataacctgggcatcaccggcaagggaaaccttgac

SEQ ID NO: 80147 - DNA, 430 bp, Zea mays
actgccatcctctccaacacgaagatggcgttcatcagcaatgtcgcagtgtacgcggcggccgtggccgcgctgctgctggtcgcaccggtgtcgcctgccgcgcgcgcggcggcggtggcggtggcgggaggggcgccgtccgtgccggcgggtccgctggacatcgcgcagctgggcgccaaaggcgacggcaagtcggacagcaccccgatgatcctcaaggcgtgcgaagacgcgtgcgacgcgacgggggtacacaatatcgtcatcccgccgggcaactacctgacgggcgggctggagctgaagggcccctgcaagtcctccatcatcatccgtctccacggcaacctgctcggcaccggcgacctcagcgcgtaccaaacgaactggatcgagatcgacatcgtccagatcctgtccatca

SEQ ID NO: 80148 - DNA, 420 bp, Zea mays
acgcacaactgcctgtaccgcgccgtggacatctacctcaagacacacccggggctggacgagatcgagcgggagaaggtgtgcagcgtcatggacccgctcaggctgtcgtaccaggcgcggatgcacgcgtcgcagaacaagcggctgccgctgcaggccgtgctcagcgtgctctactacgaccagctgaagatccgtagcgcggacggcagcggcggcacggaggaagggtgggagacacagtcggccgccgggaaggcccgtgcgcaggcgcgggcggacgtgtccctggcaagggagaacgaggcgctgccgttggagctggcgcggatgcgagcgtacgtgtcagggatgcagcagagcagcaaggggagcgggtccaggccatcgtcgtcatcgctggtaccaggcccagcg

SEQ ID NO: 80149 - DNA, 426 bp, Zea mays
agccatggtccccatccgtgtccacaccgtcctcatctccacccagcacgacgagacagtgaccaatgatgagatcgctgctgacctgaaggagcatgtcatcaagcctgtcatccctgagcagtaccttgacgagaagaccatcttccaccttaacccatctggccgctttgtcattggtggacctcacggcgatgctggcctcactggccgcaagatcatcattgacacctacggtggctggggagcccatggtggtggcgctttctccggcaaggacccaaccaaggttgaccgcagcggagcctatgtcgcaaggcaggctgccaagagcatcgtcgccagcggccttgctcgccgcgccatcgtccaggtgtcttacgccatcggcgtgcccgagcctctctccgtgttcgtcgacacgta

SEQ ID NO: 80150 - DNA, 440 bp, Zea mays
gacccaggcgtccgaaagaagtcacctaattctttcgatcgaattaggcgccttcttcgtcccacgctccgtctttatttgtaatctgaagcttacaggaacatttgagtggatcatggacggattggtaggcctcttgaaagtccgggtggtgaggggcatcaaccttgcctaccgcgacgcaagaggcagcgatccgtatgtcgtcctacgacttggcaagaagaaacttaagacgagcgtgaagaagagatctgtgaaccccatctggcacgaggagctaactctgaccgtcacagatcccagcctagctctgaagctggaggtgttcgacaaggacacgttcagcagggacgacccgatgggggacgcggagatcgacgtggcgccgctggtggaggcggcgaacgcgagcccggaagcgagcctgaggaacggcg

SEQ ID NO: 80151 - DNA, 340 bp, Zea mays
actaactttctggcctgcaactttcgaaggcgttccaagctccgggatggcgcccgtgtacatggccttcctccgcttcatgggggacgagaacgaggccaagaactacagctacagcctcgaggtcggcgccaacgggaggaagatggtgtgggagggcaccccaaggagcgtccgcgacagccaccgcaaggtgagggacagccacgacggcctcatcatccagaggaacatggcgctcttcttctccggcggggaccggaaggagctcaagctcaggatcaccggacggatctggaaagagcagcagacaccagacggcgcatgtactccaaatctg

SEQ ID NO: 80152 - DNA, 395 bp, Zea mays
tatcaacgcttctcctgctggttactccgcgcgccttctctttctctcccggacgtcgatcgtgttcttcagcacgggctagctagctccctccctcccagccatggcgacgccggacaacaaggggcacgggcatccgctgcccaagtttggggagtgggacgtgaagaatccggccacgtccgagggcttcaccgtcatattccagaaggcccgcgacgacaagaagaccaccaccggccctggggctgggaacgcgcgcgcaggcattccgccggccttcaggaacggcggcggcgacggcgggtacaggcccgacttcggcgacggcaaccagtacacgccgcccaaacggaacaagtgggccttctgtggctgctgaatcgaagctcgct

SEQ ID NO: 80153 - DNA, 422 bp, Zea mays
cccacgcgtccgcccacgcgtccgccgcgttcctcgcggtgccggcctcggcgaagtccggggagctgagcgcgatggggttgctggcggcgaagggcggcagcggcgcgggcccgcagaagtgctcgggcgcggtgggcgagtgcgacgtggacgaggcggaggagctcgggctgagcggcggcggcctcggctccgacgacgcggtgcggcggacgctggcgcagcggaagccgaccaaccggtacatcagctacgcggcgctgcgcgcggaccaggtgccgtgcaacaagcgcggccggtcctactacagcaactgcgaggcgcagaaggccgccaacccctaccgccgcggctgctccgccatcacgcgctgcgcccgcaacatgaactgagcccagcgctagctgctgccggggcgc

SEQ ID NO: 80154 - DNA, 402 bp, Zea mays
acgtggatggcggtgccacaacctctcctgctgtcgctgctggtcgccgtgctagcggtggccgccgatgtcgccaacgccggccaagccaagcccccaaagccttgccggccccttggaaaagaacaacaacggcaagttcacggccgggccgtggaaacccgcccacgcaaccttctacggcgggcgtgacgggtccggcaccacggcgggcgcgtgcgggtacaaggacacgcgcacgcaggggtacggcgtgcagacggtggccgtgagcactgtgctgttcggtgacggcgcggcctgcggagggtgctacgacgtgcggtgcgtggacagccctaccgggtgcaagcccgacgcggcagcgctggtggtgaccgtgaccgacctgtgcccgcccaa

SEQ ID NO: 80155 - DNA, 398 bp, Zea mays
agtgctacggttccggccagggggccacgccggggccgggcgagcgccggcagccgagctggacgaggcgccgcgggagggctgctgggcgcagttgcctctcgatcttctgcgtatgattaataccatgggagtgatatacagatggttctaccaatcatggttggaggttacacagacttcttttgttctatgctccatacaaggaattgtggattcatcttccgagggtcgtagactccgatcaatccaaattgatatgtgttttcttggtcaatcatggttggattcatcttccgaggatctagactccactaagactgtcctttgacaagctggacggtgttgacgttgcatggagtcagtcaaggatcaacgactctgtcatggtttgctca

SEQ ID NO: 80156 - DNA, 370 bp, Zea mays
agagaactgccagaagagcaagatcttgttcatctcctggtccccggacacctcgagggtcaggagcaagatgctgtacgcgagctccaaggaccggttcaagagggagctggagggcatccagctggagctgcaggccaccgaccccagcgagatgagcatggacattgtcagggcgcgagctctctgaagaggaagacgcgcatccgctcgcgcgatcgccatgcatgccccggaacgacagaagctgtttgtcttgcatcgaccggcggcctctgcatgtacccgtgtgccgttttttgcaccgccggtgccagtgttctcttactccatgtaaactactctagacagtgcccggtgagtacagctg

SEQ ID NO: 80157 - DNA, 411 bp, Zea mays
  unsure (1)..(411): unsure at all n locations
accacgcgaccgcgtacgtggacgagcacctgatgtgcgagatcgagggccaccacctcacgtcggcggccatcgtcggccacgacggcgccacctgggctcagagcaccgcattccccgagttcaagcccgaggagatggctgccatcatgaaggatttcgacgagccggggcacctcgccccgaccggcctgatactgggaggcaccaagtacatggtcatccaaggcgaacctggagctgtcatccgtggcaagaagggatccgggggcatcactgtgaagaaaacagggcagtcactcatcattggcatctacgacgagccgatgactcccgggcagtgcaacctgntggtgggaaggctgggcgactacctgctccaacaaggggatgttatgacaacccctcccc

SEQ ID NO: 80158 - DNA, 420 bp, Zea mays
acgtacacccgctcttccaagttaggaggggagcacccatcagccaagagctatccatacgcacagcgatgcaccagcacgagatactagccatcatgcgcctgtcgtccctcctcctcgtcgtggccgccctctcggcgcgcgccgcggcgcagcaggtgccgccggtgggcggcagcgctctgaagccggactactacagccagtcgtgcccgcgcgcggagcggatcatcgcggaggtgatgcagacgaagcagatggcgaacccgacgacggccgcgggcatgctgcgcgtcttcttccacgactgcttcgtcaccgggtgcgacgcgtcggtgctgatcgcgtccacccagttccagaagtcggagcacgacgcggagatcaaccactcgctccccggggacgccttcgacgccg

SEQ ID NO: 80159 - DNA, 421 bp, Zea mays
agattcgagtaacacagttgagcacgacgatgggatccctcgctaataacatcatggtcgtgggcgccgtccttgcggcgcttgtcgtcggcgggtcgtgcgggcccccgaaggtgccgcccggccccaacatcaccaccaactacaacggcaagtggctcaccgccagggccacctggtacggtcagcccaacggtgccggcgctcctgacaacggcggtgcgtgcgggatcaagaacgtgaacctgccaccctacagcggcatgacggcgtgcggcaacgtccccatcttcaaggacggcaagggctgtggctcatgctacgaggtgagatgcaaggaaaaacctgagtgctcgggcaatccagtcacggtgttcatcacagacatgaactacgagcctatcgctcgctaacacttcga

SEQ ID NO: 80160 - DNA, 378 bp, Zea mays
aaaaagatcatgcaacagatggtgacaagtacctcgagtgggcagctcaaatggccctcagcacacaaacaggagttccatggataatgtgcaagcagtcttcagctcctggtgaagtgatccctacatgcaatggaaggcattgtggagacacatggacacttcgcgacaaaaacaagcctatgctttggactgagaattggactcaacaattcagagcatatggcgatcaagtagctatgcgttcagctgaggacattgcatatgctgtgttacgattttttgcaaagggtgggtcattggttaactactacatgtaccacggaggaacaaattttggaaggactggcgcttcttatgtgctgactggatactatg

SEQ ID NO: 80161 - DNA, 422 bp, Zea mays
  unsure (1)..(422): unsure at all n locations
gcatccggtccgcaagggccccgccggcgaactgcgctaaccgtcctaaccggagagcaacgggacctggaaattcccaagcatcggcgccttccagtgcaacgacaggtacatgcgtagccgcctgcaagcggcagcggaggcngccggcaagcctgagtggggccacggtgggccgaccgacgctggcggctacaacaactggccggaggacaccgtcttcttccgcggcgacaacggtgggtggagcaccgagtacggcgacttcttcctgtcgtggtactcgcaagatgctgctggagcacggcgacctcatcctgtcgggcgccacgtccgtgttcggcgccgcgcccgtggaggtctccgtgaaggtggccggcatccactggcactacggcagccggtcccacgccccggagctc

SEQ ID NO: 80162 - DNA, 410 bp, Zea mays
cgaccacgagttcgccctgcgccggcgtcgcgtcaccgcgttcctgcggctcctgcacgagctccgggaccgccagctgcagcggctggaggctgctgccggggtcgccctcgaaggcgaccagctgacccctttcggtcggagcctcttcatcggcgcagctggcggcggcgatcatggcgtggcgctgggcgactacttcctcggccccagcctcgacgctctggtgcagcagctcgccgagaacgacgcgggacggcacgggacgccgccggccaagaaggaggccgtggaggcaatgccgaccgtggaaatcgccggtggcaatggcaacgatgacgacacggccagctgccccgtctgcctggaggactacgcggccggcgagcgcgctcgggagattccctgca

SEQ ID NO: 80163 - DNA, 389 bp, Zea mays
  unsure (1)..(389): unsure at all n locations
gcgctcccacagcctcacccctgcgcccccgccgattcgcgtcgccctttgttggaaggaacgatggagcagaccttcatcatgatcaagcccgacggcgtccagcggggcctgatcggggacatcatcagtcgcttcgagaggaaagggttctaccgcaaggggatgaagtgcatgaacgtgtagaggtccttcgcgcaggagcactacgcgggggggggcggcaacgcgtgggttggcnngtgtggtngagcgggtgattgccggccccgtgggggctggggtgtgggaggggaaggacgtcgtgttgactggccgcaggatcattggggccaccaggccttgggaggcagcccccggtaccattcgtggggactacgccgtggaag

SEQ ID NO: 80164 - DNA, 423 bp, Zea mays
acccctctccatctctgcgtgatggacgcccgcctcgtcttcctcctcctcctcgccgccgcggcgtccgcgccgctggcctccgcgcagctctcggcggatttctacaagacgtcgtgccccgacgccgagaagatcatcttcgacgtcgtccagaagcggttcaaagctgaccccggcaccgccgccggcctcctccgcctcgtcttccacgactgcttcgcaaatggctgcgacgcgtccatcctgatcgacccgatgtcgaaccaggcctccgagaaggaggccggccccaacgtctccgtgaagggctacgacgtgatcgaggagatcaagacggagctggagaagaagtgcccgaacgtggtgtcgtgcgcggacatcatctcggtgagcgcccgcgactcggtgaagctgacgggc

SEQ ID NO: 80165 - DNA, 410 bp, Zea mays
gtccaggcgtcggacgcggcaggccgcacgccgtggtgatgccgtacccgctgcagggccacgtgatcccggcggtgcacctggcgctgcggctggccgagcgcgggttcgcggtcaccttcatcaacacggagtccgtgcaccaccagatcggcgccggcggcgacatcttcgccggcgtgcgcgcgcgggggggagggacgacgacggaggagctggacgtgcggtacgagctggtgagcgacggcttcccgctgggcttcgaccggtcgctgaaccacgaccagttcatggagggcgtcctgcacgtgcccccggcccacgtcgaggacctcctccgccgccgcgttctcgtggacccggccaccacgtgcctcgtcgtcgacaccgtcctcgtgtggccggccacg

SEQ ID NO: 80166 - DNA, 396 bp, Zea mays
aatcgacataaagtactgccccaacaagttgtgtactgccaacggcgcctccaaggtcaccgtcaaggacatcaccttcaagaacatcactggcacctcctccaccccggaggccattagcctgctctgcactgccaaggtcccatgcaccggcgtcaccatggatgacgtcaacgtcgagtatagtggcaccaacaacaagaccatggctatatgcacgaacgccaagggcagcaccaagggttgcctcaaggagcttgcatgcttctagaccctcagtcgactgacccatctctctagttataatttttctctcgtccttgaattgtccattagttgctatccatttgtaacgcacaacagtaaaatgatagacatccaacagctatattatgt

SEQ ID NO: 80167 - DNA, 148 bp, Zea mays
acaaaaccagtaaactatacacggcggcgtcgcggacatgctgcacaaaactacaacgatacagagcgaacgcatggcatggatagcagtatctaccgaaagaaaacgaagaaaaggaaaataaaaaatgtatcagagtgcttgattc

SEQ ID NO: 80168 - DNA, 425 bp, Zea mays
aggggtggcgcagggcaggattaggcagggcagcgccgcgccggccggaccgcccgtccacgagccagggactttcggccatgggggacggtggtgctgacgacgcctcctcgccgccgccgcatgacgggggcttctcctacctcgccgtcttccacaactaccccctcgtcgccgccctgctcggcttcgccgtcgcgcagtccatcaagttcttcctcacatggtacaaggagaacaggtgggatcccaagcagcttatcggctctggtggcatgccatcatcacattctgccacggttacagcactagcagtagcgattgggttgcaagatggctttaactgctccctctttgcaacagcaactatatttgcaagtgtggtaatgtacgatgcttctggtatcagattgcatgctggaaag

SEQ ID NO: 80169 - DNA, 413 bp, Zea mays
aaaaaaaatcaaagggtggcatctttcttgctttatctcacggatgtcgaagaagggggagaaactatgttcccatacgagaacagtgagaatatggatataggctatgactatgagaagtgcattggcctaaaggtaaaaccaaggaagggtgacggactcttgttttactcccttatggtaaatgggaccattgaccggacttcacttcatggtagctgccccgtcatcaaaggcgagaaatgggtcgccaccaaatggatcagagacaatatagtgtagaaatcgaaaggctcaggtgtcatgtgccctccaaaaaaatagatcatgcgcacatatactgaccatatacttcagtgtttgttcaattgccatggacagttggaccaacggaaggaaagtgtaaccaatct

SEQ ID NO: 80170 - DNA, 413 bp, Zea mays
atcgagatttcgttatcctcctcgatcttaattacaggtcatagctaagcaggtctgacaggatgtcgtggcagacatacgtcgatgagcacctcatgtgcgagatcgagggccaccacctgacctccgctgccatagtcggccacgacggcgccgtttgggcccagagcaccgcattcccacagttcaagacagaggagatgaccaacatcatgaaggacttcgacgagcccgggttcctggccccgaccggcctcttcctcggccccaccaagtacatggtcatccaaggcgagcccggcgctgtcatccgcgggaagaagggatctggaggcataactgtgaagaagacagggcaagcgatggtggtcggcatctacgacgagcccatgacccccggccagtgcaacatg

SEQ ID NO: 80171 - DNA, 409 bp, Zea mays
agatcatcatctccatccaccgcccgccgtagctagctagatctgctgccatggcttcctttggcgaggctcccggcggtgacgccggcagcggcgagaagatcttccgcaccaagtgcgcgcagtgccataccgtggagcgaggtggcgcgcacaggcagggacccaacctgcacggcctcttcggtcgtcagtcaaggaacaacctcgggtaagcctaatccaagggcaacaagaacatgggcgtcctccgggaagagggcacactgtgtgaataactcctcacacccaagaagtatattccaagcgcacaaagatggtcttcccggggctcaagaagcctaaggagcgaaccgatctcatcgcctacctcaaggaatccacggcttaacttcttctagctatctta

SEQ ID NO: 80172 - DNA, 394 bp, Zea mays
acacagattactttctgttgcttctagttcacagattctctatgttggtgatcacatatacggagatattctgcggagcaagaaagttctaggctggcggactatgctggtgattccagaactagaacaagagctgaagcttctctcagaatcaaagtctactcgtaaggagcttagacatcttagaatggagcgtgattcaattgaagacaaaatccatcatcttgaatggtctcttaagcttgatgatatctcagaaaaccagaaggagaaattgttctctgaacatgacaatctgctgaaacagagagggcatgttcgtggtcttcatcaagaagctcagaagcaacatcatcagaagtttcataaggtgtggggacagctcatgaagact

SEQ ID NO: 80173 - DNA, 434 bp, Zea mays
acccgcccgtccaggcacttcatatatttcttgacagaatgtttcatcctgttgttgctgtggtattgtcagtgacatttgttcttgcctttggagaggttataccgcaagcaatctgtaccagatatggcctagcagtgggtgctaactttgtatggctcgtacgcattctcatggtcatttgctatccaatttcttaccctattgggaaggtcctggactgtgctcttgggcacaatgagtctgcactttttaggcgagctcagttgaaagctctagtttcaatccatggcaaagaggctggcaagggcggagagcttacccatgatgagactacaatcataagtggagccttggacctgaccgaaaagactgctgcagaagctatgacacctattgagtcaactttctcactagatgtggattctaagttg

SEQ ID NO: 80174 - DNA, 402 bp, Zea mays
tagtcttcgtctcactcaccccgccttcacgcctccctcaccaaataaggtcccgcccttttccgacattcacacgggggacaggaaatcagcggccatggcctcgattccggcgacgaccttcgccgtcatcttatccgtcctcttctgtgccgcggctggcaccgccgtcgacaacgacctccccgactacgtcatccagggccgcgtccattgcgacacctgccgcgccgggttcgtgaccaatgtcaccgagtacatcgcgggcgccaacgtgaggctggagtgcaagcacttcggcaccggcaagctcgagcgctccatcgacggggtgaccgacgggaacggcacgtacacgatcgagctcaaggacagccacgatgacgacatctgcgacgtggt

SEQ ID NO: 80175 - DNA, 378 bp, Zea mays
gcgacaacctgcgccccgccaacccgctcggctacctcaaggacgtgccgctgcccatctgcgcctcgctgctcaaacagttggactcggacgacgacgacgatcagtaatagcacatcgacgacgacgatcgatatgtaatagcacgtcgtcgacgaccgaccgcagtcgtcgcagactggctggcactaaaccacaaatcctcttcacctggattacaaatatgtaactgagaaaggaaaggaaaacaaaaatgtaactgcgtggctgtaccaaaaaaaaaaaaaaaaaaaaaaaaaagaaaaaaaaaaaacaggaacaaataaaaagaaaaaaaaaactacagggagaaaaaataaaaaaaaaaaggggcggccg

SEQ ID NO: 80176 - DNA, 405 bp, Zea mays
acccacgcgtccgcccacgcgtccgcagcacgaaggctgtgcaggaggcatgggcatcagcgtgcggcggcactgggaagcagacaatcctcatacccaagggcgacttccttgtcggacaactcaacttcacaggcccttgcaagggcgacgtgaccatccaggtggatggcaatctgctggcgaccacggacctaagccagtacaaggaacatggtaattggatcgagattctacgcgtggataacctggtcatcaccggcaagggaaaccttgacgggcagggcccagccgtgtggagcaagaactcctgcaccaagaagtacgactgcaagatccttcccaactcgctggtgatggacttcgtgaacaacggggacgtgtccgggatcacgctgctcaact

SEQ ID NO: 80177 - DNA, 430 bp, Zea mays
cccgcccgtccgaccacgcgaccgccggtccttcctgcggcagaaggacaacatgctggtgctgttcgaggaggagttcgggcggccggacgcgatcatgatcctgacggtgaagcgcgacaacatctgcaccttcatctcggagcggaacccggcgcacatcatgtcgtgggagcgcaaggacagccagatcacggcgaaggcgaacgccgacgacctcagggcccgggcggcgctggcgtgcccgcccaagaagctcatccagcaggtggtgttcgcgagctacggaaaccccgcgggcatctgcggcaactacaccgtcggcagctgccacacgccacgcgccaaggaggtggtggagaaggcgtgcctcggcaagcgcgtctgcacgctgcccgtgggcgccgacgtctacggcggcgacgccaac

SEQ ID NO: 80178 - DNA, 425 bp, Zea mays
agcgccatgagctccccgtggtgcgcgcggcgtcgtgctcgtcgtggccgccgacgtcgccaacgccggccacgccaagcccctgacgcctggcgggcgcgtggtacaccacaaccacggcaagttcacggccgggccgtggaaacccgcccacgcgaccttctacggcgggcgggacgggtccggcaccacggcgggcgcgtgcgggtacaaggacacgcgcgcgcaggggtatggcgtgcagacggtggccgtgagcacggtgctgttcggtgacggcgcggcctgcggcgggtgctacgaggtgcgctgcgtggacagccctagcgggtgcaagcccagcgcggcgacactggtggtgacggcgaccgacctgtgcccgcccaacgaccaacagtccgcggacagccgcgggtggtgcaacc

SEQ ID NO: 80179 - DNA, 83 bp, Zea mays
agtacgtcaccgttcccaagaacatggccaacatcttcatgtacggcgacgggccgacacagacggtggtcaccggcgacaag

SEQ ID NO: 80180 - DNA, 386 bp, Zea mays
  unsure (1)..(386): unsure at all n locations
ccacgcgtccgacttcgtaaacaaccgggaagtgtccggggtcacgccgctcaactccaagttcctccacatgaacatgttacggtgcaaggacatgctgattaaggactttaccgttacggcgcccggggacagccccaacacggatggcatccacattggcgattcatccgggatcaccatcaccaacaccgtcatttgcgtccagcactactgcatctccatcaggcccgggaactccaatgtgaacatcaccggcgtgacctgtggccctggccactgtatcagcatcggcagcctaaggcggtacacngacgagaaggacgtcacagacatcaacgtcaaggattgcactcttaagaagactatgttcggcgtccgcatca

SEQ ID NO: 80181 - DNA, 413 bp, Zea mays
gagcgatctcctctccctctccctctccgatccattctccagcgcagcgaagttaacatgtccgaccgggcaaagatgtcgtggcaggcgtacgtggacgagcacctgatgtgcgagatcgagggccaccacctcgcggcggcggccatcgtcggccacgacggtgccgcctgggcgcagagcacggcgttccccgagttcaagaccgaggacatggccaacatcatgaaggacttcgacgagccagggcacctcgcgccgacaggcctgttcctcggacctaccaggtacatggtcatccaaggcgagcctggtgccgtcatccgtggcaagaacggatcaggaggcatcaccgtgaagaagacagggcaggcactcgtggttggcatctacgacgagccgatgacgcctgg

SEQ ID NO: 80182 - DNA, 418 bp, Zea mays
atgcaagtaccccgccgggcagaagatcgtgttccacatcgagaagggctgcaaccccaactacctggccgtgctggtgaagtatgtggcggacgacggcgacatcgtgctgatggaaatccaggacaagttgtcggctgagtggaagcccatgaagctctcttggggcgccatctggaggatggacactgccaaggcgctcaagggccccttctccatccgcctcaccagcgagtccggcaagaaggtcatcgccaaagacgtcatcccgccgaactggagacccgatgccgtctacacttccaacgtccaattctactagactttgaattcccttcgattcatccggcgcggtgggctatggacctgcagcagcaagctaattaagtttatatatattgcatgagagagcatgcac

SEQ ID NO: 80183 - DNA, 372 bp, Zea mays
tgctgcagctcgtcgtcgcgggcttccgcgccgtcgtcatcgacaagctcaacaagtcgtccgagctggccgtccgccgcgtcgccgcgctcgcaggggaggactcacgcaacctctctttccacaagattgatgtccgtgacaagggatcactggaaatggtttttgcttctacaacatttgaagctgtcattcacttcgctggattgaaagctgtgggtgaaagcatacagaagccattactttattatgacgacaacgtcattggcacgataaatcttctagaagttatgtctgttcacggttgcaagaagttggtgttctcatcatcagctgcagtttatggatcacccaaaaactcaccctgcacag

SEQ ID NO: 80184 - DNA, 421 bp, Zea mays
aataacacaggtgagcgcgacgatgggatccctcgttaataacatcatggtcgtgggcgccgtccttgcggcgctcgtcgccggcgggtcgtgcgggcccccgaaggtgccacccggccccaacatcaccaccaactacaacggcaagtggctcaccgctagggccacctggtacggtcagcccaacggtgccggcgctcctgacaacggcggtgcgtgcgggatcaagaacgtgaacctgccaccctacagcggcatgacggcgtgcggcaacgtccccatcttcaaggacggcaagggctgcggctcatgctacgaggtgagatgcaaggaaaaacctgagtgctcgggcaatccattcacggtgtacatcactgacatgaactacgagcctatcgctccctaccacttcgacttgagc

SEQ ID NO: 80185 - DNA, 380 bp, Zea mays
  unsure (1)..(380): unsure at all n locations
aaccacgcgtacgcgatcacgacangatggcatgcacaaacaatgcgatgagagccttgttcctcctggtcctcttctgcatcgtgcatggtgagaaggaagagtcaaagggcatcgatgcgaaagcgtccgggcctggtgggtccttcgacatcaccaagttgggcgcctccggcaatggcaagacagacagcacgaaggctgtgcangaggcatgggcatcggcgtgcggcggcactgggaagcagacaatcctcatacccaagggcgacttccttgtcggacaactcaacttcacaggcccttgcaagggcgacgtgacaatccaggtggatggcaatctgctggcaaccacggacctaagccagtacaaggaccat

SEQ ID NO: 80186 - DNA, 321 bp, Zea mays
  unsure (1)..(321): unsure at all n locations
gagcgatcgagagatanatatagatgatgaaagtgggatcatcgtcagccgttctcttcgtgctagccctgacgctagtttgtgccccgctgatagcagaggcaaagaagaagagagtcgccgccgccgccgccgaggagaagaaggtgcaggacaacttctgctcgacgctgtgcgagggcangaaggggatggacctggtggtgtgcaaggagtcctgcgacctctcacagcgctccaacctggtgctgtacggccggattcagtgcaagggcaagtgcaccgagcagaacggcatcaccgcgccgcagatgaaagtgt

SEQ ID NO: 80187 - DNA, 402 bp, Zea mays
cttgaaatctcgccctcgttgcggtcgtccacatccttttctctcctcctcgccggcccaacctgattgttcttcaaccaagaggaagaaaggaaggaagggaccggaagcatcagccatgtcgaactcggcgtcgggaatggccgtctgtgatgaatgcaagctcaagttccaggagctcaaggcaaagaggagcttccgcttcatcgtgttcaagatcaacgagaacgtgcaccaggtggtggtggacaggctaggggagccaggcgagagctacgacgccttcacggcctgcttccccgccaacgagtgccgctacgccgtgttcaattttgacttcgtcactgacgagatctgccagaagagcaatatcttctttacctcttgggccccggatacatc

SEQ ID NO: 80188 - DNA, 419 bp, Zea mays
aaaagatcagatactgtgatggttcatcatttactggtgacgttgaggctgtggacactgcgaaagatctccgttacagagggttcagagtctggcgtgccgtcatcgatgatctacttactgtgaggggaatgagcaaggcgcaaaatgctcttctttctggatgctcagccggaggtctagcagcaatactacactgtgacagattccatgatctgtttccagcgaaaacaaaggtcaagtgtttttctgatgctggatattttttcgatgggaaggatatctccgggaacttttacgctaggtcaatctataagagcgttgtgaatctacatggatcagccaaaaatttaccagcttcatgtacctcaaagccaaagcaatcacctgagctgtgtatgttccacagtatgttgtcc

SEQ ID NO: 80189 - DNA, 400 bp, Zea mays
acgccgagctcatctactccgtcctcgacgtcgtgcgcaaggaggccgagaactgcgactgcctccaagggttccaagtatgccactccctgggtggcggcactggttctggcatgggcacgctgctcatttccaagatccgggaggagtacccggaccgcatgatgctcaccttctccgtgttcccgtcgcccaaggtgtccgacaccgtcgtggagccctacaacgccacgctgtccgtgcaccagctcgtggagaacgccgacgagtgcatggtccttgacaactatgcgctctatgatatttgcttccgcaccctcaagctcaccaacccttcatttggtgacctgaaccatctgatctcggcgaccatgagcggcgtgacatgctgcctgcggtt

SEQ ID NO: 80190 - DNA, 340 bp, Zea mays
gacaccactgacggcggcgcgtgcggctacaaaggcgagctggggaaagactacggcaccctgacggcggccgtgggcccgtcgctgtacaccaacggcaccgggtgcggcgcgtgctatgatctcaagggccccaagggcaccgtggtggtgacggccaccaacgaagccccgccgccggtgagcgggcaaaagggcgagcacttcgacctcaccataccggcgttcctcaagatcgccgaagagaacgccggcatcgtgcccatcacctaccgcaacgtggcgtgcgaaaggaaaggcggcatccggtacacgatcacggggaaacagcactacagcc

SEQ ID NO: 80191 - DNA, 418 bp, Zea mays
aggttaggaaggcggcggccagcggcgagagcgcgagaggaagagcaggaggaggggtcggccatgacggggaatgcgaagccgaagaagcacacggcgaaggagatcgccgcgaagatcgacgcggcgacgacgaaccggggcggcggcaaggccgggcaagcggaccggctggggcaggacaagggcgggcatgcgaagctggcgtgcccgctctgccgcaccccggcgcccgacatcaagtccatgcagatccaccacgaggcgcgccaccccaagctccccttcgagccggagaagctcctcaacctgcactcctccgcccccgctgctgccgccgccgccggcggcggcggccgccgccgccgacgccaacaactccaagcccaaagcccggcggtccgcggcagcctcaaag

SEQ ID NO: 80192 - DNA, 403 bp, Zea mays
acccacgcgtccgctgcattcatctcctccaccaccaccaccaagctcaacaacagccagctcgcgaaaatattgaaagccgcaacatggcatcatccggcgcgccccttggggtacccttcccccaattgggggcaacggcccaaaaggtaccgtaggcaaagagaagaaaaccggcggcaaccgctaaggcggcgaaggcaaaaatattcaggacgacttctgctcgacgctgttcaaaggcatgaaggggacggacctggtcctgtgcaaagagtcctgcgcgctctcccagcactccaacctggtgctgtacggcaggattcagtgcaagggcaagtgcaccgagcagaagggcatcacggcgccggccatgaaggtctgccaggaggattgcgacaag

SEQ ID NO: 80193 - DNA, 418 bp, Zea mays
ccacctcgctcatgtccgctcaccggggcgggctcagcatcctttcgaagaagtaacacttctccgtgaggcctgagcccctcgccgcggtgagccaagccggcgcacgtcgccccggggctcacgctcaccaccgagccccaaccaattaataatatatatatatagctaggatcgatcgtcagtaaaatggcaggctccgccgtcctgaggagccccctgtccgtcctcctctacatcctcgccgccgtgcccgccaccgccgcggcgacgccgaccgacgccgccatcgacgaggcgtacgcgcatctcgtcaacctcaccgctaaccaggagtactgggcggagcgcgcggaggcggcgcacgcgtacaaccgcgcggcgtaccagaccgaccccgtggccgtcgtgcagcgct

SEQ ID NO: 80194 - DNA, 397 bp, Zea mays
cgtacattcacccggcggcaataatggcctcggttccggctccggcgacgacgaccgccgccgtcatcctatgcctatgcgtcgtcctctcctgtgccgcggctgacgacccgaacctccccgactacgtcctccaaggccgcgtgtactgcgacacctgccgcgccgggttcgtgaccaacgtcacccaatacatcgcgggcgccaaggtgaggctggagttgcagcacttcgggcacggcaagctcgagcgcgccatcgacggtgtcaccgacgcgactgggcactacacgatggagctcaatgacagccactacgatgacatctgccaggtggtgctggttggccacccgcgcaaggactgcgacgaggtccaggcgcttcaggaccgcgccgg

SEQ ID NO: 80195 - DNA, 201 bp, Zea mays
catccgtggttgagccatacaacagtgtcctgtccacccactctctcctcgagcacactgatgttgctgtcctgctcgacaatgaggccatctatgacatctgccgccgctcccttgacattgagcgcccaacctacaccaacctcaacaggcttgtctcccacgtcatctcatccctgacggcttcactgaagttctatg

SEQ ID NO: 80196 - DNA, 433 bp, Zea mays
  unsure (1)..(433): unsure at all n locations
acatcaccaccaccaagctcaacaacagccagctcgcgaaaataatgaagagccgcagcatggcatcatcggccgcgctcttggtgctagccctcgcgctagtggcggccaccgccccacaggtagcggaggcaaagaagaagagagcggcggagagcggcgaggcggcggaggcgaagaagatccaggacgacttctgctcgacgctgtgcgagggcaagaaggggacggacctggtcgtgtgcaaggagtcctgcgcgctctcncagcagtccaacctggtgctgtacggcaggatccagtgcaagggcaagtgcaccgaacaagaaggcatcancgcgccggccatgaaggtctgccangaggagtgcgacaaggcgtacgtggtgaaggcggccgaggtcaccaaggcctgcagcgtcacctgcgccaa

SEQ ID NO: 80197 - DNA, 365 bp, Zea mays
agtaccattaaggatgaaggtttctcttccttgtggaggggtaacactgctaatgttattcgttacttccctactcaggctttgaactttgcatttaaggactacttcaagaggttgttcaacttcaagaaggatagggatggctattggaagtggtttgctggcaacctggcctctggtggtgctgctggtgcttcctctttgttttttgtgtactccctggactacgcgagaacaaggttggctaatgacgcgaaggctgccaagggaggaggtgaaaggcagttcaatgggcttgtccatgtctaccgcaggacactcaagtctgatggtattgctggggctttaccgtggatttaacatct

SEQ ID NO: 80198 - DNA, 423 bp, Zea mays
acacggtcgacgaaccgtggtgttggaggatggcgtgcaatgggacagggtgagggcaccgcctgttgacacccttgcgcatgacctgcacacctctgactgcctgcatgagctccggcccggcgaccacatcgagattcagtggagaaggaacaaagaattcccatacggctggtggtatggagttgttgggcacttggagtcatgtgatggaagcgaacacttttgtcggtgccatcttagtgataccgtggtgctggagtttaatcagtacacgccgggctcaaggtggaggcaagcgttggtgaagcggaaggagcataaggaggagggcaacgagggcgacgggttctacggcggcataaggaagctccgcggcaaggatgacatctccaagtggaggcagctgtggccaacagacgt

SEQ ID NO: 80199 - DNA, 376 bp, Zea mays
  unsure (1)..(376): unsure at all n locations
agtcgtcgagcccatcctgctcgaggtcgaccagatctaccacctcgcctgccccgcgtcncccgtccactacaaatacaaccccatcaaaacaatcaagaccaatgtggttgggactctgaacatgcttggattggcaaagaggatcaatgctaggttcctcctcaccagtaccagtgaggtctatggtgatcccctccagcacccgcaggtggagacttactggggcaatgtcaatcccatcggtgtcaggagctgttacgatgagggcaagcgtacagccgaaacgttgaccatggattaccaccgtggtgccaaccttgaggttaggatcgcacgtatcttcaacacatatggccctcgcatgtgcattgac

SEQ ID NO: 80200 - DNA, 425 bp, Zea mays
acggcgttcaccgagttcaagaccgatgacatggccaacatcatgaaggacttcgacgagccagggcacctcgcgccgacatgcctgttcctcgggcctaacaagtacatggtcatccaacgcgagcctggtgccgtcatccgtggcaagaatggatcaggaagcatcaccgtgaagaagacagggcatgcactcgtggttggtatctacgatgagccgatgacgcctgcgcagtgcaccatggtggtggaaaagctgtgcgactacctggcttaacaagggatgtaactactacgtagcagctggcatgcatgtcgacgaccatggttttcaatttcgacttccaataatactgacaacaaagcaataggcttcctcccggcgtaattgctttggctcttctcctccacgcgataggatatcta

SEQ ID NO: 80201 - DNA, 419 bp, Zea mays
actatcaccattaattcatcctctgaccaaaggctacatggtcctctaccgcaactatttctgcaaacatcgagctgatctcggagcccggagctgcaatctgacaacagtgcgtgtcgcaacaggagatcgggtcaccggaatcgatagaaaggacgattagactatggtgccccgaattaccaatcgaattacacgccacagatcgcggcttgggatttgggacgtccccaaatcagaaccccggacttagcggcacagggccagggatgaaaacggtcggaaacggtatttattcggtaatcagttttttagtcgtttttctttgattgcgaataaatagaatatagaatctatcatacaaatttgtattcctgtttttaacattcagtttgtaaagattcataaaagataaacct

SEQ ID NO: 80202 - DNA, 420 bp, Zea mays
agtcaactcgttgctgggggcgggatcccggccgagcaccatgcgaggaaataacatgccgcggcacacgtcgccgttactttttgccttgttggcgaccctgctcagcgtcggcgacgcgttggtcgtcgacggcctgcaggtggggttctatggaaagacgtgcccggcggccgaaggcgtcatcagcgacatcgtcaacaacgaaatcgctatggaccggggcatctcccctggcctcattcgcctcttcttccacgactgcttcatcacgggttgcgacgcttccattctcctggacgagtcgcccgccggcgacgtcccagagaaggagtcgtccgccaacggcttcaccctggtcgggctcagaaccatcgacatcgccaagtccaccgtagagggcatgtgccccggcaaggt

SEQ ID NO: 80203 - DNA, 419 bp, Zea mays
acctcgtcccaccctccctccctcatacaaataataacagaaaggtcccgcccttttcctccgacatccacatggggggaggggaaaacacttacattcacccggcggaactaatggcctccgttccggctccggcgactacaaccgccgccgtcatcctatgcctatgcgtcgtcctctcctgtgccgcggctgatcacccgaacctccccgactacgtcatccagggccgcgtgtactgccacacctgtcgtgccgggttcgtgactaacgtcacctagtacatctcggactccaatgtgaggctggagtgcaagcacttcggcaccggcagactcgaccgcgccatcgactgggtcacccacgctaccggcaactacactatcgagctcaaggacagccacgatgatggacatctg

SEQ ID NO: 80204 - DNA, 402 bp, Zea mays
atccgatccatcaacaatcgccgagagcgatcgagagataaataaagatgaagaaagtggcatcatcgtcagccgttctcttcgtgctagccctgacgctagtttgtgccccgctgatagcagaggcaaagaagaagagagtcgccgccgccgccgccgaggagaagaaggtgcaggataacttctgctcgacgctgtgcgagggcaggaaggggatggacctggtggtgtgcaaggagtcctgcgacctctcacagcgctccaacctggtgctgtacggccggatccagtgcaagggcaagtgcaccgagcagaagggcatcaccgcgccgcaagatgaagtgtgccaagaggcgtgcgacaaagactacgtggtcaaggcggctgaaggtcacaaggcct

SEQ ID NO: 80205 - DNA, 431 bp, Zea mays
  unsure (1)..(431): unsure at all n locations
attcttctcacgatccatcaacaatcgccgagagcgatcgagagataaataaagatgaagaaagtggcatcatcgtcagccgttctcttcgtgctagccctgacgctagtttgtgccccgctgatagcagaggcaaagaagaagagagtcgccgccgccgccgccgaggagaagaaggtgcacgacaacttctgctcgacgctgtgcgaaggcacgaaggggatggacctgntggtgtgcaaggagtcctgcgacctctcacagcgctccaacctggtgctgtacggccggattcagtgcaggggcaagtgcaccgagcagaaggggatcaccgcgccgcagatgaaggtgtgccaagaggcgtgcgacaaggactacgtggtcaaggcggctganggtcacaaggcctgcaacaacacctgcgccaagga

SEQ ID NO: 80206 - DNA, 407 bp, Zea mays
acccacgcgtccggcacaaacgcgtcgcatccgctccacaggatcctctgcgccaccgcaaccgtgtgaccgcccgtgccgccggcgatcccgatccgccgacccgtcccagccccgctcgcagccatgtcgccgtcggagccgacgcgggaggagagcgtgtacatggccaagcttgcggagcaggcggagcggtacgaggagatggtcgagttcatggagcgcgtcgcgcgctacgccgggggcgccggcggcggggaggagctctcggtggaggagcgcaacctgctgtccgtcgcctacaagaacgtcatcggcgcccgcagggcctcgtggcggatcatctcctccatcgagcaaaatgaggaaggccgcgggaacgaggcgcacgccgcatccatccgcgc

SEQ ID NO: 80207 - DNA, 424 bp, Zea mays
cccacgcgtccgtcgatcttaattacaggtcatagctaagcaggtctgacaggatgtcgtggcagacatacgtcgatgagcacctcatgtgcgagatcgagggccaccacctgacctccgctgccatagtcggccacgacggcgccgtttgggcccagagcaccgcattcccacagttcaagacagaggagatgaccaacatcatgaaggacttcgacgagcccgggttcctggccccgaccggcctcttcctcggccccaccaagtacatggtcatccaaggcgagcccggcgctgtcatccgcgggaagaagggatctggaggcataactgtgaagaagacagggcaagcgatggtggtcggcatctacgacgagcccatgacccccggccagtgcaacatggtggtcgagaggctcggcga

SEQ ID NO: 80208 - DNA, 435 bp, Zea mays
acgcgtccagctggttcgtggatggctgcgccacgacctctcctgctgtcgctgctggtcgccgtgctagcggtggccgccgatgtcgccaacgccggccacgccaagcccctgacgcctggcgggcgtgtggtacacgacaaccacggcaagttcacggccgggccgtggaaacccgcccacgcgaccttctacggcgggcgggacgggtccggcaccacggcgggcgcgtgcgggtacaaggacacgcgcacgcaggggtacggcgtgcagacggtggccgtgagcacggtgctgttcggtgacggcacggcctgcggcgggtgctacgaggtgcggtgcgtggacagccctagcgggtgcaagcccgacgcggcggcactggtggtgacggtgaccgacctgtgcccgcccaaggaccagtggtgcaagcca

SEQ ID NO: 80209 - DNA, 421 bp, Zea mays
acgtcaacgtgttcaacatgctcgaccagccgctcctcttcacatggcacgggatccagcagaggaagaactcgtggcaggacggcatgccgggcaccatgtgcccgatccagcccaacaccaacttcacgtaccactggcagcccaaggaccagatcggcagcttcttctactaccccagcaccggcatgcagcgggcggcgggcgcctacgggctgatcagcgtccacagccgtgacctgatcccggtgcccttcgacacgccggccgacgacttcccggtgctcatcggcgactggtacaccaaggaccacgccgtgctggccaagaacctggacgccggcaaggggatcgggcggccggcggggctggtgatcaacggcaagaacgagaaggacgcgtcgaacccgcccatgtacaa

SEQ ID NO: 80210 - DNA, 431 bp, Zea mays
  unsure (1)..(431): unsure at all n locations
aacaaggctaccctaggtggcctatcggcgattctcgtcgtggcggtggtcctccgtgtggtcgccaacgtcaaccgctccggcaagaaaggcggcgacaacttcacggtcccgggggaagcttcccttgccacgtccggcaagtcggtcaagtccctgtgcgcgcccaacctatacaaggagtcctgcgaaaagacactgtcccaagccaacaatgggaacgagaaacccaaggaagtgttccacagcgtgggcaaagtggcgctggaatccgtccagacggggtccaacagtccaagtcgatcggcgaggccaagggcagcgactccatgaccganagcgcgcgcgaggactgcaagaagctcctggaggacgccgccgacgacctgaggggcatgctcgagatggccggcggcgacatcaaggtgctg

SEQ ID NO: 80211 - DNA, 396 bp, Zea mays
  unsure (1)..(396): unsure at all n locations
aagacgcatgggctccttctcgcccgggaacgtccagctcggctgtgggaacaggacaaacccatcaaccatggcgaactccgcgtccgggatgggcgttagcgacgaatgcaagctcaagttccaagagctcaagtcgaagcgaagcttccgggtcaacaagttcaagattaacgaacaaacgcaacaagtggttggggacaagcttggggaaccgggcgaaaactacgacgaacttcacggctccatgcccgaaagcgagtggcgctacgccgtcttcgatttcgactttcacaccgacgataactgccagaagagcaggatcttggtcatctcctggtcccgggacacctcgagggtcangagcaagatgctgtacgcgagctccaaaggacg

SEQ ID NO: 80212 - DNA, 426 bp, Zea mays
cgtacgaggacgccgcctccgtgctcaccgtctccaagatccactacgagaatatcaagatggaggactcagccaaccccatcttcatcgacatgaagtactgccccaacaagttgtgtactgccaacggcgcctccaaggtcaccgtcaaggatgtcaccttcaagaacatcaccggcacctcctccaccccggaggccgttagcctgctctgcactgccaaggtcccatgcaccggcgtcaccatggatgacgtcaacgtcgagtatagcggcaccaacaacaagaccatggctatatgcacgaacgccaagggcagcaccaagggttgcctcaaggagcttgcatgcttctagaccctccgtcgactgacccatctctctagttataatttttctctcgtccttgcattgcccattagatgct

SEQ ID NO: 80213 - DNA, 419 bp, Zea mays
agcagcagccattactatgtagagagcgcagagggccgtcacctggtccgctcgccgttgtgtccattcggggcaaacacagagacctcgggagcctgccgcacctccatcgagcggaacggaagaatggtgggagaacagagaaactccaccgccatggcccggcgccgcgcctcctctggtgcactggtaccgctgccatgtgccgtgcagtgcgttggtgggatcctgtcgtcgtggtgggaatccagcggccctgggtaattcgggtgtgcgcccacatttggcctcggtgaccagctacaggattccgccgacatctccagtgcaaatcatgtggtcattccgggtggattgatgccgggggaccctgggattgttcaccggaaaatctacacagcggcaaagcgactctgagc

SEQ ID NO: 80214 - DNA, 427 bp, Zea mays
acccgctcttccaagttaggaggggagcacccatcagccaagagctatccatacgcacagcgatgcaccagcacgagatactagccatcatgcgcctgtcgtccctcctcctcgtcgtggccgccctctcggcgcgcgccgcggcgcagcaggtgccgccggtgggcggcagcgctctgaagccggactactacagccagtcgtgcccgcgcgcggagaggatcatcgcggaggtgatgcagacgaagcagatggcgaacccgacgacggccgcgggcatgctgcgcgtcttcttccacgactgcttcgtcaccgggtgcgacgcgtcggtgctgatcgcgtccacccagttccagaagtcggagcacgacgcggagatcaaccactcgctccccggggacgccttcgacgccgtggtgcgcgccaa

SEQ ID NO: 80215 - DNA, 293 bp, Zea mays
acggaggagtacgtggcgccagagatggtgcgcggcgagggccacggcttcgccgtcgactggtgggccgtcggcgtgctcgcctacgagatggcgttcgggcggacgccgttcaagggccagaaccgcaaggagacgttccggaacgtgctgcagcaggagctcgagttcccgggggacacccggtggcggacgccggagctcgcggatctcatctcgggcctgctggagcgggacccgaagaagaagctcgggtacgccggcggcgccgacgaagtccgggcccaaccgtt

SEQ ID NO: 80216 - DNA, 419 bp, Zea mays
gggtcgaggacgcgtcagcttgcaatcacaacgaacaaaagctctcgatctcaccgacaccgaggaagaagagatcaatggcgtccgagcagggagtcgtgatcgcgtgccacagcaaggctgagttcgacgcccacatgaccaaggcccaggaagccggcaagctggtggtcatcgacttcactgccgcctggtgcggtccatgccgcgccatcgccccactgttcgtcgaacacgccaagaagttcactcaggtcgtcttcctgaaggtggacgtggacgaagtgaaggaagtcaccgcggcctacgaggtcgaggcgatgccgaccttccacttcgtcaagaacggcaagacggtcgcgaccatcgtgggtgccaagaaggaccagctcctggccctgatcgaaaagcatgccgcg

SEQ ID NO: 80217 - DNA, 339 bp, Zea mays
gtctcctctcctcgccccgctctatacgatcgatggccgcgacggcggcggaggagatggagaggatggtggaggcggagtgggaggaggggatgaggaagaggaagcggtacgggctggtggagtaccgggcgctgccggcttacctgcgggacaacgagtacatccaccgccactaccgctgcgagtggccgctcccgcaggttctgctctccgccttctccatccacaacgagaccctcaacgtctggacgcatcttatacgatttttcatctttctcgctctgaccatatacacagcaacacaagttccaaatgcagtatatatccggagcttgc

SEQ ID NO: 80218 - DNA, 412 bp, Zea mays
acttccacaaccagggcgggaagccggagcagttcgaccccagcatgaacccgtcctacgccagggggctgcaggacgtgtgcagggactacctcaaggaccccaccatcgccgcgttcaacgacatcatgacgcccggcaagttcgacaacatgtacttcgtcaacctcgagcgcggcctcggcctgctcagcaccgacgaggagctgtggacggacccacgcaccaagcccctggtgcagctctatgcatccaacgccaaaaccttcttcgacgacttcggccgcgccatggagaagctcagcttgttcggcgtcaagaccggcgccgacggcgaggtcaggcggcgctgcgacgcctacaacagcggccccgccgtcgccgccaccatacccaagatgtgacgacgctg

SEQ ID NO: 80219 - DNA, 380 bp, Zea mays
ctcgacaactccgtcggcgacctctcctggctcctccgcgtctcctcctcggccaacgacgacgacgacgacttcgacgcccacatcgggctcccgcccatcgcgcagaacgagcccatcctcttcctcatctgggagcagatcgcagtgctctacaccggcaacctcgaagcccgcgccgacgccgccgccagcctcgtctcgctggcgcgcgacaatgacaggtactctaagctcatcatagaggaagatggcgtgccgccgctgctcaagctcgtcaaggaggcgcatctcgaggggcaggagaactgcgcgctcgccatcggcctcctaggccgcgatccggagtgcgtcgagcagatggtccaagccggggtgtg

SEQ ID NO: 80220 - DNA, 390 bp, Zea mays
agcctgcagcgtcacctgcgccaaggagaagaacccgcgcctcatcgagaactgcaagaggtcctgcacccctcctccttcttgaagcgaagccccttgaaatgaatgaaccatgcatgcatgcatgtatgcatgcgccggggtgacgtggcgttcagctcaggcgctgagcgagtctatacgtacgtcgtcaacggctggccacgcatgcgataaccatctgatatggacggaactatatattgtattcctattaatctggcattttctaagctaattgtttttttccaaatataccgtcgatggaactccaaatgtaatgtcacgcaaatgtgtgtttttcatcgattgaatgggtaataataaaaacgcatgctggcagttactact

SEQ ID NO: 80221 - DNA, 419 bp, Zea mays
aaagggcagacgggcgagcaggatgagagagatcatcagcatccacatcggccaggccgggatccaggtcggcaacgcctgctgggagctctactgcctcgagcacggcatcgagcccgatggcaccatgcccagtgatacctcggttggcgtcgcacatgatgccttcaacacgttcttcagcgagaccggttctggcaagcatgtgccgagggccatcttcgtcgaccttgaacccactgtcattgatgaggttcgcactggctcgtaccgccaactcttccacccagagcagctcatctcgggcaaggaagacgcagctaacaactttgcccgtggccactacactgttgggaaggagattgtcgatctatgcctggaccgtgtgcgcaagcttgcagacaactgcactgggctgc

SEQ ID NO: 80222 - DNA, 206 bp, Zea mays
  unsure (1)..(206): unsure at all n locations
acactgaacgtaccatggtattttatgagaacanagaaaatctttccaaattatgggatattctacccgtgtatgcatggattgacaaaaatgttggttacggccaaggaatgattgatttaggctcacaaatgatatttctacaaaaggatgaaccaaatgccttttggggctttgaaaaattgatccttaaattgcaaggaaat

SEQ ID NO: 80223 - DNA, 436 bp, Zea mays
acgatgggatccctcgctaataacatcatggtcgtgggcgccgtccttgcggcgctcgtcgccggcgggtcgtgcgggcccccgaaggtgccacccggccccaacatcaccagcaactacaacggcaagtggctcaccgctagggccacctggtacggtcagcccaacggtgccggcactcctgacaacggcggtgcgtgcgggatcaagaacgtcaacctgccaccctacagcggcatgacggcgtgcggcaacgtccccatcttcaaggacggcaagggctgcggctcatgctacgacgtgagatgcaacgaaaaacctgagtgctcgggcaatccagtcacggtgtacatcacttacatgaactacgagcccatcactccctatcacgtcgacttgaacggcaacgccttctgctccctggcaaagcccgggc

SEQ ID NO: 80224 - DNA, 298 bp, Zea mays
acccacgcgtccgatcgatcatgacatgatggcgtgcacagacaatgcgatgagagccttgttcctcctggtcctcttctgcatcgtgcatggtgagaaggaagagtcaaagggcatcgatgctaaagcgtccgggcctggtgggtccttcgacatcaacaagttgggcgcctccggcaatggcaagacagacagcacgaaggctgtgcaggaggcatgggcatcggcgtgcggcggcactgggaagcagacaatcctcatacccaagggcgacttccttgtcggacaactcaacttc

SEQ ID NO: 80225 - DNA, 428 bp, Zea mays
  unsure (1)..(428): unsure at all n locations
acccacacgtccggtcggccccagccgagataccggagtacgagctgaaccccggagaggtccagttccggcgaggctgtgacgttacaccgggtgtgtaccacatcgcgaaatggaatggcacaaaggtttccgtaaaaatacttgacagagacggttgctccgatcaagaagccgcaaactctttcaggcatgaattgactgtgctggagaaggtccgacaccctaacgtcgttcagttcgtcggagccgtcactcagagcatacctatgatgactgtgtctgaactccatgaagagaaagacttatcagtctgtatccagaaaaaaggaaagttaaagcctcagaaggtgctaagatacggccttgatattgccaagggcatgacctacctccaccagtgcaangccggacccatcatccactgc

SEQ ID NO: 80226 - DNA, 424 bp, Zea mays
agcgtcaccgtcctggtgatcacgcccagatcaaatcctattcaaatttggagcgcaatatggctgaagagaagagccgtccgcggctgaacgagcggatcatgtcgtccctctcaaagcggtcggtcgctgcgcattcctggcatgaccttgagataggacctggagcccctgctgttttcaattgtgttgttgagatcacaaagggcagtaaagtgaaatatgagctagacaagaagaccggaatgatcaaggttgacagggtgctatactcatcagtggtctacccacacaactacggtttcattccacgaacattgtgtgaagacggagatccaatggatgtgctggtgttgatgcaggaaccggtgatacctggctgttttcttcgggcaagggccatcggccttatgcccatgattga

SEQ ID NO: 80227 - DNA, 412 bp, Zea mays
gagcagcaagaaaatctattcatttgacacgtctccatctcattgagcatttaattatttttgggcaggaaagaacacataccagagatgaggttgttggtttaatttgattctaagtcctaatgaagaagattgtgagctccggcccggcggtgccgccctctgggttgtgcatgtagtacgtctcggagtccttggaaccgacgaggcggtcgaaatgcgcgcgcatgtaggtgagctcgccgtcggacgggtgggacatatcggacggcagcacgccggcgcccatggacgtggagtggagcatccgcatcacgcagtcgtcccgctccgtcgcctcccgccgcgacgcgtgcccgacactctcgccgttcacctcggccgtccagaccggctcgtcgagcagcctcct

SEQ ID NO: 80228 - DNA, 413 bp, Zea mays
aaacacagttgagcgcgacgatgggatccctcgctaataacatcatggtcgtgggtgtcgtccttgcagcgctcgtcgccggcgggtcatgcgggcccccgaaggtgccgcccggtcccaacatcaccaccaactacaacggcaagtggctcaccgccagggccacctggtacggtcagcccaacggtgccggcgctcctgacaacggcggtgcgtgcgggatcaagaacgtgaacctgccaccctacagcggcatgacggcgtgcggcaacgtccccatcttcaaggacggcaagggctgcggctcatgctacgaggtgagatgcaaggaaaaacctgagtgctcgggcaatccagtcacggtgtacatcactgacatgaactacgagcctatcgctccctaccacttcgac

SEQ ID NO: 80229 - DNA, 369 bp, Zea mays
aatgcacagcggctgcaccttcaaccacagatacgtgaaatccaacccgcgggaggtggagaacgccacctggatgctgacggtgttccactgcttcggccactacttctgcctgcacttcgaggcgttccagctcgggatggcgcccgtgtacatggccttcctccgcttcatgggggacgagaacgaggccaagaactacagctacagcctcgaggtcggcgccaacgggaggaagatggtgtgggagggcaccccaaggagcgtccgcgacagccaccgcaaggtgagggacagccacgacggcctcatcatccagaggaacatggcgctcttcttctccggcggggaccggaaggagctcaagct

SEQ ID NO: 80230 - DNA, 416 bp, Zea mays
agcgtggaccggggtatcaaccttgcctaccgcgacgcaagaggcagcgatccgtatgtcgtcctacggcttggcaagaagaaactgaagacaagcgtgaagaagagatccgtgaaccccatatggcaagaggagctaactctgaccgtcacagatcccagccaaccactgaagctggtgagtgagcagcaagcagaacgatcctgtttgtgattcattattctagactgtttgctacaggaggtgttcgacaaggacaccttcagcagagacgaccccatgggagacgcggaggtggacgtggcgccactgatggaggcggtgagcatgaacccgcgggaggagagtctgaggaacggcgccatcatcaggtccgagcggccgagcgccaggaactgcctcgccgacgagagcca

SEQ ID NO: 80231 - DNA, 433 bp, Zea mays
  unsure (1)..(433): unsure at all n locations
acgcaggctgctcatcgccctccctccgcgcccccgatccagatccagatccaggggcttgtcatggcatccaaacgtatcctcaaggaattaaaggacttgcaaaaggaccctccaacatcatgcagtgcaggtcctgctggtgaggatatgttccactggcaggcaaccatcatgggtcctcctgatagtccatatgctggaggtgttttcttggtgaacattcatttcccgccagactaccccttcaagcctccaaaggtatcttttaagacgaaggtcttccatccaaacatcaatagtaatggaagcataagtccttaaaatcctaaagancaattgaacccttgcttgacaatctctaaggttttgctttctatctgctccctgcttactgatcccaaccagacgaccctcttgtccctgagattgc

SEQ ID NO: 80232 - DNA, 361 bp, Zea mays
gccccggcccaacggcccccgaaccaattggccgttcggaaccgggcggggccccccggcgcaacagcagcccgagtacccggaacaagcggacctggaagacgtgctgcggacggtgggaacgttcccgcccatcgtcttcgccggcgaggcgcgcaccctcgaggagcgcctcgcggaggccgccgtcggccgggccttcctcctccagggcggcgactgcgccgagagcttcaaggagttcaacgccaacaacatcagggacaccttccgcgtcctcctgcaaatgtccgttgtgctcatgttcggaggccagatgcctgtcgtcaaggtgggaagaatggcaagtcagtttgcgaag

SEQ ID NO: 80233 - DNA, 423 bp, Zea mays
  unsure (1)..(423): unsure at all n locations
agggaggagaggaggcgaggtgagagaggacgaagagggcgcatcgtgggttgggtgatcacggcctgatggggtcgtggcgcaaggcctacggcgccctcaaggactccaccaaggtcggcctcgccaaggtcaacagcgaattcaaggaattggatattgcaattgtgaaggcaaccaaccatgttgaatgccctcccaaggaacggcacgtcagaaaaatactcttggcgacctcagcaaaccgccctcgcgcagacctctcgtactgcatatacgcattgtcaaggagattgtccaagacaaagaactggatagttgcgctcaagacattgatagtggtgcataagcttctganggaaggcgattccatgttcaaagaagagttcctggcctactcatccananggaacatcttgcaca

SEQ ID NO: 80234 - DNA, 407 bp, Zea mays
acccacgcgtccgcccacgcgtccgggccgccaccgaggtcgggtgcctcgtcgtcaacgcgcccaccgccaacaccatcgccgcggccgagcacggcatcgcgctgctcgcctccatggcgcgcaacgtctcgcaggcggacgcggcgctcaaggccggtaaatggcaaaggaacaagtacgtgggggtttctctggtgggaaagaccctggccgtcatgggcttcgggaaggttgggtcagaggtagcgaggcgagcgaaagggcttgggatgcacgtgatagctcatgatccctacgcccctgccgaccgggcccgtgccctcggggtagagctggtttctttcgacgaggccatcgcaagagccgacttcatcttcctccacatgccgctgataccgacgacg

SEQ ID NO: 80235 - DNA, 411 bp, Zea mays
acagaacgatcctgtttgtgattcattattctagactgtttgctaaaggaggtgttcgacaaggacaccttcagcagagacgaccccatgggagacgcggaggtggacgtggcgccactgatggaggcggtgagcatgaacccgcgggaggagagtctgaggaacggcgccatcatcaggtccgagcggccgagcgccaggaactgcctcgccgacgagagccacgtgtgctggaggaacggcaagttcgcgcaggacatgatcctccggctcaggaacgtcgagagcggggagatacagctgcagctgcagtgggtgaacttccctcctggtcctgctcctgctgctgcaacaaccaggtgacctgatgatcgatggtagctgctgttcctgtcgccattgcctcctgct

SEQ ID NO: 80236 - DNA, 239 bp, Zea mays
caccctccctccctcacacacttattatggaaaggtcccgcccttttcctccgacatccacaggggggaggggaaaacacgtgcattcacccggcggcaataatggcctcggttccggctccggcgacgacgaccgccgccgtaatcctatgcctatgcgtcgtcctctcctgtgccgcggctgacgaccccaacctccccgactacgtcatccagggccgcgtgtactgcgacacctg

SEQ ID NO: 80237 - DNA, 386 bp, Zea mays
agggacgtttgtgggggcaaccgtgcatccattccctaccggcgattgggcgtggaaggcggtgtggcgtgggcaattcttcgtcgaagatcgcgcttcgtcgtgaagccgctcacatccgcggtcggcgtccggtgctgcctaaattttggtatcttcggattcatggtaaaagcagatacaatgaggagcttgatcgtgacaagggttgtcgtcgctccgaagctgtgcgaaagggagcttcggctaaatcgcagaaaagggaaccgacttaaaagggaaaaggctgttcagtcctcatagatttttctataagccaatagtaaatgtaaagggcataattgtattttccataggctgtgtcctgtgcctataaatagatgaac

SEQ ID NO: 80238 - DNA, 418 bp, Zea mays
  unsure (1)..(418): unsure at all n locations
gtccggcgacttgtacggcttcggcgtggtgctgctggaaatgctggtgggacggcgcgcgctggagccgagccgggcggggggccgcgacggcagcctggtggactgggcgcggcccatccttatccggcccaaaaagttggagcggatcctggaccggcggatgggcgaggtctgctcggagatgggcctgcagcgcgtggcccgcctcgcgtacgactgcctcagccagaaccccaaggtccggccctccatggccagggtcgtcaccacgctcgaggcagtcctcgccgccggtgccggtgccgccgacgccccgccgcggtgagaccggaggttgatgtangtagtanggtcggcatacggattaattaggtgcgtacgggtatatgcttgggcggaggaggcatgtttaatt

SEQ ID NO: 80239 - DNA, 403 bp, Zea mays
  unsure (1)..(403): unsure at all n locations
gaccgacccgtccaattcataaaattaataagcaaggtttagagaagaggcaacatgggcacaaagatgaagaaggggatcctgaagccgttccgctatatctcaaccatcatggatggtaaggaggctgaaatgcaaattgggttcccgacggatgtaaaacacgtggcacatattggttgggatggtcctggctccacgaacaacaacaacaataacaacagcaacaacaatagtggcggagcacctagctggatgaaggattaccactcggcaccgcttgactcgtcctcttttaggagtgagagtgggggcacggctgctgcaaatcnctgngcttctcaagagatagtcatggatggagcaagcgtcggagaaacctccttcaaggacacgaaaagcg

SEQ ID NO: 80240 - DNA, 388 bp, Zea mays
aagaagaaacttaagacgagcgtgaagaagagatctgtgaaccccatctggcacgaggagctaactctgaccgtcacagatcccagcctagctctgaagctggaggtgttcgacaaggacacgttcagcagggacgacccgatgggggacgcggagatcgacgtggcgccgctggtggaggcggcgaacgcgagcccggaggcgagcctgaggaacggcgccatcatcctgtcggtgcggccgagcgccacgaactgcctcgccgacgagagccacgtgtgctggaggaacggcaagttcgcgcaggacatgatcctccgcctcaggaacgtggagagcggggagattcagctgcagctgcagtgggtcagcatccctcctgctgcag

SEQ ID NO: 80241 - DNA, 371 bp, Zea mays
aaccccatcgaccggtgctggcgcagccgcgccgactgggcgacggcccggaagcggctggcgcagtgcgcgcgcgggttcggccacaggaccgtccgcggcgcagacggcaagctgtacgtggtgagggacccgagcgacgacgagatgatcatcccgcggcagggcacgctgcggcacgccgtgatccaagaccggccgctgtggatcgtgttcgcacgcgacatggtgatcgagctgcggcaggaactgatcgtgaaccacaacaagacgatcgacgggcggcgcgcacaggtgcacatcatgttcgcacaaatcacgctgcataacgtgcagaacgtgatactgcacaacctgcacatccacgactc

SEQ ID NO: 80242 - DNA, 332 bp, Zea mays
ggccgacgaccgcgtcgagccacaatgcgccggtccccctcccccgccaccgtggcggccctctcggcgcgcgccgcggggcaccggccgccggcgggcggcgccctgaacccggacttcaatacccagtcgtgcccgcgcgcggagcggatcattgcggaggtgatgcagacgaagcagatggcgaacccgacgacggccgcgggcctgctccgcgtcttcttccacgactgcttcgtcagcgggtgcgacgcgtcggtgctgatcgcgtccacccagttccagaagtcggagcacgacgcggagatcaaccactccctccccggggacgc

SEQ ID NO: 80243 - DNA, 392 bp, Zea mays
ctccccccagcggcgaggagagccggcggccacaggaaggagaaatggcttccgcacacaacgctctccgggtgtttttcatcctagccgtggtaagttgcctatgcacaagcaaaaggacaagagccaacaaggaaaaatccgcggcaacccccggtggcgctgctggaggcagcggcgggacgttcgacatctccaagctcggcgcgaccagcgacggcaagacggactgcacaaaggcagtccaggacgccttgacgtcaacgtgcgaagcgaccggaagcgccacggtggtgatccccaagggcgactacctggtcggccctctcaacttcactgggccatgcaaggggagcaacatcgccatccagctggaatggaacctgctggga

SEQ ID NO: 80244 - DNA, 349 bp, Zea mays
aggtcaagtccggcgcctccaaggtggccgtcaacgacgtcgtcttcaagaacatccacggcacctccaacacgccggaggccatcacgctcaactgcgccaacaacctgccatgccagggcgtgcagctcgtcaacgtcgacatcaagtacaatggatcgggcaacaagacaatggcggtcggaagaaacgcaaccggaagttcaaccggtttggaaagggactcccctgcatccgaaccaatttactaacatgcataaattaaatatataatcactcctcgtaacctctctccttctcacgtactctcaagttcccaacgaatatataatccgctgggttgtatttt

SEQ ID NO: 80245 - DNA, 441 bp, Zea mays
gggccgacccaagcgtccacgccaacgccgatcgccacgccggaaacatactcgtccgcaagcacgacggcggcggaggcggaggcatgtcgctggttcccatcgaccatggatactgtctgccggagagcttcgaggactgcactttcgagtggctctactggcctcagtgccgggagcccttcagcgacgagacggtggagtacgtgcggtccctggacgcggaggaggacgtgactatgctgaggctccacgggtgggaggtgtcgcgcgagtgcgcgcgcacgctgcgcgtcgccaccatgctgctgaagaagggtgtggagaggggcctcaccgccttccacatcgggagcatcatgtgcagagagaccctgaccaaggagtccgccatcgaagagatcgtccgtgaggcggcggaacggggaggaggatgcgaga

SEQ ID NO: 80246 - DNA, 422 bp, Zea mays
agccgtcatcctatgcctatgcgtcgtcctctcctgtgccgcggctgacgacccgaacctccccgactacgtcatccagggccgcgtgtactgcgacacctgccgcgccgggttcgtgaccaacgtcaccgagtacatcgcgggcgccaaggtgaggctggagtgcaagcacttcggcaccggcaagctcgagcgcgccatcgacggggtcaccgacgcgaccggcacctacacgatcgagctcaaggacagccacgaggaggacatctgccaggtggtgctggtggccagcccgcgcaaggactgcgacgaggtccaggcgctcagggaccgcgccggcgtcctgctcaccaggaacgttggcatctccgacagcctgcgccccgccaacccgctaggctactttcaagacgtgccgctcc

SEQ ID NO: 80247 - DNA, 389 bp, Zea mays
tgcgtgcgttcgtccatccacagacaggcgtccgggcacaatgtctttcaccggaacgcaggacaattgcagggcgtgcgacaagaccgtccacttcatcgacctcctcacggctgacagtgccatctaccacaagacatgcttcatgtgcagccactgcacatgggtcctcgcgatgtgcagctactcctccatggacgcgtgtgcctgtactgcatgagccacatcgagcagctcttcaaggagatcgggagcttctcacatgaacttcacgccacgtggcacgtcatcagacaatggtgaactgacaagggcgtcaagcaagctgtcgtctgcattttctggtagccaggataagtgcgcagcatgccagaaaacagtgtacccgc

SEQ ID NO: 80248 - DNA, 420 bp, Zea mays
acccacgcgtccgggcccttgcaagggcgacgtgaccatccaggtggatggcaatctgctggcgaccacggacctaagccagtacaaggaacatggtaattggatcgagattctacgcgtggataacctggtcatcaccggcaagggaaaccttgacgggcagggcccagccgtgtggagcaagaactcctgcaccaagaagtatgactgcaagatccttcccaactcgctggtgatggacttcgtgaacaacggggaggtgtccggggtcacgctgctcaactccaagttcttccacatgaacatgtaccagtgcaagaacatgctgatcaaggacgtgaccgtgacggcgcccggggacagccccaacacggatggcatccacatgggcgactcatccgggatcaccatcaccaacaa

SEQ ID NO: 80249 - DNA, 419 bp, Zea mays
cgttgcggtcgtccacatccttttctctcctcctcgccggcccaacctgattgttcttcaaccaagaggaagaaaggaaggaagggaccggtagcatcagccatgtcgaactcggcgtcgggaatggccgtctgtgatgaatgcaagctcaagttccaggagctcaaggcaaagaggagcttccgcttcatcgtgttcaagatcaacgagaacgtgcagcaggtggtggtggacaggctgggggggccaggagagagctacgacgccttcacggcctgcttccccgccaacgagtgccgctacgccgtgttcgattttgacttcgtcactgacgagaactgccagtagagcaagatcgtcattatctcttgggccccggatacatcgacggtgagaagcaagatgctgtacgcgagctc

SEQ ID NO: 80250 - DNA, 198 bp, Zea mays
agcagacggggaagctgggcgtcaagtcggacatctactcgctcggcgtgctcctgctgcaggtggtcaccgcgcggccacccatggggctcacgcaccacgtcgagaaggccatcgacgcgggcaccttcgcgcagatgctcgacatcaccgtcaaggactggcccgtcgaggaggcgctcggctacgcaaagctcg

SEQ ID NO: 80251 - DNA, 410 bp, Zea mays
agctgtgccacgagaacggagtgatgcacagggacctgaagccggagaacttcctgttcgtgaacaagtcggaggagtcacctctcaaggccatcgacttcggcctctccgtgttcttcaagcctggagatcggttcaccgaagtggttggcagcgggtgttacatggctccagaggttctcaagagaagctatgggccagagatagacgtgtggagcgctggtgtcatcctgcacatccttctctgcgggttccctccgttttggggaggctccgatgagaaaattgcacagtcgatactccgtggggtaattaacttacagaaggatccatggcccaaggtctcccagagcgcaaaggatcttgtcacgaggatgcttgacccagatccttgtacacggttgacggca

SEQ ID NO: 80252 - DNA, 416 bp, Zea mays
cggtcgtccacatccttttctctcctcctcgccggcccaacctgattgttcttcaaccaagaggaagaaaggaaggaagggaccggaagcatcagccatgtcgaactcggcgtcgggaatggccgtctgtgatgaatgcaagctcaagttccaggagctcaaggcaaagaggagcttccgcttcatcgtgttcaagatcaacgagaacgtgcagcaggtggtggtggacaggctaggggagccaggcgagagctacgacgccttcacggactgcttccccgccaacgagtgccgctacgccgtgttcgattttgacttcgtcactgacgagaactgccagaagagcaagatcttctttatctcttgggccccggatacatcgagggtgataagcaagatgctgtacgcgagctcca

SEQ ID NO: 80253 - DNA, 413 bp, Zea mays
acccacgcgtccgcaagcattgaagccgtagccgccgccgccggacgagacaggttgaggcggggcggcaatggccgccggggaccttgaggtgctcaccgcgctcgacaccgcgaagacgcaatggtaccacttcaccgccatcgtggtcgccggcatggggttcttcaccgacgcctacgacctcttctgcatctccctcgtgactaagctcctcggccgcatctactacaccgtggaggggtccgcgacgcccggcaccctcccgccgcacgtgtccgcgtccgtcaacggcgtggccttcgtgggcacgctgtcagggcagctcttcttcggctggctgggcgacaagctcgggcgcatgaaggtctatggcatgacgctcatgctcatggtcctctgttccgtcgcgt

SEQ ID NO: 80254 - DNA, 406 bp, Zea mays
ggagaggggaagtcagaggcacggagtggcgcagagcagacgcccgtgaaccattgtagctgtccctgtcgtcgtcgtcgtcaacgaacccacacaaggaaaggatggagaagaagccgaccatcctcatgaacaggtacgagctcgggcgcacgctcgggcagggcaccttcgccaaggtgtaccacggccggaacctcgcgtccggcgagagcgtggccatcaaggtcatcgacaaggagaaggtgatgcgcgtcggcatgatcgaccagatcaagcgcgagatctccgtcatgcgcctcgtccgccaccccaacgtcgtgcatctgcacgaggtgatggccagcaagagcaagatatacttcgccatggagtacgtccggggcggcgagctcttcgcccgcgt

SEQ ID NO: 80255 - DNA, 410 bp, Zea mays
acccacgcgtccgggaaactcatatgcagatgcaattcatgaggcttttcatccaaaagatcacccaaaacccaaaccagattcaacgatggaatataggacgacatttataagagctaagtatgagacacaagattttttgaacccatctttgcgcatatcatcaagatcatcttttacagcgaccagttctgtgaagagtgtagatagcactttctcgaacacttcaacgaaggatatctctgaagatacaggagaacttgttggagagctgaatattagagtcgtgataggtactaacttggtcgttagagacatgctaacaagtgatccataagtcgttttaacactcggacggcagacagctcaatcgacagttaataaacgtgatcgtaatccggtacggaatg

SEQ ID NO: 80256 - DNA, 382 bp, Zea mays
aggcgacagtgcgtgcgtgcagccacaggcaggcgtcggcaccatgtcttctttcaccggcacgcaagacaagtgcgcggagtgcgacaagaccgtccacttcatcgacctcctcacggccgacggcgtcacctaccataagacatgcttcaagtgcagccactgcaaagggatcctctcgatgtgcagctactcttccatggacggtgtgctgtactgcaagacccacttcgagcagctcttcaaggagaccgggagcttctccaagaacttcacgccaggtggcaagtcttcagacaagggtgaactgacaatggcccccagcaggctatcatctgcgtattctggtactcaggataagtgtgcagcttgccagaaaaca

SEQ ID NO: 80257 - DNA, 416 bp, Zea mays
agcaaattaccgcgatggctcccaaggtcctagtcatccttgtgttcctcgccgtggcctcaccggctgctctggccgccttcgatgtgatagagatgctggccgacaagcccacgtactccacgttcctgaagctcctgcaggacaccaaggtcgcgggcgaggcgaatcagctccggtcggcgacgctactggtcgtccccgacaaacttgccaagcctctggcgtcgctgcccgccgataaggtgcggccggcggtggagaaccacgtccttctcagttacttcgaccccatcaagctggacgagatgaagacacgcaccgccatcctccccacgctgctctccgtcaccgacaagaaactcggcgtcctcaactacaccagggccgacgacgggcagatgtacttcggcgct

SEQ ID NO: 80258 - DNA, 403 bp, Zea mays
agtctaagcgcatcacggaatatatgtgggcgatgataaggtgatccatttcacaagaggaagaggacaggaggtcggaacaggaactgtcgtcgatattattcttgtgagttccaccccaaaacgaagcaacacgccttgcccggtgtgcaccgacgaaaccagcgacagcagcacagagacgaacggcgtggtatcctcctgtctcagctgcttcctagctgggggtgctctctaccgtttcgagtacgcagtcaacccggcgctcttcctcgccaaagcgcgaggagggacgtgcacgctcgctccctctgaccctgacgacacggtggctcgccgcgccagatacctgctgagcaacggtttcaagtgctacaacctgttcaagagcaactgccaagac

SEQ ID NO: 80259 - DNA, 324 bp, Zea mays
  unsure (1)..(324): unsure at all n locations
agcgaccgggacgacatactggcagcggtggacgacgccatcggggacggcgtcgacatcctgtcgctgtcgcttggccacgaggatgccatcgacttctcggacgaccccgtctcgctcgccgggtacacggcgatcctcaacggcgtgttcatctgcgccgcggcgggcaacaccggcccgtcncccgcgaccctcgtcaacgaggcgccgtggctgctcaccgtgggcggccaccaccaccgaacaggaggttcttggccttcgtaaagctaggggacacggtccatattgacggcgattccctcaaggaccctaacacaa

SEQ ID NO: 80260 - DNA, 372 bp, Zea mays
ctgccccaacaagttgtgtactgccaacggcgcctccaaggtcaccgtcaaggatgtcaccttcaagaacatcaccggcacctcctccaccccggaggccgttagcctgctctgcactgccaaggtcccatgcaccggcgtcaccatggatgacgtcaacgtcgagtatagcggcaccaacaacaagaccatggctatatgcacgaacgccaagggcagcaccaagggttgcctcaaggagcttgcatgcttctagaccctccgtcgactgacccatctctctagttataatttttctctcgtccttgcattgcccattagatgctatccattggtaacgcacaacagtaaaacgacagacatccgacagct

SEQ ID NO: 80261 - DNA, 326 bp, Zea mays
aaaataaggtcccgcccttttccgacattcacaggggggacaggaaatcagcggccatggcctcgattccggcgacgaccttcgccgtcatcttatccgtcctcttctgtgccgcggctggcaccgccgtcgacaacgacctccccgactacgtcatccagggccgcgtctattgcgacacctgccgcgccgggttcgtgaccaatgtcaccgagtacatcgcgggcgccaaagtgacgctggagtgcaagcacttcggcaccgggaagctcgagcgctccatcgacggggtgaccgacgggaacggcacgtacacgatcgaactc

SEQ ID NO: 80262 - DNA, 398 bp, Zea mays
cgaacgtccagatccgcggcatcacgctgctcaacagcaagttcttccacctcaacatcttcgagtgcaagaacgtgctgatcgacaaagtgacggtcaaggcccccggcgacagccccaacacggacggcatccacatcggcgactccagcaacgtgaccatcagcagcaccaccatcggcgtcggcgacgactgcatctccatcggccccgggagcaagatgatccgcatccatggcgtcaagtgcggcccaggccacggcatcagcgtcggcagcctggggcgctacaaggacgagaaggacgtggaagacgtgcaggtgacggggtgcacgatcgccggcaccacgaacggcctgcgcatcaagtcgtacgaggactccaagtcgtcgctcaag

SEQ ID NO: 80263 - DNA, 402 bp, Zea mays
cggacgcgtgggctccgccgtcatccgcgcaggtagaggcggtggtcctcttcaacgtctgcgacagctacgtgcggcgaccggaccaggcagaccgtgtcatcggcaccctccttggatccctcctccccgatggcaccgtccacgtccgcaactcctacgtggtcccccacagcgagtcggccgaccaggtcgccatcgacatcgactaccaccataacatgtacgcctcgcaccagaaggtgaaccccaaggaagtcatcgtcggatggttctcgactggatttggtgtttctgggggaagtacgcttatccatgagttctattcaagggaagtacaaagccccatccatcttacagtcgacaccggcttcactaggggggaagcttccatcaaagcct

SEQ ID NO: 80264 - DNA, 417 bp, Zea mays
ctaccctcgtcgtcgtctcactcaccccgccttcacgcctccctcaccaaataaggtcccgcccttttccgacattcacaggggggacaggaaatcagcggccatggcctcgattccggcgacgaccttcgccgtcatcttatccgtcctcttctgtgccgcggctggcaccgccgtcgacaacgacctccccgactacgtcatccagggccgcgtctattgcgacacctgccgcgccgggttcgtgaccaatgtcaccgagtacatcgcgggcgccaaggtgaggctggagtgcaagcacttcggcaccggcaagctcgagcgctccatcgacggggtgaccgacgggaacggcacgtacacgatcgagctcaaggacagccacgaggaggacatctgcgaggtggtcttggtgga

SEQ ID NO: 80265 - DNA, 379 bp, Zea mays
gacgcaagcctctactgcgcgccgcgtcatctcactcaccccgccttcacgcctccctcaccaaataaggtcccgcccttttccgacattcacaggggggacaggaaatcagcggccatggcctcgattccggcgacgaccttcgccgtcatcttatccgtcctcttctgtgccgcggctggcaccgccgtcgacagcgacctccccgactacgtcatctatcgccgcgtctattgcgacacctgccgcgccgggttcgtgaccagtgtcaccgagtacatcgcgggcgctaaagtgacgctggagtgcaggcacttctgcaccggcaatctcgagcgctccaacgacggggtgaccgacgggatcggcacgtacacga

SEQ ID NO: 80266 - DNA, 263 bp, Zea mays
tcactaaccccgccttcacgcctccctcaccaaataaggtcccgcccttttccgacattcacaggggggacaggaaatcagcggccatggcctcgattccggcgacgaccttcgccgtcatcttatccgtcctcttctgtgccgcggctggcaccgccgtcgacaacgacctccccgactacgtcatccagggccgcgtctattgcgacacctgccgcgccgggttcgtgaacaatgtcaccgagttcatcgcgggccccaag

SEQ ID NO: 80267 - DNA, 405 bp, Zea mays
  unsure (1)..(405): unsure at all n locations
acccacgcgtccgggaagcccaggcggcctgacatgctcactgacacttttgggtttggccggatcatacatgatggcctcatgttcaagcagaacttctccattaggtcctatgagattggggctgataggacggcatctatagagacaatgatgaaccatttgcaggaaacggcacttaatcatgtgaagaccgctgggctgctaggtgatggattcggctccacaccagagatgagtaaacggaacttattctgggtggttagccagatgcaggctatcgtcgagcgttatccatgctggggtgatactgttgaagtaaatacatgggttagtgctaatggtaaaaatggaatgcgtanggattggcatatacgtgattcctatgacaggcacacaatactg

SEQ ID NO: 80268 - DNA, 410 bp, Zea mays
accaccatcttctacatctccgtcggctgcgctgggtacgccgcgttcggttcgaatgctccgggcaacatcttggcggcaggcgggctgggtcccttgtggctcgtcgacattgccaacatgtgcctcatcctccacctgatcggtgcataccacgtatacgctcagcctgtcttcgcttcggttgagaggtgggccgcctcacggtggccagaagccaagttcatgagcagcgcatacaccgtgtccgtcagcatccccctcttgcagagaggatcggtcaccgtcgcgccgcacaagctcgtcctgaggaccgccatagtcggcgcgacgactgcggtggcgctggcgatacccttcttcaacgccgtgctggggctcctcggcgcgttcagcttctggccgctcac

SEQ ID NO: 80269 - DNA, 409 bp, Zea mays
ctccgtcccccaagcaaagaaaagaagctagctagctaggcgtagaacgaatgacgacgcagggcggcaacaggtcgacgacgacgctggtcgccgccgtggccgtagttctggccgtggcggcggcgtcgtccctggccggcgtggcgtccgcggagaaggcgggcgggttcgtggtgacggggcgcgtgtactgcgacccctgccgcgccgggttcgagacgaacgtgtccaggagcgtggccggcgcgacggtggaggtggtgtgccggcacttcggcgcgtccaaggagacgctcaaggcggaggcgacgacggacgacagcgggtggtacaagctggagatcgaccaggaccaccaggaggagatctgcgaggtggtgctggcccggagccccgacccggggtg

SEQ ID NO: 80270 - DNA, 443 bp, Zea mays
cgggccgacccaagcgtccactgaccacctcctcttatgccgcgctcaacggcgtcttgtactgcaagatccacttcgcgcagctgttcatggagaaggggagctacaaccacatgaacaagaagagcccgtcccacgaggttctgccggacgtggctgacgaggagcaaccgccggtaccagcgccaccgcaagatgagaaagaagaggacaactaagatcggagcgaccaacaaccacccatgcatatatatcacgcagactgaagtctacacgtttgccatatttctttacgacgacgacgcttctttattccctcctcccttttttttcctcttaatctctctgtgagaccggtttatcatcacgctgcaatcaagtgtgccagatgccttcgttacgtctgaggctcacgacaatggaaaatctgacatggacctgtc

SEQ ID NO: 80271 - DNA, 338 bp, Zea mays
cccaggcctacgaacgcgtccaccacgcgtctgcgacatccgatttctcaccctactcatcagaacctagctagctaggcgtagaacgaatgacgaggcagggcggcagcaggtcgacgacgacgctggtcgccgccgtggccgtagttctggccgtggcggcggcgtcgtccctggccggcgtggcgtccgcggagaaggcgggcgggttcgtggtgacggggcgcgtgtactgcgacccctgccgcgccgggttcgagacgaacgtgtccaggagcgtggccggcgcgacggtggaagtggtgtgccggcacttccgcgcgtccaaggagacgctc

SEQ ID NO: 80272 - DNA, 420 bp, Zea mays
cgcgtctacacgacgccaacctggtggagatgtaccgcaagatcagcagagccgacgtcaagtacccgcagtggttctcccctgagctccggcggttgatgcccaagctcctcgaaccgaacccaaacaacaggatcacgatcgagaagctggtcgagcacccctggttcaagaaggggtacaggccggccgtcatgctggcacagccgcacggctccagcagcctcaaggatgtccaggtcgccttcagcaacgccgaccacaaggacagcagcagcaaggtggaacagccggcggacagctccttgaagccggcgagcctgaacgcgttcgacatcatctcccactccagagggttcgacctgtcaagcctgttcgaggtggaccaagagcagaaggccagcaactcgcggttcatga

SEQ ID NO: 80273 - DNA, 427 bp, Zea mays
  unsure (1)..(427): unsure at all n locations
acttcgagaaccccgagaagagcatagactccctccacctcgacggctacgccttcttcggcgtcgggatggggcctgggacgtggtcgccggagatgaggaagacgtacaacctactggacacggtgagccggcacacgatccaggtgtacccgcggtcatggacggcgatcatgctgacattcgacaacgcgggcatgtggagcgtccggtccaacgtctgggagcggtactacctcggggagcagttctacatcagcgtcatctcgccggcgcggtcgctgcgcgacgagtacaacatgcccgacaacgccctccgctgcggcaaggtcgtggggctgccgctgccgccatcctacgcncccgcgcgctaaagacgacgaaggcgccgttttcacctcgtgttctgaccatccagtctaactaa

SEQ ID NO: 80274 - DNA, 287 bp, Zea mays
gacccacgtgtccgaacacgcgtacgcccacgcgtccgcccacgcgtccgcggacgcgtgggcggacgcgtgggggcttgcgctcaagttcgcagtgttcgactaggagatcctgaactcccctgaccgtgcgtgcaaccttgcaaagcaggcctttgatgaggcaatctccgaactagacagcctgggagaggagtcctacaaggacagcactctgatcatgcagctcctgcgtgacaacttgaccctatggacttccgacaccaacgaggacgccggagatgaga

SEQ ID NO: 80275 - DNA, 427 bp, Zea mays
atacgagaaactttctccctcctccacctttctccttttcttgccacggcaaaacaccttcgccggcgagagcatggcgatggcgtaccgtgtcctggaggtcaccctggtgtcggcaaatgacctcaagaaagtgtcgctcttctcccggactcgcatctacgccgtggcttccatctccggattcgacctccgcatcccttcccacagcacccaagcagaccacagcaacggctgcaacccctgctggaacgccgtggtacacttccccatcccggctgccgctgacacccgcggcctcgcactccacgtgaggctccgcgcccagcgtctatacctgggcgatcgcgacatcggcgaggtgtttgtgcccatcgacgacctcctggccggcgccgacaagggtggcgatccgaggcccgtgagc

SEQ ID NO: 80276 - DNA, 432 bp, Zea mays
aggaagcagttcggccgctcgtccaagaagagcgatgtctggtgcctcggcctgctcatcctcgagatgctcaccgggaagccgccgacctacgacctgcccaaggcggcgggggcggtgccgtcggccgaatcgttgtcgtcaccgcagaagccgggtccggcggcgggcaacggcacggacctggtgaccgtcgtggggtcgacgccggagggcgagtggctggacaccgtggtggacccggacctgaggggcgaggaggaggaggacaaggaggagatggtgaagctgataagggtcggcatggcgtgctgcgagagtaacgtggacagccggtgggagctcaagaccgccatcgacaagatcgaggagctcaatgcgaacgagcgccccgcccccgacgacgagcaggccttctactcgacggtgaac

SEQ ID NO: 80277 - DNA, 355 bp, Zea mays
cgcgtccaggtggccgtcaacgacgtcgtcttcaagaacatccacggcacctccaacacgccggaggccatcacgctcaactgcgccaacaacctgccatgccagggcgtgcagctcgtcaacgtcgacatcaagtacaatggatccggcaacaagaccatggccgtctgcaagaatgccatcggcaagtccatcggcttggcaaaggagctggcgtgcatttgaaccaattgactaacatgcatatattatgtactaggtttgtgcccgtgcgttgacacggaagttaaaaattagtataaaacaaagatacataacgataaatatcactatgacattcaaaaaagaaacaaaa

SEQ ID NO: 80278 - DNA, 312 bp, Zea mays
acccacgcgtccgcccacgcgtccgcccacgcgtccgcgatcgagcttaattgcgccactgctcgttatcctcctcttgcattgcattgcaggtcgtagttgagcagcagcaaccactgcacaggatgtcgtggcagacgtacgtcgatgagcacctcatgtgcgagatcgagggccaccacctgagctctgccgccatagtcggccacgacggcgccgtttgggcccagagcaccgcattcccacagttcaagccagaggagatgaccaacatcattaaggacttcgacgagcctgggtttctggccccga

SEQ ID NO: 80279 - DNA, 444 bp, Zea mays
cccaggcctccgacttgttcatcctggtcctcttctgcatcgtgcatggtgagaaggaagagtcaaagggcatcgatgcgaaagcgtccgggcctggtgggtccttcgacatcaccaagttgggcgcctccggcaatggcaagacagacagcacgaaggctgtgcaggaggcatgggcatcggcgtgcggcggcactgggaagcagacaatcctcatacccaagggtgacttccttgtcggacaactcaacttcacaggcccttgcaagggcgacgtgaccatccaggtggatggcaatctgctggcgaccacggacctaagccagtacaaggaccatggtaattggatcgagattctacgcgtggataacctggtcatcaccggcaagggaaaccttgacgggcaaggcccagccgtgtggagcaagaactccctgcacaaga

SEQ ID NO: 80280 - DNA, 426 bp, Zea mays
acacctcgctcatgtccgctcaccggggcgggctcagcatcctttcgaagaagtaacacttctccgtgaggcctgagcccctcgccgcggtgagccaagccggcgcacgtcgccccggggctcacgctcaccaccgagccccaaccaattaataatatatatatatagctaggatcgatcgtcagtaaaatggcaggctccgccgtcctgaggagccccctgtccgtcctcctctacatcctcgccgccgtgcccgccaccgccgcggcgacgccgaccgacgccgccatcgacgaggcgtacgcgcatctcgtcaacctcaccgctaaccaggagtactgggcggagcgcgcggaggcggcgcacgcgtacaaccgcgcggcgtaccagaccgaccccgtggccgtcgtgcagcgcttcaacgac

SEQ ID NO: 80281 - DNA, 430 bp, Zea mays
cgcgtccagacctggctcagtgcgccaccgccgccgcggcgaccgtcgcgccccgcacccctcgccctgctgcgtccgcgtccgtctccttctccgcgaggaagccggcgggcggcagcctgcggctgcagcggcaggcgtgctgcgagccgtcggtggcgccgtcgcgggcggtgttcgcctgccgggccgcggcgtcggggagcgcggccgacctggcctccgggggcaggaggtcgtccggcgtgccggtgttcgtcatgatgccgctggacaccgtcaaggagtgcggcaccgcgctgcaccgccgcaaggcggtgcaggccagcctctccgcgctcaagagcgcgggcgtcgagggcgtcatggtggacgtgtggtggggcatcgccgagcgcgacggcccgggccggtacaacttcgcgggcta

SEQ ID NO: 80282 - DNA, 400 bp, Zea mays
  unsure (1)..(400): unsure at all n locations
acgaaagaagtcgcctaattctttcgatcgaattaggcgccttcttcgtcccacgctccgtctttatttgtaatctgaagcttacaggaacatttgagtggatcatggacggattggtaggcctcttgaaagtccgggtggtgaggggcatcaaccttgcctaccgcgacgcaagaggcagcgatccgtatgtcgtcctacgacttggcaagaagaaacttaagacgagcgtgaagaagagatctgtgaaccccatctggcacgaggagctaactctgaccgtcacagatcccagcctagctctgaagctggaggtgttcgacaaggacacgttcagcagggacgacncgatgggggacgcggagatcgacgtggcgccgctggtggaggcggcgaacgc

SEQ ID NO: 80283 - DNA, 384 bp, Zea mays
agacacccacaaggactccgccgccggcaggacacaacacatctatcgcatagtcagcttaaaacatagtgatgatgcggtgacgcatccatcctccacgcttcttgtcttcgccttaattaatgattaattgttatgatcatgtcggccatccgaatgccgtatgtatgcatgcacatcgcgactaattaatccctgttgatttattactccgtgaaatgtactttctccgtacacacagcacactgctcttcggctaagatgaaactggtataaaccaatgttgcattctgcataaggcccctgacatggatgcgcgcctccactctactcgcgttcttggcacctttggctaccattcaccacaatatgccatgactggac

SEQ ID NO: 80284 - DNA, 371 bp, Zea mays
accacgcgtacgcccacgcgtccgctcctccaccaccaccaccaagctcaacaacagccagctcgcgaaaataatgaagagccgcagcatggcatcatcggccgcgctcttggtgctagccctcgcgctagtggcggccaccgccccacaggtagcggaggcaaagaagaagagagcggcggagagcggcgaggcggcggaggcgaagaagatccaggacgacttctgctcgacgctgtgcgagggcaagaaggggacggacctggtcgtgtgcaaggagtcctgcgcgctctcccagcagtccaacctggtgctgtacggcaggattcagtgcaaaggcaagtgcaccgagcagaagggcatcacggcgc

SEQ ID NO: 80285 - DNA, 133 bp, Zea mays
ccctctcgtgctgttcttcctcaacttcgccatccgttactcgctctcctgcatcgcctgtcacaatatcaacatcattactgtctttactatcttcacggcttacggggttggtcatctattctctcagtcg

SEQ ID NO: 80286 - DNA, 409 bp, Zea mays
acgccgtccttgcggcgctcgtcgccggcgggtcgtgcgggcccccgaaggtgccacccggccccaacatcaccaccaactacaacggcaagtggctcaccgctagggccacctggtacggtcagcccaacggtgccggcgctcctgacaacggcggtgcgtgcgggatcaagaacgtgaacctgccaccctacagcggcatgacggcgtgcggcaacgtccccatcttcaaggacggcaagggctgcggctcatgctacgaggtgagatgcaaggaaaaacctgagtgctcgggcaatccagtcacggtgtacatcactgacatgaactacgagcctatcgctccctaccacttcgacttgagcggcaaggccttcggctccctggcaaagcccgggctcaacgaaca

SEQ ID NO: 80287 - DNA, 449 bp, Zea mays
  unsure (1)..(449): unsure at all n locations
cccaggcctccgaccaggtggaaagtcttcagacaagggtgaactgacaagggcccccagcaagctatcatctgcgttttctggtactcaggataagtgtgcagcttgccagaaaacagtgtacccgctggagaagttaactctggaaggcgagtcctaccacaagagctgcttcaagtgctcgcacgggggctgcatcctcaccacctcctcctacgccgcgctcaacggcgttctgtactgcaagatccacttcgcgcagctgttcatggagaaggggagctacagccacatgatgaagaagagcccgtcccaggatacgctgccggacatggcagccgacgagcaaccgccggaaccggcgccaccgcaagacggggaaggagaggacaactangangaanggaccgccaccaatatatatcacacacacacacacacactcacac

SEQ ID NO: 80288 - DNA, 435 bp, Zea mays
cgcgtccaacattatggagcaatgacagaatcagttattcgcaacttcacccgccacattctaaggggtctagcatttttgcatggccaaaagattatgcatagggatatcaaaggagcaaatctgctagttgatgttcagggtgtagtcaaattggctgactttggaatggcaaagcatttaagtactgcagcccctaatctttcactgaagggaacgccatactggatggccccagagatggttcaagctacactaatgaaagatgtaggctatgatctcgctgttgacatatggagtcttggctgcaccatcatagagatgttcgatggaaagcctccttggagtgatcttgaagggccagctgcgatgtttaaggtgttacataaagacccaccaattcctgaaaatttgtccaatgaaggcaaagaattt

SEQ ID NO: 80289 - DNA, 422 bp, Zea mays
aagcgggagtacacgcagtacagcgagtacaagaactgggtgtggaagtcgcaggacgacctgttcctcaacggcgccttcttcaaccagtccggcggccagaacgagcgcaagtacgacaggctcgacctcatccaggccaagggcggccagtacgccgagtcgctcaccaggtacgccggcgcgctcaactgccgcgtcggcaggaagtgctagtgcgtgtgcagctctaggctgcagctttcatcattggcgatcgatcgtaacaatgcaaggttgtgttgtatataactcttgtgtttggaatgccgcccgtaattaatggtcaactctaacactgcttgcctttgcctgccggccagcaacaccattgtcccttgtggttcctgagttcttccttgtttatccatgcatggaaaccg

SEQ ID NO: 80290 - DNA, 426 bp, Zea mays
aggggaggtgtccgggatcacgctgctcaactccaagttcttccacatgaacatgtacaagtgcaaggacatgctgatcaaggacgtcaatgtgacggcgcccggggacagccccaacacggacggcatccacatgggcgactcgtccggggtcaccatcaccaacaccgtcatcggcgtcggcgatgactgcatctccatcggccccgggacctccaaggtgaacatcaccggcgtgacctgcggccccggccacggcatcagcattggcagcctaaggcggtacaaggacgagaaggacgtcacggatatcaacgtcaaggactgcacgcttaagaagacggccaatggcgtccgcatcaaggcatatgaggacgctgcctccgtgctcaccgcctccaagattcactatgagaatatcaagat

SEQ ID NO: 80291 - DNA, 422 bp, Zea mays
  unsure (1)..(422): unsure at all n locations
acccacgcgtccggccgtcttctcgtctcgctcccctctttgcgccgcccccagatccggcaccgcccgctgctcgaacccgcaccccacgcccgcaggccgggaccggtgggcgcgcgccgggcagtaggagggagaggaagggcggcatggcggcgccgccggcgagggcccgggccgactacgactaccttatcaagcttcttctcattggggatagcggtgttggcaagagttgcctcctgttgcggttctctgatggttccttcactacaagctttattaccacaattggtattgactttaagatacggacaatagaaatggatggtaagcgtatanagctacagatttgggatacagcggggccaagaacgcttccgtactattaccactgcgttctaccgtggacctatgggtat

SEQ ID NO: 80292 - DNA, 372 bp, Zea mays
aggcaagggacgtaagaagtcgtctaattcttggatcgaattagacgacttcttcgtccctctcttcattagcacgctaacttgtaatctgcaggatctaagcaaagacttgatttagttatggacggattggtaggcctcttgaaagttcgcgtggtccggggtatcaaccttgcctaccgcgacgcaagaggcagcgatccgtatgtcgtcctacggcttggcaagaagaaactgaagacaagcgtgaagaagagatccgtgaaccccatatggcaagaggagctaactctgaccgtcacagatcccagccaaccactgaagctggaggtgttcgacaaggacaccttcagcagagacgaccccatggga

SEQ ID NO: 80293 - DNA, 398 bp, Zea mays
aggaacatgccccccggcatgccgcaggtgctcatcgtcacgggcctcacctggctctcctggttccccttcatcctcttcgacaccgactggatgggccgcgagatgtaccacggcaggcccgacggcagccccaaagaggtggccaggttccaggagggcgtccggcagggcgccttcggcctgctcctcaactccgtcgtcctcggagccagctccttcctcatcgagcccatgtgccgcaagctcaccgccaaggtcgtgtgggtcatgagcagtttcctcgtctgcgtcgccatggccttggtcaccgtcctcagctcctggtcgctccgcgacatcgggggcaaagtgcaagacgccgccgccgtggataagggcctcaagaccaccgcgct

SEQ ID NO: 80294 - DNA, 416 bp, Zea mays
accacgcgtacggggatcaggagagcgccatgctgttttttttctcaccttcacaggaactccgacgtgcaacggcggccttcaccacgaactcctcttctgggctgatgatggtgcggcagagagtcagggtgatggttatttttttggagatgaactgcagcaggtcttgcggtgatttggaggcagcctcacggcagtatggaatggactcccccggaatgatcgctgtggcctgctatttatacactaccggaatttggctctttgccgagtgccaaattctttgtcgagtgttttatttcgggcactcgacaaagagctctttgccgagtgccacgcaaaaaaccctcggtaaaagaaaacactcggcgaaaaagctctttgccgagtgttttatttttgacactcggcaa

SEQ ID NO: 80295 - DNA, 442 bp, Zea mays
cccaggcctccaagacgatcaagtgtcggcatctcaaataatcaatacaatgtggaattcattgaaaggacggccagttctgggccgtatataccaagggaaggagccaccacaatttgttgctcttttccagcccatggttatcttgaagggtggaatcggatctggatacaagaagctcatagaagaaaaaggtgctatgggtgagacttatactactgaaggcatagctctaattcgagtatctgagacatctatctacaacaacaagactcttcaagtagatgcggtagcaacgtctttaagctcaacggagtctttcgtactgcaatctggaaatgctatgtttacatggtttggcaattctagcacatatgagcaacagcagtgggcagcaaaagttgctgaatttttgaagcctggcgttgcagtgaagcactgc

SEQ ID NO: 80296 - DNA, 431 bp, Zea mays
ccaggcctccagcatcaaggcgtacgaggacgccgcctccgtgctcaccgtctccaagatccactacgagaatatcaagatggaggactcagccaaccccatcttcatcgacatgaagtactgccccaacaagttgtgtactgccaacggcgcctccaaggtcaccgtcaaggatgtcaccttcaagaacatcaccggcacctcctccaccccggaggccgttagcctgctctgcactgccaaggtcccatgcaccggcgtcaccatggatgacgtcaacgtcgagtatagcggcaccaacaacaagaccatggctatatgcacgaacgccaagggcagcaccaagggttgcctcaaggagcttgcatgcttctagaccctccatcgactgacccatctctctagttataatttttctctcgtccttgcat

SEQ ID NO: 80297 - DNA, 396 bp, Zea mays
accacgcgtccgcccacgcgtccggttgtcacccacccatcgaggttggggccgccagcaggttcagccgttcctgttcttgataaaacgagagaaggatggcagtgtttcagggagctgtcctattcttgtttctcctcctcgtcgcagcagaggtgggaaccatcgatgccaaaatgggagtagccatgcccatgcatgccttgataatggagaaagcgaaacagcaggagacggagaagaaggaggagaaaagcacggagaaggaagagagtcaatgcttatcgccgagtctccagttcgagggcttctgcttcaacagcgacagatgcgccgaggtgtgcatgaaggagagctttcccggtggcgagtgcaagcgggacgtggccatgcgca

SEQ ID NO: 80298 - DNA, 431 bp, Zea mays
acccacgcgtccgaacgtcgtacgagaacctttctccctcctccacctttctccttttcttgccacggcaaaacaccttcgccggcgagagcatggcgatggcgtaccgtgtcctggaggtcaccctggtgtcggcaaatgacctcaagaaagtgtcgctcttctcccggactcgcatctacgccgtggcttccatctccggattcgacctccgcatcccttcccacagcacccaagcagaccacagcaacggctgcaacccctgctggaacgccgtggtacacttccccatcccggctgccgctgacacccgcggcctcgcactccacgtgaggctccgcgcccagcgtctatacctgggcgatcgcgacatcggcgaggtgtttgtgcccatcgacgacctcctggccggcgccgacaagggtggcgat

SEQ ID NO: 80299 - DNA, 435 bp, Zea mays
cgcgtccacagccagctcgcgaaaataatgaagagccgcagcatggcatcatcggccgcgctcttggtgctagccctcgcgctagtggcggccaccgccccacaggtagcggaggcaaagaagaagagagcggcggagagcggcgaggcggcggaggcgaagaagatccaggacgacttctgctcgacgctgtgcgagggcaagaaggggacggacctggtcgtgtgcaaggagtcctgcgcgctctcccagcagtccaacctggtgctgtacggcaggatccagtgcaagggcaagtgcaccgagcagaagggcatcacggcgccggccatgaaggtctgccaggaggagtgcgacaaggcgtacgtggtgaaggcggccgaggtcaccaaggcctgcagcgtcacctgcgccaaggagaagaacccgcgcctc

SEQ ID NO: 80300 - DNA, 301 bp, Zea mays
atgctgggatcaaacgacctgaacaagtacacggcgagctggatcgaattgtctcacgttaacaacatcgggatcaccggctcgggcacgctggacggccaggggaccgccgtttatagcaagagcaagaccgacaacgtgaaggcgatgcccaacacactggtgctgtttcacgtgatcaacgccactgtcgccggaatcaaactactcaactccaagttcttccacatcaacatcgacaactcagagagcatcaccgtgaaggacgtgaacgtcaccgcgcccgccgacgttgagaaca

SEQ ID NO: 80301 - DNA, 329 bp, Zea mays
ttcacgggccaacccacacgtccatgctgggatcacacgacctgaacaagtacacggccagctggatcgaattgtctcacgttaacaacatcgggatcaccggcgcgggcacgctggacggccagcggaccgcggtgtatagcacgaggaagaccgacaacgtgaaggcgatgcccaacacactggtgctgtttcacgtgatcaacgccactgtcgccggaatcaaactactcaactccaagttcttccacatcaacatcgacaactcagatagcatcaccgtgaaggacgtgaacgtcactgcgcccgccgacgttgagaacacggac

SEQ ID NO: 80302 - DNA, 423 bp, Zea mays
ccacgcgtccacagacccgtccgcatgatggcatgtatacacactgcattgagagccttgttccttctagcgctcttctgcaccgtgcatggtgagaatgcaaactcatcggacatcgattcagaagcgtccgggcccggtgggtccttcgtcatcaccacgttgggcgcctctggcaatggcacgatggctatcacgaacgctgtgcaagaggcgtgggcatcagcgtgccgcggcaccgtgaagcacacgatcgtcatccccaagggcgacttcctcgacggaccactcaacttcagaggcccatgcaagggcgacgtgaccatccaggtgaatggcaatctgctggcgaccacggacctaagccagtacaaggatcattggtattggatcgagattctactcgtggacaaccttgtcatc

SEQ ID NO: 80303 - DNA, 312 bp, Zea mays
  unsure (1)..(312): unsure at all n locations
gtcgaagcgaagcttccggttcatcacgttcangatcaacgagcagacgcagcaggtggtggtggaaaggctggggaagccggcgaaaactaagacgacttcaacggctccatgcccgagagcgagtgccgctacgccgtcttcgacttcgacttcaccaccgacgagaactgccagaagagcaagatcttgttcatctcctggtcnccggacacctcgagggtcaggagcaagatgctgtacgcgagctccaaggaccggttcaagagggagctggagggcatccagctggagctgcaggccaacgacccc

SEQ ID NO: 80304 - DNA, 312 bp, Zea mays
ccacgtggctctcctgctatcgctgctggtcgccgtgctagcggtggccgcggatgtcgccaacgccggccacgccaagcccctgacgcctggcgggcgcgtggtacaccacaaccacggtaagttcacggccgggccgtggtaacccgcccacgcgaccttctacggcgggcgggacgggtccggcaccacggctggcgcgtgcgggtacaaagacacgcgcgcgcaggggtatggcgtgcatacggtggccgtgagcacagtgctgttcggcgactgcacggcctgctgcgggtgctacgaggtgcgctg

SEQ ID NO: 80305 - DNA, 399 bp, Zea mays
ccgggtccccccacgcgtccgatagtctcaccctccctccctcacacaaataataaggaaaggtcccgcccttttcctccgacatccacaaggggggaggggaaaacacgtacattcacccggcggcaataatggcctcggttccggctccggcgacgacgaccgccgccgtcatcctatgcctatgcgtcgtcctctcctgtgccgcggctgacgacccgaacctccccgactacgtcatccagggccgcgtgtactgcgacacctgccgcgccgggttcgtgaccaacgtcaccgagtacatcgcgggcgccaaggtgaggctggagtgcaagcacttcggcaccggcaagctcgagcgcgccatcgacggggtcaccgacgcgaccggcacctaca

SEQ ID NO: 80306 - DNA, 440 bp, Zea mays
ccacgcgtccgacaacgcgtccgcccacgcgtccgcccacgcgtccgcgatcgagcttaattgcgccactgctcgttatcctcctcttgcattgcattgcaggtcgtagttgagcagcagcaaccactgcacaggatgtcgtggcagacgtacgtcgatgagcacctcatgtgcgagatcgagggccaccacctgagctctgccgccatagtcggccacgacggcgccgtttgggcccagagcaccgcattcccacagttcaagccagaggagatgaccaacatcattaaggacttcgacgagcctgggtttctggccccgatcggcctcttccttggccccaccaagtacatggtcatccaaggcgagcccggcgctgtcatccgcgggaagaaaggatctggaggcataactgtgaagaagaccggacaggcgctggt

SEQ ID NO: 80307 - DNA, 420 bp, Zea mays
agaacacggacgagaaggacgtcacggacatcaacgtcaacgattgcactcttaagaagacgatgttcggcgtccgcatcaaggcgtacgaggacgccgcctccgtgctcaccgtctccaagatccactacgagaatatcaagatggaggactcagccaaccccatcttcatcgacatgaagtactgccccaacaagttgtgtactgccaacggcgcctccaaggtcaccgtcaaggacgtcaccttcaagaacatcaccggcacctcctccaccccggaggccgttagcctgctctgcactgccaaggtcccatgcaccggcgtcaccatggatgacgtcaacgtcgagtatagcggcaccaacaacaagaccatggctatatgcacgaacgccaagggcaagcacaaaggttgcctca

SEQ ID NO: 80308 - DNA, 434 bp, Zea mays
  unsure (1)..(434): unsure at all n locations
acaagcgtccgcccacgcgtccgcccacgcgtccgctggactcgcgccactccttgtaccagggcctgtacgcccgcagcgtggcggacgcccgcatccgccccgcgctccgcctgctgaagcagaacctgtcgttcctggtgtccgtgctcgcggaccgcgcgcagcccgtggcggtgcgggaggtgatgcgcgcctccttcgaggcgttcctgatggtgctcctggcgggcggcaacgagcggagcttcgtgcgcgccgaccacgccacggtggaggaggacttccggagcctgaggcgcgccttctccacgtgcggggaagggctggtcnccgaggacgtggtggcgcgggaggcagagacggccgaggccgtcgtggagctcatggcacgctccacggactacctcatcgacgcgttcagcgtcgccacg

SEQ ID NO: 80309 - DNA, 425 bp, Zea mays
acggccggccagccagcgcgcgagaggacgtacggacgaacagctataggcggaggcgatggacggccaacgacgacagcaatggccgaggtctcgctcgggggctgccgccgcgcctctcctcctcctgctgctcctgtcggtgtccttgggggggcatggtgatcacggcgcggcggctgcgggcgtcgcccctgcagccggcaacggcatgacggagctgcagaagcacgtggcgttcttcgaccgcaaccacgacggcatcatcaccttcgacgagacctatcaatgtctgcgggacgtcggagtcggcgatgtcacggccaaagccagcgccgcgttcataaacggcgccctcggccccaagaccagacctgacaattccaactcctcaagcacggatatctacgtagagaacattcaga

SEQ ID NO: 80310 - DNA, 421 bp, Zea mays
agaccagcccaccttcacgctcaacttctccaaaggttccagccagattatcgcgcagtattaccagctcatccgcctcggattcgagggctacaaggacgtgatgcagaactgccgcgacaacgcggcggtgctccgcgagggcatcaacaagatgggctacttcgacgtggtgtccaaggactcgggcgtgccgctggtcgccttctccctcaaggactcctccaagtacacggtgttcgaggtggccgagagcctgcgccggttcggctggatcgtgccggcctacaccatgcccgccgacgcggagcacgtggccgtcatgcgcgtggtcatccgcgaggacttcagccgcgggctcgccgagcgcctcatcgcggacctgggcaagaccatggccgacatggacgcgcacgccggc

SEQ ID NO: 80311 - DNA, 424 bp, Zea mays
agaacgcgtgggacagccgagcgatctcctctccctctccctctccgatccattctccagcgcagcgaagtaaacatgtctgaccgggcaaagatgtcgtggcaggcgtacgtggacgagcacctgatgtgcgagatcgagggccaccacctcgcggcggcggccatcgtcggccacgacggtgccgcctgggcgcagagcacggcgttccccgagttcaagaccgaggacatggccaacatcatgaaggacttcgacgagccagggcacctcgcgccgacaggcctgttcctcggacctaccaagtacatggtcatccaaggcgagcctggtgccgtcatccgtggcaagaagggatcaggaggcatcaccgtgaagaagacagggcacgcactcgtggttggcatctacgacgagccgatga

SEQ ID NO: 80312 - DNA, 428 bp, Zea mays
  unsure (1)..(428): unsure at all n locations
agatattcatgtcactgcttgctggtgctctgtttgggcagctccggggcgtggccctggtagtcttcgccgccactgctggcgcttcttcgtgctatttcctgtcgaagatgattgggaagccactggtgttcacgctgtggccagataaactcagcttcttccagagacaggttgctaaaagaagagagaagctcttgaattacatgcttttcctcagggtgaccccaacattgccaaataccttcatcaacttggcttcaccgatagtagatgtcncctaccacatattcttactgggaactctcattggccttatcccagcttcttatgtgactgtcanggctggaatcgctcttggagaataaactcgctaagcgacctttacgacacccagtcgatagcgctgctattcctgatcggtgttg

SEQ ID NO: 80313 - DNA, 436 bp, Zea mays
aatgacttctgcaaacagcttgagcttgccaggacgttccagtttcctactctcaggcagccacccgcatcgtttcttgcaacgatggaagagtacatcagagaagcaccccgaccctcgatcaagagtgaggagagcgaggagccgaagctactgacctacgagcaagaagctccagaggaacccgaaaatgctgtggaagaggagaaagaagaaccgagtcaaaaaccagaacctcagcctgtgcctgatccagaaccccacccacagcaaacgactggagatctactaaacctggaagcagaggtgaatccttcggctctggaactcgaacaaagcaatgcattggcactcgctaatgtagcaccaggtgactacaagccgccagcatctcaaagtatgtttgatgtcaattcgtctgggtgggagctggcac

SEQ ID NO: 80314 - DNA, 434 bp, Zea mays
agcacacacacgcaaccagatctcccccaaatccagccgtcggcacctccgcttcaagatgcagatctttgtgaaaaccctgactggcaagactatcaccctcgaggtggagtcgtctgacaccattgacaacgttaaggccaagatccaggacaaggagggcatccccccagaccagcagcggctcatcttcgctggcaaacagcttgaggacgggcgcacgcttgctgactacaacatccagaaggagagcaacctccaacttgtgctccgcctcaagggaggcatgcagatcttcgtgaagaccctgaccggcaagactatcaccctcgaggtggagtcctccgacaccattgacaacgtcaaggccaagatccaggacaaggagggcatccctccagaccagcagcggctcatctttgctgggaagcagc

SEQ ID NO: 80315 - DNA, 435 bp, Zea mays
  unsure (1)..(435): unsure at all n locations
accacgcgtccgcaaacatgagaggagcagaggaggagagatctggcgccgccactgatgcgggaggagaggaggagaaacgggagaggagcgtcggcctgatggccggcctcatggacaaggccaagggcttcgtggtggagaaggtgacgcaaatccccaagcccgaggctgcgctggatcacgtctccttccagagcatcagccgcgagggcgtcgagctgcatagccacgtcgacatcagcaacccctactcgcaccgcatccccatctgcgagatcacctacacgttcaagagcgccggcaaggtgatagcgtcgggcacgatgcccgaccccgggtggatcgcggcgagcggcagcacaaggctagacctgccggtgaaggtgccgtacgacttcatcgtgtcgctgatgaaggatctcggangggact

SEQ ID NO: 80316 - DNA, 417 bp, Zea mays
tagcggtctgatcgtatccgggtggccccacgcgtccgatagtagcgaaaggcaagggacgtaagaagtcgtctaattcttggatcgaattagacgacttcttcgtccctctcttcattagcacgctaacttgtaatctgcaggatctaagcaaagacttgatttagttatggacggattggtaggcctcttgaaagttcgcgtggtccggggtatcaaccttgcctaccgcgacgcaagaggcagcgatccgtatgtcgtcctacggcttggcaagaagaaactgaagacaagcgtgaagaagagattcgtgaaccccaaatgggaagaagagctaactctgaacgtcacagattccaaccaaccactgaagctggaagtgttcgacaaggacaccttcagcagagacgaacccat

SEQ ID NO: 80317 - DNA, 452 bp, Zea mays
cacgcgtccgaccaagcgtccgagcgcacacacacacaaccagatctcccccaaatccacccgtcggcacctccgcttcaagatgcagatctttgtgaaaaccctgactggcaagactatcaccctcgaggtggagtcgtctgacaccattgacaacgttaaggccaagatccaggacaaggagggcatccccccagaccagcagcggctcatctttgctggcaaacagcttgaggacgggcgcacgcttgctgactacaacatccagaaggagagcaccctccaccttgtgctccgtctcaggggaggcatgcagatctttgtgaaaaccctgaccggcaagactatcaccctcgaggtggagtcctctgacaccattgacaacgtcaaggccaagatccaggacaaggagggcatccctccagaccagcagcggctcatctttgctggga

SEQ ID NO: 80318 - DNA, 456 bp, Zea mays
  unsure (1)..(456): unsure at all n locations
cggggggcacaagatcgtgtatcaaatcgagaagggctgcaaccccaactacctggccgtgctggtgaagtatgtggcggacgacggcgacatcgtgctgatggaaatccaggacaagttgtcggctgagtggaagcccatgaagctctcttggggcgccatctggaggatggacactgccaaggcgctcaagggccccttctccatccgcctcaccagcgagtccggcaagaaggtcatcgccaaagacgtcatcccggcgaactggagacccgatgccgtctacacttccaacgtccaattctactagactttgaattcncttcgattcatccggcacagcgggctatggaccttcagcagcaagctaattaagttggcagcatgcaccgctaaccttatatactactgagacttccaaattctagtatatgtaatccttttgttcgggttcaa

SEQ ID NO: 80319 - DNA, 424 bp, Zea mays
  unsure (1)..(424): unsure at all n locations
agctttggtcttgcaagggaagtctcatcattgccaccatatacagaatatgtctcaactcgctggtatcgggcaccagaagtcttgctccagtcatctgcttatgattctgcagttgatatgtgggcaatgggtgccataatggctgagctgttgacactccatcctctctttcctggaaccagtgaaccagatgagattcacaagatatgcaatgtcatcggtagtccagatgagcaatcttggcctcaaggattgtctcttgcagaagcaatgaagtatcagttcccacagaccaaaggcagtcaattgtctgaggtgatgacaacagctagtagcgaggcaattgacctcatctcatcactatgctcatgggatcctagcangagaccaaaggccacagaagtcctccagcataccttct

SEQ ID NO: 80320 - DNA, 438 bp, Zea mays
cggacgcgtgggcggacgcgtgggcgcaccgcctccccgtgtcccctccttctcgcccggcaccgtcgagctcggctgtggaaacagaacaaacccatcaaccatggcgaactcggcgtcggggatggccgtgagcgacgagtgcaagctcaagttccaggagctcaagtcgaagcgaagcttccggttcatcacgttcaagatcaacgagcagacgcagcaggtggtggtggacaggctggggcagccgggcgacacctacgacgacttcaccggctccatgcccgagagcgagtgccgctacgccgtcttcgacttcgacttcaccaccgacgagaactgccagaagagcaggattctgttcatctcctggtccccggacacctcgagggtcaggagcaagatgctgtacgcgagctccaaggaccggttcaagag

SEQ ID NO: 80321 - DNA, 422 bp, Zea mays
agacatctcagcatcagcttctgttgcatcagggaacaaattctgcaagggtggtgcctgtgatttctctgattccagtaactcctcgaaagatgccaaggagagatccacgtccatgaggaagcttataatcgcagtgatcctttgcatcatattcatgacggtggaagtggtcgggggcatcaaagcaaacagtcttgccatcttaactgatgcggcgcaccttctttctgatgtggcagcatttgccatatcgttattctctctctgggctgctggatgggaagcaacaccgcagcagtcatatgggttcttccggattgagattcttggtgccttggtctccattcagctcatatggctacttgctggcatactggtatatgaggctattgtaaggctcattaacgagagtggcgatg

SEQ ID NO: 80322 - DNA, 414 bp, Zea mays
ataccctcgtcgtcgtctcactcaccccgccttcacgcctccctcaccaaataaggtcccgcccttttccgacattcacaggggggacaggaaatcagcggccatggcctcgattccggcgacgaccttcgccgtcatcttatccgtcctcttctgtgccgcggctggcaccgccgtcgacaacgacctccccgactacgtcatccagggccgcgtctattgcgacacctgccgcgccgggttcgtgaccaatgtcaccgagtacatcgcgggcgccaaggtgaggctggagtgcaagcacttcggcaccggcaagctcgagcgctccatcgacggggtgaccgacgggaacggcacgtacacgatcgagctcaaggacagccacgaggaggacatctgcgaggtggtcttggt

SEQ ID NO: 80323 - DNA, 466 bp, Zea mays
  unsure (1)..(466): unsure at all n locations
ggtcacaaatccgggtccgncacgcgtccgaaggaccgcaacgcaagcgccgacgccaaggactccccaaggggaaagaatggtcaacccaaaaggcaaaacaaaccaaatttaaaggaattcaaaccaaaaaattgcaaggcgtataaagaaaatcagaaggaacctgtaacaatgatggaaggatctccacctgatgttggtcaagatggtgatgatgagcaaggtattgatccatcttgggctgctgtagttacgccggttttacgagtcaagacaatttatatcagttcggcgattcttgctgcgaagagtcctttctttttcaagcttttctcaaacggcatgaaagaatcggaccagagacatgcaacccttagaaatactgactcagaggaaaatgccctcatggagcttttaagctttatgtatagtggaaagttgacaactactgagcccactcttc

SEQ ID NO: 80324 - DNA, 414 bp, Zea mays
aaccaaggacgcgtgggcggcgaccgacctgtgcccacccaaggacaagtggtgcaagccgccgcaggagcacttcgacctcagcatgcccgcgttcctccagatcgcgcaggagaaggccggcatcgtgcccatctcctatcgcagggtggcatgcgcaaagcagggcggcatccggtacaccatcaccgggaacaagtacttcaacatggtgacgatcaccaacgtgggcggcgccggcgacatcgcggcggtgtcggtgaaggggagcaagcgcgtcaagtggacggagatgaagcgcaactgggggcaagtgtggcagaccgaggaggacctcacctgcgagtcgctgacgttccgggtgatgactagcgaccaaccgcaaggcacctcatggcacgttctccccgctga

SEQ ID NO: 80325 - DNA, 434 bp, Zea mays
ctctcgtgtcggtcccgcgatgggcatgttcgcatcggccgcaaagagatacagcaacggcaagaattttctccgcagcgcgggcgtgtgctgttgttcgccgtccgcctccgcccagcttggtggtgtgcgcggcaaggaagagacatcgacgtcggcgccagctttcgcgccggatagcaacaagaaaaggtggaggaagaggaggttctggagaaagaagatgaaggccaggaaggagatcggcgggctggtggacctcgtcaacgatatttcggccaagtcagaggagagcctaggggttagcaaccaaaacatgcccagcagggcgctgacgttcagtcagctgagcgccgcaacggacgggttcagttcgcagaacctgctcggagaaggcggctttggacgggtgtacaaagggctcctcgaggaca

SEQ ID NO: 80326 - DNA, 433 bp, Zea mays
cacgcgtccggtacctggacgccaacccgtccgaggtggtcaccgtcttcctcgaggactacgcggcgccagggtcactcagcaacaccttcaatgccgccggactgtccaagtactggttccccgaggctcaaatgcctagccctagtaagggcggcggtgactggccgctgctcagggacatgatcgccgataaccaccggctcatcgtgttcacatccaagaaagggaagcaggggacggaggggctcgcgtaccagtgggactacgtcgtggaaacccaatacgggagcgagggcatggcggatggcagttgcccaaagcggaccgagtcgaagcccatggactctaaggcccagtcactagtgctgctgaacttcttcaccagcaacccgagccaaagctgggcctgcagcaacaactccgcgccgct

SEQ ID NO: 80327 - DNA, 406 bp, Zea mays
gcagacgctagcgcatgcactacacacaccgtaccgagtgaacgaaatggcaggtgcgtgagcgaagacctcgaggttccgcatggagcgctccttgtgaaagattctcaacagtgtacacatgaacatagtcggacaaagggaaagaagaaatgaacagaagttccaggaccagcgtgaagcagggtgggagttctcttacgtgtattttcctttcactttgtagttccagtagtttaaaattcacttaacgttttgatcattgaatgccacatataatgccacaccagacgcgccgggattcgatgaccaaacgtcaacgaagtacatcgcgggcgccaaggtgaggctggagtgcaagcacttccgaaccggcaaactcaagcgcgcaatctacggggtcacc

SEQ ID NO: 80328 - DNA, 423 bp, Zea mays
  unsure (1)..(423): unsure at all n locations
gtaggcatgggccccgccggcgagctgcgctacccgtcctacccggagagcaacggcacctggaagttcccaggcatcggcgccttccagtgcaacgacaggtacatgcgtagccgcctgaaggcggcagcggaggcggccggcaagcctgagtggggccacggtgggccgaccgacgctggcggctacaacaactggccggaggacaccgtcttcttccgcggcgacaacggtgggtggagcaccgagtacggcgacttcttcctgtcgtggtactcgcagatgctgctggagcacggcgaccgcatcctgtcgggcgccacgtccgtgttcggcgcggcgcccgtggaggtctccgtgaaggtggccggcatccactggcactacggcagccggtcccacgcncccgagctcaccgcgggg

SEQ ID NO: 80329 - DNA, 396 bp, Zea mays
cacgcgtccaccatcgcgtccggcgatgctctgtacgctatggagctgactctggctctggaaaagctggttaatgagaagctgcacagcctgcatggtgtggcaacaaggtgcaatgatcctcagctgatagacttcatcgagagtgagttcctcgaggagcaggtggaagccataaataaggtctccaagtatgtcgcgcagctgaggagagtgggcaacaaggggcacggggtgtggcactttgatcagatgctgcttcaggaaggggcctgaaggccaacaagggtggcgtggacggagctgagctctgggtgtgttattttcttttctttccagttggttagtgttttagttgtagaacggtgttgcgttgcccacatgacatgatggatg

SEQ ID NO: 80330 - DNA, 383 bp, Zea mays
cggtcagaacgaacgggtcggccacgcgtccgaggtaaggtcccgcccttttccgacattcacaggggggacaggaaatcagcggccatggcctcgattccggcgacgaccttcgccgtcatcttatccgtcctcttctgtgccgcggctggcaccgccgtcgacaacgacctccccgactacgtcatccagggccgcgtctattgcgacacctgccgcgccgggttcgtgaccaatgtcaccgagtacatcgcgggcgccaaggtgaggctggagtgcaagcacttcggcaccggcaagctcgagcgctccatcgacggggtgaccgacgggaacggcacgtacacgatcgagctcaaggacagccacgacgaggacatctg

SEQ ID NO: 80331 - DNA, 436 bp, Zea mays
  unsure (1)..(436): unsure at all n locations
cccacgcaaccaagacaagatggcatgcacaaacaatgcgatgagagccttgttcctcctggtcctcttctgcatcgtgcatggtgagaaggaagagtcaaagggcatcgatgcgaaagcgtccgggcctggtgggtccttcgacatcaccaagttgggcgcctccggcaatggcaagacagacagcacgaaggctgtgcatgaggcatgggcatcggcgtgcggcggcactgggaagcatacaatcctcatacccaatgggcgacttccttgtccggacaacctaacttaacacgcccttgcaagaggcgacatgaccatccaggtggatggcaatctgctggcgaccacggacctaagccagtacaaggaccatggtaattggatcgagaatctacgcatggataacctgntcatcaccggcaagggaaacctt

SEQ ID NO: 80332 - DNA, 463 bp, Zea mays
attcgcccgtcgacccacgcgaccgagcagcatttcgagtaacacagttgagcacgacgatgggatccctcgctaataacatcatggtcgtgggcgccgtccttgcggcgcttgtcgtcggcgggtcgtgcgggcccccgaaggtgccgcccggccccaacatcaccaccaactacaacggcaagtggctcaccgccagggccacctggtacggtcagcccaacggtgccggcgctcctgacaacggcggtgcgtgcgggatcaagaacgtgaacctgccaccctacagcggcatgacggcgtgcggcaacgtccccatcttcaaggacggcaagggctgtggctcatgctacgaggtgagatgcaaggaaaaacctgagtgctcgggcaatccagtcacggtgttcatcacagacatgaactacgagcctatcgctccctaccacttcgacttgagcggcaa

SEQ ID NO: 80333 - DNA, 432 bp, Zea mays
acgcgtccgagagttcaaccacttcggccgcgggctggtgcagcggatgccgcgctgccgctacggcttcttccacgtggtgaacaacgactacacgcactggatcatgtacgccatcggcggcaacatgaaccccaccatcatcagccagggcaaccgcttcatcgcccccgacgaccccaacgccaaggaggtgaccaagcgggagtacacgccgtacaaggactacatcgagtgggtgtggaagtcgcagggcgacttcatgatgaacggcaccttcttcaacgagtccggcggccagaacgagcgcaagtacgacaggttcgacttcatcccggccaagcacggccgctacgtcggtcagctcacgcacttcgccggactactcaagtgcatcatcagccagccgtgctactacacatcggcccggtc

SEQ ID NO: 80334 - DNA, 375 bp, Zea mays
tgcaagattggggccttgagatcgttctcgctggagaagatacactactggagggagagagcgtccggcatgagctcgctggcatacttcctgtccaaagacacgatagatcacttcaacacgataatcaagcccatcgtctacctctccatgttttacttcttcaacaacccaaggtcatcgatctgggagaactatgtcgtccttcttgcgctcgtctactgcgtgacggggattggatacaccttcgccatcttcttccagccaagttctgcgcagctgtggtcggcgctccttccggttgttccaaccctgatagcaacccagcaaaaggacaccttcatcgcaaacctgtgctacacaaagtgggctctg

SEQ ID NO: 80335 - DNA, 417 bp, Zea mays
  unsure (1)..(417): unsure at all n locations
acgcgtccggcatgtacaaggaccatggtaattggatcgagattctacgcgtggataacctggtcatcaccggcaagggaaaccttgacgggcagggcccagctgtgtggagcaagaactcctgcaccaagaagtacgactgcaagatccttcccaactcgctggtgatggacttcgtgaacaacggggaggtgtccggggtcacgctgctcaactccaagttcttccacatgaacatgtaccggtgcaaggacatgctgatcaaggacgtgaccgtgacagcgcccggggacagccccaacacggatggcatccacatgggcgactcatccgggatcacaatcacagcaccgtcattggcgtcngcgacgactgcatcctcatcggccccgggacctcaaaggtgaacatcaccga

SEQ ID NO: 80336 - DNA, 458 bp, Zea mays
cggggccgaccaagccttcgacggacccttggggccttgctgacgccgccgctgtccctggggggcggcgggctcccggggaacctccgcccggcaaacctcggccaacggttgctcagccccttcggcaacttcggcccgggctccgacttctccaacttcaagctgccggcaactttcaaccggcccaagtcgcagctgcagctgtacggcgaggccgtgtactgcggcggcgaggacatgctggcgcggtgcgcgcgcggcgccgacagcctgcagcgcatgtgcgccgtggtggcgtggagcatctccaccacgcggccccccatcttcggcttcgcgccctacaacccggtgctcggggagacgcaccacgtctccacgcccgccggcctcaacgtgctcctggagcaggtctcgcaccgcccgcccgtgacggcgctgcacgcgacgcacgc

SEQ ID NO: 80337 - DNA, 419 bp, Zea mays
  unsure (1)..(419): unsure at all n locations
cgaccagcagaacctcataacggcgccggtgaccaaaagcggcctcatgaaggtgccgccccggtccgcgcccaccgcggttgcgcaggacacggtggtgctccccgtggacaacgccgcggggttccccggcgcttggtccatcatcagcgagaacgcgggcgtgtccgcgatgcacctggtgatcatgcggagcgacaaggccatcatgttcgacacggtcaccacggggccgtcgctgctgcggctgcccaaggggaactgccgcctcgatctccgcagcaagcaggtcggcgccaaggactgcgccgcgcacgccgtcgagtttgattacgcgacaggcggtgtcagggccctcaaggtcttgacggacgtgtggtgctcgtcnggcgcgctcgacgccgagggcaacctggtgc

SEQ ID NO: 80338 - DNA, 438 bp, Zea mays
cagcacgagacatatcgatggcgttcatcagcagtgcggcgatgaaggcagccgtggccgctctgctggtgttcgccgcggtgtcgcctgccgcgcgcgcggtggcggcggaggcggaggcgaaggcgaaagctgtgggaagcgcgccgtcggtgcccgctggctcgctggacatcgcgcagctgggcgccaagggcgacggcaagtcggacagcaccccgatggtgctcaaggcgtggaagcacgcgtgcgaagcgacggggcagcagaagatcgtcatccccaagggcaactacctgacgggcgcgctggacctggtgggcccctgcaagtcctccatcatcatccgcctcgacggcaacctgctcggcaccggcgacctcaacgcgtacaagaggaactggatcgagatccagaacgtcgacaacctgtccatca

SEQ ID NO: 80339 - DNA, 462 bp, Zea mays
ttcgcccgtcgacccacgcaaccgacgccgcacgtcgggcgcgctcgacaactgcggggagctgctcgactacgccatcgacgacctccggacgacgttcgacaggctcggcggcttcgagatgaccaacttcaagagcgccgtggacgacctccggacgtggctgagctccgcgctcacgtaccaggagacgtgcctggacgggttcgagaacaccacgacgcccgccgcgggcaagatgcgcaaggcgctcaacagctcgcaagagctgacggagaatatcctggcgctcgtggacgagttctccgagacgctcgccaacctgggcctgccgagcttccagcgccggctcctcgcggagcacgctcgcggcgcgccctcctggatgcccgacgccaagcgccggctgctgctggtctcccccggcgacaacggcttcaggcccgacgtgacggtggtcaa

SEQ ID NO: 80340 - DNA, 432 bp, Zea mays
  unsure (1)..(432): unsure at all n locations
atcctctccaacacgaagatggcgttcatcagcaatgtcgcagtgaaggcggcggccgtggccgcgctgctgctggtcgcagcggtgtcgcctgccgcgcgcgcggcggcggtggcggtggcgggaggggcgccgtcggtgccggcgggtccgctggacatcgcgcagctgggcgccaagggcgacggcaagtcggacagcaccccgatgatcctcaaggcgtggaagaacgcgtgcgaggcgacgggggtacagaagatcgtcatcccgccgggcaactacctgacgggcgggctggagctgaagggcccctgcaagtcctccatcatcatccgtctcgacggcancctgctcggcaccggcgacctcagcgcgtagcanaggaactggatcgagatcgagaacgtcgagaacctgtccatcaacggccac

SEQ ID NO: 80341 - DNA, 172 bp, Zea mays
attcctcacaggctgcgtcctgtgcctataaatagtgaacagtattccgttactgttcacgcattctgatttttgcaatcgcatctctcggaatacaacctttgtcaaggcataggtattattgtatttaatgattcaatgtattaagtgaatatgatataatgtatctgtg

SEQ ID NO: 80342 - DNA, 389 bp, Zea mays
cacgcgtccgccaacgcgtccggagtggcgcagagcagacgcacgtgaaccattgtagctgtccctgtcgtcgtcgtcgtcgtcaacgaatccacacaaggaaaggatggagaagaagccgaccatcctcatgaacaggtacgagctcgggcgcacgctcgggcagggcaccttcgccaaggtgtaccacggccggaacctcgcgtccggcgagagcgtggccatcaaggtcatcgacaaggagaaggtgatgcgcgtcggcatgatcgaccagattaagcgcgagatctccgtcatgcgcctcgtccgccaccccaacgtcgtgcagctgcacgaggtgatggccagcaagagcaagatatacttcgccatggagtacgtccggggcg

SEQ ID NO: 80343 - DNA, 420 bp, Zea mays
  unsure (1)..(420): unsure at all n locations
gacaagatggcgtgcacaaacaatgcgatgagagccttgttcctcctggtcctcttctgcatcgtgcatggtgagaaggaagagtcaaagggcatcgatgcgaaagcgtccgggcctggtgggtccttcgacatcaccaagttgggcgcctccggcaatggcaagacagacagcacgaaggctgtgcangaggcatgggcatcggcgtgcggcggcactgggaagcagacaatcctcatacccaagggtgacttccttgtcggacaactcaacttcacaggcccttgcaagggcgacgtgaccatccaagtggatggcaatctgctggcgaccacggacctaagccagtacanaggacatggtaattggatcgagattctacgtgtggataacctggtcatcaccggcaaaggaaacctt

SEQ ID NO: 80344 - DNA, 436 bp, Zea mays
aacatgaatggatccctctatgactttctgcacttgtccgacgactacagcaagccgctgacctgggacacccgcgtaaggattgctgttggtacagcttgtgctctggagtacctacatgacgcgtgttcacctccagtgatccacaagaacatcaaggcatccaacgtcttgctcgatgctgacctcaaccctcacctcactgactgcggccttgcatacttctatgaggatccgagtcagagcctgggaccagggtacgatcctccagagtgcacaaggccatcaggttacgttatgaagagcgatgtctactgctttggtgtcgtcatgcttcagctgttgaccggccggaagccctacgacagctcgaagcctagagcggagcagtccttggtcaagtttgtcggtccacagcttcatgacaccaacgcct

SEQ ID NO: 80345 - DNA, 397 bp, Zea mays
ttccggagagagagagagacgcaggaccgccggcgacgatcgaggagggaggaaccagatacccggcggcggcgatcgatggctccgcgcagctcatcggcggcgacgtgcctgtgcctcgctctcgccgcggccacgctggcgctggcccacggggcgcaaggaggaggaccatcggcatcggcggcggacctggacaaggtcacggccgagaccttcttggccatcgagatcgacggcaagcctgcaggccggttcgtgctgggactgtttggggacaccgttcctaaaacagcagagaacttccgagcactttgcacaggggagaaaggaattgccaagtccggcaagcctctgtggtacaaggggtcgacgttccacaggatcatcccggggt

SEQ ID NO: 80346 - DNA, 422 bp, Zea mays
atccgcccacgcgtccgcggacgcgtgggctcgcctcgtccttctcctccgtcccaaccatgagggagatcctgcacatccagggcgggcagtgcgggaaccagatcggtgccaagttctgggaggtgatctgcgacgagcacggcatcgaccacacgggcaagtacgccggcgactccgacctccagctcgagcgcatcaacgtctactacaatgaggccggcgggggccggttcgtcccgcgcgccgtgctcatggacctcgagcccggcaccatggactccgtgcgctccggcccctacggccagatcttccgccccgacaacttcgtcttcggccagtccggcgccggcaacaactgggccaagggccactacaccgagggcgccgagctcatcgactccgtgctcgacgtcgtccgc

SEQ ID NO: 80347 - DNA, 340 bp, Zea mays
aagcccctgaagcactcctggggcgccatctggaggaaggacagcgacaaaccgcttaagggacccctcaccgtccgcctcactaccgagggaggcaccatgtccgtctacgacgatgtcatccctgccaactggaaggccaacaccgcctacaccgccaaataattaactttagtgctgacaatactttaagccgacctatgctagctatactagattgggttggatcccaagcaatgcattacacatgcatgcattggaccgtgatatctatttgctaccactaccctattacgacagtgatgctggcgccaacaatgatggtgtcatcctccttctc

SEQ ID NO: 80348 - DNA, 419 bp, Zea mays
gtacaagcatgaacgcgaatgtaatgctgtaattgcacaaacacttgaaggaaaaattgctaggcttgagagcctcatggatggaactttaccagctgaagaattcatgaatgaagagtttttatcacttatgaatgagcataagatcctccaaaagaaatatgaaaaccatcctgatgttttgcatgctgaaattgaggtaaagagactccaggaggaattggacatgttcaggaactctgtggacgagaaagaagttctacaggaggagatacaagatctgaaaaatcagttgcattatatgctttcatcatcgtcatcaatccgtaggctctggcctccagtgccgttgtctcagggaagtaattctgaacgtggaacaaaagatatagatggagatactaattttgtggacactc

SEQ ID NO: 80349 - DNA, 411 bp, Zea mays
cttttctcttcctgtatgttgggatggatgccctcgacatcgagaagtgggagtttgccagtgacagcccgggcaaatccattggcataagctcgattttgctaggattggttctgctggggagagctgcatttgttttcccattgtcgtttttgtccaacctgacaaagaagtctccattggagaaaataacatttagacagcaaattgtaatatggtgggccggactgatgagaggtgccgtctccattgctctcgcttacaacaagttcacgagatctggacacactgagctgcacggcaacgcgataatgatcaccagcacgatcactgtggtcctgtttagcactatggtgtttgggatgatgacgaagccattgatccggctgctgctccctgcctgcagcaaca

SEQ ID NO: 80350 - DNA, 438 bp, Zea mays
  unsure (1)..(438): unsure at all n locations
agagaagctcgcctacatcgccctggactacgaccaggagatggagaccgccaagaccagctcttccgtggagaagagctacgagctccccgacggacaggtcatcaccatcggcgccgagcgcttccgctgccccgaggtcctcttccagccatccttcatcgggatggaagctgccggcatccacgagaccacctacaactccatcatgaagtgcgacgtggatattaagaaggacctgtacggcaacatcgtcctctccggtggcaccaccatgttccctgngatcgctgacaggatgagcaaggagatcactgccttggctcccagcagcatgaagatcaaggtggtcgctcctccagagaggaagtacagtgtctggatcggaggattcatcctggcatcnctcagcaccttccagcagatgtggatcgccaa

SEQ ID NO: 80351 - DNA, 427 bp, Zea mays
acgcgtccgtccatcttcacgcaggacgcatcggtcgccgactgctcgacgaaattcgctcgccccggcgaccttaactaccctgccttcgccgccgtcttctcctcgtaccaagactcggtcacctaccgccgggtggtgcgcaacgtcggcagcaactccagcgcggtgtaccagccgacgatcgccagcccgtacggcgtggatgtcacggtgaccccgagcaagctcgcgttcgacgggaagcagcagagcctgggatacgaaatcaccatcgcagtgtcaggcaacccggtgatcgtggattccagctactcgttcggatccatcacctggagcgacggcgcgcacgacgtcacgagccccattgccgtgacctggccgtccaacggtggagcagcagccatgtagtagactgatgctgttg

SEQ ID NO: 80352 - DNA, 432 bp, Zea mays
accacgcgtccgctggcccataaatatatatctatctatcgccatcgagcaattataatctcacagaataataaacatcatggggcaagcctcacggctcgtcctcctcgccgtcgtggcgctgctgtccgccgggctcctcccgcaggcgctgggtaagggtaggggaagcaagcggaggagagcggcgatgcggcggaggccatgaagatccaggacgacttctgctcgacgctgtgcgagggcaagaaggggacggacctggtcgtgtgcaaggactcctgcgcgctctcccagcagtccagcctgctgctgtacggcaggatccagtgcaagggcaaatgcaccgagcagtaacggcatcactgcgccgggccataacgtctgccaggaggagtgcgacaaggcgtacgtggtgaaggcggccgaggt

SEQ ID NO: 80353 - DNA, 353 bp, Zea mays
  unsure (1)..(353): unsure at all n locations
aacgggcngggcgcgcaggtgcacatcatgttcgcgcagatcacgctgcagaacgtgcagaacgtgatcctgcacaacctgcacatccacgactccaaggcgcactcgggcggcatgatccgcgactcgaagcggcactacgggctgcgcacgcggagcgacggcgacggcgtctccgtgctgtcgtccagcaacgtgtggatcgaccacgtgtccatgtccagctgctccgacgggctgatcgacgtggtgaacgggtcgacggccatcaccgtgtccaacangcacttcaccgacgacgaccacgtgatgctgttcggcgccagcaacgacagcccgcaagaagcggtgat

SEQ ID NO: 80354 - DNA, 362 bp, Zea mays
ccaaggcttcggtcctccaacaacaacaacaagcttcaacaacaagcaagctccgccgaaaattaatggaagaagcggcagcatggaatcaaccggccgcgctccttggggcaacccctcgcgctagtggctgccaccgccccacaggtagcggaggcaaagaagaagagagcggcggagagcggcgaggcggcggatgcgaagaagatccaggacgacttctgctcgacgctgtgcgagggcaagaaggggacggacctggtcgtgtgcaaggagtcctgcgcgctctcccagcagtccaacctggtgctgtacggcaggattcagtgcaagggcaaatgcaccgagcagaagggcatcac

SEQ ID NO: 80355 - DNA, 454 bp, Zea mays
  unsure (1)..(454): unsure at all n locations
gggtcgacgcccgcgtccgagacgatgtgctgtactgcaagacccacttcgagcagctcttcaaggagaccgggagcttctccaagaacttcacgccaggtggcaagtcatcagacaagggtgaactgacaagggccccaagcaagctgtcgtctgcattttctggtacccaggataagtgcgcagcatgccagaaaacagtgtacccgctggagaagttaactctggaaggcgagtcctaccacaagagctgcttcaagtgctcgcacggcggctgcatcctgaccacctcctcttatgccgcgctcaacggcgtcttgtactgcaagatccacttcgcgcagctgttcatggagaaggggagcttacaccacatgaacaagaagagcccgtcncaggaggttctgccggacgtggctgacgaggagcaaccgccggaaccagcgccaccgca

SEQ ID NO: 80356 - DNA, 379 bp, Zea mays
gcgtccgatcggatcaacaatttcgtgaaccgggcaagggcggctaaattcaacgcgcacataatcagccacctgaagaaaaaaatgcctgcactgatgggcaaggccaaggcccagcaaaagctgctcgacgggctggatcaaaagttcgccaaggtccagaaggagctgcacctgccgccaggggacttcccgagcgtggaggagtacagggagctcctgagcgcctacaacttcgacaggttcgagaagctgaggcccaagatggtccagggcgtggacgacatgctggcctacgacatcccggacctcctgaagaaattcaagaacccctacaactgaagccggaaaccaatctctttgctcctcggggaagggt

SEQ ID NO: 80357 - DNA, 428 bp, Zea mays
agcggagttcgacgtggaggcgctggcgcagatcgtgcagatggacctggaggacatccgcagcggcaccgtcgtccgcaccgtccgccccggcggcacgggaagctgcctcgccgacgagagccacatcatctgggacaagggccacgtcgtgcaggacctcctcctcaggctccggaacgtcgactccggcgtcgtccacctgcagctcagatgggtcgccaccccacctgaagactgaactggaggagacgaactgcagtatgtacgtgctctcgctccatatccccatgggaagaacgtacggattcgctcgcgtgacgatgatactatgcgatgcatgcatgctcaagagtcaagatgtcactgtcttctgtgtattttagtacagccacgtacattgtcgccatccaacatcactatgcatg

SEQ ID NO: 80358 - DNA, 411 bp, Zea mays
gaccgacgcgtcagggcatcaacgacgagccgatgacccctgggcagtgcaacatggtggtggaaaggctgggcgactacctgcttgaacagggcatgtaactactacgtaccagctggaatgcatgtcgacgacgatggtttcgagtttcgacttccaataatagtaacaacaaagcaaaggccttcctcccggcgtatttgctttggctcttctcctccacgccataagatatctagcaattggtgactcgccttaattagttcgctttgcttttgaggttgactcgaccattttgctgtaacgtgaattgcatggacatgcaacgctccaatggcctttggaatgtggaatttttttcccgtttctgtaattttcctataaaatgaagtaatgaactggttcttatat

SEQ ID NO: 80359 - DNA, 377 bp, Zea mays
  unsure (1)..(377): unsure at all n locations
tttcaggttgcattttctttgaggagctattcactcactgaagcagattcattacaaccatctcggcgccggtcattgtttactctgtcgacagccatgattattttctcgtcaagagcttacaatgtcttgccactcatcncgatctgtaaacanatgatcaatgatcgtgcggccgatccgttccttcatttggtggatgagagcagacttacagctgttaaggattcttcaaatgatccttcaaaaatatatggattcacagaggacaacaataatgcactgaagtccctttcagaaatagaactatcagaaagtcaatctcgagaatgcatagtctccacaatcatgaacaacatcgcaaatatgctggatgc

SEQ ID NO: 80360 - DNA, 432 bp, Zea mays
atcaacactctctacctgtgtccgtgtgctctgctactctgcaccaccaaccaaccagtgctgccctccgccgattcactgacctaccgcgagcgccaatggcgaccgccgcggtcctggccgccacattagcgctgttcctccgcgccgccgccgcaacggccgcgacggctgcggcggaggcggaccggatcggcaggctgcctggccagccgccggtcaacttctccatgtactccggctacgtcaccgtggacgcggcggcggggcgggccctcttctactggttcatcgaggcggccggcgtgcccgcggagtccgcgccgctcgtgctgtggctcaacggcgggcccgggtgctcctccgtcggctacggcgcgtcagaggagctcggcgccttccggattaacgccgacggcaggacgctctact

SEQ ID NO: 80361 - DNA, 424 bp, Zea mays
actgcaatcatctcctccatcaccaccagcaagctcaacaacagtcagctcgcgataataatgaagagccgcagcatggcatcatcggccgcgctcttggtgctagccctcgcgctagtggcggccaccgccccacaggtagcggaggcactgaagaagagagcggcggacagcggcgaggctgcggaggcgattaagatccagcacgacttctgctctacgctgtgcgagggcaacaatgggactgacctggtcgtgtgcaaggagtcctgcgcgctctcccagcagtctaacctggtgctgtacggcacgatccagtgcacaggcaagtgcaccgatcagcatggcatcacagcgccggtcatgaatgtctgccaggaggagtgcgagtcggcgtacgtggtgaatgcggccgatgtcacca

SEQ ID NO: 80362 - DNA, 429 bp, Zea mays
aatggttgatgccttcaactacacagaccactacctggggtctgtgctggggcggtacgatgggaatgtgtacccagcgctgtacgaggaggcgtggaaggaccctctgaacgagacggtggtgcccgaggggtaccacgagtacctccgccccttgctcaagcagcagctcaagctctccaggctctagtctgatcggctaccccccctggaattctccatggcggctgccttctcagaaaatctcacgcgacctccgaatgaaagtgatgtaagctactaacgattcttgttagagccaggaaagaggctctccagccaattataaatttattcctcaagctctgaggatcaagttcaagctgtggattatataggaagcacgtttaataattaataaagagggagaggatgagcatctctctgttg

SEQ ID NO: 80363 - DNA, 353 bp, Zea mays
gcgtccgattcggagtggtgctgctggaggcgctgtgcgcgcggccccccatcgacccgcagctgccccgggagcaggtcagcctgccggactggggcatgcactggaagcgcaagggcctcatcgagaagatcatggaccccaagctcgccggcaccgtcaacccggagtcgctcgccaagttcgccgagaccgccgagaagtgcctcgccgagttcggcagcgaccgcatctccatgggcgacgtgctgtggaacctcgagtacgcgctgcagctgcaggacgccaacccgcccgatggcgcgcggcatggcggcgacggggacgaccaggacggcgccgcggcggcgggc

SEQ ID NO: 80364 - DNA, 434 bp, Zea mays
aggccgagcaccatgcgaggaaataacatgccgcggcacacgtcgccgttcctttttgccttgttggcgtcggcggcgaccctgctcagcgtcggcgacgcgttggtcgtcgacggcctgcaggtggggttctatggcaagacgtgcccggcggccgaaggcgtcatcagcgacatcgtcaacaacgaaatcgctatggaccggggcatctcccctggcctcattcgcctcttctttcacgactgcttcatcacgggttgcgacgcttccattctcctggacgagtcgcccgccggcgacgtcccagagaaggagtcgtccgccaacggcttcaccctggtcgggctcagaaccatcgacatcgccaagtccaccgtagagggcatgtgccccggcaaggtctcgtgcgcagacatcctggccttcgcggcgcg

SEQ ID NO: 80365 - DNA, 405 bp, Zea mays
  unsure (1)..(405): unsure at all n locations
aattcntaggccgacccgacccgtcaggccccctaacgtccgtgcccaccaccctcgctcgtcggcgtcgtccccctctttctctctcctgtgccccggccaagaaggcaaggctgcctgccgactggttggacctggacgaaggaggacgagaggctcgctcgtcgctggcggttggtacgtgcgcgcgcgatggacaggggaacggtggaggacctcatacggcggttgctggacgggaagaagcacaaggcgacggggaagaaggtgcagctgaccgagaccgagatccggcacctctgcgtcaccgccaaggagatcttcctctcccagcccaacctcctcgagctggtggcccccatcaacgtctgcggtgacatccacgggcagttctcggacctgctg

SEQ ID NO: 80366 - DNA, 251 bp, Zea mays
  unsure (1)..(251): unsure at all n locations
agctttctacctcctccacctttctccttttcttgccacggcaaaacaccttcgccggcgagagcatggcgatggcgtaccgtgtcctggaggtcaccctggtgtcggcaaatgacctcaagaaagtgtcgctcttctcccggactcgcatctacgccgtggcttccatctccggattcgacctccgcatcncttcccacagcacccaagcagaccacagcaacggctgcaacccctgctggaacgccgtg

SEQ ID NO: 80367 - DNA, 426 bp, Zea mays
  unsure (1)..(426): unsure at all n locations
atggaagggaatgagccatgcttcttcaagacgtacttttcttgggataacacaaaatctttggttcatggaaattccttccagaagaaactctcgctgctttttggattgcgttctgagggtgcacctangagctctggtaatggtgggccaactcagagggcatctgcattagcagctctatcatccgcattcaatccatcatctcaacaaaggctgtctaatgagaggcctaaaagcacaggcgatggacccacgcaacgtgcctcagcactggctgccttatctaatgcattcaacccatccttaaaacccaaaacatcacctccatctcgctcaagtcgaggttctcaaagagcagctgctgtagctgctctatcctctgtgctgactgctgagcaatctggatcttcagaatttctacga

SEQ ID NO: 80368 - DNA, 400 bp, Zea mays
gggtccacgcacgcgtccgaactcaccccgccttcacgcctccctcaccaaataaggtcccgcccttttccaacatccacagggggaacaggaaaccaccggcaatggcctcaattccggcaacaaccttcgccgtcatctaacccgtcctcttctgtgccgcggctggcaccgccgtcgacaacgacctccccgactacgtcatccagggccgcgtctattgcgacacctgccgcgccgggttcgtgaccaatgtcaccgagtacatcgcgggcgccaaggtgaggctggagtgcaagcacttcggcaccggcaagctcgagcgctccatcgacggggtgaccgacgggaacggcacgtacacgatcgagctcaaggacagccacgaagaggacatctg

SEQ ID NO: 80369 - DNA, 438 bp, Zea mays
aatccgagggcaccttctgctacatcgacccggagtaccagcagacggggaagctgggcgtcaagtcggacatctactcgctcggcgtgctcctgctgcaggtggtcaccgcgcggccacccatggggctcacgcaccacgtcgagaaggccatcgacgcgggcaccttcgcgcagatgctcgacatcaccgtcaaggactggcccgtcgaggaggcgctcggctacgcaaagctcgcgctcaagtgcacggagatgcggcggagggaccggccggacctcgcaaccgtcgtactgccggagctcaaccggttaaggaacctcggccacgcgtacgaggcacgcatgagcgccgtcggggccaacagtggaagtggcgaaagtaatgaccaggtcagcgggagctcgccgacggcgggtggttcatggagaacggcgg

SEQ ID NO: 80370 - DNA, 429 bp, Zea mays
accgcggccaccccttcctgcctatatttctctctctgtcttgcgcgacagggagagaccagcgccaacacctccggtttcttgattgggtggtgatcggtgaaggaaggagaaattaagatgagcctcttcgggcttgggagcaagaatcagaagacgttcaggcctaagaagaatgcaccgtctggcaacaagggtgtgcagctgaagaaacacatcgatgcaaccttaggaagcgggaatttgagggatgctgtccgattgccaccaggggaggatctcaatgaatggctagctgttaacactgttgatttcttcaaccaggtgaacatcctgtatggtactctaatggagttctgcacaccagctacatgcccaacaatgtcagctggaccaaagtttgagtatagatgggccgatggggtgcag

SEQ ID NO: 80371 - DNA, 342 bp, Zea mays
  unsure (1)..(342): unsure at all n locations
agcccacgcgtccgctcctccatcaccaccaccaagctcaacaacagccagctcgcgaaaataatgaagagccgcagcatggcatcatcggccgcgctcttggtgctagccctcgcgctagtggcggccaccgccccacaggtagcggaggcaaagaagaagagagcggcggagagcggcgaggcggcggaggcgaagaagatccaggacgacttctgctcgacgctgtgcgagggcaagaaggggacggacctggtcgtgtgcaaggagtcctgcgcgctctcncagcagtccaacctggtgctgtacggcaggattcagttgcaaggcaaatgcaccgag

SEQ ID NO: 80372 - DNA, 436 bp, Zea mays
  unsure (1)..(436): unsure at all n locations
aacacacgtccgcggcaccttccacaccgagcaggccatcgagtacggcaccaacatggttggtggagtgactcctaagaaaggtggaactgaacatttagggctcccagtgtttaactctgtagcagaagctaaggctgaaacaaaagccaatgcaactgttatatatgttccaccaccatttgccgccgccgctataatggangcaatggaggctgagctcgaccttgccgtctgcattacagaaggaatacctcagcatgacatggtgaaagtgaaggctgcactaaacagccagtctaaaactcgattgattgggccaaattgccctggtatcattaagcctggtgagtgtaaaattggaatcatgccaggttacatccacaagcctgngcgtattgggatcgtatctcgttctggtactttgacatatgaa

SEQ ID NO: 80373 - DNA, 433 bp, Zea mays
  unsure (1)..(433): unsure at all n locations
aaagagagacgcaggaccgccggcgacgatcgaggagggaggaaccagatacccggcggcggcgatcgatggctccgcgcagctcatcggcggcgacgtgcctgtgcctcgctctcgccgcggccacgctggcgctggcccacggggcgcaaggaggaggaccatcggcatcggcggcggacctggacaaggtcacggccgagaccttcttggacatcgagatcgacggcaagcctgcaggccggatcgtgctgggactgtttggggacaccgttcctaaaacagcagagaacttccgagcactttgcacaggggagaaaggaattgccaagtccggcaagcctctgtggtacaaggggtcgacgttccacaggatcatcccggggttcatgatccanggaggcgacttcaccaacggcaacggcacgggggg

SEQ ID NO: 80374 - DNA, 397 bp, Zea mays
agcccacgcgtccgcctctccctcaatctaaggagaggagagatatgcagctcacgagctccaccaaatgctgacctcccaaagctgtggtcgcgatccaaacagaagggaaatgatcaggcgacaacccggcatggatcggttcctgcagctgctggccgccggcgtggccgtgctactgctagtggcaccgcgggccatggctgacgacgacattgtagaagtcggcgtcaactggggatcgcagctctcgcacccgcttctccccggctccgtggtgaagatgctcaaggcgaaccgcatcgccagggtcaagatgttcgacgccgactcctggcccgtcggagcgctcgtcgactccggcattgaggtcatgctcggcatccccaacgacatg

SEQ ID NO: 80375 - DNA, 436 bp, Zea mays
agtggatggcggcgccacgacctctcctgttgtcgctgctggtcgccatgctagcggtggccgccgatgtcgccaacgccggccacgccaagcccctgacgcctggcgggcgcgtggtacacgacaaccacggcaagttcacggccgggccgtggaaaccagcccacgcgaccttctacggcgggcgggacgggtccggcaccacggcgggcgcgtgcgggtacaaggacacgcgcgcgcaggggtacggcgtgcagacggtggccgtgagcacggtgttgtttggcgacggcgcggcctgcggcgggtgctacgaggtgcggtgcgtggacagccccagcgggtgcaagcccgacgcggcggcgctggtggtgacggcgaccgacctgtgcccacccaaggacaagtggtgcaagccgccgcaggagcacttcga

SEQ ID NO: 80376 - DNA, 377 bp, Zea mays
aggcgacttcggcctcagcacctgctactacgccgaggtggagaaccacgggcccggcgccaacatgagcgaacgcgtaaagtggaggggtatcaagaacatcacctaccagcacgcgctgcagaagtacaccgtcgagagcttcatccagggccagcactggctcccacagctcggcgtgccattcatcccggggctgctgccgcagcagcaatcgggcaggatacactgacatctaaggaagataatatatgatcggcaggctgcgttgtcgatatgacgtggcactaacatgtacgtaccatggtttagtttgttggttggtttatgctattttgactactactttttttatatttgataaaaaaatgcagtac

SEQ ID NO: 80377 - DNA, 436 bp, Zea mays
  unsure (1)..(436): unsure at all n locations
aaacggcttcatctctgccgccgagctccgccatgtcatgacaaatcttggggagaagctaactgatgaggaggtagacgagatgatccgtgaggctgatgtcgatggtgatggccagattaactacgaggagtttgttaaggtcatgatggccaagtgagccacagaagcataagctcaaggcagagaggattgtgcattgcatattagtcaagatgcaatgcaactcttatttcatcgacttccagtgaaacattctgctagttgtagtttttgaaaggcaatgcagttgctgctttgttcttccctccagtgtgttttcagaactgttgattcatgtgaaactgtaatgattgccctccctgctgtgtcttggttgcagttganaccatatgtagctacattccccctcccaccacctccacacatcaacttc

SEQ ID NO: 80378 - DNA, 391 bp, Zea mays
gaccgacccgtcagctcgcggttcatgacccagaaaccggcgtcggcgatagtgtcaaagctggagcagatcgctgagacagagcgcttcatggtgaagaaacaggacgggctggtgaagctgcaggggtccaagcaagggaggaaggggcagctcgcgatcgacgccgagatcttcgaggtgacaccggcctttcacgtcgtcgaggtgaagaagtcggcaggcgacacgctggagtatgagatgttctgcagcaagggcctaagaccttcactcagcgacatctgctggagcagccgatctgaggagaacatggctccttcagtggttcagccatcacaattggagccatcctcttagaccgtctccgacagtttactcacccctctta

SEQ ID NO: 80379 - DNA, 458 bp, Zea mays
ccgggtcgacgtccgacaacatgatcctccacaacctgcacgtccacgacgccgcggcgcacggcggccgccccaatcggggacccgcagcaacaacggggcgttcccgggggaaagcgaacgcgacggcgtccccgtgatggggtccaccgatatccggatcgagcacctgtccatgagcagctgcgcggacgggctggtggacgcggtggacggctccaccgccatcaccgtctccaacggccacttcacgaggcacgaccacgttatgctgttcggggccagcgacgccgcgtccaaggacagggagatgcaggtcaccgtcgccttcaaccacttcggcaaggggctggtgcagcggatgccgcgctgccgtcacggcttcttccacgtggtgaacaacgactacacgcactggctcatgtacgccatcggcggcagccggaaccccaccatca

SEQ ID NO: 80380 - DNA, 436 bp, Zea mays
  unsure (1)..(436): unsure at all n locations
accgcatcttctcgttcgcggagatccaggcggccaccaagaacttcgacaaaaaggcaatcatcggcttggccgggtccggcaacttgtacgtcggggagatcgacgacggcacaaaggtggcggtgaagcgcgggagcgcggagtccgagcagggcatcaacgagttcaacacggagatccagatgctgtcgaagctgcggcaccggcacctggtgtcgctgatcggctactgcgacgagaaccaggagatgatcctggtgtacgagtacatgcacaacggcgtgttccgggaccacatctacggcagcgaggggaaggcgccgctgccgtggaagcagcggctggagatctgcatcngcgcggcgcgggggctgcactacntgcacacgggcacggcgcaagggatcatccaccgcgacgtgaagaccaccaa

SEQ ID NO: 80381 - DNA, 432 bp, Zea mays
accacgcgtccgggaacatccatcgatctccccccagcggcgaggagagccggcggccacaggaaggagaaatggcttccgcacacaacgctctccgggtgtttttcatcctagccgtggtatgtgccgtatgcacagcgaaaaggacaggagccaagaaggaagaatcggcggcagcccctggtggtgctgctggaggcagcggcgggacgttcgacatctccaagctcggcgcgaccagcgacggcaagacggactgcacaaaggcagtccaggacgcgtggacgtcagcgtgcgaagcgaccggaagcgccacggtggtgatccccaagggcgactacctggtcggccctctcaacttcactgggccatgcaagggcagcagcatcgccatccagctggatggcaacctgctgggatcaaacgacctga

SEQ ID NO: 80382 - DNA, 443 bp, Zea mays
  unsure (1)..(443): unsure at all n locations
tccgaccacgcgtccgcccacgcgtccggcttgcgcgagcgcagaaggcacacacgtacagccatggcgaactcgtcgtccggcctggcggtgagcgacgagtgcaaggtgaagttccgggatctgaaggcgcggcggagcttccggttcatcgtgttcaggatcgacgacaaggacatggagatcaaggtggaccgcctcggcgagccgaaccagggctacggcgacttcaccgacagcctccccgccgacgagtgccgctacgccatctacgacctcgacttcaccaccgtcgagaactgccagaagagcaagatcttcttcttctcctggtcccctgatactgcacgcacccggagcaagatgctgtacgccagctccaaggacaggttcanganggagctggacggcatccagtgcgagatccaggccaccgaccccaa

SEQ ID NO: 80383 - DNA, 396 bp, Zea mays
cgctgatctacagctacaaggccgccgctagcgggttcgccgccaagctcacgccggcgcaggtcgccgcgttgcagaagcatcctgacgttgtgcaggcgctgcctgacgtgaagtacacccttgaggacaggaaccacctcaactgaaccgagtgcggctttcaccaacacgatacatagctcggcactagtgccatctcatgttagcaagtgtgcatgtgcccacaccctaaggtcagaatttatataagcatgctatgtgtgggctagtgatggtaatttagtctcttcataaagattgaatgctgtacccggagcgtacgtacatattactacccagcctgctgttcattgtttgatatcaccgtggattcacgagactgctggcactgat

SEQ ID NO: 80384 - DNA, 420 bp, Zea mays
aggacgcgtgggggaccatggtaattggatcgagattctacgcgtggataacctggtcatcaccggcaagggaaaccttgacgggcagggcccagctgtgtggagcaagaactcctgcaccaagaagtacgactgcaagatccttcccaactcgctggtgatggacttcgtgaacaacggggaggtgtccggggtcacgctgctcaactccaagttcttccacatgaacatgtaccggtgcaaggacatgctgatcaaggacgtgaccgtgacggcgcccggggacagccccaacacggatggcatccacatgggcgactcatccgggatcaccatcaccaacaccgtcattggcgtcggcgacgactgcatctccatcggccccgggacctccaaggtgaacatcaccggcgtgacctg

SEQ ID NO: 80385 - DNA, 415 bp, Zea mays
attcggccgtcgacccacgcgaccgaggacgcgtgggatagcatgcgccgtccttttatattctattccagcatggccagttcatcaccggcaagggaaaccttgacgggcaaggcccagctgtgtggaccaggagggcctgcaccattaactacgactgcatgatccttcccaactcgctggtgatggacttcgtgaacaacggggaagtgtccggggtcacgctgctcaactccaagttcttccacatgaacatgtaccggtgcaaggacatgctgatcaacgacgtgaccgtgacagcgcccggggacagccccaacacggatggcatccacatggtcgactcatccgggatcaccatcaccaacaccgtcattggcgtcagcgaccactgcatctccatcggcccccggac

SEQ ID NO: 80386 - DNA, 419 bp, Zea mays
  unsure (1)..(419): unsure at all n locations
aggacgcgtgggttgtgatgtcccgatggttgaagaggccatagacgccatctgcaagagccacggaacaccaccagatgagaagattgccatcaccaaagctattataaatgtatcgaatggatccaagcccccactctttgctggcatcatagcacttgtgatgagcatcgcaacgatggtccgtctgacccgcagcatgatgcctgggaaggttctcggtgctgccataggtggagctaccctctcagaaggtaaatcaaaagtacaagagcgccagcggtccaagctatcagaagaggctgtggaggaagctgaagacgccgtctctgcaaagcgcctctcggagcttgaggagaaggtcattgcactcctgacaaaacccgcatcaatgcctgctgataaggangaggttctgc

SEQ ID NO: 80387 - DNA, 392 bp, Zea mays
acgcgtccgcaaaaacaagctcaacaacagccagctcgcgaaaataatgaagagccgcagcatggcatcatcggccgcgctcttggtgctagccctcgcgctagtggcggccaccgccccacaggtagcggaggcaaagaagaagagagcggcggagagcggcgaggcggcggaggcgaagaagatccaggacgacttctgctcgacgctgtgcgagggcaagaaggggacggacctggtcgtgtgcaaggagtcctgcgcgctctcccagcagtccaacctggtgctgtacggcaggatccagtgcaagggcaagtgcaccgagcagaagggcatcacggcgccggccatgaaggtctgccaggaggagtgcgacaaggcgtacgtggtga

SEQ ID NO: 80388 - DNA, 395 bp, Zea mays
aaaagattctccgtactctagcagatggcaaggataaagcctaagcaattgctaatccaaagcaaaacaaagaaggctccatctcgaatcagctactctactatcatcacatggaacttgattgtcatattggttgtgctatctctctatgctacctacagccattggcatcaaaggtctacccaagacttcgaaatggagcttcatgaagctgagcttgctgtgagaccggaggattcaaaaatgataagtagaccaagatatgcggtaatgaacaccgcaaaagggccaattactatagaaatatacaaagatgcttctgctgacgttgtggatagatttatcaacttgtgcaagagttatcatttcaaaggaatgccatttcggcatatcat

SEQ ID NO: 80389 - DNA, 453 bp, Zea mays
taccggtcgcactctcgggtggccccacgcgtccgccacacctcgctcatgtccgctcaacggggcgggctcaacaaccctttcgaaaaattaaaacttctccttgaggcctgagcccctcgccgcggtgagccaagccggcgcacgtcgccccggggctcacgctcaccacgagcccaaccaattaataatatatatatatagctaggatcgatcgtcagtaacatggcaggctccgccgtcctgaagagccccctgtcagtcctcgtctacatcctcgccgccgtgcccgccaacgccgcggcgacgccgaccgacgccgccatcgacgaggcgtacgcgcatctcgtcaacctcaccgctaaccaggagtactgggcggagcgcgcggaggcggcgcacgcgtacaaccgcgcggcgtaccagaccgaccccgtgggcgtcgtgcagcgc

SEQ ID NO: 80390 - DNA, 418 bp, Zea mays
ccaacacgtccgcccacgcgtccgcccacgcgtccgggacgtggaggacgtgaaggtgacggggtgcacgctcgccggcaccaccaacggcctgcgcatcaagtcgtacgaggactccaagtcgtcgctcaaggccaccaagttcctgtaccaggacgtcaccatggacaacgtctcctaccccatcatcatagaccagaagtactgccccaacaacatctgcgtcaagtccggcgcctccaaggtggccgtcaacgacgtcgtcttcaagaacaaccacggcacctccaacaagccggaagccatcacgctcaactgcgccaacaacctgccctgccagggcgtgcagctcatcaacgtcgacatcaagtacaacaggtccgacaacatgaccatgtccgtctgcaagaacgccatc

SEQ ID NO: 80391 - DNA, 414 bp, Zea mays
  unsure (1)..(414): unsure at all n locations
ccttacaaggccaacttaacaaccaagttggatggaatccggctggcaacaacggacctaaccaattacaaggacaatggtaattggttcaaaattcaacgcgtggataacctggccatcaccggcaagggaaaccttgacgggcagggcccagccgtgtggagcaagaactcctgcaccaagaagtacgactgcaagatccttcccaactcgctggtgatggacttcgtgaacaacggggaggtgtccggggtcacgctgctcaactccaagttcttccacatgaacattttaccggtgcaaggacatgctgatcaaagacgtgaccgtgacggcgcccggggacagccccaacacggatggcatccacatgggcgactcatccgggattcacatcnnacaacacgtcattgg

SEQ ID NO: 80392 - DNA, 377 bp, Zea mays
tccgtgaggaggtggaaggagcaaccccttgggcaggtcaacacaaagcacctggaaaaaacggcggaaccaaaggtcaaggtgctggacctgacgatcctgtcacctggcagaccggacctgatccttccgatcccgttccaggctgacgagaagggctatgcgtttgccctcaaggacggcagcccctacagcttccgcttctccttcatcgtctccaacaacatcgtgtcaggcctcaagtacaccaacactgtctggaaaactggagtcaaagtggagacccagaagatgatgctggggacgttcagcccccagcttgagccctatgtctacgagggcgaagaagagaccacccctgctggcatttttgcgac

SEQ ID NO: 80393 - DNA, 423 bp, Zea mays
aagaattcatatataagagtgcatatatatatataatcctgccaagacaaaggtaatggagtcgtcacgcatgttccagccggccatcatcctgcttctcctgctcattgtgaccaccgatgtggcgcaggcggcgagggaatgcgagaaggacagcgagcgattccttggggcatgcatggcgtcggacaactgcgccaacgtgtgccgcggtgagggcttctccggcggcaggtgcagcaccttccgccgccgctgcatctgcactaagccgtgctaaattaacctactcccggcagttcgatggtggacgtttattctatttattggcttacttgattttttcccccctaacaataagaaaacgcacgtgctggcatgtacgttgtgttgtatatgcttttcttgctggcttcatttgct

SEQ ID NO: 80394 - DNA, 426 bp, Zea mays
caggcaggtcggcgaggagggcaggaagaccgaagaccgagccgtgcgggggctcgggacgggaacgggacaggaccccaaaatctcagatccttcctgcccgcccgcccgtgcccgtcgacgcgtcgttcttgccggccgcgcctcacctccgccctctcctcctccagggggatcggatacgccacaggctgcgcgatggtgctgtgggtcttcggctacggctccctcatctggaaccccggcttcgacttcgacgacaaaatcctcggcttcatcaagggctacaagcgcacctttaatctcgcttgcattgaccacagaggcacaccggagcatccggcgaggacctgcacgcttgaaaccgacgacgaggccatatgctggggaattgcatattgtgtcaaagggtggtcagaaaaagag

SEQ ID NO: 80395 - DNA, 440 bp, Zea mays
ccgggtggcgccacgcgtccgccaacacgtccgcccacgcgtccgcccacgcgtccgctcgttatcctcctcttgcattgcattgcaggtcgtagttgagcagcagcaaccactgcacaggatgtcgtggcagacgtacgtcgatgagcacctcatgtgcgagatcgagggccaccacctgagctctgccgccatagtcggccacgacggcgccgtttgggcccagagcaccgcattcccacagttcaagccagaggagatgaccaacatcattaagggcttcgacgagcctgggtttctggccccgatcgggctcctccttggccccaccaagtacatggtcatccaaggcgagcccggcgctgtcatccgcgggaagaagggatctggaggcataactgtgaagaagaccggacaggcgctggtgatcggcatctacg

SEQ ID NO: 80396 - DNA, 427 bp, Zea mays
  unsure (1)..(427): unsure at all n locations
ataagaggcgaccaccaggacgagatctgcgacgtgcgcctgctcaagagccccgaggcggactgcgccgagatcgaccactcccgcgaccgctgccgcgtcncgctcacccgcaacgacggcatcaagcagagcggcgtccgctacgccaaccccatcgccttcctccgcaaggagccgctccccaactgcggcgagctgctccgcgcctacgacctctacaacgagacgtccgagaattcctaagcgtccaaacaaaagttctctcgctcgctttttttttaaaaaaaaaatcccatatacatatagcacatttgtttcggtttgttgatgcgcgcatgcatgctagcagacatctttcctaaaaaaaatttaaataatttccatctcgcattattttagtagctaccattcatgttttctgagt

SEQ ID NO: 80397 - DNA, 450 bp, Zea mays
  unsure (1)..(450): unsure at all n locations
cggccgtcgacgcacgcctacgaccctcgtctcaccctccctccctcacacaaataataaggaaaggtcccgcccttttcctccgacatccacaggggggaggggaaaacacgtgcattcacccggcggcaataatggcctcggttccggctccggcgacgacgaccgccgccgtaatcctatgcctatgcgtcgtcctctcctgtgccgcggctgacgaccccaacctccccgactacgtcatccagggccgcgtgtactgcgacacctgccgcgccgggttcgtgaccaacgtcaccgagtacatcgcgggcgccaaggtgaggctggagtgcaggcacttcggcaccggcaagctcgagcgcgccatcgacggggtcaccgacgcgaccggcacctacacgatcgagctcaaggacagccacgaggaggacatctgccangtggtgc

SEQ ID NO: 80398 - DNA, 436 bp, Zea mays
  unsure (1)..(436): unsure at all n locations
cacgcctctaccatgacgtcccgggagccacaacctctcctgctgtcgctgctggtcgccgtgctaaccgttggcgccgatgttcccaaagccgggcaagccaaacccctaaagccttgccggccccttggtaaacaacaaccacggaaagttcacggccgggccgtggaaacccgcccacgcaaccttctacggcnggcgtgacaggtccggcaccacngcgggcgcgtgcgggtacaaggacacgcgcacgcatgggtacggcgtgcagacggtggccgtgagcactgtgctgttcggtgacggcgcggcctgcggagggtgctacgaagtgcggtgcgtggacagccctagcgggtgcaagcccgacgcggcagcgctggtggtgacggtgaccgacctgtgcccgcccaaggatcagtggtgcaagccaccg

SEQ ID NO: 80399 - DNA, 425 bp, Zea mays
cacgcgtccggtacggcgcccacacgctgggcttctcccactgcaaggagttcgccgaccgcctctacaacttccgcagccagggcgggaagccggagccgttcgaccccagcatgaacccgtcctacgccagggggctgcaggacgtgtgcaaggactacctcaaggaccccaccatcgccgcgttcaacgacatcatgactcccggcaagttcgacaacatgtacttcgtcaacctggagcgcggcctcggactgctcagcaccgacgaggagctgtggacggacccccgcaccaagcccctggtgcagctctacgcgtccaaccccactgccttcttcaccgacttcggccgcgccatggagaagctcagcttgttcggcgtcaagaccggcgccgacggcgaggtcaggcggcgttgcgac

SEQ ID NO: 80400 - DNA, 428 bp, Zea mays
  unsure (1)..(428): unsure at all n locations
cacacacgtccgcccacgcgtccgcagcacgaatgctgtgcangaggcatgggcatcagcgtgcggcggcactgggaagcagacaatcctcatacccaagggcgacttccttgtcggacaactcaacttcacaggcccttgcaagggcgacgtgaccatccaggtggatggcaatctgctggcgaccacggacctaagccagtacaacgaacatggtaattggatcgagattctacgcgtggataacctggtcatcaccggcaagggaaaccttgacgggcaaggcccagccgtgtggagcaagaactcctgcaccaagaagtacgactgcaagattcttcccaactcgctggtgatggacctccttgaacaacggggaggtgtccgggatcacgctgctcaactccaagttcttccacatgaacatg

SEQ ID NO: 80401 - DNA, 357 bp, Zea mays
aggacgcgtgggcggacgcgtgggcagagatgttgcgtggccaaaaactccagcaagggaagtctatgaagtgttgacttatcgaggatggcaggagctgtttcctctgttatcaacagtgcatgagatctgtattgggcagttgcctcctacatcgatagttgaatacagtgagcacacgccaaatctctccatcatcggtggtcatactccattctactgagctagatactgctgtttggactagtgctccagtatcacttgttataaactaagaaatatgagatatgttgaatatctgaatatgttttgcatataaatatgatttcagtcatgtcaccttattaggtgcatatg

SEQ ID NO: 80402 - DNA, 445 bp, Zea mays
cgggtccgccacgcgtccgcccacacgtccgagcgggttttctgcatacgacgtcctcaaacaaccctgggttaaaggaggacggcaagggccggacacgccgctggacaacgcggtcctcggccggctgaagcagttcacggccatgaaccagttcaagaaggcggcgctgcgggtcatcgcggggtgcctgtcggaggaggagatccgtgggctcaaggagatgttcaagagcatggactccgacagcagcggcaccatcaccgtggacgagctgcggagaaggctggccaacaagggcaccaagctgagcgaggccgaagtccagcagctcatggaagctgccgacgccgacgggaacgggacgatcgactacgaggagttcatcacggcgacgatgcacatgaaccggatggatcgcgacgagcacctctacaccgcgttc

SEQ ID NO: 80403 - DNA, 373 bp, Zea mays
ccctccctccctcacacaaataataaggaaaggccccgcccttttcctccgacatccacaaggggggaggggaaaacacgtacattcacccggcggcaataatggcctcggttccggctccggcgacgacgaccgccgccgtcatcctatgcctatgcgtcgtcctctcctgtgccgcggctgacgacccgaacctccccgactacgtcatccacggccgcgtgtactgcgacacctgccgcgccgggttcgtgaccaacgtcaccgagtacatcgcgggcgccaaggtgaggctggaattcaaagcacttcggcaccggcaagctcgagcgcgccatcgacggggtcactgacgcgaccggcacctacacga

SEQ ID NO: 80404 - DNA, 376 bp, Zea mays
acccggccttaacgcttccttcaccaaataaggtcccgcccttttccgacattcacaggggggacaggaaatcaccggccatggcctcaattccggcgacaaccttcgccgtcaccttatccgtcctcttctgtgccgcggctggaaccgccgtcgacaacgacctccccgactacgtcatccagggccgcgtctattgcgacacctgccgcgccgggttcgtgaccaatgtcaccgagtacatcgcgggcgccaaggtgaggctggagtgcaagcacttcggcaccggcaagctcgagcgctccatcgacggggtgaccgacgggaacggcacgtacacgatcgagctcaaggacagccacgaagaagacatctg

SEQ ID NO: 80405 - DNA, 449 bp, Zea mays
attcgccggtcacccacgcgaccgagacgcgtccgagtccttcgacggccggcaccagcagctgctgtccacggccacggcgcgggtggcgtcgctggaccgccgcctgggcctcagcgacaagttcagcctcggcacggccgcggcccgcggcgcggcgcgcggcgtcgacgagcgcttccaggtcacggagcgcgcctggggggccttctcggcggccggggaggtcgtggccggcagcccctacgcgtcccgcggcgccgcctgggtgtcggcggccgtcggcgccgtcgcccgggccgcgtccgacgttcgggccaatgacaaggaaaaagtgggcaaggcccaagcagagggggaggcctcggcggcggagcatggtcactacgcgtcgtcccgtgtcgacgtgcacgacggacagggacgtgcagctcagcacggtgaccata

SEQ ID NO: 80406 - DNA, 412 bp, Zea mays
gccgacccacccgtctaaccaagcgtcctgacaaacgtcgtacgagaacctttctccctcctccacctttctccttttcttgccacggcaaaacaccttcgccggcgagagcatggcgatggcgtaccgtgtcctggaggtcaccctggtgtcggcaaatgacctcaagaaagtgtcgctcttctcccggactcgcatctacgccgtggcttccatctccggattcgacctccgcatcccttcccacagcacccaagcagaccacagcaacggctgcaacccctgctggaacgccgtggtacacttccccatcccggctgccgctgacacccgcggcctcgcactccacgtgaggctccgcgcccagcgtctatacctgggcgatcgcgacatcggcgaggtgttttgtgcc

SEQ ID NO: 80407 - DNA, 416 bp, Zea mays
accacgcgtccgaaagaagtcgcctaattctttcgatcgaattaggcgccttcttcgtcccacgctccgtctttatttgtaatctgaagcttacaggaacatttgagtggatcatggacggattggtaggcctcttgaaagtccgggtggtgaggggcatcaaccttgcctaccgcgacgcaagaggcagcgatccgtatgtcgtcctacgacttggcaagaagaaacttaagacgagcgtgaagaagagatctgtgaaccccatctggcacgaggagctaactctgaccgtcacaaattccagcctaactctgaagctggaggtgttcgacaaggacacgttcagcaaggacgacccgatgggggacgcggagatcgacgtggcgccgctggtggaggcggcgaacgcgagcccg

SEQ ID NO: 80408 - DNA, 391 bp, Zea mays
gacgcgtgggcggacgcgtgggcgcgagcggccccctttttttttttttttaaacaagatgaaaaccccgatgaattatataattataaaggctagtttgacaacttcattttctcaagtgaatcctattttttcaagagaaaatgaattaaattcccttgaaaaaataaaacctcttagaaaaaataaggttgtgaaactagccctattaataaatttatgcagaatgcaacatcggtttccaccattttcctctttacagaatactactgctccgtgtatacggagaaactacatttcacggagtagtaaataaacagggattaattagcgccgtgtgcatgcatgcatacggcgttgggctggccgacatgatcataacaattaatta

SEQ ID NO: 80409 - DNA, 426 bp, Zea mays
atgaactacgagcctatcgctccctaccacttcgacttgagcggcaaggccttcggctccctggcaaagcccgggctcaacgacaagattcgccactgcggcatcatggacgtcgagttcagaagggtgccatgcaagtaccccgccgggcagaagatcgtgttccacatcgagaagggctgcaaccccaactacctggccgtgctggtgaagtatgtggcggacgacggcgacatcgtgctgatggaaatccaggacatgttgtcggctgagtggaagcccatgaagctctcttggggcgccaaccggaaggttgacaacgccaaagcgctcaatggccccttctccatccgcctcaccagcgagtccggcaagaaggtcatcgccaaagacgtcatcccggcgaactggagacccgatgccgtc

SEQ ID NO: 80410 - DNA, 423 bp, Zea mays
ctcctagatcttaattacaggtcatagctaagcaggtctgacaggatgtcgtggcagacatacgtcgatgagcacctcatgtgcgagatcgagggccaccacctgacctccgctgccatagtcggccacgacggcgccgtttgggcccagagcaccgcattcccacagttcaagacagaggagatgaccaacatcatgaaggacttcgacgagcccgggttcctggccccgaccggcctcttcctcggccccaccaagtacatggtcatccaaggcgagcccggcgctgtcatccgcgggaagaagggatctggaggcataactgtgaagaagacagggcaagcgatggtggtcggcatctacgacgagcccatgacccccggccagtgcaacatggtggtcgagaggctcggcgactacctc

SEQ ID NO: 80411 - DNA, 427 bp, Zea mays
  unsure (1)..(427): unsure at all n locations
aaggtacacgatcgccggcacaacaaacggcctgcccatcaattcttacaaggacccaaatcctcccccaagggcaacaagtttctggtccaagggaaccacaatggccatgttctctaacccaaccccatcaacaaaaattatggcccaataaacatctgcgtcaagtccggcgcctcaaatgtggccgtcaacgacgtcgtcttcaagaacatccacggcacctccaacacgccggatgccatcacgctcaactgcgccaacaacctgccatgccagggcgtgcagctcgtcaacgtcgacatcaagtacaatggatccggcaacaagaccatggccgtctgcaagaatgccatcggcaagtccatcggcttggcaaangagctggcgtgcatttgaaccaattgactaacatgcatatattatg

SEQ ID NO: 80412 - DNA, 290 bp, Zea mays
cgcgtcggaggcaaccatgcgcctgtccctcctcctcgtcgtcgtggccgccctctcggcgcgcaccgcggcgcagctgccgctggcgggcggcggcggcggcgccctgaagccggacttctatagccagtcgtgcccgcgcgcggagcggatcattgcggaggtgatgcagacgaagcagatggcgaacccgacgactgccgcgggcctgctccgcgtcttcttccaggactgcttcgtcagcgggtgcgacgcgtcggtgctgatcgcgtccacccagttccaaaagt

SEQ ID NO: 80413 - DNA, 385 bp, Zea mays
ttataccaatccctggccgaaaaacggaaggccaatccttgggaacccaaggtccaggttcataaccgacaacttcttcgacccaaacaagctcctgcattccgtggacctgtcgacggagcacaagatcgtggacctcaaggaccggatcaaggcctccgtcgtcatctggcaccggaagatcagcaacaagctctcgtggggccccgccggcgtcagcctggagaagcgggaggagttcgaggagcgggcgcagaccgccctgctcatcctcaagcacaggttccccggcatccctcagtcggcgctcgacatcagcaagatccagtacaacacggacgtcgggtacgccatcctggagagctactccaggaccctcgagagc

SEQ ID NO: 80414 - DNA, 386 bp, Zea mays
  unsure (1)..(386): unsure at all n locations
ggccgtcttctcgtctcgctcccctctttgcgccgcccccagatccggcaccgcccgctgctcgaacccgcaccccacgcccgcaggccgggaccggtgggcgcgcgccgggcagtangagggagaggaagggcggcatggcggcgccgccggcgaaggcccgggccgactacgactaccttatcaagcttcttctcattggggatagcggtgttggcaagagttgcctcctgttgcggttctctgatggttccttcactacaagctttattaccacaattggtattgactttaagatacggacaatagaattggatggtaagcgtataaagctacagatttgggatacagcgggccaagaacgcttccgtactattaccactgcg

SEQ ID NO: 80415 - DNA, 377 bp, Zea mays
  unsure (1)..(377): unsure at all n locations
aggccctgccggcgagctgcgctacccgtcctacccggagagcgacggcacctggtcgttccctggcatcggcgagttccagtgctacgacaggttcatgctgagtagcttgaaggcggctgctgaggcagtgggcaagccggagtggggcaacgcgggtccgggcgactccggcagctacaaggactggccggaggacacgggcttcttccggcgcgagggcggctggagcacggagtacggggagttcttcatgagctggtactcgcagatgctcctggagcacggcgagcgcatcctgtcggcggcgacgggcgtgttcacngnngtccccggcgtgaagatctcggtgaaggtggccgggatccactggcact

SEQ ID NO: 80416 - DNA, 409 bp, Zea mays
agagctttcgttatcctcctcgatcttaattacaggtcatagctaagcaggtctgacaggatgtcgtggcagacatacgtcgatgagcacctcatgtgcgagatcgagggccaccacctgacctccgctgccatagtcggccacgacggcgccgtttgggcccagagcaccgcattcccacagttcaagacagaggagatgaccaacatcatgaaggacttcgacgagcccgggttcctggccccgaccggcctcttcctcggccccaccaagtacatggtcatccaaggcgagcccggcgctgtcatccgcgggaagaagggatctggaggcataactgtgaagaagacagggcaagcgatggtggtcggcatctacgacgagcccatgacccccggccagtgcaaca

SEQ ID NO: 80417 - DNA, 421 bp, Zea mays
agtcaggacaagatcagacctctttggaggcattacttccagaacacccagggtcttatctttgttgtggacagcaatgaccgtgaccgtgttgttgaagccagagatgagctccacaggatgctgaacgaggatgagctacgtgatgctgtgctgcttgtttttgccaacaagcaagatcttcccaatgccatgaatgctgctgagattactgacaagcttggattacactccctgcgccagcgacactggtacatccagagcacttgtgccacaactggcgagggtctgtatgaaggcctggactggctgtccagcaacattgcgagcaaggcttgaggcctaccttgaatgtcaaccgcgaactgactaggagctccggatgtatcatggaaactcaggacagaatcgcagttgcaac

SEQ ID NO: 80418 - DNA, 406 bp, Zea mays
aggctagttcgtggatggcggcgccacgacctctcctattgccgctgctggtcgccatgctagcggtggtcgccgatgtcgccaacgccggccacgccaagcccctgacgcctggcgggcgcgtggtacacgacaaccacggcaagttcacggccgggccgtggaaacctgcccacgcgaccttctacggcgggcgggacgggtccggcaccacggcgggcgcgtgcgggtacaaggacacgcgcgagcaggggtacggcgtgcagacggtggctgtgagcacggtgttgtttggcgatggcgcggcctgcggcgggtgctacgaggtgcggtgcgtggacagccccagcgggtgcaagcccgacgcggcggcgctggtggtgacggcgaccgacctgtgcccgcc

SEQ ID NO: 80419 - DNA, 401 bp, Zea mays
acccacgcgtccgatcacgacaagatggcatgcacaaacaatgcgatgagagccttgttcctcctggtcctcttctgcatcgtgcatggtgagaaggaagagtcaaagggcatcgatgcgaaagcgtccgggcctggtgggtccttcgacatcaccaagttgggcgcctccggcaatggcaagacagacagcacgaaggctgtgcaggaggcatgggcatcggcgtgcggcggcactgggaagcagacaatcctcatacccaagggcgacttccttgtcggacaactcaacttcacaggcccttgcaagggcgacgtgaccatccaggtggatggcaatctgctggcgaccacggacctaagccagtacaaggaccatggtaattggatcgagattctacg

SEQ ID NO: 80420 - DNA, 391 bp, Zea mays
accacgcgtccgcccacgcgtccgggagctcaacatggacctcttccgcaagtgcatggagcccgtggagaagtgcctccgcgacgccaagatggacaagagcagcgtgcaggacgtcgttctcgtgggcggctccactcgcatcccccgcgtgcagcagctgctccaggacttcttcaacggcaaggagttgtgcaagagcatcaacccagacgaggctgtcgcgtacggagcggccgtccaggccgccatcctcactggcgagggcaatgagaaggttcaggatctgctcctgctcgacgtctcgccgctctcgctcggcctggagacggccggatgcctcatgactgtgctcatcgccaggaacaccaccatcccgactaagaaggag

SEQ ID NO: 80421 - DNA, 387 bp, Zea mays
  unsure (1)..(387): unsure at all n locations
accacgcgtccgaccaccaccaagctcaacaacagccagctcgcgaaaataatgaagagccgcagcatggcatcatcggccgcgctcttggtgctagccctcgcgctagtggcggccaccgccccacaggtagcggaggcaaagaagaagagagcggcggagagcggcgaggcggcggaggcgaagaagatccaggacgacttctgctcgacgctgtgcgagggcaagaaggggacggacctggtcgtgtgcaaggagtcctgcgcgctctcccagcagtccaacctggtgctgtacggcaggatccagtgcaagggcaagtgcaccgagcagaagggcatcacggcgccggccatgaaggtctgccangaggagtgcgacaaggcg

SEQ ID NO: 80422 - DNA, 412 bp, Zea mays
agcaagacatacagcacgaaggctgtgcaggaggcatgggcatcggcgtgcggcggcactgggaagcagacaatcctcatacccacgggtgacttccttgtcggacaactcagcttcacaggcccttgcagtggcgacgtgaccatccaggtggatggcaatctgctggcgaccacggacctaagccagtataaggaccatggtaattggatcgagattctacgtgtggataacctggtcatcaccggcaagggaaaccttgacgggcacggcccagccgtgtggagcaagaactcctgcacgatgaagtacgactgcaagatccttcccaactcgctggtgatggacttcgtgaacaacggggacgtgtccggtgtcacgctgctcaactccaagttcgtccacaatgaca

SEQ ID NO: 80423 - DNA, 396 bp, Zea mays
acccacgcgtccgggaacgaggtggaggaggaaggggaggagttcgcagcgtactgccggaggggaaagggaaggagaagggtggaaatggaggaccggcatgtggccaaggtcgctctcggcggggacccccaagtggcactgtttggtgtgttcgatggccacggcgggaaaaacgcggcagagttcgccgcggagaacatgcccaagtttatggccgaggagttgacgaaggtaaacggcggagagatcgaaggagcggtgaagaggggttacctcaagacggacgaggagttcctcaagatggacgagagcgggggcgcgtgctgcgtcacagccgtcctccaaaagggtggactggtcgtctccaacgctggagactgccgtgcggtgctc

SEQ ID NO: 80424 - DNA, 389 bp, Zea mays
cagcggcgccatggacaccgtgttcctcgtcgcggaggggccctcggccttgcgccccagccgctacgccctcaaggtcttcgacaagcgctccgccgcccgcagcaggaagcctgacgccgaccgccgcgcgcggtgggagatcagcgtgctctcccgccttgcgcacccgcacctcccctcgctcctcggcttcaccgagacggacgaccttctcgcgtgggccgtcccctactgctccggcggcgacctcaacgagctccgctactcgctccccgaccgcatcttctcccccgcggccatccgcttctacattgccgagatcgtctccgcggtcgccgagctccacgccgcgggcgtcgtgtaccgccacctcaagcccgacaacg

SEQ ID NO: 80425 - DNA, 387 bp, Zea mays
agtcgtctcactcaccccgccttcacgcctccctcaccaaataaggtcccgcccttttccgacattcacaggggggacaggaaatcagcggccatggcctcgattccggcgacgaccttcgccgtcatcttatccgtcctcttctgtgccgcggctggcaccgccgtcgacaacgacctccccgactacgtcatccagggccgcgtctattgcgacacctgccgcgccgggttcgtgaccaatgtcaccgagtacatcgcgggcgccaaggtgaggctggagtgcaagcacttcggcaccggcaagctcgagcgctccatcgacggggtgaccgacgggaacggcacgtacacgatcgagctcaaggacagccaccaggaggacatc

SEQ ID NO: 80426 - DNA, 390 bp, Zea mays
cgatcacgacaagatggcgtgcacaaacaatgcgatgagagccttgttcctcctggtcctcttctgcatcgtgcatggtgagaaggaagagtcaaagggcatcgatgcgaaagcgtccgggcctggtgggtccttcgacatcaccaagttgggcgcctccggcaatggcaagacagacagcacgaaggctgtgcaggaggcatgggcatcggcgtgcggcggcactgggaagcagacaatcctcatacccaagggtgacttccttgtcggacaactcaacttcacaggcccttgcaagggcgacgtgaccatccaggtggatggcaatctgctggcgaccacggacctaagccagtacaaggaccatggtaattggatcgagattctacg

SEQ ID NO: 80427 - DNA, 389 bp, Zea mays
agcttaattgcgccactgctcgttatcctcctcttgcattgcattgcaggtcgtagttgagcagcagcaaccactgcacaggatgtcgtggcagacgtacgtcgatgagcacctcatgtgcgagatcgagggccaccacctgagctctgccgccatagtcggccacgacggcgccgtttgggcccagagcaccgcattcccacagttcaagccagaggagatgaccaacatcattaaggacttcgacgagcctgggtttctggccccgatcggcctcttccttggccccaccaagtacatggtcatccaaggcgagcccggcgctgtcatccgcgggaagaagggatctggaggcataactgtgaagaagaccggacaggcgctggtga

SEQ ID NO: 80428 - DNA, 387 bp, Zea mays
acaccaccaccaagctcaacaacagccagctcgcgaaaataatgaagagccgcagcatggcatcatcggccgcgctcttggtgctagccctcgcgctagtggcggccaccgccccacaggtagcggaggcaaagaagaagagagcggcggagagcggcgaggcggcggaggcgaagaagatccaggacgacttctgctcgacgctgtgcgagggcaagaaggggacggacctggtcgtgtgcaaggagtcctgcgcgctctcccagcagtccaacctggtgctgtacggcaggatccagtgcaagggcaagtgcaccgagcagaagggcatcacggcgccggccatgaaggtctgccaggaggagtgcgacaaggcgtacgtggtga

SEQ ID NO: 80429 - DNA, 399 bp, Zea mays
acttcatcacgggatgcgacgcttccattctcctggacgagtcgcccgccggcgacgtcccagagaaggagtcgtccgccaacggcttcaccctggtcgggctcagaaccatcgacatcgccaagtccaccgtagagggcatgtgccccggcaaggtctcgtgcgcagacatcctggccttcgcggcgcgcgacgccgccgtggccgcgggcctcccgagatacgaggtcgcggcggggcgccgcgacggcatgcgctcgaacatggacgacctcccgggcaacttccccgtgccgggccaccacgtgccgcgcctcaccgagctcttcagccagcgggggctctcccaggaggacctcgtcctgctctccggcgcgcactccatcggcggcgcgcact

SEQ ID NO: 80430 - DNA, 369 bp, Zea mays
agcgcatgaataatttaatgatatcacttgcccacaagttcacgaagttgcgagttctcactcgccggcagaacacacctcagcttgaacacagtgccgtacaagctgttgccaactactgccatgacctacgtgagttacacctcaccagaagcttcaggcttattgaccgctccttgtatgcactggcccatggatgcccacggcttacaacactgaacattagtggatgttccactttcagcgacactgccttgatttaccttagctgccgctgtagtcacctcaagtgcctgaacttgtgtggatacgtacaggctgttactgacacagctttgcacgctattgctcacaactgtgggcagctgc

SEQ ID NO: 80431 - DNA, 366 bp, Zea mays
gatttcgaagcgaagccaatggtcatgctgttgggtcaatactccacggggaaaacaacatttataaagcatttactaaaaacaagttatccaggcgctcatattgggccagagcctacaacggacaggtttgttgtcatcacttctggaccagacgaaagatgcattcctggaaacaccatcgccgtccaagctgacatgccatacagtggcctgtcatcgttcggaacagcatttttgtccaagttcgaatgttctcagatgccacatccactgttagagcacgtgaccttcgtggacactccaggagttttatcaggggagaagcagcggacgcagcgcagctacgatttcaccggagtcacg

SEQ ID NO: 80432 - DNA, 384 bp, Zea mays
aatcacgacaagatggcgtgcacaaacaatgcgatgagagccttgttcctcctggtcctcttctgcatcgtgcatggtgagaaggaagagtcaaagggcatcgatgcgaaagcgtccgggcctggtgggtccttcgacatcaccaagttgggcgcctccggcaatggcaagacagacagcacgaaggctgtgcatgaggcatgggcatcggcgtgcggcggcactgggaagcagacaatcctcatacccaagggtgacttccttgtcggacaactcaacttcacaggcccttgcaagggcgacgtgaccatccaggtggatggcaatctgctggcgaccacggacctaagccagtacaaggaccatggtaattggatcgagatt

SEQ ID NO: 80433 - DNA, 417 bp, Zea mays
agtgggatcgagttgtttcactgcacgagcacatcctccggcgaccaccggcctccctctccgtcctctagcgaccgaccaacgcgtcgagcgaagatgtcgtggcagacgtacgtggacgagcacctgatgtgcgagatcgagggccaccacctcacgtcggcggccatcgtcggccacgacggcgccacctgggctcagagcaccgcattccccgagttcaagcccgaggagatggctgccatcatgaaggatttcgacgagccggggcacctcgccccgaccggcctgatactgggaggcaccaagtacatggtcatccaaggcgaacctggagctgtcatccgtggcaagaagggatccgggggcatcactgtgaagaaaacagggcagtcactcatcattggcatctacgac

SEQ ID NO: 80434 - DNA, 399 bp, Zea mays
gccggcggcagcgtggacgcccacgacggcgtgctgtcgctggggaacggcgacatgtccttcgccgtccacgccgccaagcgcttcgggcagcgcttctccttctgcctgctcagcgccaacagctcccgcgacgcctccagctacctcaccttcgggcccaacccggcggtgatgggtccgggcaccatggagacggacatcctgtacaacgtggacgtgaagcctgcatacggggccaaggtgacgggcgtcttggtgggcggggagcggctggacatcccggacgaggtgtgggacgccgagaggtttgtgggcggcggtgtcatcctagacacgagcacgtcggtgacgtcgctggtgccggaggcgtacgcgccggtgacggcggcgctggac

SEQ ID NO: 80435 - DNA, 411 bp, Zea mays
cagggcgccgtcggagccggcgggtccgctggacatcgcgcagctgggcgccaagggcgacggcaagtcggacagcaccccgatgatcctcaaggcgtggaagaacgcgtgcgaggcgacgggggtacagaagatcgtcatcccgccgggcaactacctgacgggcgggctggagctgaagggcccctgcaagtcctccatcatcatccgtctcgacggcaacctgctcggcaccggcgacctcagcgcgtaccaaaggaactggatcgagatcgagaacgtcgagaacctgtccatcaacggccacggcaccatcgacgggcagggagccctggtgtggagcaagaaccagtgccagcattcttacaattgcaagatcctcgcgaatagcttggtgctggattttgtgac

SEQ ID NO: 80436 - DNA, 394 bp, Zea mays
aaaaaaacttggtagaagcatatgctcaatttgtgaaagattattacattaaaaaaatggagacaccaccatcctcgtatgatcgagaatatctgaaggaaacaactccacatgattctagtaaggttctaggctctggtggttccaagtttgcagtgaggttgcctactttcaagtggcacccaaaaatgacagcgttcgttctgcaaggatcaatacgaggtaccatttggacctatgcagacatgtctttggggaaggcgtttatcccgatgtgttcatgacgaacttgtattatggaggcacaagaatcgctgcttctaaaatcgtgtttacaaatggctcccaagacccatggcgccatgcctccaagcagaaatcatcgaaagacatg

SEQ ID NO: 80437 - DNA, 378 bp, Zea mays
acctccaccaccaccaccaagctcaacaacagccagctcgcgaaaataatgaagagccgcagcatggcatcatcggccgcgctcttggtgctagccctcgcgctagtggcggccaccgccccacaggtagcggaggcaaagaagaagagagcggcggagagcggcgaggcggcggaggcgaagaagatccaggacgacttctgctcgacgctgtgcgagggcaagaaggggacggacctggtcgtgtgcaaggagtcctgcgcgctctcccagcagtccaacctggtgctgtacggcaggatccagtgcaagggcaagtgcaccgagcagaagggcatcacggcgccggccatgaaggtctgccaggaggagtgcgac

SEQ ID NO: 80438 - DNA, 401 bp, Zea mays
agcggaccagaagcccggcgactacctgctggtggcgtccacccggttcatcaaggagaagagcagcaccacggccgtgatccgctacaagggctccagcgccccgccgccggccaagctgccggagggccccagcgggtgggcgtggtccatcaaccagtgcaggtccttccgctggaacctgacggccagcgcggcgcggcccaacccgcaggggtcgtaccactacggccagatcaacatcacccgcaccatcaagctcgccatgggccgcggcaaggtcgacggcaaggagaggttcggcttcaacggcgtgtcgcacgtggacccggaaacccccgtgaagctcgccgagtacttcaacgccagcgacggcgtgttcaagtacaacctcatcgggg

SEQ ID NO: 80439 - DNA, 399 bp, Zea mays
atgccgcttccaggagcctggtgtcgcagagaaggagttctcgccggccaacgccgggtacctgatgaagcggatcctgtgcaaccgcttcacctcctcggcggccggcgacgacaagcgaccgccggcggacgccgccgaggaggagccgctgccgccgtggctgacggaggaggacgtgggccacttcgcgtcggagttcgagcggacgggcttcacggggcccatcaactactaccgcaacatggaccgcaactgggagctggcggcgccgtgggcggacgccaaggtgcgggtgcccaccaggttcatcgtcggcgacggcgacctcacctaccactacccgggcatccaggactacatccacaagggcgggttcgaggccgacgtcccggggct

SEQ ID NO: 80440 - DNA, 387 bp, Zea mays
accacgcgtccgaccacgcgtccggggtccttcggtgctttggcccctcggagttttccgttgccgtgaccatcttcggcgggcgtggccatgccgggacatggggaaaggcacttggtgcagaggtctatgactgcaacaacatggtggagcaggagctgcctggaggcgggctcctcgtgtaccagagcttctgtgctgctgaagacgctgttgctacctcgcccaaatctgttttccactgctttgacggcgagaacgtggagagtgctcctcctcctatgaagaaggactacaaactggctaatcttctatgctgggaggaggaagcggatgccatggaggagaaggcgggagtgcttgatgagtaagacgggcttctggggt

SEQ ID NO: 80441 - DNA, 422 bp, Zea mays
aggtaaaaatgacgagtccatggaagattcaacaaggaaatgtattgaaatgctttgtgctcctgatggtgagcttcctgagaagctgaggaatctagaacctcgccttattgaacatgtcagtaatgaaataatggatagggatcctaatgtccgctggaatgacatagctggtttggaacatgcaaagaagtgtgtgacagagatggtgatatggccactgctacgtcctgatatattccgtggttgtcggtctcctggaagaggtctactgttgtttggacctcctggaacaggcaaaaccatgattggaaaggcaatagctggtgaagccaaggcaacatttttctacatatctgctagttcactaacaagcaaatggattggtgagggtgaaaaacttgttcgggcactttttggtg

SEQ ID NO: 80442 - DNA, 414 bp, Zea mays
gtgttccgcagcggcgggtcccggaggttgagccgcgcttcgtcggcggcgtccccgcggtacgcgccgtcgccgtagcccagcacccagaagtcgtggccgtggaggtgccacgggtgcacctcgctgacgttgcgcgacagcgcgttggcgttctggagcagcacgtcgacggtggtgttgtgcgccaggacgtacacgttgtcccccaccgtcgtgttggggttcggcggcggcagcgtcacgtcgtattcccggctgaacgtctccgcggggcgcgccgccgccagcgtcgacttgagccccatcttcagggagcccaggtacggcgtggcgggcagaaacatggacacgttgttgatgggacacctgatgcgcccgtccatccggttctgcgtgttgagcaactcgatg

SEQ ID NO: 80443 - DNA, 413 bp, Zea mays
acttgagaggaatatacagagccactggaatcaagcagttcatggtctcactgcaaatgtgcgcaagatgtttttggacatggacagtgaactatttgaagagtgccagcagcagtacatggagaaacaagcgaaagccaaagagatacaggaacaacgagaatcagcatggagacaattggaagctgttgttgctgccaaggctgctggagatgacatggttttggtcaactagatgatagctgctcacttatttcatgagcgtcatgtgcgcttatcgaggcaacaaggtatcggtgctagttgcggtgctcttatatcaacattgttgacttgggactatcagatccatgttccttgcatcagtgcaaaaaaatgcggaccgagtttgaacacattggtggcaacgaaag

SEQ ID NO: 80444 - DNA, 418 bp, Zea mays
aaagatggcgtgcacaaacaatgcgatgagagccttgttcctcctggtcctcttctgcatcgtgcatggtgagaaggaagagtcaaagggcatcgatgcgaaagcgtccgggcctggtgggtccttcgacatcaccaagttgggcgcctccggcaatggcaagacagacagcacgaaggctgtgcaggaggcatgggcatcggcgtgcggcggcactgggaagcagacaatcctcatacccaagggtgacttccttgtcggacaactcaacttcacaggcccttgcaagggcgacgtgaccatccaggtggatggcaatctgctggcgaccacggacctaagccagtacaaggaccatggtaattggatcgagattctacgcgtggataacctggtcatcaccggcaagggaaacctt

SEQ ID NO: 80445 - DNA, 404 bp, Zea mays
  unsure (1)..(404): unsure at all n locations
accacgcgtccgggaagcccaggcggcctgacatgctcactgacacttttgggtttggccggatcatacatgatggcctcatgttcaagcagaacttctccattaggtcctatgagattggggctgataggacggcatctatagagacaatgatgaaccatttgcaggaaacggcacttaatcatgtgaagaccgctgggctgctaggtgatggattcggctccacaccagagatgagtaaacggaacttattctgggtggttagccagatgcaggctatcgtcgagcgttatccatgctggggtgatactgttgaagtaaatacatgggttagtgctaatggtaaaaatggaatgcgtanggattggcatatacgtgattctatgacaggccacacaatactg

SEQ ID NO: 80446 - DNA, 410 bp, Zea mays
ctcgtcgtcgtctcactcaccccgccttcacgcctccctcaccaaataaggtcccgcccttttccgacattcacaggggggacaggaaatcagcggccatggcctcgattccggcgacgaccttcgccgtcatcttatccgtcctcttctgtgccgcggctggcaccgccgtcgacaacgacctccccgactacgtcatccagggccgcgtctattgcgacacctgccgcgccgggttcgtgaccaatgtcaccgagtacatcgcgggcgccaaggtgaggctggagtgcaagcacttcggcaccggcaagctcgagcgctccatcgacggggtgaccgacgggaacggcacgtacacgatcgagctcaaggacagccacgaggaggacatctgcgaggtggtcttggtg

SEQ ID NO: 80447 - DNA, 367 bp, Zea mays
  unsure (1)..(367): unsure at all n locations
gctgctactacacgctcctcggcatccgcaagaacgcctccgccaccgacatacgcgccgcttaccggaggctcgcgatgaagtggcacccggaccggtgggccagcgaccccggcgcggccggcgaggccaatcagcggttccagcggatccaggaggcatactccgttctgtcggacaaggggaagaaggccatgtacgacgccgggctcttcgaccccctcgacgacgacgaccaggatttctccgacttcatgcaggagatgctggtgatgatggatagcgtgaaaaacgagaagccggacacgctggaggacctgcagaagatgctggaggacatcgtgaagggcgacggcggnggcgggag

SEQ ID NO: 80448 - DNA, 346 bp, Zea mays
aagcaaacctgcagtcatctcctccaccaccaccaccaagctcaacaacagccagctcgcgaaaataatgaagagccgcagcatggcatcatcggccgcgctcttggtgctagccctcgcgctagtggcggccaccgccccacaggtagcggaggcaaagaagaagagagcggcggagagcggcgaggcggcggaggcgaagaagatccaggacgacttctgctcgacgctgtgcgagggcaagaaggggacggacctggtcgtgtgcaaggagtcctgcgcgctctcccagcagtccaacctggtgctgtacggcaggatccagtgcaagggcaagtgcaccgag

SEQ ID NO: 80449 - DNA, 359 bp, Zea mays
agtgctttgagaaattgatgcgtagattgcgaggaaatttcaaatgcacagatcaatctgtgggagtatccaaccaacttcaacatcttgcatctattattcaggttcttgacccaaagctacatgaccacctagaaactcttggcggaggtgactacctttttgcgttccgaatgttcatggtgctatttaggcgtgaagtatcatttggagactccttatacctctgggagatgatgtgggctctagaatacgaccctgacattttcttcgcaacatgcgaagaacaaggtgcagtacataaaaataaagtttctaaatccaaactgaaaggactgcgccattttggcaagtgggat

SEQ ID NO: 80450 - DNA, 411 bp, Zea mays
accacgcgtccgatagatcttctcatggagtcagcttcatgcttgcgtgtattagatttgagcaagacagcagtggaggccatcccgaaatccattggtaacttggtacatttaaggtacctcaatcttgatggggctcaggtcagagacataccttcttccattggatttctcataaacttgcagaccttgagccttcaaggttgccaaagcttgcagagacttcctcggtccatcagggcattgctagagcttagatgcctttgtctctatggaacttccctaagctatgtaccaaagggtgttggtaaattgaagcatctcaatcatctagatggtctaatcattggtcatgacaacaatgcgcctgagggttgtgacttagatgaccttaaagcattgtcagaacta

SEQ ID NO: 80451 - DNA, 422 bp, Zea mays
gcccgggccacggcatcagcgtcggcagcctggggcggtacaaggacgagaaggacgtggaggacgtgaaggtgacggggtgcacgctcgccggcaccaccaacggcctgcgcatcaagtcgtacgaggactccaagtcgtcgctcaaggccaccaagttcctgtaccaggacgtcaccatggacaacgtctcctaccccatcatcatagaccagaagtactgccccaacaacatctgcgtcaagtccggcgcctccaaggtggccgtcaacgacgtcgtcttcaagaacatccacggcacctccaacacgccggaggccatcacgctcaactgcgccaacaacctgccctgccagggcgtgcagctcatcaacgtcgacatcaagtacaacaggtccgacaacaagaccatgtccgtctgc

SEQ ID NO: 80452 - DNA, 385 bp, Zea mays
atctcactcaccacgccttcacgcctccctcaccaaataaggtcccgcccttttccgacattcacaggggggacaggaaatcagcggccatggcctcgattccggcgacgaccttcgccgtcatcttatccgtcctcttctgtgccgcggctggcaccgccgtcgacaacgacctccccgactacgtcatccagggccgcgtctattgcgacacctgccgcgccgggttcgtgaccaatgtcaccgagtacatcgcgggcgccaaggtgaggctggagtgcaagcacttcggcaccggcaagctcgagcgctccatcgacggggtgaccgacgggaacggcacgtacacgatcgagctcaaggacagccacgaggaggacatctg

SEQ ID NO: 80453 - DNA, 402 bp, Zea mays
attaccgggccgaccatgcgtctgtcgtcctacgacttggcaagaagaaacttaagacgagcgtgaagaagagatctgtgaaccccatctggcacgaggagctaactctgaccgtcacagatcccagcctagctctgaagctggaggtgttcgacaaggacacgttcagcagggacgacccgatgggggacgcggagatcgacgtggcgccgctggtggaggcggcgaacgcgagcccggaggcgagcctgaggaacggcgccatcatcctgtcggtgcggccgagcgccacgaactgcctcgccgacgagagccacgtgtgctggaggaacggcaagttcgcgcaggacatgatcctccggctcaagaacgtggagagcggggagattcagctgcagctgc

SEQ ID NO: 80454 - DNA, 357 bp, Zea mays
cagacgaccagcaggaggtacgagcaagaccacctaggaggcctctctctctctctccccagccacccccgtagcgagagggagggcggaagaggatgagcgcgtccaggttcataaagtgcgtcacggtcggggacggcgccgtcggcaagacctgcatgctcatctcctacacctccaacaccttccccaccgactatgttccgacagtgtttgataacttcagtgccaacgttgtggttgatggtaatactgtcaacctcggcctctgggacactgcaggtcaagaggattacaacagactgagaccactgagctatcgtggagctgatgtttttcttctggctttctcactga

SEQ ID NO: 80455 - DNA, 430 bp, Zea mays
agcggcgccacggcctctcctgctatcgctgctggtcgccgtgctagcggtggccgcggatgtcgccaacgccggccacgccaagcccctgacgcctggcgggcgcgtggtacaccacaaccacggcaagttcacggccgggccgtggaaacccgcccacgcgaccttctacggcgggcgggacgggtccggcaccacggcgggcgcgtgcgggtacaaggacacgcgcgcgcaggggtatggcgtgcagacggtggccgtgagcacggtgctgttcggcgacggcgcggcctgcggcgggtgctacgaggtgcgctgcgtggacagccccagcgggtgcaagcccagcgcggcggcgctggtggtgacggcgaccgacctgtgcccgcccaacgaccagcagtccgcggacagcggcgggtggtgcaac

SEQ ID NO: 80456 - DNA, 409 bp, Zea mays
cgcagcaccactggggcgtgcgcggggagagcgacggcgacggcgtctccgtgatggggtccagcgatatctggatcgaccacctgtccatgagcagctgcgcggacgggctggtggacgcggtggacggctccaccgccatcaccgtctccaacggccacttcacgaggcacgaccacgttatgctgttcggggccagcgacgccgcgtccaaggacagggagatgcaggtcaccgtcgccttcaaccacttcggcaaggggctggtgcagcggatgccgcgctgccgtcacggcttcttccacgtggtgaacaacgactacacgcactggctcatgtacgccatcggcggcagccggaaccccaccatcatcagccagggcaaccgctttcgcgccgtcgacgacag

SEQ ID NO: 80457 - DNA, 420 bp, Zea mays
gcgagcgggcatgtggaacgtccggtccaacgtctgggagcggtactacctcggggagcagttctacatcagcgtcatctcgccggcgcggtcgctgcgcgacgagtacaacatgcccgacaacgccctccgctgcggcaaggtcgtggggctgccgctgccgccatcctacgcccccgcgcgctaaagacgacgaaggcgccgttttcacctcgtgttctgaccatccagtctaactaatccattcctgtgctgctcggcgaaataaaatcatcaaaaagaacaaagacgaaggaagcctagggaagggagaagggacgttgggtgggggtgagccaaatgagaacgcacggatatatctattgatgtaatcttgagatgccctctcaaatcactgtaatggggtttaaaaaacaatca

SEQ ID NO: 80458 - DNA, 362 bp, Zea mays
agaacatcttcgggagcaagaacgtggtgatcgacaaggtgacgatcaaggcccccggcaacagccccaacacggacggcatccacatcggcgactcgagcaacgtgaccatcagcggcaccaccatcgccgtcggcgacgactgcgtctccatcggccccgggagcaagaccatccgcgtgaagggcgtcaagtgcggcccgggccacggcatcagcgtcggcagcctggggcggtacaaggacgagaaggacgtggaggacgtgaaggtgacggggtgcacgctcgccggcaccaccaacggcctgcgcatcaagtcgtacgaggactccaagtcgtcgctcaaggccaccaagttcctg

SEQ ID NO: 80459 - DNA, 401 bp, Zea mays
attcttcgtcccacgctccgtctttatttgtaatctgaagcttacaggaacatttgagtggatcatggacggattggtaggcctcttgaaagtccgggtggtgaggggcatcaaccttgcctaccgcgacgcaagaggcagcgatccgtatgtcgtcctacgacttggcaagaagaaacttaagacgagcgtgaagaagagatctgtgaaccccatctggcacgaggagctaactctgaccgtcacagatcccagcctagctctgaagctggaggtgttcgacaaggacacgttcagcagggacgacccgatgggggacgcggagatcgacgtggcgccgctggtggaggcggcgaacgcgagcccggaggcgagcctgaggaacggcgccatcatcctgt

SEQ ID NO: 80460 - DNA, 406 bp, Zea mays
actacgtgcgttcgtgcagccacagacaggcgtccgggcaccatgtctttcaccggcacgcaggacaagtgcacggcgtgcgacaagaccgtccacttcatcgacctcctcacggccgacggcgccatctaccataagacatgcttcaagtgcagccactgcaaaggggtcctctcgatgtgcagctactcctccatggacggtgtgctgtactgcaagacccacttcgagcagctcttcaaggagaccgggagcttctccaagaacttcacgccaggtggcaagtcatcagacaagggtgaactgacaagggccccaagcaagctgtcgtctgcattttctggtacccaggataagtgcgcagcatgccagaaaacagtgtacccgctggagaagttaactctgg

SEQ ID NO: 80461 - DNA, 425 bp, Zea mays
atcctcgccatcgatctcgagggggcgcgccgcgaggtcgtcggcctctccgggcagacactcctccgcgcgctcgccaacgcggagctcatcgagccggcctcccaccgcctcgaggatatcgacgcgtgctccgccgagtgcgaggtccacatcgcgcaggagtggctcgacaagctgccgccaccgtcctacgaggagcggtacgtgctcacgcgcgcgtccaggaaccgcgagctcaacaagcacgcgcgcctgggttgccaggtcgtcctcacgccggagctgcatggcatggtcgtcgctgtccccgagcctaagccgtgggacatcccgtaatggcctgccgcgacgaatggcaaggtgcggctttcgacgctgtgagccttccttcattcccctggctcggtcaagcttgtgcgcct

SEQ ID NO: 80462 - DNA, 382 bp, Zea mays
acacgcgtccggagcgaggaagttcgccatcatcaacgtggggctggtggggtgcgtgccggtggtgcgggtgctggacgcggacggcgggtgcgccgaggggctcaacaagctggctgaagccttcgacgtcgcgctggggccgctcctcgccggcctcgccgacaagctgccggggctgacctactcgctggccaactccttccgcctgacgcaggacgccttcgcggacccgaaggcgtcagggtacagcgacgtggccagcgcctgctgcgggagcgggcggctgctggcggaggcggactgcctgcccaactccaccgtgtgcagcgaccacgacagccacgtgttctgggaccgctaccacccggcccagcgcgcg

SEQ ID NO: 80463 - DNA, 395 bp, Zea mays
agagagagacgcaggaccgccggcgacgatcgaggagggaggaaccagatacccggcggcggcgatcgatggctccgcgcagctcatcggcggcgacgtgcctgtgcctcgctctcgccgcggccacgctggcgctggcccacggggcgcaaggaggaggaccatcggcatcggcggcggacctggacaaggtcacggccgagaccttcttggacatcgagatcgacggcaagcctgcaggccggatcgtgctgggactgtttggggacaccgttcctaaaacagcagagaacttccgagcactttgcacaggggagaaaggaattgccacgtccggcaagcctctgtggtacaaagggtcgacgttccacaggatcatcccggggttcatgatc

SEQ ID NO: 80464 - DNA, 409 bp, Zea mays
agcactagcagtagcgattgggttgcaagatggctttaactgctccctctttgcaacagcaactatatttgcaagtgtggtaatgtacgatgcttctggtatcagattgcatgctggaaagcaagcagcggtactgaaccaaatagtttgtgaacttccttctgaacatcccttgtctgaaacaagaccactgcgagaacttttaggccatacaccaacccaggttgttgctggcgcattgcttgggtgtacgatagccacagcaggacaattattcgtttgaactccgaaggtgcaggagaaatgttgtagcatttgcatcgcggggacttgagaagaagtttctctagtgttctgctactttaggtattggtaagattttcaacttggtgctgtagtgttgtccaat

SEQ ID NO: 80465 - DNA, 403 bp, Zea mays
aggatgccgcgctgccgctacggcttcttccacgtggtgaacaacgactacacgcactggatcatgtacgccatcggcggcaacatgaaccccaccatcatcagccagggcaaccgcttcatcgcccccgacgaccccaacgccaaggaggtgaccaagcgggagtacacgccgtacaaggactacaaggagtgggtgtggaagtcgcagggcgacgtcatgatgaacggcgccttcttcaacgagtccggcggccagaacgagcgcaagtacgacaggttcgacttcatcccggccaagcacggccgctacgtcggtcagctcacgcgcttcgccggaccactcaagtgcatcgtcggccagccgtgctagtagacagcggcccggtcgggcacatactcct

SEQ ID NO: 80466 - DNA, 381 bp, Zea mays
cttcggcctccaactatcaccacccgggacgtcttccatggcctcctcgtagtagaatagttctatctcaccgcaacaactcctcattacatcctttatgagaggctgatcgattggtagatacgtactcgggtggagcagagcaacgagagacatggcgacgacgacgcgtgttgccgccgccgccaccggcgtgctgctggtcctgtcggcgttggcgaccctggcgcgggccgaggacccgtacctgttcttcgagtggaaggtgacgtacgggaccaagtccctgctgggcgtgccccagaaggtcatcctcatcaacggcgagttccccggccccaggatcaactgctcctccaacaacaacatcgtcgtcaacgt

SEQ ID NO: 80467 - DNA, 319 bp, Zea mays
agcgccactccttgtaccagggcctgtacgcccgcagcgtggcggacgcccgcatccgccccgcgctccgcctgctgaagcagaatctgtcgttcctggtgtccgtgctcgcggaccgcgcgcatcccgtggcggtgcgggaggtgatgcgcgcctccttcgaggcgttcctgatggtgctcctgtcgggcggcaacgatcggagcttcgtgcgcgccgaccacgccacggtggatgaggacttctggagcctgaggcgcgccttctccacatgtggcgaatggctggtccccaaagacgtagtggcatcggaggcaaa

SEQ ID NO: 80468 - DNA, 414 bp, Zea mays
  unsure (1)..(414): unsure at all n locations
atgataaaccgagtggaatacatgcattccaagggatttattcatcgtgacatcaagccagacaacttccttatgggcttaggtcggaaagctaatcaggtctatatcattgattatggacttgctaagaaatacaaggaccttcatactcataaacacatcccgtacagggagaacaaaaatctgactggaacagcacgttatgctagtgtgaatactcatcttggaatagaacaaagtaggagagatgatctggagtctgctggctatcttctgctatattttttaagacgaagcctcccatggcacggtcttaaagctggcactaagaaacagaagtatgacaatattagtgaaaagaaaatgcttacgtcagcagaggttctttgcanatcttacccgtcggagttcgtc

SEQ ID NO: 80469 - DNA, 415 bp, Zea mays
agcaccaccacctccatccgtgcgcctctcgctctcgctggtggtgctcctcctcctccacctgctcccggggcgggcggcctccttttccacctcctgctggtgccagggccgggagggcgtcgcggaggtggcgcgcatggggctcgccggggacgggtcggcggacaccgcccacctcagtaataatgaaaatgggcggttcatttatggagttgcgagttctcctggtaacagagcatcgatggaggacttctatgaggcacgaatagacgacgttgatggagagaaaattggaatgttcggtgtatatgatggtcatggaggagtccgagcagctgagtatgttaagcagcaccttttcagcaatttaatcaaacacccaaagttcatcactgataccaatgctgctatc

SEQ ID NO: 80470 - DNA, 416 bp, Zea mays
agcttgcatatgtggctcttgaatacgaccaggagctcgagaatgccaagagcagctcatctgtggagaagagctacgagctgcctgatggtcaggtgatcaccattggggcagagaggttcagatgccctgaggtcctcttccagccttccttcattggtatggaagctcctggcatccatgagaccacctacaactccatcatgaagtgcgatgtcgacatcaggaaggacttgtatggtaacattgtgctcagtggtggcacgaccatgttccctggtattgcggaccgtatgagcaaggagatcactgcccttgcgccgagcagcatgaaaatcaaggtggtggcaccgcctgagaggaaatacagtgtctggataggaggatccatccttgcctccctgagcaccttccaa

SEQ ID NO: 80471 - DNA, 375 bp, Zea mays
  unsure (1)..(375): unsure at all n locations
atgaacatgtacaagtgcaaggacatgctgatcaaggacgtgaccgtgacggcgcccggggacagccccaacacggatggcatccacatgggcgactcatccgggatcacgatcaccaacaccgtcattggcgtcggtgacgactgcatctccatcggccccgggacctccaaggtgaacatcaccggcgtgacctgcggccctggccacggcatcagcatcggcagcctanggcggtacaaggacgagaaggacgtcacggacatcaacgtcaaggattgcactcttaagaagacgatgttcggcgtccgcatcaaggcgtacgaggacgccgcctccgtgctcaccgtctccaagatccactacgagaatatc

SEQ ID NO: 80472 - DNA, 420 bp, Zea mays
  unsure (1)..(420): unsure at all n locations
aaacagagcctggacaaagagagttcaacatgactggaaacttctggagaaggatctaccagcgtatatttttgttcgggttgctgaagatagaatggaccttcttagggctgcaattattgggcccaagggaacaccttaccatgatgggcttttcttctttgatattcacattccctctgcttatccttgtgctcccccgctggtatattaccactctggaggacttcggattaatccaaacttgtataacaatgggaaagtgtgtcttagcctgttgggtacctgngatggtagaggttgtgagaagtggaatccagctcaatcgacaatgctgcaagttcttgtctccattcaagctctgattttgantgacaagccatattacaacgagccaagatatgagtcctatgccaacac

SEQ ID NO: 80473 - DNA, 413 bp, Zea mays
actctcctctgtccctctacggtgcttctgctcgccggcccaaaatcgcctcatcgaccacgcccccttccaggctcccgtctccatgggtctcctctcaaacaggattgggagggagagcctcaaggcgggggatcatatctactcctggagggcggcgtgggtctacgcgcatcacggaatatatgtgggcgatgataaggtgatccatttcacaagaggaagaggacaggaggtcggaacaggaactgtcgtcgatattattcttgtgagtctcaccccaaaacgaagcaacacgccttgcacggtgtgcaccgacgaaaccagcgacagcagcacagagacgaacggcgtggtatcctcctgtctcagctgcttcctagctgggggtgctctctaccgtttcgagtacg

SEQ ID NO: 80474 - DNA, 434 bp, Zea mays
  unsure (1)..(434): unsure at all n locations
agccacgtcagcaccagagtcatgggcacctacggctactgcgcccccgagtacgccatgaccggcaagctcaccaagatgtcggacatctacagcttcggcgtcgtgctgctcgagctcatcaccggccgccgcgccatcgacatggccaggccgtccgaggagcaggtcctacttaactgggcttcgcctctgctgagagacaagaggaggttcgtgaagctggccgacccgttgctgggcaacaggtacccagtgaaggcgctgtaccaggcgctcgccgtcgcgtccatgtgcctgcaggaggacgctgccagccggccggggatcagcgacgtcgtcgcggcgctctccttcctcgcccgaccgcantactaccctcccggaggcacngnagctgaacacaagagcacgcatagcgggacagacaatga

SEQ ID NO: 80475 - DNA, 364 bp, Zea mays
ttccgggaagacccacgcgtccaagggatgccagacacgcagtgccccatcgcgcccaacaccaacttcacgtacaagtggcagcccaaggaccagatcggcagcttcttctacttcccgtccatcggcatgcagcgggcggcgggcgggtacggcgccatcagcgtggtgagccgcctcctcatcccggtccccttcgaccagccgccgccggagagcgaccacgcggtgctcatcggcgactggtacaccaaggaccacgaggtgctggcgcgccagctcgacgccggcaagagcgtgggccgccccgcgggcgtgctcatcaacggcaagggacgcaacgaccctgaagccgccgcgccca

SEQ ID NO: 80476 - DNA, 403 bp, Zea mays
acagccaagagctatccatacgcacagcgatgcaccagcacgagatactagccatcatgcgcctgtcgtccctcctcctcgtcgtggccgccctctcggcgcgcgccgcggggcagcaggtgccgccggtgggcggcagcgctctgaagccggactactacagccagtcgtgcccgcgcgcggagaggatcatcgcggaggtgatgcagacgaagcagatggcgaacccgacgacggccgcgggcatgctgcgcgtcttcttccacgactgcttcgtcaccgggtgcgacgcgtcggtgctgatctcgtccacccagttccagaagtcggagcactacgcggagattaactactcgctccccggggacgccttcgacgccgtggtgcgcgccaagctggccct

SEQ ID NO: 80477 - DNA, 383 bp, Zea mays
aatcaaggtcatggtctcccgcggccacatcgacggcaagctccgctacggcttcaacggcatctcccacagggaccccgagacccccgtgaagctcgctgaatacttcaacgtcaccgacggggtgttcagctacaaccagatgggcgacgtgccccccgccgtgaacggtcccctccatgtcatccccaatgtcatcaccgccgagttccgcaccttcatcgagatcgtcttcgagaaccccgagaagagcatagactccctccacgtcgatggctacgccttcttcggcgtcgggatgggccccgggaagtggtcgccggaggtgaggaagacgtacaacctgctggacacggtgagccggcacacgatccaaagtgtac

SEQ ID NO: 80478 - DNA, 356 bp, Zea mays
accacgcgtccgggctgctgaggcagtgggcaagccggagtggggcaacgcgggtccgggcgactccggcagctacaaggactggccggaggacacgggcttcttccggcgcgagggcggctggagcacggagtacggggagttcttcatgagctggtactcgcagatgctcctggagcacggcgagcgcatcctgtcggcggcgacgggcgtgttcacggggtcccccggcgtgaagatctcggtgaaggtggccgggatccactggcactacggcacccggtcccacgcggcggagctgacggcggggtactacaacacccggtcgcacgacgggtacgcgcccatcgcgcgca

SEQ ID NO: 80479 - DNA, 397 bp, Zea mays
  unsure (1)..(397): unsure at all n locations
aaacgagagggcaggagcagccgcagtcccggcgatcccgccgccggtcgccctcacacctcctcgtcactgccttcgtttctctttccaacaatcaagatgagccgtggcggtagcgcgggtggtggtcaaagttctctgggttacctctttggaagcggtgagccccccaaaccagcagtggcaccaccagctgtaagtgctccacctgctgctgcaggtgctccacctgctgagaaaccacctgctgcaaagcctgatggcaccagtcagattgctgctggggttaccagccaaaccaataactatcacagggctgacggtcagaacaccggcaacttccttacggaccgncccttcgacaaggtccacgctgctcctgncggtggctcttccc

SEQ ID NO: 80480 - DNA, 421 bp, Zea mays
agtcacgacaagatggcatgcacaaacaatgcgatgagagccttgttcctcctggtcctcttctgcatcgtgcatggtgagaaggaagagtcaaagggcatcgatgcgaaagcgtccgggcctggtgggtccttcgacatcaccaagttgggcgcctccggcaatggcaagacagacagcacgaaggctgtgcaggaggcatgggcatcggcgtgcggcggcactgggaagcagacaatcctcatacccaagggcgacttccttgtcggacaactcaacttcacaggcccttgcaagggcgacgtgaccatccaggtggatggcaatctgctggcgaccacggacctaagccagtacaaggaccatggtaattggatcgagattctacgcgtggataacctggtcatcaacggcaaaggaa

SEQ ID NO: 80481 - DNA, 400 bp, Zea mays
agcctccctcaccaaataaggtcccgcccttttccgacattcacaggggggacaggaaatcagcggccatggcctcgattccggcgacgaccttcgccgtcatcttatccgtcctcttctgtgccgcggctggcaccgccgtcgacaacgacctccccgactacgtcatccagggccgcgtctattgcgacacctgccgcgccgggttcgtgaccaatgtcaccgagtacatcgcgggcgccaaggtgaggctggagtgcaagcacttcggcaccggcaagctcgagcgctccatcgacggggtgaccgacgggaacggcacgtacacgatcgagctcaaggacagccacgaggaggacatctgcgaggtggtcttggtggagagcccgcgcaaggactg

SEQ ID NO: 80482 - DNA, 381 bp, Zea mays
acccacgcgtccgggcgacgacgccccgagggccgtcttccccagcatcgtggggcgcccgcgccacactggtgtcatggtcgggatggggcagaaggacgcctacgtcggtgacgaggcgcagtccaagaggggtatcctgaccctcaagtaccccatcgagcacgggatcgtcagcaactgggacgacatggagaagatctggcatcacaccttctacaacgagctccgcgtggctcccgaggagcaccccgtcctcctcaccgaggcgcccctgaaccccaaggctaacagggagaagatgacccagatcatgttcgagaccttcaacacccccgctatgtacgtcgccatccaggccgtgctctctctgtatgccag

SEQ ID NO: 80483 - DNA, 407 bp, Zea mays
acgcggccaacccgccccccaagcccacccagcgcgacgaagctggggggcgatcgctccagcgccgccggcgacatcgccccgggagccgccggcggtaacccgctctctgtcccgcctcaacgaaccctcaggtccaagtagttcgtttcgtgagttatccacagttgcgccgcaatgatgagtactgctaatcgctaccaacacatcaggtcaactaagcctgttgtaggcaacgcaataaaattgaaggatctcatgataaacagtgacaatacgatatgtgctgactgtggtgcacctgatcccatatgggcatctgctaatattggagtgtttctttgcttaaaatgtggagatgttcatacgggacttggacctgacatctcaaacgttttatctgtaac

SEQ ID NO: 80484 - DNA, 378 bp, Zea mays
agccgcgacctggctgtacctggcgacgaggcggcaggtgtacgcggacttcatcgcccacgaggccatctcgtcgagcgtggccgagttcagctgggacctcaagttcccgggcgcgcaggtgctgctggccgagttcaacatgacctcggcgggcggcgcgcagaacttcaagtcgcaggcggacaacttcgtgtgcgcggtgctggcggacacggggttccaccaggtgttcatcaccccgggcggcgtgatccaactccgggacggggccaactcgcaatacgttgacagcaacgcgttcctgctggtggtgtacgccggactgctgctgccgccggggcaaaccgtgctgtgcgggaaccaagcgctggcccc

SEQ ID NO: 80485 - DNA, 428 bp, Zea mays
  unsure (1)..(428): unsure at all n locations
agcatctccatcggccccgggagcaagatgatccgcatccatggcgtcaagtgcggcccaggccacggcatcagcgtcggcagcctggggcgctacaaggacgagaaggacgtggaagacgtgcaggtgacggggtgcacgatcgccggcaccacgaacggcctgcgcatcaagtcgtacgaggactccaagtcgtcgctcaaggccagcaagttcctgtacgagggcatcaccatggacaatgtctcctaccccatcatcatcgaccagaagtactgccccaacaacatctgcgtcaagtccggcgcctccaaggtggccgtcaacgacgtcgtcttcaagaacatccacggcacctccaacacgccggaggccatcacgctcaactgcgccaacaacctgccatgccanggcgtgcagctcgtcaa

SEQ ID NO: 80486 - DNA, 403 bp, Zea mays
agtggacgtcagcgtgcggagcgatgggagacgcaacgatgctcatccccaagggcgactacctggtgggccctctctacttcagtggcccgtgcatgggggacatcaccatccagctcgatggcatcctgctgggatccaacgacctggccaagtacacggcgagttggatccaggtgtcgcacgttaacaacatcgtcatcaacggctccggcacgctcgatggccagggcaccgcagtatataccaagagcaagaccgacgtcgtcaaggcgatgcccaacacactagtgttgttctacgtgaccaacggcactgtttccggaattaaactactcaactccaaattcttccacatcaacatcgacacttctaaggacatcaccgtgaaggatgtgaacat

SEQ ID NO: 80487 - DNA, 383 bp, Zea mays
aggacgcgtgggatacccccacaccttgagacctgcgttgtcacccacccatcaaggttggggccgccagcaggttcagccgttcctgttcttgctaaaacgagagaaggatggcagtgtctcagggagctgtcctattcttgtttctcctcgtcgcagcagaggtgggaaccatcgatgccaaaatgggagtagccatgcccatgcatgccttgataatggagaaagcgaaacagcaggagacggagaagaaggaggagaaaagcacggagaaggaagagagtcaatgcttatcgccgagtctccagttcgagggcttctgcttcaacagcgacagatgcgccgatgtgtgcatgaaggagagctttcccggtggcgagtgc

SEQ ID NO: 80488 - DNA, 396 bp, Zea mays
cccacgcgtccgagacgcgccgccctcccctcgcgttcattgatttctgttataattactaccgagctactatctccacattattattggtaaagaaagaaagggcgcctcctctaatttgatgggcattccgtttccttctcaacttcaacgccaacaacagttgatgctactatggttggaaatcgggcatggttcggagggcttttcagcggctcaggcaaaaggcgacaagtcagtgcagagaagatagtgcttgatctaacccctgtacaggaacagagactgcaaagtctgaaggaaaggctaaatgtaccttacgacgaaactcggacggatcatcaagattcgcttaaggctctatggaatgcctcctttcccgatacagagctcact

SEQ ID NO: 80489 - DNA, 411 bp, Zea mays
acgagcgcccctcctccgatccgccggcccgccgagagctagctgctgatcggtcgaggagagtcatggcgacgtcgacgatgcgcgttgccgccggcgtgctgctggtcgtgtcggcgctggcgaccttggcccgggccgaggacccctacctgttcttcgagtggaaggtgacgtacgggaccaggtccctgctgggagtgccccagaaggtcatcctcatcaacggcgagttccctggccccaggatcaactgctcctccaacaacaacatcgtcgtcaacgtcttcaaccagctcgaccatccgctccttttcacctggaacgggatgcagcacaggaagaactcgtggatggacgggatgccaggcacgcagtgccccatcgcgcccaacaccaacttcacgtaca

SEQ ID NO: 80490 - DNA, 411 bp, Zea mays
acgcgtccaggcgtcaagtgcggcccaggccacggcatcagcgtcggcagcctggggcgctacaaggacgagaaggacgtggaagacgtgcaggtgacggggtgcacgatcgccggcaccacgaacggcctgcgcatcaagtcgtacgaggactccaagtcgtcgctcaaggccagcaagttcctgtacgagggcatcaccatggacaatgtctcctaccccatcatcatcgaccagaagtactgccccaacaacatctgcgtcaagtccggcgcctccaaggtggccgtcaacgacgtcgtcttcaagaacatccacggcacctccaacacgccggaggccatcacgctcaactgcgccaacaacctgccatgccagggcgtgcagctcgtcaacgtcgacatcaagtac

SEQ ID NO: 80491 - DNA, 429 bp, Zea mays
  unsure (1)..(429): unsure at all n locations
aggaggccgcaccaaatctatctggggatcggagcgcgggcgacaagatgccacgcggcggcaagcccgcggcttcgtcgaagccgaacccgttcgactcggactcggactcggagtccagcaataagccggcgaacaagtccggggcgtcgtcgtaccaggcccccgccgacgccaagaagcggtacaaggacgggttccgggactcgggcgggctggagaaccagtcggtgcaggagctggagcactacgcggcgtacaaggccgaggagacgacggacgcgctcgccggctgcctgcgcatcgccgaggacatcaggcaggacgccagcgacacgctgatcacgctgcacaagcagggggagcagatcagccggacgcacgagaaggccgtcgagatcgnacaggacctcgcaaagagcgagaccc

SEQ ID NO: 80492 - DNA, 407 bp, Zea mays
caagggcaacaggagagagggatggctaggctgatgtcgctggttgacgaggggttcgccgtcaggcgccagacccaggaagcgttgtactgcatgcagatgatgacgaggatccagactcagctgtacacgagacggctcaagaccgagaaggacaagaaggttctcaagagtcagaccaaggccgttaataaacatagcctggacaaagcaaagattggtgaaggctgggatcatagcctgcagtccaaggagcagatggaaacggtgcagaagatgaagcaggaagctgctacaaggcggcaaagggccttgtcatacgcattctctcaacagtggaggaacaggaacacctcttctgcgcgagctgcgcatgggcctgctcccatgtacatgggacctggcaa

SEQ ID NO: 80493 - DNA, 408 bp, Zea mays
actcaccccgccttcacgcctccctcaccaaataaggtcccgcccttttccgacattcacaggggggacaggaaatcagcggccatggcctcgattccggcgacgaccttcgccgtcatcttatccgtcctcttctgtgccgcggctggcaccgccgtcgacaacgacctccccgactacgtcatccagggccgcgtctattgcgacacctgccgcgccgggttcgtgaccaatgtcaccgagtacatcgcgggcgccaaggtgaggctggagtgcaagcacttcggcaccggcaagctcgagcgctccatcgacggggtgaccgacgggaacggcacgtacacgatcgagctcaaggacagccacgaggaggacatctgcgaggtggtcttggtggagagcccgcgc

SEQ ID NO: 80494 - DNA, 393 bp, Zea mays
ggcaagctcgccatggtgctcgtgggctccagcgtggggcgcaacgacggcggcgtcgtcgccggcctcgtggcctgtgggatcgtgatggggaccatgtccaacgccaacaacctgatgcaggacctcaagacggggtacctgacgctgacctcgccgcacaccgtgttcatcagccaggccatcggcacggcgctcgggtgcgtcgtcaacccggtcatgttctgggccttctacagggtggtgcagaacggcgacaccgacgtcttcgacgcgccctacgcccgagtgtaccgcagcatcgccatgctgagcgccgggcaggacgggataccaatgcacagcctctggctctgcaagctcttcttcgcgctggcgctcgcgctcaacgtg

SEQ ID NO: 80495 - DNA, 404 bp, Zea mays
cgcgtggataacctggtcatcaccggcaagggaaaccttgacgggcagggcccagccgtgtggagcaagaactcctgcaccaagaagtacgactgcaagatccttcccaactcgctggtgatggacttcgtgaacaacggggaggtgtccggggtcacgctgctcaactccaagttcttccacatgaacatgtaccggtgcaaggacatgctgatcaaggacgtgaccgtgacggcgcccggggacagccccaacacggatggcatccacatgggcgactcatccgggatcaccatcaccaacaccgtcattggcgtcggcgacgactgcatctccatcggccccgggacctccaaggtgaacatcaccggcgtgacctgtggccctggccacggcatcagcat

SEQ ID NO: 80496 - DNA, 379 bp, Zea mays
  unsure (1)..(379): unsure at all n locations
tgatctccctacaccttgagacctgcgttgtcacccacccatcgaggttggggccgccagcaggttcagccgttcctgttcttgataaaacgagagaaggatggcagtgtttcagggagctgtcctattcttgtttctcctcctcgtcgcagcagaggtgggaaccatcgatgccaaaatgggagtagccatgcccatgcatgccttgataatggagaaagcgaaacagcaggagacggagaagaaggaggagaaaagcacggagaaggaagagagtcaatgcttatcgccgagtctccagttcgagggcttctgcttcaacagcgacagatgcgccgaggtgtgcatgaaggagagctttcncggtggcgagtgcaag

SEQ ID NO: 80497 - DNA, 400 bp, Zea mays
caagatggcatgcacaaacaatgcgatgagagccttgttcctcctggtcctcttctgcatcgtgcatggtgagaaggaagagtcaaagggcatcgatgcgaaagcgtccgggcctggtgggtccttcgacatcaccaagttgggcgcctccggcaatggcaagacagacagcacgaaggctgtgcaggaggcatgggcatcggcgtgcggcggcactgggaagcagacaatcctcatacccaagggcgacttccttgtcggacaactcaacttcacaggcccttgcaagggcgacgtgaccatccaggtggatggcaatctgctggcgaccacggacctaagccagtacaaggaccatggtaattggatcgagattctacgcgtggataacctggtcatc

SEQ ID NO: 80498 - DNA, 400 bp, Zea mays
gtggacttcatcttcggcaactcggcggcgctgttccagaactgcctcatgacggtgcgcaagcccggggacagccagtccaacatggtgacggcgcaagggcggacggaccccaacatgcccacgggcatcgtgctccagggctgccgcatcgtgccggagcaggcgctcttccccgaccgcctccagatcgccacctacctcggccggccgtggaaggagtacgcgaggacggtggtgatggagagcaccatcggcgacctcatcaggccggaagggtgggcggagtggatgggcgacctcggcctcaagacgctctactacgccgagtacgccaacaccggcccgggcgccggcaccagcaagagggtcaactggccaggctaccacgtcatcggac

SEQ ID NO: 80499 - DNA, 385 bp, Zea mays
  unsure (1)..(385): unsure at all n locations
cttaattacaggccaaacctaaccaggcctgacaggatttcttggaaaacatacttcaataaccacctcatgtgcgaaatcaagggccaccacctgacctccgctgccatagtcggccacaacggcgccttttgggcccagagcaccgcattcccacagttcaagacagaggagatgaccaacatcatgaaggacttcgacgagcccgggttcctggccccgaccggcctcttcctcggccccaccaagtacatggtcatccaaggcgagcccggcgctgtcatccgcgggaagaagggatctggangcataactgtgaagaagacaaggcaagcgatggtggtcggcatctacgacgagcccatgacccccggccagtgcaaca

SEQ ID NO: 80500 - DNA, 391 bp, Zea mays
  unsure (1)..(391): unsure at all n locations
acctgcagtcatctcctccaccaccaccaccaagctcaacaacagccagctcgcgaaaataatgaagagccgcagcatggcatcatcggccgcgctcttggtgctagccctcgcgctagtggcggccaccgccccacaggtagcggaggcaaagaagaagagagcggcggagagcggcgaggcggcggaggcgaagaagatccaggacgacttctgctcgacgctgtgcgagggcaagaaggggacggacctggtcgtgtgcaaggagtcctgcgcgctctcccagcagtccaacctggtgctgtacggcaggatccagtgcaagggcaagtgcaccgagcagaagggcatcacggcgccggccatgaaggtctgccangaggagtgcgac

SEQ ID NO: 80501 - DNA, 407 bp, Zea mays
cccacgcgtccgcccacgcgtccgtgctaaaacgagagaaggatggcagtgtctcagggagctgtcctattcttgtttctcctcgtcgcagcagaggtgggaaccatcgatgccaaaatgggagtagccatgcccatgcatgccttgataatggagaaagcgaaacagcaggagacggagaagaaggaggagaaaagcacggagaaggaagagagtcaatgcttatcgccgagtctccagttcgagggcttctgcttcaacagcgacagatgcgccgatgtgtgcatgaaggagagctttcccggtggcgagtgcaagcaggtcgtggccacgcgcaagtgcttctgcaagaagccttgctagttcatcggtcttgctaattgttgatgggtgcttcattaatttga

SEQ ID NO: 80502 - DNA, 403 bp, Zea mays
ccacgcgtccggctggcgctgccgcagagactgggcgacggaccggcagcgcctggcccgttgcgccagaggcttcgggcacgcgaccaccggcggcctcggcggcaagatctacgtggtgaccgaccccaccgacctcgacgtggtgaacccgcgccccggcacgctgcgctggggcgtcatccagcccggcccgctgtggatcatcttcgcgcggtccatgatcatccagctctcgcaggagctgctcatgagcagcgacaagaccatcgacgggcgcggcgcgcaggtgcacatcgccaacggcgccgggatcacggtgcagctggcgcaaaacgtcatcatccacaacctgcacgtgcacgacgtcaagcacaccatgggcggcctcatgcgcgactcc

SEQ ID NO: 80503 - DNA, 402 bp, Zea mays
agtgaacatctacactatgataagttctctagttttttgaaacaattgcatgatgagattgtccgcttggagttcagtcactacgatttgaaatcatcgaacacaatatctgcaaaggactttgcgttatctatggttgcttctgctgatatgaatcacatagacaagttattggatagagttgatgatttggatgacaatcttgacctcaaggatctgcgcattacctttgaggagttcaaggcatttgctgatcttcgaagaaggttggaaccatttgcaatggctatcttcagctatggcaaagtaaatggtttgttgacgaagcaggatctaaaacgtgctgcatcacatgtttgtggagtggacttgactgacaaagtagtggacataattttccat

SEQ ID NO: 80504 - DNA, 401 bp, Zea mays
cggacgcgtgggcggcagaggcctcgtgcagaggatgccaaggtgccgctggggcttcttccacgtggtcaacaacgactacacgcactggctcatgtacgccatcggcggcagcaaggcccccaccatcatcagccagggcaaccgctacatcgcgccgcccaaccttgccgcgaagcaggtcaccaagcagcatgacacgccggagtcggtgtggaagaactgggtgtggcactccgagaacgacctcttcatggaaggcgcctacttcaccgtcaccggcggccagattaacaggcagttcaacaagaaggacctcatcaagcccaggaacgggtcctacgtcaccaggctcacgcgctacgccggctccctcgcctgcacgcccggcaagccctgct

SEQ ID NO: 80505 - DNA, 461 bp, Zea mays
  unsure (1)..(461): unsure at all n locations
catccatcaatctcnccccagcggcgaagagagccggcggccacaggaaggagaaatggcttccgcacacaacgctctccgggtgtttttcatcctagccgtggtatgtgccgtatgcacagcgaaaaggacaggagccaagaaggaagaatcggcggcagcccctggtggtgctgctggaggcagcggcgggacgttcgacatctccaagctcggcgcgaccagcgacggcaagacggactgcacaaaggcagtccaggacgcgtggacgtcagcgtgcgaagcgaccggaagcgccacggtggtgatccccaagggcgactacctggtcggccctctcaacttcactgggccatgcaagggcagcagcatcgccatccagctggatggcaacctgctgggatcaaacgacctgaacaagtacacngcgagctggatcgaattgtctcacgttaacaaca

SEQ ID NO: 80506 - DNA, 445 bp, Zea mays
cccgccctttcactgccctcccctcaacaacattaaggtccccccctttccgacattcacacgtgggacaggaaatcaccggccatggcctcaattccggcgacgaccttcgccgtcatcttatccgtcctcttctgtgccgcggctggcaccgccgtcgacaacgacctccccgactacgtcatctactgccgcgtctattgcgacacctgtcgcgccgggttcgtgaccaatgtcaccgagtacatcgcgggcgccaaggtgacgctgcactgcaaacacttcggcatccggaacctcgagcgctccatcatacgggtgaccgactggaactgcacgtacacgatcgagctcaaggacagccacgatgacgacatctgcgacgtggtcttggaggacagcccgcgcaaggactgcgaccaggtgcatgcagacacggaccgca

SEQ ID NO: 80507 - DNA, 403 bp, Zea mays
  unsure (1)..(403): unsure at all n locations
gacaaatccctctccttcttctcgcacggcgggtgcgcgtcgccggcgtcggtctcgaaccgccaactggcgccgtccggccgtttcgaccgtgcgcgcgccgcggcgcagtcggccatcgtccacgtcgccgaggtcgccgcgtaccgcctcgtcttcctggactcgcaccactccttctacggcgggctctacgtcgggggcgtcgccgacgcccgcatccgccccgcgctccgcgcgctgaagcagaacctgtcgctgctcgtctccatcctcgtggaccgcgcgcagccggtggccgtccgggaggtgatgaaggcctcgttccaggggttcctcatcgtcctgctcgccggcggcagcgacaggagcttcacggtgganggacacgcgatggtcgaag

SEQ ID NO: 80508 - DNA, 400 bp, Zea mays
gtcctcttcgatcccgtccaatcccccgcgccccggcgcccctctccgccggcggctttgctgggtcccgcgctcctcctcctcctaggctgttctggttggggctgcggcggagggaactaggtaagggggaaggaaaggggaggtttgagggagagcgcagcggcagcggcagcagcgatgccatcgcacgcggatctggaccgccagatctcgcagctgcgggattgcaagttcctgcctgaggcggatgtcaaaacgctatgcgagcaggccaaggcgatcctcatggaggagtggaacgtgcagcccgtgcgttgccccgtcactgtctgcggcgacatccacggccagttctacgacctcatcgagctctttcgcatcggtggcgacgcgcccg

SEQ ID NO: 80509 - DNA, 406 bp, Zea mays
cggcctttccctcccatatactcgccgtcggccagcggatctaatcggggcgggcgcgatggctgggcagaaccagcggctcaacgtcgtgccgacggtgacgatgctcggcgtcatgaaggcccggctcgtcggcgcgacccgcggccacgcgctgctgaagaagaagtccgacgcgctgacggtccagttccgcgccatcctcaagaagatcgtcgccgccaaggagtcgatgggcgagacgatgcgcgcctcctccttctccctcgccgaggccaagtacgtcgctggcgacggcgtccgccacgtcatcctccagtccgtccgcgcggcatccgtccgcgtccgctcccaccaggagaacgtggccggggtcaagctccccaagttcacccacttcgtcgac

SEQ ID NO: 80510 - DNA, 434 bp, Zea mays
gcgttgtaacccacccatcgaggttggggccgccagcaggttcagccgttcctgttcttgataaaacgagagaaggatggcagtgtttcagggagctgtcctattcttgtttctcctcctcgtcgcagcagaggtgggaaccatcgatgccaaaatgggagtagccatgcccatgcatgccttgataatggagaaagcgaaacagcaggagacggagaagaaggaggagaaaagcacggagaaggaagagagtcaatgcttatcgccgagtctccagttcgagggcttctgcttcaacagcgacagatgcgccgaggtgtgcatgaaggagagctttcccggtggcgagtgcaagcgggacgtggccatgcgcaagtgcttctgcaagaagccttgctagttcatcggtcttgctaattgttgatgggtgcttc

SEQ ID NO: 80511 - DNA, 313 bp, Zea mays
gaagagagcggcggagagcggcgaagcggccgaggcgaagaagattcaggacgacttctgctcgacgctgtgcgaaggcaagaaggggacggacctggtcgtgtgcaaagagtcctgcgcgctctcccagcagtccaacctggtgctgtacggcaggattcagtgcaagggcaaatgcaccgagcagaagggcatcacggcgccgggcatgaaggtctgccaagaggagtgcgacaaggcgtacgtggtgaaggcggccgaagtcaccaaggcctgcagcgtcacctgcgccaaggagaagaacccgcgcctc

SEQ ID NO: 80512 - DNA, 465 bp, Zea mays
gaaacaggcacacaagaacaaatacctcgctaccaacaatggcctccaggtcctccatcctacttgcaacgtcgatgctggctgcgctgtttgcggttggtttgtgcaccaccccgctcaccttccaggttggcaagggatccaagcctggccacctgatcctcacccccaatgttgcaaccatatccgacgtggagatcaaagagcacgggggcgatgacttctcccttacgctcaaggagggcccaacgggaacttggacgctcaaaacaaaggcccgctcaagtaccccctttgcaaccgctttgctgtcaagtccggttgctaccgcatcgctgacgacgtcatccccgctgatttcaaagccggcaccacctattagaccacactcagcatctaatcagcctctgatgatgaattatatttcaaaagagctcaactggtgctcatgttagcaagacaata

SEQ ID NO: 80513 - DNA, 404 bp, Zea mays
acgataagacggcgtacacaaacaatgcgatgagagccttgttcctcctggtcctcttctgcatcgtgcatggtgagaaggaagagtcaaagggcatcgatgcgaaagcgtccgggcctggtgggtccttcgacatcaccaagttgggcgcctccggcaatggcaagacagacagcacgaatgctgtgcaggaggcatgggcatcggcgtgcggcggcactgggaagcagacaatcctcatacccaagggtgacttccttgtcggacaactcaacttcacaggcccttgcaagggcgacgtgaccatccaggtggatggcaatctgctggcgaccacggacctaagccagtacaaggaccatggtaattggatcgagattctacgcgtggataacctggtcatc

SEQ ID NO: 80514 - DNA, 409 bp, Zea mays
  unsure (1)..(409): unsure at all n locations
ctcggaggtgggcagcgaggagctcgacggaggcggcggcagcggcagccccgaggcggccggcagcaacgccagcggcgcggcgcgtgggtacagcggcatcccggggtacccgatgggcggcctcgcgtccggcgcctggccggacgaggcgtcgccgtcgccgacgtccggcgcgaagcgcccccgcgactccggccccgcgctgcagcagccgctggcgccgcagctcagcctgcccagcggaaagaacaagggcggcagggcggcctcggcggagatggcggcgatcgagaagttcctccagttccaggacgccgtcncctgcaagatccgcgccaagcgcgggtgcgccacccacncgcgcagcatcgccgagcgggtgaggaggacgaagatcagcgagcgg

SEQ ID NO: 80515 - DNA, 381 bp, Zea mays
aggttatttctaatacatatggattggatgagattggaaaaaattaagaagaagtttaacttgtttgcgattcaaacacatccaatctcattcaattcacatggattgagagctaaccgaacaagcctgtagttggacaagggtgtaacacttatttgtcaggcgtaccgggcacagaccgcttcctatttgttcgtggggatgtaactgtaagccttgtgacccctaagcagtctgcgtcttgtgcctgctgctgtagcggtagagcagagagagagatcaaatgtaaattacattttttagctcaaattcacgacaaattggttgtcctaaaaaaaaaagaaaaaaaagacaactacataggcaatcaagaattcaatt

SEQ ID NO: 80516 - DNA, 400 bp, Zea mays
agccctcgtcgtcgtctcactcaccccgccttcacgcctccctcaccaaataaggtcccgcccttttccgacattcacaggggggacaggaaatcagcggccatggcctcgattccggcgacgaccttcgccgtcatcttatccgtcctcttctgtgccgcggctggcaccgccgtcgacaacgacctccccgactacgtcatccagggccgcgtctattgcgacacctgccgcgccgggttcgtgaccaatgtcaccgagtacatcgcgggcgccaaggtgaggctggagtgcaagcacttcggcaccggcaagctcgagcgctccatcgacggggtgaccgacgggaacggcacgtacacgatcgagctcaaggacagccacgaggaggacatctgcg

SEQ ID NO: 80517 - DNA, 242 bp, Zea mays
gtccggcggccagaacgagcgcaagtacgacaggctcgacctcatccaggccaagggcggccagtacgccgagtcgctcaccaggtacgccggcgcgctcaactgcgcgtcggaggaaatgctagtgcctgtgcagctctaggctgcagctttcatcattggcgatcgatcgtaacaatgcaaggttgtgttgtatataactcttgtgtttggaatgccgcccgtaattaatggtcaactct

SEQ ID NO: 80518 - DNA, 464 bp, Zea mays
  unsure (1)..(464): unsure at all n locations
cagacgcatgggcgctcagcgcgcctgggtcaccaggaacttgaaggttctgctgcatgcttccggttattgcactgcatgcctctctgctgcacgagagtgcaaaaatctaacagagcctcgttccctttaatttgcttcctctccagggtttgcaggacaagatggagctggtggccatcgatctgcaggacanaccggcttggtacaaggacaaggtttacgcacaagggcacggtgccttccctggagcacgacagcgaggtcaggggcgagagcttggacctgatcaggtacatcgacagcaactttgacgggcccgcgctgctcccagaggatgctgcgaaaaggcagtttgctgacgaactgttcccgtctgccaacgcgttcaccaaagccctctactcgccgttgctgtcccacgcggccgtgttagacgaagttgttgccgctctggataaact

SEQ ID NO: 80519 - DNA, 406 bp, Zea mays
ggacgctcgtctcgtctcgtcacgtgccgccgccatggctgctctgggccgtggcctgcccctcctcctcctgctcctcctcctcgccgtatcgggggccgccaacgccgcggcggcgcccggcggcatgtccatcatcacctacaacgaggagcacggcgcgcgggggctggagcggacggagccggaggtgcgggccatgtacgacctctggctcgcggagcacggccgcgcctacaacgcgctgggcgagggcgagggcgagcgcgaccgccgcttcctcgtcttctgggacaacctccgcttcgtcgacgcgcacaacgagcgcgccggcgcccgcggcttccgcctcgggatgaaccagttcgccgacctcaccaacgacgagttccgcgccgcgtacctc

SEQ ID NO: 80520 - DNA, 376 bp, Zea mays
cgagtacatcgcgggcgccaaggtgaggctggagtgcaagcacttcggcaccggcaagctcgagcgctccatcgacggggtgaccgacgggaacggcacgtacacgatcgagctcaaggacagccacgaggaggacatctgcgaggtggtcttggtggagagcccgcgcaaggactgcgaccaggtgcaggcggacagggaccgcgccggcgtcctgctcaccaggaacgtcggcatcagcgacaacctgcgccccgccaacccgctcggctacctcaaggacgtgccgctgcccatctgcgcctcgctgctcaaacagttggactcggacgacgacgacgatcagtaatagcacatcgacgacgacgatcgatat

SEQ ID NO: 80521 - DNA, 396 bp, Zea mays
cgtctaattcttggatcgaagtagacgacttcttcgtccctctcttcattaccacgctaacttgtaatctgcaggatctaagcaaagacttgatttagttatggacggattggtacgcctcttgagagttcgcgtgggccggggtatcaaccttgcctaccgcgacgcaagaggcagcgatccgtatgtcgtcctacggcttggcaagaagaaactgaagacaagcgtgaagaagagatccgtgaaccccatatggcaagaggagctaactctgaccgtcacagatcccagccaaccactgaagctggaggtgttcgacaaggacaccttcagcagagacgaccccatgggagacgcagaggtggacgtggcgccactgatggaagcagtgagcat

SEQ ID NO: 80522 - DNA, 401 bp, Zea mays
ggacgctcgtctcgtctcgtcacgtgccgccgccatggctgctctgggccgtggcctgcccctcctcctcctgctcctcctcctcgccgtatcgggggccgccaacgccgcggcggcgcccggcggcatgtccatcatcacctacaacgaggagcacggcgcgcgggggctggagcggacggagccggaggtgcgggccatgtacgacctctggctcgcggagcacggccgcgcctacaacgcgctgggcgagggcgagggcgagcgcgaccgccgcttcctcgtcttctgggacaacctccgcttcgtcgacgcgcacaacgagcgcgccggcgcccgcggcttccgcctcgggatgaaccagttcgccgacctcaccaacgacgagttccgcgccgccg

SEQ ID NO: 80523 - DNA, 457 bp, Zea mays
cggccaagcatccgggttaacaactaatcccctaaatggacgttttaaacggagatgttaacaagggcgtctgcaatttgtgattctaaaaccaatcctgggcgttaacactttcatactttacgcaaaagggaaatatgaagatggaaacttcagtgtcaaccagtcctatctatacataactatcatctatacaatctcatactctacggcattgtttgctcttgcactgttctatgcggcatgcagagatctacttcagccatataaccctgtcccgaagtttatcataatcaaatcagttgtgtttccaacgtattggcaaggtgtgctggttttccctgctgcaaaatctgggttcataaaaaatgccgagaaagctgcatatctccagaacttcgtgctatgtgttgagatgctcatagcagccattgggcaccgattttccttctcctac

SEQ ID NO: 80524 - DNA, 400 bp, Zea mays
gtgttcaccgccaacgactcgccgcccgatcagaagatccccttccaccacgagatggctcaggttccaacatttccgtccaaattgttcttcttctgcgaagtggagccaaagagtggcggagagacgccggttgtaccgagccattatgtctacaagaggatgaaggagaaattccctggattcgtggagaaactggagaaggacatgattgtatatacaagggttttaggagagggcgataacccgtcctcgtcaatcggtcgtggatggcaatcgacatttctcactaaagataaagttgttgctgaggaaagggccgcaaagctcgggataaagctagaatggaccgacgacagcgtgaagacggtcatgggccccatccccgcggtgaagtggg

SEQ ID NO: 80525 - DNA, 402 bp, Zea mays
cgcgtgtctaggtttcctctctcaccatagcgcccgctctgtcgcccttcgttcacctctccttcctctcgtccctgcctgccagggagaggggaagtcagaggcacggagtggcgcagagcagacgcccgtgaaccattgtagctgtccctgtcgtcgtcgtcgtcaacgaacccacacaaggaaaggatggagaagaagccgaccatcctcatgaacaggtacgagctcgggcgcacgctcgggcagggcaccttcgccaaggtgtaccacggccggaacctcgcgtccggcgagagcgtggccatcaaggtcatcgacaaggagaaggtgatgcgcgtcggcatgatcgaccagatcaagcgcgagattcccgtcatgcgcctcgtccgcaacccaacg

SEQ ID NO: 80526 - DNA, 393 bp, Zea mays
cccacgcgtccgcctggttcaagaaggggtacaggccggccgtcatgctggcacagccgcacggctccagcagcctcaaggatgtccaggtcgccttcagcaacgccgaccacaaggacagcagcagcaaggtggaacagccggcggacagctccttgaagccggcgagcctgaacgcgttcgacatcatctcccactccagagggttcgacctgtcaagcctgttcgaggtggaccaagagcagaaggccagcaactcgcggttcatgacccagaagccggcgtcggcgatagtgtcaaagctggagcagatcgctgagacagagcgcttcatggtgaaaaaacaggacgggctggtgaagctgcaagggtccaagcaagggaggaaggggc

SEQ ID NO: 80527 - DNA, 385 bp, Zea mays
ggcatgcagatcttcgtgaagaccctgaccggcaagactatcacccttgaggtggagtcttcagacaccatcgacaacgtcaaggccaagatccaggacaaggagggcatcccaccggaccagcagcgtttgatcttcgctggcaagcagctggaggatggccgcacccttgcggattacaacatccagaaggagagcaccctccacctggtgctccgtctcaggggtggcatgcagatctttgtgaagacactcactggcaagacaatcacccttgaggtggagtcttcgggatacattgacaatgtccaaggcaaaaattcatgaacaaggaggcatcccaccggaacagcaacgcctcatcttcgcccgcaagcaactggaa

SEQ ID NO: 80528 - DNA, 461 bp, Zea mays
aaacaacaagactgacagcgacgatgatgccacagctgcgtagcctcgtcgcgctggtcctcgtggccacggccatagccgccgctcccggcgttgggtttgtcgtcaccggccgcatctactgcgacaactgccgcgccgggttcgagacaaacgtgtcgcacgccatccaaggcgcgacggtggagatggagtgccgccacttcgagtcgcagcaggtccacgacaaggcggaggcgacgacgggccccggcagctggtacatgatggagatcagcggcgaccaccagggacagatttgcgacatgcccctgctcaagagccccgaaggcgactgcgccgagattgaccactcccgcgaacgctgccgcgtcccgctcacccgcaacgacggcatcaagcagagcggcgtccgctacgccaaccccatcgccttcctccgcaaggagccgctccccaac

SEQ ID NO: 80529 - DNA, 381 bp, Zea mays
ctggaagagaaggttctggaatacatgagagcaccaatttatgtttattatgaacttgagaatttctatcagaatcaccgcaggtatgtcaaaagtagaagcgataaacagctgcgttttggggcaaaatacacggccgactcgtgcagtcctgttgagtgggataataatggttccccaattgttccctgcggcttgattgcctggagcttattcaatgatacatatggttttactcgtgggtccaaggaaataaaggtcaacaggaaaaacatttcatggaagagcgaccgggagcataatttggcaaacatgtgtttccctccaactttcagaacggaaccttgattggaggggggaaactccgacctactgtcccgc

SEQ ID NO: 80530 - DNA, 405 bp, Zea mays
aggttttgaacaaatggtggcgcataacaaatacacttgtccaatatgctctaaaacagctcttgatttgacacatcattgggaaatgttggatcaagagatcgaagccacgatcatgcctcttgtgtatcgctacaagatttgggtgctttgcaacgattgcaacaaggtctcagaggtgaactttcacgtgattggccacaagtgcagccactgcagatcgtacaacacccgaacgacatcgcgccctgcagatttatcgggaagcagctcaccttcaacagactcatccgacaacaacatatagagaagaaaccattgacagagccaatatgattgaagaaccgaaggaggaaatattgtttcggggcgtgcgtgcttgccaaacttgaagactcccagccg

SEQ ID NO: 80531 - DNA, 381 bp, Zea mays
gcgaattttcatgtaaaaagagctgatcagacatggctgcgaaggacggctcagggtcacaggaccaggggcacaggttgtggcccatgctgtcctacgcttgcggcgagctatgtgtgatcatgctgctctacgtggctgcctttgcatcccatgcagccacaaggctggcgcgcatctgcgggctcaggccaccatgcatcctgtgcacgaggctggaccgcgccctccatggaaacttgccatggttctccgcggacctggtctgttccgtgcatcggtccgaggtctcgtctctggctcactgcaagagccatggccggcttgcacggtccggcgatctctgcaaatcatgcctcctttcatgcacggcggtaggtg

SEQ ID NO: 80532 - DNA, 392 bp, Zea mays
cgcgagatctccgtcatgcgcctcgtccgccaccccaacgtcgtgcagctgcacgaggtgatggccagcaagagcaagatatacttcgccatggagtacgtccggggcggcgagctcttcgcccgcgtcgcccgcggccggctcaaggaggacgccgcgagaaggtacttccaccagctcgtcggcgccgtcgacttctgccacagccgcggcgtctaccaccgcgacctcaagcccgagaacctcctcgtcgacgagcacggcaacctcaaggtctccgacttcggcctcagcgcgctcagggagtgccagaagcaggacggcctgctgcacaccacctgcggcacccccgcgtacgtcgcgccggagatcatcaacaagaagggctacga

SEQ ID NO: 80533 - DNA, 372 bp, Zea mays
  unsure (1)..(372): unsure at all n locations
ccatcgtggagccctacaacgcgaccctgtccgtgcaccagctggtggagaacgccgacgagtgcatggtccttgacaacgaggcgctctatgatatttgcttccgcaccctcaagctcaccaacccttcatttggcgacctgaaccatctgatctcggcgaccatgagcggcgtgacgtgctgcctgcggttcccgggccagctgaactcggacctccgcaagctggcggtgaacctgatcncgttcncgcggctgcacttcttcatggtggggttcgcgccgctgacgtcgcgcgggtcgcagcagtaccgcgcgctgacggtgccggagctgacgcagcagatgtgggatgccaagaacatgatgtgcg

SEQ ID NO: 80534 - DNA, 402 bp, Zea mays
gggtccaccacgcgtccgacagcgcacggggacagccccaacacggacggcatccacatgggcgactcgtccggggtcaccatcaccaacaccgtcatcggcgtcggcgacgactgcatctccatcggccccgggacctccaaggtgaacatcaccggcgtgacctgcggccccggccacggcatcagcatcggcagcctaaggcggtacaaggacgagaaggacgtcacggatatcaacgtcaaggactgcacgcttaagaagacggccaatggcgtccgcatcaaggcatatgaggacgctgcctccgtgctcaccgcctccaagatccactatgagaatatcaagatggaggactccgggctacccatcatcatcgacatgaagtactgccccaacaag

SEQ ID NO: 80535 - DNA, 483 bp, Zea mays
ggtcgccgcacgcgtccgcatacaaaccatccttaaaacccaaaacatcacctccatctcgctaaggtcgaggttctcaaagagcagctgctgtagctgctctatcctctgttgctgactgctgagcaatctggatcttcagaatttctacgatccaaagctagcaacacagcatataagactgatgtcgaccggattgtcataactccagctggcccatcaggcccatcttctcctcagtctgaagctggggagtccaatgtgtttcaccaggaaaaagatgctgcagcagatggggcaccgcctgacactgatggagcagtggctgaggccggagaggaagaaacaacggaaaatgttggtgaagcgacatttagctatgaccgcttgatatccaaatccaccgattcagttcgtgggatagattacaaacgcagagaggcatacttatcagatagtgaattccaaactgtttttggcatg

SEQ ID NO: 80536 - DNA, 352 bp, Zea mays
cccagtcaggatcctcctaatcccggtcccgttccaccaacccccgcccggagaacaaacaacttgggccccaccggagaacgggtcaacaaaggccaaccaaggttgcaagcccgcaagtatcgacgccggcaaggccttgggccgccccgcgggcgtgctcatcaacggcaagggcggcaaggacctgtaggccgcgcctgccttcaccttcgaggccggcaagacgtaccgcctccgcgtctgcaacaccgggatcaacgcgtcgctcaaacttccgcatccaaggccactacattaaactggtccaactggaaggctcccacaacctgcagaacacgttcgactccct

SEQ ID NO: 80537 - DNA, 401 bp, Zea mays
  unsure (1)..(401): unsure at all n locations
atcggttacgctctcggtgacacgacggaagactgcaatgtttacacggggaagcggctgcacgcggccttgttcttcgtgatgggattctggctgctggacttttccaacaacacggtgcagggccccgcacgcgcgctgatggcggacctcgcaggcagccacggacccagcacggcgaacgccatcttcgtgtcgtggatggcgatcgggaacatcctgggctactcgtcggggtccaccgacaagtggcacacctggttcccgttcctgcagacgagggcatgctgcgaggcgtgcgccaacctcaaggccgccttcctggtgtcggtggtgttcctgngcctgtccacggtggtgaccatgatcttcgcccgcgaggtgccgctggaaccggcggc

SEQ ID NO: 80538 - DNA, 399 bp, Zea mays
aacgcgaccacagacagagcgcgcttcaaggcctttttttttttgagataacaaggaggagaggaggagatggcggtcacgatcacctgggtgaaggcgaggcagatcttcgacagccgcggcaaccccaccgtcgaggtggacgtgggcctcagcgacggcagctacgcgaggggggccgtacccagcggcgcatccactggaatatatgaggccttggagttgagggatggaggatctgattatcttggcaagggtgttcttaaggctgtcagcaacgtaaacaacattattggaccagcgattgttggaaaggaccccactgagcaggttgagattgacaacttcatggtccaacagcttgatggaacctccaatgaatggggctggtgcaaacag

SEQ ID NO: 80539 - DNA, 406 bp, Zea mays
gtcagccgcctcctcatcccggtcccgttcgaccagcccccgccggagaacgaccacgtggtgctcatcggagactggtacaccaaggaccacgaggtgctagcccgccagatcgacgccggcaagggcgtgggccgccccgcgggcgtgctcatcaacggcaagggcggcaaggacctggaggccgcgcctgccttcaccttcgaggccggcaagacgtaccgcctccgcgtctgcaacaccggtatcaaggcgtcgctcaacttccgcatccagggccactacatgaagctggtcgagctggagggctcccacaccctgcagaacacgtacgactcgctcgacgtccacgtcggccactgcctctccgtgctcgtcgacgccgaccagaagcccggcgactact

SEQ ID NO: 80540 - DNA, 410 bp, Zea mays
gcaactgaaaacagccgagcgatctcctctccctctccctctccgatccattctccagcgcagcgaagtaaacatgtctgaccgggcaaagatgtcgtggcaggcgtacgtggacgagcacctgatgtgcgagatcgagggccaccacctcgcggcggcggccatcgtcggccacgacggtgccgcctgggcgcagagcacggcgttccccgagttcaagaccgaggacatggccaacatcatgaaggacttcgacgagccagggcacctcgcgccgacaggcctgttcctcggacctaccaagtacatggtcatccaaggcgagcctggtgccgtcatccgtggcaagaagggatcaggaggcatcaccgtgaagaagacagggcaggcactcgtggttggcatctacg

SEQ ID NO: 80541 - DNA, 403 bp, Zea mays
ccctccctccctcacacaaataataaggaaaggtcccgcccttttcctccgacatccacaggggggaggggaaaacacgtgcattcacccggcggcaataatggcctcggttccggctccggcgacgacgaccgccgccgtaatcctatgcctatgcgtcgtcctctcctgtgccgcggctgacgaccccaacctccccgactacgtcatccagggccgcgtgtactgcgacacctgccgcgccgggttcgtgaccaacgtcaccgagtacatcgcgggcgccaaggtgaggctggagtgcaggcacttcggcaccggcaagctcgagcgcgccatcgacggggtcaccgacgcgaccggcacctacacgatcgagctcaaagacagccacgaggaggacatc

SEQ ID NO: 80542 - DNA, 401 bp, Zea mays
aaataaagcaggttgactgccctgtgttggtcatacatggcacagccgatgagatcgtggacttcacgcatggcaagcggctgtgggagctagccaaggagaagtacgagccgctgtggatcaaaggcggtgggcattgcaacctggagacgtacccggagtacatcaggcacctgcgcaagttcataaacgccatggagaagctggcaaaggacagcaaggcggccagggcgccgccgccgtcgagcatggccgacgaagtaagacgcaccaagtgcttgagattcgggaagagatgaggctggcggcgaggccatgcgggtctcggccgtctttagctgcgtacgccagtcactaaccccctgctgcattgcattgcattgctttgctgctgcacgtgc

SEQ ID NO: 80543 - DNA, 405 bp, Zea mays
  unsure (1)..(405): unsure at all n locations
ctaacttgtaatctgcaggatctaagcaaagacttgatttagttatggacggattggtaggcctcttgaaagttcgcgtggtccggggtatcaaccttgcctaccgcgacgcaagaggcagcgatccgtatgtcgtcctacggcttggcaagaagacaagcgtgaagaagagatccgtgaaccccatatggcaagaggagctaactctgaccgtcacagatcccagccaaccactgaagctggaggtgttcgacaaggacaccttcagcagagacgaccccatgggagacgcggaggtggacgtggcgccactgatggaggcggtgagcatgaacccgcgggaggagagtctgangaacggcgccatcatcaggtccgagcggccgagcgccaggaactgcctcg

SEQ ID NO: 80544 - DNA, 382 bp, Zea mays
aagacgtacgtggacgatcacctgatgtgcgagatcgagggccaccacctcacgtcggcaggcatcgtcggccacgacggcgccacctgggctcagagcaccgcattccccgagttcaagcccgaggagatggctgccatcatgaaggatttcgacgagccggggcacctcgccccgaccggcctgatactgggaggcaccaagtacatggtcatccaaggcgaacctggagctgtcatccgtggcaagaagggatccgggggcatcactgtgaagaaaacagggcagtcactcatcattggcatctacgacgagcccatgactcccgggcagtgcaacctggtggtggaaaggctgggcgactacctgctcgaacagggga

SEQ ID NO: 80545 - DNA, 409 bp, Zea mays
cgcgtgcgtacattaatctaagcgatcttcatccagccttctgctctgctccctcgaaatggaggcgacgagcaaggcgatggcttcaggcctcctcgttctgctgcttctcatcaacacaggctttgtcctgcccgtccattccgaggactgctgggccgacacccgcgtcatctgcaccaagacgcacaactgccgggacgacacttgcgcggggcgcggcatgccggacggccgctgccactgggagttccccaacctggtgcccttctgccagtgcctgcgccccaactgccactagtccgggcgcctcggattggctcacttcgccggcgatgatggatggtgcccaactgcgactgcccagtctgctccattcgttgttgtttaaggcataatatataaactg

SEQ ID NO: 80546 - DNA, 409 bp, Zea mays
aggcgctcaccgccgtcctaccttcatatacctagcagtgtctctgcatagaaagataaaaggtaggaggaggcgcagtgcgtggtgggattatttgtgaggagatattggagttattatatatatatatataggtagacgatagatagacagctagatctatataaccatggtggatgggttccgatggatcagaccgggctctttcgtcctgtacttggtcttcttcttcctgtccgcagccctgtcggaggccaatatcggcgacttcgatgaatactggcagcagcgcaagctcatggccgacgccgcggctgaggccacgtacaagcatgacccggtcgaggtcgccaaccaacttaaccgtgcagtccacagatccgtcgagaaggatgacattggcaccagg

SEQ ID NO: 80547 - DNA, 413 bp, Zea mays
aatcccacaccaccaccacctcctccggtccccaacccctgtcgcaccgcagccgccggccatggcctgcctcaccgacctcgtcaacctcaacctctcggacaacaccgagaagatcatcgcggaatacatatggatcggtggatctggcatggatctcaggagcaaagcaaggaccctctccggcccggtgaccgatcccagcaagctgcccaagtggaactacgacggctccagcacgggccaggcccccggcgaggacagcgaggtcatcctgtacccgcaggccatcttcaaggacccattcaggaggggcaacaacatccttgtgatgtgcgattgctacaccccagccggcgagccaatccccaccaacaagaagtacaacgccgccaagatcttcagcagccctg

SEQ ID NO: 80548 - DNA, 416 bp, Zea mays
cccacgcgtccgcccacgcgtccgcccacgcgtccgcccacgcgtccgttttatcaacgcttctcctgctggttactccgcgcgccttctctttctctcccggacgtcgatcgtgttcttcagcacgggctagctagctccctccctcccagccatggcgacgccggacaacaaggggcacgggcatccgctgcccaagtttggggagtgggacgtgaagaatccggccacgtccgagggcttcaccgtcatattccagaaggcccgcgacgacaagaagaccaccaccggccctggggctgggaacgcgcgcgcaggcattccgccggccttcaggaacggcggcggcgacggcgggtacaggcccgacttcggcgacggcaaccagtacacgccggccaaaccggaaaaagtgg

SEQ ID NO: 80549 - DNA, 420 bp, Zea mays
  unsure (1)..(420): unsure at all n locations
ggaggaggccatcttcctgaaggaagactatgctgatgcgcactgtgaccttgggtcggccctgcatgcagtangggaggatgaccgtgctatccaggagtttcagacagcaattgatctcaaacctggccatgttgatgccttgtacaatcttggtggattgaacatggatgctggccgcttcgtacgggctgcagagatgtatactcgtgtgctgagcatccgaccaaaccattggcgtgcgcagctaaacaaggcagtggctttgcttgggcagggtgaatccgaggaggctaagaaggcactcaaggaggcgtttaagatgacacagagggtggaagtgtatgatgctatctcacatttgaagacattgcaaaagaagaagctaaagccttccaaaggaaaaaatgatggtcaagg

SEQ ID NO: 80550 - DNA, 334 bp, Zea mays
agcggataccccttcggcctccacctatcaccacccgggacgtcttccatggcctcctcgtagtagaatagttctatctcaccgcaacatctcctcattacatcctttatgagaggctgatcgattggtagatacgtactcgggtggagcagagcaacgagagacatggcgacgacgacgcgtgttgccgccgccgccaccggcgtgctgctggtcctgtcggcgttggcgaccctgtcgcgggccgaggacccgtacctgttcttcgagtggaaggtgacgtacgggaacaagtccctgctgggcgtgccccagaaggtcatcctcatcaacg

SEQ ID NO: 80551 - DNA, 425 bp, Zea mays
ataaataaagcagctcctccgggggcggcgaactactcctcgtcgccaaaaccctagccctgcttctttgccatggcgagcagcgctagccaggcgagcctcctgctccagaagcagctcaaggatcttgcgaagaaccccgtggatgggttctccgccgggcttgtagacgacagcaacatcttcgagtggcaggtcaccatcatcggaccgcctgacaccctatatgatggaggctacttcaatgcaataatgaccttcccccagaactatcccaacagcccgccatcagtaagatttacttctgagatgtggcatccgaatgtttatcctgatggacgtgtttgcatttctattcttcatccacctggtgaagatcccaatggttatgagcttgcaagcgaacgatgggacacagtgcacac

SEQ ID NO: 80552 - DNA, 436 bp, Zea mays
cagagaacagcgaacaaggtgataggtacatggagttggctcaccgagttgacgaagctttggggttcatgtcagctgctgggctccctttagatcaccctataatgacaacagcagaattttggacgtcacatgagtgtcttcttctaccttatgagcaagcgctcactcgtgaggattccaccacgggcctctattatgactgctctgcccacttcctatgggtcggagagcgcactcgccagcttgatggtgctcacgttgagttccttcgaggcattgccaaccctcttggtatcaaggttagtgacaagatggacccagcagaacttgtgcggttgattgatatattgaatcccgaaaacagggctgggagaataaccatcatcacaagaatgggacctgaaaacatgagggtgaaacttccacacctgat

SEQ ID NO: 80553 - DNA, 417 bp, Zea mays
tcgctctcacgatccctcggcagtcggcgacggctgggcgaccgccacttccgccttctcttcctactgagcgtctccaggcacgcttctgaattcggagttgccagcattcgctcgaggtgccggaccagatctcaccatcatgcaggctagcgatagattcaacataaactctcagcttgagcatcttcaagccaaatatgttggtacagggcatgctgatttgtctagatttgaatgggctgtaaacatccagagagacagctatgcctcttatattgggcactatccaatgctagcatattttgccattgctgagaatgaatcgatcggaagagaacgttacaatttcatgcagaaaatgctgcttccttgtggcctccctcctgagagagatgaagattgaagagctgttgc

SEQ ID NO: 80554 - DNA, 414 bp, Zea mays
caagttcttccacatgaacatgtaccggtgcaaggacatgctaatcaaggacgtgaccgtgacggcgcccggggacagccccaacacggatggcatccacatgggcgactcatccgggatcacgatcaccaacaccgtcattggcgtcggcgacgactgcatctccatcggccccgggacctccaaggtgaacatcaccggcgtgacctgcggccctggccacggcatcagcatcggcagcctagggcggtacaaggacgagaaggacgtcacggacatcaacgtcaaggattgcactcttaagaagacgatgttcggcgtccgcatcaaggcgtacgaggacgccgcctccgtgctcaccgtctccaagatccactacgagaatatccagatggaagactcaaccaaccccat

SEQ ID NO: 80555 - DNA, 408 bp, Zea mays
agcacctgtacccggcggacttctacttcgaggccgggaacaagggcacgctgtccttctcgtgggtggacgagtcgcgcctgcggttcgcgcccgaggaccgcatccgccccttcttcgagaccctcaactactggggcatccagcggaagcgcacgcgcatcagctgcgacgcctgcggccacctgcttggccacgtctacgacgacggtccgccggccatgcagggcaccggccagttcgggatggggcccagccaggtcatcccgcgccgccccaggtaccgcttcaagatcaaggccatcgccgccagctcctcggcacctgccgccgccgcctatgaaaagtgatgctccatagatttcttcatctggttgcgtgtcctgtgtgctgtcagtgctgtggttc

SEQ ID NO: 80556 - DNA, 388 bp, Zea mays
agggcgagagtgcgtgcgtgcagccacaggcaggcgtcggcaccatgtcttctttcaccggcacgcaggacaagtgcgcggagtgcgacaagaccgtccacttcatcgacctcctcacggccgacggcgtcacctaccataagacatgcttcaagtgcagccactgcaaagggatcctctcgatgtgcagctactcttccatggacggtgtgctgtactgcaagacccacttcgagcagctcttcaaggagaccgggagcttctccaagaacttcacgccaggtggcaagtcttcagacaagggtgaactgacaagggcccccagcaagctatcatctgcgttttctggtactcaggataagtgtgcagcttgccagaaaacagtgta

SEQ ID NO: 80557 - DNA, 455 bp, Zea mays
agcttggtgctagccctcgcgctagtggcggccaccgccccacaggtagcggaggcaaagaagaagagagcggcggagagcggcgaggcggcggaggcgaagaagatccaggacgacttctgctcgacgctgtgcgagggcaagaaggggacggacctggtcgtgtgcaaggagtcctgcgcgctctcccagcagtccaacctggtgctgtacggcaggatccagtgcaagggcaagtgcaccgagcagaagggcatcacggcgccggccatgaaggtctgccaggaggagtgcgacaaggcgtacgtggtgaaggcggccgaggtcaccaaggcctgcagcgtcacctgcgccaaggagaagaaccgcgcctcagcgagaactgcaagaggtcctgcacccctcctccttcttgaagcgaaaccccttgaaatgaatgaaccatgcatgcatgc

SEQ ID NO: 80558 - DNA, 419 bp, Zea mays
  unsure (1)..(419): unsure at all n locations
ggaagctaaccacgggaaagggaggaacactgcagagctgtctgtctgctctcttgaatcttctttttgtaaagcgtacaccacgtaggcaggatgtaacaacaacattcaaggagttatcttgactgagatgcagattttcagcagcaatgcagcatgaagtcgagctaactgttccacacaaactactcagcaaaaggtcatgggagaggtctcaagcagggtgaccctcctcctcctcctcccctcctttttgttctggcgattgacccactacaaaaaaaatctaaagattgctacagagaccggagtactgagcanatcggggagctgttcgcccactataaggatctcgatgtatacacatgatgcgaccttgtttgttaagcccaaaaaagaagaaattgagagaattgtnt

SEQ ID NO: 80559 - DNA, 423 bp, Zea mays
  unsure (1)..(423): unsure at all n locations
cgaagattgccacttccctaacagcatcgagaaggcaatcagaagcgcttttgtaaaggccgacaatgcaattgcggattcccattctcttgaccggaattctgggaccacagcattgacggtccttatatttggcaggacactgcttgttgcgaatgccggtgactgtcgagctgtattaggaaagcgaggccgagctgttgaactctctagagaccacaaacccagctgcatagttgaaaggctcagaatcgaaaacctgggtggtaccgtctttgatggctacctcaacggtcagctggctgtagcaagggcaatcggtgattggcacatgaaaggctccaagggctctgtatgccctcttacaccagaacctgagtttagggaggttaggcttactgangaaaatgagttcttgataat

SEQ ID NO: 80560 - DNA, 464 bp, Zea mays
gcttgactccagcaaacagcctgatcaagaattccttgtgcaggtttcagctgtctcaagattgaagcatgagaatgttgtccaactcgtcggatactgcgccgaagggagcacccgcgtccttgcttatgagtatgcaactaggggatcattgcatgatatcctccatggtaaaaagggtgtcaaaggagcccagccagggccagtcctgtcatggatgcagcgagctaggattgccgtatgtgctgctcggggtctcgagttcctccacgagaaggccgatcctcgagtggtccaccgcgacatcaagtcaagcaacatactgctctttgaccatgatgttgcgaagatcggggacttcgacatctcaaaccaggcccctgacatggctgcgcgcctccactctactcgcgttcttggcacctttggctaccatgcaccagaatatgccatgactggacagc

SEQ ID NO: 80561 - DNA, 427 bp, Zea mays
gcgatggatcacccatccacgtgatggatccgacagctccttccccggccccccctgcgggcgatggggcacagccatcggaccagaaccggcagcgaccaaggtctgcactccgtggcgccctcggggtggccttccccatcgtggtatcgttcctcttctccttcctcgttgggctcgctgggctcgcgcttggtggcctctcgtccactgcatcggtctccatgccctccacctgccgcatcctctccagtggcgttgaccttaggtcatcaaaagtttgcgagcttgggttattgaactatagagctaagcatgtcttctacccatcgagtaagaggagattccgctgccatgatgactactactgggcttcagttttacaggttgaatatacagaatatttttctggccaattatcttatgc

SEQ ID NO: 80562 - DNA, 417 bp, Zea mays
cgggattgtgggcgagtgcgtgcgttcgtgcagccacagacaggcgtccgggcaccatgtctttcaccggcacgcaggacaagtgcacggcgtgcgacaagaccgtccacttcatcgacctcctcacggccgacggcgccatctaccataagacatgcttcaagtgcagccactgcaaaggggtcctctcgatgtgcagctactcctccatggacggtgtgctgtactgcaagacccacttcgagcagctcttcaaggagaccgggagcttctccaagaacttcacgccaggtggcaagtcatcagacaagggtgaactgacaagggccccaagcaagctgtcgtctgcattttctggtacccaggataagtgcgcagcatgccagaaaacagtgtacccgctggagaagttaactc

SEQ ID NO: 80563 - DNA, 237 bp, Zea mays
  unsure (1)..(237): unsure at all n locations
agactttgacttgccatcgattcatccggcgcggcgggctatggacctgcagcagcaagctaattaanagggtgtttggtttctagggactaatgtttaatcccttcaatttaatctttttcagcatataaattgctacatacataaactataccttattttagtttctacatttaataattttctcactatattctactacactttcatgactaattattactccctaaaaaccaa

SEQ ID NO: 80564 - DNA, 430 bp, Zea mays
agcagcatccatcgcgtgcgtacattaatctaagcgatcttcatccagccttctgctctgctccctcgaaatggaggcgacgagcaaggcgatggcttcaggcctcctcgttctgctgcttctcatcaacacaggctttgtcctgcccgtccattccgatgactgctgggccgacacccgcgtcatctgcaccaagacgcacaactgccgggacgacacttgcgcggggcgcggcatgcctgaccgccgctgccactgggagttccccaacctggtgcccttctgccagtgcctgcgcctcaactgccactagtccgggcgcctcggattggctcacttcgccggcgatgatggatggtgcccaactgcgactgcccagtctgctccattcgttgttgtttaaagcaaaattgataaactgccaaattca

SEQ ID NO: 80565 - DNA, 422 bp, Zea mays
tacccacacttctgcgagacccgtccttgaggggcacgtcctagatcggtggcgcctgcctctcgccgccgatacggtgcctctcgcggtctcgctccccctcgcaggtcttttggtttttttagttcctccctttgcttcttggaggtgtttgttgccgtctcacccgcagttcttgagacatgcagagccagatagtgtgccacgggtgcaggacccttctgttctacccaagaggtgctccgagcgtgtgttgtgcggtatgccatgtggtcaccaatgtgccgcctccagcaatggagatggctcgacttagatgtggtggctgccagacattattgatgtatgctcgcagtgcaacaactgtaagatgctcatgttgtgacacagtcaatcttgtcagaccagttagtagcatagct

SEQ ID NO: 80566 - DNA, 416 bp, Zea mays
gcagaacgtgatcctgcacaacctgcacatccacgactccaaggcgcactcgggcggcatgatccgcgactcgaagcggcactacgggctgcgcacgcggagcgacggcgacggcgtctccgtgctgtcgtccagcaacgtgtggatcgaccacgtgtccatgtccagctgctccgacgggctgatcgacgtggtgaacgggtcgacggccatcaccgtgtccaacagccacttcaccgaccacgaccacgtgatgctgttcggcgccagcaacgacagcccgcaggacgcggtgatgcaggtcacggtggcgttcaaccacttcggccgcgggctggtgcagcggatgccgcgctgccgctacggcttcttccacgtggtgaacaacgactacacgcactggatcatgtacgcca

SEQ ID NO: 80567 - DNA, 391 bp, Zea mays
acgcggtccgtgcaccggcagcgctaccgcatgggggtcggctacaaggtcgcgcccgacggcacgaccacggagaagtactgggagcccgtggaggaggacggcgagcagcaggcaggaagggcaggcaggacgaggaagccgtaccgcgtcgagctcgtcggcatcatctgcgacgcctacctcgccgtcgtcaggggcatcatgcgagctatcatatccgggagagccgtgcgggtgaactcgcagctcaagtcgcacaagcgcttcgccggcgcgttccgcaagtactgcgacctcgtggacaacgccaggctctacagcaccaataccatcgccggcgcaaagctgatcgggttgaaggacaatgacaaccggctactggtggacg

SEQ ID NO: 80568 - DNA, 409 bp, Zea mays
  unsure (1)..(409): unsure at all n locations
acggcgaaaggcaagggacgtaagaagtcgtctaattcttggatcgaattagacgacttcttcgtccctctcttcattagcacgctaacttgtaatctgcaggatctaagcaaagacttgatttagttatggacggattggtaggcctcttgaaagttcgcgtggtccggggtatcaaccttgcctaccgcgacgcaagaggcagcgatccgtatgtcgtcctacggcttggcaagaagaaactgaagacaagcgtgaagaagagatccgtgaaccccatatggcaagaggagctaactctgaccgtcacagatcccagccaaccactgaagctggaggtgttcgacaaggacaccttcagcagagacgaccccatgggagacgcggangtggacgtggcgccactgat

SEQ ID NO: 80569 - DNA, 323 bp, Zea mays
aaggcaggtcgtcgatcgccttgggtggtgaataattgaagaagaagaagaggcggagacttgagcaggtgatgtcttcgctgccaggaggcttcctgtgcgtgcgcgtcctgcgcgggatcgacctcgtcagctgcgacgccaagggcagcgacccctacgtcgtgctcagcctggatggacagaaactgatgacgagcgtgatgaagaagacggtgaacccgttgtggaacgaggacctcaccttggccgtcatggacgcgtcggcgcccatcaagctagaggtcttcgataaggacacgttcagcaaggacgacatgatg

SEQ ID NO: 80570 - DNA, 429 bp, Zea mays
  unsure (1)..(429): unsure at all n locations
ctccgccatggctgtatacaaggtgaagcttgtcgggcctgaaggtgaagagcacgagtttgatgctccagacgacgcctacatccttgacgcagccgagactgccggtgtggagttgccatactcgtgccgtgctggggcttgctccacctgtgccggcaaaatcgagtctggttcggttgaccagtcggatgggtccttccttgatgacgggcagcaggaggaaggttatgtgctgacatgcgtctcctacccaaagtccgactgcgtcatccacacccacaaggaaggcgacctgtactanggctagggctttccaatttggcgagggacaaaaaatgctctcgagtggtgtgttgtcaagcaaagctcctccatctgcgccctaccccgttgtgcgaactgtttggcatcaaacttgtgtgggtg

SEQ ID NO: 80571 - DNA, 468 bp, Zea mays
acgcccacgcgtccggcaggtcggcgaggagggcaggaagaccgaagaccgagccgtgcgggggctcgggacgggaacgggacaggacctcaaaatctcagatccttcctgcccgcccgcccgtgcccgtcgacgcgtcgttcttgccggccgcgccccacctccgccctctcctcctccagggggatcggatacgccacaggctgcgcgatggtgctgtgggtcttcggctacggctccctcatctggaaccccggcttcgacttcgacgacaaaatcctcggcttcatcaagggctacaagcgcacctttaatctcgcttgcattgaccacagaggcacaccggagcatccggcgaggacctgcacgcttgaaaccgacgaagaggccatatgctggggaattgcatattgtgtcaagggtggtccagaaaaagagctaaaagcaatgcagtacttggagagaaga

SEQ ID NO: 80572 - DNA, 435 bp, Zea mays
ctccaagccaagcaggtccagagatctcgatcggtcctcttgcagaaacgaggaaagaaaacatgtcttctcgctgggttagggcggaggtgtacccgctgttcgcgacgacaggggtggcggtggggatctgcgtgatgcagctggtgcgcaacatcaccaccaacccggaggtgcgggtgaccaaggagaagcgggcggccggggtgctggacaaccacgacgaggggcggcgctactcgcagcacggcgtgcgcaggttctggctctccaagcgccgcgactacatgcaggccatggacaaggtgcccacggaccctaataagtagacgacgacgatataccccaatgcatggcaagaagatatatatatcagcacaacgcaactgcatgcgatgctgcttgttgctgcaattaatccactatactatatac

SEQ ID NO: 80573 - DNA, 387 bp, Zea mays
ctggtggacgcggtggacggctccaccgccatcaccgtctccaacggccacttcacgaggcacgaccacgttatgctgttcggggccagcgacgccgcgtccaaggacagggagatgcaggtcaccgtcgccttcaaccacttcggcaaggggctggtgcagcggatgccgcgctgccgtcacggcttcttccacgtggtgaacaacgactacacgcactggctcatgtacgccatcggcggcagccggaaccccaccatcatcagccagggcaaccgcttccgcgccgtcgacgacagcaggttcaaggaggtgaccaagcgggagtacacgcagtacagcgagtacaagaactgggtgtggaagtcgcaggacgacctgttcctc

SEQ ID NO: 80574 - DNA, 415 bp, Zea mays
aagagctacgagctgcctgacggacaggtcatcaccattggtgctgagcgcttccgctgccctgaggtcctcttccagccatccttcattgggatggaagctgctggtatccacgagaccacctacaactccatcatgaagtgcgacgtggatattaggaaggatctgtatggcaacatcgtcctctccggtggtaccactatgttccctggcattgctgacaggatgagcaaggaaatcaccgccctggctcctagcagcatgaagatcaaggtggttgctcctccagaaaggaagtacagtgtctggattggaggatccatcctggcatcgctcagcaccttccagcagatgtggattgccaaggctgagtacgacgagtctggcccgtccatcgtgcacaggaaatgcttct

SEQ ID NO: 80575 - DNA, 434 bp, Zea mays
cctccccctaatcgcgaacgagcgtctttctcctccgtccgcgcccgtttgctcatcggttttgcctgccggtgggggaccgcctgcacgagcagcggctagccagacgtacgggcttcgtttgaggctggagtcctgattggcaggtgcaagcacagagctcgatcgccatgtctttcaccggcacgcaggacaagtgcaaagcctgcgacaagacggtccacatcatcgacctcctcaccgccgacggcgtctcgtaccacaagacatgcttcaagtgcagccactgcaagggcgtcctctcgattagcagctactcttccatggacggcgtcctgtactgcaagacgcactttgaacagctcttcaaggagacagggaccttctcaaagaactttcaaggtggagcatcttcaaacaagaacgaccaagca

SEQ ID NO: 80576 - DNA, 74 bp, Zea mays
aagttttaagtgacaccaatttagaagggaattagagtggattaaattcgctcccggtaaaaaatgactcgaag

SEQ ID NO: 80577 - DNA, 90 bp, Zea mays
agcccacacgtccgcgacaagatggcgtgcacaaacaatgcgatgagagccttgttcctcctggtcctcttctgcatcgtgcatggtgag

SEQ ID NO: 80578 - DNA, 418 bp, Zea mays
gaagggagcacccgcgtccttgcttatgagtatgcaactaggggatcattgcatgatatcctccatggtaaaaagggtgtcaaaggagcccagccagggccagtcctgtcatggatgcagcgagctaggattgccgtatgtgctgctcggggtctcgagttcctccacgagaaggccgatcctcgagtggtccaccgcgacatcaagtcaagcaacatactgctctttgaccatgatgttgcgaagatcggggacttcgacatctcaaaccaggcccctgacatggctgcgcgcctccactctactcgcgttcttggcacctttggctaccatgcaccagaatatgccatgactggacagcttagcacgaagagtgatgtctacagctttggagttgtgctgctggagcttttaaccg

SEQ ID NO: 80579 - DNA, 434 bp, Zea mays
  unsure (1)..(434): unsure at all n locations
gttcatcactgataccaaggccgctattgctgaaacttacaaccgcacagattcagaatttctgaaagctgatagcactcaaactcgagatgctggctcaactgcctcaacagctattattgtaggtgatcgtttgcttgttgcaaatgttggagattctagagctgttatttctaaaggaggacaggcgattgcggtttcaagggatcacaaacctgatcagacagatgagaggcaaagaattgaggatgcagggggctttgttatgtgggctgggacatggagagtgggtggcgttctcgctgtctctcgagcatttggtgataaactcttgaagccgtatgttgttgctgaccctgaaatcaaggangaggtggtcgacagctccctcgaatttctcatccttgctagcgacggactctgggatgttgtca

SEQ ID NO: 80580 - DNA, 424 bp, Zea mays
cctcattggcgagggctcgtatgccagagtctattttggtgtgctgaaagatgggacgaaatctgcagtgaagaagcttgactccagcaaacagcctgatcaagaattccttgtgcaggtttcagctgtctcaagattgaagcatgagaatgttgtccaactcgtcggatactgcgccgaagggagcacccgcgtccttgcttatgagtatgcaactaggggatcattgcatgatatcctccatggtaaaaagggtgtcaaaggagcccagccagggccagtcctgtcatggatgcagcgagctaggattgccgtatgtgctgctcggggtctcgagttcctccacgagaaggccgatcctcgagtggtccaccgcgacatcaagtcaagcaacatactgctctttgaccatgatgttgcgaag

SEQ ID NO: 80581 - DNA, 418 bp, Zea mays
cgttgagccaaagttttcaatgccccactcagctaaagtggatgaagtggtggtggcaaatagcctaatcggaagtgtattatcagactacttctgggctctttctgttgtttggactactcccttggtggccactctaggcatgtctctcacaattccaatagcaatggttgctgatatgatcattcacggccgtcactattcagcagtatatattcttggttctgtccaggtattttcaggctttgttatcgcgaaccttgcagatcgcttttctcgttctctagggctatcatagtctcataaaacagaacaggcccttattagagcgtgcatcaggaagctccaaggtcgggttggttaggccaatacttcagaaaacctggatcgggagataccaggaattaatttccctttg

SEQ ID NO: 80582 - DNA, 428 bp, Zea mays
  unsure (1)..(428): unsure at all n locations
cccacgcgtccgcaggaattcaattgatactgagtttgtgtttggctgatgggtttgacatgttcccaacattactagttacagatggatcatgcatgatagacaggaggatgggaatacatgggcatcctcttgaaatccaagctttattctactctgctttacgatgctcacgagaaatgcttgtcgtgaatgatggatcgaaaaacctcatccgtgccattaataacaggctcagtgcattgtcctttcacatcagagaatattactgggttgacatgaagaagataaatgagatatacagatacaagacagaagaatactcacatgatgccactaacaaattcaacatttaccctgagcaaatcccttcctggcttgttgactggattcctgagaaaggaggttaccttatanggaatctgcag

SEQ ID NO: 80583 - DNA, 216 bp, Zea mays
agcccacgcgtccggcgcctcaccgagctcttcagccagcgggggctctcccaggaggacctcgtcctgctctccggcgcgcactccatcggcggcgcgcactgcttcatgttctccaaccgcatctacaacttctcccaggacgccgacgtcgacccgacgctggacccggagtacgccaagtggctgcgccaaatgttcccgccgcgggaaccc

SEQ ID NO: 80584 - DNA, 375 bp, Zea mays
taaccctccctctctcacacaaataataaggaaaggtcccgcccttttcctccgacatccacaaggggggaggggaaaacacgtacattcacccggcggcaataatggcctcggttccggctccggcgacgacgaccgccgccgtcatcctatgcctatgcgtcgtcctctcctgtgccgcggctgacgacccgaacctccccgactacgtcatccagggccgcgtgtactgcgacacctgccgcgccgggttcgtgaccaacgtcaccgagtacatcgcgggcgccaaggtgaggctggagtgcaagcacttcggcaccggcaagctcgagcgcgccatcgacggggtcaccgacgcgaccggcacctacacga

SEQ ID NO: 80585 - DNA, 404 bp, Zea mays
taaccacgcgtccggcagcgctcaagagcgccggggtggagggcatcatggtggacgtctggtggggcatcgccgaggccgacgggcccgggcagtacaacttcaacgggtacatggagctcatggagatggccaggaagaccgggctcaaggtccaggccgtcatgtccttccaccagtgcggcggcaacgtcggcgattcagtcaccataccacttccgggatgggtcttggaggagatggacaaggaccaggacctggcctacaccgaccggagtggccgccggaactacgagtacgtctccctgggctgcgacgcgatgcccgtgctcaagggccgcacccccatccagtgctacgccgacttcatgcgcgccttccgcgaccacttcgccaacctcaag

SEQ ID NO: 80586 - DNA, 367 bp, Zea mays
  unsure (1)..(367): unsure at all n locations
aacatggcgttcacaagcaatgcgatgaaagccttgttcctcctggtcctcttctgcatcgtgcatggtgagaaggaagagtcaaagggcatcgatgcgaaagcgtccgggcctggtgggtccttcgacatcaccaagttgggcgcctccggcaatggcaagacagacagcacgaaggctgtgcangaggcatgggcatcggcgtgcggcggcactgggaagcagacaatcctcatacccaagggtgacttccttgtcggacaactcaacttcacaggcccttgcaagggcgacgtgaccatccaggtggatggcaatctgctggcgaccacggacctaagccagtacaaggaccatggtaattgga

SEQ ID NO: 80587 - DNA, 386 bp, Zea mays
aaccacacgtccggcggcgctcaagagcgccggggtggagggcatcatggtggacgtctggtggggcatcgccgaggccgacgggcccgggcagtacaacttcaacgggtacatggagctcatggagatggccaggaagaccgggctcaaggtccaggccgtcatgtccttccaccagtgcggcggcaacgtcggcgattcagtcaccataccacttccgggatgggtcttggaggagatggacaaggaccaggacctggcctacaccgaccggagtggccgccggaactacgagtacgtctccctgggctgcgacgcgatgcccgtgctcaagggccgcacccccatccagtgctacgccgacttcatgcgcgccttccgcgaac

SEQ ID NO: 80588 - DNA, 392 bp, Zea mays
aggaaaggtcccgcccttttcctccgacatccacaaggggggaggggaaaacacgtacattcacccggcggcaataatggcctcggttccggctccggcgacgacgaccgccgccgtcatcctatgcctatgcgtcgtcctctcctgtgccgcggctgacgacccgaacctccccgactacgtcatccagggccgcgtgtactgcgacacctgccgcgccgggttcgtgaccaacgtcaccgagtacatcgcgggcgccaaggtgaggctggagtgcaagcacttcggcaccggcaagctcgagcgcgccatcgacggggtcaccgacgcgaccggcacctacacgatcgagctcaatgacagccacgaggaggacatctgccaggtggtgc

SEQ ID NO: 80589 - DNA, 389 bp, Zea mays
  unsure (1)..(389): unsure at all n locations
ttggagttgtgctgctggagcttttaaccggtcgcaagccagttgaccacacactgccccgtggccagcagagccttgtgacatgggctacaccgaggcttagtgaagacaaggtgaggcaatgcgtcgatccaaggctcggagacgaataccctccaaaggctgtagccaagatggctgctgtggccgccctctgcgtgcaatacgagggtgaattccgtcccaacatgagcatcgtcgtcaaggctctgaaccccttgctgcacagccggtctggcaaccgccctactgcctcgtcggcctcccacgctgccgcagcagcagagcgatccggactgtgatttcncatcgctgcgacaactttgggttcacgaaaaaggaccgtcttg

SEQ ID NO: 80590 - DNA, 380 bp, Zea mays
gaacggtagtttgtcacttgaagagctgaaggagggtttccggataaacgatcatcctgttccagaggaagagataaagatgttgttacaagcgggcgatatacatggaactgacacattagattgtgaggaatttgtgacagtcttgcttcacattaaaaagatgagtaatgacgagtatctacctaaagctttcgagttcttcgacaaagacgggaatggttttattgaaatgtccgagttaatggagactctaagtgatggtgaactaaagcctgatgagcaattggttaacgacattattcaagaggttgacaaggataaggatggtcgcatcagttacccagagtttgaattgatgatgaaaagtggatcggact

SEQ ID NO: 80591 - DNA, 370 bp, Zea mays
agcgcttcatggtgaagaaacaggacgggctggtgaagctgcaggggtccaagcaagggaggaaggggcagctcgcgatcgacgccgagatcttcgaggtgacaccggcctttcacgtcgtcgaggtgaagaagtcggcaggcgacacgctggagtatgagatgttctgcagcaagggcctaagaccttcactcagcgacatctgctggagcagccgatctgaggagaacatggctccttcagtggttcagccatcacaattggagccatcctcttagaccgtctccgacagtttactcacccctcttagtcgattgttatttaagtgcagtctcttcggagatgcaattacagtccatcctctctttct

SEQ ID NO: 80592 - DNA, 362 bp, Zea mays
gagatctcctctccctctccctctccgatccattctccagcgcagcgaagtaaacatgtctgaccgggcaaagatgtcgtggcaggcgtacgtggacgagcacctgatgtgcgagatcgagggccaccacctcgcggcggcggccatcgtcggccacgacggtgccgcctgggcgcagagcacggcgttccccgagttcaagaccgaggacatggccaacatcatgaaggacttcgacgagccagggcacctcgcgccgacaggcctgttcctcggacctaccaagtacatggtcatccaaggcgagcctggtgccgtcatccgtggcaagaagggatcaggaggcatcaccgtgaagaaga

SEQ ID NO: 80593 - DNA, 411 bp, Zea mays
cacgcgtccgcacacgcgtccgcgcgtctattgcgacacctgccgcgccgggttcgtgaccaatgtcaccgagtacatcgcgggcgccaaggtgaggctggagtgcaagcacttcggcaccggcaagctcgagcgctccatcgacggggtgaccgacgggaacggcacgtacacgatcgagctcaaggacagccacgaggaggacatctgcgaggtggtcttggtggagagcccgcgcaaggactgcgaccaggtgcaggcggacagggaccgcgccggcgtcctgctcaccaggaacgtcggcatcagcgacaacctgcgccccgccaacccgctcggctacctcaaggacgtgccgctgcccatctgcgcctcgctgctcaaacagttggactcggacgacgacgacga

SEQ ID NO: 80594 - DNA, 389 bp, Zea mays
acccacgagtccggtcgtcgtctcactcaccccgccttcacgcctccctcaccaaataaggtcccgcccttttccgacattcacaggggggacaggaaatcagcggccatggcctcgattccggcgacgaccttcgccgtcatcttatccgtcctcttctgtgccgcggctggcaccgccgtcgacaacgacctccccgactacgtcatccagggccgcgtctattgcgacacctgccgcgccgggttcgtgaccaatgtcaccgagtacatcgcgggcgccaaggtgaggctggagtgcaagcacttcggcaccggcaagctcgagcgctccatcgacggggtgaccgacgggaacggcacgtacacgatcgagctcaaggacagcca

SEQ ID NO: 80595 - DNA, 375 bp, Zea mays
agaaacaatgacgggcagggccaacccttttggagcaaaaattccggcacaaaaaattacaacggcaaattccttccaaactccccgggtgatggacttcgtaaaaaacggggaggtgtccggggtcacgctgctcaactccaagttcttccacatgaacatgtaccggtgcaaggacatgctgatcaaggacgtgaccgtgacggcgcccggggacagccccaacacggatggcatccacatgggcgactcatccgggatcacgatcaccaacaccgtcattggcgtccgtgacgactgcatctccatcggccccgggacctccaaggtgaacatcaccggcgtgacctgcggccctggccacggcatcagcat

SEQ ID NO: 80596 - DNA, 397 bp, Zea mays
gtccagcaccaggactttgctcgcataccctctccatccttgtgaatgattgtcctggtgttctcaacattgtaacaggagtctttgctcgcaggggctacaatatacagagccttgctgttggctcagctgagaaggaaggcatttcacgtattacaacagttgttcctggtactgttgaatccattgggaagttagttcagcagctttacaagcttattgatgtgcatgaagttcatgacattacccactcaccttttgctgaaagggagctgatgcttattaaagtttctgtaaacactgctgctcggagggaaattctagatattgctgaaatcttccgagcaaaacctattgacgtttctgaccatacagtaacccttcagcttactggaga

SEQ ID NO: 80597 - DNA, 408 bp, Zea mays
ctccgacccccaaccatggatgaggcgcaagttgtggagtcaaaggatggaaccatctcggttgcttctgcatttgctggttatcaggaagctgtgcaagacagggatcacaaattcttgacaaaagcagtggaagaagcatatcgaggagtcgattgcggtgacggaggtccattcggagcagttgtcgtctgtaatgacgaagtagtagtcagctgccataacatggttctgaagcacactgaccctactgcgcatgctgaagtaactgcaattagagaggcttgcaaaaagcttgggaaaattgagctctcagactgcgaaatttacgcgtcctgcgagccatgcccaatgtgctttggtgcagttcatctctcccgaatcaagaggctggtttaagggggcaaa

SEQ ID NO: 80598 - DNA, 389 bp, Zea mays
acggacgcgtggggcgaccatggtcggcttgtctgaccagaccgtggacaccgcgaccagcagcctgcagaccatgtacaggctcaacgtcggcggctcttacattgccccgaccaacgactctgggctgtcgcgggactggtacgacgacaccccgtacctctacggagctgcggtcggcgtcacgtacaaacctgatgacaatgcccagatcaagttcccgagccctgaggcagagtacgcggcgccggccagcctctacctcagcagcaggtccatgggccctaacccaaaggtgaaccagaactacaacctgacgtgggtgttcgaggtggacagcaacttcacctacgttgtccgcctccacttctgcgagctgctgcttacca

SEQ ID NO: 80599 - DNA, 401 bp, Zea mays
gagccgggttcgtgaccaatgtcaccgagtacatcgcgggcgccaaggtgaggctggagtgcaagcacttcggcaccggcaagctcgagcgctccatcgacggggtgaccgacgggaacggcacgtacacgatcgagctcaaggacagccacgaggaggacatctgcgaggtggtcttggtggagagcccgcgcaaggactgcgaccaggtgcaggcggacagggaccgcgccggcgtcctgctcaccaggaacgtcggcatcagcgacaacctgcgccccgccaacccgctcggctacctcaaggacgtgccgctgcccatctgcgcctcgctgctcaaacagttggactcggacgacgacgacgatcagtaatagcacatcgacgacgacgatcgatat

SEQ ID NO: 80600 - DNA, 394 bp, Zea mays
aggccgaggccgtcgtggagctcatggcacgctccacggactacctcatcgacgcgttcagcgtcgccacgtgcgactccatcagcgaggacggccgcgccggcgcaggcgggtgcacgccgctgccgcccacgacgcggaggtgggaccccgccgacccgaacaccatcctccgggtgctgtgccaccgcgacgacgaggccgccaaccagttcttgaagcgcacgttccagctggccaggaggcggtgaggccacggccatagcttgacttgaaggagcacgaaagatccttacgcgtcccgcgccccgcggcccgattgatgaaatgatgtgcgtggtgtttcgcatttttctcgctgaaaattgctcgcaagctgtgtcgctcgctcgca

SEQ ID NO: 80601 - DNA, 382 bp, Zea mays
acgcgtccgaacaccatcgccttcaaccacttcggcagaggcctcgtgcagaggatgccaaggtgccgctggggcttcttccacgtggtcaacaacgactacacgcactggctcatgtacgccatcggcggcagcaaggcccccaccatcatcagccagggcaaccgctacatcgcgccgcccaaccttgccgcgaagcaggtcaccaagcagcatgacacgccggagtccgtgtggaagaactgggtgtggcactccgagaacgacctcttcatggagggcgcctacttcaccgtcaccggcggccagatcaacagacagttcaacaagaaggacctcatcaagcccaggaacgggtcctacgtcaccaagctcacgcgct

SEQ ID NO: 80602 - DNA, 380 bp, Zea mays
agccggagtcgtcggtggtcggaaaaatggggcaacaacgcacgttggggtaaaccttctggcgcgaggcaccatcgtcctagcggacaatgctgaggtctccggcaactttgcctccgttgctgcacaatgcctacagaaactccccgccaacaacaatcgcttcaactacaattgtgatgggcacacattcaactaccacatttatgatggattcacgtactgcgtcgttgctaccgagtcagctggtcgccagcttccagttggatttattgagagagtcaaagaagatttttccaagaaatatagcggagggaaagccaaaaatgctagtgccaatggcctcaagcgagaatacgggcctaaactcaaggagcaca

SEQ ID NO: 80603 - DNA, 404 bp, Zea mays
aggcggcgccacggcctctcctgctatcgctgctggtcgccgtgctagcggtggccgcggatgtcgccaacgccggccacgccaagcccctgacgcctggcgggcgcgtggtacaccacaaccacggcaagttcacggccgggccgtggaaacccgcccacgcgaccttctacggcgggcgggacgggtccggcaccacggcgggcgcgtgcgggtacaaggacacgcgcgcgcaggggtatggcgtgcagacggtggccgtgagcacggtgctgttcggcgacggcgcggcctgcggcgggtgctacgaggtgcgctgcgtggacagccccagcgggtgcaagcccagcgcggcggcgctggtggtgacggcgaccgacctgtgcccgcccaacgaacagcag

SEQ ID NO: 80604 - DNA, 399 bp, Zea mays
tatagtgaggcctactactctaatttgatgggcattccgtttccttctcaacttcaacgccaacaacagttgatgctactatggttggaaatcgggcatggttcggagggcttttcagcggctcaggcaaaaggcgacaagtcagtgcagagaagatagtgcttgatctaacccctgtacaggaacagagactgcaaagtctgaaggaaaggctaaatgtaccttacgacgaaactcggacggatcatcaagattcgcttagggctctatggaatgcctcctttcccgatacagagctcactatcttagtttcggaacagtggaaagacatggggtggcagggcgtcaacccagcaactgatttcaggggctgtggatttgtttcgcttgaaaaccctt

SEQ ID NO: 80605 - DNA, 384 bp, Zea mays
agaattccgtctcttgtccctgtcgtcctcgcccggtttccccggtttttgagaggggaaagaggaggcggaggagagggatggggagggacgagaggttcccggtgtgggaggccgcgctcggcgccggaatcgccgccgccttcgccgctggactcgtcggtgtctacctttccatgccggactccgactacagcttcctcaagttgccacgtaatctcgaggaactccaaatcctcactggccaccttgagaactatactagtgactacaccctacaggtgttggtaggttattgcgctgtgtacatcttcatgcagaccttcatgatcccagggacaatattcatgtcactgcttgctggtgctctgtttgggcaactgc

SEQ ID NO: 80606 - DNA, 402 bp, Zea mays
tacaagactctatacagacgtcgtagtatcgtgcatggtgagaaggaagagtcaaagggcatcgatgcgaaagcgtccgggcctggtgggtccttcgacatcaccaagttgggcgcctccggcaatggcaagacagacagcacgaaggctgtgcaggaggcatgggcatcggcgtgcggcggcactgggaagcagacaatcctcatacccaagggcgacttccttgtcggacaactcaacttcacaggcccttgcaagggcgacgtgaccatccaggtggatggcaatctgctggcgaccacggacctaagccagtacaaggaacatggtaattggatcgagattctacgcgtggataacctggtcatcaccggcaaaggaaaccttgacgggcaaggccca

SEQ ID NO: 80607 - DNA, 334 bp, Zea mays
  unsure (1)..(334): unsure at all n locations
ccaacacggatggcatccacatgggcgactcatccgggatcacgatcaccaacaccgtcattggcgtcggtgacgactgcatctccatcggccccgggacctccaaggtgaacatcaccggcgtgacctgcggccctggccacggcatcagcatcggcagcctanggcggtacaaggacgagaaggacgtcacggacatcaacgtcaaggattgcactcttaagaagacgatgttcggcgtccgcatcaaggcgtacgaggacgccgcctccgtgctcaccgtctccaagatccactacgagaatatcaagatggaggactcagccaaccccat

SEQ ID NO: 80608 - DNA, 397 bp, Zea mays
aacatgaactacgagcctatcgctccctaccacttcgacttgagcggcaaggccttcggctccctggcaaagcccgggctcaacgacaagattcgccactgcggcatcatggacgtcgagttcagaagggtgcgatgcaagtaccccgccgggcagaagatcgtgttccacatcgagaagggctgcaaccccaactacctggccgtgctggtgaagtatgtggcggacgacggcgacatcgtgctgatggaaatccaggacaagttgtcggctgagtggaagcccatgaagctctcttggggcgccatctggaggatggacactgccaaggcgctcaagggccccttctccatccgcctcaccagcgagtccggcaagaaggtcatcgccaaagacg

SEQ ID NO: 80609 - DNA, 379 bp, Zea mays
aacatgaaccacgagcctatcgctccctaccacttcgacttgagcggcaaggccttcggctccctggcaaagcccgggctcaacgacaagattcgccactgcggcatcatggacgtcgagttcagaagggtgcgatgcaagtaccccgccgggcagaagatcgtgttccacatcgagaagggctgcaaccccaactacctggccgtgctggtgaagtatgtggcggacgacggcgacatcgtgctgatgggaatccaggacaagttgtcggctgactggaagcccatggagctcccttggggcgccatctggaggatggacactgccaaggcgctcacgggccccttcgtccatccgcctcaccagcgaatccggcaag

SEQ ID NO: 80610 - DNA, 405 bp, Zea mays
aggcccccgggaagcccatgcccaagaccatcaagttgaccaaccccgtgggcttccggtgccccgcccccaaccacaaagacagcgtgatgtacgtgtgctgcgtcaaggaccgcaagttcaaggcgaagaaggctaacagcacgcggtaccagacacggcggaaagcggacctgacgttcgcctacgacgtgctgcaggccaacaccaacaactaccaggtgcaggtgaccatcgacaactggagccccatcagccggctggacaactggaacctcacctgggagtggaagcgcggcgagttcatctacagcatgaagggcgcctacacgctgctcaaggaaggccccgcctgcatctacagccccgcagcgggctactacaaggacatggaactcaaccccg

SEQ ID NO: 80611 - DNA, 401 bp, Zea mays
ttcacggggccacgcacgcgtccgcatcaggcttggttacaatagcttgggtgcgtttgccaccatcaatcacctccactttcaggcgtactacttgtcagtgcctttccctgttgagaaggcagctacccacaagatcccactctctgaggacacgaagaagaatggggtgaccgtgtccaagctgataaattatcctgtgagaggcctggtatttgagggagggaacaccctggacgacctggccactgtggtttctaatgcttgcatttggctgcaagacaacaatgtgccttacaatgtgctcatttctgactgtggcaagagggttttcctgttcccccagtgctacgcagagaagcaggctctgggtgaagtgagccaggagctgctggacactc

SEQ ID NO: 80612 - DNA, 403 bp, Zea mays
ttcacgggtgcacgcacgcgtccgcacgtctcaccctccctccctcacacaaataataaggaaaggtcccgcccttttcctccgacatccacaggggggaggggaaaacacgtgcattcacccggcggcaataatggcctcggttccggctccggcgacgacgaccgccgccgtaatcctatgcctatgcgtcgtcctctcctgtgccgcggctgacgaccccaacctccccgactacgtcatccagggccgcgtgtactgcgacacctgccgcgccgggttcgtgaccaacgtcaccgagtacatcgcgggcgccaaggtgaggctggagtgcaggcacttcggcaccggcaagctcgagcgcgccatcgacggggtcaccgacgcgaccgggacctacacg

SEQ ID NO: 80613 - DNA, 373 bp, Zea mays
gacgagcgatctcctctccctctccctctccgatccattctccagcgcagcgaagtaaacatgtctgaccgggcaaagatgtcgtggcaggcgtacgtggacgagcacctgatgtgcgagatcgagggccaccacctcgcggcggcggccatcgtcggccacgacggtgccgcctgggcgcagagcacggcgttccccgagttcaagaccgaggacatggccaacatcatgaaggacttcgacgagccagggcacctcgcgccgacaggcctgttcctcggacctaccaagtacatggtcatccaaggcgagcctggtgccgtcatccgtggcaagaagggatcaggacgcatcaccgtgaagaagacagggc

SEQ ID NO: 80614 - DNA, 389 bp, Zea mays
cgtccggtcctatctccatcggccatctctggcgcatgatcgaaccgcacgaccgaggcagcaagtgagtctcagacaccaccatgcaggcgatgcgtccggccgcggagggggaggcacaggagcaggcggtgagggcggaggcggacgaggtgaagagggaggtggcgaaggcgcacgacgaggaggaggcggtgcctgaggagaaagacgtggcggttgtaggggaggaggtggaggcggaggcggagacggagacagagactgaaggcgaggcggaggcagaggtcgaggccgaggtggaggtcgaggtggaggcggaggccggtgcatcgtctgcgaagaagaaccgtatccaggtgtccaccaacaagaagccgctctatttc

SEQ ID NO: 80615 - DNA, 405 bp, Zea mays
gggccgcgtccagcgagatccaaggaccggttcaagagggagctggatggcattcaggtggagctacaagcaaccgacccgagcgaaatgagcatggacatcgtcaagtcgcgagccctctgaaacagccccggccgctgcacctgcacgctgcaggggcgcatcggctcctgcatgcccgtgggtcgtcgaatccttgcttgtgtgttgggaacggtcttgtgttttcgtgtccttgttttcctggaagcaaaagccctgcattctgtatgagactgtatgccattttccatctttttctctccccatatctctgccctagtcctgctaccgctgtagactagaacttatttggtgtttgatctcgtggcattgtcgagtcttttatgtgtctatgcaatgcta

SEQ ID NO: 80616 - DNA, 391 bp, Zea mays
acgacgatgggatccctcgctaataacatcatggtcgtgggtgtcgtccttgcagcgctcgtcgccggcgggtcatgcgggcccccgaaggtgccgcccggtcccaacatcaccaccaactacaacggcaagtggctcaccgccagggccacctggtacggtcagcccaacggtgccggcgctcctgacaacggcggtgcgtgcgggatcaagaacgtgaacctgccaccctacagcggcatgacggcgtgcggcaacgtccccatcttcaaggacggcaagggctgcggctcatgctacgaggtgagatgcaaggaaaaacctgagtgctcgggcaatccagtcacggtgtacatcactgacatgaactacgagcctatcgctccctaac

SEQ ID NO: 80617 - DNA, 391 bp, Zea mays
agcgccatcgtcggcgggcccgacaagaacgacggcttcgtggacaagcgcggcaactcctcctacaccgagccctgcacctacatcaactccctcgccatcggcccgctcgccgcgctcgccgtccgaggcgtgcagctcgtcgccacgcagtgatctatccccatgcgtgcgtgtgtgtcccgctgtttcgtttcttccctgacatgatatgatttctactccgttactgatgattcattgattccggccgcccccgcattgttcattatattaggtgacgtctgcgggcgcgtgcggggatccatccaaatctctcactcgctattgtttctgtacgtacgtacgtgtacgtccaagattataatgatactcataataatctcgtcgc

SEQ ID NO: 80618 - DNA, 357 bp, Zea mays
catactacggcggcggcggcggcggtcttggtggcgcctacggaggcggtggctccgagtacggccacgagggccgaccgcaccacggcggcggcggatcccagtacggccacgagacacgcccgcaccacggcggcgggggcggcgccccgcctgtgaggcagcagacgtacaggatctactgcaaggctggggaggaccagtacagcctcgcctcccgcgacggcaaggtctgcctcgtgcgcacggaccgtgatgacgacgcgcagcactggatcaaggacatgaagtacagcaccagggtgaaggatgaggaaggctaccctgccatcgtcctcgtcaacaaagccactggag

SEQ ID NO: 80619 - DNA, 380 bp, Zea mays
gaacgtcgtacgagaacctttctccctcctccacctttctccttttcttgccacggcaaaacaccttcgccggcgagagcatggcgatggcgtaccgtgtcctggaggtcaccctggtgtcggcaaatgacctcaagaaagtgtcgctcttctcccggactcgcatctacgccgtggcttccatctccggattcgacctccgcatcccttcccacagcacccaagcagaccacagcaacggctgcaacccctgctggaacgccgtggtacacttccccatcccggctgccgctgacacccgcggcctcgcactccacgtgaggctccgcgcccagcgtctatacctgggcgatcgcgacatctgcgaagtgtttgtgccc

SEQ ID NO: 80620 - DNA, 390 bp, Zea mays
cgaggttccccaaacacgcacagcacacgaacacacaccgcgcccagctccgaggtgatcttccggcggccggcgagatgagccgtggcacaggcgcgggctatgaccgccacatcaccatcttctccccggagggacgcctgtaccaagtcgagtacgcgttcaaggcggtgaagtcggcgggtgtcacgtcgatcggcgtccgcggcgcggactccgtctgcgttgttacgcagaagaaagtcccggataagttgctggatcagacgagcgtgacacacctgttcccgatcaccaagtacgtcggattgcttgccactggccttacagctgatgctaggtcattggtttcccaagcaaggaacgaagcagctgagtttcgtttcaaat

SEQ ID NO: 80621 - DNA, 387 bp, Zea mays
ctcaaggctctcctctcggaggtctgataggcaacccaataatggcagaagtcctatcaggatctcatgaacaccgtctaagctctgccttagatggacactacgacgagaagaggaaatccaatgtggaatacacagaggacgagaagaaagccgtgatcgcggctctgaaaaagaaggctttgagcgcctcacagaagtttaggcattccatgaagagggggaggaagagcagcaaggtgatgtccatctcgattctggatgagcgtgaacctgaggaggtgcaggctgtggatgccttccgccagcttcttgtacttgaagagctgctaccatcgcagcatgatgactaccacatgatgctaagatttctcaagggaagaaagt

SEQ ID NO: 80622 - DNA, 409 bp, Zea mays
  unsure (1)..(409): unsure at all n locations
cactgacgagaactgccagaagagcaagatcttctttatctcttgggccccggatacatcgagggtgagaagcaagatgctgtacgcgagctccaaggaccggttcaagagggagctggatggcattcaggtggagctacaagcaaccgacccgagcgaaatgagcatggacatcgtcaagtcgcgagccctctgaaacagccccggccgctgcacctgcacgctgcaggggcgcatcggctcctgcatgcccgtgggtcgtcgaatccttgcttgtgtgttgggaacggtcttgtgttttcgtgtccttgttttcctggaagcanaagccctgcattctgtatgagactgtatgccattttcaatctttttctctccccatatctctgccctagtcccgctacggctg

SEQ ID NO: 80623 - DNA, 387 bp, Zea mays
acccacgcgtccggcagtcatctcctccatcaccaccaccaagctcaacaacagccagctcgcgaaaataatgaagagccgcagcatggcatcatcggccgcgctcttggtgctagccctcgcgctagtggcggccaccgccccacaggtagcggaggcaaagaagaagagagcggcggagagcggcgaggcggcggaggcgaagaagatccaggacgacttctgctcgacgctgtgcgagggcaagaaggggacggacctggtcgtgtgcaaggagtcctgcgcgctctcccagcagtccaacctggtgctgtacggcaggatccagtgcaagggcaagtgcaccgagcagaagggcatcacggcgccggccatgaaggtctgcca

SEQ ID NO: 80624 - DNA, 415 bp, Zea mays
actggaatgggatctgatctctttgggtcatacgcagagtcttcttgtgctgcccttgttgttgcgtctatttcatctttcggaatcgaccatgatttcactgggatgtgctacccactccttgttagctctgttggtatcattgtctgcttgatcaccaccctttttgctactgatttctttgaagtcaaggctgtgaaagaaattgagcctgcacttaagaagcagctcatcatctccaccgtcctgatgacttttggtattgctctaatcagctggttggcccttccagctaagttcaccatctacaacttcggtactcagaaggaggtttccaactggggtttgttcttctgtgtttcaattggtctgtgggctggtttgattaatgggtttgtcacagaatactacacta

SEQ ID NO: 80625 - DNA, 276 bp, Zea mays
tctacagtgacgattcctgacacacacggatgaagatcgcagtgggtgcagctagaggcatcgagtacttgcacgaggtaaccaacccgccagtgatctaccgcgatctcaagggatccaacatcctcttgggcgcaagcttcaacgcgaagctgtcagacttctgtctgggcaagcttggtccgagccgcgacagaacccatgtcatcacaaaggggattgggacctactggtactgcgctccagaattagccatgactgggaagctgaccaaga

SEQ ID NO: 80626 - DNA, 333 bp, Zea mays
  unsure (1)..(333): unsure at all n locations
agttgagcacgacgatgggatccctcgctaataacatcatggtcgtgggcgccgtccttgcggcgcttgtcgtcggcgggtcgtgcgggcccccgaaggtgccgcccggccccaacatcaccaccaactacaacggcaagtggctcaccgccagggccacctggtacggtcagcccaacggtgccggcgctcctgacaacggcggtgcgtgcgggatcaagaacgtgaacctgccaccctacagcggcatgacggcgtgcggcaacgtcnccatcttcaaggacggcaagggctgtggctcatgctacgaggtgagatgcaaggaaaaacctg

SEQ ID NO: 80627 - DNA, 446 bp, Zea mays
cccaaacgtccgcttcaccgagccccagatcaagtgctacatgcgacagctgctggaggggctggcgcactgccatgcgcgcggggtgatgcaccgggacatcaagtgcgccaacctgctggtgaacaacagcggcgagctcaaggtggcggacttcgggctggcgaacctcttcgcgccggcgccggcggcgccgctcaccagccgggtggtcacgctctggtaccgcccgccggagctgctcctgggcgccacggcgtacgagccctccgtcgacctctggagcgccggctgcgtcttcgcggagatgcacgcgcgccggcccgtcctgcagggccgcaccgaggtcgagcagatcaaaagatcttcaagccccggtggcccaccgcccaaggacttctggggccgcttggggctctcccacggcgccgtcttccgcccgcagc

SEQ ID NO: 80628 - DNA, 354 bp, Zea mays
cggacgcgtggggccggccggggatcagcgacgtcgtctcggcgctctcgttcctcgccgatccgcaatactaccctccccaaggcacgggagccgagcagaaggccacagccacaggtcgagagagtaaacccaaggaggatactacagacaaggatagcagtcctcataaggccgaaatgatcagggcagacgacgaaacgaagcatagatgatgaccgtagggggaagctaaccacgggaaagggaggaacactgcagagctgtctgtctgctctcttgaatcttctttttgtaaagcgtacaccacgtaggcaggatgtaacaacaacattcaaggagttatcttgactg

SEQ ID NO: 80629 - DNA, 374 bp, Zea mays
acggacacgcggggcaggccggggatcagcgacgtcgtctcggcgctctcgttcctcgccgatccgcaatacgaccctccccaaggcacgggagccgagcagaaggccacagccacaggtcgagagagtaaacccaaggaggatactacagacaaggatagcagtcctcataaggccgaaatgatcagggcagacgacgaaacgaagcatagatgatgaccgtagggggaagctaaccacgggaaagggaggaacactgcagagctgtctgtctgctctcttgaatcttctttttgtaaagcgtacaccacgtaggcaggatgtaacaacaacattcaaggagttatcttgactgacaaagaacaagaaatggc

SEQ ID NO: 80630 - DNA, 406 bp, Zea mays
gccatggccccggaatacaagcatcatgggttaccaaatgagggattcctttggttcccacaaatatctttctaactttgcacaatttaaacttggcctcctcaggtgtaaaacgatgaacagcaaagcgacccttggtgtcatagatcaaacgaaagttctctccagtcttatcaatgctgatgacatccataaaaccagcagggtaggttatatctgtgcggactttgccatcgatcttaatgaaacgctgcatgcaaatcttctttacttcatctccagttacggcatacttaagtctattccttaggaaaatgattacggggagacactcccttatcttgtggggagcggtacatggacgaagggcaaacacgccggtcagtttatccagcatccaatgttt

SEQ ID NO: 80631 - DNA, 359 bp, Zea mays
  unsure (1)..(359): unsure at all n locations
gaccggacaaccaaagaatcaaaaccttcatgtgtctcaaagccgacgtagtagcatgagaatttctaatttttccatgaaaagaggcccttcaatggccatgagagctccttcagtagctatcagagctccttcaatatctctgagaggtccttcaatgtcttcaagagcatcttctgtgtctgtaaaggaagaccaaatttccccaaagaaatcagacgaggaaacggaatcagtgttggtgaagctgagcgcccgtcagatcacacttttgctatcatccatttgggctcaagcaacatcncctgaaaatactcctgtgaactatgaagccattgctcatacttacagtttgcttc

SEQ ID NO: 80632 - DNA, 323 bp, Zea mays
cccacacgtccggccgtacaaggactacaaggagtgggtgtggaagtcgcagggcgacgtcatgatgaacggcgccttcttcaacgagtccggcggccacaacgagcgcaagtacgacaggttcgacttcatcccggccaagcacggccgctacgtcggtcagctcacgcgcttcgccggaccactcaagtgcatcgtcggccagccgtgctagtagacagcggcccggtcgggcacatactcctcttcctatatacatcggatttggatgggcggcatatatgtacgtgtgtgtaatatattattactacatcttgtactat

SEQ ID NO: 80633 - DNA, 432 bp, Zea mays
gcaagcccgacgcggcggcgctggtggtgacggcgaccgacctgtgcccgcccaaggacaagtggtgcaagccgccgcaggagcacttcgacctcagcatgcccgcgttcctccagatcgcgcaggagaaggccggcatcgtgcccatctcctatcgcagggtggcgtgcgcgaagcagggcggcatccggtacaccatcaccgggaacaagtacttcaacatggtgacgatcaccaacgtgggcggcgccggcgacatcgcggcggtgtcggtgaaggggagcaagcgcgtcaagtggacggagatgaagcgcaactgggggcaagtgtggcagaccggggaagacctcaactggcagtccctgacgttccgggtgatgactagcggacaacgcaagggcacctcatggcacgttctccccgctgactgga

SEQ ID NO: 80634 - DNA, 428 bp, Zea mays
ctccctcttgccggtcccgaataaagagcagcagcgcaagaggtcggtagagcgagaagaaggcaatggcggccgagagcttccttttcacctcggagtccgtgaacgaggggcaccccgacaagctgtgcgaccaggtgtcggacgccgtgcttgacgcatgcctcgcgcaggaccccgacagcaacgtggcctgcgagacctgcaccaagaccaacatggtgatggtgttcggcgagatcacgaccaacgcgaccgtggactacgagaagatcgtgcgcgacacctgccgcgagatcgggttcacctccgacgacgtgggcctcgacaccgaccgctgcaaagtgctggtgaacatcgagcagcattcccccgacatcgcgcatggcgtgcacgggcacttcacgaagcggcccgaggagatcggc

SEQ ID NO: 80635 - DNA, 396 bp, Zea mays
gcatgatccctaccgccatgggcgcgggataccgcgtgatcagcgccctgcccatccagcaccaggactggactggaggaaaggagttcaagtgcaaggtcaacaacaaaggcctctcggcccccatcgtgaggatcatctccaggagcaaagggccggcccgggagccgcaggtgtatgtcctggacccacccaaggaagagctcagcaaaagcacgctcagcgtcacctgcatggtcaccggcttctacccagaagatgtagccgtggagtggcagagaaaccggcagactgagtcggaggacaagtacatttctaatttgtaacatacaaccatagtctgcaaaactattctgtgtatcactgacgcacatcccaaactgtttagttccagtc

SEQ ID NO: 80636 - DNA, 425 bp, Zea mays
gcatgactcccaaccgccatggccgcgggatactttagcacaaaatggtattactgtatttccaccagcacctgcctcctctgattcagtctatgccagcccctgaccagaaaccccaatgggtgggcttaaaagccatcaggggaggagtctgggcaaaggggcctcacgtgggcctgggaagacagcatagagtgggcagacacactgaaggagggataaagatgctatagccagacagacagcttcttcccaagggacaccaggcacgatgctgaagggtccacctaaagaagcaaggcggcgccatgtgggtctgaacctgacacatgtccctggtggcaagaggggtctgtcacagggtcctgggctattgacctctccagaccgtctcctagttccttctgtcttcacggggctcccct

SEQ ID NO: 80637 - DNA, 428 bp, Zea mays
  unsure (1)..(428): unsure at all n locations
gcacaacgatgcaccagcacgagatactagccatcatgcgcctgtcgtcnctcctcctcgtcgtggccgccctctcggcgcgcgccgcggcgcagcaggtgccgccggtgggcggcagcgctctgaagccggactactacagccagtcgtgcccgcgcgcggagaggatcatcgcggaggtgatgcagacgaagcagatggcgaacccgacgacggccgcgggcatgctgcgcgtcttcttccacgactgcttcgtcaccgggtgcgacgcgtcggtgctgatcgcgtccacccagttccagaagtcggagcacgacgcggagattaaccactcgctccccggggacgccttcgacgccgtggtgcgcgccaagctggccctggagctggagtgccccggggtggtgtcctgcgccgacatcctcgcg

SEQ ID NO: 80638 - DNA, 351 bp, Zea mays
cggacgcgtgggcgacaagatggcgtgcacaaacaatgcgatgagagccttgttcctcctggtcctcttctgcatcgtgcatggtgagaaggaagagtcaaagggcatcgatgcgaaagcgtccgggcctggtgggtccttcgacatcaccaagttgggcgcctccggcaatggcaagacagacagcacgaaggctgtgcaggaggcatgggcatcggcgtgcggcggcactgggaagcagacaatcctcatacccaagggtgacttccttgtcggacaactcaacttcacaggcccttgcaagggcgacgtgaccatccaggtggatggcaatctgctggcgaccacgga

SEQ ID NO: 80639 - DNA, 352 bp, Zea mays
agcggttcaaagctgaccccggcaccgccgccggcctcctccgcctcgtcttccacgactgcttcgcaaacggctgcgacgcgtccatcctgatcgacccgatgtcgaaccaggcctccgagaaggaggccggccccaacgtctccgtgaagggctacgacgtgatcgaggagatcaagacggagctggagaagaagtgcccgaacgtggtgtcgtgcgcggacatcatctcggtgagcgcccgcgactcggtgaagctgacgggcgggcccgagtacgcggtgcccctgggacggcgcgactcgctcgtgtccaaccgcgaggacgccgacaacctgccgggcccggacat

SEQ ID NO: 80640 - DNA, 429 bp, Zea mays
cccggtcgcacgacgggtacgcgcccatcgcgcgcatgctggcgcgccacggcgccgtgctcaacttcacgtgcgtggagatgcgcgaccacgagcagccgcaggacgcgcagtgccgccccgaggcgctggtgcagcaggtggccgccgcggcgcgggaggccggcgtgggcctggccggcgagaacgcgctgccgcgctacgacgacacggcgcacgaccaggtggtggccactgccgccgacagggccgccgatgaccgcatggtggccttcacgtacctgcgcatggggcccgacctgttccagcccgacaactggcgccgcttcgccgcgttcgtcaagcgcatgacggagccgggcgcgcgggaggcgtgccgggagcaggtggagcgggaggccgagggcgtcgcgcacgccacccagcccc

SEQ ID NO: 80641 - DNA, 429 bp, Zea mays
  unsure (1)..(429): unsure at all n locations
cgacaagatggcatgcacaaacaatgcgatgagagccttgttcctcctgatcctcttctgcatcgtgcatggtgagaatgaacagtcaaagggcatcgatgcgaaagcgtccgggcctggtgggtccttcgacatcaccaagttgggcgcctccggcaatggcaagacagacagcacgaaggctgtgcaagatgcatgggcatctgcgtgcggcagcactgggaatcagacaatcctcatacccaatggcgacttccttgtcggacaactcaacttcacaggcccttgcaatggcgacgtgaccatccaggtggatggcaatctgctggcgaccacggacctaagccagtacaatgatcatggtaattggatcgagattctacgcgtggataagctgntcatcaccggcaagggaaaccttgacgggca

SEQ ID NO: 80642 - DNA, 420 bp, Zea mays
  unsure (1)..(420): unsure at all n locations
cgccgcgaagcaccatattgaccagagcacaacaattcttgacgtgcaaggagtggggatgaagcaattcagtaaagctgcaagggagctcattggcatgcttcagaagattgatggtgacaattatccagagaccctgtgccgcatgttcatcatcaatgcaggccagggattccggcttctatggggcaccgtcaagagctttcttgacccaaagaccactgcaaagattcatgttctgggtaacaagtatcagagcaagcttctcgaggtgattgatgctagtgagttgccagaaatttttggtggaacctgccgatgtgaacgtggttgcatgaaggctgacaaanggccttggaaggaccccgaaatcatgaaaatggttcaaagtggtgatgggaggtgtggatcactcggtac

SEQ ID NO: 80643 - DNA, 501 bp, Zea mays
  unsure (1)..(501): unsure at all n locations
gggnnngnaatttactttgccngcccggtccaaaatacccgggtcgacccacgcgtccggccattttcctctcctctcctctcctctccctccatctaaggagaggagagatatgcagtcacgagctccaccaaatcctgacctcccaaagctgtggtcgcgatccaaacagaagggaatgatcaggcgacaacccggcatggatcggttcctgcagctgctggccgccggcgtggcgtgctactgctagtggcaccgccggccttggctgacgacgacattgtagaagtcggcgcaactggggttcgcagctctcgcacccgcttctccccggctccgtggtgaagatgctcaggcgaaccgcatcgccagggtcaagatgttcgacgccgactcctggcccgtcngcgcgccgtcgactccggcantgaagtcatgctcngnatccccaaagaaatnctggagaacaatgacaagcaantanngggaaagncccaagat

SEQ ID NO: 80644 - DNA, 456 bp, Zea mays
  unsure (1)..(456): unsure at all n locations
gcatgatccctgccgccatggccgcgggatacaagcttatttttttttttttttttttttttctttttttttttttttttcaggtttatgcctttattgctgaaggaggagcggccccaagcaggaggccccaggaggggcctggaggggcctgggtcccaggaggggtgaatgtggtcccggttcctcctggtcccctgatggggcaggcggggatgacatcgtctgtccccagaggggccaaggctcccgggctctagatgtggcactgctcctccagctgggttgggttgaaggacagccggatgtgcatgggcagggccttgagggctttgtcgaatttctccagggcctcgtcgtccacctccggggtcctgaccaggcactggcaggccaggctttgctcgggctcagcactgttctccatgcanaagagcaggtatcactantgcggcc

SEQ ID NO: 80645 - DNA, 342 bp, Zea mays
cggacgcgtggggcggcgccacgacctctcctgttgtcgctgctggtcgccatgctagcggtggccgccgatgtcgccaacgccggccacgccaagcccctgacgcctggcgggcgcgtggtacacgacaaccacggcaagttcacggccgggccgtggaaaccagcccacgcgaccttctacggcgggcgggacgggtccggcaccacggcgggcgcgtgcgggtacaaggacacgcgcgcgcaggggtacggcgtgcagacggtggccgtgagcacggtgttgtttggcgacggcgcggcctgcggcgggtgctacgaagtgcggtgcgtggacagcccc

SEQ ID NO: 80646 - DNA, 504 bp, Zea mays
  unsure (1)..(504): unsure at all n locations
gggnnnnnggaactgttacttngccnggcccggtccanaataaacgggtcgacccacgctccgcaggggtccaagcaagggangaaggggcagctcgcgatcgacgccgagatcttcgggtgacaccggcctttcacgtcgtcgaggtgaagaagtcggcaggcgacacgctggagttgagatgttctgcagcaagggcctaagaccttcactcagcgacatctgctgggagcagcgatctgaggagaacatggctccttcagtggttcaaccatcacaattggagccatcctctanaccgtctccgacagtttactcacccctcttagtcgattgttatttaagtgcagtctctcggagatgcaattacagtccatcctctctttcttttcccctttctcaaagagctaggacttgctcgactgagcatcangctgtanggctctttgtgatcatcctttgccanttttcccctggtancaaaaattntttgggcaaggnanc

SEQ ID NO: 80647 - DNA, 505 bp, Zea mays
  unsure (1)..(505): unsure at all n locations
gggnnnngnantgttatttgcnggcccggtccanaatacccgggtcgacccacgcgtccggcgactccgtcagcatcccgctgccgcggtgggccgcggaggagatggagaangaccagacctctgctacaccgaccagtggggccgacgcaactacgaagtacgtctcgctcggctcnacgccctgcccgtcctcaagggacgcacgcccgtcgagtgctacaccgacttcatgccgcgttccgcgaccacttcgccgactacctcggcaacaccatcgtggaaatccaagtcgcatgggccccgccggcgaactgcgctacccgtcctacccggagagcaacggcacctggagttcccaagcatcggcgccttccagtgcaacgacaggtacatgcgtagccgcctgcangggcagcggaagcggccggcaaacctgaatnggggccaccgtgggcccaaccgaacnctgggggttanaanaantggccgggaggaacacntt

SEQ ID NO: 80648 - DNA, 452 bp, Zea mays
gcatgatcccgaccgccatgggcgcgggatacaagttcacctcggcccgtctgcccagcaaggccccaggttcaaagtgctgggaggtgggcccttcgttccgaccccagcgcacacgcagctccaagttgccggaccaggaggcttcctcaagcacgatcttccttcccccacccatcctcagagacctggcttggagctgggacaaggaggtcacagggaggccccaaaccagccgtttgggtgtgttttgactggtaggtggtatgctgtcccccgggttgacttgatgttctgaaaccagcctcgcactggcagattcacccatgctgaccccgacgtatacagcttctgaccgttagcacagacacactcagaggggtcacacatgcacacatgccgtgtggatgggacctttgcagtcagtcatgcttggaccacatggacactca

SEQ ID NO: 80649 - DNA, 442 bp, Zea mays
gcataatccctaccgccatggccgcgggatacatggatatagctatttatttctatctactagaaaataaagtcatattttttcttaatttaatattggtcattgctaatcagaacacactattgccaggaacacagtagttattgttaaaatcagctgcactagatacaatttgaaaatatccagcaccaggttaattccaataacgaacccaatagattagttaatgctatgagaagactaaagagaaagagaaaagagacgcagacccaggcctggctccacatgctactaactaccagctctcagatgtgtcactgggaacaatacacactccatgcgttttgctacatctccagaagaggtaaggacttgagtccacacggggatgctcgcttgcaagtccttgaggcccacagcctggtgtgtttcacgcacagat

SEQ ID NO: 80650 - DNA, 340 bp, Zea mays
gcccggctcgcccgagaacatcctctactaccacatgatccccgagtaccagaccgaggagtccatgtacaacgccgtgcgccgcttcggcaaggtgcgctacgacacgctgcgcctgccgcacaaggtcgtggcgcgggaggccgacggctccgtcaagttcggccagggcgagggctccgcctacctcttcgacccggacatctacaccgacgggaggatctccgtgcagggcatcgacgccgtgctgttcgcgccggacgacaccaaggccacgcagacagccgaccctaacaggaagcctcccgccatcgtcacccacaagaagaagatcaagctc

SEQ ID NO: 80651 - DNA, 425 bp, Zea mays
  unsure (1)..(425): unsure at all n locations
cgcgatggcgtggaacgtgttccggttctgcacggctctccgtgggctgggttccatcatgatcctactcgtcctcgccatcgtcggcgttacctactacgctgtcgtcctctgcaactacggccccgccctcctcaccggcggcggcaccactctcgccgcgctcgctgtcctgctcctcttccactttctgcttgctatgcttttatggagttatttttctgtggtgctcactgaccctggttctgttccaccaaattggaatcttgattttgatgcggagaggggagaaactgctcctctcactagctcagagttcagtagccagatgaattcacagcaatctgtggctcttggcaatacggcaaatccaaagggcaaggtactgtangaaatgcaaccagttgaagcacctcggtgccaca

SEQ ID NO: 80652 - DNA, 423 bp, Zea mays
ccaagtcggcatgggccccgccggcgagctgcgctacccgtcctacccggagagcaacggcacctggaagttcccaggcatcggcgccttccagtgcaacgacaggtacatgcgtagccgcctgcaggcggcagcggaggcggccggcaagcctgagtggggccacggtgggccgaccgacgctggcggctacaacaactggccggaggacaccgtcttcttccgcggcgacaacggtgggtggagcaccgagtacggcgacttcttcctgtcgtggtactcgcagatgctgctggagcacggcgacctcatcctgtcgggcgccacgtccgtgttcggcgccgcgcccgtggaggtctccgtgaaggtggccggcatccactggcactacggcagccggtcacacgccccggagctcaccgc

SEQ ID NO: 80653 - DNA, 431 bp, Zea mays
  unsure (1)..(431): unsure at all n locations
caagtcgtcgctcaaggccagcaagttcctgtacgagggcatcaccatggacaatgtctcctaccccatcatcatcgaccagaagtactgccccaacaacatctgcgtcaagtccggcgcctccaaggtggccgtcaacgacgtcgtcttcaagaacatccacggcacctccaacacgccggaggccatcacgctcaactgcgccaacaacctgccatgccagggcgtgcagctcgtcaacgtcgacatcaagtacaatggatccggcaacaagaccatggccgtctgcaagaacgccatcggcaagtccatcggcttggcaaaggagctcgcctgcatnctgaacaattgactaacatgcatatnatatatactaggtaaaatccccgtgcattgcaacggaaaacacttgtgtatacacaggtcatttt

SEQ ID NO: 80654 - DNA, 424 bp, Zea mays
cggatacgctcgccgtcgaggcgctgcagaagatggttcaaggcaagttcaggcacctgccggtggtggataacggcgaggtggtggccatgctggacatcgccaagtgcctctacgacgccatctcccggatggagagggcgtccgagaaggggaaggcggcgatcgccaacgtcgcggctggcgacgacaagtactccatcgtcgaagctctcaaggagcaaatgttcaagccctgcttgtctgccattattggcgaagactcaacagtcgtcatggtgtcgcctggtgattccgtccttgcagctaccaagaggatggtggaagcgcatgcgacctcagccgtagtggccgtggggagcaagccgcaaggcatcctgacttcaagggatatcttgatgcgcctggtcgctaagaacctgtc

SEQ ID NO: 80655 - DNA, 429 bp, Zea mays
gtgatttgaaatacttgggaataaatagttcgtgaatccctgaagcgtgcatatatatattcctgccaagataaaggtaatggagtcgtcacgcaggttccagccggccgtcatcctgcttctcctgctcattgtgtccaccgatatggcacaggcaagggaatgcgagaagtacagtgagcgatttgttggggcatgcatgatcgcagacaactgcgccaatgtgtgccgcggtgagggcttcttggccggcaggtgcagcaccttccgccgccgctgcatctgcactatgcagtgctaaacaagatcgctcgatcgttcgccatgcatcgacaacctattcttaataacgttcattaatctcgtcctatttatgacgaatgtcatgtatgtcctggtgactgtcatgtatattctgatgactgtcat

SEQ ID NO: 80656 - DNA, 425 bp, Zea mays
gccaccctcgtctcaccctccctccctcacacaaataataaggaaaggtcccgcccttttcctccgacatccacaaggggggaggggaaaacacgtacattcacccggcggcaataatggcctcggttccggctccggcgacgacgaccgccgccgtcatcctatgcctatgcgtcgtcctctcctgtgccgcggctgacgacccgaacctccccgactacgtcatccagggccgcgtgtactgcgacacctgccgcgccgggttcgtgaccaacgtcaccgagtacatcgcgggcgccaaggtgaggctggagtgcaagcacttcggcaccggcaagctcgagcgcgccatcgacggggtcaccgacgcgaccggcacctacacgatcgagctcaaggacagccacgaggaggacatctgccag

SEQ ID NO: 80657 - DNA, 328 bp, Zea mays
agccaccctcgtcgcaccctcgctccctcacacacatgataaaggaaggtcccgcccttttcctccgacatccacaaggggggaggggaaaccacgtacattcacccggcggcaataatggcctcggttccggctccggcgacgacgaccgccgccgtcatcctatgcctatgcatcatcctcacctgtgccgcggctgactacccgaacctccccgactacgtcatccagagccgcatgtactgcgacacctgcctgctccgggttcgtgaccaacgtcaccgagtacatcgcgggcgccaatgtgacgctggactgcaagcacttc

SEQ ID NO: 80658 - DNA, 292 bp, Zea mays
aaccaggggcctccaagtgaaagctcttcctgctcccactgctccccagccctgtcccaacatggcatatgtgggaaagcggcaggcctgaagcaaacgatgttctggctgtggtaagcagtgtcacagcatccctagtcagtgatcacagagtcacctgggttaaaagtctaggtctcacagtcaaggcaaggattatgaaggtgacacggcaaaggtggtctgaaggtgctcataattttctcaaattcagtggggaagggaaggttggaatgatgtccttcaaggccac

SEQ ID NO: 80659 - DNA, 351 bp, Zea mays
cgagaacctgtccatcaacggccacggcaccatcgacgggcaaggagccctggtgtggagcaagaaccagtgccagcattcttacaattgcaagatcctcccgaatagcttggtgctggattttgtgacgaacgtccagatccgcggcatcacgctgctcaacagcaagttcttccacctcaacatcttcgagtgcaagaacgtgctgatcgacaaagtgacggtcaaggcccccggcgacagccccaacacggacggcatccacatcggcgactccagcaacgtgaccatcagcagcaccaccatcggcgtcggcgacgactgcatctccatcggccccgggagcaagat

SEQ ID NO: 80660 - DNA, 377 bp, Zea mays
aggcgcacacacacacaaccagatctcccccaaatccacccgtcggcacctccgcttcaagatgcagatctttgtgaaaaccctgactggcatgactatcaccctcgaggtggagtcgtctgacaccattgacaacgttaaggcgaagatccaggacaacgagggcatccccccagaccagcagcggctcatctttgctggcaaacagcttgaggacgggcgcacgcttgctgactacaacatccacaaggagagcaccctccaccttgtgctccgtctcaggggaggcatgcagatctttgtgaaaaccctgaccggcaagactatcaccctcgacgtggagtcctctgacaccattgacaacgtcaaaggccaag

SEQ ID NO: 80661 - DNA, 314 bp, Zea mays
gcgcagacacacacaaccagatgtcacccaaatccacccgtcggcacctccgcttcaagatgcatatctttgtaaaaaccctgactggcaagactatcaccctcgaggtggagtcgtctgacaccattgacaacgttaaagccaagatccaggacaatgagggcatccccccagatgaacagcggctcaactttgctggaaaacagcttgatgacggacgcacgcttgctgactacaacatccacaaggtgagcaccctccaccttgtgctccgatctcaagggacgcatgcagatctttgtgaaaaccctgac

SEQ ID NO: 80662 - DNA, 515 bp, Zea mays
  unsure (1)..(515): unsure at all n locations
ggggnnnngaagtgttactttgccggncccggtccaaaatacccgggtcganccacgcgccgggaaattacaaaaaacttcagcagtgatgccctcattggcgagggctcgtatgccaagtctattttggtgtgctgaaagatgggacgaaatctgcagtgaagaagcttgactccagcaaacagcctgatcaagaattccttgtgcaggtttcagctgtctcaagattgaagcatagaatgttgtccaactcgtcggatactgcgccgaagggagcacccgcgtccttgcttatagtatgcaactaggggatcattgcatgatatcctccatgggtaaaaagggtgtcaaagggnccagccagggccagtcctgtcatggatgcaaccgagctaggattgccgtatgtgctgtcggggtctcgaagtcctccacgagnaagggccgnttcctccgantgggccnaccgcngcnatcaagtccnngcaanatacngggtccttgnncnatggngg

SEQ ID NO: 80663 - DNA, 502 bp, Zea mays
  unsure (1)..(502): unsure at all n locations
ggnnnnnngaantgttacgcctgccgtaccgggtccanaattcccgggtcgacccacgctccgcgggacctcaagcctgatnaactttctgtatgccaacanatctgngaactcggnttcaangtcatcnactttggtcnctcngtgtgcttcannccaagtgacangttcagtgactcgttggattcccctaataaaatcgctcctgaagtgctgaanaggaactatggacaagaatagatatatggantgcacgagtcatactctacatcttgcaatgtggcgtcccatcgtttgggcaagagactgatgaaggcatagcacaagctatcatccggtccaacancgacntcccagagagcttggtcaancgtgtcagnaaatgcaaaagatcttgtgaggaaaatgcnntgtcaagcccctantgtcngttgactgccgaccaggttcaaaacatccctggatacaaaatccaangganctcccaaanttccacttggng

SEQ ID NO: 80664 - DNA, 279 bp, Zea mays
acttatccgtcctctgctgtgccacggctggcaccgccgtcgacaccgacctctccgagtaggtcatccaaggccgcgtctattgcgagatctgctgcgcctggttcgtgaccattgtcaccgagtacatcacggagcgcagtgtgacgcgcgagtgcacgcacatcagtacctggatgccccatcgctccagcgacggcgtgacagatcggaaaggtacgtgaacgatctcactcctagacacacaggatgacgacatctgcgaagtggtcctggcgg

SEQ ID NO: 80665 - DNA, 376 bp, Zea mays
  unsure (1)..(376): unsure at all n locations
aaaagaagtcgcctaattctttcgatcgaattaggcgccttcttcgtcncacgctccgtctttatttgtaatctgaagcttacaggaacatttgagtggatcatggacggattggtaggcctcttgaaagtccgggtggtgaggggcatcaaccttgcctaccgcgacgcaagaggcagcgatccgtatgtcgtcctacgacttggcaagaagaaacttaagacgagcgtgaagaagagatctgtgaaccccatctggcacgaggagctaactctgaccgtcacagatcccagcctagctctgaagctggaggtgttcgacaaggacacgttcagcanggacgacccgatgggggacgcggagatcgacgtggcgc

SEQ ID NO: 80666 - DNA, 407 bp, Zea mays
acggcaaggtggtttaaccacattgatgcgctcgtgaggctgagcggaattactgcagagggccaaggtgtgaaggttgaatcctcagcagttccttcagccccaactccagatgttgctgaagcacaggccccagttgctgaggaggacgacgacgatgatgttgacctttttggtgaggagaccgaagatgagaagaaggctgctgaagagcgtgctgcagctgccaaggcttctggcaagaagaaagaatctgggaagtcatcagttttacttgatgtgaagccatgggacgatgagactgacatggccaagctcgaggaagctgttaggagtgtccagatggaagggctgctctggggcgcatccaagcttgtcccagttggatatggtatcaagaagctgca

SEQ ID NO: 80667 - DNA, 362 bp, Zea mays
ggaacatccatcgatctccccccagcggcgaggagagccggcggccacaggaaggagaaatggcttccgcacacaacgctctccgggtgtttttcatcctagccgtggtatgtgccgtatgcacagcgaaaaggacaggagccaacaaggaagaatcggcggcagcccccggtggcgctgctggaggcagcggcgggacgttcgacatctccaagctcggcgcgaccagcgacggcaagacggactgcacaaaggcagtccaggacgcgtggacgtcagcgtgcgaagcgaccggaagcgccacggtggtgatccccaagggcgactacctggtcggccctctcaacttcactgggccatgc

SEQ ID NO: 80668 - DNA, 347 bp, Zea mays
ctgccatcctctccaacacgaagatggcgttcatcagcaatgtcgcagtgaaggcggcggccgtggccgcgctgctgctggtcgcagcggtgtcgcctgccgcgcgcgcggcggcggtggcggtggcgggaggggcgccgtcggtgccggcgggtccgctggacatcgcgcagctgggcgccaagggcgacggcaagtcggacagcaccccgatgatcctcaaggcgtggaagaacgcgtgcgaggcgacgggggtacagaagatcgtcatcccgccgggcaactacctgacgggcgggctggagctgaagggcccctgcaagtcctccatcatcatccgtctcgac

SEQ ID NO: 80669 - DNA, 406 bp, Zea mays
gtcgtcgtcgtcgtctcgttctgtggctcgtgatatccgcgcaaacaatgctagttgccgccgcggccggcgccaagcggcaggcgccggtgatgttcgtgttcggcgactcgacgctggacgtcgggaacaacaacttcctgtcgggggcggccgtccccagggccaacaagccccactacggcgtcgacttccccggcggccatcccaccggaaggttcagcaatggcgacaacacggctgacttcgtcgcgaagagcatggggttgaagagtagccctccgccgtatctgtcgcttgcacccaacggctccagccctctgctcgcgcagactgctctcaccactggtgtcagctacgcttccgcagacgctggcgtcctcgactcaaccaacgagggcaagtg

SEQ ID NO: 80670 - DNA, 405 bp, Zea mays
ggcaggtctactagcattagagcacaaagagcaccttgcttcgatttctgtatcatctcaccaggaagagctaagcaacattacatatgagctcaacatcatccatgaaagaacaaaagcaactaagatgcctatagagctacaacaagcaactgaagttgtggaacaagcaaaagctaaggctttgatggcccattatgaggtggcaaaagctagggaagatgcggatcaagttaagtcacaattaaatgtcattaaattgagactagaagcggcatcaagggagatacttgcagtgaatgcatctaaagaaattgcaaccacctcagcaaatgcattgcaagaatacaaagatgaagcacatatagagccccaagatgagcagataagaaataactatatgac

SEQ ID NO: 80671 - DNA, 347 bp, Zea mays
atcacgacaagatggcgtgcacaaacaatgcgatgagagccttgttcctcctggtcctcttctgcatcgtgcatggtgagaaggaagagtcaaagggcatcgatgcgaaagcgtccgggcctggtgggtccttcgacatcaccaagttgggcgcctccggcaatggcaagacagacagcacgaaggctgtgcaggaggcatgggcatcggcgtgcggcggcactgggaagcagacaatcctcatacccaagggtgacttccttgtcggacaactcaacttcacaggcccttgcaagggcgacgtgaccatccaggtggatggcaatctgctggcgaccacggaccta

SEQ ID NO: 80672 - DNA, 421 bp, Zea mays
ctcaccccgccttcacgcctccctcaccaaataaggtcccgcccttttccgacattcacaggggggacaggaaatcagcggccatggcctcgattccggcgacgaccttcgccgtcatcttatccgtcctcttctgtgccgcggctggcaccgccgtcgacaacgacctccccgactacgtcatccagggccgcgtctattgcgacacctgccgcgccgggttcgtgaccaatgtcaccgagtacatcgcgggcgccaaggtgaggctggagtgcaagcacttcggcaccggcaagctcgagcgctccatcgacggggtgaccgacgggaacggcacgtacacgatcgagctcaaagacagccacgaggaggacatctgcgaggtggtcttggtggaaagcccgcgcaaggactgcgacca

SEQ ID NO: 80673 - DNA, 405 bp, Zea mays
agccacgcgtccgctgaaagctgatagctgtcaaactcgagatgctggctcaactgcctcaacagctattattgtaggtgaccgtttgcttgttgcaaatgttggagattctagagccgttatttctaaaggaggacaggcgattgcggtttcaagggatcacaaacctgatcagacagatgagagacaaagaattgaggacgcagggggctttgttatgtgggctgggacatggcgagtgggtggtgttcttgctgtctctcgcgcatttggtgataaactcttgaagcagtatgttgtcgctgaccctgaaatcaaggaggaggtggtcgacagctcccttgaattcctcatcctggctagtgatggactctgggatgttgtcactaatgaggaagctgttgc

SEQ ID NO: 80674 - DNA, 415 bp, Zea mays
agaacgtcgtacgagaacctttctccctcctccacctttctccttttcttgccacggcaaaacaccttcgccggcgagagcatggcgatggcgtaccgtgtcctggaggtcaccctggtgtcggcaaatgacctcaagaaagtgtcgctcttctcccggactcgcatctacgccgtggcttccatctccggattcgacctccgcatcccttcccacagcacccaagcagaccacagcaacggctgcaacccctgctggaacgccgtggtacacttccccatcccggctgccgctgacacccgcggcctcgcactccacgtgaggctccgcgcccagcgtctatacctgggcgatcgcgacatcggcgaagtggtttgtgccatccacgacctcctggccggggccgacaagggtg

SEQ ID NO: 80675 - DNA, 426 bp, Zea mays
  unsure (1)..(426): unsure at all n locations
cggctgcctaggccgctacaaggacgagaaggacgtgagcgacatcacggtgcggaactgcgtgctcaagaacaccaccaacggcgtgcgcatcaagtcgtacgtggacgccgagtccgtgctgacggcctcccatctcaccttcgagaacatcaggatggaggaggtggccaaccccatcgtcatcgaccagtacttctgcccgcagaaggtatgccctggcaagcggagcaactcctcgcatgtctccgtcaaggacgtcacgttccgcaacatcaccggcacgtcgtccacgcccgaggccatcagcctgctctgctcggagacgcagccatgcagcggcgtctccctcatcgatgtcaacgtggagtacgccggcaagaacaacanaaccatggccgtctgcagcaacgccaaggggcacgc

SEQ ID NO: 80676 - DNA, 403 bp, Zea mays
gggaggcaaggacctggaggccgccgcgcccatgctcaccttcgaggcgggcaagacgtaccgcctccgcgtgtgcaacaccgggatcaaggcgtcgctcaacttccgcatccagggccacgacatgaagctcgtggagctggagggctcacataccctgcaggacgtgtacgactcgctggacgtgcacgtcggccactgcctctccgtgctggtcgacgccgaccaggcgcccggcgactactacatggtggcctccacgcggttcatccacgacgccaagtccgcctccgccgtcatccgctacgccggctccagcggcgccccgccggcgcccaacatgaccgagccaccggccggctgggcctggtccatcaaccaggccaggtcgttccgctggaac

SEQ ID NO: 80677 - DNA, 364 bp, Zea mays
  unsure (1)..(364): unsure at all n locations
gatttttgtgaatggtgaaggcgtgggtagatactgggtctcataccgaactcttgctggaactccttctcaagcactataccatattccgcgtcctttcttgaaatccaaggacaaccttttggttgtcttcgaggaggagatgggcaagccggatggcatcctcgtgcagacggtgacgagagacgacatatgtctgttcatctcggagcacaacccgggacagataaagacgtgggatacggatggtgacaaaatcaaactcattgcagaggatcacagcangcggggcaccttgatgtgcccccctgagaagacaatccaagaagtcgtctttgccagcttcggcaacccaagaggcatg

SEQ ID NO: 80678 - DNA, 402 bp, Zea mays
gggcacctacggctacgccgcgccggagtacgtagccaccgggcacctgacggtgatgagcgacgtgtacggcttcggcgtggtgctgctggagatgctggtgggacggcgcgcgctggagccgagccgggcggggggccgcgacggcagcctggtggactgggcgcggcccatccttatccggcccaaaaagttggagcggatcctggaccggcggatgggcgaggtctgctcggagatgggcctgcagcgcgtggcccgcctcgcgtacgactgcctcagccagaaccccaaggtccggccctccatggccagggtcgtcaccacgctcgaggcagtcctcgccgccggtgccggtgccgccgacgccccgccgcggtgagacgggaggttgatgtaggt

SEQ ID NO: 80679 - DNA, 406 bp, Zea mays
aaagaacgtcgtacgagaacctttctccctcctccacctttctccttttcttgccacggcaaaacaccttcgccggcgagagcatggcgatggcgtaccgtgtcctggaggtcaccctggtgtcggcaaatgacctcaagaaagtgtcgctcttctcccggactcgcatctacgccgtggcttccatctccggattcgacctccgcatcccttcccacagcacccaagcagaccacagcaacggctgcaacccctgctggaacgccgtggtacacttccccatcccggctgccgctgacacccgcggcctcgcactccacgtgaggctccgcgcccagcgtctatacctgggcgatcgcgacatcggcgaggtgtttgtgcccatcgacgacctcctggccggcgc

SEQ ID NO: 80680 - DNA, 404 bp, Zea mays
cccacgcgtccggtcgccttcaaccacttcggcaggggcctggtgcagcggatgccaaggtgccgctggggcttcttccacgttgtcaacaacgactacacgcactggctcatgtacgccattggcggcggcgacgcgccaaccatcatcagccagggcaaccgctacatagcaccaccaaacatcgccgccaaagtgatcaccaagcactacgcggaagaaggcgtgtggaagaactgggtgtggcacacggaggacgacctgttcatgaacggcgccatcttcaatccgtccggcggcgcccccaagcaggtcgacaccaacgagtgggtaaagcccaagccaggaacctacgttacaaggctcacccgcttctccggcacactgtcctgctgcacgggcaa

SEQ ID NO: 80681 - DNA, 355 bp, Zea mays
cgccaggtcttcttcggggcccaggtcgctgccgcctacatcaggggccccaagttttcctacttcctaggacccctcgccggcgacgagcaccaccagcttggttcactcccaacaaaatgtcagccaatgtgggtgaatcaactagcggtgtcagcagcagcgatgcagctggggggagctttgagtgcaacatatgcttcgagctgcctcaggagccaatagtgactctctgtggccacctcttctgctggccgtgcctttaccggtggctgcacattcacgcacactcgccagagtgcccagtgtgcaaggccctcgtggaggaggacaagctcgtccccctttatgggcg

SEQ ID NO: 80682 - DNA, 401 bp, Zea mays
acacccacgcgtccgcccgggccacgctgacgtgctctcccaagaagctcatccagcaggtggtgttcgcgagctacggcaaccccatgggcatctgcggcaactacaccatcggcagctgccacacgccgcgcgccaaggagctggtggagaaggcctgcctcggcaagcgcatctgcacgctgcccgtgtccgccgacgtctacggcggcgacgccaactgccctggcaccaccgccacgctcgccgtgcaggccaagtgctccaagaggtcgcccagagccgcgcagtaatttcggtagtcgtcggcttcggcctcggcttgttacctcccgtcatctttcattcttcattgctgatgctgctgctgtaccatgggaccatgatttgaccggagacat

SEQ ID NO: 80683 - DNA, 406 bp, Zea mays
ggctggttcgtggatggcggcgccacggcctctcctgctatcgctgctggtcgccgtgctagcggtggccgcggatgtcgccaacgccggccacgccaagcccctgacgcctggcgggcgcgtggtacaccacaaccacggcaagttcacggccgggccgtggaaacccgcccacgcgaccttctacggcgggcgggacgggtccggcaccacggcgggcgcgtgcgggtacaaggacacgcgcgcgcaggggtatggcgtgcagacggtggccgtgagcacggtgctgttcggcgacggcgcggcctgcggcgggtgctacgaggtgcgctgcgtggacagccccagcgggtgcaagcccagcgcggcggcgctggtggtgacggcgaccgacctgtgcccgccc

SEQ ID NO: 80684 - DNA, 404 bp, Zea mays
cccacgcgtccgcccacgcgtccgcggaagccgtggttggtgcgctgagaggggagctcgcagcaaccgctgtgaatgcgcccatggtcccagctgagatcctgtcagagctggctccatatgtttctctggccgagaagctcgggaggctggcggtgcagctcgtggccggcgagagcggcatcaagggcgtgaaggtggtgtacaccacagcgcgtggccccgacgacctggacactcggctcctccgcgcgatggtgaccaagggcctggtggagccggtgtccagcacgttcgtgaacctggtgaacgcggactacacggccaagcatcgcggcctccgcctcacggaggagcgcgtggcgcacgacagccccgcggcggaggcgccgctggagtccgtc

SEQ ID NO: 80685 - DNA, 386 bp, Zea mays
ccgcgcgccttctctttctctcccggacgtcgatcgtgttcttcagcacgggctagctagctccctccctcccagccatggcgacgccggacaacaaggggcacgggcatccgctgcccaagtttggggagtgggacgtgaagaatccggccacgtccgagggcttcaccgtcatattccagaaggcccgcgacgacaagaagaccaccaccggccctggggctgggaacgcgcgcgcaggcattccgccggccttcaggaacggcggcggcgacggcgggtacaggcccgacttcggcgacggcaaccagtacacgccgcccaaacggaagaagtgggccttctgtggctgctgaatcgaagctcgctgtgctgctgtgctgact

SEQ ID NO: 80686 - DNA, 367 bp, Zea mays
cccacgcgtccgaagggcccctgcaagtcctccatcatcatccgtctcgacggcaacctgctcggcaccggcgacctcagcgcgtaccaaaggaactggatcgagatcgagaacgtcgagaacctgtccatcaacggccacggcaccatcgacgggcagggagccctggtgtggagcaagaaccagtgccagcattcttacaattgcaagatcctcccgaatagcttggtgctggattttgtgacgaacgtccagatccgcggcatcacgctgctcaacagcaagttcttccacctcaacatcttcgagtgcaagaacgtgctgatcgacaaagtgacggtcaaggcccccggcgacagccccaaca

SEQ ID NO: 80687 - DNA, 381 bp, Zea mays
gtgcaagtccgtgcagatcgacaaagtgacggtcacggcccccggcgacagccccaacacggacggcatccacatcggcgactccatcaacgtgacgatcatcagcaccaccatcggcgtctgcgatgactgcatcgccatcggacccgggagcacgatgatccgcatctatggcgtcaagtgcggctcaggccacggcatcagcgtcagcagcctgtggcgctacaaggacgagaacgacgtggaagacgtacaggtgacggggtgcacgatcacctgcaccacgaacggcctgcgcatcaagtcgtacgacgactctatgtcgtcgctcaaggccagcgagttcctgtacgacggcatcacaatggacaatgtctccta

SEQ ID NO: 80688 - DNA, 415 bp, Zea mays
aggcgacctcatcctgtcgggcgccacgtccgtgttcggcgccgcgcccgtggaggtctccgtgaaggtggccggcatccactggcactacggcagccggtcccacgccccggagctcaccgcgggctactacaacacgcggcgccacgacgggtacctcaccatcgcgcgcctcctggcgcgccacggcgccgtgctcaacttcacctgcgtggagatgcgggaccacgagcagccgcaggaggcgcggtgcatgccggaggcgctggtccggcaggtgggcgccgcggcgcgcgccgccggggtgggcctcgcgggcgagaacgcgctgccgcggtacgacggcacggcgcacgaccaggtggtcaccacggccgccgagcgcgccgccgatgaacgggatggtggccttcac

SEQ ID NO: 80689 - DNA, 404 bp, Zea mays
  unsure (1)..(404): unsure at all n locations
atgcagtcatctcctccatcaccaccaccaagctcaacaacagccagctcgcgaaaataatgaagagccgcagcatggcatcatcggccgcgctcttggtgctagccctcgcgctagtggcggccaccgccccacaggtagcggaggcaaagaagaagagagcggcggagagcggcgaggcggcggaggcgaagaagatccaggacgacttctgctcgacgctgtgcgagggcaagaaggggacggacctggtcgtgtgcaaggagtcctgcgcgctctcccagcagtccaacctggtgctgtacggcaggatccagtgcaagggcaagtgcaccgagcagaagggcatcacggcgccggccatgaaggtctgccangaggagtgcgacaaggcgtacgtggtg

SEQ ID NO: 80690 - DNA, 422 bp, Zea mays
ggccgacccacgcgtccagtgaacccgaagaaggccatggaccctggcctcgtgtacaacatgacggccatgggctacgtgccgtacctgtgcgggctcaactacacggacgacaaggtgagcacgatcatctacccggagccgccggtgtcgtgcgccaagctgtcaaggctcgaacaggacgacctcaactacccgtccatcaccgtcatcctcaaccagccgcccttcaccgcgacggccaaccgctccgtcacgaacgtcggcgcggccagctcgacgtacaccgtggaggtgaacgtgccggcgtcggtgacagtggaggtgaacccgccgaagctgactttcaaggcgctggaagaggtcctgaactactctgtcacaatcaagtcggccaacggccaggcgcttaccggccctgt

SEQ ID NO: 80691 - DNA, 109 bp, Zea mays
aggtaggcgtggctcagtttatgtgatactgctagcgatggatgatgatgatctgcgtgtaattgaattaaagaattgtgctgatctttctacaacactgttccacatc

SEQ ID NO: 80692 - DNA, 402 bp, Zea mays
ccacgcgtccgcagatggccatggagggtcgtcgtcgtcgtcgtctcgttctgtggctcgtgatatccgcgcaaacaatgctagttgccgccgcggccggcgccaagcggcaggcgccggtgatgttcgtgttcggcgactcgacgctggacgtcgggaacaacaacttcctgtcgggggcggccgtccccagggccaacaagccccactacggcgtcgacttccccggcggccatcccaccggaaggttcagcaatggcgacaacacggctgacttcgtcgcgaagagcatggggttgaagagtagccctccgccgtatctgtcgcttgcacccaacggctccagccctctgctcgcgcagactgctctcaccactggtgtcagctacgcttccgcagacg

SEQ ID NO: 80693 - DNA, 385 bp, Zea mays
atggccatggagggtcgtcgtcgtcgtcgtctcgttctgtggctcgtgatatccgcgcaaacaatgctagttgccgccgcggccggcgccaagcggcaggcgccggtgatgttcgtgttcggcgactcgacgctggacgtcgggaacaacaacttcctgtcgggggcggccgtccccagggccaacaagccccactacggcgtcgacttccccggcggccatcccaccggaaggttcagcaatggcgacaacacggctgacttcgtcgcgaagagcatggggttgaagagtaaccctccgccgtatctgtcgcttgcacccaacggctccagccctctgctcacgcagactgctctcaacactggtgtcagctacgcttccgcag

SEQ ID NO: 80694 - DNA, 426 bp, Zea mays
tcctgggccgacacacgcgtctacacatgcgtctgccaacgcgtccggtgcacaaacaatgcgatgagagccttgttcctcctggtcctcttctgcatcgtgcatggtgagaaggaagagtcaaagggcatcgatgcgaaagcgtccgggcctggtgggtccttcgacatcaccaagttgggcgcctccggcaatggcaagacagacagcacgaaggctgtgcaggaggcatgggcatcggcgtgcgccggcactgggaagcagacaatcctcatacccaagggcgacttccttgtcggacaactcaactttacaggcccttgcaagggcgacgtgaccatccaggtggatggcaatctgctggcgaccacggacctaagccagtacaaggaccatggtaattggatcgagattctacgcgtggat

SEQ ID NO: 80695 - DNA, 393 bp, Zea mays
gcccgacgcgcggtgggagaaagacgacatgcccgtgggccgcgtcatgggcgacatgctgatcctccccaccggcgacctgctgctgctgagcggcgccgccaagggctgctccggctggggcttcgggcggcagccggtgctgaccccggtcctgtactcgccgctgaaggtgcatggcccgctgttcctggcgctggcgtcgtcgaccatcgcgcgcatgtaccactccaccagcgccgtgctgccctacgccacggtgctggtggccggcggcatcacgaacgcggcgtacaacttcatcggcgtggacttccccaccgaggtgcgcgtggagcggttctccccgccgtacctcagcgatggggccgccggcaaccgcccggtgctgga

SEQ ID NO: 80696 - DNA, 373 bp, Zea mays
cccacgcgtccgcttccgcatccagggccactacatgaagctggtcgagctggagggctcccacaccctgcagaacacgtacgactcgctcgacgtccacgtcggccactgcctctccgtgctcgtcgacgccgaccagaagcccggcgactactacatggtggcctccacgcggttcatccacgacgccaagtccgcgtccgccgtcatccgctacgccggctccagcgccccgccggcgccgaacatgaccgagccaccggccggctgggcctggtccatcaaccaggccaggtcgttccgctggaacctgacggccagcgccgcgcggcccaacccgcagggctcctaccactacggccagatcaacatc

SEQ ID NO: 80697 - DNA, 405 bp, Zea mays
ccctccctccctcacacaaataataaggaaaggtcccgcccttttcctccgacatccacaggggggaggggaaaacacgtgcattcacccggcggcaataatggcctcggttccggctccggcgacgacgaccgccgccgtaatcctatgcctatgcgtcgtcctctcctgtgccgcggctgacgaccccaacctccccgactacgtcatccagggccgcgtgtactgcgacacctgccgcgccgggttcgtgaccaacgtcaccgagtacatcgcgggcgccaaggtgaggctggagtgcaggcacttcggcaccggcaagctcgagcgcgccatcgacggggtcaccgacgcgaccggcacctacacgatcgagctcaaggacagccacgaggaggacatctg

SEQ ID NO: 80698 - DNA, 388 bp, Zea mays
ccgcttcgtgcgccgcaagaacgtgctcctcagcgtcgactccgacaagacggacgaggcggagctgcaggccgccgtggagcgcgcggcgcgcctgctggcgccctacgacgcggccatcgccgagtacacgagccaggcggacgccaccaccatcccgggccactacgtcgtgtactgggagctcatggtgagggagggcggggcgtcgcccgacgccgccgtcttcgagcgctgctgcctggagatggaggaggccctgaacgcggtgtacaggcagggccgcaacggggacgccatcaggccgctggagatccgggtggtgcgcggcggcacgttcgaggaggtgatggactacgccatctcgcgcggcgcctctatcaaccag

SEQ ID NO: 80699 - DNA, 399 bp, Zea mays
gtgggcgcggcgaagggcatcgagtacctgcacgaggtggccaacccgccggtgatctaccgcgacctcaaggcgtccaacatcctccttgacagggaattcaacgccaagctctccgacttcgggctcgccaagctgggccccatgggcgaccagagccacgtcagcaccagggtcatgggcacgtacggctactgcgcccccgagtacgccatgaccggcaagctcaccaagatgtcggacatctacagcttcggcgtcgtgctgctcgagctcatcaccggccgccgcgccatcgacgtcacgaggccgtccgaggagcaggtcctcgttcactgggcaacgcctctgctgagagacaggcggaggttcatgaagctggccgacccgttgctgggc

SEQ ID NO: 80700 - DNA, 402 bp, Zea mays
acggacgcgtgggcaagcagcagccaatggcttctcgttcgcccaccattgccctggtcctcatccttgcctgcttctcctcgccggcggcggccttcaacatcaccaggctactcggacaattctccgacttcacaacctttaacaacctcctgtctcagacgaagctcgcggaggatatcaaccgccggcagaccatcaccgtgctcgccgtggacaacggcgccgccggtggcatctcctccctcccatcagacgtccagcggaaggtgctctccatgcacgttgtcctcgactactacgacaccgccaagctggaggccatcaagaaccactccgccctgctgacgactatgttccagtcctccggccaggccaccgaccgcatgggcttcctcaact

SEQ ID NO: 80701 - DNA, 415 bp, Zea mays
  unsure (1)..(415): unsure at all n locations
ggctgacatgtccaaggtgctgcaggtggagatctcagccggcgccgccgaggaggacgccgtggctgcgactgcgactgcgcctgcgccggcgtcggcgtcggcgtcctttgggctcttctccggggagttcctccgccggcacgggctgcacctcctgggcacgtcctcgacgtggttcctgctggacatcgccttctactcgcagaacctgttccagaaggacatcttcagcgcggtggggtggatccccaaggcggcgacgatgaacgcgctggaggagctgttcagcatcgcgcgggcgcagtccctgatcgcgctgtgcggcacggtgcccggctactggttcacggtggcgctgatcgacgtgttggggcggttcgcgatccangtgacggggttcctgatgatgacg

SEQ ID NO: 80702 - DNA, 410 bp, Zea mays
cccacgcgtccggcaggatctaagcaaagacttgatttagttatggacggattggtaggcctcttgaaagttcgcgtggtccggggtatcaaccttgcctaccgcgacgcaagaggcagcgatccgtatgtcgtcctacggcttggcaagaagaaactgaagacaagcgtgaagaagagatccgtgaaccccatatggcaagaggagctaactctgaccgtcacagatcccagccaaccactgaagctggaggtgttcgacaaggacaccttcagcagagacgaccccatgggagacgcggaggtggacgtggcgccactaatggaggcggtgagcatgaacccgcgggaggagagtctgaggaacggcgccatcatcaggtccgagcggccgagcgccaggaactgcct

SEQ ID NO: 80703 - DNA, 392 bp, Zea mays
cccacgcgtccgctcatacccaagggtgacttccttgtcggacaactcaacttcacaggcccttgcaagggcgacgtgaccatccacgtggatggcaatctgctggcgaccacggacctaacccagtacaaggaccatggtaattggatcgagattctacgtgtggataacctggtcatcaccggcaacggaaaccttgacgggcagggcccagccgtgtggagcaagaactcctgcatcaagaagtacgactgcaagatccttcccaactcgctggtgatggacttcgtgaacaacggggaggtgtccggggtcacgctgctcaactccaagttcttccacatgaacatgtaccggtgcaaggacatgctgatcaacgacctgaccgtgac

SEQ ID NO: 80704 - DNA, 395 bp, Zea mays
gcaaacctgcagtcatctcctccaccaccaccaccaagctcaacaacagccagctcgcgaaaataatgaagagccgcagcatggcatcatcggccgcgctcttggtgctagccctcgcgctagtggcggccaccgccccacaggtagcggaggcaaagaagaagagagcggcggagagcggcgaggcggcggaggcgaagaagatccaggacgacttctgctcgacgctgtgcgagggcaagaaggggacggacctggtcgtgtgcaaggagtcctgcgcgctctcccagcagtccaacctggtgctgtacggcaggatccagtgcaagggcaagtgcaccgagcagaagggcatcacggcgccggccatgaaggtctgccaggaggagtgcgac

SEQ ID NO: 80705 - DNA, 401 bp, Zea mays
aacctgctgtccaactactcggccgccatcacggatctgcactccatcggcgcgaggaagttcgccatcatcaacgtggggctggtggggtgcgtgccggtggtgcgggtgctggacgcggacggcgggtgcgccgaggggctcaacaagctggctgaagccttcgacgtcgcgctggggccgctcctcgccggcctcgccgacaagctgccggggctgacctactcgctggccaactccttccgcctgacgcaggacgccttcgcggacccgaaggcgtcagggtacagcgacgtggccagcgcctgctgcgggagcgggcggctgctggcggaggcggactgcctgcccaactccaccgtgtgcagcgaccacgacagccacgtgttctgggaacgcta

SEQ ID NO: 80706 - DNA, 409 bp, Zea mays
gccatcgccatcgcgcaccgcctccccgtgtcccctccttctcgcccggcaccgtcgagctcggctgtggaaacagaacaaacccatcaaccatggcgaactcggcgtcggggatggccgtgagcgacgagtgcaagctcaagttccaggagctcaagtcgaagcgaagcttccggttcatcacgttcaagatcaacgagcagacgcagcaggtggtggtggacaggctggggcagccgggcgacacctacgacgacttcaccggctccatgcccgagagcgagtgccgctacgccgtcttcgacttcgacttcaccaccgacgagaactgccagaagagcaagatcttgttcatctcctggtccccggacacctcgagggtcaggagcaagatgctgtacgccagctc

SEQ ID NO: 80707 - DNA, 401 bp, Zea mays
tcgaataacacaggtgagcgcgacgatgggatccctcgttaataacatcatggtcgtgggcgccgtccttgcggcgctcgtcgccggcgggtcgtgcgggcccccgaaggtgccacccggccccaacatcaccaccaactacaacggcaagtggctcaccgctagggccacctggtacggtcagcccaacggtgccggcgctcctgacaacggcggtgcgtgcgggatcaagaacgtgaacctgccaccctacagcggcatgacggcgtgcggcaacgtccccatcttcaaggacggcaagggctgcggctcatgctacgaggtgagatgcaaggaaaaacctgagtgctcgggcaatccagtcacggtgtacatcactgacatgaactacgagcctatcg

SEQ ID NO: 80708 - DNA, 405 bp, Zea mays
  unsure (1)..(405): unsure at all n locations
cgccatcgagcacccgtggcgcaacatcctggagcgcaggtaccggccgcagctgacggtggcagcgctgatccccttcttccagcagctgacgggcatcaacgtgatcatgttctacgcgccggtgctgttcctgaccatcggcttcggcgacgacgcgtcgctgatggcggccgtcatcacggggctggtcaacatgttcgccaccgtggtgtccatcgtgtgcgtggaccgcctgggccggcgcgcgctgttcctgcagggcggtacgcagatgttcgtctcccagatcgtggtgggcacgctgatcgcgctccagttcggcaccgccggcgtgggcgagatgtcncgctccaacgcctggctgctggtgctcttcatctgcctctacgtcgccgggttcgc

SEQ ID NO: 80709 - DNA, 414 bp, Zea mays
cccacgcgtccgcccacgcgtcagggcgacggtgacattgtggcagtggacgtcaaggataagggctccgacacgtacgagcctctgaagcactcctggggcgccatctggatgaaggacagcgacaaaccgcttaagggacccctcaccgtccgcctcactaccgagggaggcaccaagtccgtctacgacgatgtcatccctgccaactggaatgccaacaccgcctacaccgccaaataattaactttagtgctgacaatactttaagccgacctatgctacctatactagattgggttggatcccaagcaatgcattacacatgcatgcattggaccgtgatatctatttgctaccactaccctattacgacagtgatgctggcgccaacaatgatggtgtcatcctcct

SEQ ID NO: 80710 - DNA, 386 bp, Zea mays
cttcttcgccgtcggcatgggcccgggcaaatggacgccagcgtcccggagcacgtacaacctcctggacacggtgagccggcacacgatccaggtgtaccctaggtcgtggacggcggtgatgatgacgttcgacaacgcgggcatgtggagcatccggtccaacatctgggagaggcagtacctcggcgagcagctgtacgtgagcgtcatctcgccggagcggtcgctcagggacgagtacaacatgccggagactagcctccgctgcggcaaggtcgtcggactgccaatgccgccgtcctacctctccgtctagagcatgcacgcatctcgctcggtttccccttccttccatcacgtgcgcacggtgctgtatacacaat

SEQ ID NO: 80711 - DNA, 398 bp, Zea mays
aaaccctgaccggcaagactatcaccctcgaggtggagtcctctgacaccattgacaacgtcaaggccaagatccaggacaaggagggcatccctccagaccagcagcggctcatctttgctgggaagcagcttgaggacgggcgcacgcttgccgactacaacatccagaaggagagcaccctccacttggtgctgcgcctcaggggaggcatgcagatcttcgtgaagaccctgaccggcaagactatcaccctcgaggtggagtcttcagacaccatcgacaacgtcaaggccaagatccaggacaaggagggcattcccccagaccagcagcggctcatctttgctggaaagcagcttgaggacgggcgcacgcttgccgactacaacatccag

SEQ ID NO: 80712 - DNA, 399 bp, Zea mays
ccacgcgtccgggcgccctgtatgaccacatggggctgcactacttcaagtcctgcaccatcaggggcaccatcgacttcatctttggctctgccaagtccttttacgaggactgcgccattgtttccgtgaacaacatggaggagatcatgaccttgcctgtggcaccacctcaacttgacattcacgacaatccaatcaaggttgccccatggaagggaggcttctccttcaagacatgtaccatcaccggggaagggcaacatatcttcctcggaaggatgggcacgccttccatctactcctacacccagattgctaaggaggttgtgcccataatctacgacaaagggaacatcttcatgcccagtaatatgactggtagacgctgtgccactt

SEQ ID NO: 80713 - DNA, 402 bp, Zea mays
caaagtcaaaggacaacgatgcaaaagcgtccgggcccggtgggtccttcgacatcaccaagttgggcgcctccggcaatggcaagacggatagcacgaaggctgtgcaggaggcgtgggcatcagcgtgcggcggcaccgggaagcagacgatcctcatccccaagggcgacttcctcgtcggaccactcaacttcacaggcccatgcaagggcgacgtgaccatccaggtgaatggcaatctgctggcgaccacggacctaagccagtacaaggatcatggtaattggatcgagattctacgcgtggacaaccttgtcatcaccggcaagggaaagctcgacgggcaggggccagccgtgtggagcaagaactcctgcgtcaagaagtacgactgcaaga

SEQ ID NO: 80714 - DNA, 399 bp, Zea mays
gatcacaacaagatggcatgtatagacaatgcaatgagagccttgttccttctagcgctcttctgcaccgtgcatggtgagaaggcaaagtcaaaggacaacgattcaaaagcgtccgggcccggtgggtccttcgacatcaccaagttgggcgcctctggcaatggcaagacggatagcacgaaggctgtgcaggaggcgtgggcatcggcgtgcggcggcaccgggaagcagacgatcctcatccccaagggcgacttcctcgtcggaccactcaacttcacaggcccatgcaagggcgacgtgaccatccaggtgaatggcaatctgctggcgaccacggacctaagccagtacaaggatcatggtaattggatcgagattctacgcgtggacaac

SEQ ID NO: 80715 - DNA, 399 bp, Zea mays
ctctctcttcttcttcttcaatcctccctccccgcgccggagttggaggagggagaggggacaagctttccggcgccgacgccgacgcggacccggcgccgacacgatccggtggatcaagtgcatcacacctttagggaggccccttggacagcagtttgtgctgcaaattctatatagctctgtcgcagcatggcctcggtgggcgtggcacgctcttctttgggatttcagaatggcacaagttctagcagtgacccagatcgtcttcccaacgagttgggcagtatgagcataacggacgacaaggacgttgaagatattgtagtcaatggcaatggggcggagcctggtcatatcatagtgaccagcattgatgggagaaatgggcaggcaaag

SEQ ID NO: 80716 - DNA, 413 bp, Zea mays
cccacgcgtccgcccacgcgtccggtcccattctgatcctgtggacagtgggttaataatagtaataaaaatgataatccacctcctctgcttcccaggcccagcagcaggagctcccccgtctccgtcctcctccgcctctgtcagggtcccggtcggacttcctcacgaccgccgcgccaaatcccgtctcgttcctccgttccgctgcgcatcctcaggaatggaacttggcgccaccactgccctgtaccctctgcaccgctgcaaaaccatttacctggtcaggcatgcccagggcattcacaacgtcgcaggcgagaaggacttcggcgcctacatgtcacatgaactgttcgatgctcagctcaaccctttgggttggaaccaagtcgatggtctgcgggagcatg

SEQ ID NO: 80717 - DNA, 412 bp, Zea mays
gttcgtggatgccggcgccacagcctctcctgctgtcgctgctggtcgccgtgctagcggtggccgccgatgtcgccaacgccggccacgccaagcccctgacgcctggcgggcgcgtggtacaccacaaccacggcaagttcacggccgggccgtggaaacccgcccacgcgaccttctacggcgggcgggacgggtccggcaccacggcgggcgcgtgcgggtacaaggacacgcgcgcgcaggggtatggcgtgcagacggtggccgtgagcacggtgctgttcggtgacggcgcggcctgcggcgggtgctacgaggtgcgctgcgtggacagccctagcgggtgcaagcccagcgcggcgacactggtggtgacggcgaccgacctgtgcccgcccaacgaccagca

SEQ ID NO: 80718 - DNA, 388 bp, Zea mays
ctcgtctcaccctccctccctcacacaaataataaggaaaggtcccgcccttttcctccgacatccacaaggggggaggggaaaacacgtacattcacccggcggcaataatggcctcggttccggctccggcgacgacgaccgccgccgtcatcctatgcctatgcgtcgtcctctcctgtgccgcggctgacgacccgaacctccccgactacgtcatccagggccgcgtgtactgcgacacctgccgcgccgggttcgtgaccaacgtcaccgagtacatcgcgggcgccaaggtgaggctggagtgcaagcacttcggcaccggcaagctcgagcgccccatcgacggggtcaccgacgcgaacggcacctacacgatcgagct

SEQ ID NO: 80719 - DNA, 401 bp, Zea mays
acggacgcttgggcaactgcgaggtgctgggcaccgtggacttcatcttcggcaactcggcggcgctgttccagaactgcctcatgacggtgcgcaagcccggggacagccagtccaacatggtgacggcgcatgggcggacggaccccaacatgcccacgggcatcgtgctccagggctgccgcatcgtgccggagcaggcgctcttccccgaccgcctccagatcgccacctacctcggccggccgtggaaggagtacgcgaggacggtggtgatggagagcaccatcggcgacctcatcaggccggaagggtgggcggagtggatgggcgacctcggcctcaagacgctctactacgccgagtacgccaacaccggcccgggcgccggcaccagcaag

SEQ ID NO: 80720 - DNA, 404 bp, Zea mays
cggcgacttcgatgaatactggcagcagcgcaagctcatggccgacgccgcggctgaggccacgtacaagcatgacccggtcgaggtcgccaaccaacttaaccgtgcagtccacagatccgtcgagaaggaggacattggcacgaggcgggagatgatggggacgacgacgaggaagtctaagttcagcgggccgtgcagggcgacgaacccgatcgaccggtgctggcggtgccggcaggactgggcgacggaccggaagcgcctggcgcggtgcgccaaggggttcgggcgcaacaccaccggcgggctggccggcaagttctacgtggtgacggacggcaccgacgacgacgtggtgaacccgcgccccggcacgctccggtggggcgtcatccagatcg

SEQ ID NO: 80721 - DNA, 405 bp, Zea mays
acggtatcaacatcattgcgctcgtagtcggtgtgtcccgcgccgtgtacgcggagatcccgcagtacagcaagcttctgggcggcgggttcttcagcttctgggtgctggcgcactactacccgttcgccaaggggctcatgggtcgccgcggacgcacgccgaccctcgtctacgtctgggcgggacttatctccatcaccgtctccctgctttggatcaccatcagcccgcccgacgacaggatcacccagggcggcgtcgatgtgtgatcatccaagcttcaccaacgagagattaccaaacaaagaatagctgaaattttctggacgatttgcctagtttttgtactgaacactatgtctacttacgcgtactaattaattactgaccaatagtgtctat

SEQ ID NO: 80722 - DNA, 401 bp, Zea mays
agccttcgagggaccatccgggagtacacgcattacagcgagtacaagaactgggtgtggaagtcgcaggacgacctgttcctcaacggcgccttcttcaaccagtccggcggccagaacgagcgcatgtacgacaggctcgacctcatccaggccaagggcggccagtacgccgagtcgctcaccatgtacgccggcgcgctcaactgccgcgtcggcaggaagtgctagtgcgtgtgcagctctaggctgcagctttcatcattggcgatcgatcgtaacaatgcaaagttgtgttgtatataactcttgtgtttggaatgccgcccgtaattaatggtcaactctaacactgcttgcctttgcctgccggccagcaaaaagaaggctcgagcaacgga

SEQ ID NO: 80723 - DNA, 465 bp, Zea mays
accggtcctagttcccgggtccaaccaagccttcagagcgccccccattcaaattcaaattcaaggggcttgtcatggcatccaaacttatcctcaaggaattaaaggacttgcaaaaggaccctccaacatcatgcattgcaggtcctgctggtgaggatatgttccactggcaggcaaccatcatgggtcctcctgatagtccatatgctggaggtgttttcttggtgaacattcatttcccgccagactaccccttcaagcctccaaaggtatcttttaagacgaaggtcttccatccaaacatcaatagtaatggaagcatatgtcttgacattcttaaggagcagtggagccctgctttgacaatctctaaggttttgctttctatctgctccctgcttactgattccaacccagacgaccctcttgtccctgaaattgctcaaatgtacaagacggatc

SEQ ID NO: 80724 - DNA, 211 bp, Zea mays
ttgaattcccttcgattcatccggcacagcgggctatggaccttcagcagcaagctaattaagttggcagcatgcaccgctaaccttatatactactgagacttccaaattctagtatatgtaatccttttgttcgggttcatgatcgaattccaaagagtggaaaacaagcaaaaggttaaatatacatgccatttttggaggcattttt

SEQ ID NO: 80725 - DNA, 387 bp, Zea mays
gcgaaaataatgaagagccgcagcatggcatcatcggccgcgctcttggtgctagccctcgcgctagtggcggccaccgccccacaggtagcggaggcaaagaagaagagagcggcggagagcggcgaggcggcggaggcgaagaagatccaggacgacttctgctcgacgctgtgcgagggcaagaaggggacggacctggtcgtgtgcaaggagtcctgcgcgctctcccagcagtccaacctggtgctgtacggcaggatccagtgcaagggcaagtgcaccgagcagaagggcatcacggcgccggccatgaaggtctgccaggaggagtgcgacaaggcgtacgtggtgaaggcggccgaagtcaccaaggcctgcagcgtc

SEQ ID NO: 80726 - DNA, 382 bp, Zea mays
aggacgcgtgggcggacgcgtgggcggacgcgtgggtgagaatgttgtccaactcgtcggatactgcgccgaagggagcacccgcgtccttgcttatgagtatgcaactaggggatcattgcatgatatcctccatggtaaaaagggtgtcaaaggagcccagccagggccagtcctgtcatggatgcagcgagctaggattgccgtatgtgctgctcggggtctcgagttcctccacgagaaggccgatcctcgagtggtccaccgcgacatcaagtcaagcaacatactgctctttgaccatgatgttgcgaagatcggggacttcgacatctcaaaccaagccccctgaaaatgctgcgcggcctcaactctactcgcg

SEQ ID NO: 80727 - DNA, 360 bp, Zea mays
acgacaactgccgcgccgggttcgagacaaacgtgtcccacgccatccaaggcgcgacggtggagatggagtgccgccacttcgagtcgcagcaggtccacgacaaggcggaggcgacgacgggccccggcggctggtacaggatggagatcagcggcgaccaccaggacgagatctgcgacgtgcgcctgctcaagagccccgaggcggactgcgccgagatcgaccactcccgcgaccgctgccgcgtcccgctcacccgcaacgacggcatcaagcagagcggcgtccgctacgccaaccccatcgccttcctccgcaaggagccgctccccaactgcggcgagctgctccgcgcct

SEQ ID NO: 80728 - DNA, 412 bp, Zea mays
aaccgactggttcgtggatggctgcgccacgacctctcctgctgtcgctgctggtcgccgtgctagcggtggccgccgatgtcgccaacgccggccacgccaagcccctgacgcctggcgggcgtgtggtacacgacaaccacggcaagttcacggccgggccgtggaaacccgcccacgcgaccttctacggcgggcgggacgggtccggcaccacggcgggcgcgtgcgggtacaaggacacgcgcacgcaggggtacggcgtgcagacggtggccgtgagcacggtgctgttcggtgacggcacggcctgcggcgggtgctacgaggtgcggtgcgtggacagccctagcgggtgcaagcccgacgcggcggcactggtggtgacggtgacggacctgtgcccggccaa

SEQ ID NO: 80729 - DNA, 397 bp, Zea mays
  unsure (1)..(397): unsure at all n locations
gcacgaagagtgatgtctacagctttggagttgtgctgctggagcttttaaccggtcgcaagccagttgaccacacactgccccgtggccagcagagccttgtgacatgggctacaccgaggcttagtgaagacaaggtgaggcaatgcgtcgatccaaggctcggagacgaataccctccaaaggctgtagccaagatggctgctgtggccgccctctgcgtgcaatacgagggtgaattccgtcccaacatgagcatcgtcgtcaaggctctgaaccccttgctgcacagccggtctggcaaccgccctactgcctcgtcggcctcccacgctgccgagcgatccggactgtgatttctcatcgctgcgacaactttggggtcacganaaaggac

SEQ ID NO: 80730 - DNA, 378 bp, Zea mays
ggcacgtctcactctcactccctcacacagatattaaggaaaggtcccgcccttttctcccgacatccataaggggggaggggaaaatacgtacattcacccggctgcaataatggactcggttccggctccggcgacgactaccgcagccgtcatcttatgcgtatgcgtcgtcctctcctgtgccgcagctgactacccgagcctctccgactacgtcatccatggccgcgtgtactgcgacacctgccgcgccgggttcgtgaccaacgtcaccgagtacatcgctggcgccaaggtgaggctggagtgcaagcacttcggcaccggcaagctcgagcgcgccatcgacagggtcaccgacacgaccggcaacta

SEQ ID NO: 80731 - DNA, 395 bp, Zea mays
ctcgcgggccgacacacgcctctaggctgggtcgtggtagccggcgccacagcctctcctgctgtcgctgctggtcgccgtgctagcggtggccgccgatgtacgctaacgccggccaagccaatcccctgaggcttggcgggcgcgtggtacaccacagctaaggtaagttcaccgccgggccgtggaaacacgcccacgcgaccttctaccgtgggcgggacgggtccggcatcacggctggctcttgcggctacaaggatactcgcacgcaggggtatggcgtgcacactgtggccgtcagcacggtgctgtacggtgacggcacggcatgcagatggtgctacgacgtatgctgcgtgaacagccctagcgggtgcaagcccaccggagca

SEQ ID NO: 80732 - DNA, 425 bp, Zea mays
ctgaaatggtgggagaaaaatgctggaccaaatatgattgacatccactccacagtggagttcttggatgcacttagagatgctggagacaatcttgttattgttgagttctacggaacctggtgtgcttcatgcagggctctctttccaaggctctgccggacagctttggagaaccctgatatattgtttctaaaagtgaattttgatgaaaacaaacctatgtgcaaacgactgaatgtcaaagtccttcctttcttccatttttatcgtggagctgacgggctacttgaggctttctcctgttccttagctaagtttcagaagctgaaggatgccattgcaatgcacaacactgctcgttgcagcattggtccacctgttggagtttgcgaatgttgacttgctggataacgcgagccctc

SEQ ID NO: 80733 - DNA, 374 bp, Zea mays
aaaaaacattgatgtttattcacatagccccagaaccagatgctattagtgagtccataagtactttgaagttcgccgagcgtgtttccactattgagcttggagcagccaagtcaagcaaggaaggaggaggaggaggaggaggagaagccagagagctcaaagaacagattgcttgcctcagggcagcattagctaggaaagatggagatcatgagagcatacgaagcactcaatcgagcccagacatatatagaatgggaacgggtaatgcatcacctgcgtccaggcacccaatagaagatgggatcatagagaacgactcagcattgggagatttggctgaacactcacagttcgggagcagcaattcc

SEQ ID NO: 80734 - DNA, 375 bp, Zea mays
aggacgcgtgggcgccagcaccaaccgcggatgcaaggcaattgccgagtccggtggggcctccagcgtcgtgctcaaggacgggatgacgcgagccccggccgtccggttcccatctgcacgccgcgccgccgagctcaaggcctttttggaggacccagcgaactttgacaccctggctatggtgtttaacaggtcgagcagatttggaaggctgcagggagtgaagtgtgcgattgcagggaggaacctttacatgaggttcagctgcagcacaggggatgccatggggatgaacatggtctccaaaggtgtacagaacgtgctggactacctccaggctgacttccctgatatggatgtcatcagcatatc

SEQ ID NO: 80735 - DNA, 348 bp, Zea mays
  unsure (1)..(348): unsure at all n locations
accacgcgtccggaatactcccatgacgccactaacaaattcaacatttaccctgagcaaatcccttcctggcttgttgactggattcctgagaaaggaggttaccttatagggaatctgcagccagctcacatggattttaggttcttctctcttggcaacctttgggccatagcttcgtctctaactactccaaaacaagctgagggaattcttagccttattgaagaaaaatgggatgatcttgtagcaaacatgcccctgaagatatgcttccctgcaatggaagatgatgaatggcgcattattactggcagtgattctacnaatgacccatggtcatatcat

SEQ ID NO: 80736 - DNA, 366 bp, Zea mays
tcccgggtccatccaagcccccaaaattaatccttgtaaggacggcaaggggccggacacgccgctggaaaaagcggtctccggccggctgaagcaattcagggccatgaaccaattcaagaaggctgcactgcggttcatcgcggggtgcctgtcagaagacgacatccgtgggctcaaggagatgttcaagagcatggactccgacagcagcggcaccatcaccgtggactagctgccgacacggctggccaacaaggtcaccaagctgatcgatgccgaactccagcagctcatcgaagctgcctactccaacgggaacgggacgatcgactacgaggagttcatcactgccacgatgcacat

SEQ ID NO: 80737 - DNA, 229 bp, Zea mays
ttgaattcccttcgattcatccggcacagcgggctatggaccttcagcagcaagctaattaagttggcagcatgcaccgctaaccttatatactactgagacttccaaattctagtatatgtaatccttttgttcgggttcatgatcgaattccaaagagtggaaaacaagcagaaggttagatatacatgccatttttggaggcatttttaaaaaaagcaaaacaaaa

SEQ ID NO: 80738 - DNA, 403 bp, Zea mays
gcgacgtgccccccgccgtgaacggtcccctccatgtcatccccaatgtcatcaccgccgagttccgcaccttcatcgagatcgtcttcgagaaccccgagaagagcatagactccctccacgtcgatggctacgccttcttcggcgtcgggatgggccccgggaagtggtcgccggaggtgaggaagacgtacaacctgctggacacggtgagccggcacacgatccaggtgtacccgcggtcatggacggcaatcatgctgacgttcgacaacgcgggcatgtggagcgtgcattccaacatctgggagcggtactacctcggggagcagttctacatcagcgtcgtctcgccggcgcgatcactgcgcgacgagtacaacatgcccgacaacggcctccg

SEQ ID NO: 80739 - DNA, 385 bp, Zea mays
gcacgggcgcaccgaccccaacatgaagtccgggctcgtcatccagaactgccgcctggtgcccgaccagaagctgttcccggaccgcttcaagatcccctcgtacctgggccgcccctggaaggagttctcgcgcctcgtcatcatggagagcaccatcgccgacttcgtcaagccagaggggtacatgccctggaacggcgacttcgccctcaagacgctctactacgccgagtacaacaaccgcgggcccggcgccggcaccagcaagagggtcaactggcccggcttccacgtcatcggacggaaggaggccgagccgttcaccgccgggccgttcatcgacggcgccatgtggctcaagtacaccggcgcgccgcacata

SEQ ID NO: 80740 - DNA, 385 bp, Zea mays
gccgccccccctctccgcctcaaggctctcctctcggaggtctgataggcaacccaataatggcagaagtcctatcaggatctcatgaacaccgtctaagctctgccttagatggacactacgacgagaagaggaaatccaatgtggaatacacagaggacgagaagaaagccgtgatcgcggctctgaaaaagaaggctttgagcgcctcacagaagtttaggcattccatgaagagggggaggaagagcagcaaggtgatgtccatctcgattctggatgagcgtgaacctgaggaggtgcaggctgtggatgccttccgccagcttcttgtacttgaagagctgctaccatcgcagcatgatgactaccacatgatgctaag

SEQ ID NO: 80741 - DNA, 362 bp, Zea mays
atggcatgcacaaacaatgcgatgagagccttgttcctcctggtcctcttctgcatcgtgcatggtgagaaggaagagtcaaagggcatcgatgcgaaagcgtccgggcctggtgggtccttcgacatcaccaagttgggcgcctccggcaatggcaagacagacagcacgaaggctgtgcaggaggcatgggcatcggcgtgcggcggcactgggaagcagacaatcctcatacccaagggcgacttccttgtcggacaactcaacttcacaggcccttgcaagggcgacgtgaccatccaagtggatggcaatctgctggcgaccacggacctaagccagtacaaggaccatggtaattg

SEQ ID NO: 80742 - DNA, 367 bp, Zea mays
tagtgctccgctaggtcaatcgaagagtcgaaagatcccagctttcccatcccatggcgggcggcgacctcacgcctcctcctcctcctcccgaagagacgccgccggcagcggcggccgaggacctgatcgagatcgtggaggaagggtcggggcggctggacatcgcgcggtacgtggaccacgtgcgcgacctgtcggcgggcgccatcgcgacgttcgatggcacgacgcgggaccacttcgcggggcggcgcgtggtggagctccggtacgatgcgtacgcggccatggcgcggcgccgcctggctgtcatactgctggaggcccggtcgctgcacgcgcagctgctgctggccgtggagca

SEQ ID NO: 80743 - DNA, 430 bp, Zea mays
agcaatgcgtcggcctacgcgtccgctgagagcttcgaaaggctggagaagatcgggcagggcacgtacagcagcgtgttccgggcgcgggagctggccacgggcctgctggtgtcgctcatcaatgtgcagttcgacattgtgcacctccagaacttgcagttcatggagcaggaaagttgtaaccgccgcatcctcagtggcctgccgaagctcgtcgaactcgaaggcatcaatacctcccgctcctctccctccatctaactcatcttcgaatacctctagcacgacctggtcggcctcaactcctcatccgatatcatcttcaccgagccccagatcaagtgctacatgcgacagctgctggtaggggctggcgcactgcaatgcacgcggtgtgatgcaccgggacatcatttgcgccaacctg

SEQ ID NO: 80744 - DNA, 385 bp, Zea mays
gatacaaccctctacactgagtcgtagtagacgagatccacacgctcatcgccgccatggacgccgacggcaacggcaccgtggagttcgacgagctctcctcctccctggcgccgctgctcctggggccctgccgccccgccgtggccgtcgaccacgcgcagctcgccgaggccttccgcgccttcgaccgcgacggcaacggcttcatctccgccgccgagctcgcgcgctccatggcgctcatgggccaccccatctgctacgccgagctcaccgacatgatgaaagaggccgacaccgacggagacggcgtcatcagcttccaggagttcacagccatcatgggcaagtccgccgtcgacttcctatgcctcgctgctct

SEQ ID NO: 80745 - DNA, 426 bp, Zea mays
  unsure (1)..(426): unsure at all n locations
gttgaaggtagcaagaagactaaatggtgtccagctcctgactgcacatgtgctgtggagttccttggtgatgaaaactatgatgtttcatgcaattgcatgttcagcttttgttggaattgcactgaggaagctcatcgaccagtgaactgtgagactgtttctaagtggatattaaaaaacagtgcagaatctgaaaacatgaactggatactggctaattctaagccctgtccaaagtgcaaacggccaatagagaaaaaccagggatgcatgcatatgacatgcacccctccttgtaaattcgaattttgctggttatgtctgggtgcatggtcagatcatggagagagaacaggtggcttttatgcttgcaatcgttaagaatcaagcanagaaggaggaattttacgacaagactgatgc

SEQ ID NO: 80746 - DNA, 381 bp, Zea mays
ccacgcgtccgagaatggacaggttgttgcagtgaagcaacttgatcgcaatggccttcaaggaaacagggagtttctggttgaggttctaatgcttagtctgttgcaccatgacaatctagtaaacttaattggatactgcgctgatggagaccaacgtcttcttgtatacgagtttatgccattgggatcacttgaggatcatttgcatgatattccacctgataaggaacctctggactggaatacacgtatgaagattgctgctggtgccgccaagggcttagagtacttgcatgataaggcaagtcctcctgttatttacagggatttcaagtcctcaaacattctactcggtgaagggtttcatccgaagctatc

SEQ ID NO: 80747 - DNA, 354 bp, Zea mays
  unsure (1)..(354): unsure at all n locations
cccacgcgtccgcccacgcgtccgcgacaccaccgtgtggtcgacaaaataaaaaggagagagagagagatggctctgtcgtctcgccgtatggccgccgcaccattcttcgtcgtcgtccttctcgtcctcgtggcggcagagaggacgatgggcagggtggtggtggaagagacgctctgcttgtcgcagagccatgccttcaaaggcgtgtgcctcagcaacaccaactgcgacaacgtatgcaagacggagaagttcacaggcggcgagtgcaagatggacggcgtcatgcgcaagtgctactgcaagaaggtctgctanggcatgaccggcagcaagccccagccgtac

SEQ ID NO: 80748 - DNA, 420 bp, Zea mays
  unsure (1)..(420): unsure at all n locations
ggccaaccaacgcgtcgggctacccaggacaatgctctgaatctttgcaccgagaaagtcttactggcacgccaagcttatgacctgatagagagccatataaaacgccttgatgaagacttgggccagtttgcagaagatttaaagcatgaagggaagatacctccagatgaacctacagtccttcctccagttccggtggttagcagggatgagaaaaggaggtttggttttagtacacctcaagcatcaaaaaaatttagagagagggaatgggacagggaaaggggtatggactttgatttaatgccccctccaggtagcagcaagaaagcaggtacatctatggatgtggatcanacaattgattcaaatgaaccgacatactgtatatgccaccagatttcaaatggtgacatg

SEQ ID NO: 80749 - DNA, 366 bp, Zea mays
aagctttctccctcctccacctttctccttttcttgccacggcaaaacaccttcgccggcgagagcatggcgatggcgtaccgtgtcctggaggtcaccctggtgtcggcaaatgacctcaagaaagtgtcgctcttctcccggactcgcatctacgccgtggcttccatctccggattcgacctccgcatcccttcccacagcacccaagcagaccacagcaacggctgcaacccctgctggaacgccgtggtacacttccccatcccggctgccgctgacacccgcggcctcgcactccacgtgaggctccgcgcccagcgtctatacctgggcgatcgcgacatcggagaggtgtttgtgccc

SEQ ID NO: 80750 - DNA, 385 bp, Zea mays
gttcctcctggtcctcttctgcatcgtgcatggtgagaaggaagagtcaaagggcatcgatgcgaaagcgtccgggcctggtgggtccttcgacatcaccaagttgggcgcctccggcaatggcaagacagacagcacgaaggctgtgcaggaggcatgggcatcggcgtgcggcggcactgggaagcagacaatcctcatacccaagggtgacttccttgtcggacaactcaacttcacaggcccttgcaagggcgacgtgaccatccaggtggatggcaatctgctggcgaccacggacctaagccagtacaaggaccatggtaattggatcgagattctacgtgtggataacctggtcatcaccggcaagggaaaccttgac

SEQ ID NO: 80751 - DNA, 360 bp, Zea mays
cacacaaataataaggaaaggtcccgcccttttcctccgacatccacaaggggggaggggaaaacacgtacattcacccggcggcaataatggcctcggttccggctccggcgacgacgaccgccgccgtcatcctatgcctatgcgtcgtcctctcctgtgccgcggctgacgacccgaacctccccgactacgtcatccagggccgcgtgtactgcgacacctgccgcgccgggttcgtgaccaacgtcaccgagtacatcgcgggcgccaaggtgaggctggagtgcaagcacttcggcaccggcaagctcgagcgcgccatcgacggggtcaccgacgcgaccggcacctacacga

SEQ ID NO: 80752 - DNA, 385 bp, Zea mays
cagaagtttgaggcaactgttggtagcaaacgctggggactgccgcgccgtcctgtgtaagaaagggacagcggtggaggtgtcaaaggatcacaggccgacatacgacgcagagcgtcaaagggttatcgagtgcggtggatacatcgaagatgggtacctcaacggcgtactctctgtgacccgggctttaggggactgggacatgaagctgccccaaggctctccgtcgccccttatcgcagagccagagatccactggaccaccctgacggaagacgacgagttcctcatcatcggctgcgatgggatatgggatgtgatgagcagccagcacgcggtgagcacggtccgcaaaggcctccggaagcacaatgaccccggc

SEQ ID NO: 80753 - DNA, 302 bp, Zea mays
ccttgcagaggactgtgaggtacagtttgagttcacggcaatggctgctaacattgaagatttgactgctggaatgctaggtcgccgtcccggagaggccctcattgttaactttgcattcctgctgcaccaccttcctgatgaaagtgtctcaattatgaaccaaagggatcggcttctccgtatggtgaagggtctccgaccaaaactagtgacgttggtggagcaggacgcaaatactaacactaccccattcccttccaggttccgggaggtctatgactactattcggcactttttg

SEQ ID NO: 80754 - DNA, 347 bp, Zea mays
cacacacgtacattcacccggcggcactaatggcctcggttccggctccggcgacgactaccgccgccgtcatcgtatgcctatgcgtcgtcctctcctgtgccgcggctgatgacccgaatctcaccgattatctcatccacggccgcgtgtactgcgatacctgccgcgccgggttcgtgactaatgtcacggagtatatctcgggcgccatggtgaggctggagtgcaagcacttctgcaccggcaatctcgagcgcgccagcgacggtgtcatcgatgcaactggtaactagactattcatctcatcgacagccacgatgacgacatctgccaggtggtgctg

SEQ ID NO: 80755 - DNA, 404 bp, Zea mays
tctcgcgggtcgatgcaagtctctagaatgaggcgtattaagagagagagacgcaggcccgccggcgacgatcgaggagggaggaacgccagagacccggcggcggcgacgatggctccgcgcagctcatcggcggcgacgtgcctgtgcctcgctctcgccgcggccacgctggcgctggcccacggggcgcaaggaggaggaccatcggcatcggcggcggacctggacaaggtcacggccgagaccttcctcgacatcgagatcgacggcaagcctgcaggccggatcgtgctgggactgtttggggacaccgttcctaaaacagcagagaacttccgagcactttgcacaggggagaaaggaatggccatgtccggcaagcctctatggtacgagggggt

SEQ ID NO: 80756 - DNA, 418 bp, Zea mays
gcggtggataagctcctcaccaggggcagcatgctccagctcgtccatgtgagggttgaagcaaacaaagatgagggtgacgcagagataacacagctatttatatcatatagagggtattgtgctcgtaaagggatgcatctgaaggagttgatcttggatggcactgacatctccaaagcaataattgactatgccactagcaatgccatcacagacattgtcgtcggcgcatcaactaagaacacattcatcagaaggtttagaaatcccgatgtcccaacgtgtttgatgaagatggcgcctgattattgcacggtacatgtcatccacaaggcaaaagccatccaggtgaaggcagccaaagctcctgcaccctttgctactctccctccaaagcaacactcgcaaccaaaca

SEQ ID NO: 80757 - DNA, 431 bp, Zea mays
gatgactcccgggcagtgcaacctggtggtggaaaggctgggcgactacctgctcgaacaggggatgtaatgacaaccccttcccctggaatgcatgttgatgatgttgctggttccaacttcgttttcagtaataataacaacaaagcgaagaccctcctacctaccctatttgcttgagcggctcttgtccgcgccacaagataccaattgttgcgctgggaatattcagttacgatgacccgctttagttcagtttcttttttttgggggttggttcgatcatttggctgtagcgtgaatcgcttggacaacagactccaattactaagcaaatattttttcttctgcatatatttgaagaatcttgttcagggccccttttcaaaatgaacgcggggaattttttttttcttgtttccaatgtcttt

SEQ ID NO: 80758 - DNA, 426 bp, Zea mays
cccacgcgtccgcccacgcgtccgctctccaatctgacaacacttctcacagtcaagatgatgactcatattctgtcacttcttcaactgtaacttcagcaagagctgggaaaactaagaagacaactgttgctgttgcacctacattcgtctgtgctaatcgtgctgagaagagaggagagttttacacaaaattagaagaaaaacgcaaggctttggaagaggagaaactccaagcagaggccagaaagagggaagaggaagaagaagctctaagacaactgaggaagaacttggtcgtccgagcaaaacccatgccaagcttctaccaagagggacccccaccaaaggttgaacttaagaagggtgctccaacccttgcaaggtccacaaaattgacacggagaaagagctgcagtgaaaccc

SEQ ID NO: 80759 - DNA, 365 bp, Zea mays
ctcactcaccccgccttcacgcctccctcaccaaataaggtcccgcccttttccgacattcacaggggggacaggaaatcagcggccatggcctcgattccggcgacgaccttcgccgtcatcttatccgtcctcttctgtgccgcggctggcaccgccgtcgacaacgacctccccgactacgtcatccagggccgcgtctattgcgacacctgccgcgccgggttcgtgaccaatgtcaccgagtacatcgcgggcgccaaggtgaggctggagtgcaagcacttcggcaccggcaagctcgagcgctccatcgacggggtgaccgacgggaacggcacgtacacgatcgagctcaaggacag

SEQ ID NO: 80760 - DNA, 380 bp, Zea mays
ccctccctccctcacacaaataataaggaaaggtcccgcccttttcctccgacatccacaaggggggaggggaaaacacgtacattcacccggcggcaataatggcctcggttccggctccggcgacgacgaccgccgccgtcatcctatgcctatgcgtcgtcctctcctgtgccgcggctgacgacccgaacctccccgactacgtcatccagggccgcgtgtactgcgacacctgccgcgccgggttcgtgaccaacgtcaccgagtacatcgcgggcgccaaggtgaggctggagtgcaagcacttcggcaccggcaagctcgagcgcgccatcgacggtgtcaccgacgcgaccggcacctacacgatcgagctc

SEQ ID NO: 80761 - DNA, 381 bp, Zea mays
accacgcgtccggcggcaaggacctggaggccgcgcctgccttcaccttcgaggccggcaagacgtaccgcctccgcgtctgcaacaccggtatcaaggcgtcgctcaacttccgcatccagggccactacatgaagctggtcgagctggagggctcccacaccctgcagaacacgtacgactcgctcgacgtccacgtcggccactgcctctccgtgctcgtcgacgccgaccagaagcccggcgactactacatggtggcctccacgcggttcatccacgacgccaagtccgcgtccgccgtcatccgctacgccggctccagcgccccgccggcgccgaacatgaccgagccaccggccggctgggcctggtccatca

SEQ ID NO: 80762 - DNA, 355 bp, Zea mays
acctgaccactaccaccacccgggacgtcttccatggcctcctcatagaataagctctatctcaccgcaacaactcctcattacaatccttcaggagagcagcactacactacactacattagagagaggtcgagcgcccctcctccgatccgccggcccgccgagagctagctgctgatcggtcgaggagagtcatggcgacgtcgacgatgcgcgttgccgccggcgtgctgctggtcgtgtcggcgctggcgaccttggcccgggccgaggacccctacctgttcttcgagtggaaggtgacgtacgggagcaggtccctgctgggagtgccccagaaggtcatcctcatca

SEQ ID NO: 80763 - DNA, 422 bp, Zea mays
tacaatactctagaatgagtcgtattacaagagggttggcaggaagactaccttgcggcaggatttggccaatgctctagatataagggccttcgagaggatgacgaagctaggccactgcgatgtggagcttcttagaaaagagatgaatgagactgatgtccccgtatcttactcaggcactggcatccctgagaagtcaatacgcaaagcagctcttgaggttattctccgcaggctcctctcttttctcaagccagacacctttcagggtgccatcaaggcaatcaacgaaagaattctctctgtccttgatgctcctggttctggtcgtgttgatctgggtatgttcttcgccatcattgctccaatctgttcaggccctgtggataggcgcaagcgtatcgtctttgatgcacttc

SEQ ID NO: 80764 - DNA, 378 bp, Zea mays
  unsure (1)..(378): unsure at all n locations
tcaaacgtctacaatatgtcgtgcacagacaatgcgatgagagccttgttcctcctggtcctcttctgcatcgtgcatggtgagaaggaagagtcaaagggcatcgatgcgaaagcgtccgggcctggtgggtccttcgacatcaccaagttgggcgcctccggcaatggcaagacagacagcacgaaggctgtgcangaggcatgggcatcggcgtgcggcggcactgggaagcagacaatcctcataccccaagggcgacttccttgtcngacaactcaacttcacangcccttgcaaagggcgacgttgacatccaggtggatggcaatctgctggcgaccaccgacctaagccaagtacaaggaacatggtaat

SEQ ID NO: 80765 - DNA, 435 bp, Zea mays
  unsure (1)..(435): unsure at all n locations
aattcagggtggttagccagatgcaggctatcgtcgagcgttatccatgctggggtgatactgttgaagtaaatacatgggttagtgctaatggtaaaaatggaatgcgtanggattggcatatacgtgattctatgacaggccacacaatactgaaggcgacaagtaaatgggttatgatgaacaaactcactaggaagcttgcaagaattccagatgaagtgcggactgaaatagagccatactttgttgggcgttctgctattgttgatgaagacaaccgcaagcttccaaaactgccagagggtcaaagcacttctgcagctaaatatgtgaggacaggcctgactcctcgttgggctgatcttgatataaaccagcatgtcaataatgttaaatacattgcgtggaatcttgagagtgcaccgattacta

SEQ ID NO: 80766 - DNA, 199 bp, Zea mays
agccctcgcgctagtggcggccaccgccccacaggtagcggaggcaaagaagaagagagcggcggagagcggcgaggcggcggaggcgaagaagatccaggacgacttctgctcgacgctgtgcgagggcaagaaggggacggacctggtcgtgtgcaaggagtcctgcgcgctctcccagcagttcaacctggtgctg

SEQ ID NO: 80767 - DNA, 369 bp, Zea mays
cttagccgggtggatgttcatcatgaccaccttcatcgccctcttcctgccggagaccaagggggtgcccatcgaggagatgaacctcgtctggagccgccactggttctggggcaagtacgtcaacgtcgacacacaacacggcggcgccagcccgagatccaacggcgtctgatctgagcaagctgcagcaacacctcggcacctgacctggccatgcatgcacacgtatactataatctaacaacgtagctgacctgggcaaattgccagcctgacaggggccagggtgctcgaatgtctcactctcaccgccgactaactttccatcaaaattgattcttgttcatactccatagcatgcacaga

SEQ ID NO: 80768 - DNA, 443 bp, Zea mays
  unsure (1)..(443): unsure at all n locations
acaatactctaaactgagtcataatactatcaactacacacaggttgccgtgctcgcggatgacatattgaaaaatgtggaatatgatgctctgagggttattttcaacaagttccaatctgtcatatcgtttaagcccacaatggtaacaatactttcccccgaggttgcagaaaaagaatcagaagctggtgggaagatgggtgacctagattcttatgagattgaaggcggcgagacanaatcagagattttgcagaatctagctgagttccagttttcttgtgtcctgtacaatggtgcnctagagaatgcatgcagtgagcttggagcccgtatgtctgccatggacagctctagcagaaatgctggcgatatgcttgatcgtctcactctcacttacaacaggacacgccaagcatccaatcacacagagcttactg

SEQ ID NO: 80769 - DNA, 432 bp, Zea mays
acttcagcgtggcgcgcgtggaggcgcagagctgcgaggtgacggggcagacgggcacgctgggctacatggcgccggaggtgctgcaggggaagccgtacgaccacaagtgcgacgtgtacagcttcggcatcctgctctgggagacctactgctgcgccatggcctaccccaactacagcctcgccgacatctcctaccacgtcgtcaagctgggcatccggccggacatcccgaggtgctgcccgcgggcgctggtggagatcatgacgcggtgttgggacggcaacccggacaaccggccggagatgtcggaggtggtggcgctgctggagaagatcgacaccagcagcggcaagggcggcatgacgcccgtcgacgacgtcgcgcaggggtgctcctgcttcggcttcaaccaccgcagcgtcgcct

SEQ ID NO: 80770 - DNA, 399 bp, Zea mays
  unsure (1)..(399): unsure at all n locations
acaacactctagactgagtcgtactattgtaaacgggttagcagaagaacacacagggtgacaacaaatccttgttcggttatttctaatacatatggattggatgagattggaaaaaattaagaagaagtttaacttgtttgcgattcaaacacatccaatctcattcaattcacatggattgagagctaaccgaacaagcctgtagttggacaagggtgtaacacttatttgtcaggcgtaccgggcacagaccgcttcctatttgttcgtggggatgtaactgtaagccttgtgacccctaagcagtctgcgtcttgtgcctgctgctgtagcggtagagcagagagagagatcaaatgtaaattacatttnttagctcaaattcacgacannnaa

SEQ ID NO: 80771 - DNA, 412 bp, Zea mays
  unsure (1)..(412): unsure at all n locations
acacacgagtctactgacatgcactacaagcctatcgctccctaccacttcgacttgagcggcaaggccttcggctccctggcaaagcccgggctcaacgacaagattcgccactgcggcatcatggacgtcgagttcagaagggtgcgatgcaagtaccccgccgggcagaagatcgtgttccacatcgagaagggctgcaaccccaactacctggccgtgctggtgaagtatgtggcggacgacggcgacatcgtgctgatggaaatccaggacaagttgtcggctgagtggaagcccatgaagctctcttggggcgccatctggaggatggacactgccaaggcgctcaagggccccttctccatccgcctcaccagcgagtccggcaagaaggtcatcgnccaaagac

SEQ ID NO: 80772 - DNA, 285 bp, Zea mays
agtctacgtcgtctcactcaccccgcattcacgcctccctcatcaaatagcgtcccgcccttttcggacattcgcaggggggacaggaactcatccgccacggacacgagtccggcgacgaccttcgccgtcatcttatccgtcctcttctgtgccgcagctgtcaccgccgtctacatcgacgtcaccgactacttcatccaacgcctcgtctattgctacacctgccgctccgggttcgtgactaatgtcaccgagtacatcgctgccgccaatgtgatgctg

SEQ ID NO: 80773 - DNA, 447 bp, Zea mays
cacgcgtccacttgaatatgatgtcaacgtatccaagtcatttgaaaagctcaacaactggcgtgaggaattcctaattcaagccagcccatcagacccagagaatttcccatttgttgtgcttggtaacaagatcgatgttgatggtggtaacagccggactgtttctgagaagaaggctaaagcatggtgtgcttcaaagggaaacatcccctactttgagacgtcggctaaagagggcttcaatgtagaggctgcatttgagtgtatagcgaggaatgctgtaaaaaatgagccagaagaagatatgtatcttcctgatacgattgatgttgggggcgctggaaggcaacaacgttcgtcaggttgtgaatgctagaagatatggagcactgcgatttgctcggttggttggtctgattctctagggcttgttttggttggcct

SEQ ID NO: 80774 - DNA, 404 bp, Zea mays
  unsure (1)..(404): unsure at all n locations
tccccctcctttccaggtcccctcgcccgcgctctcagatctcgcgcgcctcccacaagggaaaccttgagccatgggcacagttgtggatgccgctccagcagttgtggctgaggtcactgagaacatgttgggtggcaagaaagttacagttgtatttgttctaggtggtcctggaagtggaaaaggcacacagtgtgccaacatcgtggagcactttggattcacccatcttagtgctggagatcntctgcgtgcagagattaaatctggctctgagaacggaaccatgattgagaacatgataaaggagggaaagattgttccatcggaagtgactataaagcttttgcangaggcaatgataaaaagtgaaaatgacaaattcctgatcgatggatttc

SEQ ID NO: 80775 - DNA, 425 bp, Zea mays
tcgtgggccgatacaagcctctagaataactcgtagaaacagagcaagagcatcgctctcgaagcaaaacgcgcaccacgccgtcgccggccggccacttcgcacgtacgtaggacgcgcacgcaccggtgcatatatggggctcctgaaccagctgtgggacgacacggtggccgggccgcgcccggactccggcctcggcaagctccgcaactgcagcgacgacgcccaggggagagggctggacgaagaagctgcgcgggaaagccaggatgggcggcggcggcggtgacgacgcccccggcacgccgaggagccccaccgtgtacgactgggtggtgatcagttcgctggacctctgaagcccaagccaagacgagaactgcacaaggaaacccaccaccaccatcaacacagctagcgaa

SEQ ID NO: 80776 - DNA, 395 bp, Zea mays
cacgcctctacagtcactcgtaggacgagtgcgtgcgttcgtgcagccacagacaggcgtccgggcaccatgtctttcaccggcacgcaggacaagtgcacggcgtgcgacaagaccgtccacttcatcgacctcctcacggccgacggcgccatctaccataagacatgcttcaagtgcagccactgcaaaggggtcctctcgatgtgcagctactcctccatggacggtgtgctgtactgcaagacccacttcgagcagctcttcaaggagaccgggagcttctccaagaacttcacgccaggtggcaagtcatcagacaagggtgaactgacaagggccccaagcaagctgtcgtctgcattttctgggtaccaggataagtgcgcagcatg

SEQ ID NO: 80777 - DNA, 396 bp, Zea mays
acaagcctctatatcaagtctgatcaaggtggaccaagagcagaaggccagcaactcgcggttcatgacccagaagccggcgtcggcgatagtgtcaaagctggagcagatcgctgagacagagcgcttcatggtgaaaaaacaggacgggctggtgaagctgcaggggtccaagcaagggaggaaggggcagctcgcgatcgacgccgagatcttcgaggtgacaccggcctttcacgtcgtcgaggtgaagaagtcggcaggcgacacgctggagtatgagatgttctgcagcaagggcctaagaccttcactcagcgacatctgctggagcagccgatctgaggagaacatggctccttcagtggttcagccatcataattgaagccatcctc

SEQ ID NO: 80778 - DNA, 402 bp, Zea mays
acacgactctacagtgactcctactaactcaccccgccttcacgcctccctcaccaaataaggtcccgcccttttccgacattcacaggggggacaggaaatcagcggccatggcctcgattccggcgacgaccttcgccgtcatcttatccgtcctcttctgtgccgcggctggcaccgccgtcgacaacgacctccccgactacgtcatccagggccgcgtctattgcgacacctgccgcgccgggttcgtgaccaatgtcaccgagtacatcgcgggcgccaaggtgaggctggagtgcaagcacttcggcaccggcaagctcgagcgctccatcgacggggtgaccgacgggaacggcacgtacacgatcgagctcaaggacagccacgaggaggaca

SEQ ID NO: 80779 - DNA, 415 bp, Zea mays
atgatccatcaacaatcgccgagagcgatcgagagataaataaagatgaagaaagtggcatcatcgtcagccgttctcttcgtgctagccctgacgctagtttgtgccccgctgatagcagaggcaaagaagaagagagtcgccgccgccgccgccgaggagaagaaggtgcaggacaacttctgctcgacgctgtgcgagggcaggaaggggatggacctggtggtgtgcaaggagtcctgcgacctctcacagcgctccaacctggtgctgtacggccggattcagtgcaagggcaagtgcaccgagcagaagggcatcaccgcgccgcagatgaaggtgtgccaagaggcgtgcgacaaggactacgtggtcaaggcggctgaggtcaccaaggcctgcaacacaacctgcg

SEQ ID NO: 80780 - DNA, 431 bp, Zea mays
caacactctatactgagtcgtactactggatcacaggggactaccagatgggcggcgccttggagccgttggaccccggcgcggtgggcagcgtcctgcggtacggcctcgctgccaacgccctcgactacgaggccaccggggagtcgctcgtgtacagccagctgtacccgttcgagggcctccagaactacacctccggcatcatccaccacgtcggcctcgagggcctgaagcctgggaccaggtacttgtaccggtgcggtgacactgccatctcggacacaatgagcggcgtgcacgcgttccgcacgatgccggctgtcgggcctgggagctagcccgggccgattaccttggtcggggacctcgggaccacctactctaccacctcgactgtgggacacatggtgtgcaaatgcaccgatctg

SEQ ID NO: 80781 - DNA, 424 bp, Zea mays
ctctacactaagtcgtcatacctccctcaccaaataaggtcccgcccttttccgacattcacaggggggacaggaaatcagcggccatggcctcgattccggcgacgaccttcgccgtcatcttatccgtcctcttctgtgccgcggctggcaccgccgtcgacaacgacctccccgactacgtcatccagggccgcgtctattgcgacacctgccgcgccgggttcgtgaccaatgtcaccgagtacatcgcgggcgccaaggtgaggctggagtgcaagcacttcggcaccggcaagctcgagcgctccatcgacggggtgaccgacgggaacggcacgtacacgatcgagctcaaggacagccacgaggaggacatctgcgaggtggtcctggtggagagcccgcgcaaggactgcgacca

SEQ ID NO: 80782 - DNA, 431 bp, Zea mays
  unsure (1)..(431): unsure at all n locations
acaagactctaatctaagtcgtaggaaatctgctggcgaccacggacctaagccagtacaaggaacatggtaattggatcgagattctacgcgtggataacctggtcatcaccggcaagggaaaccttgacgggcagggcccagccgtgtggagcaagaactcctgcaccaagaagtatgactgcaagatccttcccaactcgctggtgatggacttcgtgaacaacggggaggtgtccggggtcacgctgctcaactccaagttcttccacatgaacatgtaccagtgcaagaacatgctgatcaaggacgtgaccgtgacggcgcccggggacagccccaacacggatggcatccacatgggcgactcatccgggatcaccatcaccaacaccgtcattggcgtcngccacgactgcatctccatcggc

SEQ ID NO: 80783 - DNA, 394 bp, Zea mays
tacaacactctacactgactcgtatgtacatccgatccctgtccaccgcgttgggagcggcgcagcccatggacgacaacgagagagagaaagagaatgagaatgagaaggagaagcactacgggactgacgtcgaggatgaagaagaggacgaggaaggtaacaagcgagtcgtggtgcttggcccccaggtccccctcaaggagcagctcgagctcgacaaggatgatgagagcctgaggaggtggaaggagcaactccttgggcaggtcgacacagagcagctgggagaaactgcggaaccagaggtcaaggtggtggacctgacgatcctgtcacctggcagaccggacctgatccttccgattccgttccaggctgacgagaagggcta

SEQ ID NO: 80784 - DNA, 447 bp, Zea mays
cacgagtcaaggatgactccacaccattgagacctgcgttgtcacccacccatcaaggttggggccgccagcaggttcagccgttcctgttcttgctaaaacgagagaaggatggcagtgtctcagggagctgtcctattcttgtttctcctcgtcgcagcagaggtgggaaccatcgatgccaaaatgggagtagccatgcccatgcatgccttgataatggagaaagcgaaacagcaggagacggagaagaaggaggagaaaagcacggagaaggaagagagtcaatgcttatcgccgagtctccagttcgagggcttctgcttcaacagcgacagatgcgccgatgtgtgcatgaaggagagctttcccggtggcgagtgcaagcaggtcgtggccacgcgcaagtgcttctgcaagaagccttgctagttcatcggtcttgct

SEQ ID NO: 80785 - DNA, 447 bp, Zea mays
  unsure (1)..(447): unsure at all n locations
cacgcctctacactaacgtcatcagaactaggaaggcaaagccaaaggcccggcccggcccggcacggttcaaccaatggcggtggcccctcctacggcggcggccctggagcagctaagcagcagcaagatgtttcgacggcttcaatctccgcttccgccaccagagcgccacccttggctgcgccatgactttctccatctacctgcccccgtccccggcgtccaaccttcccgtgctgtactggctctcgggtctcacctgcaccgacgagaatttcatcataaagtccggcgcccagcgcgccgccgctgcccacggcatcgccctcgtggcacctgacacctccccacgtgggttaaatattgaaggagagtcagacagctatgattttggtgtgggtgccgggttttatttgaatgccacanatgaaaagtggaaaaact

SEQ ID NO: 80786 - DNA, 395 bp, Zea mays
tctcaacatcaaggttagcggccccgtgcacaagggcatgccgcacaggttctacaacggccgcaccggaaccgtctggaacgtcacaaagcgcgccatcggcgtcgagatcaacaagcaggttaacggccgcatcatcaggaagcggatcgatgtccgcgtggagcatgtgcagccctcccgttgcacggaggagttccgcttgaggaaagccaagaatgaccagctcaacgcggatgccaaggcccgcggtgaggtgatcagcaccaagacgcagcctgtgcgaaccacacctggcttcatggttgagggtgctacacccgagacagtcactcctattctttatgatgtggtcaacgatctcaagggcggttactagatagaatttttgtacc

SEQ ID NO: 80787 - DNA, 385 bp, Zea mays
aatcctctacactgacgtcgtattacctcgtcgtcgtctcactcaccccgccttcacgcctccctcaccaaataaggtcccgcccttttccgacattcacaggggggacaggaaatcagcggccatggcctcgattccggcgacgaccttcgccgtcatcttatccgtcctcttctgtgccgcggctggcaccgccgtcgacaacgacctccccgactacgtcatccagggccgcgtctattgcgacacctgccgcgccgggttcgtgaccaatgtcaccgagtacatcgcgggcgccaaggtgaggctggagtgcaagcacttcggcaccggcaagctcgagcgctccatcgacggggtgaccgacgggaacggcacgtacacg

SEQ ID NO: 80788 - DNA, 419 bp, Zea mays
tacaacactctagactgagtcgtattacctccggcatgtcggcgctcctgcccctcgacctccgccgcggcgacgtcctcagtcccgaggtcatcgtctgcggcggctcccccaagaacgccttcacgctcggcgagtccaacacgttcccgcccgccctcaaggactgcgcgcgcatcaaccccttgaagcccgacgctcggtgggcgctggaccagatgcccgtggcccgcaccatgggcgacctgctgatcctgcccaccggcgacctgctcattctgaacggcgcggccaagggctgctccggctggggcttcgggcggcagcccgtgctgagcccgctcctgtactctccgcgccatgcgcggggctcgcggttccgggcgctggcgcccaacaccatcccgcgcatgtaccac

SEQ ID NO: 80789 - DNA, 349 bp, Zea mays
aatctcctccatcaccaccaccaagctcaacaacagccagctcgcgaaaataatgaagagccgcagcatggcatcatcggccgcgctcttggtgctagccctcgcgctagtggcggccaccgccccacaggtagcggaggcaaagaagaagagagcggcggagagcggcgaggcggcggaggcgaagaagatccaggacgacttctgctcgacgctgtgcgagggcaagaaggggacggacctggtcgtgtgcaaggagtcctgcgcgctctcccagcagtccaacctggtgctgtacggcaggatccagtgcaagggcaaatgcaccgagcagaagggcatcacggcg

SEQ ID NO: 80790 - DNA, 446 bp, Zea mays
  unsure (1)..(446): unsure at all n locations
cccgggccgatacacgactctacactgagtcatctcactggactacgaccaggagatggagaccgccaagaccagctcttccgtggagaagagctacgagctccccgacggacaggtcatcaccatcggcgccgagcgcttccgctgccccgaggtcctcttccagccatccttcatcgggatggaagctgccggcatccacgagaccacctacaactccatcatgaagtgcgacgtggatattaggaaggacctgtacggcaacatcgtcctctccggtggcaccaccatgttccctgggatcgctgacaggatgagcaaggagatcactgccttggctcccagcagcatgaagatcaaggtggtcgctcctccagagaggaagtacagtgtctggatcggaggattcatcctggcatcnctcagcnacttccagcagatgtgga

SEQ ID NO: 80791 - DNA, 397 bp, Zea mays
tactgagtcgtatgagccgtcgacgacagcaggttcaaggaggtgaccaagcgggagtacacgcagtacagcgagtacaagaactgggtgtggaagtcgcaggacgacctgttcctcaacggcgccttcttcaaccagtccggcggccagaacgagcgcaagtacgacaggctcgacctcatccaggccaagggcggccagtacgccgagtcgctcaccaggtacgccggcgcgctcaactgccgcgtcggcaggaagtgctagtgcgtgtgcagctctaggctgcagctttcatcattggcgatcgatcgtaacaatgcaaggttgtgttgtatataactcttgtgtttggaatgccgcccgtaattaatggtcaactctaacactgcttgccttt

SEQ ID NO: 80792 - DNA, 406 bp, Zea mays
  unsure (1)..(406): unsure at all n locations
ggcaagggacctgatgaacctggctaggttgaccatcgatgagttctccgagatcccagcgagtgcgaaagacgaggtggttcaagatctcgtcgacggcctggagtcgatcttccaggagtacatcttctttgtggcgtcttgcggttcgaaacagaactacctccctccgctgccgccgctgacgaggtgcaaccaagactcgggcttcttccgactgtggaagaaggcggcgctgccgacgtgccaggcgccgccggatgccaccccgcgcggcggcggcggttcgcaccacgtcncgcggccgtccatcagccggggcacgcagcggctctacgtccgcctcaacacgctccactacgtgctgacccacctggaggccctcgacagctcgctgtcgtcctcg

SEQ ID NO: 80793 - DNA, 438 bp, Zea mays
  unsure (1)..(438): unsure at all n locations
tcgtgctaccctcgtcgtcgtctcactcaccccgccttcacgcctccctcaccaaataaggtcccgcccttttccgacattcacaggggggacaggaaatcagcggccatggcctcgattccggcgacgaccttcgccgtcatcttatccgtcctcttctgtgccgcggctggcaccgccgtcgacaacgacctccccgactacgtcatccagggccgcgtctattgcgacacctgccgcgccgggttcgtgaccaatgtcaccgagtacatcgcgggcgccaaggtgaggctggagtgcaagcacttcggcaccggcaagctcgagcgctccatcgacggggtgaccgacgggaacggcacgtacacgatcgagctcnaagacagccacgaggaggacatctgcgaggtggtcttggtggagagcccgcgcaaggac

SEQ ID NO: 80794 - DNA, 340 bp, Zea mays
accaaaaaaaaaaaaacaaaaaaaaaagaaaaaataaaaaaattcaaaagaaaaaaatgacactcaaggagcaagcaaaagaaactcgaccagggcatcctgattataatgtttgagatgccttttaacatttggtgtggtggatgcaattccatgatagcgaagggagtaagatttaatgctgagaagaaacacgttgggaattattactctaccaagatatggagcttcatcatgaaatcgccctgttgcaagcatgggattgtcatacagacagacccaacagatactgaatatgtcataatcagtggggcccacaagaagacagaagattttgatg

SEQ ID NO: 80795 - DNA, 398 bp, Zea mays
tactctagagtgagtcgtaatagagacgcaggaccgccggcgacgatcgaggagggaggaaccagatacccggcggcggcgatcgatggctccgcgcagctcatcggcggcgacgtgcctgtgcctcgctctcgccgcggccacgctggcgctggcccactgggcgcaaggaggaggaccatcggcatcggcggcggacctggacaaggtcacggccgagaccttcttggacatcgagatcgacggcaagcctgcaggccggatcgtgctgggactgtttggggacaccgttcctaaaacagcagagaacttccgagcactttgcacaggggagaaaggaattgccaagtccggcaagcctctgtggtacaagggttgacgttccacaggatcacccg

SEQ ID NO: 80796 - DNA, 443 bp, Zea mays
  unsure (1)..(443): unsure at all n locations
tcgcgggccgatacacgcatctacccacgcgtctgcgtgtgccaggcctcgccttctcgcggcggtgctccctccctcttcgtcccccagcgacgcaggcaggcgcgcgcgcggccatgaaggggggcggtgccatgaggccgtcgcctatgttctacgtccacgaggcggacgtcgtccagatccaccacttcctcgaggagtgctccctctgcgccaaatcgctctccggcgacatcttcatgtacaggggtgacacgccgttctgcagcgaggagtgcagggagcagcagatcgaggtggacagggcgaagcaccggcggaagaagcgcgcggcggcgcacgcgctgtccgcacgcagcagggagcaccggcaccagcagcagctgcagcagcnnacaccacagcagcagcaaccgcagccgcggaatgccggcatggac

SEQ ID NO: 80797 - DNA, 450 bp, Zea mays
acgagtccacgccgtcgtggtctggaacgacactgcggccacgaacggcaaggacggcaagccggtgggcacggtggggagcgccacgctggcggtggagtcggactacttcacggcgtacggcgtggtgttccggaacgacgcgccgctggccaagcccggcgccaatggcggccaggcggtggcggtgcggctgttcgggaccaagacgcagatctacaactgcaccatcgacggcggacaggacacgctgtacgaccacaagggcctgcactacttcaagggctgcctcatccggggcagcgtcgacttcatcttcggcttcggccgcagcttctacgaggactgccgcatcgagtcggtggtcaaggaggtggcggtgctgacggcgcagcagcgttccaagtcgatcgagggcgccatcgacaccggcttctcgttcaagaactg

SEQ ID NO: 80798 - DNA, 414 bp, Zea mays
accaaaacattcaatggccccaacggcggcggaggaaatggaaaggatggtggaggcggattggaaggaggggatgaggaaaaggaaccggtacgggctggtggagtaccgggcgctgccggcttacctgcgggacaacgagtacatccaccgccactaccgctgcgagtggccgctcccgcaagttctgctctccgccttctccatccacaacgagaccctcaacgtctggactattacagaggaggcaaatatagatactccagtaaaggaaatgaggatgctgaagagaaaaagctagcttgggaggaacgggagatcgattcttgcctgactctgattgcaatgcgtcgaattggcaaaatatttacgcgtttatttcctgcttgtgcttaattcctgcgtgtgtttctg

SEQ ID NO: 80799 - DNA, 439 bp, Zea mays
cacgactctactccgggtcatcaggcctcctcgttctgctgcttctcatcaacacaggctttgtcctgcccgtcaattccaaggactgctgggccgacacccgcgtcatctgcaccaagacgcacaactgccgggacgacacttgcgcggggcgcggcatgccggacggccgctgccactgggagttccccaacctggtgcccttctgccagtgcttgcgccccaactgccactagtccgggcgcctcggattggcacacttcgccggcgatgatggatggtgcccaactgcgactgcccagtctgctccattcgttgttgtttaaggcataatatataaactgccaaattcacatgtattttgggatatttgttatcatactatgaaatgactgtgaatcgttgttctgatttggtcttcaccacatgttttccttgc

SEQ ID NO: 80800 - DNA, 425 bp, Zea mays
ctagcgatagtgtcaaagctggagcagatcgctgagacagagcgcttcatggtgaagaaacaggacgggctggtgaagctgcaggggtccaagcaagggaggaaggggcagctcgcgatcgacgccgagatcttcgaggtgacaccggcctttcacgtcgtcgaggtgaagaagtcggcaggcgacacgctggagtatgagatgttctgcagcaagggcctaagaccttcactcagcgacatctgctggagcagccgatctgaggagaacatggctccttcagtggttcagccatcacaattggagccatcctcttagaccgtctccgacagtttactcacccctcttagtcaattgttatttaagtgcagtctcttcggagatgcaattacagtccatcctctctttcttttccctttctcaaa

SEQ ID NO: 80801 - DNA, 383 bp, Zea mays
acaagactctacactgagtcgtagtagaccgggcccgtgccctcggggtagagctggtttctttcgacgaggccatcgcaagagccgacttcatctccctccacatgccgctgataccgacgacgtccaagatcttcaacgacgagtccttcgcaaagatgaagaatggtgtccggatcatcaacgtggccaggggtggagtgatcgacgaagacgctctggtcagggcgcttgactccggcaaagttgctcaggcggctcttgatgtcttcaccgtggagcccccgcccaaggacagcaagctggtgttgcatgagaatgtcactgtaacaccccaccttggagctagtactgtcgaggctcaggaaggcgtcgctatcgag

SEQ ID NO: 80802 - DNA, 404 bp, Zea mays
gttgcaagactctagactgagtcgttgagatcgagttgtttcactgcacgagcacatcctccggcgaccaccggcctccctctccgtcctctagcgaccgaccaacgcgtcgagcgaagatgtcgtggcagacgtacgtggacgagcacctgatgtgcgagatcgagggccaccacctcacgtcggcggccatcgtcggccacgacggcgccacctgggctcagagcaccgcattccccgagttcaagcccgaggagatggctgccatcatgaaggatttcgacgagccggggcacctcgccccgaccggcctgatactgggaggcaccaagtacatggtcatccaaggcgaacctggagctgtcatccgtggcaagaagggatccgggggcatcactgtgaag

SEQ ID NO: 80803 - DNA, 355 bp, Zea mays
acgttccggtcactggccggggagggctcagaaacctttcacccaatacatacatctatctgagccctttcccgcggtgaggcccgaccggagtccacacacacacggtgtcgatggcggccgtaataaggagccgccgccgcgtgtccgttttcttctacgtcgtcctcgccgcagctgcagctgcagccgcggcgcaagcatccaataacgtcacctccgacgaggagtactgggcggagcgcgccgaggtggctcggtcgcgcaacctcgccgcctacgtcagcgaccccgtggccgccacgaaccgcttcaacgcggacgtgctgagggccacgacgcggcgggcgctggc

SEQ ID NO: 80804 - DNA, 305 bp, Zea mays
tattcacgggacaacacactagactgatgctcgtatagctcgccaaaataatgaagaggcccaccatggcatcatacgtcgctcccattggagctagccctcgcgctagtggcggccaccgccccacaagtagcggaggcaaagaagaagatacggcagagagcggcgaggcggccgatgcgaagaagatccaagacgacttctgctcgacgctgtgcgagggcaagaaggggacggacctggtcgtgtgcaaggagtcctgcgcgctctcccagcagtccaacctggtgctgtacggcaggatc

SEQ ID NO: 80805 - DNA, 426 bp, Zea mays
cccacgcgtccgcccacgcgtccggcggctggcaccgccgtcgacaacgacctccccgactacgtcatccagggccgcgtctattgcgacacctgccgcgccgggttcgtgaccaatgtcaccgagtacatcgcgggcgccaaggtgaggctggagtgcaagcacttcggcaccggcaagctcgagcgctccatcgacggggtgaccgacgggaacggcacgtacacgatcgagctcaaggacagccacgaggaggacatctgcgaggtggtcttggtggagagcccgcgcaaggactgcgaccaggtgcaggcggacagggaccgcgccggcgtcctgctcaccaggaacgtcggcatcagcgacaacctgcgccccgccaacccggctcggctacctcaaggacgtgccgctgcccatctgcgc

SEQ ID NO: 80806 - DNA, 215 bp, Zea mays
ctcgcgggtcgacacacgcctccacaatgaatcagtgtattatgctcaccaatgatagttctactaaaggatgaagcagatgccttttggtgctttgagaaattgatgcgtagattgcgaggaaatttcaaatgcacagatcaatctgtgggagtatccaaccaacttcaacatcttgcatctattattcaggttcttgacccaaagctacatga

SEQ ID NO: 80807 - DNA, 382 bp, Zea mays
  unsure (1)..(382): unsure at all n locations
gtagtcccctccttctcgcccggcaccgtcgagctcggctgtggaaacagaacaaacccatcaaccatggcgaactcggcgtcggggatggccgtgagcgacgagtgcaagctcaagttccaggagctcaagtcgaagcgaagcttccggttcatcacgttcaagatcaacgagcagacgcagcaggtggtggtggacaggctggggcagccgggcgacacctacgacgacttcaccggctccatgcccgagagcgagtgccgctacgccgtcttcgacttcgacttcaccaccgacgagaactgccagaagagcaagatcttgttcatctcctggtcnccggacacctcgagggtcaggagcaagatgctgtacgcgagct

SEQ ID NO: 80808 - DNA, 396 bp, Zea mays
  unsure (1)..(396): unsure at all n locations
cacgcctccacagcaatccatcctgagtgctgtacggcaggatccagtgcacaggcaagtgcaccgagcagaagggcatcacggcgccggccatgaaggtctgccaggangagtgcgacaaggcgtacgtggtgaaggcggccgaggtcaccaaggcctgcagcgtcacctgcgccaaggagaagaacccgcgcctcagcgagaactgcaagaggtcctgcacccctcctccttcttgaagcgaagccccttgaaatgaatgaaccatgcatgcatgcatgtatgcatgcgccggggtgacgtggcgttcagctcaagcgctgagcgagtctatacgtacgtcgtcaccggctggccacgcatgcgataaccatctgatatggacggaactatata

SEQ ID NO: 80809 - DNA, 447 bp, Zea mays
aggacgttacaacaccctacagtgacgtcgtagtatctcccacagggacaccgagacccccctcaagctcgccgagtacttcaacgtcaccgacggggtgttcagctacaaccagatgggcgacgtgccccccgccgttaacgggccactccatgtcatccccaacgtcatcaccgccgagttccggaccttcatcgagatcgtcttcgagaaccccgagaagagcatagactccctccacctcgacggctacgccttcttcggcgtcgggatggggcctgggacgtggtcgccggagatgaggaagacgtacaacctactggacacggtgagccggcacacgatccaggtgtacccgcggtcatggacggcgatcatgctgacattcgacaacgcgggcatgtggagccgtcgggtcaacgtctgggagcggtactacctcgggga

SEQ ID NO: 80810 - DNA, 328 bp, Zea mays
  unsure (1)..(328): unsure at all n locations
gaggtcaaaaccttgggatttgtgcggcgggacctttaaaccggtcgcaagccgtttgaccacaaactgccccgtgggcagcagagccttgtgacatgggctacaccgaggcttaatgaagacaaggtgaggcaatgcgtcgattccaggctcggagacgaatacctccaaaggctgtagccaagatggctgctgtggccgccctctgcgtgcaatacgaggggtaattccgtcncaacatgagcatcgtcgtcaaggctctgaaccccttgctgcacagccggtctggcaaccgccctactgcctcgtcggcctcccacgctgccgc

SEQ ID NO: 80811 - DNA, 407 bp, Zea mays
agggatccctcgctaataacatcatggtcgtgggtgtcgtccttgcagcgctcgtcgccggcgggtcatgcgggcccccgaaagtgccgcccggtcccaacatcaccaccaactacaacggcaagtggctcaccgccagggccacctggtacggtcagcccaacggtgccggcgctcctgacaacggcggtgcgtgcgggatcaagaacgtgaacctgccaccctacagcggcatgacggcgtgcggcaacgtccccatcttcaaggaccgcaagggctgcggctcatgctaccaagttagatgcaaggaaaaagcttgatgctcgggcaatccagtcacggtgtacatcactgacatgaactacgaagcttatcgcgccctaccaattcgactttagcggcaaggc

SEQ ID NO: 80812 - DNA, 354 bp, Zea mays
cctagactgagtcgtatgagttctgttccgttcggaagatgttcttggagagcttccgggtggagagcccgcgggtgaagtacggcgacggcgagatccagtcggagtaccgctacgacaccaccgaagtcgtcccgccggggaatggcggcggcgcggggtgggtggtgcgcccaaagtccgtcacctacaacttcaagaccagcaccaacgtcccaaagctgggggtgatgctcgtcggatggggcggcaacaacgggacgacgctcacggccggggtgatcgccaacagggaagggatttcgtgggagacgaaagagaaggttcacaaggccaactacttcggctccctga

SEQ ID NO: 80813 - DNA, 423 bp, Zea mays
cgggtcgacgcaagcctctacatggattcctgcgacacagcctctcctgctgtcgctgctggtcgccgtgctagcggtggccgccgatgtcgccaacgccggccacgccaagcccctgacgcctggcgggcgcgtggtacaccacaaccacggcaagttcacggccgggccgtggaaacccgcccacgcgaccttctacggcgggcgggacgggtccggcaccacggcgggcgcgtgcgggtacaaggacacgcgcgcgcaggggtatggcgtgcagacggtggccgtgagcacggtgctgttcggtgacggcgcggcctgcggcgggtgctacgaggtgcgctgcgtggacagccctagcgggtgcaagcccagcgcggcgacactggtggtgacggcgaccgacctgtgcccgcccaacga

SEQ ID NO: 80814 - DNA, 360 bp, Zea mays
  unsure (1)..(360): unsure at all n locations
gtgagtcggaatgactactggatcgtccggaactcgtggggcccgaagtggggcgaggctggttacatccgtatggagaggaacgttaacgccagcactgggaagtgcgggatcgcgatgatggcgtcctacccgacgaagaagggcgcgaaccctcccaggccgtctccaaccccgccaacaccgccggctgcccctgacaatgtctgcgacgagaacttctcgtgctccgcgggcagcacctgctgctgcgcgtttggcttcaggaacgtctgcttggtctggggctgctgcnctgtcgagggcggcanctgctgcaaggatcacgcnagctgctgcccgccgggctaccctgtctgc

SEQ ID NO: 80815 - DNA, 433 bp, Zea mays
actcgtcggtcgacgcacgcgaccagcaccaatgaccttcggcgcccgttcaggatccacatcttcccgagcgagttcttggttgacctcttcccccttcggaccacctccaaggctcttggtgtagcttgccactctcaccaatcaagttttcatgtctgatctcgacattcagatcccaactgccttcgatcccttcgctgaggccaatgctggggactctggtgcggcagcagggtcaaaggactacgttcacgtgcgcatccagcagcgtaatggtcgcaagagcctgactaccgtccagggattgaagaaggagttcagctacagcaagatcctcaaagatctcaagaaagagttctgctgcaatggtacagtggtccaggacccagaacttggacaggtcattcagctccaaggtgatcagaggaag

SEQ ID NO: 80816 - DNA, 415 bp, Zea mays
gggtcgagccagcgtctaatcccagtcgcgtgcatatatatattcctgccaagataaaggtaatggagtcgtcacgcaggttccagccggccgtcatcctgcttctcctgctcattgtgtccaccgatatggcacaggcaagggaatgcgagaagtacagtgagcgatttgttggggcatgcatgatcgcagacaactgcgccaatgtgtgccgcggtgagggcttcttggccggcaggtgcagcaccttccgccgccgctgcatctgcactaggcagtgctaaacaagatcgctcgatcgcttgccatgcatcgacaacctattcttaataacgttcattatctcgttcttatttatgacgaatgtcatgtatgttctggtgactgtcatgtatattctgatgactgtcaagta

SEQ ID NO: 80817 - DNA, 417 bp, Zea mays
agtcaccgtcaaagacgtcaccttcaagaacatcaccggcacctcctccaccccggaggccgttagcctgctctgcactgccaaggtcccatgcaccggcgtcaccatggatgacgtcaacgtcgagtatagcggcaccaacaacaagaccatggctatatgcacgaacgccaagggcagcaccaagggttgcctcaaggagcttgcatgcttctagaccctccgtcgactgacccatctctctagttataatttttctctcgtccttgcattgcccattacatgctatccattggtaacgcacaacagtaaaatgacagacatccgacagctatattaggttcgacggtgtaacaccctgaatttgagggtataaaattttttctctaaatacaaccaaaatcaggtgtaacctct

SEQ ID NO: 80818 - DNA, 425 bp, Zea mays
ctctagagaaagtcgtcagattcgcggtggtgttcccggagcaaaggtacgagatcgtgaaccggcggaaggaccggaacacatctgcggcattaccgggacggcgtgaacgacgcgcccgcgctgaaaaaggcggacatcggcatcgcggtggacgacgcgacggacgcggcccggagcgcgtcggacatcgtgctgacggagcccgggctgagcgtgatcgtgagcgccgtgctcaccagccgcgccatcttccagcgcatgaagaactacaccatctacgccgtgtccatcaccatccgcatcgtgctgggcttcctgctcgtcgcgctggtctggaagttcgacttcgcgcccttcatggtgctcatcattgccatcctcaaccaacggaacatcatgaccatctccaaggaccgcgtgaa

SEQ ID NO: 80819 - DNA, 371 bp, Zea mays
  unsure (1)..(371): unsure at all n locations
agccgtcgccgaggtcgccgcgcaccgcctcatcttcctggactcgcgccactccttgtaccagggcctgtacgcccgcagcgtggcggacgcccgcatccgccccgcgctccgcctgctgaagcagaacctgtcgttcctggtgtccgtgctcgcggaccgcgcgcagcccgtggcggtgcgggaggtgatgcgcgcctccttcgaggcgttcctgatggtgctcctggcgggcggcaacgagcggagcttcgtgcgcgccgaccacgccacggtggaggaggacttccggagcctgaggcgcgccttctccacgtgcggngaagggctggtccccgaggacgtggtggcgcgggaggcagagacggccg

SEQ ID NO: 80820 - DNA, 384 bp, Zea mays
aagcctctagatcgagtcttgctacgccacggcctctcctgctatcgctgctggtcgccgtgctagcggtggccgcggatgtcgccaacgccggccacgccaagcccctgacgcctggcgggcgcgtggtacaccacaaccacggcaagttcacggccgggccgtggaaacccgcccacgcgaccttctacggcgggcgggacgggtccggcaccacggcgggcgcgtgcgggtacaaggacacgcgcgcgcaggggtatggcgtgcagacggtggccgtgagcacggtgctgttcggcgacggcgcggcctgcggcgggtgctacgaggtgcgctgcgtggacagccccagcgggtgcaagcccagcgcgggggcgctggtgg

SEQ ID NO: 80821 - DNA, 370 bp, Zea mays
ccacgacgccgcggcgcacggcggcggcgcgatccgggactcgcagcaccactggggcgtgcgcggggagagcgacggcgacggcgtctccgtgatggggtccagcgatatctggatcgaccacctgtccatgagcagctgcgcggacgggctggtggacgcggtggacggctccaccgccatcaccgtctccaacggccacttcacgaggcacgaccacgttatgctgttcggggccagcgacgccgcgtccaaggacagggagatgcaggtcaccgtcgccttcaaccacttcggcaaggggctggtgcagcggatgccgcgctgccgtcacggcttcttccacgtggtgaacaacgactacacgcac

SEQ ID NO: 80822 - DNA, 392 bp, Zea mays
cacggagcgcttctccgacgagctcaagatcggcgagggcggctacggccccgtctaccgcgcctccctggaccacacccccgtcgccatcaaggtgctccggcccgacgcgcaccaggggaggaagcagttccagcaggaggtggaggtgctcagctgcatccgccaccccaacatggtgctcctcctcggcgcgtgccccgagtacggctgcctcgtgtacgagtacatggagcacggcagcctcgaggaccggctgttccgtcggggcggcacgccgccgatcccgtgggcgcagcggttccggatcgcggcggagatcgcgacggcgctgctgttcctgcaccagacaaagccggagccgctggtgcaccgggacctgaagccgggca

SEQ ID NO: 80823 - DNA, 422 bp, Zea mays
aatactctatactgacgtcgtattaaactggtgctttcagatatttcaggctcttgcttacatgcatcagaggggctactttcatcgtgacctcaaacctgagaatctgttagttagcaaagatgtcataaagctagcagactttggtcttgcaagggaagtttcatcattgccgccatatacagaatatgtctcaactcgctggtatcgggcaccagaagtattgctccagtcatctgcttatgattctgcagttgatatgtgggcaatgggtgccataatggctgagttgttgacactccatcctctctttcctgtaaccagtgaagctgatgagattcacaagatatgcaatgtcatcggtagtccagatgagcaatcttggcctcaaggattgtcacttgcagaagcaatgaagtatc

SEQ ID NO: 80824 - DNA, 415 bp, Zea mays
  unsure (1)..(415): unsure at all n locations
ggtcgatgccagcctctacaggcactcgcactatggacggccaggggaccgccgtttatagcaagagcaagaccgacaacgtgaaggcgatgcccaacacactggtgctgtttcacgtgatcaacgccactgtcgccggaatcaaactactcaactccaagttcttccacatcaacatcgacaactcagagagcatcaccgtgaaggacgtgaacgtcaccgcgcccgccgacgttgagaacacggacggcgtccacgtcggaggctcctccaagatcagcatcctcaactcgaccatcggcaccggcgacgactgcgtctcgattgggcccgggtgcaacggcgtcttggtggacagcatcacctgcggccccgggcaaggcatcagcgtcngctgcctaagccgctacaagga

SEQ ID NO: 80825 - DNA, 349 bp, Zea mays
  unsure (1)..(349): unsure at all n locations
agttcgagatcgcgaacggccaccctttttttttttttttttttaatttcaaacaacaaacttattcatgatttgtcatagttctgggtagtacgcacacacaacacaaccggtccattattaaaccaacactgacacgaacagcagatacttcgacaacctccatatggagagggcaccagacgacgcaggcacatcggcagcttaaacgacccatgacttactgaccaccnacggagacggagcacaaagtggagggtgctctccttttgggattttgtagcctgccagggtgcggccatcctccaactgtttgccggcgaggatcagacgctgctggtccgggggg

SEQ ID NO: 80826 - DNA, 392 bp, Zea mays
  unsure (1)..(392): unsure at all n locations
acttgatataaaccagcatgtcaataatgttaaatacattgcgtggattcttgagagtgcaccgattactatttttgagaatcatgagctggccagcattgtgctggattacaaaagggagtgtgtccgcgatagtgtgctgcagtcacacacctctgtccatgaggattgcaacattgagtctggagaaacaaccttgcactgtgagcatgtgctgagccttgaatcaggtccgaccatagtgaaggcccggaccatgtggaggcctaagggaaccaaggcccaaganacaccggttccatcttcattctgatttttgtcagatgttcgagatggtgactttggcagcaaactatctggcagaagatcagaatggttactagcatcctcta

SEQ ID NO: 80827 - DNA, 395 bp, Zea mays
actccctctatctccagcattgtgttctgattcacctgctccaatggctgttctttctgctgctgatgcttccccggtctcagctatcgggtttgagggctatgagaagcgccttgagatcacattctctgaggcacctgtctttgtggaccctcatgggcgtggtttgcgtgccctctccagggcccagattgactctgttctggatcttgcacggtgcacaattgtgtctgagctctccaacaaggatttcgactcatatgtcctttctgagtcaagcttgtttatctatcctctgaagattgtcatcaagacctgtggcactaccaagctcctgctcaccattccaagaatccttgagcttgctgaagagctgtctatgccacttgctgctg

SEQ ID NO: 80828 - DNA, 359 bp, Zea mays
agcatcgatcacgacaagatggcgtgcacaaacaatgcgatgagagccttgttcctcctggtcctcttctgcatcgtgcatggtgagaaggaagagtcaaagggcatcgatgcgaaagcgtccgggcctggtgggtccttcgacatcaccaagttgggcgcctccggcaatggcaagacagacagcacgaaggctgtgcaggaggcatgggcatcggcgtgcggcggcactgggaagcagacaatcctcatacccaagggtgacttccttgtcggacaactcaacttcacaggcccttgcaagggcgacgtgaccatccaggtggatggcaatctgctggcgaccacggacctaagcca

SEQ ID NO: 80829 - DNA, 415 bp, Zea mays
aaaatcagtcatgcggcggaggcgaagaagatccaggacgacttctgctcgacgctgtgcgagggcaagaaggggacggacctggtcgtgtgcaaggagtcctgcgcgctctcccagcagtccaacctggtgctgtacggcaggatccagtgcaagggcaaatgcaccgagcagaagggcatcacggcgccggccatgaaggtctgccaggaggagtgcgacaaggcgtacgtggtgaaggcggccgaggtcaccaaggcctgcagcgtcacctgcgccaaggagaagaacccgcgcctcagcgagaactgcaagaggtcctgcacccctcctccttcttgaagcgaagccccttgaaatgaatgaaccatgcatgcatgcatgcatgtatgcatgcgccggggtgacgtggcgt

SEQ ID NO: 80830 - DNA, 369 bp, Zea mays
ggtcgaggccagcctctacagtcactcgggtcacggagatgcacgcgcgccggcccgtcctgcagggccgcaccgaggtcgagcagatccacaggatcttcaagctctgtggctcgccgcgcgaagacttctggcgccgcttggggctctcccacggcgccgtcttccgcccgcagcaaccttacccgaaccgcctccgggacaccttcgccgcgtccatgcccgaccacacgttccgcctcgtcgccacgctcctcgccctcgacgctgccggccgtggcaccgccgccgccgccctcgacgccgagtacttcacgacggcgccatacgcgtgcgatccggagagcctgcccaagtacgcgcccaaca

SEQ ID NO: 80831 - DNA, 436 bp, Zea mays
  unsure (1)..(436): unsure at all n locations
gccgaccaacccgtccattcacaacatgcgaagaacaaggtccattacataaaattaaagttccaaaaccaaaactgaaaggactgcccaattttgcaaattggaataaggacaaggataaggaaaatgataaaaatggggctgaggacngtgaagatggtccggttccgatttcagtcttcatggttgcaagtgtcctcaaggagaagagagaaaagctgttacaagaagccagaggactggatgatcttatcaggatattgaacgatgtaaatgggaacttagatgctaagaaagcttgcgctggagcattgaaacttcacaaaaaatacctgaaaaaggtacaagcaaagaaaccttaaacgtgccatggaacacacgttcccaatggggctaaccttacaatttcacatacacgacaatttccacacacaac

SEQ ID NO: 80832 - DNA, 231 bp, Zea mays
aacacgtccgcccaagcgtccgtctcaccctcgctcgttcacacatctaataacgaaaggtctcgcccttttcctccgacatccacaggggggaggggaaaacgactgcattcacccggcggcagtactggcctcggttccggctccggcgacgacgaccgccgctgtaatcctactcctatgcgtcgtcctctcactgtccactgctgacgaccccaacctctcagacta

SEQ ID NO: 80833 - DNA, 341 bp, Zea mays
  unsure (1)..(341): unsure at all n locations
cgcccacgcgtcggtctcaccctccctccctcacacagataataaggaaaggtcccgcccttttcctccgacatccacaggggggaggggaaaacacgtgcattcacccggcggcaataatggcctcggttccggctccggcgacgacgaccgccgccgtaatcctatgcctatgcgtcgtcctctcctgtgccgcggctgacgaccccaacctccccgactacgtcatccagggccgcgtgtactgcgacacctgccgcgccgggttcgtgaccaacgtcaccgagtacatcgcgggcgccaaggtgaggctggagtgcangcacttcggcaccggcaag

SEQ ID NO: 80834 - DNA, 431 bp, Zea mays
cgggtcggccacgcgtctaatcgacatcatctcactccctgtgatgctcagaaccatcggcctcgcgggtgtatttggctcctacgccttcgtctgctgcttgtcgctcgtcttcgtgtacctcagggtgcccgagaccaaggggttcccgctcgaggtcataatcgagttcttcaacgtgggtgccaaagctcagaagccggagcagcatgaagaggaggagaaccacgactaacccgtatatatttggattcattaataataactgttttttctttctttctttctttctttctttctttctggattatgagttgaatgaatgatgtcgatcagagagcttgatgaccatcatgttagcgatcccatgaaatatgtttgaggacgcatttggatgtttctaaaaaaaaaaaaaaagggccggcggctct

SEQ ID NO: 80835 - DNA, 442 bp, Zea mays
ccaagcctctacaaagaggcgcagtacgtggacagccctaccgggtgcaagcccgacgcggcggcactggtggtgacggtgaccgacctgtgcccgcccaacgaccagtggtgcaagccaccgcgggagcacttcgacctcagcatgcccgcgttcctccagatcgcgcaagagaaggccggcatcgtgccgatctcctaccgcagggtggcgtgcgtgaagcagggcggcatccggtacaccatcaccgggaacaagtacttcaacatggtgacgatcaccaatgtgggcggcgctggcgacatcgcggcggtgtcggtgaaggggagcaagcgcgtcaagtggacggagatgaagcgcaactgggggcaagtgtggcagaacggggaaggaactcacctgcaattcgctgacgttccgggtgatgaccagcgaccaccgc

SEQ ID NO: 80836 - DNA, 426 bp, Zea mays
acccacgcgtccgcgagaaccccgagaagagcatcgacaccatccacatcgacggctacgccttcttcgccgtcggcatggggcccggcaaatggacggcagcgtcgcggagtacgtacaacctcctggacacggtgagccggcacacgatccaggtgtacccaaggtcgtggacggcggtgatgatgacgttcgacaacgcgggcatgtggagcgtccgctccaacatctgggagaggcagtacctcggcgagcagctgtacgtgagcgtcatctcgccggagcggtcgctcagggacgagtacaacatgccggagaccagcctccgctgcggcaaggtcgtcggcctgccgatgccaccgtcctaccgcgccgtctagagcgtcgaccgatcgcgcacggtgctgtacacaactaaaggagagc

SEQ ID NO: 80837 - DNA, 375 bp, Zea mays
cacgcgtctaaaatcggtctgataatgggatgcaccaagtacatggacatccacagcgaacctgcagctgtcatccgtggcacgaatggatccgggggcatcactgtgaagaatacagggcaatcagtcatcattgggatcgacgacgagcccatgactcccgggcagtgtaacctggtggtgagaaggctgcgcgactacctgctcgaacaggggatgtgatgacaaccccttctcctggaatgcatgttgatgatgttgctggttccaacttcgtattcagtaataacaacacagctaagagcctcctacctaccctaattgcttgagcggctcttgtccgcgccataagataccaactgttgcactgggaaa

SEQ ID NO: 80838 - DNA, 401 bp, Zea mays
  unsure (1)..(401): unsure at all n locations
gtttgacctgagcatgtcagcaagtaaggacgtgcttgcccttgcttcactcgaggtggacctctccagcattgagccagggaccacggtgactgtgaagtggcgtggaaagccagtcttcatcagacgccggacggacgacgacatcaagcttgccaacagtgtggatgtggcatccctgcgccacccagagcaggatgcagagcgtgtgaagaatcccgagtggctggtggtcattggcgtgtgcactcacctcggctgcatcccactaccgaacgccggagactttggcggctggttctgcccatgccatggttcccactacgacatatccgggaggatccgcaagggccctgcgccgttcaacctcgaggtcncgacctacagtttcttggaggaga

SEQ ID NO: 80839 - DNA, 310 bp, Zea mays
actccgatccccaattcctccttcggatctcgcattcagcgcagcgcaggtgtgaaggaagggggacgcggaggaagatggggctcgcgttcgggaagctcttcagccggctcttcgccaagaaggagatgcggatcctcatggtcggcctcgacgccgccggtaaaaccaccatcctctacaagctcaagctcggcgagatcgtcaccaccatccccaccatcggtttcaatgttgaaactgttgagtacaagaacattagcttcactgtctgggatgtcgggggtcaggacaagattagacctctttg

SEQ ID NO: 80840 - DNA, 380 bp, Zea mays
tcgtgggtcgatacaagactctaatctatgtcgtcataatggcatgcacaaacaatgcgatgagagccttgttcctcctggtcctcttctgcatcgtgcatggtgagaaggaagagtcaaagggcatcgatgcgaaagcgtccgggcctggtgggtccttcgacatcaccaagttgggcgcctccggcaatggcaagacagacagcacgaaggctgtgcaggaggcatgggcatcggcgtgcggcggcactgggaagcagacaatcctcatacccaagggcgacttccttgtcggacaactcaacttcacaggcccttgcaagggcgacgtgaccatccaggtggatggcaatctgctggcgaccacggacctaagccag

SEQ ID NO: 80841 - DNA, 369 bp, Zea mays
cccacgcgtccgcccacgcgtccggaaacaacaagactgacagcgacgatgatgccacagctgcgtagcctcgtcgcgctggtcctcgtggccacggccatagccgccgctcccggcgttgggtttgtcgtcaccggccgcatctactgcgacaactgccgcgccgggttcgagacaaacgtgtcccacgccatccaaggcgcgacggtggagatggagtgccgccacttcgagtcgcagcaggtccacgacaaggcggaggcgacgacgggccccggcggctggtacaggatggagatcagcggcgaccaccaggacgagatctgcgacgtgcgcctgctcaagagcccgaggcggactgcgccgaga

SEQ ID NO: 80842 - DNA, 298 bp, Zea mays
ggcacgcgtctacgctacatcatgtcaagcaacatactgctctttgaccatgatgttgcgaagatcggggacttcgacatctcaaaccaggcccctgacatggctgcgcgcctccactctactcgcgttcttggcacctttggctaccatgcaccagaatatgccatgactggacagcttagcacgaagagtgatgtctacagctttggagttgtgctgctggagcttttaaccggtcgcaagccagttgaccacacactgccccgtggccagcaaagccttgtgacatgggctacac

SEQ ID NO: 80843 - DNA, 328 bp, Zea mays
  unsure (1)..(328): unsure at all n locations
gccgccggcactacgagtacgtctccctgggctgcgacgcgatgcncgtgctcaagggccgcacccccatccagtgctacgccgacttcatgcgcgccttccgcgaccacttcgccaccttcatgggcaacaccatcgtggagatccaggtcggcatgggccctgccggcgagctgcgctacccgtcctacccggagagcgacggcacctggtcgttccctggcatcggcgagttccagtgctacgacaggttcatgctgagtagcttgaaggcggctgctgaggccgtgggcaagccggagtggggcaacgcgggtccgggcgactc

SEQ ID NO: 80844 - DNA, 362 bp, Zea mays
gccgatacaacactctagaatgcgtcgtcttagtcgcccacagcgcccgacgtcgagctgccgcacgccaacttcaccgtggaccgcctcatccagatgttcggcgccaaggggttcacggtgcaggagctggtggcgctgtccggcgcccacacgctgggcttctcccactgcaaggagttcgccgaccgcctctacaacttccgcagccagggcgggaagccggagccgttcgaccccagcatgaacccgtcctacgccagggggctgcaggacgtgtgcaaggactacctcaaggaccccaccatcgccgcgttcaacgacatcatgactcccggcaagttcgacaacatgtacttcgt

SEQ ID NO: 80845 - DNA, 290 bp, Zea mays
cggtcgagcacgcgtctagcactatgcaatgaactttacacagtagtccgtgaagttttggatgccattcctccttttgagactacacggtcaggatgcagtcctgggctcctggcattgagttccttgaggatatctgttgagaaagccaagaatttactccagtattgctcagagagtagcaagctttacttggctgttacagcagaaagcgttctaacaaaatttgagaattcaagacaaggacttctggaaagccttcaccaagtagaagaaacaattccggaagc

SEQ ID NO: 80846 - DNA, 322 bp, Zea mays
agccgggttcgagacaaacgtgtcccacgccatccaaggcgcgacggtggagatggagtgccgccacttcgagtcgcagcaggtccacgacaaggcggaggcgacgacgggccccggcggctggtacaggattgagatcagcggcgaccaccaggacgagatctgcgacgtgcgcctgctcaagagccccgaggcggactgcgccgagatcgaccactcccgcgaccgctgccgcgtcccgctcaaccgcaacgacggcatcaagcagagcggcgtccgctacgccaaccccatcgccttcctccgcaaggagccgctcccc

SEQ ID NO: 80847 - DNA, 301 bp, Zea mays
agtttatcacctctaagttgtgatttttcatgggagactcactgaagcagatgcacacagatactttcagtagcttatcgacggtgttgatttttgtcacaagaaaaggagtctaccattgagacttaaaggatgcttagtgggtcaactgtagggatctttccttctacatacgacctatgggactcgctttttggtaggtgcccgtgcgatgccacggaacataaattgcgaacctccaatggacttcatttgagacaagtgatgcccaagaaaatgggggtaaactgacacagctatc

SEQ ID NO: 80848 - DNA, 331 bp, Zea mays
cggacgcgtgggttgcgccactgctcgttatcctcctcttgcattgcattgcaggtcgtagttgagcagcagcaaccactgcacaggatgtcgtggcagacgtacgtcgatgagcacctcatgtgcgagatcgagggccaccacctgagctctgccgccatagtcggccacgacggcgccgtttgggcccagagcaccgcattcccacagttcaagccagaggagatgaccaacatcattaaggacttcgacgagcctgggtttctggccccgatcggcctcgtccttggccccaacaagtacatggtcatccaaggcgaacccggggctg

SEQ ID NO: 80849 - DNA, 351 bp, Zea mays
cccacgcgtccgcccacgcgtccgagcggctgcacgcggccttgttcttcgtgatgggattctggctgctggacttttccaacaacacggtgcagggccccgcacgcgcgctgatggcggacctcgcaggcagccacggacccagcacggcgaacgccatcttcgtgtcgtggatggcgatcgggaacatcctgggctactcgtcggggtccaccgacaagtggcacacctggttcccgttcctgcagacgagggcatgctgcgaggcgtgcgccaacctcaaggccgccttcctggtgtcggtggtgttcctgggcctgtccacggtggtgaccatgatcttcgcccgcg

SEQ ID NO: 80850 - DNA, 417 bp, Zea mays
ctcgcgggtcgatacacgcctctacaatgcgtctcctgatggttactccgcgcgccttctctttctctcccggacgtcgatcgtgttcttcagcacgggctagctagctccctccctcccagccatggcgacgccggacaacaaggggcacgggcatccgctgcccaagtttggggagtgggacgtgaagaatccggccacgtccgagggcttcaccgtcatattccagaaggcccgcgacgacaagaagaccaccaccggccctggggctgggaacgcgcgcgcaggcattccgccggccttcaggaacggcggcggcgacggcgggtacaggcccgacttcggcgacggcaaccagtacacgccgcccaaacggaagaagtgggccttctgtggctgctgaatcgaagctcgctg

SEQ ID NO: 80851 - DNA, 378 bp, Zea mays
tacaagactctacaataattcgtgcgagcagccacaggcaggcgtcggcaccatgtcttctttcaccggcacgcaggacaagtgcgcggagtgcgacaagaccgtccacttcatcgacctcctcacggccgacggcgtcacctaccataagacatgcttcaagtgcagccactgcaaagggatcctctcgatgtgcagctactcttccatggacggtgtgctgtactgcaagacccacttcgagcagctcttcaaggagaccgggagcttctccaagaacttcacgccaggtggcaagtcttcagacaagggtgaactgacaagggcccccagcaagctatcatctgcgttttctggtactcaggataagtgtgcagc

SEQ ID NO: 80852 - DNA, 269 bp, Zea mays
tggtgctcctcctcggtgcgtgccccgagtacggctgcctcgtgtacgagtacatggagcacggcagcctcgaggaccggctgttccgtcggggcggcacgccgccgatcccgtgggcgcagcggttccggatcgcggcggagatcgcgacggcgctgctgttcctgcaccagacaaagccggagccgctggtgcaccgggacctgaagccggccaacatcctgctggaccgcaactacgtgagcaagatcagcgacgtcgggctggcg

SEQ ID NO: 80853 - DNA, 309 bp, Zea mays
cttgtgccgattctgctgatccctcgccgacaacggccggcgaatcgacaccatggccgctgcgcgccggggcccgtggcgacagcaccaacggcgtcgtccgtccccgcccccgcgaccgcggcgtcggcggccggagcatggcggggcgcgtgggcgtcctcgccttctgtgtcgcagggatctggtccgcctacatctaccaaggcgtcctccaggagactctatcgacgaagcggttcgggccggatgcgcggcggttcgagcacctcgcgttcctcaacttcgcgcagaacgtcatccgcttcg

SEQ ID NO: 80854 - DNA, 247 bp, Zea mays
atgcgcaccggacccggagcaggatttcagcaccgggtacgacggcagggatgtcgtgctccagaacctggtccagatctgcgtgttcagggtcgccaatgggactcgcaggccgtggatgtggtgggactacgtgcacgacttcgctgtgaggtgcccgatgaaggagaagaagtacacgcgtgagtgtgcgaacggtgttatcaattcacttggactggacattgagaaaatcaacaagtgtgtt

SEQ ID NO: 80855 - DNA, 315 bp, Zea mays
  unsure (1)..(315): unsure at all n locations
agtgagatattggaatatcatccacaactgctcaaagactatatcaatggcacggagaggacaacctttctgtacccaagtgctgtcgaccaatttaggaagcaatttgctcatcttgaagaaaatagtggaaacggacctgtgattccaatggaaagaaaacatacttctcttcctaggtctactattgttcactcatctccaattcctgtcaaggaacaaccccgtatcggcccatgtanggaaaggccttcatctgatgagtcctaaaggaatcctcgggagacaggacaatattccgggaatctccccaaa

SEQ ID NO: 80856 - DNA, 361 bp, Zea mays
aatcatccacaactgctcaaagactatatcaatggcacggagaggacaacctttctgtacccaagtgctgtcgaccaatttaggaaccaatttgctcatcttgaagaaaatagtggcaacggacctgtgattccaatggaaagaaagcatacttctcatcctaggtctactattgttcactcatcaccaattcctgtcaaggaacaaccccgtatcggaccatgtatggaaatgccttcatctgatgagtcctacaggaatcctcgggagacagaacaatattcctggaatctccgccagaacgtcacaggctccagaaagagtgccaacagtcagaccagtaaagggtttttggccaata

SEQ ID NO: 80857 - DNA, 222 bp, Zea mays
cgcccaggccgatacaacactctagaggcagtcgtatcacacagccagcgggcagccatgagggagatcctccacatccagggcgggcagtgcgggaaccagatcggggccaagttctgggaggtgatctgcgacgagcacgggatcgacgccacgggccgctacgcgggggactcagacctccagctcgagcgcgtcaacgtctactacaacgaggccagc

SEQ ID NO: 80858 - DNA, 331 bp, Zea mays
gggtcgagacacgcgtctaggccgatgcggggcactgcctcgctgacatcggtgacatgatgacccgcgagttcacggctcagcaggatgtgctgagcacactcgaggcgctatgcaagcaagcgcgcgactccgtcctcctcctcccacgcctgccctccttccgacacccctcgaccgacggcgacggcgtcgacgagggtacagccgtctccggcgggcggaagcacgtgtcgttcggcgacctgagcttcgcggagtgggcgtcgttcctggagaggttcgagcagctgctgccggcggcgctagaagccaagaagcgcgctgggct

SEQ ID NO: 80859 - DNA, 207 bp, Zea mays
gggtcagcagctcaatcatcctcacacacacagctcacacacactccaatatgaaacgacatgatcacggcctctggacctcggctatcgcacccaagacgagaagaaaaacgcgaacgcagcgcgagcaaaaatcagacactctgctcacctgtgcagggcagaagggaccgacctggtcgtgtgcaaggagtcctgcgcgctctc

SEQ ID NO: 80860 - DNA, 281 bp, Zea mays
cccacgcgtccgtccacgtggtcaacaacgactacacgcactggctcatgtacgccatcggcggcagcaaggcccccaccatcatcagccagggcaaccgctacatcgcgccgcccaaccttgccgcgaagcaggtcaccaagcagcatgacacgccggagtccgtgtggaagaactgggtgtggcactccgagaacgacctcttcatggagggcgcctacttcaccgtcaccggcggccagatcaacagacagttcaacaagaaggacctcatcaagccc

SEQ ID NO: 80861 - DNA, 286 bp, Zea mays
cacgactctagcatgactcttatcatcaaggcgtggaagaacgcgtgcgaggcgacgggggtacagaagatcgtcatcccgccgggcaactacctgacgggcgggctggagctgaagggcccctgcaagtcctccatcatcatccgtctcgacggcaacctgctcggcaccggcgacctcagcgcgtaccaaaggaactggatcgagatcgagaacgtcgagaacctgtccatcaacggccacggcaccatcgacgggcagggaaccctggtgtggagcaagaacc

SEQ ID NO: 80862 - DNA, 379 bp, Zea mays
accacgcgtccgcggacgcgtgggcggacgcgtgggatttcgaataacacagttgagcgcgacgatgggatccctcgctaataacatcatggtcgtgggtgtcgtccttgcagcgctcgtcgccggcgggtcatgcgggcccccgaaggtgccgcccggtcccaacatcaccaccaactacaacggcaagtggctcaccgccagggccacctggtacggtcagcccaacggtgccggcgctcctgacaacggcggtgcgtgcgggatcaagaacgtgaacctgccaccctacagcggcatgacggcgtgcggcaacgtccccatcttcaaggacggcaagggctgcggctcatgctacgaggtgagatgcaagggaaaa

SEQ ID NO: 80863 - DNA, 336 bp, Zea mays
cgggtcgatacacgcgtctacacagaggcctctataagctcgcacgcgccggcaaaatcaaagggttcaccggcatcgacgatccttacgaaccgccgtcggactgtgagatagtgatccagtgtaaagtcggcgactgcccttcgcctgaatcgatggctggtcacgttgtgtcgtaccttgagacgaatggtttcctccaggactagacatggaatgcgatcgatgcgtctgatgtgtatatatgtagcagcagccggagcggcattgccaaggctgtgtaatctcatggctgtctttctctttaagaccaaaacaaacaagagatggcagtgt

SEQ ID NO: 80864 - DNA, 371 bp, Zea mays
gggtcgagcacgcgtccggttatacaggcgctcatattgggccagagcctacaacggacaggtttgttgtcatcacttctggaccagacgaaagatgcattcctggaaacaccatcgccgtccaagctgacatgccatacagtggcctgtcatcgttcggaacagcatttttgtccaagttcgaatgttctcagatgccacatccactgttagagcacgtgaccttcgtggacactccaggagttttatcaggggagaagcagcggacgcagcgcagctacgatttcaccggagtcacgtcgtggtttgcggccaagtgcgacctcatccttctcctgtttgatccgcataagcttgacatcagcgatgag

SEQ ID NO: 80865 - DNA, 315 bp, Zea mays
gggtcgagacacgcgtccagcactacgtgctgcacaacgccaccgagctcagcagcaacgcgctggccatcaccaacagcctcggcgggatcctgaagaagatggacctcggcatgttcagcaaggactcgcgccgccgactgctgtcgtcggagcaagatgagaaaggctggcccgtgtggatgcggtcgccggagaggaagctgctggcgtcgggcaaccagcccaagccgaacgcgatcgtggccaaggacggtagcgggcagttcaagagcatccagcaggccgtggacgccgtgcccaagggccatcagg

SEQ ID NO: 80866 - DNA, 365 bp, Zea mays
acggacgcgtggggccgtgacccgggcccgggcgctgtggatcaccttcgcgcgcgacatggtgatcgagctctgccaggagctcatcgtgagcagcgacaagaccatcgacgggcgcggagcgcaggtgcacatcgtgggcgcgcagatcacgctgcagaacgtgcgcaacgtgatcctccacaacctgcacgtccacgacgccgcggcgcacggcggcggcgcgatccgggactcgcagcaccactggggcgtgcgcggggagagcgacggcgacggcgtctccgtgatggggtccagcgatatctggatcgaccacctgtccatgagcagctgcgcggacgggctggtggacgcggtggacg

SEQ ID NO: 80867 - DNA, 321 bp, Zea mays
actggttactccgcgcgccttctcgttctctctcggacgtccatcgtgttcttcagcaccggctagctaattccctccctcccagccatgatgacgccggacatcacggggcacgggtatccgctgcccaagtttggggagtgggacgtgaagaatccggtcacctccgacggcttcaccgtcatattccagaaggcccgcgactacaagaagaccaccaccggccctggggctgggaacgcgcgcgcaagcattccgcaggccttcacgaacggtggctgcgacggcggctacatgcccgacttcggcgacggcaaccag

SEQ ID NO: 80868 - DNA, 381 bp, Zea mays
acgcgtctaacacggtctaatgaagcgcaacgatttctgaccatcccctgacggtttgcggtggccgtccaaatccaatcccaggcgaccatgatctgcgtggacaactccgagtggatgaggaatggggactatcccccatcgcggttcgcggcgcaagcccacgccttcgccgtcctctccggcgccaagacggaggcgaacctggagagcacggtggggctggtggccatggcgggcaaaggcgtcagcgtgctcgtcccgccaaacaacgacttctgcaaagtcctgtcatgcatgaacgggctggaaattggtggtgaagcaaacttgactgctgcgattcacgtcgctcaatttgcactcaagaatcggcaagac

SEQ ID NO: 80869 - DNA, 358 bp, Zea mays
  unsure (1)..(358): unsure at all n locations
acccacacgtccggcttaattgcgccactgctcgttatcctcctcttgcattgcattgcaggtcgtagttgagcagcagcaaccactgcacaggatgtcgtggcagacgtacgtcgatgagcacctcatgtgcgagatcganggccaccacctgagctctgccgccatagtcggccacgacggcgccgtttgggcccagagcaccgcattcccacagttcaagccagaggagatgaccaacatcattaaggacttcgacgagcctgggtttctggccccgatcggcctcttccttggccccaccaagtacatggtcatccaaggcgaacccggcgctgtcatccccgggaaaaaagga

SEQ ID NO: 80870 - DNA, 269 bp, Zea mays
acaccctaaagtatgtcgtattataattgcgccactgctcgttatcctcctcttgcattgcattgcaggtcgtagttgagcagcagcaaccactgcacaggatgtcgtggcagacgtacgtcgatgagcacctcatgtggcgagatcgagggccaccacctgagctctgccgccatagtcgggcacgacggcgccgtttgggcccagagcaccgcattcccacagttcaagccagaggagatgaccaacatcattaaggacttcgacga

SEQ ID NO: 80871 - DNA, 311 bp, Zea mays
gccgtgctagcggtggccgcggatgtcgccaacgccggccacgccaagcccctgacgcctggcgggcgcgtggtacaccacaaccacggcaagttcacggccgggccgtggaaacccgcccacgcgaccttctacggcgggcgggacgggtccggcaccacggcgggcgcgtgcgggtacaaggacacgcgcgcgcaggggtatggcgtgcagacggtggccgtgagcacttcgacctcagcatgcccgcgttcctccagatcgcgcaggagaaggccggcatcgtgcccatctcctaccgcaaggtggcg

SEQ ID NO: 80872 - DNA, 316 bp, Zea mays
tacattcactctttctagccacggcaaaacaccttcgccggcgagagcatggcgatggcgtaccgtgtcctggaggtcaccctggtgtcggcaaatgacctcaagaaagtgtcgctcttctcccggactcgcatctacgccgtggcttccatctccggattcgacctccgcatcccttcccacagcacccaagcagaccacagcaacggctgcaacccctgctggaacgccgtggtacacttccccatcccggctgccgctgacacccgcggcctcgcactccacgtgaggctccgcgcccagcgtctatacctgg

SEQ ID NO: 80873 - DNA, 366 bp, Zea mays
ctctacccacacttctggcaaccctacagcggcatgacggcgtgcggcaacgtccccatcttcaaggacggcaagggctgcggctcatgctacgaggtgagatgcaaggaaaaacctgagtgctcgggcaatccagtcacggtgtacatcactgacatgaactacgagcctatcgctccctaccacttcgacttgagcggcaaggccttcggctccctggcaaagcccgggctcaacgacaagattcgccactgcggcatcatggacgtcgagttcagaagggtgcgatgcaagtaccccgccgggcagaagatcgtgttccacatcgagaagggctgcaaccccaactacctggccgtgctggtg

SEQ ID NO: 80874 - DNA, 309 bp, Zea mays
  unsure (1)..(309): unsure at all n locations
agcctctacagtaactcgtgctaacgcgtgggcaagttgggcgcctccggcaatggcaagacagacagcacgaaggctgtgcangaggcatgggcatcggcgtgcggcggcactgggaagcagacaatcctcatacccaagggcgacttccttgtcggacaactcaactttacaggcccttgcaagggcgacgtgaccatccaggtggatggcaatctgctggcgaccacggacctaagccagtacaaggaccatggtaattggatcgagattctacgcgtggataacctggtcatcaccggcaagggg

SEQ ID NO: 80875 - DNA, 284 bp, Zea mays
tagactcattagcgcgccggactcgcgcgtcatcttcgccgacacctacctctccaagaccatccagccggccggctggacaaccataggctacagcggcatcaccgacaaggtgacgctcgcggagttcaactgcactgggccgggcgctgacgtgacgaaccgcgtgccatggtcgcggaggttctctctcgacgacgcagccaagtacctcaccatcgacttcatcaactgcaaggactggctgccggcgtactactactgatccgacgatcgactgctgg

SEQ ID NO: 80876 - DNA, 367 bp, Zea mays
ctctacaatgacacgctgatcaaggacgtgaccgtgacggcgcccggggacagccccaacacggatggcatccacatgggcgactcatccgggatcaccatcaccaacaccgtcattggcgtcggcgacgactgcatctccatcggccccgggacctccaaggtgaacatcaccgacgtgacctgcggccctggccacggcatcagcatcggaagcctagggcggtacaaggacgagaaggacgtcacggacatcaacgtcaaggattgcactcttaagaagacgatgttcggcgtccgcatcaaggcgtacgaggacgccgcctccgtgctcaccgtctccaagatccactacgagaatatcaaga

SEQ ID NO: 80877 - DNA, 328 bp, Zea mays
ctctagacatttccattggaacagttgagcgcgacgatgggatccctcgctaataacatcatggtcgtgggtgtcgtccttgcagcgctcgtcgccggcgggtcatgcgggcggccgaaggtgccgcccggtcccaacatcaccaccaactacaacggcaagtggctcaccgccagggccacctggtacggtcagcccaacgggtgccggcgctcctgacaacggcggtgcgtgcgggatcaagaacgtggacctgcgaccctacagcggaatgacggcgtgcgggaacgtccccatcttcaaggagggcaagggctgcggctcatgc

SEQ ID NO: 80878 - DNA, 428 bp, Zea mays
ctcgcgggccgatacacgcctcaagtctaagtctcctcactcaccatagcgcccgctctgtcgcccttcgttcacctctccttcctctcgtccctgcctgccagggagaggggaagtcagaggcacggagtggcgcagagcagacgcccgtgaaccattgtagctgtccctgtcgtcgtcgtcgtcaacgaacccacacaaggaaaggatggagaagaagccgaccatcctcatgaacaggtacgagctcgggcgcacgctcgggcagggcaccttcgccaaggtgtaccacggccggaacctcgcgtccggcgagagcgtggccatcaaggtcatcgacaaggagaaggtgatgcgcgtcggcatgatcgaccagatcaagcgcgagatctccgtcatgcgcctcgtccgccaacccaacgtcgtgc

SEQ ID NO: 80879 - DNA, 413 bp, Zea mays
agacatttcgaataacacagttgagcgcgacgatgggatccctcgctaataacatcatggtcgtgggtgtcgtccttgcagcgctcgtcgccggcgggtcatgcgggcccccgaaggtgccgcccggtcccaacatcaccaccaactacaacggcaagtggctcaccgccagggccacctggtacggtcagcccaacggtgccggcgctcctgacaacggcggtgcgtgcgggatcaagaacgtgaacctgccaccctacagcggcatgacggcgtgcggcaacgtccccatcttcaaggacggcaagggctgcggctcatgctacgaggtgagatgcaaggaaaaacctgagtgctccggcaatccagtcacggtgtacatcactgacatgaactacgagcctatcgctccc

SEQ ID NO: 80880 - DNA, 415 bp, Zea mays
agcgagctcctcgcccgcgtcgcccgcggccggctcaaggaggacgccgcgagaaggtacttccaccagctcgtcggcgccgtcgacttctgccacagccgcggcgtctaccaccgcgacctcaagcccgagaacctcctcgtcgacgagcacggcaacctcaaggtctccgacttcggcctcagcgcgctcagggagtgccagaagcaggacggcctgctgcacaccacctgcggcacccccgcgtacgtcgcgccggagatcatcaacaagaagggctacgacggggccaaggccgacatctggtcctgcggcgtcatcctcttcgtgctcctcgccggctacctcccgttccacgacgccaacctggtggagatgtaccgcaagatcagcagagcccacgtcaagtacccgc

SEQ ID NO: 80881 - DNA, 360 bp, Zea mays
acatctgttcaaagcagatgcaccacaccggcaacgagctcttgcagcggacgcaataacctgccggaaattcgccgagcgggcttacaagtacagaccactcaaagttgttgagtttgatcggccctacccacagtgcatagcatacttggatctcaagcgcgacgagtgctctcgactctttcctgcagggcggatatactcgcaagcgttccaccttgcagggcagggtttcttcctctcggctcactgtaacatggagcagcaaagcgcgttctactgcttcgggctcttcctggggatgcaagagaagggctccacgagtgtgacagtggactacgagttcgctgcaaggacgag

SEQ ID NO: 80882 - DNA, 383 bp, Zea mays
tcgcgggccgatacaagactctacagtgagtcctattatccccgctctctgtctcgccgcccggggagaaggagggctcctccgctcgcggggaagagcacgccattgcctccgccgcgctgactggggaagatggttgtccaggagttcagagttgatctcaacaagcaccttgttttccagggtggccatcttgaagaacggtagcatcaatgggttcaacaaccgatcgttagcaacgagggtccacgcgtttgcgggaatgatgtcttggagttcttgactcacacgaggtggtgggctgtgccaactatatggctgactgttgtcagctgcctgctcgtgaaatctattctgatgggtcatatcgttcatgacgtagc

SEQ ID NO: 80883 - DNA, 383 bp, Zea mays
aacacgaatctgccatcctctccaacacgaagatggcgttcatcagcaatgtcgcagtgaaggcggcggccgtggccgcgctgctgctggtcgcagcggtgtcgcctgccgcgcgcgcggcggcggtggcggtggcgggaggggcgccgtcggtgccggcgggtccgctggacatcgcgcagctgggcgccaagggcgacggcaagtcggacagcaccccgatgatcctcaaggcgtggaagaacgcgtgcgaggcgacgggggtacagaagatcgtcatcccgccgggcaactacctgacgggcgggctggagctgaagggcccctgcaagtcctccatcatcatccgtctcgacggcaacctgctcggcaccggcgacctc

SEQ ID NO: 80884 - DNA, 401 bp, Zea mays
cacgcgtctacccagacgtctggaagacaagtggccagagtattatgacaccaggacaggaatgttcattgggaagcaatcacggctatatcaaacttggagcattgctggatatcttagctctaagatgttattggactgtccggagatggcatccatactagtatgcgatgaagacttcgagctgctggaaggttgtgcttgcagcttgaataagaatgctcgcaccaaatgctcacgtcgtgcggccaagtcgcaggttcttgtgtagttccatgcctgttcttgacccaaaagctgcaacgctccttcaacttgttgtaattgttcgtcacagaagctggcactagttactagttacttaagcagaatgattcacaaacaactatgccgattttttt

SEQ ID NO: 80885 - DNA, 354 bp, Zea mays
agctatctccatcatcggtggacctctcgccgcggtggtctcgaccccattccgcttggttaccacgaacatctatgggatggcggtgatggccgtcggggtgtactgcgcgagcaggtatgcagctgatattggcaaccgccgtgatgtggtgaaaatggaagtcgaggacctgacggccggactggccagcggcaggatatgtgctgtggagaacatcgcccagctggtggctccggaggcagaaggcccggccgatgccacggccacggccacgctggctgcttaacgggccattgtgccattattgctgcgacagagatgtgcgtcagccaacatgtgtgctgttgtttt

SEQ ID NO: 80886 - DNA, 324 bp, Zea mays
gacccacgcctctacagtcagtcctcgaaaataatgaagagccgcagcatggcatcatcggccgcgctcttggtgctagccctcgcgctagtggcggccaccgccccacaggtagcggaggcaaagaagaagagagcggcggagagcggcgaggcggcggaggcgaagaagatccaggacgacttctgctcgacgctgtgcgagggcaagaaggggacggacctggtcgtgtgcaaggagtcctgcgcgctctcccagcagtccaacctggtgctgtacggcaggatccagtgcaagggcaagtgcaccgagcagaagggcatc

SEQ ID NO: 80887 - DNA, 396 bp, Zea mays
gggccgacccacgcctctaggaatggtcatagtacagcacttcgtgcttgttcatggcgaagggcatggggcctggtgctggttcaagctccgctggctcctcgagggcgctggccaccgtgtcacgtgcgttgacctggccggaggcggcgtcgatcctaccgaccccaacaccatccggtccttcaagcagtacgacaagccgctcatagacctcatctccaacttgccagacggagagaaggtgattctgatcggacatggcgctggagggctgagtgtgatccatgcaatgcatgaatttgttgacaggatcggtcaagcatttttcgtggccgccacaatgctgccgtttggatttcaagccgatgaagataagaacgatgggttaccgac

SEQ ID NO: 80888 - DNA, 384 bp, Zea mays
actgatgtaccatcaaacacggtgttgacagcatcaaagaagatgctggaactaaaaatgagttcagcagttgtagcaatcgaaagcaaacctgggggaattctgacatctagagatatcctgatgcgtgttatcgcccaaaatcttcctcctgagtccactacagtcgagaaggtcatgactcagtgtcctgaatgtgcctcggtagacaccccaattcttgatgctcttcacacaatgcatgatggaaaatttttacatttgcctgttctggacagggatggaaatgttgtgactgttgttgatgttcttcacataacgcatgctgcaattgctacggttggaaacagcggggcagctggatctgagtcaacgtctgccatg

SEQ ID NO: 80889 - DNA, 351 bp, Zea mays
acgcgtccaacgaggtgcgagaggacgaagagggcgcatcgtgggttgggtgatcacggcctgatggggtcgtggcgcaaggcctacggcgccctcaaggactccaccaaggtcggcctcgccaaggtcaacagcgaattcaaggaattggatattgcaattgtgaaggcaaccaaccatgttgaatgccctcccaaggaacggcacgtcagaaaaatactcttggcgacctcagcaaaccgccctcgcgcagacctctcgtactgcatatacgcattgtcaaggagattgtccaagacaaagaactggatagttgcgctcaagacattgatagtggtgcataagcttctg

SEQ ID NO: 80890 - DNA, 365 bp, Zea mays
atcccaccgttctgggcagagactgatgagggcatagcacacgctatcatccggtccaacatcgacttccgcagagagccttggtcaaaggtgtcggaaaatgcaaaagatcttgtgaggaagatgcttgatccaagcccctactgtcggttgactgcccagcaggttctagaacatccctggatacagaatgccagtgcagctcccaacatcccacttggagaagcagtgaggtccaggctgaagcaattcactgttatgaacaagttcaagaagaaggccctgcttgtggtggcagagtacctaccagccgaagagctggaagcaatcagggagttgtttcagttgctggacacgaacaagga

SEQ ID NO: 80891 - DNA, 336 bp, Zea mays
acccacgcgtccgctccaccaccaccaccaagctcaacaacagccagctcgcgaaaataatgaagagccgcagcatggcatcatcggccgcgctcttggtgctagccctcgcgctagtggcggccaccgccccacaggtagcggaggcaaagaagaagagagcggcggagagcggcgaggcggcggaggcgaagaagatccaggacgacttctgctcgacgctgtgcgagggcaagaaggggacggacctggtcgtgtgcaaggagtcctgcgcgctctcccagcagtccaacctggtgctgtacggcaggatccagtgcaagggcaagtgcaccg

SEQ ID NO: 80892 - DNA, 418 bp, Zea mays
cgggccgatccacgagtctgcccaggcgtcctgggagcacttggttttcatttacgagttcattgcaattacgagttatgttgagcgccgtagcgaacgtagccaaggccggccacgccaagcccctgacgcctggcgggcgtgtggtacacgacaaccacggcaagttcacggccgggccgtggaaacccgcccacgcgaccttctacggcgggcgggacgggtccggcaccacggcgggcgcgtgcgggtacaaggacacgcgcacgcaggggtacggcgtgcagacggtggccgtgagcacggtgctgttcggtgacggcacggcctgcggcgggtgctacgaggtgcggtgcgtggacagccctagcgggtgcaagcccgacgccgcggcactggtggtgacggtgaccgacct

SEQ ID NO: 80893 - DNA, 402 bp, Zea mays
  unsure (1)..(402): unsure at all n locations
gcgggccgacacaagcctctagcgggcatcgctccacaggtagcggaggcaaagaagaagagagcggcggagagcggcgaggcggcggaggcgaagaagatccaggacgacttctgctcgacgctgtgcgagggcaagaaggggacggacctggtcgtgtgcaaggagtcctgcgcgctctcccagcagtccaacctggtgctgtacggcaggatccagtgcaagggcaagtgcaccgagcagaagggcatcacggcgccggccatgaaggtctgccaggaggagtgcgacaaggcgtacgtggtgaaggcggccgaggtcaccaaggcctgcagcgtcacctgcgccaaggagaagaaccgcgcctcagccagaactgcaagaggtcctngcaccctcctc

SEQ ID NO: 80894 - DNA, 385 bp, Zea mays
tccaagcctctagtctgagtcatattaccttcacgcctccctcaccaaataaggtcccgcccttttccgacattcacaggggggacaggaaatcagcggccatggcctcgattccggcgacgaccttcgccgtcatcttatccgtcctcttctgtgccgcggctggcaccgccgtcgacaacgacctccccgactacgtcatccagggccgcgtctattgcgacacctgccgcgccgggttcgtgaccaatgtcaccgagtacatcgcgggcgccaaggtgaggctggagtgcaagcacttcggcaccggcaagctcgagcgctccatcgacggggtgaccgacgggaacggcacgtacacgatcgagctcaaggacagccacga

SEQ ID NO: 80895 - DNA, 395 bp, Zea mays
tacaccggatcatcagagcctgatctttgctggcaagcagctggaggatggccgtaccctcgccgactacaacatccagaaggagagcaccctccacctggtgctccgcttgcgaggtggtatgcagatctttgtgaagaccttgactggcaagaccataaccctggaggttgagagctccgacaccatcgacaacgtgaaggcgaagatccaggacaaagagggcatccccccagaccagcagcgtctgatcttcgctggcaagcagctggaggatggccgcaccctagcagactacaacatccagaaggagagcactctccacctggtgctccgcctccgcggtggtcagtaagccatgggtcatttaagctgctgctgtacctgggtatctg

SEQ ID NO: 80896 - DNA, 384 bp, Zea mays
gtcgatgacaagcctctagtgtgattcatcttaaagctcctgttaagatatttggagatttacacggacaatttggagatctgatgaggttatttgatgaatatggtgctccttcgactgcaggtgacattgcttacattgattatctattcttgggggattatgtagatcgcggccagcatagtttagaaactatcactcttcttcttgcattgaaggttgaatatcctcaaaatgtacatttgattcgaggaaatcacgaagctgcagatatcaatgctttgtttggtttccgaatagagtgtatagaacgaatgggcgaaagagatggtatctggacatggcatcgaatgaataggctatttaattggcttcctttggctg

SEQ ID NO: 80897 - DNA, 376 bp, Zea mays
acgatcactgtggtcctgtttagcactatggtgtttgggatgatgacgaagccattgatccggctgctgctccctgcctgcagcaacacggccacctccgagccgtcctcacccaagtccctgcactcgcctctcctgacgagcatgcagggctcggacatcgagacggggtcggcacagattgtgaggccgtccagcctccggatgctcctaagcaagccaacccacacggtgcactactactggcgcaagttcgacgacgcgctcatgcggcccatgtttggcggccgcgggttcgtgcccttctcccctggatcgcccactgagcagagcgtccacgacggacggtgaacaaagccgcgtctgacaccaagag

SEQ ID NO: 80898 - DNA, 386 bp, Zea mays
accaaaacatagagtgtcgacttttctattggtgtgattgggggcactaaatacctaccacattgcactcagactacatatactgtgtttgtgtgttgtatgccgtatgcgtgtgtgagcttgcgcaaattggacatctaggccgtgcgtaccctgcgatgaaaggcgccgtcatcggcgcatcgaccgtcctggtcgtggcggtggtggccaccatctgcgtcgtttccttcaaaggcagcggcgatggcgggagggccgaggagggcgagatgtccacgtcggtgaagtccatcaagtccttctgccagcccgtggactacagggagacgtgcgagaaggcgctggacgctgcagccgggaacgccaccagccccacggagctg

SEQ ID NO: 80899 - DNA, 363 bp, Zea mays
gcgtccaattttatcaacgcttctcctgctggttactccgcgcgccttctctttctctcccggacgtcgatcgtgttcttcagcacgggctagctagctccctccctcccagccatggcgacgccggacaacaaggggcacgggcatccgctgcccaagtttggggagtgggacgtgaagaatccggccacgtccgagggcttcaccgtcatattccagaaggcccgcgacgacaagaagaccaccaccggccctggggctgggaacgcgcgcgcaggcattccgccggccttcaggaacggcggcggcgacggcgggtacaggcccgacttcggcgacggcaaccagtacacgccgcccaaa

SEQ ID NO: 80900 - DNA, 360 bp, Zea mays
gggccgagccacgcgtccatatcaatggcgttcatcagcagtgcggcgatgaaggcagccgtggccgctctgctggtgttcgccgcggtgtcgcctgccgcgcgcgcggtggcggcggaggcggaggcgaaggcgaaggctgtgggaggcgcgccgtcggtgcccgctggctcgctggacatcgcgcagctgggcgccaagggcgacggcaagtcggacagcaccccgatggtgctcaaggcgtggaagcacgcgtgcgaggcgacggggcagcagaagatcgtcatccccaagggcaactacctgacgggcgcgctggacctggtgggcccctgcaagtcctccatcatcatccgcctc

SEQ ID NO: 80901 - DNA, 380 bp, Zea mays
aggttcgtggatggcggtgccacaacctctcctgctgtcgctgctggtcgccgtgctagcggtggccgccgatgtcgccaacgccggccacgccaagcccctaacgcctggcgggcgcgtggtacacgacaaccacggcaagttcacggccgggccgtggaaacccgcccacgcaaccttctacggcgggcgtgacgggtccggcaccacggcgggcgcgtgcgggtacaaggacacgcgcacgcaggggtacggcgtgcagacggtggccgtgagcactgtgctgttcggtgacggcgcggcctgcggagggtgctacgaggtgcggtgcgtggacagccctagcgggtgcaagcccgacgcggcagcgctggtggtga

SEQ ID NO: 80902 - DNA, 423 bp, Zea mays
agccgagttcgacgcgttccaggacacgctgtacgtgcacgcgcggcggcagttcttccgcaactgcgtggtctccggcaccatcgacttcatcttcggcaactcggcggcggtgttccagaactgcctcatcatcacgcggcggcccatggacaaccagcagaactcggtgacggcgcacgggcgcaccgaccccaacatgaagtccgggctcgtcatccagaactgccgcctggtgcccgaccagaagctgttcccggaccgcttcaagatcccctcgtacctgggccgcccctggaaggagttctcgcgcctcgtcatcatggagagcaccatcgccgacttcgtcaagccagaggggtacatgccctggaacggcgacttcgccctcaagacgctctactacgccgagtacaacaaccg

SEQ ID NO: 80903 - DNA, 420 bp, Zea mays
gaaataattgggaataaatagttcgtgaatccctgaagcgtgcatatatatattcctgccaagataaaggtaatggagtcgtcacgcaggttccagccggccgtcatcctgcttctcctgctcattgtgtccaccgatatggcacaggcaagggaatgcgagaagtacagtgagcgatttgttggggcatgcatgatcgcagacaactgcgccaatgtgtgccgcggtgagggcttcttggccggcaggtgcagcaccttccgccgccgctgcatctgcactaggcagtgctaaacaagatcgctcgatcgcttgccatgcatcgacaacctattcttaataacgttcattatctcgttcttatttatgacgaatgtcatgtatgttctggtgactgtcatgtatattctgatgactgtc

SEQ ID NO: 80904 - DNA, 363 bp, Zea mays
gcagtcatctcctccaccaccaccaccaagctcaacaacagccagctcgcgaaaataatgaagagccgcagcatggcatcatcggccgcgctcttggtgctagccctcgcgctagtggcggccaccgccccacaggtagcggaggcaaagaagaagagagcggcggagagcggcgaggcggcggaggcgaagaagatccaggacgacttctgctcgacgctgtgcgagggcaagaaggggacggacctggtcgtgtgcaaggagtcctgcgcgctctcccagcagtccaacctggtgctgtacggcaggatccagtgcaagggcaagtgcaccgagcagaagggcatcacggcgccggccatg

SEQ ID NO: 80905 - DNA, 430 bp, Zea mays
atacaagactctaccatgagtcatctcaagcccaacggcgacgcgcctatctcgagcacggacaagcagatctcccccgacgccaagtccggaacggcgtactcgaagccgcgccggctgcggaccgacgaggtccccgggatcgtcgacgacttcaggcgggccgcacggaacgcgatccaggctggtttcgacgccgtcgagatccacggcgcgcacgggtacctcctggagcagttcatgaaggacagctgcaacgaccgcacggaccagtacggcggcagcctggagaaccggtgccgtctcgccgtggaggtcgtggacgccgtcgtccgcgaggtgggcgcgcgccgcgtcggcatcaggctgtcgcccttcgtcgacttcgtggactgcgtggactccgacccggtggcgctcggccactaca

SEQ ID NO: 80906 - DNA, 277 bp, Zea mays
gggtcgagacacgcgtctacccacacgtccgacacctagcgaggcagcgccatccacgcctgccgctgaggagacgacgacgactccttcgtcaggcggcgggggttacggcggtgcaaccggcaaggcttcctcaggcggcggcgggctggaccccgacggcgacccagaggttgggctgaacgggaaggcgatcgaggagatcgtgaacgagcacaacgtgttccgcgccaaggagcacgtgcctccgctggtgtggaacgcgacgctggccagg

SEQ ID NO: 80907 - DNA, 338 bp, Zea mays
aagagagaagatttatacccgaccttccatgcgaaactgacaatatgggtcagattgtgaacctagtagatgtccatgacttcgttcctgacagcgtggaaagtgtatctgagctgatggcccctccctccccggactccagctacggtttccatgttcccggcgagaaggagttctccaaggagcctcctcagctgccgtcccagctctatctcggcgtgctgaattcccggagcaccgaagaaggctgcgcgaggccgaggcacgtcgtcctcgaccatctctacatcgagaagggctggggcgcacagccgctggtggccctcggctacacccac

SEQ ID NO: 80908 - DNA, 360 bp, Zea mays
aaagaaacaggcacacaagaacaaatacctcgctaccaacaatggcctccaggtcctccatcctacttgcaacgtcgatgctggctgcgctgtttgcggttggtttgtgcaccaccccgctcaccttccaggttggcaagggatccaagcctggccacctgatcctcacccccaatgttgcaaccatatccgacgtggagatcaaagagcacgggggcgatgacttctcctttacgctcaaggagggcccgaccggcacctggacgctcgacaccaaggccccgctcaagtaccccctttgcatccgctttgctgtcaagtccggtggctaccgcatcgctgacgacgtcatccccgctg

SEQ ID NO: 80909 - DNA, 352 bp, Zea mays
gaacgtcgtacgagaacctttctccctcctccacctttctccttttcttgccacggcaaaacaccttcgccggcgagagcatggcgatggcgtaccgtgtcctggaggtcaccctggtgtcagcaaatgacctcaagaaagtgtcgctcttctcccggactcgcatctacgccgtggcttccatctccggattcgacctccgcatcccttcccacagcacccaagcagaccacagcaacggctgcaacccctgctggaacgccgtggtacacttccccatcccggctgccgctgacacccgcggcctcgcactccacgtgaggctccgcgcccagcgtctatacctgggcga

SEQ ID NO: 80910 - DNA, 326 bp, Zea mays
cccacgcgtccgcccacgcgtccgcccacgcgtccggcggcggcggaggggcagtgggtgctcatggcaacggggcggacgccgaccaacattgcggtgatcaagtactgggggaagcgggacgaggcgctcatcctccccatcaacgacagcatcagcgtaacgctcgacgccgaccatctctccgccaccaccactgtcgccgtcagcccctcattcccttccgaccgcatgtggctcaatggcaaggagatctcgctattacgaggaaggtttcagagctgcctcagagaaatcagaaagcgtgctcgtgactttgacgacaa

SEQ ID NO: 80911 - DNA, 388 bp, Zea mays
  unsure (1)..(388): unsure at all n locations
gatacacgactccaggatgagtcataggacatcgatgcgaaagcgtccgggcctggtgggtccttcgacatcaccaagttgggcgcctccggcaatggcaagacagacagcacgaaggctgtgcaggaggcatgggcatcggcgtgcggcggcactgggaagcagacaatcctcatacccaagggcgacttccttgtcggacaactcaacttcacaggcccttgcaagggcgacgtgaccatccaggtggatggcaatctgctggcgaccacggacctaagccagtacaaggaccatggtaattggatcgagattctacgcgtggataacctggtcatcaccggcaagggaaaccttgacgggcanggcccagccgtgtggagcaaga

SEQ ID NO: 80912 - DNA, 380 bp, Zea mays
cccacacgtccggaggactcagccaaccccatcttcatcgacatgaagtactgccccaacaagttgtgtactgccaacggcgcctccaaggtcaccgtcaaggatgtcaccttcaagaacatcaccggcacctcctccaccccgggggccgttagcctgctctgcactgccaatgtgccatgcaccggggtcaccatggatgacatcaacgtctagtatagcggcaccaacaacaagaccatggctatatgcacgaacgccaaaggcagcaccaaaggttgcctcaaagagcttgcatgcttctagaccctccatcgactgagacatctctctacttataaattttctcccgtccttgcagtgcccactagatgctatcc

SEQ ID NO: 80913 - DNA, 317 bp, Zea mays
tacccacacgtctgccaacgcgtccgccctcgtctcaccctccctcgctcagacaaataataatgaacggtcccgcccttttcctccgacatccacaacgggggaggggaaaacacgtacattcatccggcggcaataatggcctcggttccggctccggcgacgacgaccgccgccgtcatcctatgcctatgcgtcgtcctctcccgtgccgcggctgaccacccgaaactccccgactacgtcatccacggccgcgtgtactgcgacacctgccgcgccgggtttgtgaacaacgtcaccgagtacatcgcggg

SEQ ID NO: 80914 - DNA, 361 bp, Zea mays
gtgatcatgatcaacgactaccagaagagccggttcgtgaaccgcgtcgtgtcgtccatgttcaacaccgttgccggcaagaagatcgccgtcctcggcttcgccttcaagaaggacaccggcgacaccagggagaccccggccatcgatgtctgcaagggcctgctgggtgacaaggcccagatcagcatctacgacccccaggtgacggaggaccagatccagcgggacctagccatgaacaagttcgactgggaccacccgatgcacctgcagccgacgagcccgacggccgtgaagcacgtgagctgcgtgtgggacgcgtacgaggccaccaagggcgcccacgggctgtgcaacc

SEQ ID NO: 80915 - DNA, 343 bp, Zea mays
gtgctgcctgcggttcccgggccagctgaactcggacctccgcaagctggcggtgaacctgatcccgttcccgcggctgcacttcttcatggtggggttcgcgccgctgacgtcgcgcgggtcgcagcagtaccgcgcgctgacggtgccggagctgacgcagcagatgtgggatgccaagaatatgatgtgcgcggcggacccgcggcacgggcggtacctgacggcgtccgccatgttccggggcaagatgagcaccaaggaggtggacgagcagatgatcaacgtgcagaacaagaactcctcctacttcgtggagtggatccctaacaacgtcaagtcc

SEQ ID NO: 80916 - DNA, 342 bp, Zea mays
gcgagagtgcgtgcgtgcagccacaggcaggcgtcggcaccatgtcttctttcaccggcacgcaggacaagtgcgcggagtgcgacaagaccgtccacttcatcgacctcctcacggccgacggcgtcacctaccataagacatgcttcaagtgcagccactgcaaagggatcctctcgatgtgcagctactcttccatggacggtgtgctgtactgcaagacccacttcgagcagctcttcaaggagaccgggagcttctccaagaacttcacgccaggtggcaagtcttcagacaagggtgaactgacaagggcccccagcaagctatcatctgcgtttt

SEQ ID NO: 80917 - DNA, 377 bp, Zea mays
atccatccccaatccccaaaggcgaggatagaactatcatcggggaaatggctgcttccacaaacaacactctcagggtgctgttcaccctacatggttgttatgcgccgcagtatgcacagctaacatgactgtatcaaaagcaggagacttgtcgccagcccctgctccgttacgatcaggaggcgccaccgcagccccaaaaagtgcggctacagccaacaagacgttcgacatatcgaagttcggctcgaccaccgacggcaagacatgactcgacacaggcagtccaggacacgtggacgtcagcgtgcggaccgatgggagacgcaaccatgctcatccccaatggcgactacctgctgggccctctctac

SEQ ID NO: 80918 - DNA, 370 bp, Zea mays
tacgcgctgtcgtacaacgacgccggcgcggcggacggcgggcgacccatcgtgcacggcaccatccaggcgtacctccgcgacgcgcgggaccggctggaggccatggtgcttggcgcggagcgggagcgcgtgcggctggggctcaaggtcgtgcgcggtgcgtacctgacccgcgaggcccggctcgcgaccgcgctcggcgtgccgtcgcccgtgcacggcagcatccaggagacccacgactgctacaacggctgcgccgccttcctcctcgaccgcgtgcgccgcgggtccgcctccgtcatgctcgccacccacaacgtggagtcaggccaactcgcggcggcgcgtgcccaggagctgggga

SEQ ID NO: 80919 - DNA, 363 bp, Zea mays
cccgtcctacgccagggggctgcaggacgtgtgcagggactacctcaaggaccccaccatcgccgcgttcaacgacatcatgacgcccggcaagttcgacaacatgtacttcgtcaacctcgagcgcggcctcggcctgctcagcaccgacgaggagctgtggacggacccacgcaccaagcccctggtgcagctctatgcatccaacgccacagccttcttcgacgacttcggccgcgccatggagaagctcagcttgttcggcgtcaagaccggcgccgacggcgaggtcatgcggcgctgcgacgcctacaacagcggccccgccgtcgccgccaccatacccaagatgtgacgacgctg

SEQ ID NO: 80920 - DNA, 342 bp, Zea mays
gcttccccgaccacacgcaccgaggcttcgagaccgtcacctacatgcttgagggcgccgtgacgcacgaggacttcgagggccaccgtggcaccatcaaggccggcgacgtgcagtggatgacggccggccgcggcatcgtgcactccgagatgcccgccggccccggcacgtccaggggcctgcagctctgggtcaacctctcctccgccaacaaaatggtcgagcccgggtaccaggagatccagagcaaggacatcgcgtgcacgtccgacggcgacggcggcgtcacggtgcgcgtgatcgccggccacgccatgggcgtgcgctcgccggtgcgca

SEQ ID NO: 80921 - DNA, 352 bp, Zea mays
agcttccctcaccacacgcaccgaggcttcgagaccgtcacctacatgcttgagggcgccgtgacgcacgaggacttcgagggccaccgtggcaccatcaaggccggcgacgtgcagtggatgacggccggccgcggcatcgtgcactccgagatgcccgccggccccggcacgtccaggggcctgcagctctgggtcaacctctcctccgccaacacaatggtcgagcccgggtaccagcagatccagagcacggacatcgcgtgcacgtccgacggcgacggcggcgtcacggtgcgcgtcatcaccggccacgccatgggcgtgcgctcgccggtgcgcacgcgcacgc

SEQ ID NO: 80922 - DNA, 332 bp, Zea mays
cggcggctcgtgctcctcctccacggcttcggcgcgtcggcgacgtggcagtgggccccgtacctccgcagcctcctcgcggccggcctcgaccccatcgtcccggacctcctcttcttcggcgcctcctcgtccacggtccccgaccgctccgacaccttccaggccaggaccgtgaaggccgccatggacggcatgggcgtgcgccgcttcgccgtggtcggcgtcagctacggcggcttcgtcgcgtaccggctggcggccatgtacccggaggccgtggagcgggtggtcctcgtgtcgtcgggcgtgtgcctggaggagggggacct

SEQ ID NO: 80923 - DNA, 384 bp, Zea mays
ctcatcgacgtcgtgcagagctccacggggatcaccatctccaactgccacttcaccaaccacaacgacgtcatgctcttcggcgccagcgactcctggccgcaggaccagatcatgcagatcaccgtcgccttcaaccacttcggcaggggcctggtgcagcggatgccaaggtgccgctggggcttcttccacgttgtcaacaacgactacacgcactggctcatgtacgccattggcggcggcgacgcgccaaccatcatcagccagggcaaccgctacatagcaccagcaaacatcgccgccaaagtgatcaccaagcactacgcggaagaaggcgtgtggaagaactgggtgtggcacacggatgacgacctgttcatg

SEQ ID NO: 80924 - DNA, 381 bp, Zea mays
cccacgcgtccgggagtagcagccaaaattgttgtgatactgctcctttccaattgccttcgtctagtaagaaagtgcatggatattgcagaagcaatcggcatctggatctagcccttggcttctcatggcctagataaagactccaactttaaccaaagcttcaggagtaagctagtgaaggaatatctcaaattttttcagcacttcgactaacattctatgcgaaggaaagcatatcccagctttcatgaaacttcggaaaaccactactccgatccatctgactcgggaagaagaacagtgctctctcctccggctctcactatggatatatcatgaaaatattttcccttcattgtctcaatttgtcctttcttg

SEQ ID NO: 80925 - DNA, 387 bp, Zea mays
cacgaatctgccatcctctccaacacgaagatggcgttcatcagcaatgtcgcagtgaaggcggcggccgtggccgcgctgctgctggtcgcagcggtgtcgcctgccgcgcgcgcggcggcggtggcggtggcgggaggggcgccgtcggtgccggcgggtccgctggacatcgcgcagctgggcgccaagggcgacggcaagtcggacagcaccccgatgatcctcaaggcgtggaagaacgcgtgcgatgcgacgggggtacagaagatcgtcatctcgccgggcaactacctgacgggcgggctggagctgaacggcccctgcaagtcctccatcatcatccgtctcgacggcaacctgctcggcaccggcgacctcagcgcg

SEQ ID NO: 80926 - DNA, 362 bp, Zea mays
aaacctgcagtcatctcctccatcaccaccaccaagctcaacaacagccagctcgcgaaaataatgaagagccgcagcatggcatcatcggccgcgctcttggtgctagccctcgcgctagtggcggccaccgccccacaggtagcggaggcaaagaagaagagagcggcggagagcggcgaggcggcggaggcgaagaagatccaggacgacttctgctcgacgctgtgcgagggcaagaaggggacggacctggtcgtgtgcaaggagtcctgcgcgctctcccagcagtccaacctggtgctgtacggcaggatccagtgcaagggcaaatgcaccgagcagaagggcatcacggcgcc

SEQ ID NO: 80927 - DNA, 331 bp, Zea mays
  unsure (1)..(331): unsure at all n locations
acccacgcgtccgcaccaccatcgccgtcggcgacgactgcgtctccatcggccccggaagcaagaccatccgcgtgaagggcgtcaagtgcggcccgggccacggcatcagcgtcggcagcctgnggcggtacaaggacgagaaggacgtggaggacgtgaaggtgacggggtgcacgctcgccggcaccaccaacggcctgcgcatcaagtcgtacgaggactccaagtcgtcgctcaaggccaccaagttcctgtaccaggacgtcaccatggacaacgtctcctaccccatcatcatagaccagaagtactgccccaacaacatctg

SEQ ID NO: 80928 - DNA, 358 bp, Zea mays
gaagggcctccgcgacccggtgctcccgatcgccgaggggcagcacgggacgcacacgtccagcaccgcggccggcgcgttcgtgcccaacgccagcgtcttcggcaacgggctcggcacggcggccggcatggccccgcgcgcgcacatcgcgttctaccaggtgtgctacgaggacaagggctgcgaccgggacgacatactggcagcggtggacgacgccatcggggacggcgtcgacatcctgtcgctgtcgcttggccacgaggatgccatcgacttctcggacgaccccgtctcgctcgccgggtacacggcgatcctcaacggcgtgttcatctgcgccgcggcgggcaac

SEQ ID NO: 80929 - DNA, 349 bp, Zea mays
aatctgccatcctctccaacacgaagatggcgttcatcagcaatgtcgcagtgaaggcggcggccgtggccgcgctgctgctggtcgcagcggtgtcgcctgccgcgcgcgcggcggcggtggcggtggcgggaggggcgccgtcggtgccggcgggtccgctggacatcgcgcagctgggcgccaagggcgacggcaagtcggacagcaccccgatgatcctcaaggcgtggaagaacgcgtgcgaggcgacgggggtacagaagatcgtcatcccgccgggcaactacctgacgggcgggctggagctgaagggcccctgcaagtcctccatcatcatccgtctcga

SEQ ID NO: 80930 - DNA, 397 bp, Zea mays
ctctaaagggagacatagcagatcggcaaccacaacatccccagcagggtgtttacgttccgtgaactggtggacgccaccaactccttctgcccagaaaacctgctgggcgagggcggcttcgggagggtgtacaagggatgcattccagacaccatggaagtcatagcggttaagcagctcgacaaagatgggctgcaaggtaaccgtgagttcctcgtcgaggtgctgatgcttagcctgctgcaccatccaaacctagtcaccttggtcgggtacagcacagactgtgaccagaggatcctagtgtacgagtacatgtcactcggttcactgcaagaccatctcctcgatctcagtccgaaatcccagccactttcctggcacacaccgatga

SEQ ID NO: 80931 - DNA, 426 bp, Zea mays
  unsure (1)..(426): unsure at all n locations
aaaatgagaaaagctctcctaggtggcctatcggcgatcctcgtcgtggcggtggtcgtcggtgtggtcgccaccgtcacccgctccggcaagaaggccggcgacaacttcacggtcccgggggaggcttcccttgccacgtccggcaagtcggtcaagtccctgtgcgcgcccaccctatacaaggagtcgtgcgagaagacactgtcccaggccaccaatggcaccgagaaccccaaggaggtgttccacagcgtggccaaggtggcgctggagtcggtccagacggcggtcgagcagtccaagtcgatcggcgaggccaaggccagcgactccatgaccganagcgcgcgcgaggactgcaaaaagctccctggagacaccgcccaaaaactgaaggggcatacccaaaaatgccggggggaa

SEQ ID NO: 80932 - DNA, 363 bp, Zea mays
gtttgggcagctccggggcgtggccctggtagtcttcgccgccactgctggcgcttcttcgtgctatttcctgtcgaagatgattgggaagccactggtgttcacgctgtggccagataaactcagcttcttccagagacaggttgctataagaagagagaagctcttgaattacatgcttttcctcatggtgaccccaacattgccaaataccttcatcaacttggcttcaccgatagtagatgtcccctaccatatattcttactgggaactctcattggccttatcccagcttcttatgtgactgtcagggctggaatcgctcttggagaattaacttcgctaagcgacctttacgacac

SEQ ID NO: 80933 - DNA, 355 bp, Zea mays
cgagccgcagaagtgcaagtggacgaagaaggcgcggaagaaaaagaagacgaagaatgagcagaacgggctggcagccctagtggaggagatctcgctctcgaacagtcccaagcacagggcagcagcaggggagatactgcggatcggcaaccacaacatacccagcagggtgtttacgttccgtgaactggtggacgccaccaactctttctgcccagaaaacctgctgggcgagggcggcttcgggagggtgtacaagggatgcattccagacaccatggaagtcatagcggttaagcagctcgacaaagatgggctgcaaggtaaccgtgagttcctcgtcgaggtgctg

SEQ ID NO: 80934 - DNA, 377 bp, Zea mays
cggacgcgtgggcggacgcgtgggcggacgcgtgggtgcagtcatctcctccatcaccaccaccaagctcaacaacagccagctcgcgaaaataatgaagagccgcagcatggcatcatcggccgcgctcttggtgctagccctcgcgctagtggcggccaccgccccacaggtagcggaggcaaagaagaagagagcggcggagagcggcgaggcggcggaggcgaagaagatccaggacgacttctgctcgacgctgtgcgagggcaagaaggggacggacctggtcgtgtgcaaggagtcctgcgcgctctcccagcagtccaacctggtgctgtacggcaggatccagtgcaagggcaaatgcaccgagcaga

SEQ ID NO: 80935 - DNA, 308 bp, Zea mays
aacacgtaggccgagcttcagctgcatgcagtactgccacaaccagttgtgtactgccaacagcgcctccaacgtcaccgtcaagggtgtcagcatcacgaccatcaccggcacctccgcgacaccggaggcccttagcctgctcagcactgccaaggtcccatgcaccggcatcacgatggctgacgtcaacgtcgagtagagcgggaccaacaacatgaccaaggatatatgcacgaacgccaacggcagcaccaagggttgcctcaaggagcttgcatgcgtctagaccctccatcgactgaacc

SEQ ID NO: 80936 - DNA, 329 bp, Zea mays
acggacacttgggggcgcggcctgcggcgggtgctacgaggtgcgctgcgtggacagccctagcgggtgcaagcccagcgcggcgacactggtggtgacggcgaccgacctgtgcccgcccaacgaccagcagtccgcggacagcggcgggtggtgcaacccgccgcgggagcacttcgacctcagcatgcccgcgttcctccagatcgcacaggagaaggccggcatcgtgcccatctcctaccgcagggtggcgtgcacgaagcagggtggcatccggtacaccatcaccgggaacaagtacttcaacatggtgacgatcaccaacg

SEQ ID NO: 80937 - DNA, 349 bp, Zea mays
gaggactcgggctaccccatcatcatcgacatgaagtactgccccaacaagttatgcaccgccaatggtgcctccaaggtcaccgtcaaggacgtcaccttcaagaacatcaccggcacctcctccaccccggaggccgtcaacctgctctgctccgccaagatcccatgcaccggtgtcaccatggacgacgtcaacatcaactacagtggcaccaacaacaagaccatggctgtatgcaagaacgctaagggcagcgccaagggttgcctgaaggcgctcgcatgcttctagacccaccattgacccatctctgtagttatacaatgtgtttggttgttggatgctg

SEQ ID NO: 80938 - DNA, 364 bp, Zea mays
gtgcagccacagacaggcgtccgggcaccatgtctttcaccggcacgcaggacaagtgcacggcgtgcgacaagaccgtccacttcatcgacctcctcacggccgacggcgccatctaccataagacatgcttcaagtgcagccactgcaaaggggtcctctcgatgtgcagctactcctccatggacggtgtgctgtactgcaagacccacttcgagcagctcttcaaggagaccgggagcttctccaagaacttcacgccaggtggcaagtcatcagacaagggtgaactgacaagggccccaagcaagctgtcgtctgcattttctggtacccaggataagtgcgcagcatgccagaaaac

SEQ ID NO: 80939 - DNA, 357 bp, Zea mays
acccacgcgtccgcgcgatctccgtagcctccgtcgcgtcgagcatcgatcatgtcggcctactgcggaaagtacaaggatgagctcatcaagaatgctgcctacattggcacccctggcaagggtatccttgctgctgatgagtccactggcaccattggcaagcgcctttccagcatcaatgtcgagaacgttgaggagaaccgccgtgccctccgtgagctcctattctgctgccctggtgctctccagtacatcagcggtgtgatcctcttcgaggagaccctgtaccagaagaccaaggatggcaagccttttgttgatgtcctcaaggagggaggcatcctccctggcatc

SEQ ID NO: 80940 - DNA, 371 bp, Zea mays
cgctcttggtgctagccctcgcgctagtggcggccaccgccccacaggtagcggaggcaaagaagaagagagcggcggagagcggcaatgacaacggcggcggtgatggtagggcaagtattccaggcaatgcggagccagccgaagccgaagagaacggcagccggttgccgccatccttgcagtggctcaacagcctgttctcgccatcggcgcagtcctccggtagcggcagcggcagttcgcatcattgggagaattgagcaataatgcaatataaggatggatgattgttgctgcttgagcccattggtgccaatgtacataggaagagcaggagcatgccggcatgaaaatttggagcccttttt

SEQ ID NO: 80941 - DNA, 365 bp, Zea mays
aggctgaggcgcaccacgttcagggagacctcgcggcgttctacaactgccggttcgacgcgttccaggacacgctgtacgtgcacgcccggcgccagttcttccgcaactgcgtcatctccggcaccattgacttcatcttcggcaactcggcggcggtgttccagaactgcctcatcgtcacgcggcggcccatggacaaccagcagaactcggtgaccgcgcacggccgcacggaccccaacatgaagtcggggctcgtcatccagaactgccgcctggtgcccgaccagaagctcttccccgaccgcttcaagatcccctcgtacctgggccgaccctggaaggagttttcgcgcctcgtc

SEQ ID NO: 80942 - DNA, 346 bp, Zea mays
ctcgccgcctccagtccagagccaccgtgagatctgcccgattccgccgcccggacccggggactccctcccctcctcgatccgttcgggcggccggccggcctagcttcaagtgcggggatggtgttctacttcaaggcgcggcccgaggccggcgactataccatcttcatgggtcttgacaagtacgagaacgaggacctcatcaaatacggcttccccgaggacatctggttccatgtagataagatgtcctctgcacatgtgtatgtgagattgaataaaggtcaatcaatggatgacatgagtgagggtttgctggaagactgtgcgcagcttgtcaaag

SEQ ID NO: 80943 - DNA, 335 bp, Zea mays
cccacgcgtccgcggacgcgtggggtttcctctctcaccatagcgcccgctctgtcgcccttcgttcacctctccttcctctcgtccctgcctgccagggagaggggaagtcagaggcacggagtggcgcagagcagacgcccgtgaaccattgtagctgtccctgtcgtcgtcgtcgtcaacgaacccacacaaggaaaggatggagaagaagccgaccatcctcatgaacaggtacgagctcgggcgcacgctcgggcagggcaccttcgccaaggtgtaccacggccggaacctcgcgtccggcgagagcgtggccatcaaggtcatcgaca

SEQ ID NO: 80944 - DNA, 323 bp, Zea mays
acccacgcgtccgatcagccaagagctatccatacgcacagcgatgcaccagcacgagatactagccatcatgcgcctgtcgtccctcctcctcgtcgtggccgccctctcggcgcgcgccgcggcgcagcaggtgccgccggtgggcggcagcgctctgaagccggactactacagccagtcgtgcccgcgcgcggagcggatcatcgcggaggtgatgcagacgaagcagatggcgaacccgacgacggccgcgggcatgctgcgcgtcttcttccacgactgcttcgtcaccgggtgcgacgcgtcagtgctgatcgcgt

SEQ ID NO: 80945 - DNA, 349 bp, Zea mays
gtccaatacgaacgtcgtacgagaacctttctccctcctccacctttctccttttcttgccacggcaaaacaccttcgccggcgagagcatggcgatggcgtaccgtgtcctggaggtcaccctggtgtcggcaaatgacctcaagaaagtgtcgctcttctcccggactcgcatctacgccgtggcttccatctccggattcgacctccgcatcccttcccacagcacccaagcagaccacagcaacggctgcaacccctgctggaacgccgtggtacacttccccatcccggctgccgctgacacccgcggcctcgcactccacgtgaggctccgcgcccagcgtct

SEQ ID NO: 80946 - DNA, 394 bp, Zea mays
atttcgttatcctcctcgatcttaattacaggtcatagctaagcaggtctgacaggatgtcgtggcagacatacgtcgatgagcacctcatgtgcgagatcgagggccaccacctgacctccgctgccatagtcggccacgacggcgccgtttgggcccagagcaccgcattcccacagttcaagacagaggagatgaccaacatcatgaaggacttcgacgagcccgggttcctggccccgaccggcctcttcctcggccccaccaagtacatggtcatccaaggcgagcccggcgctgtcatccgcgggaagaagggatctggaggcataactgtgaagaagacagggcaagcgatggtggtccggcatctacgacgagcccatgacccccg

SEQ ID NO: 80947 - DNA, 351 bp, Zea mays
aagaacccatccgcggtcgccagagcacaagaatctaacctcgcgcttctcacgtacgggcagctcaacaacgtgtgggaggcagtctacatccaatacctgatgggcgtgcacggcgtcatcgttgaccgggtggaggagatctcggacgccgtggccggttttggtctggggaaaccaggccttggccggggcggtgctggcgtggacggagcgaaaacgcatcaggctcaggccttctcgcagcagcagctggggttcctgctccggcttatccctgaactgattgagcagcggcactgaaggacggtacaccaccatatgtaacatcccagttttttgaccccctcg

SEQ ID NO: 80948 - DNA, 267 bp, Zea mays
ctcctcttgcattgcattgcaggtcgtagttgagcagcagcaaccactgcacaggatgtcgtggcagacgtacgtcgatgagcacctcatgtgcgagatcgagggccaccacctgagctctgccgccatagtcggccacgacggcgccgtttgggcccagagcaccgcattcccacagttcaagccacaggagatgaccaacatcattaaggacttcgacgagcctgggtttctggccccgatctgcctcttccttggccccaccaa

SEQ ID NO: 80949 - DNA, 213 bp, Zea mays
gacccacgcgtccagacgccctttttttattttttttttttttttttacataaatatcgtatattacttcatgcaaggaaaacatgtggtgatagacatatcagatcaacgattcacagtcatttcatagtatgataacaaatatcccaaaatacatgtgaacttggcagtcttatgtatcatgccctaaagaaaatctaatggcagcacact

SEQ ID NO: 80950 - DNA, 362 bp, Zea mays
gccagtcttcgtcatgagtgccgctggacaccgtcaaggattgcggcaccgcgctgcaccgccgcaaggcggtgcatgccagcctctccgcgctcaagagcgcgggcgtcgagggcgtcatggtggacgtgtggtggggcatcgccgagcgcgacggcccgggccggtacaacttcgcgggctacgcggagctcatggagatggcgcgcaaggccgggctcaaggtccatgccgtcatgtccttccaccagtgcggcggcaacgtcggcgactccgtcagcatcccgctgccgcggtgggccgcggaggagatggagaaggaccaggacctctgctacaccgaccagtggggccgacgcaac

SEQ ID NO: 80951 - DNA, 271 bp, Zea mays
aagatggcaaatgctctcctaggtggcctgtgggcgatcgtcgtcgtcgcggtggtcgtcggcgttgtcgccaccgtcacccactccggcaagaaggccggcgacgacttcaccgtcccgggggaagcctccattgccacgtccggcaagtcggtcgagtccctgtgcgcgcccacgttgtacaaggagtcgtgtgagaagacgctctcccaggccaccaatggcaccgagaaccccaaggaggtgttccacagcgttgccaacgtggcgc

SEQ ID NO: 80952 - DNA, 265 bp, Zea mays
gctaacttgtaatctgcaggatctaagcaaagacttgatttagttatggacggattggtacgcctcttgaaagttcgcgtggtccggggtatcaaccttgcctaccgcgacgcaagaggcagcgatccgtatgtcgtcctacggcttggcaagaagaaactgaatacaagcgtgaagaagagatccgtgaaccccatatggcaagaggagctaactctgaccgtcacagatcccatccaaccactgaatctggaggtgttcgaca

SEQ ID NO: 80953 - DNA, 273 bp, Zea mays
acgtagccgtatccaccagcaagggagcggtcacggcgacgacggtgaccaagagtcgcgctacatcaacacagccgatgcccacgtcaaaaaccggtcgctacctctctcgacattgatcgagatgctgaaggataagactgggaaggactacattgatgtagggtcaatccggctaacgctttttaacctcttcaaagacgatgccagcccgaagataaagaagttcatgaaggtcatgctgaacaagttacagcatgggcagcacggagg

SEQ ID NO: 80954 - DNA, 271 bp, Zea mays
acagacagtcacaagtacgagctcataaggaaggcatatgcaaaagcagccatggcgaactcgtcgtccggccttgcagtgaacgatcagtgcaaggtgaacttccgggagctgacgtcgcggcggagcttctggttcatcatgtgcaggatcgactacacagacatggagatcaaggtggacctcctcggcggaccgaaccagtgctacggccacttcaccgacagcctcccggccaaagaatgccgctacacgatctacgacctcgact

SEQ ID NO: 80955 - DNA, 363 bp, Zea mays
ggtggggcatcgccgaggccgacgggcccgggcagtacaacttcaacgggtacatggagctcatggaaatggccagaaaaaccgggctcaaggtccaggccgtcatgtccttcaaccagtgcggcggcaacgtcggcgattcagtcaccataccacttccgggatgggtcttggaggagatggacaaggaccaggacctggcctacaccgaccggagtggccgccggaactacgagtacgtctccctgggctgcgacgcgatgcccgtgctcaagggccgcacccccatccagtgctacgccgacttcatgcgcgccttccgcgaccacttcgccaccttcatgggcaacaccatcgtggaga

SEQ ID NO: 80956 - DNA, 384 bp, Zea mays
  unsure (1)..(384): unsure at all n locations
ctaangccgacgggcccgggcagtacaacttcaacgggtacatggagctcatggagatggccaggaagaccgggctcaaggtccaggccgtcatgtccttccaccagtgcggcggcaacgtcggcgattcagtcaccataccacttccgggatgggtcttggaggagatggacaaggaccaggacctggcctacaccgaccggagtggccgccggaactacgagtacgtctccctgggctgcgacgcgatgcccgtgctcaagggccgcacccccatccagtgctacgccgacttcatgcgcgccttccgcgaccacttcgccaccttcatgggcaacaccatcgtggagatccaggtcggcatgggccctgccggcgagctgc

SEQ ID NO: 80957 - DNA, 267 bp, Zea mays
cgacaagatggcgtgcacaaacaatgcgatgagagccttgttcctcctggtcctcttctgcatcgtgcatggtgagaaggaagagtcaaagggcatcgatgcgaaagcgtccgggcctggtgggtccttcgacatcaccaagttgggcgcctccggcaatggcaagacagacagcacgaaggctgtgcaggaggcatgggcatcggcgtgcggcggcactgggaagcagacaatcctcatacccaagggtgacttccttgtcggaca

SEQ ID NO: 80958 - DNA, 266 bp, Zea mays
gcgcgcgtccctcgctcctgcgccgcccgtccgatccggtcactggccggggagggctcagaaacctttcatccaatacatacatctatctgagccctttcccgcggtgaggcccgaccggagtccacacacacacggtgtctatggcggccgtaataaggagccgccgccgcgtgtccgttttcttctacgtcgtcctcgccgcagctgcagctgcagccgcggcgcaggcatccaataacgtcacctccgacgaggagtactgg

SEQ ID NO: 80959 - DNA, 255 bp, Zea mays
agcgatcagagctcactcaatatctctgagaggtccttcaatgtctttgagagcatcctctatgtctgtgcaggaagagcaaagttcctcaaacacgtcatatgaggaaacggaatctgtgttggtgaagctgatcgcacgtcagatcacacttttgctgtcatccatttgggctcaatcaacatcccctgaaaatactcctgtgaactatgaagccattgctcatacttacagtttgcatctgttgttctctgg

SEQ ID NO: 80960 - DNA, 270 bp, Zea mays
  unsure (1)..(270): unsure at all n locations
ccggtttttgagaggggaaagangaggcggaggagagggatggggaaggacgagaggttcccggtgtgggaggccgcgctcggcgccggaatcgccgccgccttcgccgctggactcgtcggtgtctacctttccatgccggactccgactacagcttcctcaagttgccacgtaatctcgaggaactccaaatcctcactggccaccttgagaactatactagtgactacaccctacaggtgttggtaggttattgcgctgtgtacatc

SEQ ID NO: 80961 - DNA, 386 bp, Zea mays
ctcgggctaggctagctagctaggttaccactctggtacaacatggctggtgatggcatggaggtatctgccagcgggggtggcggcggcaacaagcagccgcagatcagccttttggggctgttcctcgcctgcatggtcgccggcggcgtgcagtacggatgggcgctgcagctctcccttctcaccccctacgtccagacactggggattcctcatgctcttacatcagtcatgtggctctgtggacctattgctggcttacttgtacaaccctgcgtcggcctctatagtgacaaatgcacttctaagcttgggagacggaggccattcatctttacaggatgcatcatcatctgtatatctgtgatagtcatcggtttctc

SEQ ID NO: 80962 - DNA, 280 bp, Zea mays
  unsure (1)..(280): unsure at all n locations
cccacgcgtccgcggaacgcgtgggctgataattgcaggttccaattccaaccgggaatttttaagaagcaataaattaaaaggcttttcanaatggaggatgtgagcatgggcatgtgggtagagcggttcaacaacaccagacttgttaaatatgtccacagcatcaaattttgtcaatttggatgcatagatgattattacactgcacactaccaatcaccaatgcagatgttgtgtttgtgggacaaactgcaggctggaaaagcccaatgctgca

SEQ ID NO: 80963 - DNA, 368 bp, Zea mays
ctcacgcgtccgcccacgcgtccgcccacgcgtccgcgtgaagcagctggacaggaacgggttccatggcaaccgcgagttcctcgtggaggtgctgatgctcagcctcctgcaccacgcgaacctcgtcaagctgctgggctacagcaccgactccaaccagcggatcctggtgtacgagtacatgcccaggggctcgctggaggaccacctcctggacctgcccccgagctggaagcccctgccgtggcacacgcggatgcgggtcgcggtgggcgcggcgaatggcatcgagtacctgcacgaggtggccaacccgccggtgatctaccgcgacctcaatgcgttcaacatcctccttgacaagg

SEQ ID NO: 80964 - DNA, 268 bp, Zea mays
cgacaagatggcgtgcacaaacaatgcgatgagagccttgttcctcctggtcctcttctgcatcgtgcatggtgagaaggaagagtcaaagggcatcgatgcgaaagcgtccgggcctggtgggtccttcgacatcaccaagttgggcgcctccggcaatggcaagacagacagcacgaaggctgtgcaggaggcatgggcatcggcgtgcggcggcactgggaagcagacaatcctcatacccaagggtgacttccttgtcggacaa

SEQ ID NO: 80965 - DNA, 268 bp, Zea mays
taaacagacttgcagtcatctcctccaccaccaccaccaagctcaacaacagccagctcgcgaaaataatgaagagccgcagcatggcatcatcggccgcgctcttggtgctagccctcgcgctagtggcggccaccgccccacaggtagcggaggcaaagaagaagagagcggcggagagcggcgaggcggcggaggcgaagaagatccaggacgacttctgctcgacgctgtgcgagggcaagaaggggacggacctggtcgtgtg

SEQ ID NO: 80966 - DNA, 268 bp, Zea mays
ctctctcctcggtttcctctcccaccaccaacccccagatcgcagcgatctccgccgccgccctctctgggattccgcgcgacaaagtcaggcgtagaggctccaggaggaggagggaggcgcagcagggcgggtgggggagatgttcctctgggactggttctacggggtgctggcctccctcggcctgtggcagaaggaggccaagatcctcttccttggcctcgacaacgccggcaagaccacgctgctccacatgctcaaggac

SEQ ID NO: 80967 - DNA, 384 bp, Zea mays
gcccctgcacggcgaccaaccccatcgaccagtgctggcggtgccgccgcgactgggcccgcgaccgcaagcgcctggccaggtgcgccatgggcttcggccacaggaccaccggcgggctggccggcaagttctacgtggtgattgaccccagcgacgacgccgccgacctcgtcacccccaggaagggcacgctccggcacgccgtgacccgggcccgggcgctgtggatcaccttcgcgcgcgacatggtgatcgagctctgccaggagctcatcgtgagcagcgacaagaccatcgacgggcgcggagcgcaggtgcacatcgtgggcgcgcagatcacgctgcagaacgtgcgcaacgtgatcctccacaacctgcacg

SEQ ID NO: 80968 - DNA, 287 bp, Zea mays
gtcgatacaagcctctagatcgagtcgtattaatcgcctcatcgaccacgcccccttccaggctcccgtctccatgggtctcctctcaaacaggattgggagggagagcctcaaggcgggggatcatatctactcctggagggcggcgtgggtctacgcgcatcacggaatatatgtgggcgatgataaggtgatccatttcacaagaggaagaggacaggaggtcggaacaggaactgtcgtcgatattattcttgtgagttccaccccaaaacgaagcaacacgc

SEQ ID NO: 80969 - DNA, 273 bp, Zea mays
  unsure (1)..(273): unsure at all n locations
tacgatacctggctcaanggcgtcatgacgttcatggacacctgcgtcgacggcttcgtcgacgagaagctcaaggccgacatgcactccgtgctgcgcaacgccaccgagctcagcagcaacgcgctggccatcaccaacagcctcggcgggatcctgaagaagatggacctcggcatgttcagcaaggactcgcgccgccgactgctgtcgtcggagcaggatgagaagggctggcccgtgtggatgcggtcgccggagaggaagctgctg

SEQ ID NO: 80970 - DNA, 382 bp, Zea mays
gagaatatcaagatggaggactcagccaaccccatcttcatcgacatgaagtactgccccaacaagttgtgtactgccaacggcgcctccaaggtcaccgtcaaggatgtcaccttcaagaacatcaccggcacctcctccaccccggaggccgttagcctgctctgcactgccaaggtcccatgcaccggcgtcaccatggatgacgtcaacgtcgagtatagcggcaccaacaacaagaccatggctatatgcacgaacgccaagggcagcaccaagggttgcctcaaggagcttgcatgcttctagaccctccatcgactgacccatctctctagttataatttttctctcgtccttgcattgcccattagatgctatc

SEQ ID NO: 80971 - DNA, 268 bp, Zea mays
ctcgcttgtcctcatggccttgatgatcacatggcactacgtccacgtgatgaagtactggtacgagctggaccacgtcgtgccagccaacgaagtgacaacgctgcttgagaagcatgaggtgcggcggatccccggggtgggcctcctttactcggacctggtccaaggcatcacccccgtgtttccacgtctggtgcagaggataccctccgtgcacgcggtcttcctgttcatgtccatcaagcacctgccgatcccacacgtg

SEQ ID NO: 80972 - DNA, 257 bp, Zea mays
aaggcgtcatgacgttcatggacacctgcgtcgacggcttcgtcgacgagaagctcaaggccgacatgcactccgtgctgcgcaacgccaccgggctcagcagcaacgcgctgggcatcagcaacagcctcggcgggatcctgaagaagatggacctcggcatgttcagcaaggactcgcgccgccgactgctgtcgtcggagcaggatgagaatggctggcccgtgtggattcagtcgccggagatgaagctgctg

SEQ ID NO: 80973 - DNA, 277 bp, Zea mays
ctctacacagcaccatgttcatccacatgaacatgtacaagtgcaagaacatgctgatcaaggacgtgaccgtgacggcgcccggggacagccccaacacggatggcatccacatgggcgactcatccgggatcaccatcaccaacaccgtcattggcgtcggcgacgactgcatctccatcggccctgggacctccaacgtgaacatcactggcgtgacctgcggccccggccacggcatcagcatcggcagcctaaggcggtacaaggacgagaa

SEQ ID NO: 80974 - DNA, 379 bp, Zea mays
cacgaggcacgaccacgttatgctgttcggggccagcgacgccgcgtccaaggacagggagatgcaggtcaccgtcgccttcaaccacttcggcaaggggctggtgcagcggatgccgcgctgccgtcacggcttcttccacgtggtgaacaacgactacacgcactggctcatgtacgccatcggcggcagccggaaccccaccatcatcagccagggcaaccgcttccgcgccgtcgacgacagcaggttcaaggaggtgaccaagcgggagtacacgcagtacagcgagtacaagaactgggtgtggaagtcgcaggacgacctgttcctcaacggcgccttcttcaaccagtccggcggccagaacgagcgcaag

SEQ ID NO: 80975 - DNA, 375 bp, Zea mays
acggacacgtgggtcaagatcgagaacgtcgagaacctgtccatcaacggccacggcaccatcgacgggcagggagccctggtgtggagcaagaaccagtgccagcattcttacaattgcaagatcctcccgaatagcttggtgctggattttgtgacgaacgtccagatccgcggcatcacgctgctcaacagcaagttcttccacctcaacatcttcgagtgcaagaacgtgctgatcgacaaagtgacggtcaaggcccccggcgacagccccaacacggacggcatccacatcggcgactccagcaacgtgaccatcagcagcaccaccatcggcgtcggcgacgactgcatctccatcggccccgggagc

SEQ ID NO: 80976 - DNA, 269 bp, Zea mays
aggatgcatcggcataggcgtgcggcggcactgggaagcagacaatcctcatacccaagggtgacttccttgtcggacaactcaacttcacaggcccttgcaagggcgacgtgaccatccaggtggatggcaatctgctggcgaccacggacctaagccagtacaaggaccatggtaattggatcgagattctacgtgtggataacctggtcatcaccggcaagggaaaccttgacgggcagggcccagccgtgtggagcaagaactcc

SEQ ID NO: 80977 - DNA, 266 bp, Zea mays
gcgaaaggcaagggacgtaagaagtcgtctacttcatgaattaaggtcccgcccttttccgacattcacaggggggacaggaaatcagcggccatggcctcgattccggcgacgaccttcgccgtcatcttatccgtcctcttctgtgccgcggctggcaccgccgtcgacaacgacctccccgactacgtcatccagggccgcgtctattgcgacacctgccgcgccgggttcgtgaccaatgtcaccgagtacatcgcgggcgc

SEQ ID NO: 80978 - DNA, 297 bp, Zea mays
tctagaagtcccgggccgacttcgcctcgacgtcgtctaatccacccggccttaaggctctctagtgcgattcagtcatatgacgtgtaggaagctgcggaaggtcctagcctgcacagatatagaccacgagcaagcaaccaagtgtgtcaccgaggctcttctgttcaaagctgatgcaccacaccggcaacgagctcttgcagcggacgcaataacctgccggaaattcgccgagcgggcttacaagtacagaccactcaaagttgttgagtttgatcggccctacccacagtg

SEQ ID NO: 80979 - DNA, 269 bp, Zea mays
gctcggcgcgatgcggcatgccaacctgctgccgccgctggcctaccactaccgcaaggacgagaagctcctggtctacgattacatccccaagggcagcctgctgtacgtcctccacggcgaccggggcatggactacgcggcgctggactggccgacgcggctcaaggtggccgtcggcgtcgcgcgcggcacggcgttcctccacacggcgctcgccggacacgaggcgccccacggcaacctcaagtcggccaacgtcctcctcg

SEQ ID NO: 80980 - DNA, 389 bp, Zea mays
  unsure (1)..(389): unsure at all n locations
caacttcacgtaccactggcagcccaaggaccagatcggcagcttcttctactaccccagcaccggcatgcagcgggcggcgggcgcctacgggctgatcagcgtccacagccgtgacctgatcccggtgcccttcgacacgccggccgacgacttcccggtgctcatcggcgactggtacaccaaggaccacgccgtgctggccaagaacctggacgccggcaaggggatcgggcggccggcggggctggtgatcaacggcaagaacgagaaggacgcgtcgaacccgcccatgtacaacgtggaggccggcaagacgtaccggttccgcgtgtgcaacgtgggcatcaaggcgtccttcaacgtccgcatccangaccacatcatga

SEQ ID NO: 80981 - DNA, 360 bp, Zea mays
actggcgagccaaggaccagatcggcagcttcgtctactaccccagcaccggcatgcagcgggcggcgggcgcctacgggctgatcagcgtcgacaggggtgacctgatcccggtgcccttcgacacgccggtcgacgacttcccggtgctcatcggcgactggtacaccaaggaccacgccgtgctggccaagaacctggacgccggcaaggggatcgggcggccggcggggctggtgatcaacggcaagaacgagaaggactcgtcgaacccgcccatgtacaacgtgaaggccggcaagacgtaccggttccgcgtgtgcaacgtgcgcatcaaagcgtccttcaacgtccgcatcc

SEQ ID NO: 80982 - DNA, 367 bp, Zea mays
gaaaaatcgtggatggacgggatgccaggcacgcagtgccccatcgcgcccaacaccaacttcacgtacaagtggcagcccaaggaccagatcggcagcttcttctacttcccgtccatcggcatgcagcgggcggcgggcgggtacggcgccatcagcgtggtgagccgcctcctcatcccggtccccttcgaccagccgccgccggagagcgaccacgcggtgctcatcggcgactggtacaccaaggaccacgaggtgctggcgcgccagctcgacgccggcaagagcgtgggccgccccgcgggcgtgctcatcaacggcaagggaggcaaggacctggaggccgccgcgcccatgctcacct

SEQ ID NO: 80983 - DNA, 382 bp, Zea mays
gtccacgcccatccacgagacgtaccagccgcgctgggattactggggaaggtacatggagcccgtgacgtcgagcatcccgatgatggtggtggagggcaaccatgagatcgagcagcagatccacaacaggacgttcgcggcctacagctcccggttcgcgttcccgtcggaggagagcgggtcctcctcgccgttctactactcgttcgacgccggcggcatccacttcgtcatgcttgcgtcctacgccgactacagcagatcaggtgcgcagtacaagtggctggaggcggacctggagaaggtggacaggtcggtgacgccatggctgatcgcgggctggcacgcgccctggtacaccacctacaaggctcactac

SEQ ID NO: 80984 - DNA, 440 bp, Zea mays
  unsure (1)..(440): unsure at all n locations
agaaacaggcacacaagaacaaatacctcgccaccaacaatggcctccaggtcctccatcctacttgcaacggcgatgctggttgcgctgtttgcggttggtttgtgcaccaccccgctcaccttccaagttggcaagggatccaagcctggccacctgatcctcacccccaatgttgcaaccatatctgacgtggagatcaaagagcacgggggcgatgacttctcctttacgctcaaggagggcccgaccggcacctggacgctcgacaccaaggccccgctcaagtaccccctttgcatccgctttgctgtcaagtccggtggctaccgcatcgccgacgacgtcatccccgccgatttcaanggcgggaacaccttataagacacactcaacatctaatcaacctctgatgatgaattatatttcaaaagagctca

SEQ ID NO: 80985 - DNA, 410 bp, Zea mays
cccacgcgtccgcccacgcgtccggcgggatcaagaacgtgaacctgccaccctacagcggcatgacggcgtgcggcaacgtccccatcttcaaggacggcaagggctgcggctcatgctacgaggtgagatgcaaggaaaaacctgagtgctcgggcaatccagtcacggtgtacatcactgacatgaactacgagcctatcgctccctaccacttcgacttgagcggcaaggccttcggctccctggcaaagcccgggctcaacgacaagattcgccactgcggcatcatggacgtcgagttcagaagggtgcgatgcaagtaccccgccgggcagaagatcgtgttccacatcgagaacggctgcaaccccaactacctggccgtgctggtgaagtatgtggcggac

SEQ ID NO: 80986 - DNA, 400 bp, Zea mays
cccacgcgtccgcccgtcgcgcgtccgcgaccgcatctcgcgctcggtgcgccaggagctggaccagccgctcaactacgcgcgcgtctacctcgccgacacgctgccgcgcgacgtgcgccgcgtcacgtacctcgactccgacgtggtcgtggtggacgacgtccggacgctggcgtccgtggacctcgcgggccacgtggtggcggcgcccgagtactgccacgccaacttcagcaactacttcacggacgccttctggtcgcacccggcgctcaacggcaccttccacgggcgccgcccatgctacttcaacacgggcgtcatggtcatggacgtcgacaagtggcgcgccggcgggtacacgcgccgggtggaggagtggatggccgtgcagaag

SEQ ID NO: 80987 - DNA, 362 bp, Zea mays
cggacgcgtgggcccaaccccacccagcgcgacgaagccggggggcgatcgctccagcgccgccgcgccagcgacctcaccccccgggagccgccggcggtacccccctccctatcacgcctcatcgaatcctcagatctaagttttttttggttttgtgagttatccaaagttggaccgcaaagatgagtactgctaatcactatcagcacatcaagtcaaccaagcctgttgtagatctactaatattggagtgtttctttgcttaaaatgtggagatgttcatagggcacttggacctgacatttcaaaggttttatctgtaactttggatgattggtctgacagtgatatcgactcca

SEQ ID NO: 80988 - DNA, 354 bp, Zea mays
cggacgcgtgggttccgccgctcctgcagcctctcgtggacgacgcgggtggccatcgcgctcgacgtcgccaggggcctcgccttcctccacgggtccgaccgccccatcatctaccgggacttcaagagctccaacatcttgctcgacgcgaaattcaacgccaagctgtcggacttcgggctcgccaaggaagggccgatgggcggtgagacgcacgtgtccaccagggtcatgggcacctacggctacgccgcgccggagtacgtagccaccgggcacctgacggtgatgagcgacgtgtacggcttcggcgtggtgctgctggagatgctggtgggacggcgcgcgctg

SEQ ID NO: 80989 - DNA, 394 bp, Zea mays
gacgccgggaagctcggccgccggatccggcgtcgtcgttcctcggaacttcaggctcctagaagagcttgaacgtggagagaagggcattggagatgggacagtgagctatggaatggatgacgcagatgacatctacatgcgatcatggactggcactattattggccctcataataccgtccatgagggtcgcatctaccagctgaagttgttctgcgacaaggactaccctgagaagccaccatcagttcgatttcattcaagaataaacttaacatgcgttaatcatgaaactggagtggttgacccgaagaagttcagcgttctgggtaactggcagcgtgattactcaatggaatacatcctaacccatctcaagaaagagatgaca

SEQ ID NO: 80990 - DNA, 414 bp, Zea mays
ccggtttccccggtttttgagaggggaaagaggaggcggaggagagggatggggagggacgagaggttcccggtgtgggaggccgcgctcggcgccggagtcgccgccgccttcgccgctggactcgtcggtgtctacctttccatgccggactccgactacagcttcctcaagttgccacgtaatctcgaggaactccaaatcctcactggccaccttgagaactatactagtgactacaccctacaggtgttggtaggttattgcgctgtgtacatcttcatgcagaccttcatgatcccagggacaatattcatgtcactgcttgctggtgctctgtttgggcaactgcgtggccttgcgctggtggtctttgctgccactgcaggtgcttcttcgtgctatttcctgtcg

SEQ ID NO: 80991 - DNA, 364 bp, Zea mays
  unsure (1)..(364): unsure at all n locations
ggttagggtggtgcgaggagtgcacctggccatctgcgaccccctcacccacagcagcgacccctacgtcgtcctccgccacggacagcagaaagtcaagtcaagtataaaataccgcacgatcaatccggaatggaacgaggaactcaccctgtccatcacaaacatgatgaacccggtcaagattgaactcttcgaccatgacacgttcaccaaggacgacagcatgggcaacgccgagttctccatcctcaacttcgtggagatcgccaagcaggacctgagcgacgtcnccgacggcacggtgatgaagacgatccacacggagaagggcagctgcctcgccaccgacaggcacatcacg

SEQ ID NO: 80992 - DNA, 393 bp, Zea mays
aaactattcaagtcacagactattcaaaggatggctagtacaaaagatatttctcttccctcttccacagatgcaagtactttgagtgaacaaactccaaatcaggaaaaggatgctgtcacccttatgctcagtgttcgtcaggcaaatcttcttctttcctcgttatggactcaggcactgtcacctgaaaatgttccacggaattatgaagcaatttctcatacttacagcttgatgctattgttttctagagccaagggctcaggtgccgacgttttggttggtagctttcagcttgctttttcattaagaagtgtttcgttacaagcaggttttcttccaccttcacgcaggcgctctctttttactttggcaacttcaatgcttgtg

SEQ ID NO: 80993 - DNA, 422 bp, Zea mays
  unsure (1)..(422): unsure at all n locations
cggacgcgtgggtgaggcctgagcccctcgccgcggtgagccaagccggcgcacgtcgccccggggctcacgctcaccaccgagccccaaccaattaataatatatatatatagctaggatcgatcgtcagtaaaatggcaggctccgccgtcctgaggagccccctgtccgtcctcctctacatcctcgccgccgtgcccgccaccgccgcggcgacgccgaccgacgccgccatcgacgaggcgtacgcgcatctcgtcaacctcaccgctaaccaggagtactgggcggagcgcgcggaggcggcgcacgcgtacaaccgcgcggcgtaccagaccgaccccgtggccgtcgtgcagcgcttcaacgacggcgtgcacanggcgacggcgacgcggtcgcggtccctggcgcacagggc

SEQ ID NO: 80994 - DNA, 418 bp, Zea mays
  unsure (1)..(418): unsure at all n locations
gcggtccgctcctctcccggccacctctaccccggacgcatgcatgtggacatgtcccaccgcgtccggctcgcggcggcggcgctcgtcgcggtcgcggcgctggccctggcgctcgcccccggcgccgcggccaagtggcagcggaccaggaacggcaccgtggtcagctacgaccgccgctcgctcatgttcgacggccaccgggaaatcttcttatccgggtccatccactacccgcggagcccgccggacatgtggccggagctcatcgccaaggccaagganggcgggctcaacaccatcgagacctacgtgttctggaacatccacgagcccgagaagggtgagttcaacttcgaggggcagaacgacgtggtgaggttcttccagctgatccaagagcacgacatgtacg

SEQ ID NO: 80995 - DNA, 368 bp, Zea mays
agggtcgaggcgacgcgtccgtgacatccggcctgtgcttcaggtcaaaagtagtgcacacgcaatgatgggatttgctaatgatgctttcgtaggatgcgcgcgcggaaacaagcaggtgaagggtttcatgtttgaaaaaccggttgatctgaaagtaggtgtgaaccatgtcgtattgctgtcgtcaactatgggaatgaaggatagtggtggtgaacttgctgaagtaaagggcggcattcaggagtgcctaatccaaggtctcaacactgggacgttggatttacaagtcaatggctggggccataaagctgcactagaaggtgagtacaaggagatctactcacaaaaaggtttgggcaaag

SEQ ID NO: 80996 - DNA, 358 bp, Zea mays
  unsure (1)..(358): unsure at all n locations
ggtggagtacgtgcggtccctggacgcggaggaggacgtgactatgctgaggctccacgggtgggaggtgtcgcgcgagtgcgcgcgcacgctgcgcgtcgccaccattctgctgaagaagggtgtggagaggggcctcaccgccttccacatcgggagcatcatgtgcagagagaccctgaccaaggagtccgccatcgaagagatcgtccgtgaggcggcggaacggggaggaggatgcgagactgtcttcttgcangctgtctcggagatcatggaccgccgtctcgacgacatcaaagaacatgttagcctctagatatgcacatggctgacaaaataacgatgtaatcaactc

SEQ ID NO: 80997 - DNA, 363 bp, Zea mays
ggaggccgcgatggtggcgcggtcctgccagccgaggaggaggcagcccctgtcctcggtgagccggtagccgtcgccggcgccgtagaggcccagcaagacctggctctgggcaacggcggccgggctgagcggcacaggctcaaatccacggccttccatgatgcgcctccaccgatccagccgctcgtgccgcgccacccgctcggcgccctcgcacgccaccacgttgcggatctccggcgccaggaggcactgctccaccttcatccgctgcgccgagtccgccgggaacgtcgcgtccagcgagtcgaagatcgccgagtagtagtgcagggcctccaaaaaccttcatggaataca

SEQ ID NO: 80998 - DNA, 421 bp, Zea mays
cggacgcgtgggcggacgcgtgggttctgaaaggcgccaagattcatccataggatttggggcacccattcgtacgaacatgagaagttctggagctagctgtccaatggttacctcatctttattagaatctgttgaaagtggtgatcttgtaagatatggtctaattccggagttcattggtcgtttgcccattctagtaagtttggcagctctgaatgaaggccagctcgttcaggttctgacagaaccaaagaattcactttccaaacaatacaggaaaatgtttaacctgaacaaagttaggctgcacttcactgatggtgcacttagattgttagctaagaaggcgatagctaaaagcactggtgctcgtggtttaagagccatcttggaaactgttcttttggaggccatgtat

SEQ ID NO: 80999 - DNA, 416 bp, Zea mays
  unsure (1)..(416): unsure at all n locations
acgggcacgcgacgtactacggcgggcgcgacgggttaactgacaccacggacggcggcgcgtgcggctacaagggcgagctggggaaagactacggcaccctgacggcggccgtgggcccgtcgctgtacaccaacggcaccgggtgcggcgcgtgctatgagctcaagggccccaagggcaccgtggtggtgacggccaccaacgacgccccgccgccggtgagcgggcagaagggcgagcacttcgacctcaccataccggcgttcctcaagatcgccgaggagaaggccggcatcgtgcccatcacctaccgcaaggtggcgtgcgagaggaaaggcggcatccggtacacgatcacggngaaccagcactacagcgaggtgaacggtgacaccgtgggcggcgccggggac

SEQ ID NO: 81000 - DNA, 413 bp, Zea mays
gccacggcatgtggggtgctgtgaagaaacttcagtctgggttcagagcgtaccagcaaatgagagacacagaaaataccctgtcacacagcgccattatggctcgaatgaccaccagggtatccatcacggcttcgaatggtggcttagaccatgacctctccatcgccgataaaatcagtggcgagaatgacagctcccatgcagttcagcatggttttgactggaagtgggtggtttttggtggtgcggtggctgcggtttgtgtgctcaacaccggactggtaggcaaggtcctgttgcttggagcagcgagacggcaggcaaagaagtgatgtgaggagcaaccttccagcctctgcagaaaggcattcgtcaggctgtagctacaaccgtacaggcaaaaagtattg

SEQ ID NO: 81001 - DNA, 353 bp, Zea mays
  unsure (1)..(353): unsure at all n locations
atcaacgccctgcaccagctgcacatcttcatcttcttcctcgccgtcttccacgtctcctacagcgcaatcaccatggcgctcggcagggccaagatacgtgcatggaaagagtgggagaaagaagctgcaggacaagactacgagttctcacatgacccgacgcggttcaagttcacccacgagacttccttcgtgaggcagcatatgaatgtgctgaacaagttcccagcatcattctacatcagcaacttcttccggcagttcttcaggtccgtgaggcangcagactactgcgcgctgcgccacagctttgtcaacgtccatctggcccctggcagcaagtttgattt

SEQ ID NO: 81002 - DNA, 365 bp, Zea mays
ggaaaaggagcgaagagagagagagacgcaagcccgccggcgacgatcgacgagggatgaacgccagagacccggcggctgcgacgatggctccgcgcagctcatcggcggcgacgtgcctgtgcctcgctctcgccgcggccacgctggcgctggcccacggggcgcaaggaggaggaccatcggcatcggcggcggacctggacaaggtcactgccgagaccttcctcgacatcgagatcgacggcaagcctgcaggccggatcgtgctgggactgtttggggacaccgttcctaacacagcagagaacttccgagcactttgcacaggggagaaaggaatggccaagtccggcaagcctcta

SEQ ID NO: 81003 - DNA, 364 bp, Zea mays
cgtctaattcttggatcgaattagacgacttcttcgtccctctcttcattagcacgctaacttgtaatctgcaggatctaagcaaagacttgatttagttatggacggattggtaggcctcttgaaagttcgcgtggtccggggtatcaaccttgcctaccgcgacgcaagaggcagcgatccgtatgtcgtcctacggcttggcaagaagaaactgaagacaagcgtgaagaagagatccgtgaaccccatatggcaagaggagctaactctgaccgtcacagatcccagccaaccactgaagctgactgtttgctacaggaggtgttcgacaaggacaccttcagcagagacgacccatggg

SEQ ID NO: 81004 - DNA, 374 bp, Zea mays
cggacgcgtgggcagtcatctcctccatcaccaccaccaagctcaacaacagccagctcgcgaaaataatgaagagccgcagcatggcatcatcggccgcgctcttggtgctagccctcgcgctagtggcggccaccgccccacaggtagcggaggcaaagaagaagagagcggcggagagcggcgaggcggcggaggcgaagaagatccaggacgacttctgctcgacgctgtgcgagggcaagaaggggacggacctggtcgtgtgcaaggagtcctgcgcgctctcccagcagtccaacctggtgctgtacggcaggatccagtgcaagggcaagtgcaccgagcagaagggcatcacggcgccggccatg

SEQ ID NO: 81005 - DNA, 379 bp, Zea mays
cagatggccatggagggtcgtcgtcgtcgtcgtctcgttctgtggctcgtgatatccgcgcaaacaatgctagttgccgccgcggccggcgccaagcggcaggcgccggtgatgttcgtgttcggcgactcgacgctggacgtcgggaacaacaacttcctgtcgggggcggccgtccccagggccaacaagccccactacggcgtcgacttccccggcggccatcccaccggaaggttcagcaatggcgacaacacggctgacttcgtcgcgaagagcatggggttgaagagtagccctccgccgtatctgtcgcttgcacccaacggctccagccctctgctcgcgcagactgctctcaccactggtgtcagctacg

SEQ ID NO: 81006 - DNA, 425 bp, Zea mays
gacaagatggcgtgcacaaacaatgcgatgagagccttgttcctcctggtcctcttctgcatcgtgcatggtgagaaggaagagtcaaagggcatcgatgcgaaagcgtccgggcctggtgggtccttcgacatcaccaagttgggcgcctccggcaatggcaagacagacagcacgaaggctgtgcaggaggcatgggcatcggcgtgcggcggcactgggaagcagacaatcctcatacccaagggtgacttccttgtcggacaactcaacttcacaggcccttgcaagggcgacgtgaccatccaggtggatggcaatctgctggcgaccacggacctaagccagtacaaggaccatggtaattggatcgagattctacgcgtggataacctggtcatcaccggcaaaggaaaccttgacgg

SEQ ID NO: 81007 - DNA, 352 bp, Zea mays
atcagctccatgctgcggttgtggagcttgtgtgtgagaatggggcagagattaagtactccacggtgcagaattggtactccggtgatgaggaggggagaggaggcatttataactttgtgacaaagaggggaaggtgcaaagggcggggttcgaagatctcatggacacaggttgagacaggatctgctattacatggaagtacccaagcgttgagcttgtcggggatgacagtgttggagagttctactcggttgcgcttacaaacgattgccagcatgcagacacagggacgatcatgatccacaaggggaaaaattcacgcagccggattatatccaacggcatctc

SEQ ID NO: 81008 - DNA, 429 bp, Zea mays
acggacgcgtgggattccccagaacactagccttccccgcgaggcccctcccccgcggtctccgcctgacccctccgcacgccgccgcggaggcatcggcggcagccacggcgttgggcgggcttctggcgtcgccgctctcgactctggaggccgccctgcggggcctcaacctcgcgccccttcgcgcccccgtggcggcggcgatgtcggcggccgtgcggtggctgggagtgtaccgggaggtgctgctcgtcggcgtgctgctctcctggttccccaacatcccctgggaccgccagcccttctcggccctgcgcgacctctgcgaccccttcctcgccctgtgccgtgaagtcatgccccccgtgttcgggcgcaagctcgacctcagcccgcttgttgcatcaaggctattgacatcatcat

SEQ ID NO: 81009 - DNA, 433 bp, Zea mays
  unsure (1)..(433): unsure at all n locations
ccggcgggctggccggcaagttctacgtggtgattgaccccagcgacgacgccgccgacctcgtcacccccaggaagggcacgctccggcacgccgtgacccgggcccgggcgctgtggatcaccttcgcgcgcgacatggtgatcgagctctgccaggagctcatcgtgagcagcgacaagaccatcgacgggcgcggagcgcaagtgcacatcgtgggcgcgcagatcacgctgcagaacgtgcgcaacgtgatcctccacaacctgcacgtccacgacgccgcggcgcacggcggcggcgcgatccgggactcgcagcaccactggggcgtgcgcggggagagcgacggcgacggcgtctccgtgatggggtccagcgatatctggatcgnacacctgtccatgagcagctgcgcggacgggctggtgga

SEQ ID NO: 81010 - DNA, 414 bp, Zea mays
ccactcattccaagaggcagccgcggtctcctctccaacccggccgccggccgcccccacagtgccgtaccccgaccagccatgcgcatcttcgtgctgtccgggcagagtaacatggccggccgcggcggcgtacacgacaggcactgggacggcgtggtgcccccagaatgcgcgccggatccgtccatcctccgcctttcctcggcgcagcagtgggaggaagcccgcgagccgctccacgccgacatcgacacaaccaagacctgtggcatcgggcccgggatggcattcgcccgcgctgtgctctcgagcctgcaggaggacacccctggcgcggcggcccagatcgggctcgtgccgtgcgccgttgtgaggacggccatccgggagtggtccctcgggaaacatctg

SEQ ID NO: 81011 - DNA, 412 bp, Zea mays
aacgaggcagccgcggtctcctctccaccccggccgccggccgcccccacagtgccgtaccccgaccagccatgcgcatcttcctgctgtcgggggagactaacatggccggccgccgaggagtacaccacaggcactgggacggagtggagcccccacaacgcgcgccggatccgtccatcctccgccttgcctctgcgcagcactgggatgaagcccgcgagccgccctacgccgacatcgacacacccaagacctgtggcatcgggcccgggatggcattcgcccgcgctgtgctctcgagcctgcaggaggacacccctggcgcggcggcccagatcgggctcgtgccgtgcgccgttggcgggacggccatccgggagtggtccctcgggaaacatctgtacgagca

SEQ ID NO: 81012 - DNA, 409 bp, Zea mays
agaacgtctcacgagaacctttctccctcctccacctttctccttttcttgccacggcaaaacaccttcgccggcgagagcatggcgatggcgtaccgtgtcctggaggtcaccctggtgtcggcaaatgacctcaagaaagtgtcgctcttctcccggactcgcatctacgccgtggcttccatctccggattcgacctccgcatcccttcccacagcacccaagcagaccacagcaacggctgcaacccctgctggaacgccgtggtacacttccccatcccggctgccgctgacacccgcggcctcgcactccacgtgaggctccgcgcccagcgtctatacctgggcgatcgcgacatcggcgaagttgtttggtgccatcgacgacctcctggccggcgccgac

SEQ ID NO: 81013 - DNA, 364 bp, Zea mays
agctacctatagctatatcgcaggttcaattgcaagggcaattgcaccgaccaaaagggcatcacggcgccggccatgaaggtctgccagaaggattgcgacaaggcgtacgtggtgaaggcggccgaggtcaccaaggcctgcagcgtcacctgcgccaaggagaagaacccgcgcctcagcgagaactgcaagaggtcctgcacccctcctccttcttgaagcgaagccccttgaaatgaatgaaccatgcatgcatgcatgtatgcatgcgccggggtgacgtggcgttcagctcaagcgctgaccgagtctatacgtacgtcgtcaccggctggccacgcatgcgataaccacctgatat

SEQ ID NO: 81014 - DNA, 375 bp, Zea mays
  unsure (1)..(375): unsure at all n locations
cccacgcgtccgcggacgcgtgggcgagcctgggtttctggccccgatcggcctcttccttggccccaccaagtacatggtcatccaaggcgagcccggcgctgtcatccgcgggaagaagggatctggaggcataactgtgaagaagaccggacaggcgctggtgatcggcatctacgacgagcccatgacccctggacagtgcaacatggtggttgagaggctcggtgactacctcgtagagcaaggcctgtgaatgcatccaaacaacgacaccaacgccaacattaattaattagtagtctccatgccctgngattgtgcgtggccgctccgttgaacaccatccatccntcggtccgcaatttttccccc

SEQ ID NO: 81015 - DNA, 181 bp, Zea mays
aagggacgtcacacctttttcctctgacatctacaaggggggaagggaaaacacgtacattcacccggctgcattaatggcctcggttccggctccggcgactaccatcgccgccgtcatcctatgcctatgcgtcgtcctctcctgtgccgcggctgacgactcgaacctcgccgactac

SEQ ID NO: 81016 - DNA, 419 bp, Zea mays
attcattgtagatggagaaagaagatttatacccgaccttccatgcgaaactgacaatatgggtcagattgtgaacctagtagatgtccatgacttcgttcctgacagcgtggaaagtgtatctgagctgatggcccctccctccccggactccagctacggtttccatgttcccggcgagaaggagttctccaaggagcctcctcagctgccgtcccagctctatctcggcgtgctgaattcccggagcaccgaagaaggctgcgcgaggccgaggcacgtcgtcctcgaccatctctacatcgagaagggctggggcgcacagccgctggtggccctcggctacacccacaggttccgctccaagttcgtcacctgcgtcctgtacaaaggcatcgagcggtagcctagctaaccat

SEQ ID NO: 81017 - DNA, 339 bp, Zea mays
agcccacgcgtccgcccatgcgtccggaccctccgtcgactgacccatctctctagttataatttttctctcgtccttgcattgcatattagttgctatccattggtaacgcacaacagtaaaacgacaaacatccaacagctatattatgttcgacggtgtaacaccctgaattttagggtataaaatttcttctctaaatgcaaaccaaattcaagtgttacctcttgtctctctctctatcttttccttttgattaaaagtaagtgaattaggcgagggtttaattatttaatttgtcaaaacttatgtgagtcatgaaatgttgtatcatgctga

SEQ ID NO: 81018 - DNA, 336 bp, Zea mays
gggcagggagccctggtgtggagcaagaaccagtgccagcattcttacaattgcaagatcctcccgaatagcttggtgctggattttgtgacgaacgtccagatccgcggcatcacgctgctcaacagcaagttcttccacctcaacatcttcgagtgcaagaacgtgctgatcgacaaagtgacggtcaaggcccccggcgacagccccaacacggacggcatccacatcggcgactccagcaacgtgaccatcagcagcaccaccatcggcgtcggcgacgactgcatctccatcggccccgggagcaagatgatccgcatccatggcgtcaag

SEQ ID NO: 81019 - DNA, 266 bp, Zea mays
agctgccacttcacaaacaacaacgaactcatgctcctccgcgccagcgactcctggccgcaagaccagatcatgcagatcaccgtcgccttcaaccacttcggcaggggcctggtgcagcggatgccaaggtgccgctggggcttcttccacgttgtcaacaacgactacacgcactggctcatgtacgccattggcggcggcgacgcgccaaccatcatcagccagggcaaccgctacatagcaccaccaaacatcgccgccaa

SEQ ID NO: 81020 - DNA, 363 bp, Zea mays
acgtcatcccgccgggcaactacctgacgggcgggctggagctgaagggcccctgcaagtcctccatcatcatccgtctcgacggcaacctgctcggcaccggcgaccgcagcgcgtaccaaaggaactggatcgagatcgagaacgtcgagaacctgtccatcaacggccacggcaccatcgacgggcagggagccctggtgtggagcaagaaccagtgccagcattcttacaattgcaagatcctcccgaatagcttggtgctggattttgtgacgaacgtccagatccgcggcatcacgctgctcaacagcaagttcttccacctcaacatcttcgagtgcaagaacgtgctgatcgaca

SEQ ID NO: 81021 - DNA, 340 bp, Zea mays
acccatggaatgccgggccgtggaaacccgcccacgcgaccatctagagcgggcgggacgggtccggcaccacggcgggcgcgtgcgggtacaaggacacgcgcgcgcgggggtatggcgtgcagacagtggacgtgagcacggtgctgttcggcgacggcgcggcctgcggcgggtgctacgaggtgcgctgcgtggacagccccagcgggtgcaagcccagcgcggaggcgctggtgtgcgacggcgaccgacctgtgcccgcccaacgaccagcagtccgcggacagcggcgggtggtgcaacccgccgcgggagcacttcgacctcagcatgcccg

SEQ ID NO: 81022 - DNA, 311 bp, Zea mays
caaccaaaaggcagttcttccgcgactgcgaggtgctgggcaccgtggacttcatcttcggcaactcggcggcgctgttccagaactgcctcatgacggtgcgcaagcgcggggacagccagtccaacatggtgacggcgcaagggcggacggaccccaacatgcccacgggcatcgtgctccagggctgccgcatcgtgccggagcaggcgctcttccccgaccgcctccagatcgccacctacctcggccggccgtggaaggagtacgcgaggacggtggtgatggagagcaccatcggcgacctcatc

SEQ ID NO: 81023 - DNA, 334 bp, Zea mays
cccacgcgtccgggtgaccaagcgggagtacacgcagtacagcgagtacaagaactgggtgtggaagtcgcaggacgacctgttcctcaacggcgccttctgcaaccagtccggcggccagaacgagcgcaagtacgacaggctcgacctcatccaggccaagggcggccagtacgccgagtcgctcaccaggtacgccggcgcgctcaactgccgcgtcggcaggaagtgctagtgcgtgtgcagctctaggctgcagctttcatcattggcgatcgatcgtaacaatgcaaggttgtgttgtatataactcttgtgtttggaatgccgcccg

SEQ ID NO: 81024 - DNA, 347 bp, Zea mays
  unsure (1)..(347): unsure at all n locations
agcccacgcgtccgctcgtctcaccctccctccctcacacaaataataaggaaaggtcccgcccttttcctccgacatccacaggggggaggggaaaacacgtgcatgcacccggcggcaataatggcctcagttccggctccggcgacgacgaccgccgccgtaatcctatgcctatgcgtcgtcctctcctgtgccgcggctgacgaccccaacctccccgactacgtcatccagggccgcgtgtactgcgacacctgccgcgccgggttcgtgaccaacgtcaccgagtacatcgcgggcgccaaggtgaggctggagtgcangcacttcggcaccggcaagct

SEQ ID NO: 81025 - DNA, 380 bp, Zea mays
taaccagaatctgttcacggaccgcttcaagatcccctcgtacctgggccgcccctggaaggagttctcgcgcctcgtcatcatggagagcaccatcgccgacttcgtcgagccagaggggtacatgccctggaacggcgacttcgccctcaagacgctctactacgccgagtacaacaaccgcgggcccggcgccggcaccagcaagagggtcaactggcccggcttccacgtcatcggacggaaggaggccgagccgttcaccgccgggccgttcatcgacggcgccatgtggctcaagtacaccggcgcgccgcacatacttgggttcaagttctaaaggccgcatggcatggcatacatcacatcatatatagtga

SEQ ID NO: 81026 - DNA, 330 bp, Zea mays
agcgcttccgctccacaggatcctctgcgccacccacaaccgtgcgaccgtccgtgctgccggcgaccccgatccgccgacccgtcccgtcccaccacacccgagcggggctcgcagctatgtcgccgtcggagccgacgcgggaggagagcgtgtacatggccaagctggcagagcaggcggagcggtacgaggagatggtcgagttcatggagcgcgtcgcgcgctccgccggcggcgccggcggaggggaggagctctccgtggaggagcgcaacctgctgtccgtcgcctacaagaacgtcatcggcgctcgcatggcctcgtggc

SEQ ID NO: 81027 - DNA, 375 bp, Zea mays
acgtcataccgccgggcaactacctgacgggcgggctggagctgaagggcccctgcaagtcctccatcatcatccgtctcgacggcaacctgctcggcaccggcgaccggcagcgcgtaccaaaggaactggatcgagatcgagaacgtcgagaacctgtccatcaacggccacggcaccatcgacgggcagggagccctggtgtggagcaagaaccagtgccagcattcttacaattgcaagatcctcccgaatagcttggtgctggattttgtgacgaacgtccagatccgcggcatcacgctgctcaacagcaagttcttccacctcaacatcttcgagtgcaagaacgtgctgatcgacaaagtgaccgtc

SEQ ID NO: 81028 - DNA, 393 bp, Zea mays
gggtcgacgcccgcgtccagccgcattcctggtgtcggtggtgttcctgggcctgtccacggtggtgaccatgatcttcgcccgcgaggtgccgctggacccggcggcggcggcgaagcaggacgaggccggggagtcgtcgggcccgttcgccgttttcaagggcatgaagaacatgccccccggcatgccgcaggtgctcatcgtcacgggcctcacctggctctcctggttccccttcatcctcttcgacaccgactggatgggccgcgagatgtaccacggcaggcccgacggcagccccgaggaggtggccaggttccaggagggcgtccggcagggcgccttcggcctgctcctcaactccgtcgtcctcggagccagctccttcct

SEQ ID NO: 81029 - DNA, 370 bp, Zea mays
agcggaagtcatgcaaatgaagcagatggcgaacccgacgaccgccgcgggcatgctgcgcgtcttcttccacgactgcttcgtcaccgggtgcgacgcgtcggtgcggatcgcgtccacccagttccagaagtcggagcacgacgcggagatcaaccactcgctccccggggacgccttcgacgccgtggtgcgcgccaagctggccctggagctggagtgccccggggtggtgtcctgcgccgacatcctcgcgctggcgtcgggggtgctggtcaccatgaccggcgggccccggtacccgattccgctggggcgcaaggactcgctgtcgtcgtcgcccacagcgcccgacgtccagctgccgcac

SEQ ID NO: 81030 - DNA, 339 bp, Zea mays
aagcggaagcggcggcggcgcgggggcccggccgaacgtcgtcacggtggcgatcctgatgtcggcgtgcgcgaagctgaggaggccggcgcccgggcgggaggtccacgggtacgcggcccggaacgtggccgcgctcgacctccacgcgctcaacgcgctggtgcacatgtacggcaggtgcgggcggctcagggacgcgaggacggcgttcgccggcatcggggccggcgcgaggaacgccgtgtcgtggacggccatgatcgacgcgtgccgcgagaacgggcgccccgcggaggcgctgggggtgttcgaggagatgcgtcggctcgctggcgc

SEQ ID NO: 81031 - DNA, 349 bp, Zea mays
gggtcgagcacgcgtccgcccaagcgtccgtgatcctcaaggcgtggaagaacgcgtgcgatgcgactgtggtacagaagatcgtcatcccgccgggcaactacctgacgggcgggctggagctgaagggcccctgcaagtcctccatcatcatccgtctcgactgcaacctgctcggcaccggcgacctcagcgcgtaccataggaactggatcgagatcgagaacgtcgagaacctgtccatcaacggccacggcaccatctaccggcagggagccctggtgtggagcaagaaccagtgccagcattcttacaattgcaagatcctcgcgaatagcttggtgctgga

SEQ ID NO: 81032 - DNA, 387 bp, Zea mays
aggagctcctcgggaatccggtgccaggcctcgccttctcgcggcggtgctccctccctcttcgtcccccagcgacgcaggcaggcgcgcgcgcggccatgaaggggggcggtgccatgaggccgtcgcctatgttctacgtccacgaggcggacgtcgtccagatccaccacttcctcgaggagtgctccctctgcgccaaatcgctctccggcgacatcttcatgtacaggggtgacacgccgttctgcagcgaggagtgcagggagcagcagatcgaggtggacagggcgaagcaccggcggaagaagcgcgcggcggcgcacgcgctgtccgcacgcagcagggagcaccgggcacagcagcagctgcaacaacaacaacaac

SEQ ID NO: 81033 - DNA, 376 bp, Zea mays
gcgtccactcctaaactaatatttggagctacggagtataccactgcaatcgatatctggtctgttggctgtgtagtggctgagcttctgattggtcagcctttgtttcctggggaaagtggtgttgatcaactggtggaaatcataaagattttgggtactccaacaagagaggaaatcaggtgcatgaatccaaattattctgaattcaagttccctcagataaaagcccatccatggcacaagctttttggtaagcgcatgccacctgaagctgttgatctcgtgtcaaggctacttcagtactcaccaaacctgcgctgcactgctgttgatgcttgtgcccatccattcttttatgagcctgcggaaccca

SEQ ID NO: 81034 - DNA, 331 bp, Zea mays
agggttcgtggatggctgcgccacgacctctcctgctgtcgctgctggtcgccgtgctagcggtggccgccgatgtcgccaacgccggccacgccaagccccggacgcgtggcgggcgtgtggtacacgacaaccacggcaagttcacggccgggccgtggaaacccgcccacgcgaccttctacggcgggcgggacgggtccggcaccacggcgggcgcgtgcgggtacaaggacacgcgcacgcaggggtacggcgtgcagacggtggccgtgagcacggtgctgttcggtgacggcacggcctgcggcgggtgctacgaagtgcggtg

SEQ ID NO: 81035 - DNA, 386 bp, Zea mays
agcagtgccccaatggacacacgctgtgttccacatgcaaggccagagtacacaaccgttgccctacctgcaggcaagagctgggcgacatcaggtgcctggcgctggagaaagtcgccgagtctctggagctcccctgcaggtactactcgctggggtgccccgagatcatgccttactacagcaagataaagcactaggcgcagtgcggcctgagaccgtacaactgcccctacgccggctccgagtgcggcgcggccggcgacatcccttccctcgtctcccacctgagggacgaccacaacgtggacatgcacagcggctgcaccttcaatcacagatacgtgaaatccaaccccccgggaggtggaaaaagccaacttgaa

SEQ ID NO: 81036 - DNA, 316 bp, Zea mays
aggccggagcaaaaagcttgtgcgtctggctgtctccggccggccgggcttgtcgtacgtcctccaatccgttgacggtcaggccctctagcttttgctcggtgttctggagacagagcgagagagagagagagagagagaggtagacggagatggagtgcctgctggggctgctcaaggtgcgggtggtgcgaggagtgcacctggcaatctgcgacccgctcacccacagcagcgacccctacgtcgtcctccgccacggaaagcagaaagtgaaatcaagtataaaataccgcacgatcaacccagaatggaa

SEQ ID NO: 81037 - DNA, 315 bp, Zea mays
aacatgcagtcatctcctccatcaccaccaccaagctcaacaacagccagctcgcgaaaataatgaagagccgcagcatggcatcatcggccgcgctcttggtgcgagccggcgcgctagtggcggccacagccccacaggtagcggaggcaaagaagaagagagcggcggagagcggcgaggcggcggaggcgaagaagatccaggacgacttctgctcgacgctgtgcgagggcaagaaggggacggacctggtcgtgtgcaaggagtcctgcgcgctctcccagcagtccaacctggtgctgtaaggcagga

SEQ ID NO: 81038 - DNA, 390 bp, Zea mays
  unsure (1)..(390): unsure at all n locations
acccacacgtccgcatgaacaagttcaagaagaaggcgctgggcgtggtggcgcggaacctgccggtggaggagctggacaagtacgtgcagatgttccacctcatggagaaggaccacaacggcaacctcacgctggaggagctcatggacggcctccacatcaacggccagcccgtgccggagtcggagatcaggatgctgctcgaggccgccgacacggacggcaacggcaccctggactgcgacgagttcgtgacggtgtccctgcacctcaagaagatgagcaacgacgagtacctggcgtcggcgttcaggtacttcgacaaggacggcagcggcttcatcgagcccgangagctgcnggatgaactgggccccaacgaacaag

SEQ ID NO: 81039 - DNA, 317 bp, Zea mays
cagacgttgaggtcgagggacacggtatctctgagcttcatcggagagcgacccgccaccgccacgcttggccgcaagccgagaagagtgccgggccgggagaccggacgattattgatccgtagcagattcgctaatggcggatacggcggacatggagcggatcttcaagcggttcgacaccaacggcgacggtaagatctcgctgtcggagctgacggaggcgctacggacgctggggtccacctctgccgacgaggtgcagcgcatgatggccgagatcgacaccgacggcgacggctgcatcgactttaacg

SEQ ID NO: 81040 - DNA, 322 bp, Zea mays
ccatgccagcggcgggggagacagaggaggcagaatgagattctagggagttaagggaggcgaccgccatgggggactccagcgacggggtggcggtcgacgtcgagcggatcttctttggcggcaaggggcatcgagtgaggacgaggcacggccctctatcggtttctgtatacggagacgaggacaagcccgcgctcgtaacttatccggatttagccttgaatcacatgtcttgcttccaaggattgttcttctgtccagaggccgcgtcgttgttgcttcacaatttctgtgtgtaccacatcacacctcaagggca

SEQ ID NO: 81041 - DNA, 335 bp, Zea mays
aataacacagttgagcgcgacgatgggatccctcgctaataacatcaaggtcgtgggtgtcgtccttgcagcgctcgtcgccggcgggtcgggcaggcccccgaaggtgccgcccagtcccaacatcaccaccaactacaacggcaagtggctcaccgccagggccacctggtacggtcagcccaacggtgccggcgctcctgacaacggcggtgcgtgcgggatcaagaacgtgaacctgccaccctacagcggcatgacggcgtgcggcaacgtccccatcttcaaggaccgcaagggctgcggctcatgctacgaggtgagatgcaaggaaa

SEQ ID NO: 81042 - DNA, 377 bp, Zea mays
agggagacctggtgtggagcaagaaccagtgccagcattcttacaattgcaagatcctcccgaatagcttggtgctggattttgtgacgaacgtccagatccgcggcggcacgcggctcaacagcaagttcaaaaacctcaacatcttcgagtgcaagaacgtgctgatcgacaaagtgacggtcaaggcccccggcgacagccccaacacggacggcatccacatcggcgactccagcaacgtgaccatcagcagcaccaccatcggcgtccgcgacgactgcatctccatcggccccgggagcaagatgatccgcatccatggcgtcaagtgcggcccatgccacggcatcagcctcggcagcctggggcccctc

SEQ ID NO: 81043 - DNA, 336 bp, Zea mays
agcgacaagatggcatgctcaaacaatgcgatgagagccttgttcctcctggtcctcttctgcatcgtgcatggtgagaaggaagagtcaaagggcatcgatgcgaaggcgtccgggcctggtgggtccttcgacatcaccaagttgggcgcctccggcaatggcaagacagacagcacgaaggctgtgcaggaggcatgggcatcggcgtgcggcggcactgggaagcagacaatcctcatacccaagggcgacttccttgtcggacaactcaacttcacaggcccttgcaagggcgacgtgaccatccaggtggatggcaatctgctggcgaac

SEQ ID NO: 81044 - DNA, 392 bp, Zea mays
aacgtcagctggcaagtgtttacaagggagaagcagagaagatccttatggtgaataaagcggaggcagaagcagaggcgaaatatctttctggtgtcggtatcgctaggcagcggcaggcgataaccgacggccttagagagaacatcctgaacttctcacactcggtgtcgggcaccagcgcgaaggaggtcatggacctgatcatggtcacgcagtacttcgacaccatcaaggagctcggggacggctccaagaacaccacgatcttcataccccacggaccaggccacgtgaaggacatcagcgagcagatccgcgacggcatgatgcaggcctcaagcagcaacgtgtaaatcaccgactctctgcacgattggagacggctcggc

SEQ ID NO: 81045 - DNA, 347 bp, Zea mays
aggagaaggtgatgcgcgtcggcatgatcgaccagatcaagcgcgagatctccgtcatgcgcctcgtccgccaccccaacgtcgtgcagctgcacgaggtgatggccagcaagagcaagatatacttcgccatggagtacgtccggggcggcgagctcttcgcccgcgtcgcccgcggccggctcaaggaggacgccgcgagaaggtacttccaccagctcgtcggcgccgtcgacttctgccacagccgcggcgtctaccaccgcgacctcaagcccgagaacctcctcgtcgacgagcacggcaacctcaaggtctccgacttcggcctcagcgcgctcagggag

SEQ ID NO: 81046 - DNA, 394 bp, Zea mays
ctcacgggtcgacacacgcctctacctcgactccgtctcactcaccccgccttcacgcctccctcaccaaataaggtcccgcccttttccgacattcacaggggggacaggaaatcagcggccatggcctcgattcgggcgacgaccttcgccgtcatcttatccgtcctcttctgtgccgcggctggcaccgccgtcgacaacgacctccccgactacgtcatccagggccgcgtctattgcgacacctgccgcgccgggttcgtgaccaatgtcaccgagtacatcgcgggcgccaaggtgaggctggagtgcaagcacttcggcaccggcaagctcgagcgctccatcgacggggtgaccgacgggaacggcacgtacacgatcgagctca

SEQ ID NO: 81047 - DNA, 447 bp, Zea mays
cggtcagggattcacgggtccatccactcctgacctaccaagtacatggtcatccaaggcgagcctggtgccgtcatccgtggcaagaagggatcaggaggcatcaccgtgaagaagacagggcaggcactcgtggttggcatctacgacgagccgatgacgcctgggcagtgcaacatggtggtggaaaggctgggcgactacctgcttgaacagggcatgtaactactacgtaccagctggaatgcatgtcgacgacgatggtttcgagtttcgacttccaataatagtaacaacaaagcaaaggccttcctcccggcgtatttgctttggctcttctcctccacgccataagatatctagcaattggtgactcgccttaattagttcgctttgcttttgaggttgactcgaccattttgctgtagcgtgaattgcatggacatg

SEQ ID NO: 81048 - DNA, 415 bp, Zea mays
gttttgtttgttgtccgcctggcgcctggccccataactactctgccacaatccggggaagaatcaacctagcggtaagcggacatggcggcggcgaagatagcgccgtcgatgctctcgtcggactttgccaacctcgcttcggaggctgagcgcatggtccgcctaggcgccgactggctacatatggacatcatggatgggcacttcgttcctaacctgactattggggctccggtgatccagagcttgaggaaacataccaaagcatatttggactgccatcttatggtcacaaagccttcagattacgtagaaccatttggaaaggctggcgcttctggattcacattccatatagaagttgctagagacaactggcaagatctcatccaaagcattaaatcaaagggta

SEQ ID NO: 81049 - DNA, 377 bp, Zea mays
cgcagatgctgctggagcacggcgacctcatcctgtcgggcgccacgtccgtgttcggcgccgcgcccgtggaggtctccgtgaaggtggccggcatccactggcactactgcagccggtcccacgccccggagctcaccgcgggctactacaacacgcggcgccacgacgggtacctcaccatcgcgcgcctcctggcgcgccacggctccgtgctcaacttcacctgcgtggagatgcgggaccacgagcagccgcaggaagcgcggtgcatgccggaggcgctggtccggcaggtgggcgccgcggcgcgcgccgccggggtgggcctcgcgggcgagaacgcgctgccgcggtacgacggcacggcgcacgac

SEQ ID NO: 81050 - DNA, 397 bp, Zea mays
cccacgcgtccgctcactcaccccgccttcacgcctccctcaccaaataaggtcccgcccttttccgacattcacaggggggacaggaaatcagcggccatggcctcgattccggcgacgaccttcgccgtcatcttatccgtcctcttctgtgccgcggctggcaccgccgtcgacaacgacctccccgactacgtcatccagggccgcgtctattgcgacacctgccgcgccgggttcgtgaccaatgtcaccgagtacatcgcgggcgccaaggtgaggctggagtgcaagcacttcggcaccggcaagctcgagcgctccatcgacggggtgaccgacgggaacggcacgtacacgatcgagctcaaggacagccacgaggaggacatctgcg

SEQ ID NO: 81051 - DNA, 395 bp, Zea mays
gggacgtaagaagtcgtctaattcttggatcgaattagacgacttcttcggcactctcttcattagcacgctaacttgtaatctgcaggatctaagcaaagacttgatttagttatggacggattggtatgcctcttgaaagttcgcgtggtccggggtatcaaacttgcctaccgcgacacatgaggcagcgatccgtatgtcgtcctacggattggcaagaagaaactgaagacaacgcgtgaaaaagagatccgtgaaccccatatggcaagaggagctaagtctgaccgtcacatatcccagccaaccactgaagctggaggtgttcgacaaggacaccttcaacacacacgaccccatgggagacgcggaagtggacgtggcgccactga

SEQ ID NO: 81052 - DNA, 435 bp, Zea mays
  unsure (1)..(435): unsure at all n locations
gcggtcaggggtccacggacgcgtcaggctggttcgtggatggctgcgccacgacctctcctgctgtcgctgctggtcgccgtgctagcggtggccgccgatgtcgccaacgccggccacgccaagcccctgacgcctggcgggcgtgtggtacacgacaaccacggcaagttcacggccgggccgtggaaacccgcccacgcgaccttctacggcgggcgggacgggtccggcaccacggcgggcgcgtgcgggtacaaggacacgcgcacgcangggtacggcgtgcagacggtggccgtgagcacggtgctgttcggtgacggcacggcctgcggcgggtgctacgaggtgcggtgcgtggacagccctagcgggtgcaagcccgacgcggcggcactggtggtgacggtgaccgacctgtgcccgcccaag

SEQ ID NO: 81053 - DNA, 418 bp, Zea mays
  unsure (1)..(418): unsure at all n locations
gccaactcgggtgcagcatgctgctgatgacgccgatctgcagggccttccggtggccatcaagcagctggaccgcaatggcttccagggcaacaacgagttcatggtggaggtgctcatgctcagcatgctgcaccaccccaacctcgtcagcctcgtcggttactgcgccgagggcgagcagcgcctgctcgtctacgagtacatggcactagggtccctcgaggaccacctgttattgctgcgtgacgatggccatggcagccctttgccctggcgcacgaggatgaagatcgcgctcggcgcggcgcggggcttagagtacctgcacgaaagcgctgtcatctaccgggacctcaagtcctccaacatcctcctcgnacaagactacgcgcccaagctctctgacttcggcctc

SEQ ID NO: 81054 - DNA, 371 bp, Zea mays
aggagagatgatctggagtctgttggctatcttctgctatattttttaagaggaagcctcccatggcagggccttaaagctggcactaagaaacaaaagtatgataaaattagtgaaaagaaaatgcttacctcggcagagattctgtgcaaatcttacccgccggagttcgtctcatatttccactattgtcgctccctgcgatttgaagacaggccagattactcttcaatgaagaagctctttcgtgatgtatttatacgggaaggataccaatttgattacgtatttgactggactgcactcaagtaccctcaaatgggctccaacaacaagcttgttcaacagaccaagtgcaagaatggctggag

SEQ ID NO: 81055 - DNA, 408 bp, Zea mays
ctgcttcgcaaacggctgcgacgcgtccatcctgatcgacccgatgtcgaaccaggcctccgagaaggaggccggccccaacgtctccgtgaagggctacgacgtgatcgaggagatcaagacggagctggagaagaagtgcccgaacgtggtgtcgtgcgcggacatcatctcggtgagcgcccgcgactcggtgaagctgacgggcgggcccgagtacgcggtgcccctgggacggcgcgactcgctcgtgtccaaccgcgaggacgccgacaacctgccgggcccggacatcgcggtgcccaagctcatcgacgagttcgacaagcagggcttcaacgtcgaggagatggtcgcgatgctgggcggcggccacagcatcggcgtctgcaggtgcttcttcatcga

SEQ ID NO: 81056 - DNA, 241 bp, Zea mays
acggacgcgtccaggcagcagccccgtctgcctgcaggactacgcggccggcgagcgcgctcgggagatgccctgcacgcacacgttccactccaattgcatcgttccgtggctcgagatgcacagctcctgccctgtctgccggttccagctgccggccaccgactacaaaggctcatgcagcagcggtgacggtggttttgtcagtgtcgatgcggatggtgaaggcaatgacaacggc

SEQ ID NO: 81057 - DNA, 409 bp, Zea mays
tcgctcctgcgccgcccgtccgatcaggtcactggccggggagggctcagaaacctttcatccaatacatacatctatctgagcgctttcccgcggtgaggcccgaccggagtccacacacacacggtgtcgatggcggccgtaataaggagccgccgccgcgtgtccgttttcttctacgtcgtcctcgccgcagctgcagctgcagccgcggcgcaggcatccaataacgtcacctccgacgatgagtactgggcggagcgcgccgaggtggctcggtcgcgcaacctcgccgcctacgtcagcgacaccgtggccgccacgaaccgcttcaacgcagacgtgctgagggccacgacgcggcgggcgctggcgaagtacgatgggccgtgcatggcgactcaaccca

SEQ ID NO: 81058 - DNA, 395 bp, Zea mays
gcgggctggtttgaccgtcgttttgtacccgttgagatcccaggattcagactggtgccattcgatttgatttggcgcggggtactttcctatggccgcctccatcgcggcctcgcccttctttccagggtcgccggcgccggccgctcctaagaacggccttggagagcgcccagagagcctggacgtccgcggcgttgcggcgaagccgggagcctcgtctaatgccgtgagggcgggcaagacgcgcgcccacgctgccgtccccaaggtgaacggtggcaagtctgcggtggcggatgtggaacacgagaccgtaactgtaccttcgtcagtgccgaggactttctacaaccagcttcccgactggagcatgctccttgctgccatcacga

SEQ ID NO: 81059 - DNA, 403 bp, Zea mays
cacgaatctgccatcctctccaacacgaagatggcgttcatcagcaatgtcgcagtgaaggcggcggccgtggccgcgctgctgctggtcgcagcggtgtcgcctgccgcgcgcgcggcggcggtggcggtggcgggaggggcgccgtcggtgccggcgggtccgctggacatcgcgcagctgggcgccaagggcgacggcaagtcggacagcaccccgatgatcctcaaggcgtggaagaacgcgtgcgaggcgacgggggtacagaagatcgtcatcccgccgggcaactacctgacgggcgggctggagctgaagggcccctgcaagtcctccatcatcatccgtctcgacggcaacctgctcggcaccggcgacctcagcgcgtagcagaggaactgga

SEQ ID NO: 81060 - DNA, 393 bp, Zea mays
ggatcgtccggtccaacgtctgggagcggtactacctcggggagcagttctacatcagcgtcatctcgccggcgcggtcgctgcgcgacgagtacaacatgcccgacaacgccctccgctgcggcaaggtcgtggggctgccgctgccgccatcctacgcccccgcgcgctaaagacgacgaaggcgccgttttcacctcgtgttctgaccatccagtctaactaatccattcctgtgctgctcggcgaaataaaatcatcaaaaagaacaaagacgaaggaagcctagggaagggagaagggacgttgggtgggggtgagccaaatgagaacgcacggatatatctattgatgtaatcttgagatgccctctcaaatcactgtaatggggtt

SEQ ID NO: 81061 - DNA, 392 bp, Zea mays
cccacgcgtccgctgccatcctctccaacacgaagatggcgttcatcagcaatgtcgcagtgaaggcggcggccgtggccgcgctgctgctggtcgcagcggtgtcgcctgccgcgcgcgcggcggcggtggcggtggcgggaggggcgccgtcggtgccggcgggtccgctggacatcgcgcagctgggcgccaagggcgacggcaagtcggacagcaccccgatgatcctcaaggcgtggaagaacgcgtgcgaggcgacgggggtacagaagatcgtcatcccgccgggcaactacctgacgggcgggctggagctgaagggcccctgcaagtcctccatcatcatccgtctcgacggcaacctgctcggcaccggcgaactcagcgcg

SEQ ID NO: 81062 - DNA, 393 bp, Zea mays
gctggttcgtggatggctgcgccacgacctctcctgctgtcgctgctggtcgccgtgctagcggtggccgccgatgtcgccaacgccggccacgccaagcccctgacgcctggcgggcgtgtggtacacgacaaccacggcaagttcacggccgggccgtggaaacccgcccacgcgaacttctacggcgggcgggacgggtccggcaccacggcgggcgcgtgcgggtacaaggacacgcgcacgcaggggtacggcgtgcagacggtggcccgtgagcacggtgctgttcggtgacggcacggcctgcggcgggtgctacgaggtgcggtgcgtggacagccctagcgggtgcaagcccgacgcggcggcactggtggtgacggtgaccga

SEQ ID NO: 81063 - DNA, 419 bp, Zea mays
  unsure (1)..(419): unsure at all n locations
agcacccgccttcacgcctccctcaccaaataaggtcccgcccttttccgacattcacaggggggacaggaaatcagcggccatggcctcgattccggcgacgaccttcgccgtcatcttatccgtcctcttctgtgccgcggctggcaccgccgtcgacaacgacctccccgactacgtcatccagggccgcgtctattgcgacacctgccgcgccgggttcgtgaccaatgtcaccgagtacatcgcgggcgccaaggtgaggctggagtgcaagcacttcggcaccggcaagctcgagcgctccatcgacggggtgaccgacgggaacggcacgtacacgatcgagctcaaggacagccacgaggaggacatctgcgaggtggtcttggtggagagcccgcgcaaggacntgcgac

SEQ ID NO: 81064 - DNA, 391 bp, Zea mays
gcgaaaggcaagggacgtaagaagtcgtctaattcttggatcgaattagacgacttcttcgtccctctcttcattagcacgctaacttgtaatctgcaggatctaagcaaagacttgatttagttatggacggattggtaggcctcttgaaagttcgcgtggtccggggtatcaaccttgcctaccgcgacgcaagaggcagcgatccgtatgtcgtcctacggcttggcaagaagaaactgaagacaagcgtgaagaagagatccgtgaaccccatatggcaagaggagctaactctgaccgtcacagatcccagccaaccactgaagctggaggtgttcgacaaggacaccttcagcagagacgaccccatgggagacgcggaagtgga

SEQ ID NO: 81065 - DNA, 325 bp, Zea mays
  unsure (1)..(325): unsure at all n locations
ggctcctgtacgggagtanggacaccagtgctcctgtatattgctcgtcgtcgctcgttcttggccgcggatcggtgcagtgcatgcgtagcggaagaggtggcgcgacctggtgtcgtgagattgaagatgagcggggactccagcgcgggatcgagtaacacgatgaagaatctccatccactggtgattaccgttgtcacccgtgctcgccgcgacccaaggccagtgcctcggcgggaccctcgcgctatcggcgtccggtcncccccatgccgcgtgaggacacgtgttacctgaagagcaagttggtacctggaatctc

SEQ ID NO: 81066 - DNA, 414 bp, Zea mays
  unsure (1)..(414): unsure at all n locations
agggcgatgataaggagtcactcagctgaattacttcgggatggcgtatcactggagcaaataggtcttgatttttctccagaactcactgaaacaactgctccagattccatccggatgcttgttcaaacagttctctcagataagaaaccagaagaaattcaatcagttgtagaatcactcttgagcaaagtaattaatgaacttgagcaccgtattgcaagccagagtgaattggtgaaaganactatggataccaacggctgtaactcagttttgagaatggagtctccctgtaacaacaatgacagtaaatcattatccagagtggaccctccacaagtggagttgacttcctgcagtgatctggagaaggtgaaagaaactatggataccaatggctgtaactcagtt

SEQ ID NO: 81067 - DNA, 419 bp, Zea mays
agtcgagcacccctggttcaagaaggggtacaggccggccgtcatgctggcacagccgcacggctccagcagcctcaaggatgtccaggtcgccttcagcaacgccgaccacaaggacagcagcaccaaggtggaacagccggcggacagctccttgaagccggcgagcctgaacgcgttcgacatcatctcccactccagagggttcgacctgtcaagcctgttcgaggtggaccaagagcagaaggccagcaactcgcggttcatgacccagaaaccggcgtcggcgatagtgtcaaagctggagcagatcgctgagacagagcgcttcatggtgaagaaacaggacgggctggtgaagctgcaagggtccaaacaagggaggaaggggcagctcgcgatcgacgccgagatcttcg

SEQ ID NO: 81068 - DNA, 429 bp, Zea mays
actcgcgggctgacgcacgcgtctgcccacacgtccgcccacgcgtccgcgacaagaaagaagagtactatctcagctactggattgggaaggatagcttggtggacgatcaagtgtcggcatctcaaataatcaatacaatgtggaattcattgaaaggacggccagttctgggccgtatataccaagggaaggagccaccacaatttgttgctcttttccagcccatggttatcttgaagggtggaatcggatctggatacaagaagctcatagaagaaaaaagtgctaggggtgagacttatactactgaacgcatagctctaattcgagtatctgagacatctatctacaacaacaagactcttcaagtagaatcggtagcaacgtctttaagctcagcggagtctttcgtactgcaatctggaa

SEQ ID NO: 81069 - DNA, 406 bp, Zea mays
cacgacaagatggcatgcacaaacaatgcgatgagagccttgttcctcctggtcctcttctgcatcgtgcatggtgagaaggaagagtcaaagggcatcgatgcgaaagcgtccgggcctggtgggtccttcgacatcaccaagttgggcgcctccggcaatggcaagacagacagcacgaaggctgtgcaggaggcatgggcatcggcgtgcggcggcactgggaagcagacaatcctcatacccaagggcgacttccttgtcggacaactcaacttcacaggcccttgcaagggcgacgtgaccatccaggtggatggcaatctgctggcgaccacggacctaagccagtacaaggaccatggtaattggatcgagattctacgcgtggataacctggtcatca

SEQ ID NO: 81070 - DNA, 396 bp, Zea mays
aaagaccctaagaaatctaagtattcagatacactgcatcggttttggaagaaagagcatgattaggggtgttaaaagtttatggagctgtcagaattacatgatggctttattgttcaggattctcttaccatcaaagcccaagttcaagtcattagaagatagaccgtccatttcgttgccttgatggtcagtaccgaagggaactaattagggtgtatctatcaaatgtggaacaaatttatcggtgttttattgatgaaaaagaaggacgttcagcaggctgattgaggataaactcgggtggtccagtttcagtggattctggctagccatttttcatctttgattttatctgaacagagacttgaactcgctatcaactttcagtagacc

SEQ ID NO: 81071 - DNA, 359 bp, Zea mays
agcgcaatcgtcgactgctgctgcgttcagttccgttcggaagatgttcttggagagcttccgggtggagagcccgcgggtgaagtacggcgagggcgagatccagtcggagtaccgctacgacaccaccgaggtcgtcccgccggggaatggcggcggcgcggggtgggtggtgcgcccaaagtccgtcacctacaacttcaagaccagcaccaacgtcccaaagctgggggtgatgctcgtcggatggggcggcaacaacgggacgacgctcacggccggggtgatcgccaacagggaacggatttcgtgggagactaaagagaaagttcacaaggccaactacctcggctccctga

SEQ ID NO: 81072 - DNA, 385 bp, Zea mays
tggcgtcggtgacgactgcatctccatcggccccgggacctccaaggtgaacatcaccggcgtgacctgcggccctggccacggcatcagcatcggcagcctagggcggtacaaggacgagaaggacgtcacggacatcaacgtcaaggattgcactcttaacaagacgatgttcggcgtccgcatcaaagcgtacgaggacgccgcctccgtgctcaccgtctccaagatccactacgagaatatcaagatggatgactcagccaaccccatcttcatcgacatgaagtactgccccaacaagttgtgtactgccaacggcgcctccaaggtcaccgtcaaggatgtcaccttcaagaacatcaccggcacctcctccaccccg

SEQ ID NO: 81073 - DNA, 404 bp, Zea mays
atttttcaaggcacacagtggtcggaaatctggcagctgatcagcgcgagattctcctttctgctcataggttgctccaggcaatggttgatgttatatccagcaatggttggcttagtcttgctcttagtacaatggagctgagtcaaatggtgacacaaggcatgtgggatcgggattctgtgctgcttcaagttccacacttcacaaaagacttggctcggaggtgccaggaaaatgaagggaagcccatcgagagtatctttgatctagctgagatggctgtcgatgagatgcgggatctcttacaactatcgaactctcagctgcaagacatcattgaattcatcaagcggttccccaatgttgatatgacctatgaggtccgtgagggtgatgatata

SEQ ID NO: 81074 - DNA, 352 bp, Zea mays
aggccgaagagctggaagcaatcagggagttgtttcagttgctggacacgaacaaggatgggcatcttacaatcgaagaactcaggaagggaatgcgattgataggccacaatgtccatgacactgacgtcgatatgctcatggaagctgccgacatcgacgggaacgggaccctggactgcaaggagttcgtgacagtctccattcacctgaagaaaatccgtagcgaggatcacctgcccaaggtgttcagctacttcgacaagaacgggagcgggtacatcgagatcgaagagctgaaggaggccctctctccaagaggtgaccagaaggcgatcgaggacataatcct

SEQ ID NO: 81075 - DNA, 382 bp, Zea mays
  unsure (1)..(382): unsure at all n locations
aaaaacccttccgaggcgacgggggtacagaagatcgtcatcccgccgggcaactacctgacgggcgggctggagctgaagggcccctgcaagtcctccatcatcatccgtctcgacggcaacctgctcggcaccggcgacctcagcgcgtaccaaaggaactggatcgagatcgagaacgtcgagaacctgtccatcaacggccacngcaccatcgacgggcagggacccctggtgtggagcaggaaacagtgccagcattcttacaattgcaagatcctcccgaatagcttggtgctggatttttgtgacgaacgtccagattcgcggcatcacgctgctcaacagcaagttcttccagctcaacatcttcgagtgcaag

SEQ ID NO: 81076 - DNA, 384 bp, Zea mays
agctgcgccacgacctctcctgctgtcgctgctggtcgccgtgctagcggtggccgccgatgtcgccaacgccggccacgccaagcccctgacgcctggcgggcgtgtggtacacgacaaccacggcaagttcacggccgggccgtggaaacccgcccacgcgaccttctacggcgggcgggacgggtccggcaccacggcgggcgcgtgcgggtacaaggacacgcgcacgcaggggtacggcgtgcagacggtggccgtgagcacggtgctgttcggtgacggcacggcctgcggcgggtgctacgaagtgcggtgcgtggacagccctagcgggtgcaagcccgacgcggcggcactggtggtgacggtgaccgacctgtg

SEQ ID NO: 81077 - DNA, 394 bp, Zea mays
cgagtacttcaacgccagcgacggcgtgttcaagtacaacctcatcggggacgtgccgccctccaacacggcccccaccaagatggcacccaacgtcatcagcgccgagttccgcacgttcattgaggtggtcttcgagaaccccgagaagagcatcgacaccatccacatcgacggctacgccttcttcgccgtcggcatggggcccggcaaatggacgccagcgtcgcggagtacgtacaacctcctggacacggtgagccggcacacgattcaggtgtacccaaggtcgtggacggcggtgatgatgacgttcgacaacgcgggcatgtggagcgtccgctccaacatctgggagatgcagttactcggcgaacagctgtacgtaagcgtc

SEQ ID NO: 81078 - DNA, 441 bp, Zea mays
ggtcatggaatcccgggtcgatccaggcatcaattcgactaacacagttgaccccaacaatggaatccctcgctaataacatcatggtcttggttgtctcccttgcaccgctcgtcgccggcgggtcatgcgggcccccgaaggtgccgcccggtcacaacatcaccaccaactacaacggcaagtggctcaccgccagggccacctggtacggtcagcccaacggtgccggcgctcctgacaacggcggtgcgtgcgggatcaagaacgtgaacctgccaccctacagcggcatgacggcgtgcggcaacgtccccatcttcaaggacggcaagggctgcggctcatgctacgaggtgagatgcaaggaaaaacctgagtgctcgggcaatccagtcacggtgtacatcactgacatgaactacgagcctatcgctccct

SEQ ID NO: 81079 - DNA, 365 bp, Zea mays
ctcctccatcaccaccaccaagctcaacaacagccagctcgcgaaaataatgaagagccgcagcatggcatcatcggccgcgctcttggtgctagccctcgcgctagtggcggccaccgccccacaggtagcggaggcaaagaagaagagagcggcggagagcggcgaggcggcggaggcgaagaagatccaggacgacttctgctcgacgctgtgcgagggcaagaaggggacggacctggtcgtgtgcaaggagtcctgcgcgctctcccagcagtccaacctggtgctgtacggcaggatccagtgcaagggcaaatgcaccgagcagaagggcatcacggcgccggccatgaaggtctgcc

SEQ ID NO: 81080 - DNA, 411 bp, Zea mays
agcggacgcgtggggtgaactgacaagggccccaagcaagctgtcgtctgcattttctggtacccaggataagtgcgcagcatgccagaaaacagtgtacccgctggagaagttaactctggaaggcgagtcctaccagaagagctgcttcaagtgctcgcacggcggctgcatcctgaccacctcctcttatgccgcgctcaacggcgtcttgtactgcaagatccacttcgcgcagctgttcatggagaaggggagctagaaccacatgaacaagaagagcccgtctcaggaggttctgccggacgtggctgaccaggagcaaccgccggaaccagcgccaccgcaagatgagaaagaacaggacaactaggatcggagcgaccaacaaccacccatgcatatatatca

SEQ ID NO: 81081 - DNA, 399 bp, Zea mays
  unsure (1)..(399): unsure at all n locations
agggaaataacatgccgcggcacacgtcgccgttactttttgccttgttggcgaccctgctcagcgtcggcgacgcgttggtcgtcgacggcctgcaggtggggttctatggaaagacgtgcccggcggccgaaggcgtcatcagcgacatcgtcaacaacgaaatcgctatggaccggggcatctcccctggcctcattcgcctcttcttccacgactgcttcatcacgggttgcgacgcttccattctcctggacgagtcgcccgccggcgacgtcccagagaaggagtcgtccgccaacggcttcaccctggtcgggctcagaaccatcgacatcgccaagtccaccgtanagggcatgtgccccggcaaagtctcgtgcgcagacatcctgggct

SEQ ID NO: 81082 - DNA, 442 bp, Zea mays
cccacgcgtccgctgggccaagggccactacaccgagggcgccgagctcatcgactccgtcctcgacgtcgtgcgcaaggaggccgagaactgcgactgcctccaagggttccaagtatgccactccctgggtggcggcactggttctggcatgggcacgctgctcatctccaagatccgggaggagtacccagaccgcatgatgctgaccttctccgtgttcccgtcgcccaaggtgtccgacaccgtcgtggagccctacaacgcgacgctgtccgtgcaccagctggtggagaacgccgacgagtgcatggtccttgacaacgaggcgctctatgatatttgcttccgcaccctcaagctcaccaacccttcatttggcgacctgaaccatctgatctcggcgaacatgagcggcgtgacgtgctgcctgcggttcccg

SEQ ID NO: 81083 - DNA, 429 bp, Zea mays
agtacatcgaggctggtgccagcgagcacgcgaggaccctcggtcccaagggatccgactgccacaaggccgctgtgatcggtgacaccattggtgaccccctgaaggacacctccggcccgtccctcaacatcctcatcaagctcatggccgtggagtccctcgtgtttgcccccttctttgccacccagggtggcctgctcttcaagtacctgtaaaagggacaacaccaagcacacagcagaagtatacgatctcccgaccgaccgtggacaatatcgaataactcctgccaaatcgccagttccttttgtgtactgtgcgctagccgccgcctagctgcactgctgtatttttgtttcaggattgctgctgctgttcgcattcaatctttgggcctcccggagccgccggaggcgcgttttactg

SEQ ID NO: 81084 - DNA, 413 bp, Zea mays
agaagaggtacctaactctaccctactatagagaaaaagtcagcacattgcaagaaataataatggagacgacgacgaagctccggtggagccggcccggctccttcctcctcgtcgccgcggcgttcctggcgtccgccgccgcgtcgggcgtcaacgtcggccagttcgacgaccacttgcagaagcggaaggagctcgccgaggcgtcggcgagggaggcgtacaggcccgacccgtacaacgtcaccaacagcttcaacgccgccgtccacagagctgtcagcagcagtcggcgtgagatgcgggagaggccgaggaagcacaagaagaggggcccatgccgggcgacgaaccctatcgacaagtgctggcgctgccgcagggactgggcgacggaccggcagcgcctg

SEQ ID NO: 81085 - DNA, 405 bp, Zea mays
aaccaagccttcgggccttccaaaaggttaaccccggggttaatgttcaagggaggcaacttcacaaccggaaacggaacggggggcgagtcaatctacagcaggcacatcttctccgacgagaacttcaagcacacccacgctaaagccggtacgctgtccatggctaactacgggcccgactccaatggctcccagttcttcatcaccaccgtagacgaaaaccggttgcccaagaagctggacgggcgccacgtggtgttcggcaaggtggtgaaagggatggacgtcgtgcgcaagatcgaagccgagggccagctcaccggcgtgcccaaggccaaggtcgtcatagccaacagcggccagctgccaacgcccgccgccgccggccatcgttacctctga

SEQ ID NO: 81086 - DNA, 395 bp, Zea mays
tgcccacgcctttgggcaatgccggcaccaccatgcatggatgagaagtaggcagcaagcgggagacagatctcggcaaggctgaaaaattcaaagtgaggggaaagcaaatggccgtgcttaattattcaaaggctagtttcttgcctgttcaggtttaccactctagtttcgctgatgatgatgggatcacaaaagcttgcagctgtcctttgcttccactgaaaactcatatcaagggcccggcaccagcctctgaccctgataaagcggacattgttgatgaagccataactttctttcgagccaatgttttcttcaaaaatttcaatgtgaaaagctcagcagacaagttattgatctatctgacgttttatatcaatattgccttaaaa

SEQ ID NO: 81087 - DNA, 432 bp, Zea mays
ggtcaagggttcagggcccgtccgaccacgcatccggctgacgacaccaccgtgtggtcgacaaaataaaaaggagagagagagagatggctctgtcgtctcgccgtatggccgccgcaccattcttcgtcgtcgtccttctcgtcctcgtggcggcagagaggacgatgggcagggtggtggtggaagagacgctctgcttgtcgcagagccatgccttcaaaggcgtgtgcctcagcaacaccaactgcgacaacgtatgcaagacggagaagttcacaggcggcgagtgcaagatggacggcgtcatgcgcaagtgctactgcaagaaggtctgctagggcatgaccggcagcaagccccagccgtacggctggttgatccggttgcacaccgtttgggcacgcggtcatgttccggcttctcggcttt

SEQ ID NO: 81088 - DNA, 200 bp, Zea mays
cctccctccctcaaacaaattattaggaaaagtcccgcccttttcctccgacatccacaaagggggaagggaaaacaccttcattcaacccgccggaataattggctccgtttccggtcccggcaacaacaacggcggccttcacccaagcccaatccttcttctcccctgttgccccggttaacaacccaaacttcccc

SEQ ID NO: 81089 - DNA, 416 bp, Zea mays
agatgagaagattgccatcaccaaagctattataaatgtatcgaatggatccaagcccccactctttgctggcatcatagcacttgtgatgagcatcgcaacgatggtccgtctgacccgcagcatgatgcctgggaaggttctcggtgctgccataggtggagctaccctctcagaaggtaaatcaaaagtacaagagcgccagcggtccaagctatcagaagaggctgtggaggaagctgaagacgccgtctctgcaaagcgcctctcggagcttgaggagaaggtcattgcactcctgacaaaacccgcatcaatgcctgctgataaggaggaggttctgcaagctgctgtctcccgcgttagtgcactggaagaggagcttgcagctacaaagaagaccttgcaggagactc

SEQ ID NO: 81090 - DNA, 424 bp, Zea mays
atcagccaagagctacgcaaacgcacagcgatgcaccagcacgagataccagccaccatgcgcctgtccctcctcctcgtcatcgtggccgccctctcggcgcgcgccgcggcgcagctgccgccggcgggcggcgccctgaagccggacttctatagccagtcgtgcccgcgcgcggagcggatcattgcggaggtgatgcagacgaagcagatggcgaacccgacgacggccgcgggcctgctccgcgtcttcttccacgactgcttcgtcagcgggtgcgacgcgtcggtgctgatcgcctcaaccaatttcaaaagtccgggcaagacgccggaattaaacaattccttcccggggaagcctttcaagccgttggtccccgcaaacctggccctgaagctggagtgccccggggtggtgt

SEQ ID NO: 81091 - DNA, 409 bp, Zea mays
gtctccctcaacatatacggtcgcgcccttttccgacattcagaggggggacaggaaatcagcggctatggcctcgactccggcgacgaccttcgccgtgatcgcacccgtcctcttctgtgccgcggctggcaccgccgtcgacaaggactctccccgactacgtcgtccagggccgcgtcgattgcgacacctggtgcgccgggttcgtgaccaatgtcaccgagtacagcgcgggcgccaaggtgaggctggagtgcaagcagttcggcaccggcaatgctcaagcgctcgagcgactgggtgaccgacgggaacggcgtgtacaccatgaagctcaaagacagccacgaggaggaggtatgcgaggtggtcctggtggagagcccgcgcaaggactgcgactagg

SEQ ID NO: 81092 - DNA, 400 bp, Zea mays
  unsure (1)..(400): unsure at all n locations
agcgcagcgaagtaaacatgtctgaccgggcaaagatgtcgtggcaggcgtacgtggacgagcacctgatgtgcgagatcgagggccaccacctcgcggcggcggccatcgtcggccacgacggtgccgcctgggcgcagagcacggcgttccccgagttcaagaccgaggacatggccaacatcatgaaggacttcgacgagccagggcacctcgcgccgacaggcctgttcctcggacctaccaagtacatggtcatccaaggcgagcctggtgccgtcatccgtggcaagaagggatcaggaggcatcaccgtgaagaagacagggcaggcactcgtggttggcatctacgacgagccgatgacgcctgngcagtgcaacatggtggtggaaaggct

SEQ ID NO: 81093 - DNA, 435 bp, Zea mays
cccacgcatccgggtgaagggcagcttcgggtacctcgacccggagtacttcaggcggcagcagctcacggagaagtccgacgtctactcgtacggcgtggtgctcttcgaggtgctctgcgcacggccggcgctgaacccgagcctgccgagggagcaggtcagcctcgccgaccatgcactgagctgccagaggaaggggacgctggaggacataatcgacccggtgctgaagggcaagatagcgccggactgcctgaagaagtacgccgagacggcggagaagtgcctgtgtgaccatggagtggaccggccgtccatgggcgacgtgctgtggaacctcgagttcgcgttgcagatgcaggacaccttcgagaacggcgggaagccggacggtggaagaggcagctcgagcgacagtggcaccgtgtctat

SEQ ID NO: 81094 - DNA, 439 bp, Zea mays
cttcgcgccgctgacgtcccgtggctcccagcagtaccgagcactcaccgtccccgagctcacgcagcagatgtgggacgccaagaacatgatgtgcgccgctgaccctcgccacgggcgttacctcaccgcctcggccatgttccgcgggaagatgagcaccaaggaggtcgacgagcagatgatcaacgtgcagaacaagaactcgtcctacttcgtggagtggatccccaacaacgtgaagtccagcgtgtgtgacatcccgccgaggggcctgtccatggcgtccaccttcgtcggcaactcaacttccatccaggagatgttccggagggtgagcgagcagttcactgccatgttcaggaggaaggctttcttgcactggtacacgggcgagggcatggacgagatggagttcaccgaagccgagagcaatatg

SEQ ID NO: 81095 - DNA, 391 bp, Zea mays
  unsure (1)..(391): unsure at all n locations
gcacagccgcacggctccagcagcctcaaggatgtccaggtcgccttcagcaacgccgaccacaaggacagcagcaccaaggtggaacagccggcggacagctccttgaagccggcgagcctgaacgcgttcgacatcatctcccactccagagggttcgacctgtcaagcctgttcgaggtggaccaagagcagaaggccagcaactcgcggttcatgacccagaaaccggcgtcggcgatagtgtcaaagctggagcagatcgctgagacagagcgcttcatggtgaagaaacaggacgggctggtgaagctgcangggtccaagcaagggaggaaggggcagctcgcgatcgacgccgagatcttcgaggtgacaccggcctttcacg

SEQ ID NO: 81096 - DNA, 395 bp, Zea mays
acccacgcgtccgcccacgcgtccgagggaccccgagacccccgtgaagctcgctgaatacttcaacgtcaccgacggggtgttcagctacaaccagatgggcgacgtgccccccgccgtgaacggtcccctccatgtcatccccaatgtcatcaccgccgagttccgcaccttcatcgagatcgtcttcgagaaccccgagaagagcatagactccctccacgtcgatggctacgccttcttcggcgtcgggatgggccccgggaagtggtcgccggaggtgaggaagacgtacaacctgctggacacggtgagccggcacacgatccaggtgtacccgcggtcatggacggcaatcatgctgacgttcgacaacgccggcatgtggagcgtgc

SEQ ID NO: 81097 - DNA, 412 bp, Zea mays
cggtctggggccgaccgacgcgtccacccacgcgtccgaaccatagcatcaatcatgtctggtcgttcgtggacaataatggcgcctctcctggcgtcgatgctgctcgtcgggctcgccgtgggctccgaggaggaggaggacggcggcggcaaaaagaagccccacgtcaaccacggcaagtttaaggcggagccgtggacggacgggcacgcgacgtactacggcgggcgcgacgggttaactgacaccacggacggcggcgcgtgcggctacaagggcgagctggggaaagactacggcaccctgacggcggccgtgggcccgtcgctgtacaccaacggcaccgggtgcggcgcgtgctatgagctcaagggccccaagggcaccgtggtggtgacggccaccaacg

SEQ ID NO: 81098 - DNA, 425 bp, Zea mays
  unsure (1)..(425): unsure at all n locations
ggaaaaggagcgaagagagagagagacgcaggcccgccggcgacgatcgaggagggaggaacgccagagacccggcggcggcgacgatggctccgcgcagctcatcggcggcgacgtgcctgtgcctcgctctcgccgcggccacgctggcgctggcccacggggcgcaaggaggaggaccatcggcatcggcggcggacctggacaaggtcacggccgagaccttcctcgacatcgagatcgacggcaagcctgcaggccggatcgtgctgggactgtttggggacaccgttcctaaaacagcagagaacttccgagcactttgcacaggggagaaaggaatggccaagtccggcaagcctctatggtacaaggggtcgacgttccacaggatcatcncggggttcatgattcagggaggcgac

SEQ ID NO: 81099 - DNA, 434 bp, Zea mays
accacgcgtccgcgaataacacaggtgagcgcgacgatgggatccctcgttaataacatcatggtcgtgggcgccgtccttgcggcgctcgtcgccggcgggtcgtgcgggcccccgaaggtgccacccggccccaacatcaccaccaactacaacggcaagtggctcaccgctagggccacctggtacggtcagcccaacggtgccggcgctcctgacaacggcggtgcgtgcgggatcaagaacgtgaacctgccaccctacagcggcatgacggcgtgcggcaacgtccccatcttcaaggacggcaagggctgcggctcatgctacgaggtgagatgcaaggaaaaacctgagtgctcgggcaatccagtcacggtgtacatcactgacatgaactacgagcctatcgctccctaacacttcgacttgag

SEQ ID NO: 81100 - DNA, 408 bp, Zea mays
agaacgtcgtacgagaacctttctccctcctccacctttctccttttcttgccacggcaaaacaccttcgccggcgagagcatggcgatggcgtaccgtgtcctggaggtcaccctggtgtcggcaaatgacctcaagaaagtgtcgctcttctcccggactcgcatctacgccgtggcttccatctccggattcgacctccgcatcccttcccacagcacccaagcagaccacagcaacggctgcaacccctgctggaacgccgtggtacacttccccatcccggctgccgctgacacccgcggcctcgcactccacgtgaggctccgcgcccagcgtctatacctgggcgatcgcgacatcggcgaggtgtttgtgcccatcgacgaactcctggccggcgccgac

SEQ ID NO: 81101 - DNA, 395 bp, Zea mays
atcaatcatgtctggtcgttcgtggacaataatggcgcctctcctagcgtcgatgctgctcgtccggctcgccgcgggctccgaggaggaggaggacggcggcggcaaaaagaagccccacgtcaaccacggcaagtttaaggcggagccgtggacggacgggcacgcgacgtactacggcgggcgcgacgggttaactgacaccacggacagcggcgcgtgcggctacaaaggcgagctggggaaagactaccgcaccctgactgcggccgtgggcccgtcgctgtacaccaacggcaccgggtgccgcgcgtgctacgagctcaagggccccaagggcaccgtggtggtgacggccaccaacgatgcccccccgccggtgagcgggcagaagg

SEQ ID NO: 81102 - DNA, 388 bp, Zea mays
ccgtccatgatgcacatcgcggtcgccgggtccgtggcgctcgggagcttcacggaggccggcgccatcgtgttcctcttcaccgtcgccgagtggctggagacgctggcgtgcagcaaggccagcgccgggatgctgtccctcatgtccacggtgcccaagactgtcgtgctggccgagacggggcaggtcgtcggcatgggcgacgtcgcggtcggcaccgtcgtcgcggtcagggccggcgacgtggtccccgtggacggcgtggtcgtcggcgggcacagcgaggtcgacgagagcagcctcaccggcgagtccttccccgtgccgaagcagccgcagtcggaggtctgggccggcaccatcaacttagacggctacatctccg

SEQ ID NO: 81103 - DNA, 429 bp, Zea mays
accacgcatccgggaagacgtgcaggtgacggggtgcacgatcgccggcaccacgaacggcctgcgcatcaagtcgtacgaggactccaagtcgtcgctcaaggccagcaagttcctgtacgagggcatcaccatggacaatgtctcctaccccatcatcatcgaccagaagtactgccccaacaacatctgcgtcaagtccggcgcctccaaggtggccgtcaacgacgtcgtcttcaagaacatccacggcacctccaacacgccggaggccatcacgctcaactgcgccaacaacctgccatgccagggcgtgcagctcgtcaacgtcgacatcaagtacaatggatccggcaacaagaccatggccgtctgcaagaacgccatcggcaagtccatcggcttggcaaaagagctcgcctgcatctg

SEQ ID NO: 81104 - DNA, 422 bp, Zea mays
tcacctcccccggtctccctcgggctaggctagctacctaggttaccactctggtacaacatggctggtgatggcatggaggtatctgccagcgggggtggcggcggcaacaagcagccgcagatcagccttttggggctgttcctcgcctgcatggtcgccggcggcgtgcagtacggatgggcgctgcagctctcccttctcaccccctacgtccagacactggggattcctcatgctcttacatcagtcatgtggctctgtggacctattgctggcttacttgtacaaccctgcgtcggcctctatagtgacaaatgcacttctaagcttgggagactgaggccattcatctttacaggatgcatcatcatctgtatatccgtgatagtcatcggtttctcctcagacatcggttacgc

SEQ ID NO: 81105 - DNA, 176 bp, Zea mays
agcacgtacgagctcagaaggaaggcagaggcaaaagcagccatggcgaactcgtcgtccggccttgcggtcaacgacgagtgcaaggtgaacttccgggagctgaagtcgcggcggagcttccggttcatcgtgttcaggatcgacgacacggagatcgagatccgggtggagcg

SEQ ID NO: 81106 - DNA, 389 bp, Zea mays
gaccgacccgtccacgcgtgatggacgcccgtctccgcctcggcttcttcctcctcctcgtggccgcggcgttcgcgccgctggtctccgcgcagctctctgcagatttctacaagacgtcgtgccccgacgccgagaagatcatcttgggcgtcgtcgagaagcggttcaaggcggaccccggcaccgccgccggcctcctccgcctcgtcttccacgactgcttcgcaaacggctgcgacgcgtccatcttgatcgagcccatgtcgaaccaggcctccgagaaggaggcgggccccaacatctccgtcaagggctacgacgtgatcgaggagattaagacggagctggagaaagagtgccccaacgtggtgtcgtgcgcggacatc

SEQ ID NO: 81107 - DNA, 430 bp, Zea mays
ctccccgactacgtcatccagggccgcgtgtactgcgacacctgccgcgccgggttcgtgaccaacgtcaccgagtacatcgcgggcgccaaggtgaggctggagtgcaagcacttcggcaccggcaagctcgagcgcgccatcgacggggtcaccgacgcgaccggcacctacacgatcgagctcaaggacagccacgaggaggacatctgccaggtggtgctggtggccagcccgcgcaaggactgcgacgaggtccaggcgctcagggaccgcgccggcgtcctgctcaccaggaacgttggcatctccgacagcctgcgccccgccaacccgctaggctacttcaaggacgtgccgctccccgtctgcgccgcgctgctcaagcagctggactcggacgacgacgacgaacagtaaactataacac

SEQ ID NO: 81108 - DNA, 401 bp, Zea mays
gggcaagacgtaccgcctccgcgtgtgcaacaccgggatcaaggcgtcgctcaacttccgcatccagggccacgacatgaagctcgtggagctggagggctcacataccctgcaggacgtgtacgactcgctggacgtgcacgtcggccactgcctctccgtgctggtcgacgccgaccaggcgcccggcgactactacatggtggcctccacgcggttcatccacgacgccaagtccgcctccgccgtcatccgctacgccggctccagcggcgccccgccggcgcccaacatgaccgagccaccggccggctgggcctggtccatcaaccaggccaggtcgttccgctggaacctgacggccagcgccgcgcgccccaacccgcagggctcctaacact

SEQ ID NO: 81109 - DNA, 386 bp, Zea mays
gccaccctcgtctcaccctccctccctcacacaaataataaggaaaggtcccgcccttttcctccgacatccacaggggggaggggaaaacacgtgcattcacccggcggcaataatggcctcggttccggctccggcgacgacgaccgccgccgtaatcctatgcctatgcatcgtcctctcctgtgccgcggctgacgaccccaacctccccgactacgtcatccatggccgcgtgtactgcgacacctgccgcgccgggttcgtgaccaacgtcaccgagtacatcgcgggcgccaaggtgaggctggagtgcaagcacttcggcaccggcaagctcgagcgcgccatcgacggggtcaccgacgcgaccggcacctacacga

SEQ ID NO: 81110 - DNA, 423 bp, Zea mays
tagagatacacatctcaagataacagccacatgcgcctgtccctccctcctcgtcatcgtggccgccctctcggcgcgcgccgcggcgcagctgccgccggccggcggcgccctgaagccggacgtctatagccagtcgtgcccgcgcgcggagcggatcattgcggaggtgatgcagacgaagcagatggcgaacccgacgacggccgcgggcctgctccgcgtcttcttccacgactgcttcgtcagcgggtgcgacgcgtcagtgctgatcgcgtccacccagttccagaagtcggagcacgacgcggagatcaaccactccctccccggggacgccttcgacgccgtggtgcgcgccaagctggccctggagctggagtgccccggggtggtgtcctgcgccgacatcctcgcactggc

SEQ ID NO: 81111 - DNA, 423 bp, Zea mays
acgcttcggattcttaaaacaaccaccaggaggtacaaccaggaccacctaggaggcctctctctctctctccccagccacccccgtaccaaaaggaagggcggaaaaggataaccgcgtcaaggttcataaattgcgtcacggtcggggacggcgccttcggcaagacctgcatgctcatctcctacacctccaacaccttccccaccgactatgttccgacagtgtttgataacttcagtgccaacgttgtggttgatggtaatactgtcaacctcggcctctgggacactgcaggtcaagaggattacaacagactgagaccactgagctatcgtggagctgatgtttttcttctggctttctcactgatcagtaaggccagctatgagaatgtttcgaagaagtggataccttaactga

SEQ ID NO: 81112 - DNA, 435 bp, Zea mays
actcgtcgtcgtctcactcaccccgccttcacgcctccctcaccaaataaggtcccgcccttttccgacattcacaggggggacaggaaatcagcggccatggcctcgattccggcgacgaccttcgccgtcatcttatccgtcctcttctgtgccgcggctggcaccgccgtcgacaacgacctccccgactacgtcatccagggccgcgtctattgcgacacctgccgcgccgggttcgtgaccaatgtcaccgagtacatcgcgggcgccaaggtgaggctggagtgcaagcacttcggcaccggcaagctcgagcgctccatcgacggggtgaccgacgggaacggcacgtacacgatcgacctccaaggcaagccacaaggaggacatctgcgaggttgtcttggtggagagcccgcgcaaggactgcga

SEQ ID NO: 81113 - DNA, 407 bp, Zea mays
agccttgttcctcctggtcctcttctgcatcgtgcatggtgagaaggaagagtcaaagggcatcgatgcgaaagcgtccgggcctggtgggtccttcgacatcaccaagttgggcgcctccggcaatggcaagacagacagcacgaaggctgtgcaggaggcatgggcatcggcgtgcggcggcactgggaagcagacaatcctcatacccaagggtgacttccttgtcggacaactcaacttcacaggcccttgcaagggcgacgtgaccatccaggtggatggcaatctgctggcgaccacggacctaagccagtacaaggaccatggtaattggatcgagattctacgcgtggataacctggtcatcaccggcaagggaaaccttgacgggcacggcccaaccg

SEQ ID NO: 81114 - DNA, 384 bp, Zea mays
ggggtgaccgtctggaggtgctggtggacaagacggcaaccatgcaggggaacacggtgcgcttcaagcgccaagctcgccgcttcaggaacaccatgtggtggaggaacgtcaagctcacagctgcagtgatattcatcctcaccgtaatcgtgtacgtcctgctcgcctacatgtgtcgcggcttcaccataccgtcatgctttccgtaatctccatccgtcccggtgccagtgcggaccaccagccctagctctagctgcctcacaacttggttttccgggttctgtaacagcagcagcggtgctgcagttctctctcttgtacgagggaaacaacagctcattctcaagttctgcaacaaccagattctgattttttttt

SEQ ID NO: 81115 - DNA, 365 bp, Zea mays
cggacgcgtggggcagtcatctcctccaccaccaccaccaagctcaacaacagccagctcgcgaaaataatgaagagccgcagcatggcatcatcggccgcgctcttggtgctagccctcgcgctagtggcggccaccgccccacaggtagcggaggcaaagaagaagagagcggcggagagcggcgaggcggcggaggcgaagaagatccaggacgacttctgctcgacgctgtgcgagggcaagaaggggacggacctggtcgtgtgcaaggagtcctgcgcgctctcccagcagtccaacctggtgctgtacggcaggatccagtgcaagggcaagtgcaccgagcagaagggcatcacggc

SEQ ID NO: 81116 - DNA, 357 bp, Zea mays
cgccttcacgcctccctcaccaaataaggtcccgcccttttccgacattcacaggggggacaggaaatcagcggccatggcctcgattccggcgacgaccttcgccgtcatcttatccgtcctcttctgtgccgcggctggcaccgccgtcgacaacgacctccccgactacgtcatccagggccgcgtctattgcgacacctgccgcgccgggttcgtgaccaatgtcaccgagtacatcgcgggcgccaaggtgaggctggagtgcaagcacttcggcaccggcaagctcgagcgctccatcgacggggtgaccgacgggaacggcacgtacacgatcgagctcaaggacagcca

SEQ ID NO: 81117 - DNA, 380 bp, Zea mays
  unsure (1)..(380): unsure at all n locations
aacccctatcgcaccgcagccgccggccatggcctgcctcaccgacctcgtcaacctcaacctctcggacaacaccgagaagatcatcgcggaatacatatggatcggtggatctggcatggatctcaagagcaaagcaaggaccctctccggcccggtgaccgatcccagcaagctgcccaagtggaactacgacggctccagcacgggccaggcccccggcgaggacagcgaggtcatcctgtacccgcaggccatcttcaaggacccattcangaggggcaacaacatccttgtgatgtgcgattgctacaccccagccggcgagccaatccccaccaacaagaggtacaacgccgccaagatcttcagcagccctg

SEQ ID NO: 81118 - DNA, 400 bp, Zea mays
agagatactagccatcatgcgcctgtcgtccctcctcctcgtcgtggccgccctctcggcgcgcgccgcggcgcagcaggtgccgccggtgggcggcagcgctctgaagccggactactacagccagtcgtgcccgcgcgcggagcggatcatcgcggaggtgatgcagacgaagcagatggcgaacccgacgacggccgcgggcatgctgcgcgtcttcttccacgactgcttcgtcaccgggtgcgacgcgtcggtgctgatcgcgtccacccagttccagaagtcggagcacgacgcggagatcaaccactcgctccccggggacgccttcgacgccgtggtgcgcgccaagctggccctggagctggagtgccccggggtggtgtcctgcgccgac

SEQ ID NO: 81119 - DNA, 371 bp, Zea mays
acggacgcgtccacccacgcatccgccggcgccggatcgggccgccctgactgtgggtccgggcatggacatgccgatcatgcacgacagcgaccggtacgagctcgtgcgcgacatcggctccggcaacttcggcgttgcccgcctcatgcgcgaccgccgcaccaccgaactcgtcgccgtcaagtacatcgagcgtggcgagaagatagatgagaatgtccagcgcgaaataattaaccatagatcattgaaacaccctaacattattaggtttaaagaggttattttaacaccgacccatcttgctattgtcatggaatatgcctctggcggtgagctttttgagagaatatgtaagaacgtgcgat

SEQ ID NO: 81120 - DNA, 413 bp, Zea mays
acagcaagttcctgtacgagggcatcaccatggacaatgtctcctaccccatcatcatcgaccagaagtactgccccaacaacatctgcgtcaagtccggcgcctccaaggtggccgtcaacgacgtcgtcttcaagaacatccacggcacctccaacacgccggaggccatcacgctcaactgcgccaacaacctgccatgccagggcgtgcagctcgtcaacgtcgacatcaagtacaatggatccggcaacaagaccatggccgtctgcaagaacgccatcggcaagtccatcggcttggcaaaggagctcgcctgcatctgaaccaattgactaacatgcatatattatatatataatcactcttcgtaacctctctctttctcacgtactctcaagtctccaccgaat

SEQ ID NO: 81121 - DNA, 404 bp, Zea mays
atgtccatctacggtgcttctgctcgccggcccaaaatcgcctcatcgaccacgcccccttccaggctcccgtctccatgggtctcctctcaaacaggattgggagggagagcctcaaggcgggggatcatatctactcctggagggcggcgtgggtctacgcgcatcacggaatatatgtgggcgatgataaggtgatccatttcacaagaggaagaggacaggaggtcggaacaggaactgtcgtcgatattattcttgtgagttccaccccaaaacgaagcaacacgccttgcccggtgtgcaccgacgaaaccagcgacagcagcacagagacgaacggcgtggtatcctcctgtctcagctgcttcctacctgggggtgctctctaccgtgtcgagtac

SEQ ID NO: 81122 - DNA, 361 bp, Zea mays
aaggcgcagtacgcggtgcgcggggagctgtacctccgcgcctccgagctccagaaggagggcaagaagattatcttcaccaacgtcgggcaaccgcacgccctcggccagaagccgctcaccttcccgcgccaggtggtggcgctgtgccaggctccgttcctcctcgatgaccccaatgtcggcctcatgttcccgcccgatgccatcgtgcgggccaagcgctatctcgccatggcgccgggaggtctaagtgcgtacagtgatgcccgtggtatccccggaatcaggaaggaagttgctgacttcatccacaagcgtgatggatatccgagtgatccagaactcatttacctcacag

SEQ ID NO: 81123 - DNA, 382 bp, Zea mays
aggggaatatccctttgctgtagctggtgtaaatattacattcatgctgattcagatgcttgaccttcaagcagctaagccaacgtcgttggttggagcggttttcctaaatctactcttagaaaatgatcgagcgttcgacattctttactgcataaccttcaaactgatggatcagaaatggcttgaaatgcacgccagttacatggatttcaatacggttattaaatcaacacggcgccagctcgagagggagctgttgctagaagatatccagagaatcgaggacatgccatcgtacaggtttctcgcctgctagcaattgaacctcctggtcgtaccgaacattgccacaagatagtgcagctccatacactcgaag

SEQ ID NO: 81124 - DNA, 377 bp, Zea mays
acgagatcgtcttcgagaaccccgagaagagcatagactccctccacctcgacggctacgccttcttcggcgtcgggatggggcctgggacgtggtcgccggagatgaggaagacgtacaacctactggacacggtgagccggcacacgatccaggtgtacccgcggtcatggacggcgatcatgctgacattcgacaacgcgggcatgtggagcgtccggtccaacgtctgggagcggtactacctcggggagcagttctacatcagcgtcatctcgccggcgcggtcgctgcgcgacgagtacaacatgcccgacaacgccctccgctgcggcaaggtcgtggggctgccgctgccgccatcctacgcccccgcg

SEQ ID NO: 81125 - DNA, 409 bp, Zea mays
  unsure (1)..(409): unsure at all n locations
agcaccccggcgaatattcgaccacggaagccgcataacctccgtccatcccatccccgctcgcctctccagtctcctctcctcgccccgctctagacgatcgatggccgcgacggcggcggaggagatggagaggatggtggaggcggagtgggaggaggggatgagggangggaagcggtacgggctggtggagtaccgggcgctgccggcttacctgcgggacaacgagtacatccaccgccactaccgctgcgagtggccgctcccgcaggttctgctctccgccttctccatccacaacgagaccctcaacgtctggacgcatcttataggatttttcatctttctcgctctgaccatatacacagcagcacaagttccaaatgcagtagatatcgggagcttg

SEQ ID NO: 81126 - DNA, 411 bp, Zea mays
acccacacgtcaacagcctttgtttcctgttgaaagtggtgttgaccaactggtggaaataataaagattttgggtactccaacaagagaggagatcaggtgcatgaatccaagtggttccgaattcaagttccctcagataaaagcccatccatggcacaagctttttggtaagcgcatgccacccgaggctgtcgatctcgtgtcaaggctgctccagtactcaccgaacctgcgctgcactgctgtcgacgcctgtgcccatccgttcttcgatgagctgcgggaccccaaggcttgcctgccgaacggacggccaatgccaccgttgttcgacttcacagcagccgaactcgaaaggctccccgccgagcttgttcaccggatcgttcctgaacacatgaggaagga

SEQ ID NO: 81127 - DNA, 391 bp, Zea mays
agccgagaacgatgcggcgcggcacggaacgccgccggccaagaaggaggccgtggaggcaatgccgaccgtggaaatcgccggcggcaacgatggcgacgacgcggccagctgcccggtctgcctggaggactacgcggccggcgagcgcgcccgcgagatgccctgcaggcacaggttccacggcaattgcatcgtgccgtggctcgagatgcacagctcctgccctgtctgccggttccagctgccggccaccgacgacaagagctcatgcagcggcggcgacggtggtttcgtcagtgtcgatgcggatcgtgaaggcagtgacaacggcgggggtgatggtagggcaagctctccgggcaacgccgagctagctgaagctgaagag

SEQ ID NO: 81128 - DNA, 406 bp, Zea mays
ccgggccgacccaagcgtccggcgttcatcagcaatgtcgcagtgaaggcggcggccgtggccgcgctgctgctggtcgcagcggtgtcgcctgccgcgcgcgcggcggcggtggcggtggcgggaggggcgccgtcggtgccggcgggtccgctggacatcgcgcagctgggcgccaagggcgacggcaagtcggacagcaccccgatgatcctcaaggcgtggaagaacgcgtgcgaggcgacgggggtacagaagatcgtcatcccgccgggcaactacctgacgggcgggctggagctgaagggcccctgcaagtcctccatcatcatccgtctcgacggcaacctgctcggcaccggcgacctcagcgcgtaccaaaggaactggatcgagatcgagaacg

SEQ ID NO: 81129 - DNA, 387 bp, Zea mays
acccacgcgtccgggatcctaataaaatctacttgatgggccaatcagcaggagcacatatcgcggcctgcgctctcttagagcaagcaattaaggaatctaagggagagaatacctattggaatgtggctcaaataaaagcatattttggtttatctggaggatacaatatccaaaatttggtcgatcactttcatgagcgtggtctttatcgttcaatatttctcagcataatggagggagaggaatcactgccacattactcacctgaaattgtcgccaaaaaattaagtgcagaaaccatatctctactacctcagattgtactattgcatggaacagcagattactccataccatcatctgccagcgaaacttttgctgatg

SEQ ID NO: 81130 - DNA, 388 bp, Zea mays
aacccacgcgtccgatgatacagagggtggaagtgtatgatgctatctcacatttgaagacattgcaaaagaagaagctaaagccttccaaaggaaaaaatgatggtcaaggggagcagacttatgttattgtggaggcatccaagttcaagagggttggcaggaagactaccttgcggcaggatttggccaatgctctagatataagggccttcgagaggatgacgaagctaggccactgcgatgtggagcttcttagaaaagagatgaatgagactgatgtccccgtatcttactcaggcactggcatccctgagaagtcaatacgcaaagcagctcttgaggttattctccgcaggctcctctcttttctcaagccagacacctt

SEQ ID NO: 81131 - DNA, 409 bp, Zea mays
agtactcgcagatgctgctggagcacggcgacctcatcctgtcgggcgccacgtccgtgttcggcgccgcgcccgtggaggtctccgtgaaggtggccggcatccactggcactacggcagccggtcccacgcaccggagctcaccgcgggctactacaacacgcggcgccacgacgggtacctcaccatcgcgcgcctcctggcgcgccacggcgccgtgctcaacttcacctgcgtggagatgcgggaccacgagcagccgcaggaggcgcggtgcatgccggaggcgctggtccggcaggtgggcgccgcggcgcgcgccgccggggtgggcctcgcgggcgagaacgcgctgccgcggtacgacggcacggcgcacgaccaggtggtcaccacggccgccgagcg

SEQ ID NO: 81132 - DNA, 409 bp, Zea mays
acgaggcctccaccgtgatctggaagcgcaagatgcagaccaaggactccaagtcctcgtggagctccatcgtcagcttcgagaagcgcgagcagttcgaggagcgcgccgagaccatcctccacctgctcaagctccagttccccggcacgccgcagtcgcagctcgacatctccaagatacagtacaacagggacgtcgggtacgccctcctggagagctactcgcgcgtgctcgagagcctggcgtacagcgtcatgtcccgcatcgaggacgtgctgagcgcggacgcggcggcgcagaacctgacggcgagcgaggcggcgcggcgagcgctggagtcgacgtcgggggagctgcccgcgggcgcggaagcttgacgccaaggaggagctggagaagctgaacg

SEQ ID NO: 81133 - DNA, 404 bp, Zea mays
acgccaggatgctggcggaggcgagcatggcgaccaagtgccccgaggggaaagtgccgctcatctccatcaacgccctgcaccagctgcacatcttcatcttcgtcctcgccgtcttccacgtctcctacagcgcaatcaccatggcgctcggcagggccaagatacgtgcatggaaagagtgggagaaagaagctgcaggacaagactacgagttctcacatgacccgacgcggttcaggttcacccacgagacttccttcgtgaggcagcatatgaatgtgctgaacaagttcccagcatcattctacatcagcaacttcttccggcagttcttcaggtccgtgaggcaggcagactactgcgcgctgcgccacagctttgtcaacgtccatctggcccct

SEQ ID NO: 81134 - DNA, 407 bp, Zea mays
gttcgatctcacgagccgctgcacgcttaataacattgtagattggtacgacagggcgaggaaatggaataagacggctattccaatcctaatcgggacaaagttcgatgactttgcccagcttcctcttgaaatgcaatggaccattgttaaccaggccagagcatacgcaagagcgatgaaggcgaccctcttcttctcgagcgcgacgcacaacatcaacgtgaacaagatcttcaagttcatcacggccaagttcttcgacctgccgtggacggtggagcgcaacctcaccatcggcgagcccatcatagacttctgacgacctcctcctctagctaagtaattatgcagcacacacgacgacccttgtcggtatgatgggttgacagggtcgtcgcctcctc

SEQ ID NO: 81135 - DNA, 330 bp, Zea mays
aaggctgcctaggccgctacaaggatgagaaggacgtgagcgacgtgacggtgtgggattgcgtgcttaggaacaccaccaacggcgtgcgcatcaagtcgtaggaggaggccgagtctgtgctcacggcgtcccatctcaccttcgagaacatcaggatggaggaggtggccaaccccatcatcatcgaccagtacttctgcccccagaaggtctgccccggcaagcgaagcaactcctcgcatgtctccatcaagaacgtcaccttccgcaacatctccggcacgtcgtccacgcccgaagccgtcagcctgctctgctccgagacgc

SEQ ID NO: 81136 - DNA, 372 bp, Zea mays
agagaactgctccacctcaaatgattgcacccatgaatgtgcactcctttttctatcgaagagattactgaaagggaaatgtgcccttgggccatttctaagtattttgggattgagtgccaacacaagtgcttaaatgtgaatttatgctcatggatggataaagtgcaaatcaatagtaaaggtatgtttctaagccttagtacattggttttgtgtactaatatacttgtctaagtgttagaaacagaaagaagaagaaaagaaaagaggtgaaaaagacttggctgtgtacagctaaaactcagctcagtctggcacaccggactgtccggtggtgcaccggacagtgtccggtgcgccaggctgact

SEQ ID NO: 81137 - DNA, 397 bp, Zea mays
  unsure (1)..(397): unsure at all n locations
actggtacaccaaggaccacgaggtgctagcccgccagatcgacgccggcaagggcgtgggccgccccgcgggcgtgctcatcaacggcaagggcggcaaggacctggaggccgcgcctgccttcaccttcgaggccggcaagacgtaccgcctccgcgtctgcaacaccgggatcaaggcgtcgctcaacttccgcatccagggccactacatgaagctggtcgagctgganggctcccacaccctgcagaacacgtacgactcgctcgacgtccacgtcggccactgcctctccgtgctcgtcggcgccgaccagaagcccggcgactactacatggtggcctccacgcggttcatccacgacgccaagtccgcgtccgccgtcatccgctacgc

SEQ ID NO: 81138 - DNA, 401 bp, Zea mays
agttcaacagcagtgcggcgatgaaggcagccgtggccgctctgctggtgttcgccgcggtgtcgcctgccgcgcgcgcggtggcggcggaggcggaggcgaaggcgaagggggtgggaggcgcgccgtcggtgcccgctggcgcgctggacatcgcgcagctgggcgccaagggcgacggcaagtcggacagcaccccgatggtgctcaaggcgtggaagcacgcgtgcgaggcgacggggcagcagaagatcgtcatccccaagggcaactacctgacgggcgcgctggacctggtgggcccctgcaagtcctccatcatcatccgcctcgacggcaacctgctcggcaccggcgacctcaacgcgtacaagaggaactggatcgagatccagaacgtc

SEQ ID NO: 81139 - DNA, 405 bp, Zea mays
acctcaacttcacaggcccttgcaagggcgacgtgaccatccaggtggatggcaatctgctggcgaccacggacctaagccagtacaaggaccatggtaattggatcgagattctacgcgtggataacctggtcatcaccggcaagggaaaccttgacgggcagggcccagccgtgtggagcaagaactcctgcaccaagaagtacgactgcaagatccttcccaactcgctggtgatggacttcgtgaacaacggggaggtgtccggggtcacgctgctcaactccaagttcttccacatgaacatgtaccggtgcaaggacatgctgatcaaggacgtgaccgtgacggcgcccggggacagccccaacaccgatggcatccacatgggcgactcatccggga

SEQ ID NO: 81140 - DNA, 386 bp, Zea mays
accctccccctcttatctctttctcttctcccattccttccttccactcccccgcccagcgccaccatggcctcctccgtcgcggtgtccctccgcgccctcgctgccgccccgctccccaagtccagccccgccacttcctgccccttcttcgtgctccttgcgccggcgctgccccgacgcctgctccgcctccgctccgcacgccgcctgccgctcgccccgctcgccgcctccgattccgccttcgagtcctccgtcggagttaactacgcggagcccgacgactcggagaaggataaggaggtggagttgttcggatcgggtgacgacgagggggcgggtgagttggtggatgaccattccgtagacgtctcagccgctgt

SEQ ID NO: 81141 - DNA, 376 bp, Zea mays
ggcaaaggctctcctaggtggcctatcggcgatcctcgtcgtggcggtggtcgtcggtgtggtcgccaccgtcacccgctccggcaagaaggccggcgacggggtcacggtcccgggggaggcttcacttgccacgtccggcaagtcggtcaagtccctgtgcgcgcccaccctatacaaggagtcgtgcgagaagacactgtcccaggccaccaatggcaccgagaaccccaaggatgtgttccacagcgtggccaacgtggcgctggagtcggtccagacggcggtcgagcagtccaagtcgatcggcgaggccaaggccagcgactccatgaccgagagcgcgcccgaggactgcaagaagctcctggaagac

SEQ ID NO: 81142 - DNA, 380 bp, Zea mays
agacgacgagtcgatcatggatagaagaggctgtcgtcctataatgcatctccatgagcgtactcttggtgttcttgcctgccgttatgttgatgaagtcagggttggtgcaccatgggaagtttcaaaggacatgatcactacgtttaacatttcattggttgtccatgggactgtagctgagggcaattcagctggtgaaattgatccttatgctgttccaaagagcatggggattttccagacaatcaggagcccaaaatctataacaacattgtcagtggcgacaagaatagttgacaatcatgaagcttacaagaagaggaacctgaaaaagaaggctagcgaagaccggtactacacacaaaagaaattccttt

SEQ ID NO: 81143 - DNA, 397 bp, Zea mays
  unsure (1)..(397): unsure at all n locations
agcgtcatcccgcacgaatccgcgctccggccaacgggccaagccctagccacccccgcccattcatggtgggcgggccgtgagatctctanggaggcttgtcggcttcgtcgggcgggaggggaggagatgggcgcccggaacagcgctgccgccacgccggtgctgctcaacgtgtacgaccttacggccgcgaacgattacctctactggctcggcttcggcgtcttccactccggaatcgaagtccatggcacggaatatgggtttggagcccacgactacccatccagtggtgtgtttgaggtggaatcaaagagttgccctggctttatctacagaagaacagtgtggctaggcacaacagacatgtctcaagaagaattccgctcgttta

SEQ ID NO: 81144 - DNA, 410 bp, Zea mays
actcctctgtccctctacggtgcttctgctcgccggcccaaaatcgcctcatcgaccacgcccccttccaggctcccgtctccatgggtctcctctcaaacaggattgggagggagagcctcaaggcgggggatcatatctactcctggagggcggcgtgggtctacgcgcatcacggaatatatgtgggcgatgataaggtgatccatttcacaagaggaagaggacaggaggtcggaacaggaactgtcgtcgatattattcttgtgagttccaccccaaaacgaagcaacacgccttgcccggtgtgcaccgacgaaaccagcgacagcagcacagagacgaacggcgtggtatcctcctgtctcagctgcttcctagctgggggtgctctctaccgttccgagtac

SEQ ID NO: 81145 - DNA, 405 bp, Zea mays
acggacgcgtggggtgagccggcacacgatccaggtgtacccgcggtcatggacggcgatcatgctgacattcgacaacgcgggcatgtggagcgtccggtccaacgtctgggagcggtactacctcggggagcagttctacatcagcgtcatctcgccggcgcggtcgctgcgcgacgagtacaacatgcccgacaacgccctccgctgcggcaaggtcgtggggctgccgctgccgccatcctacgcccccgcgcgctaaagacgacgaaggcgccgttttcacctcgtgttctgaccatccagtctaactaatccattcctgtgctgctcggcgaaataaaatcatcaaaaagaacaaagacgaaagaagcctatggaaaggaaaaaggaactttggttggg

SEQ ID NO: 81146 - DNA, 423 bp, Zea mays
gggccgagcacgcgtccagaatcagccatcctctccaacacgaagatggcgttcatcagcaatgtcgcagtgaaggcggcggccgtggccgcgctgctgctggtcgcagcggtgtcgcctgccgcgcgcgcggcggcggtggcggtggcaggaggggcgccgtcggtgccggcgggtccgctggacatcgcgcagctgggcgccaagggcgacggcaagtcggacagcaccccgatgatcctcaaggcgtggaagaacgcgtgcgaggcgacgggggtacagaagatcgtcatcccgccgggcaactacctgacgggcgggctggagctgaagggcccctgcaagtcctccatcatcatccgtctcgacggcaacctgctcggcaccggcgacctcagcgcgtaccagaggaactggatcgag

SEQ ID NO: 81147 - DNA, 410 bp, Zea mays
actcgactccgcccagtttttccaccaggcgctgtacctggggggcgtcaccgccgcccccgctcggcccacgctccgcctcatgaagcagaacctcgcgttcctctcgagcggggtcaccgagcaggcccagctgccggccgtgctcgaggtgatgagggcctccgtggaggccttcctgacggtcgtcctcgctggcggcagcgggcgggccttcgcccgcggggaccacgccgccgtggccgcggacttcgcgagcttgaagcgcctgttctgcagtttcggggtcggggaggaggcggtcgagagggagacggtgcgggcggaaggggtgctggcgctcatggccgttccgacggaacagctcatccatgagttgctcggccactatgcttccactccgatgagag

SEQ ID NO: 81148 - DNA, 391 bp, Zea mays
acccacgcgtccggtgcaccaccccgctcaccttccaggttggcaagggatccaagcctggccacctgatcctcacccccaatgttgcaaccatatctgacgtggagatgaaagagcacgggggcgatgacttctcctttacgctcaaggagggcccgaccggcacctggacgctcgacaccaaggccccgctcaagtaccccctttgcatccgctttgctgtcaagtccggtggctaccgcatcgccgacgacgtcatccccgccgatttcaaggccggcatcacctacaagaccacactcagcatctaatcagcctctgatgatgaattatatttcaaaagagctcacctggcgctcacgttagcaagacaatattttttctatggtta

SEQ ID NO: 81149 - DNA, 404 bp, Zea mays
aatctgcccccagaaggtctgccccggcaagcgaagcaactcctcgcatgtctccatcaagaacgtcaccttccgcaacatctccggcacgtcgtccacgcccggggccgtcagcctgctctgctccgagacgcagccgtgcagcggcgtctcgctcatcgatgtcaacgtcgagtacgccggcaagaacaacaagaccatggctgtgtgcagcaacgccaagggaaccgccaagggaagcctccaggccctggattgcctcgtctgatcgatgaccttgcatttgcatgcattcttcttccgtttcacttttccatattctattgcgttccagccaagcatcttgtttcttttatatatatatatatatatatatatgcatggaaataaatttatgggggggg

SEQ ID NO: 81150 - DNA, 359 bp, Zea mays
aaagactgacagcgacgatgatgccacagctgcgtagcctcgtcgcgctggtcctcgtggccacggccatagccgccgctcccggcgttgggtttgtcgtcaggggccgcatctactgcgacaactgccgcgccgggttcgagacaaacgtgtcccacgccatccaaggcgcgacggtggagatggagtgccgccacttcgagtcgcagcaggtccacgacaaggcggaggcgacgacgggccccggcggctggtacaggatggagatcagcggcgaccaccaggacgagatctgcgacgtgcgcctgctcaagagccccgaggcggactgcgccgagatcgaccactcccgcgaccgc

SEQ ID NO: 81151 - DNA, 415 bp, Zea mays
caagcctctggctgtctccctcgcatttggtgataaactcttgaagcagtatgttgtcgctgaccctgaaatcaaggatgaggtggtcgacagctcccttgaattcctcatcgtggcgagtgatggactctgggatgttgtcactaatgaggaagctgttgccatggtcaagcctattcaggacccccaggaagcagcaaacaagcttctcgaagaagcgtcccgaaggggaagctctgataacatcaccgttgtcatcgtccgcttcctatatggaactaccggtgataaatcaggcgcagacaaagagaccaccaatgaccaaaactcctaattgcctcctgtagggatccatcatgcgtgtgttttcttctggctgttgtatctgatgctcaaagtagatgctccgtgtgtc

SEQ ID NO: 81152 - DNA, 176 bp, Zea mays
  unsure (1)..(176): unsure at all n locations
agaacgtacccgttcaatgtaatgatctgtacagggaaattactcaaagtcgtgtcattaagctagattacaagcagagcgaaagcaagtgtgctcttttttagggtcggggtaattancccccgggttctcatgctcgggtttggtttactggtttgactgttgcgtaacatttc

SEQ ID NO: 81153 - DNA, 361 bp, Zea mays
acccacgcgtccgattcctgccaagataaaggtaatggagtcgtcacgcaggttccagccggccgtcatcctgcttctcctgctcattgtgtccaccgatatggcacaggcaagggaatgcgagaagtacagtgagcgatttgttggggcatgcatgatcgcagacaactgcgccaatgtgtgccgcggtgagggcttcttggccggcaggtgcagcaccttccgccgccgctgcatctgcactaggcagtgctaaacaagatcgctcgatcgttcgccatgcatcgacaacctattcttaataacgttcattatctcgttcttatttatgacgaatgtcatgtatgttctggtgactgtc

SEQ ID NO: 81154 - DNA, 354 bp, Zea mays
  unsure (1)..(354): unsure at all n locations
acgcgcatgccgcagcatataggcatagccacgcccacgggcacgggccatgtgatgactgtcacgatgggcatgatgaggagccgtcccaagctcgtcatgttgtcgggtcggagattcttgancttgggattgtatcgcactcagtgatcatccggctatctttgggcgtctcacagaatccttgcaccatcaaacctctaagtgctgctctctccttccaccagttttttgagggctttgcatttggcggctgcatttccgaggctcagttcaagagtttctctgcactccttatggctttcttcttcgctatcaaaagacctgctgggattaccgtggggtctggtatcg

SEQ ID NO: 81155 - DNA, 406 bp, Zea mays
agccagatcaacatcacccgcaccatcaagctcgccatgggccgcggcaaggtggacggcaaggagcggttcggcttcaacggcgtgtcgcacgtcgaccccgagacccgcgtcgggctcgccgagtacttcaacaccaccgacggggtgttccagtacgacatcatcggcgacgtgccgccctccaagtccgcgcccaccaagatggcccccaacgtcatccgcgccgagttccgcaccttcatcgaggtggtcttcgagaaccccgagaagagcatcgacaccatccacatcgacggctacgccttcttcgccgtcggcatgggcccgggcaaatggacgccagcgtcccggagcacgtacaacctcctggacacggtgagccggcacacgatccaggtgtacc

SEQ ID NO: 81156 - DNA, 391 bp, Zea mays
atcaaaccatagcatcaatcatgtctggtcgttcgtggacaataatggcgcctctcctggcgtcgatgctgctcgtcgggctcgccgtgggctccgaggaggaggaggacggcggcggcaaaaagaagccccacgtcaaccacggcaagtttaaggcggagccgtggacggacgggcacgcgacgtactacggcgggcgcgacgggttaactgacaccacggacggcggcgcgtgcggctacaagggcgagctggggaaagactacggcaccctgacggcggccgtgggcccgtcgctgtacaccaacggcaccgggtgcggcgcgtgctatgagctcaagggccccaagggcaccgtggtggtgacggccaccaacgaggccccgccgcc

SEQ ID NO: 81157 - DNA, 387 bp, Zea mays
acaaaactcaaatctgagtcgtacaacaatcatgtctggtcgttcctcgacaataatggcgcctctcctggcgtcgatgctgctcgtctggctcgccgtgggctccgaagagggggaggactgcggcggcaaatagaaaccccaagtcaggcactgcaagtttaaggcggagccgtggatggacgggcacgctacgtactacggcgggcgcgacgggttaactgacaccacggactgcggcacgtgcggctacaagggcgagctggggaaagactacggcaccctgacagcggccgtgggcccgtcgctgtacaccaacggcaccgggtgccgcgcgtgctatgagctcaagggccccaacggcaccgttgttgtgacggccaccaa

SEQ ID NO: 81158 - DNA, 328 bp, Zea mays
aatcccttgtcgatgttccacacacatgcaggggaactgacgaatggcggcgcgctggacccggcgggcctggtggcgatcgcgatcgcgcacgcgctggcgcggttggtgggcgtgtccgtcgcggcgaacatctcgggcggccacctgaacccggccgtgacgttcgggctggccgtgggcggccacatcaccatcctgacgggcgtcttctactgggtggcccagctgctgggcgccaccgtggcgtgcctgctcctcgggttcgtcacccacggcaagcccatcccgacgcacgccgtcgcgggcatcagcgagctggagggcg

SEQ ID NO: 81159 - DNA, 428 bp, Zea mays
cggacacgtgggccagccgcggcctgctcacctcggacaacgccctcatcgaggacccgcagacgagggcgatggtggagaacttcgcccggaacgagccactgtggcagcagaagttttcccaggcgatgcagaaggtcgggatgcttgacgtgctaatcggcgagggcaagggccaggtaaggaagcagtgccgcctggtgaacgggcaggagaaggagcagaagcagcagcagccaccggaggagcaggaggagcagcagccaccggagctggaggaggaggagcagcaacagccgcatcagccacagcttccatggttcctgcagaggcagcgcccgcccgttcttcttccatggctccggccccatccacggccgcgtcgaccgttccggaaacatccggtggccgacctggttaacggattt

SEQ ID NO: 81160 - DNA, 400 bp, Zea mays
ctctagaatgggtcgtacaatatgttggtacagaacgttgatcccagaacagacagttttttgacttgggaaagcctggagtcagtgcgtataaacaaagttggcttgaaaggtcctatggctacacctattggcaagggtcatcgatctttgaatcttacattaaggaaagaacttgggctctatgccaatgtcaggccttgcaacagcctcccaggctacatgaccagatacgatgatgttaaccttgtgacaattcgtgaaaatactgaacgagaatatattggtcttgagcatcacgttgtgacacgtgttgtagaaagtttgaaaattactacccgccaagcaagtttgacagtggcataatatgcttttcattatgccaaggccaatggccggg

SEQ ID NO: 81161 - DNA, 399 bp, Zea mays
  unsure (1)..(399): unsure at all n locations
ctcgcgggtcgatacaagcctctacagtgagtcgtagtacccatcctctgcatcaataactgtggcttcttcggcagcgcggcgaccatgaacatgtgctccaagtgccacaaggagatgataacgaagcaggatcaggccaagctggctgcctcctctatcgacagcatcgtgaacggcagcgacgccgtcatggagccggttgttgctggcagcaacacggtagtagctgttgcccaagttgagttgcaaacaatgaacgtgcagcagcccgctgatgttgccggacccagcgagggggtggcggcgatctccaaaggggggaaggtanggccgaaccggtgcagcgcctgcaggaagagggttggacttacgggattcaactgccggtgtgggaac

SEQ ID NO: 81162 - DNA, 370 bp, Zea mays
accatccaggtggatggcaatctgctggcgaccacggacctaagccagtacaaggaccatggtaattggatcgagattctacgtgtggataacctgttcagcaccggcaagggaaaccttgacgggcagggcccagccgtgtggagcaagaactcctgcaccaataagtacgactgcaagatccttcccaactcgctggtgatggacttcgtgaacaacggggatgtgtccggggtcacgctgctcaactccaagttcttccacatgaacatgtaccggtgcaaggacatgctgatcaaggacgtgaccgtgacggcgcccggggacagccccaacacggatggcatccacatgggcgactcatccggga

SEQ ID NO: 81163 - DNA, 312 bp, Zea mays
acggttcaaggctgaccccggcaccgccgccggcctcctccgcctcgtcttccacgactgcttcgcaaacggctgcgacgcgtccatcttgatcgacccggtgtcgaagcaggcctccgagaaggaggcgggccccaacatctccgtcaagggctacgacgtgatcgaggagatcaagacggagctggagagggagtgccccagcgtggtgtcgtgcgcggacatcatctcggtgagcgcccgcgactcggtgaagctgtcgggagggcccgaatacgcggtgctccttgggcggcgcgactcgctcgtgtc

SEQ ID NO: 81164 - DNA, 388 bp, Zea mays
gtcgatgcaagcctctacagtgactcgtattatgttcggcgtccgcatcaatgcgtacgaggacgccgcctccgtgctcatcgtctccaagatccactacgagaatatcaagatggaggactcagccaaccccatcttcatcgacatgaagtactgccccaacaagttgtgtactgccaacggcgcctccaaggtcatcgtcaaggacgtcaccttcaagaacatcaccggcacctcctccaccccggaggccgttagcctgctctgcactgccaaggtcgcatgcaccggagtcaccatggatgacgtcaacgtcgagtatagcggcaccaacaacaagaccatggctatatgcacgaacgccaagggcagcaccaagggttgcctc

SEQ ID NO: 81165 - DNA, 446 bp, Zea mays
actcgtgggtcgatacaagactctacactgattcatcataaatcgccgagagcgatcgagagataaataaagatgaagaaagtggcatcatcgtcagccgttctcttcgtgctagccctgacgctagtttgtgccccgctgatagcagaggcaaagaagaagagagtcgccgccgccgccgccgaggagaagaaggtgcaggacaacttctgctcgacgctgtgcgagggcaggaaggggatggacctggtggtgtgcaaggagtcctgcgacctctcacagcgctccaacctggtgctgtacggccggatccagtgcaagggcaagtgcaccgagcagaagggcatcaccgcgccgcagatgaaggtgtgccaagaggcgtgcgacaaggactacgtggtcaaggcgggctgaggtcacaaggcctgcaacaacaactgcgccaa

SEQ ID NO: 81166 - DNA, 399 bp, Zea mays
  unsure (1)..(399): unsure at all n locations
gtcgatggacgactctacagtgactcctcacatgtttcctctcgtgcgttctccgcaggagcgaggagggctcgcggcagcggcagggtctccggtgtttttgttccagaatctgtagcaaatggctgacggcgaggacatccagccccttgtttgtgacaatggaactggcatggtcaaggctggttttgctggtgacgatgcgccaagggctgttttcccaagcattgttggacgcccacgtcacactggcgtgatggttggcatggggcagaaggatgcgtatgttggcgatgaggctcagtccaagaggggtatcctgactttgaagtacccgatcgaacatggcattgtcaacaactgggatgatatggagaagatctggcancacaccttcta

SEQ ID NO: 81167 - DNA, 389 bp, Zea mays
aaacatcacatggacgtccagtaccacacgacccatgggttcgccatggttgagaccacgcagggtgcgctggaggctgaaatgaatgagatctttgtcccctacagaggattcttcaaccggaatggggtggaagtatccgaggtagtattggaagaggcagacgtgtccaaagccattctaggttacatcactgcaaacaagatccagagcattgcgctcggcggagccagcagaaatgcgttcaccaagaaattcaagaacgcggacgtgccgtcgaccctgatgaagtgcgctccagactactgcaacatctacgtcgtggccaagggcaagtccgtcaatgtcaggctcgccaagtgcggcgtcccgccgatgcacactggcgc

SEQ ID NO: 81168 - DNA, 427 bp, Zea mays
  unsure (1)..(427): unsure at all n locations
ggcggcgggcgtggccgcgctgcttgtggtcgcagtggtgtcgcctgccgcgcgcgcggcggcggtggcggtggcgggaggggcgccgtcggttccggcgggtccgctggacatcgcgcagctgggcgccaagggcgacggcaagtcggacagcaccccgatgatcctcaaggcgtggaagaacgcgtgcgaggcgacgggggtacagaagatcgtcatcccgccgggcaactacctgacgggcgggctggagctgaagggcccctgcaagtcctccatcatcatccgtctcgacggcaacctgctcggcaccggcgacctcagcgcgtaccaaaggaactggatcgagatcgagaacgtcgagaacctgtccatcaacggccacggcaacatctcacggcaagggagccctgntgtggaccaagaa

SEQ ID NO: 81169 - DNA, 393 bp, Zea mays
ctcacgggtcgatgcacgcctctaggatgagtcataataatgcatctcccctgcctcatgcccatcaaatcgttaaacttgttagatcggtacgcatacagaagccagactgatgggaatggcagcgaaggagcactttgtgcatgttcatggtgaagggcatggagcctggtgctggatcaagctccgctggctccttgagggtgctggctaccatgttacatgcattgacctaatcggatgcggcgtcgatcctactgaccccaacacaatccggtcgttccagcagtacgataagccactcatatacctcatttcaaccttgccggagggggagaaggtgattctaatcggacatggtgctggatggctgactgtgattcatgcaatgca

SEQ ID NO: 81170 - DNA, 385 bp, Zea mays
agggcaactccacagacgcgcgcttgcactctactcgtgtgctggggacctttgggtaccatgctccagaatacgccatgacaggccagatcaaccagaagagcgacgtctacagtttcggtgtgatccttctggagctactcaccgggcggaagccagtcgaccacaccatgccgaaaggccagcaaagccttgttacctgggccactccaaggttgagcgaagacaaagtgaagcagtgtgtcgatccgaagctcaacagcgactaccctccaaaggcggttgcaaagctggcggcggttgcagcgctgtgcgttcagtacgagtccgacttccggccaaacatgaccatcgtggtgaaggcgatcacgcctctcctgaacgc

SEQ ID NO: 81171 - DNA, 394 bp, Zea mays
tacaagcctctagatggagtcttaatagcggcgccacggcctctcctgctatcgctgctggtcgccgtgctagcggtggccgcggatgtcgccaacgccggccacgccaagcccctgacgcctggcgggcgcgtggtacaccacaaccacggcaagttcacggccgggccgtggaaacccgcccacgcgaccttctacggcgggcgggacgggtccggcaccacggcgggcgcgtgcgggtacaaggacacgcgcgcgcaggggtatggcgtgcagacggtggccgtgagcacggtgctgttcggcgacggcgcggcctgcggcgggtgctacgaggtgcgctgcgtggacagccccagcgggtgcaagcccagcgcggcggcgctggtggtga

SEQ ID NO: 81172 - DNA, 408 bp, Zea mays
gtcgatgcacgcctctacactgagtcctattaataaggtcccgcccttttccgacattcacaggggggacaggaaatcagcggccatggcctcgattccggcgacgaccttcgccgtcatcttatccgtcctcttctgtgccgcggctggcaccgccgtcgacaacgacctccccgactacgtcatccagggccgcgtctattgcgacacctgccgcgccgggttcgtgaccaatgtcaccgagtacatcgcgggcgccaaggtgaggctggagtgcaagcacttcggcaccggcaagctcgagcgctccatcgacggggtgaccgacgggaacggcacgtacacgatcgagctcaaggacagccacgaggaggacatctgcgaggtggtcttggtggagagcccgcg

SEQ ID NO: 81173 - DNA, 418 bp, Zea mays
gtcgatgcacgcctctagaatgaatcgtactagactgttcctctctccctcctcacgggcgggctccgtctgttccgtccatccaccgccccggtcgtctcccggccagatccctctcctgcaaggtttctttgcgagtggccggagaagatgatgggcgggttcctctccagggtcctcctgctggcttttggctatgcctatcctgcctatgaatgctacaagaccgttgaactgaacaaaccacagattgagcagctcatattttggtgtcagtattggattttagttgccctgttgacagttttggagagatttggagattttacaatatcatggctaccgttttactcagaagcaaaggtgttgttctttgtatatttgtggtaccctaagacaaagggaactacgtatgttt

SEQ ID NO: 81174 - DNA, 402 bp, Zea mays
ctcacgggtcgatgcaagcctctaaaatgagtctcacaaccgattcaactacaagcttgcgggcaaaaatggcaaaggctctcctaggtggcctatcggcgatcctcgtcgtggcggtggtcgtcggtgtggtcgccaccgtcacccgctccggcaagaaggccggcgacaacttcacggtcccgggggaggcttcccttgccacgtccggcaagtcggtcaagtccctgtgcgcgcccaccctatacaaggagtcgtgcgagaagacactgtcccaggccaccaatggcaccgagaaccccaaggaggtgttccacagcgtggccaaggtggcgctggagtcggtccagacggcggtcgagcagtccaagtcgatcggcgaggccaaggccagcgactcca

SEQ ID NO: 81175 - DNA, 409 bp, Zea mays
ctaggactcgtgggtcgatacaaccctctacactgagtcgtattacacgtacgagctcagaaggaaggcagaggcaaaagcagccatggcgaactcgtcgtccggccttgcggtgaacgacgagtgcaaggtgaagttccgggagctgaagtcgcggcggagcttccggttcatcgtgttcaggatcgacgacacggacatggagatcaaggtggaccgcctcggcggaccgaaccagggctacggcgacttcaccgacagcctccccgccaacgagtgccgctacgcgatctacgacctcgacttcaccaccatcgagaactgccagaagagcaagatcttcttcttctcctggtcccctgacactgcacgcaccaggagcaagatgctgtacgccagctccaaggac

SEQ ID NO: 81176 - DNA, 392 bp, Zea mays
tagtctcatgcctctgacgtcctcgcccggtttccccggtttttgagaggggaaagaggaggcggaggagagggatggggagggacgagaggttcccggtgtgggaggccgcgctcggcgccggaatcgccgccgccttcgccgctggactcgtcggtgtctacctttccatgccggactccgactacagcttcctcaagttgccacgtaatctcgaggaactccaaatcctcactggccaccttgagaactatactagtgactacaccctacaggtgttggtaggttattgcgctgtgtacatcttcatgcagaccttcatgatcccagggacaatattcatgtcactgcttgctggtgctctgtttgggcaactgcgtggccttgcgctg

SEQ ID NO: 81177 - DNA, 422 bp, Zea mays
aagactctaaagtgacgtcctatgtacgagagcatggcgatggcgtaccgtgtcctggaggtcaccctggtgtcggcaaatgacctcaagaaagtgtcgctcttctcccggactcgcatctacgccgtggcttccatctccggattcgacctccgcatcccttcccacagcacccaagcagaccacagcaacggctgcaacccctgctggaacgccgtggtacacttccccatcccggctgccgctgacacccgcggcctcgcactccacgtgaggctccgcgcccagcgtctatacctgggcgatcgcgacatcggcgaggtgtttgtgcccatcgacgacctcctggccggcgccgacaagggtggcgatccgaggcccgtgagctaccaggtgcgcaagccgcactctggccgcgccca

SEQ ID NO: 81178 - DNA, 414 bp, Zea mays
ggtcgatgcaagcctctacagtgaatcatattaagtaacacagttgagcacgacgatgggatccctcgctaataacatcatggtcgtgggcgccgtccttgcggcgcttgtcgtcggcgggtcgtgcgggcccccgaaggtgccgcccggccccaacatcaccaccaactacaacggcaagtggctcaccgccagggccacctggtacggtcagcccaacggtgccggcgctcctgacaacggcggtgcgtgcgggatcaagaacgtgaacctgccaccctacagcggcatgacggcgtgcggcaacgtccccatcttcaaggacggcaagggctgtggctcatgctacgaggtgagatgcaaggaaaaacctgagtgctcgggcaatccagtcacggtgttcatcacagacat

SEQ ID NO: 81179 - DNA, 407 bp, Zea mays
tgcaagactctacactgacgtcgtgcgtagccccccgccgttaacgggccactccatgtcatccccaacgtcatcaccgccgagttccggaccttcatcgagatcgtcttcgagaaccccgagaagagcatagactccctccacctcgacggctacgccttcttcggcgtcgggatggggcctgggacgtggtcgccggagatgaggaagacgtacaacctactggacacggtgagccggcacacgatccaggtgtacccgcggtcatggacggcgatcatgctgacattcgacaacgcgggcatgtggagcgtccggtccaacgtctgggagcggtactacctcggggagcagttctacatcagcgtcatctcgccggcgcggtcgctgcgcgacgagttacacat

SEQ ID NO: 81180 - DNA, 446 bp, Zea mays
actcgtgggtcgatgcaagcctctacagtgacgtcgtactaacgcgtccgcgtgatggacgcccgtctccgcctcggcttcttcctcctcctcgtggccgcggcgttcgcgccgctggtctccgcgcagctctctgcagatttctacaagacgtcgtgccccgacgccgagaagatcatcttgggcgtcgtcgagaagcggttcaaggcggaccccggcaccgccgccggcctcctccgcctcgtcttccacgactgcttcgcaaacggctgcgacgcgtccatcttgatcgaccccatgtcgaaccaggcctccgagaaggaggcgggccccaacatctccgtcaagggctacgacgtgatcgaggagatcaagacggagctggagaaggagtgccccaacgtggtgtcgtgcgcggacatcatccccggtaacgccggcgactc

SEQ ID NO: 81181 - DNA, 406 bp, Zea mays
actcgcgggtcgatacaagcgtctacactgattcatcataaatcgccgagagcgatcgagagataaataaagatgaagaaagtggcatcatcgtcagccgttctcttcgtgctagccctgacgctagtttgtgccccgctgatagcagaggcaaagaagaagagagtcgccgccgccgccgccgaggagaagaaggtgcaggacaacttctgctcgacgctgtgcgagggcaggaaggggatggacctggtggtgtgcaaggagtcctgcgacctctcacagcgctccaacctggtgctgtacggccggatccagtgcaagggcaagtgcaccgagcagaagggcatcaccgcgccgcagatgaaggtgtgccaagaggcgtgcgacaaggactacgtggtcaaag

SEQ ID NO: 81182 - DNA, 409 bp, Zea mays
agtcgtcgtctcactcaccccgccttcacgcctccctcaccaaataaggtcccgcccttttccgacattcacaggggggacaggaaatcagcggccatggcctcgattccggcgacgaccttcgccgtcatcttatccgtcctcttctgtgccgcggctggcaccgccgtcgacaacgacctccccgactacgtcatccagggccgcgtctattgcgacacctgccgcgccgggttcgtgaccaatgtcaccgagtacatcgcgggcgccaaggtgaggctggagtgcaagcacttcggcaccggcaagctcgagcgctccatcgacggggtgaccgacgggaacggcacgtacacgatcgagctcaaggaacaccaacaagaaggacttctgcaaggtggtcttggtg

SEQ ID NO: 81183 - DNA, 456 bp, Zea mays
ctcacgggtcgatacaagcctctacaatgagtcggtatacacaaacaatgcgatgagagccttgttcctcctggtcctcttctgcatcgtgcatggtgagaaggaagagtcaaagggcatcgatgcgaaagcgtccgggcctggtgggtccttcgacatcaccaagttgggcgcctccggcaatggcaagacagacagcacgaaggctgtgcaggaggcatgggcatcggcgtgcggcggcactgggaagcagacaatcctcatacccaagggcgacttccttgtcggacaactcaacttcacaggcccttgcaagggcgacgtgaccatccaggtggatggcaatctgctggcgaccacggacctaagccagtacaaggaccatggtaattggatcgagattctacgcgtggaaaaacctggtcatcaccggcaagggaaaccttgacgggcagg

SEQ ID NO: 81184 - DNA, 363 bp, Zea mays
ctctacagtgcatcatcataccgttcatcacgttccggtcggaccccaagaagcccgccgtcgtggtctggaacgacactgcggccacgaacggcaaggacggcaagccggtgggcacggtggggagcgccacgctggcggtggagtcggactacttcacggcgtacggcgtggtgttccggaacgacgcgccgctggccaagcccggcgccaagggcggccaggcggtggcggtgcggctgttcgggaccaagacgcagatctacaactgcaccatcgacggcggacaggacacgctgtacgaccacaagggcctgcactacttcaagggctgcctcatccggggcagcgtcgacttcatct

SEQ ID NO: 81185 - DNA, 418 bp, Zea mays
ctcgcgggtcgatacacgcctctagtctgcgtcgtagtaccagtcgtctccgtctgagagtgagactgagaccgacagtagcagcggagaatcttcttcgtcgtcgtcgtcggaagaggccggcgagaaggagaaggagaaggagcaggagatggagaaggcggtcgcggcggagaaggctgcccagcaggagctgctcaagtacgccaaggagaagggcatcgtgtcaccgaccaacggcacggggtggtacaagggcatcgcccgggagttcgtggacgcccacaacgagctccgcgcgcgctacggcgtgccgcccatgaagtgggacaggaagctggcgcggcaggcgcggcgctggtccaaccgcatgcgcaaggactgcgagctcgtccacagcggccacaagtacggcgag

SEQ ID NO: 81186 - DNA, 451 bp, Zea mays
ctcgtgggtcgatacaacaccctacagtgactcgtactaccccgggacctccaaggtgaacatcaccggcgtgacctgcggccctggccacggcatcagcatcggaagcctagggcggtacaaggacgagaaggacgtcacggacatcaacgtcaaggattgcactcttaagaagacgatgttcggcgtccgcatcaaggcgtacgaggacgccgcctccgtgctcaccgtctccaagatccactacgagaatatcaagatggaggactcagccaaccccatcttcatcgacatgaagtactgccccaacaagttgtgtactgccaacggcgcctccaaggtcaccgtcaaggacgtcaccttcaagaacatcaccggcacctcctccaccccggaggccgttagcctgctctgcactgccaagggtcccatgcaccgccgtcacaatgga

SEQ ID NO: 81187 - DNA, 360 bp, Zea mays
atctcactcaccccgccttcacgcctccctcaccaaataaggtcccgcccttttccgacattcacaggggggacaggaaatcagcggccatggcctcgattccggcgacgaccttcgccgtcatcttatccgtcctcttctgtgccgcggctggcaccgccgtcgacaacgacctccccgactacgtcatccagggccgcgtctattgcgacacctgccgcgccgggttcgtgaccaatgtcaccgagtacatcgcgggcgccaaggtgaggctggagtgcaagcacttcggcaccggcaagctcgagcgctccatcgacggggtgaccgacggggaacgcacgtacacgatcgagctca

SEQ ID NO: 81188 - DNA, 364 bp, Zea mays
actcaccccgccttcacgcctccctcaccaaataaggtcccgcccttttccgacattcacaggggggacaggaaatcagcggccatggcctcgattccggcgacgaccttcgccgtcatcttatccgtcctcttctgtgccgcggctggcaccgccgtcgacaacgacctccccgactacgtcatccagggccgcgtctattgcgacacctgccgcgccgggttcgtgaccaatgtcaccgagtacatcgcgggcgccaaggtgaggctggagtgcaagcacttcggcaccggcaagctcgagcgctccatcgacggggtgaccgacgggaacggcacgtacacgatcgagctcaaggacagcc

SEQ ID NO: 81189 - DNA, 433 bp, Zea mays
  unsure (1)..(433): unsure at all n locations
acaaccccctagactgagtcatgatatctgcgaggtggtcttggtggagagcccgcgcaaggactgcgaccaggtgcaggcggacagggaccgcgccggcgtcctgctcaccaggaacgtcggcatcagcgacaacctgcgccccgccaacccgctcggctacctcaaggacgtgccgctgcccatctgcgcctcgctgctcaaacagttggactcggacgacgacgacgatcagtaatagcacatcgacgacgacgatcgatatgtaatagcacgtcgtcgacgaccgaccgcagtcgtcgcagactggctggcactaaaccacaaatcctcttcacctggattacaaatatgtaactgagaaaggaaaggaaaacaaaaatgtaactgcgtggctgtnacaaattctgagtgctggattcttgctattgtc

SEQ ID NO: 81190 - DNA, 415 bp, Zea mays
cgcgttggtcgttacaacaccctagactgagtcgtactaccacccatcaaggttggggccgccagcaggttcagccgttcctgttcttgctaaaacgagagaaggatggcagtgtctcagggagctgtcctattcttgtttctcctcgtcgcagcagaggtgggaaccatcgatgccaaaatgggagtagccatgcccatgcatgccttgataatggagaaagcgaaacagcaggagacggagaagaaggaggagaaaagcacggagaaggaagagagtcaatgcttatcgccgagtctccagttcgagggcttctgcttcaacagcgacagatgcgccgatgtgtgcatgaaggagagctttcccggtggcgagtgcaagcaggtcgtggccacgcgcaagtgcttctgcaaga

SEQ ID NO: 81191 - DNA, 384 bp, Zea mays
acccgcgggaggagagtctgaggaacggcgccatcatcaggtccgagcggccgagcgccaggaactgcctcgccgacgagagccacgtgtgctggaggaacggcaagttcgcgcaggacatgatcctccggctcaggaacgtcgagagcggggagatacagctgcagctgcagtgggtgaacttccctcctggtcctgctcctgctgctgcaacaaccaggtgacctgatgatcgatggtagctgctgttcctgtcgccattgcctcctgctggcaggaacaggaactctctgaagcacggggtcagggtagttcatgttgcttcgattcgatcgtaggggagataatgccggatggctttgtaaagtttgggaggacatgcat

SEQ ID NO: 81192 - DNA, 436 bp, Zea mays
  unsure (1)..(436): unsure at all n locations
taaagtgagtcgtcactatttccgacattcacaggggggacaggaaatcagcggccatggcctcgattccggcgacgaccttcgccgtcatcttatccgtcctcttctgtgccgcggctggcaccgccgtcgacaacgacctccccgactacgtcatccagggccgcgtctattgcgacacctgccgcgccgggttcgtgaccaatgtcaccgagtacatcgcgggcgccaaggtgaggctggagtgcaagcacttcggcaccggcaccgacgggaacggcacgtacacgatcgagctcaaggacagccacgaggaggacatctgcgaggtggtcttggtggagagcccgcgcaaggactgcgaccaggtgcaggcggacagggaacgcgccggcgtcctgctcnacangaacgtcggcatcagcgacaacctgcg

SEQ ID NO: 81193 - DNA, 412 bp, Zea mays
  unsure (1)..(412): unsure at all n locations
aaaatcncaggggggacaggaaatcagcggccatggcctcgattccggcgacgaccttcgccgtcatcttaaccgtcctcttctgtgccgcggctggcaccgccgtcgacaacgacctccccgactacgtcatccagggccgcgtctattgcgacacctgccgcgccgggttcgtgaccaatgtcaccgagtacatcgcgggcgccaaggtgaggctggagtgcaagcacttcggcaccggcaccgacgggaacggcacgtacacgatcgagctcaaggacagccacgaggaggacatctgccaggtggtcttggtggagagcccgcgcaaggactgcgaccangtgcangcggacagggaccgcgcccgcgtcctgctcaccaggaacgtcggcatcagcgacaacctgcg

SEQ ID NO: 81194 - DNA, 407 bp, Zea mays
ggtcgatgcacgcctctacaatggctcgcatcagcagtgcggcgatgaaggcagccgtggccgctctgctggtgttcgccgcggtgtcgcctgccgcgcgcgcggtggcggcggaggcggaggcgaaggcgaaggctgtgggaggcgcgccgtcggtgcccgctggctcgctggacatcgcgcagctgggcgccaagggcgacggcaagtcggacagcaccccgatggtgctcaaggcgtggaagcacgcgtgcgaggcgacggggcagcagaagatcgtcatccccaagggcaactacctgacgggcgcgctggacctggtgggcccctgcaagtcctccatcatcatccgcctcgacggcaacctgctcggcaccggcgaactcaacgcgtacaagaggaactgg

SEQ ID NO: 81195 - DNA, 407 bp, Zea mays
gtcgatgcacgcctctacactaagtcgtatcagctcgccggcccaaaatcgcctcatcgaccacgcccccttccaggctcccgtctccatgggtctcctctcaaacaggattgggagggagagcctcaaggcgggggatcatatctactcctggagggcggcgtgggtctacgcgcatcacggaatatatgtgggcgatgataaggtgatccatttcacaagaggaagaggacaggaggtcggaacaggaactgtcgtcgatattattcttgtgagttccaccccaaaacgaagcaacacgccttgcccggtgtgcaccgacgaaaccagcgacagcagcacagagacgaacggcgtggtatcctcctgcctcagctgcttcctagctgggggtgctctctaccgtt

SEQ ID NO: 81196 - DNA, 433 bp, Zea mays
tcacgggtcgatgcacgcctctacattgactcctactatcttaattacaggtcatagctaagcaggtctgacaggatgtcgtggcagacatacgtcgatgagcacctcatgtgcgagatcgagggccaccacctgacctccgctgccatagtcggccacgacggcgccgtttgggcccagagcaccgcattcccacagttcaagacagaggagatgaccaacatcatgaaggacttcgacgagcccgggttcctggccccgaccggcctcttcctcggccccaccaagtacatggtcatccaaggcgagcccggcgctgtcatccgcgggaagaagggatctggaggcataactgtgaagaagacagggcaagcgatggtggtcggcatctacgacgagcccatgacccccgggcagtgcaacatgggggggc

SEQ ID NO: 81197 - DNA, 389 bp, Zea mays
  unsure (1)..(389): unsure at all n locations
cccacgcgtccgctgaaaacagccgagcgatctcctctccctctccctctccgatccattctccagcgcagcgaagtaaacatgtctgaccgggcaaagatgtcgtggcaggcgtacgtggacgagcacctgatgtgcgagatcgagggccaccacctcgcggcggcggccatcgtcggccacgacggtgccgcctgggcgcagagcacggcgttccccgagttcaagaccgaggacatggccaacatcatgaaggacttcgacgagccagggcacctcgcgccgacaggcctgttcctcggacctaccaagtacatggtcatccaaggcgagcctggtgccgtcatccgtggcaagaagggatcaggangcatcaccgtgaagaagac

SEQ ID NO: 81198 - DNA, 421 bp, Zea mays
  unsure (1)..(421): unsure at all n locations
caagaaccagtgccagcattcttacaattgcaagatcctcccgaatagcttggtgctggattttgtgacgaacgtccagatccgcggcatcacgctgctcaacagcaagttcttccacctcaacatcttcgagtgcaagaacgtgctgatcgacaaagttacggtcaaggcccccggcgacagccccaacacggacggcatccacatcggcgactccagcaacgtgaccatcagcagcaccaccatcggcgtcggcgacgactgcatctccatcggccccgggagcaagatgatccgcatccatggcgtcaagtgcggcccaggccacggcatcagcgtcggcagcctgnggcgctacaaggacgagaaggacgtggaagacgtgcaggtgacggggtgcacgatcgccgggcacacgaac

SEQ ID NO: 81199 - DNA, 438 bp, Zea mays
  unsure (1)..(438): unsure at all n locations
ctcgtgggtcgatacaagcctctagagttaatcttattaagataaatgagatatacagatacaagacagaagaatactcccatgacgccactaacaaattcaacatttaccctgagcaaatcccttcctggcttgttgactggattcctgagaaaggaggttaccttatagggaatctgcagccagctcacatggattttaggttcttctctcttggcaacctttgggccatagcttcgtctctaactactccaaaacaagctgagggaattcttagccttattgaagaaaaatgggatgatcttgtagcaaacatgcccctgaagatatgcttccctgcaatggaagatgatgaatggcgcattattactggcagtgatcctaaaaataccccatggtcatatcataatggtggatcntggccaaccttattgtggc

SEQ ID NO: 81200 - DNA, 393 bp, Zea mays
accaagacacatcctgcgatcctcgaagcctccgccgagcatcgatcatgtcggcctactgcggcaagtacgcggatgagctcatcaagaatgctgcctacatcggcacccctggcaagggtatccttgctgctgatgagtcaactggcaccattggcaagcgcctttccagcatcaatgtcgagaacgtggaggagaaccggcgggctctccgtgagctcctgttctgctgccctggtgccctccagtacatcagcggtgtgatcctcttcgaggagaccctctaccagaagaccaaggatggcaagccttttgtcgatgtcctcaaggagggaagcgtcctccctggcatcaaggtcgacaagggcaccattgaggtttttggcaccgaca

SEQ ID NO: 81201 - DNA, 388 bp, Zea mays
  unsure (1)..(388): unsure at all n locations
atccatagcatcaatcagttctggtctttcgtggacaataatggcgcctctcctaccttcgatgctgctcgtcgggctcgccgcgggctccgaggaggaggaggacggcngcggcaaaaagaagccccacgtcaaccacggcaagtttaaggcggagccgtggacggacgggcacgcgacgtactacggcgggcgcgacgggttaactgacaccacggacagcggcgcgtgcggctacaagggcgagctggggaaagactacggcaccctgacggcggccgtgggcccgtcgctgtacaccaacggcaccgggtgccgcgcgtgctacgagctcaagggccccaagggcaccgtggtggtgacggccaccaacgaagccccgccgccg

SEQ ID NO: 81202 - DNA, 389 bp, Zea mays
tacagacacttgtggtaggtccttcgacatcatcacgttgggcgcctccggcaatgtcaagacagacagcacgaaggctgtgcatgacgcatgggcatcggcgtgcggcggcactgggaatcagacaatcctcatacccaaaggtgacttccttgtcggacaactcaacttcacaggcccttgcaaaggcgacgtgaccatccaagtggatggcaatctgctggcgaccacggacctaagccagtacaatgaacatggtaattggatcgagattctacgcctggataacctggtcatcaccggcaagggaaaccttgacgggcacggcccagccgtgtggagcaagaactcctgcaccaagaagtatgactgcaagatccttcccaact

SEQ ID NO: 81203 - DNA, 428 bp, Zea mays
ctcgcgggtcgatacaagcctctagaatgagtcatattaagggatgctgtccgattgccaccaggggaggatctcaatgaatggctagctgttaacactgttgatttcttcaaccaggtgaacatcctgtatggtactctaatggagttctgcacaccagctacatgcccaacaatgtcagctggaccaaagtttgagtatagatgggccgatggggtgcagatcaagaaaccaattgaggtttcagcaccaaagtatgttgagtacttgatggattggatcgaagctcagcttgatgacgaatccatcttccctcagaaactcggaaccccttttccacaaaatttcaaggaagttgtgaagacaatctttaagcgacttttccgtgtttatgctcatatttaccactcacattttcaaaagattgt

SEQ ID NO: 81204 - DNA, 420 bp, Zea mays
ctctacaatgagtcgtattaagcgcgacgatgggatccctcgctaataacatcatggtcgtgggtgtcgtccttgcagcgctcgtcgccggcgggtcatgcgggcccccgaaagtgccgcccggtcccaacatcaccaccaactacaacggcaagtggctcaccgccagggccacctggtacggtcagcccaacggtgccggcgctcctgacaacggcggtgcgtgcgggatcaagaacgtgaacctgccaccctacagcggcatgacggcgtgcggcaacgtccccatcttcaaggacggcaagggctgcggctcatgctacgaggtgagatgcaaggaaaaacctgagtgctcgggcaatccagtcacggtgtacatcactgacatgaactacgagcctatcgctccctaccacttcg

SEQ ID NO: 81205 - DNA, 404 bp, Zea mays
gtcgttgcaccactctagaatgagtcgtattaatataccctgcaggacgtgtacgactcgctggacgtgcacgtcggccactgcctctccgtgctggtcgacgccgaccaggcgcccggcgactactacatggtggcctccacgcggttcatccacgacgccaagtccgcctccgccgtcatccgctacgccggctccagcggcgccccgccggcgcccaacatgaccgagccaccggccggctgggcctggtccatcaaccaggccaggtcgttccgctggaacctgacggccagcgccgcgcgccccaacccgcagggctcctaccactacggccagatcaacatcacccgcaccatcaaggtcatggtctcccgcggccacatcgacggcaagctccgcta

SEQ ID NO: 81206 - DNA, 396 bp, Zea mays
tacggtgagccgctgtacgtcgcggctgcgtccagctccgcctggtgccgggactccgtggttttgggcatctgcttcgtctctggtcgatctgcttcatatacttctagatctgcgccatctccgttgctacgaccttgaccccaagaagtttgatgaggacttcaatatactaaactggtggcatgaacataagttgtcctatcctattctatctatcttagctagagatgttatttctgttcctgtctcaacaatttcctcagaatctgcatttagcctttgtggcaggataattgaggaacgacgacgtcgcctagcaccagaaatggtagagatgttactttgcatgaaagattgggaactaagagaagcaagagggcaacactctacaca

SEQ ID NO: 81207 - DNA, 375 bp, Zea mays
acccacgcgtccgagctcgggcgcacgctcgggcagggcaccttcgccaaggtgtaccacggccggaacctcgcgtccggcgagagcgtggccatcaaggtcatcgacaaggagaaggtgatgcgcgtcggcatgatcgaccagatcaagcgcgagatctccgtcatgcgcctcgtccgccaccccaacgtcgtgcagctgcacgaggtgatggccagcaagagcaagatatacttcgccatggagtacgtccggggcggcgagctcttcgcccgcgtcgcccgcggccggctcaaggaggacgccgcgagaaggtacttccaccagctcgtcggcgccgtcgacttctgccacagccgcggcgtctaccaccgc

SEQ ID NO: 81208 - DNA, 430 bp, Zea mays
taggatgcctcgcacgaagtgtccgatcctgcctaacaccaacttcacgtacaagtggcagcccaaggaccagatcggcagcttcttctacttcccgtccatcggcatgcagcgggcggcgggcggctacggggccatcagcgtggtcagccgcctcctcatcccggtcccgttcgaccagcccccgccggagaacgaccacgtggtgctcatcggagactggtacaccaaggaccacgaggtgctagcccgccagatcgacgccggcaagggcgtgggccgccccgcgggcgtgctcatcaacggcaagggcggcaaggacctggaggccgcgcctgccttcaccttcgaggccggcaagacgtaccgcctccgcgtctgcaacaccgggatcaaggcgtcgctcaacttccgcatccagggccactac

SEQ ID NO: 81209 - DNA, 417 bp, Zea mays
tacagtgactgcgcacaggcgcaccgaccccaacatgaagtccgggctcgtcatccagaactgccgcctggtgcccgaccagaagctgttcccggaccgcttcaagatcccctcgtacctgggccgcccctggaaggagttctcgcgcctcgtcatcatggagagcaccatcgccgacttcgtcaagccagaggggtacatgccctggaacggcgacttcgccctcaagacgctctactacgccgagtacaacaaccgcgggcccggcgccggcaccagcaagagggtcaactggcccggcttccacgtcatcggacggaaggaggccgagccgttcaccgccgggccgttcatcgacggcgccatgtggctcaagtacaccggcgcgccgcacatacttggtttcaagttctaaag

SEQ ID NO: 81210 - DNA, 423 bp, Zea mays
cggacgcgtgggcggacgcgtgggttcgtggatggcggtgccacaacctctcctgctgtcgctgctggtcgccgtgctagcggtggccgccgatgtcgccaacgccggccacgccaagcccctaacgcctggcgggcgcgtggtacacgacaaccacggcaagttcacggccgggccgtggaaacccgcccacgcaaccttctacggcgggcgtgacgggtccggcaccacggcgggcgcgtgcgggtacaaggacacgcgcacgcaggggtacggcgtgcagacggtggccgtgagcactgtgctgttcggtgacggcgcggcctgcggagggtgctacgaggtgcggtgcgtggacagccctagcgggtgcaagcccgacgcggcagcgctggtggtgacggtgaccgacctgtgcccggc

SEQ ID NO: 81211 - DNA, 455 bp, Zea mays
ctcacgggtcgacacacgcctctagcatccatcgtcatgcgtccgggcaccatgtctttcaccggcacgcaggacaagtgcacggcgtgcgacaagaccgtccacttcatcgacctcctcacggccgacggcgccatctaccataagacatgcttcaagtgcagccactgcaaaggggtcctctcgatgtgcagctactcctccatggacggtgtgctgtactgcaagacccacttcgagcagctcttcaaggagaccgggagcttctccaagaacttcacgccaggtggcaagtcatcagacaagggtgaactgacaagggccccaagcaagctgtcgtctgcattttctggtacccaggataagtgcgcagcatgccagaaaacagtgtacccgctggagaagttaactctggaaggcgagtcctaccacaagagctgcttcaagtgctcgca

SEQ ID NO: 81212 - DNA, 430 bp, Zea mays
cccacgcgtccgtccacctcaacatcttcgagtgcaagaacgtgctgatcgacaaagttacggtcaaggcccccggcgacagccccaacacggacggcatccacatcggcgactccagcaacgtgaccatcagcagcaccaccatcggcgtcggcgacgactgcatctccatcggccccgggagcaagatgatccgcatccatggcgtcaagtgcggcccaggccacggcatcagcgtcggcagcctggggcgctacaaggacgagaaggacgtggaagacgtgcaggtgacggggtgcacgatcgccggcaccacgaacggcctgcgcatcaagtcgtacgaggactccaagtcgtcgctcaaggccagcaagttcctgtacgagggcatcaccatggacaatgtctcctaccccatcatcatcgacca

SEQ ID NO: 81213 - DNA, 415 bp, Zea mays
taggacgagacggacgtcacggacatcaacgtcaaggattgcactcttaagaagacgatgttcggcgtccgcatcaaggcgtacgaggacgccgcctccgtgctcaccgtctccaagatccactacgagaatatcaagatggaggactcagccaaccccatcttcatcgacatgaagtactgccccaacaagttgtgtactgccaacggcgcctccaaggtcaccgtcaaggacgtcaccttcaagaacatcaccggcacctcctccaccccggaggccgttagcctgctctgcactgccaaggtcccatgcaccggcgtcaccatggatgacgtcaacgtcgagtatagcggcaccaacaacaagaccatggctatatgcacgaacgccaagggcagcaccaagggttgcctca

SEQ ID NO: 81214 - DNA, 437 bp, Zea mays
actcacgggtcgatgcacgcctctaatctgaatcgtaggaaggaagctcgtctccggcacgatccccgacgccgggaccatccacgcgcacggctcggagaccgtcaccatccccttcctgctggtctacgacgacatcaggagcacgtacagggagatcgagcccgggagcgtcatcccctacaaggtcagggtggtcctccacgtggacattcccgtggtcgggagggtctcgctcccgctggagaaggacggcgagatcccggtgccgtacaggcccgacgtcagcgtcgacaggatcaagttcgagcagttctccttcgaggagtccaccgcgacgcttcacctgagcctggacaacaggaacgccttcgacctggggctcaactccatggactacgaggtgtggctcggcggcgtgagcatcgcgtccgctg

SEQ ID NO: 81215 - DNA, 429 bp, Zea mays
ctcatgggtcgatacacgcctctagactgattcgcaccaaggtggcctgtgggcgatcgtcgtcgtcgcggtggtcgtcggcgttgtcgccaccgtcacccactccggcaagaaggccggcgacgacttcaccgtcccgggggaagcctccattgccacgtccggcaagtcggtcgagtccctgtgcgcgcccacgttgtacaaggagtcgtgtgagaagacgctctcccaggccaccaatggcaccgagaaccccaaggaggtgttccacagcgttgccaaggtggcgctggagtcggtgaaaacagcggtcgagcagtccaagacgatcggcgaggctaaggccagcgactccatgaccgagagcgcgcgagaggactgcaagaagctcctcgaggacgccgttgacgacctcaggggcatgctcga

SEQ ID NO: 81216 - DNA, 426 bp, Zea mays
acagagctcctgactgttcctctctccctcctcacgggcgggctccgtctgttccgtccatccaccgccccggtcgtctcccggccagatccctctcctgcaaggtttctttgcgagtggccggagaagatgatgggcgggttcctctccagggtcctcctgctggcttttggctatgcctatcctgcctatgaatgctacaagaccgttgaactgaacaaaccacagattgagcagctcatattttggtgtcagtattggattttagttgccctgttgacagttttggagagatttggagattttacaatatcatggctaccgttttactcagaagcaaaggtgttgttctttgtatatttgtggtaccctaagacaaagggaactacgtatgtttatggaactttctttaagccatatatttct

SEQ ID NO: 81217 - DNA, 427 bp, Zea mays
ctggttcgtggatggcggcgccacggcctctcctgctatcgctgctggtcgccgtgctagcggtggccgcggatgtcgccaacgccggccacgccaagcccctgacgcctggcgggcgcgtggtacaccacaaccacggcaagttcacggccgggccgtggaaacccgcccacgcgaccttctacggcgggcgggacgggtccggcaccacggcgggcgcgtgcgggtacaaggacacgcgcgcgcaggggtatggcgtgcagacggtggccgtgagcacggtgctgttcggcgacggcgcggcctgcggcgggtgctacgaggtgcgctgcgtggacagccccagcgggtgcaagcccagcgcggcggcgctggtggtgacggcgaccgacctgtgcccgcccaacgaacagcaatccgcggacag

SEQ ID NO: 81218 - DNA, 431 bp, Zea mays
tgggtcgttgcaaacctctacactgacttctggtacctggtgtccgcctgcctcatcctcatgctcttctccctcctgcggatcatcttcccgctgggcaggacggggaccatggtgtacggctgcatcgccgcgctcgtcttctccggcttcatcatctacgacaccgacaacctcatcagggtctactcctacgacgagtacgtcgccgccgccatcgagctctacctcgacatcatcaacctcttccaggccatcctagcggtgctcgaaggcgtcgactgatagggtcatatatataacacggccggctgaggctcatgggctgtgagcatatatacataggatcatatatatgcaatctatacatgagctaccactaccactacccagaaattggttccaagcttgcttggcaatctgttatccat

SEQ ID NO: 81219 - DNA, 407 bp, Zea mays
  unsure (1)..(407): unsure at all n locations
cgagaacctttctcactcctccacctttctccttttcttgccacggcaaaacaccttcgccggcgagagcatggcgatggcgtaccgtgtcctggaggtcaccctggtgtcggcaaatgacctcaagaaagtgtcgctcttctcccggactcgcatctacgccgtggcttccatctccggattcgacctccgcatcccttcccacagcacccaagcagaccacagcaacggctgcaacccctgctggaacgccgtggtacacttccccatcccggctgccgctgacacccgcggcctcgcactccacgtgaggctccgcgcccagcgtctatacctgngcgatcgcgacatcggcgaggtgtttgtgcccatcgacgacctcctggccggcgccgacaagggtggcg

SEQ ID NO: 81220 - DNA, 349 bp, Zea mays
tcgtgggacgatgcaagcctctacactgacgtcctgctaacgcgtccggtcaactgcggcctcagcttcggggactggatggcgcccgacaagcccaacccaaacgagctcaccggcgccatcgtcggcgggcccgacaagaacgacggcttcgtggacaagcgcggcaactcctcctacaccgagccctgcacctacatcaactccctcgccatcggcccgctcgccgcgctcgccgtccgaggcgtgcagctcgtcgccacgcagtgatctatccccatgcgtgcgtgtgtgtcccgctgtttcgtttcttccctgacatgatatgatttctactccgttactgatg

SEQ ID NO: 81221 - DNA, 223 bp, Zea mays
gtcgatgcacgactctaaactcgactcctatgtaaccactcaagtgcatcgtcggccagccgtgctagtagacagcggcccggtcgggcacatactcctcttcctatatacatcggatttggatgggcggcatatatgtacgtgtgtgtaatatattattactacatcttgtactatatgcgacgattgcttgactgatgaatcacgctttttaggttagacc

SEQ ID NO: 81222 - DNA, 436 bp, Zea mays
aggagtggtggcgcaacgagcagttctgggtgatcggcggcacgtcggcccacctggcggccgtgctccagggcttgctgaaggtgatcgcgggcatcgagatctccttcacgctgacggccaaggctgctgcggaggacgacgatgaccccttcgcggagctgtacctggtgaagtggacgtcgctcttcatcccaccgttggcagtgatcggtatcaacatcattgcgctcgtagtcggtgtgtcccgcgccgtgtacgcggagatcccgcagtacagcaagcttctgggcggcgggttcttcagcttctgggtgctggcgcactactacccgttcgccaaggggctcatgggtcgccgcggacgcacgccgaccctcgtctacgtctgggcgggacttatctccatcaccgtctccctgctttggatcacatc

SEQ ID NO: 81223 - DNA, 389 bp, Zea mays
cgatggcgttcatcagcagtgcggcgatgaaggcagccgtggccgctctgctggtgttcgccgcggtgtcgcctgccgcgcgcgcggtggcggcggaggcggaggcgaaggcgaaggctgtgggaggcgcgccgtcggtgcccgctggctcgctggacatcgcgcagctgggcgccaagggcgacggcaagtcggacagcaccccgatggtgctcaaggcgtggaagcacgcgtgcgaggcgacggggcagcagaagatcgtcatccccaagggcaactacctgacgggcgcgctggacctggtgggcccctgcaagtcctccatcatcatccgcctcgacggcaacctgctcggcaccggcgacctcaacgcgtacaagaggaactgg

SEQ ID NO: 81224 - DNA, 361 bp, Zea mays
atcctgctggttactccgcgcgccttctctttctctcccggacgtcgatcgtgttcttcagcacgggctagctagctccctccctcccagccatggcgacgccggacaacaaggggcacgggcatccgctgcccaagtttggggagtgggacgtgaagaatccggccacgtccgagggcttcaccgtcatattccagaaggcccgcgacgacaagaagaccaccaccggccctggggctgggaacgcgcgcgcaggcattccgccggccttcaggaacggcggcggcgacggcgggtacaggcccgacttcggcgacggcaaccagtacacgccgcccaaacggaagaagtgggccttctg

SEQ ID NO: 81225 - DNA, 423 bp, Zea mays
acaacaagcaggttctcggcgcgctgccgttgccgctgccgtacaccatcacagccttccagctcgcgttcggctccctgctcatcttcctcatgtgggccaccaggctccacccggcgcccaggctctccgctgcgcagctgggcaagatcgcgccgctggccgtggggcacatgctgggcacggtgttcaccaacatgagcctgggcaaggtcgccgtctccttcacgcacaccatcaaggcctccgagcccttcttcaccgtcgtcctctccgccctcttcctcggcgaggttccttcccttccggtgctgggctcgctcgtgccgatcgttggcggcgtcgccttggcgtcattcaccgaagtttctttcaactggaccgggttttggagcgccatggcgtccaatcctgacaaccaat

SEQ ID NO: 81226 - DNA, 425 bp, Zea mays
gtcgatgacgcctctagagtcaatctgcataatcgccggcaccacgaacggcctgcgcatcaagtcgtacgaggactccaagtcgtcgctcaaggccagcaagttcctgtacgagggcatcaccagggacaatgtctcctaccccatcatcatcgaccagaagtactgccccaacaacatctgcgtcaagtccggcgcctccaaggtggccgtcaacgacgtcgtcttcaagaacatccacggcacctccaacacgccggaggccatcacgctcaactgcgccaacaacctgccatgccagggcgtgcagctcgtcaacgtcgacatcaagtacaatggatccggcaacaagaccatggccgtctgcaagaacgccatctgcaagtccatcggcttgggaaaggagctcgcctgcatctgaacca

SEQ ID NO: 81227 - DNA, 391 bp, Zea mays
cggacgcgtgggcggacgcgtgggcggacgcgtgggacgagccgctgcacgcttaataacattgtagattggtacgggaggtcgaggaaatggaataagacggctattccaatcctaatcgggacaaagtttgatgactttgctcagcttcctcttgagatgcaatgggccatcgttaaccaggccagagcatacgcaagagcgatgaaggcgaccctcttcttctcgagcgcgacgcacaacatcaacgtgaacaagatcttcaagttcatcacggccaagctcttcaacctcccgtggacggtggagcgcaacctcaccatcggcgagcccatcatagacttctgacgacgccctcctctaactagtaactcggcagcacacgcacgac

SEQ ID NO: 81228 - DNA, 296 bp, Zea mays
caggcacaggtccagaagtcgcgggacgcagcaggccacaagtccgggtgattgacccagcgacgacgccgccgaactcgtcaaccccaggaaaggcacgctccggcacgccgtgacccgggcccgggcgctgtggatcaacttcgcgcgcgacattgtgattcaactctggcaagaactcatcgtgaacagcgaaaagaccatcgaacggccgcgaacgcaagtgcacatcgttggcgcgcagattaccctgcagaacgtgcgcaacgtgatcctccacaacctgcacgtccacg

SEQ ID NO: 81229 - DNA, 369 bp, Zea mays
cttcaagcctccctcaccaaataaggtcccgcccttttccgacattcacaggggggacaggaaatcagcggccatggcctcgattccggcgacgaccttcgccgtcatcttatccgtcctcttctgtgccgcggctggcaccgccgtcgacaacgacctccccgactacgtcatccagggccgcgtctattgcgacacctgccgcgccgggttcgtgaccaatgtcaccgagtacatcgcgggcgccaaggtgaggctggagtgcaagcacttcggcaccggcaagctcgagcgctccatcgacggggtgaccgacgggaacggcacgtacacgatcgagctcaaggacagccacgaggaggacatctg

SEQ ID NO: 81230 - DNA, 416 bp, Zea mays
  unsure (1)..(416): unsure at all n locations
aagaaggtcacgtacgtggtggaccccagcggcaagggcgactacaccaacatcaccgcggcgctggaggatatcccggtgagcaacaccaagcgcgtgatcctggatctcaagcccggcgctcagttccgcgagaagctgttcctgaacatcagcaagccgttcatcacgttccggtcggaccccaagaagcccgccgtcgtggtctggaacgacactgcggccacgaacggcaaggacggcaagccggtgggcacggtggggagcgccacgctggcggtggagtcggactacttcacggcgtacggcgtggtgttccggaacgacgcgccgctggccaagcccggcgccaagggcggccaggcggtggcggtgcggctgttncgggacaagacgcagatctacaactggcacat

SEQ ID NO: 81231 - DNA, 412 bp, Zea mays
  unsure (1)..(412): unsure at all n locations
cttcaccgagccccagatcaagtgctacatgcgacagctgctggaggggctggcgcactgccatgcgcgcggggtgatgcaccgggacatcaagtgcgccaacctgctggtgaacaacagcggcgagctcaaggtggcggacttcgggctggcgaacctcttcgcgccggcgccggcggcgccgctcaccagccgggtggtcacgctctggtaccgcccgccggagctgctcctgggcgccacggcgtacgagccctccgtcgacctctggagcgccggctgcgtcttcgcggagatgcacgcgcgccggcccgtcctgcagggccgcaccgaggtcgagcagattcacaggatcttcangctctgtggctcgccgcccgaagacttctggcgccgcttggggctctcccac

SEQ ID NO: 81232 - DNA, 408 bp, Zea mays
caccgtagagggcatgtgccccggcaaggtctcgtgcgcagacatcctggccttcgcggcgcgcgacgccgccgtggccgcgggcctcccgagatacgaggtcgcggcggggcgccgcgacggcatgcgctcgaacatggacgacctcccgggcaacttccccgtgccgggccaccacgtgccgcgcctcaccgagctcttcagccagcgggggctctcccaggaggacctcgtcctgctctccggcgcgcactccatcggcggcgcgcactgcttcatgttctccaaccgcatctacaacttctcccaggacgccgacgtcgacccgacgctggacccggagtacgccaagtggctgcgccagatgtgcccgccgcggcagcccggcgacgaccccgagcaagcgcc

SEQ ID NO: 81233 - DNA, 428 bp, Zea mays
  unsure (1)..(428): unsure at all n locations
tacacacacttctgccacgcgtccggacaagatggcatgcacaaacaatgcgatgagagccttgttcctcctggtcctcttctgcatcgtgcatggtgagaaggaagagtcaaagggcatcgatgcgaaagcgtccgggcctggtgggtccttcgacatcaccaagttgggcgcctccggcaatggcaagacagacagcacgaaggctgtgcangangcatgggcatcggcgtgcggcggcactgggaagcagacaatcctcatacccaagggcgacttccttgtcggacaactcaacttcacaggcccttgcaagggcgacgtgaccatccaggtggatggcaatctgctggcgaccacggacctaagccagtacaagggacatggtaattggatcgagaatctacgcgtggataacctggtcatca

SEQ ID NO: 81234 - DNA, 418 bp, Zea mays
  unsure (1)..(418): unsure at all n locations
cccacgcgtccggccaggaacgccgaggaggctgctctggcagtggccgagatggagaaggccaagtgccgcgcggccatggaggccgccgaggcggcgcagaggctggctgacctggaggcgcagcggcgccgcaacgccgaggtgcgcgcgcgccgggaggccgacgagaaggtgcgcgctctggatgccatttccaaccacgacttccggtaccgcaagtaccacatcgacgagatcgagatggccacggagcgcttctccgacgagctcaaaatcggcgagggcggctacggccccgtctaccgcgcctccctcgaccacacccccgtcgccatcaaggtgctccggcccgacgcgcaccaggggaggaagcagttcctgcangaggtggaggtgctcagctgcaatccgcacc

SEQ ID NO: 81235 - DNA, 408 bp, Zea mays
gggcgagtgcgtgcgttcgtgcagccacagacaggcgtccgggcaccatgtctttcaccggcacgcaggacaagtgcacggcgtgcgacaagaccgtccacttcatcgacctcctcacggccgacggcgccatctaccataagacatgcttcaagtgcagccactgcaaaggggtcctctcgatgtgcagctactcctccatggacggtgtgctgtactgcaagacccacttcgagcagctcttcaaggagaccgggagcttctccaagaacttcacgccaggtggcaagtcatcagacaagggtgaactgacaagggccccaagcaagctgtcgtctgcattttctggtacccaggataagtgcgcagcatgccagaaaacagtgtaccccgctggagaagttaact

SEQ ID NO: 81236 - DNA, 435 bp, Zea mays
gacgcgtattacgcttccgggctggttcgtggatgccggcgccacagcctctcctgctgtcgctgctggtcgccgtgctagcggtggccgccgatgtcgccaacgccggccacgccaagcccctgacgcctggcgggcgcgtggtacaccacaaccacggcaagttcacggccgggccgtggaaacccgcccacgcgaccttctacggcgggcgggacgggtccggcaccacggcgggcgcgtgcgggtacaaggacacgcgcgcgcaggggtatggcgtgcagacggtggccgtgagcacggtgctgttcggtgacggcgcggcctgcggcgggtgctacgaggtgcgctgcgtggacagccctagcgggtgcaagcccagcgcggcgacactggtggtgacggcgaccgacctgtggccgcccaacgaacaac

SEQ ID NO: 81237 - DNA, 383 bp, Zea mays
  unsure (1)..(383): unsure at all n locations
gggccaaccaaccccccaggccaaatcctcaaaggcaaatcctcctccgggccttccggtgaacaacaattgcaaggtaaattcccggaacctgaattcccggcggaccttccggttcaccttgtccaggatcaacaacacggacatggaaatcaaggtggaccgcctcggcggaccgaacaagggctacggcaacttcaccaacagcctccccgccaacgagtgccgctacgcgatctacgacctcgacttcaccaccatcgagaactgccagaagagcaagatcttcttcttctcctggtcccctgacactgcacgcaccaggagcaagatgctgtacgccagctccaaggacaggttcaaganggagctggacggcatcc

SEQ ID NO: 81238 - DNA, 283 bp, Zea mays
  unsure (1)..(283): unsure at all n locations
gcttcagccgcagcttctacgaggactgccgcatcgagtcggtggtcaaggaggtggcggtgctgacggcgcagcagcgttccaagtccatcgagggcgccatcgacaccggcttctcgttcaagaactgcagcatcggcggcgtcaagggcggccagatctacctgngccgcgcctggggggactcctcccgggtcgtctactcgtacacgaagatgggggaagaggtggtccccgtgggctgggacggctggcagatcgccaagcgggagagcagcggcat

SEQ ID NO: 81239 - DNA, 414 bp, Zea mays
gcggcgccacggcctctcctgctatcgctgctggtcgccgtgctagcggtggccgcggatgtcgccaacgccggccacgccaagcccctgacgcctggcgggcgcgtggtacaccacaaccacggcaagttcacggccgggccgtggaaacccgcccacgcgaccttctacggcgggcgggacgggtccggcaccacggcgggcgcgtgcgggtacaaggacacgcgcgcgcaggggtatggcgtgcagacggtggccgtgagcacggtgctgttcggcgacggcgcggcctgcggcgggtgctacgaggtgcgctgcgtggacagccccagcgggtgcaagcccagcgcggcggcgctggtggtgacggcgaccgacctgtgcccggccaacgaacagcagtccgcggacagc

SEQ ID NO: 81240 - DNA, 421 bp, Zea mays
gtgggatcgagttgtttcactgcacgagcacatcctccggcgaccaccggcctccctctccgtcctctagcgaccgaccaacgcgtcgagcgaagatgtcgtggcagacgtacgtggacgagcacctgatgtgcgagatcgagggccaccacctcacgtcggcggccatcgtcggccacgacggcgccacctgggctcagagcaccgcattccccgagttcaagcccgaggagatggctgccatcatgaaggatttcgacgagccggggcacctcgccccgaccggcctgatactgggaggcaccaagtacatggtcatccaaggcgaacctggagctgtcatccgtggcaagaacggatccgggggcatcactgtgaagaaaacagggcagtcactcatcattggcatctacgacgagcc

SEQ ID NO: 81241 - DNA, 419 bp, Zea mays
accacgcgtccgcgacaccatccacatcgacggctacgccttcttcgccgtcggcatggggcccggcaaatggacggcagcgtcgcggagtacgtacaacctcctggacacggtgagccggcacacgatccaggtgtacccaaggtcgtggacggcggtgatgatgacgttcgacaacgcgggcatgtggagcgtccgctccaacatctgggagaggcagtacctcggcgagcagctgtacgtgagcgtcatctcgccggagcggtcgctcagggacgagtacaacatgccggagaccagcctccgctgcggcaaggtcgtcggcctgccgatgccaccgtcctaccgcgccgtctagagcgtcgaccgatcgcgcacggtgctgtacacaactaaaggagagcgagaggggacttttt

SEQ ID NO: 81242 - DNA, 422 bp, Zea mays
cggacgcgtgggcgaataacacaggtgagcgcgacgatgggatccctcgttaataacatcatggtcgtgggcgccgtccttgcggcgctcgtcgccggcgggtcgtgcgggcccccgaaggtgccacccggccccaacatcaccaccaactacaacggcaagtggctcaccgctagggccacctggtacggtcagcccaacggtgccggcgctcctgacaacggcggtgcgtgcgggatcaagaacgtgaacctgccaccctacagcggcatgacggcgtgcggcaacgtccccatcttcaaggacggcaagggctgcggctcatgctacgaagtgagatgcaaggaaaaacctgagtgctcgggcaatccagtcacggtgtacatcactgacatgaactacgagcctatcgctccctacac

SEQ ID NO: 81243 - DNA, 395 bp, Zea mays
  unsure (1)..(395): unsure at all n locations
aggtgagcgcccgcgactcggtgaagctgacgggcgggcccgagtacgcggtgcccctggggcggcgcgactcgctcgtgtccaaccgcgaggacgccgacaacctgccgggcccggacatcgcggtgcccaagctcatcgacgagttcgacaagcagggcttcaacgtcgaggagatggtcgcgatgctgggcggcggccacagcatcggcgtccgcaagtgcttccttcatcgagaccgacgcggcgcccatcgaccccaagtacaagaagacgatcagcgacgcgtgcgacggcaaggactcgggctccgtcnccatggactccacctcgcccaacgacctggacgggagctacttcggcctggtgctggagaaaaaaatgccgctcaacat

SEQ ID NO: 81244 - DNA, 395 bp, Zea mays
  unsure (1)..(395): unsure at all n locations
gcgccgtgatcgcgaacatggagacgtgcgtcgacgggttccccgatgacgagttcaaggccaaggtgaaggagtcgttcaacgatgggaaggagctcactagcaacgccctggcgctcatcgagaaggggtcatcgctcctctctgtgctaaagggcggctcgaaacgacggttgctcgaggaggagggagaaccggcgcaagccgggcctgcactcgacaaggacggcatcccggagtgggtgcccgacggtgagcggagggtgctcaaaggcggcggcttcaagagcacactcacgccaaatgtggtggtggcgaaggacggcagcggcaagttcaagnacatcaacgaggcgctcgccgccatgccaaagacctacgacggnagatacgtg

SEQ ID NO: 81245 - DNA, 410 bp, Zea mays
cggacgcgtgggtgcgtggagatgcgcgaccacgagcagccgcaggacgcgcagtgccgccccgaggcgctggtgcagcaggtggccgccgcggcgcgggaggccggcgtgggcctggccggcgagaacgcgctgccgcgctacgacgacacggcgcacgaccaggtggtggccacggccgccgacagggccgccgaggaccgcatggtggccttcacgtacctgcgcatggggcccgacctgttccagcccgacaactggcgccgcttcgccgcgttcgtcaagcgcatgacggagccgggcgcgcgggaggcgtgccgggagcaggtggagcgggaggccgagggcgtcgcgcacgccacccagcccctcgtgcacgaggccgccgtcgcgctcaccaactgaccgga

SEQ ID NO: 81246 - DNA, 406 bp, Zea mays
ataataatgaaaggtcccgcccttttcctccgagatccacaacgggggaggggaaaacacgtacattcacccggcggcaataatggcctcggttccggctccggcgacgacgaccgccgccgtcatcctatgcctatgcgtcgtcctcgcctgtgccgcggctgactacccgaatctctccgactacgtcatccatagccgcgtgtactgcgacacctgccgcgccgggttcgtgaccaacgtcaccgagtacatcgcgggcgccaaggtgaggctggagtgcaagcacttcggcaccggcaagctcgagcgcgccatcgacggggtcaccgacgcgaccggcacctatacgatcgagctcaatgacagccacgaggaggacatctgccaggtggtgctggtgggc

SEQ ID NO: 81247 - DNA, 411 bp, Zea mays
  unsure (1)..(411): unsure at all n locations
cccacgcgtccgctaccctcgtcgtcgtctcactcaccccgccttcacgcctccctcaccaaataaggtcccgcccttttccgacattcacaggggggacaggaaatcagcggccatggcctcgattccggcgacgaccttcgccgtcatcttatccgtcctcttctgtgccgcggctggcaccgccgtcgacaacgacctccccgactacgtcatccagggccgcgtctattgcgacacctgccgcgccgggttcgtgaccaatgtcaccgagtacatcgcgggcgccaaggtgaggctggagtgcaagcacttcggcaccggcaagctcgagcgctccatcgacggggtgaccgacgggaacggcacgtacacgatcgaactcanggacaaccacgaggaggacatctg

SEQ ID NO: 81248 - DNA, 395 bp, Zea mays
ggcgaaggacggcagcggcaagttcaagaccatcaacgaggcgctcgccgccatgccaaagacctacgacggaagatacgtgatccaagtgaaggagggagtgtacgaggagtacgtgaccatcaccaagactatgaagaacgtgaccttcttaggtgacggctccaagaagtccatcgtcaccggcaagaagagcttcgccgacgggatcacgactttcaagactgcaaccttcactgcgcaaggcgacggattcatggcgatcgggatggggttccaaaacacggccggcgcggagaagcaccaggcggtggcgctgctggtgcagtcggacaagtccatcttcctcaactgcaagatggacgggttccaggacacgctgtacgcgcactcca

SEQ ID NO: 81249 - DNA, 362 bp, Zea mays
  unsure (1)..(362): unsure at all n locations
ccccaagattggattcccccccaaaaacaacaagggccttggcccccttctttccgggctcgtcccccgccggtccttccggccccccaaaggtgcaacccggcccaacaacacaacaactacaacggaaatggtcaacgctagggcaccttgtacggtcagcccaaacggtgccggcgctcctgacaacggcggtgcgtgcgggatcaagaacgtgaacctgccaccctacagcggcatgacggcgtgcggcaacgtcnccatcttcaaggacggcaagggctgcggctcatgctacgaagtgagatgcaaggaaaaacctgagtgctcgggcaatccagtcacngtgtacatcactgaca

SEQ ID NO: 81250 - DNA, 421 bp, Zea mays
  unsure (1)..(421): unsure at all n locations
cggctctagaccttggtcaacgaagtgcgcaacctcgggagcaccaaatgggatgaccatgaaatggccaaagttattctaagatcactcattttttgcaatcctacgcaagttcaattaattcgtggtgatcctagatataagctaatgtctcccgaggaggttataggaaagtttgtgagctttgaattgatgatcaaaggctccaaacaaatcatcaacttggagcaaggcggcacctccacacccgaggtgcaacccgtcgcattcaaaggcaacagaggaaaagaaagaatagtctcaatcaagtaggctttccatcgacgcctccaagctcgacaacgaggaaatggcactcatcatcaagagcttccgccaaatcctcaagcanaggagagggaaggagtacaaaccccgctcc

SEQ ID NO: 81251 - DNA, 322 bp, Zea mays
cccacacgtccgccgacgaagacgtggtgaaaccgcgccccgggaagctccggtggggcgtcatccaaattgaaccgctgtggattaccttcgccaagaccatgatcatcacgctcaaggaggagctcatcatccgcggcgacaagaccattgacggccgcggcgtgcaagtgcgcatcaacaatggcgcgcagctcacgttgcaattcgtcaacaacgtcatcatccacaacatccacatcaacgacatcgtctcctccaacaaggacggccgctacgtccgcgactcgccggaccacttcggctggcgcaccgtctccga

SEQ ID NO: 81252 - DNA, 418 bp, Zea mays
  unsure (1)..(418): unsure at all n locations
ctcaccccgccttcacgcctccctcaccaaataaggtcccgcccttttccgacattcacangggggacaggaaatcagcggccatggcctcgattccggcgacgaccttcgccgtcatcttatccgtcctcttctgtgccgcggctggcaccgccgtcgacaacgacctccccgactacgtcatccagggccgcgtctattgcgacacctgccgcgccgggttcgtgaccaatgtcaccgagtacatcgcgggcgccaaggtgaggctggagtgcaagcacttcggcaccggcaagctcgagcgctccatcgacggggtgaccgacgggaacggcacgtacacgatcgagctcaaggacagccacgaggaggacatctgcgaggtggtcttggtggagagcccgcgcatagactgcga

SEQ ID NO: 81253 - DNA, 404 bp, Zea mays
cgggtcgaccaagcctccgaacaagcctccggccaaaaggaaaggaacttagaaatcctccaaatccttgattcaaataaaacaactcctcctccctcccctcaataacaacccaaacttgtaaccggcaggattctaacaaaaacttaattactttatggacggattggtaggcctcttgaaagtccgcgtggtccggggtatcaaccttgcctaccgcgacgcaagaggcagcgatccgtatgtcgtcctacggcttggcaagaagaaactgaagacaagcgtgaagaagagatccgtgaaccccatatggcaagaggagctaactctgaccgtcacagatcccagccaaccactgaagctggaggtgttcgacaaggacaccttcagcagagacgacccca

SEQ ID NO: 81254 - DNA, 402 bp, Zea mays
ccgcctcaaggctctcatctcggatgtctgataggcaacccaataatggcagaagtcctatcatgatctcatgaacactgtctaagctctgccttagatggacactacgacgagaacaggatatccaatgtggaatacacagatgacgacaagaaagccgtgatcgcggctctgaaaaagaaggctttgatcgcctcacagaagtttacgcattccatgaacacggggatgaagagcagcaacgtgatgtccatctcgattctggatgagcgtgaacctgaggaggtgcacgctgtggatgccttccgccagcttcttgtacttgaagagctgctaccatcgcagcatgatgactaccacatgatgctaagatttctcaaggcaagatagtttgatatcgag

SEQ ID NO: 81255 - DNA, 397 bp, Zea mays
  unsure (1)..(397): unsure at all n locations
tacatcgatccgcctcatcgtggccgccctctcggcgcgcgccgcggcgcagcaggtgccgccggtgggcggcagcgctctgaagccggactactacagccagtcgtgcccgcgcgcggagaggatcatcgcggaggtgatgcagacgaagcagatggcgaacccgacgacggccgcgggcatgctgcgcgtcttcttccacgactgcttcgtcaccgggtgcgacgcgtcggtgctgatcgcgtncacccagttccagaagtcggagcacgacgcggagatcaaccactcgctccccggggacgccttcgacgccgtggtgcgcgccaagctggccctggagctggagtgcccggggtggtgtcctgcgccgacatcctcgcgctggcgtcggggg

SEQ ID NO: 81256 - DNA, 398 bp, Zea mays
  unsure (1)..(398): unsure at all n locations
gaaatctcgccctcgttgcggtcgtccacatccttttctctcctcctcgccggcccaacctgattgttcttcaaccaagaggaagaaaggaaggaagggaccggaagcatcagccatgtcgaactcggcgtcgggaatggccgtctgtgatgaatgcaagctcaagttccaggagctcaaggcaaagaggagcttccgcttcatcgtgttcaagatcaacgagaacgtgcagcaggtggtggtggacaggctgggggggccaggagagagctacgacgccttcacggcctgcttccccgccaacgagtgccgctacgccgtgttcgattttgacttcgtcactgacgagaactgccanaagagcaagatcttctttatctcttgggccccggatacat

SEQ ID NO: 81257 - DNA, 429 bp, Zea mays
  unsure (1)..(429): unsure at all n locations
agaactgggtgtggcacacggaggacgacctgttcatgaacggcgccatcttcaatccgtccggcggcgcccccaagcaggtcgacaccaacgagtgggtaaagcccaagccaggaacctacgttacaaggctcacccgcttctccggcacactgtcctgctgcacgggcaagccgtgctgaaggccggtgggcatcaggctgcttcttctagctcatggcctggccatgccaggtcgcgctggctgcgtttcatttcatggaagaaagcaaggatggatcacaggttgtcgttctgctaattaatctacatacgtttgccttcaagtactgtgttgtggcattgttacacatcacagtacagtttggtcaaattttttttccacagaggaagtanggattgatttaatcattgatttaatcccacacg

SEQ ID NO: 81258 - DNA, 403 bp, Zea mays
  unsure (1)..(403): unsure at all n locations
gcgaccacgagcagccgcaggacgcgcagtgccgccccgaggcgctggtgcagcaggtggccgccgcggcgcgggaggccggcgtgggcctggccggcgagaacgcgctgccgcgctacgacgacacggcgcacgaccaggtggtggccactgccgccgacagggccgccgaggaccgcatggtggccttcacgtacctgcgcatggggcccgacctgttccagcccgacaactggcgccgcttcgccgcgttcgtcaagcgcatgacggagccgggcgcgcgggaggcgtgccgggagcaggtggagcgggaggccgagggcgtcgcgcacgccacccagcccctcgtgcacgaggccgccgtcgcgctcnacaactgaccggaccggccggcgttccccgt

SEQ ID NO: 81259 - DNA, 418 bp, Zea mays
taagataatccacacgaggacaaccttgtcaccaccggcaagggaaagctcgacgggcaggggccagccgtgtggagcaagaactcctgcgtcaagaagtacgactgcaagatccttcccaactcgctggtgatggacttcgtgaacaacggggaggtgtccgggatcacgctgctcaactccaagttcttccacatgaacatgtacaagtgcaaggacatgctgatcaaggacgtcaatgtgacggcgcccggggacagccccaacacggacggcatccacatgggcgactcgtccggggtcaccatcaccaacaccgtcatcggcgtcggcgacgactgcatctccatcggccccgggacctccaaggtgaacatcaccggcgtgacctgcggccccggccacggcatcagcatcg

SEQ ID NO: 81260 - DNA, 384 bp, Zea mays
ccaagccttcggttcatttccccccaaccggcaaggaaacccgggggcaaaaggaaggaaaatgggttccgcaaaaaaagctccccgggtggttttcaacccaaccgttggaagttccgtttgcacaaccaaaaagacaagagccaagaaagaagaatccgccggaacccctggtggttctgctggaggcagcggcgggacgttcgacatctccaagctcggcgcgaccagcgacggcaagacggactgcacaaaggcagtccaagacgcgtggacgtcagcgtgcgaagcgaccggaagcgccacggtggtgatccccaagggcgactacctggtcggccctctcaacttcactgggccatgcaagggcagcagcatcgccat

SEQ ID NO: 81261 - DNA, 417 bp, Zea mays
gaccgccagatcgacgccggcaagggcgtgggccgccccgcgggcgtgctcatcaacggcaagggcggcaaggacctggaggccgcgcctgccttcaccttcgaggccggcaagacgtaccgcctccgcgtctgcaacaccggtatcaaggcgtcgctcaacttccgcatccagggccactacatgaagctggtcgaaccgggaggggctccacaccctgcagaacacgtacgactcgctcgacgtccacgtcggccactgcctctccgtgctcgtcgacgccgaccagaagcccggcgactactacatggtggcctccacgcggttcatccacgacgccaagtccgcgtccgccgtcatccgctacgccggctccagcgccccgccggcgccgaacatgaccgagccaccggccgg

SEQ ID NO: 81262 - DNA, 424 bp, Zea mays
caagctcctgctcaccattccaagaatccttgagcttgctgaagagctgtctatgccacttgctgctgtgaagtactcccgtgggacgttcatctttcctggcgcacagccagccccccacaggagcttctctgaggaagttgctgcacttaaccgctactttggcggcctgaaatctggtggtaatgcttatgtgattggagatccagcaagacctggacagaagtggcacgtcttctacgccactgagtacccagagcaaccaatggttaaccttgagatgtgcatgactggtctggacaagaagaaagcttgtgtctttttcaagactaatgctgatgggaacacaacatgtgccaaggaaatgacaaagctctctggcatctctgaaatcatccccgagatggagatctgcgattttgac

SEQ ID NO: 81263 - DNA, 408 bp, Zea mays
gagggtgcttcgcacgtgcatgtgagatcgggcgatcccgatcgtcggccggcgcgaattgaactaacgacgacgtacgtgcgaccgggccgggcgttggattattccggcctgagcaatgggcaagatcgagtacggcgtggtggcgcgcggcgcggtggtgctggcggagcactacggcgcggcggcggcgggcggcaacgcgggcgccgtggcgcggcaggtcctggagcgtctccctggcggcggcgacgacgactgcaacgtgtcgtacacgcaggacctccacgtgttccacgtcaagcgcaccgacggcctcacggcgctctgcatggccgacgacgccgccgggcggcgtgtccccttcgcgttcctggaggacatccacgggaggttcgtcaaggcgta

SEQ ID NO: 81264 - DNA, 421 bp, Zea mays
catcaatcatgtctggtcgttcgtggacaataatggcgcctctcctggcgtcgatgctgctcgtcgggctcgccgtgggctccgatgaggaggaggacggcggcggcaaaaagaagccccacgtcaaccacggcaagtttaaggcggagccgtggacggacgggcacgcgacgtactacggcgggcgcgacgggttaactgacaccacggacggcggcgcgtgcggctacaaaggcgagctggggaaagactacggcaccctgacggcggccgtgggcccgtcgctgtacaccaacggcaccgggtgcggcgcgtgctatgagctcaatggccccaaaggcaccgtggtggtgacggccaccaacgatgccccgccgccggtgagcgggcaaaaaggcgagcacttcgacctcaccataac

SEQ ID NO: 81265 - DNA, 430 bp, Zea mays
gtccatacaacaccctacattgagtcatgctaaggattccggcttctatggggcaccgtcaagagctttcttgacccaaagaccactgcaaagattcatgttctgggtaacaagtatcagagcaagcttctcgaggtgattgatgctagtgagttgccagaaatttttggtggaacctgccgatgtgaaggtggttgcatgaaggctgacaaaggcccttggaaggaccccgaaatcatgaagatggttcaaagtggtgatgggaggtgtggatcactcggtacggcctctttcgaggctccggagaaaatgatttgtgaagacgacacgtatcctaagaaacaagctttgtttgatggggaaacacaattagctggagacgagcattctcagtcacagaaaatttcccgtggccggattgaacatcctc

SEQ ID NO: 81266 - DNA, 414 bp, Zea mays
agatgttataataagacagaggactggatgatcttatcaggatattgaacgatgtaaatgggaacttagatgctaagaaagcttgcgctggagcattgaaacttcacaaaaaatacctgaaaaaggtacaagcaaagaaaccttaaacgtgccatggaacacacgtccccaatggggctatcgttaccatttcaacatacacgaccattttctacacacaactttgagtgaagatttatcggacacaggtggtaatcgtctgacatgtcctgagatacacggagactgatggtgccaggctagtgggttgagtacaggatgagcgcaaccggtagtgtgtatatcacgttctttgtactcaagaattttgtacagacagaaggcggtgcggatagcatgccttgcatacataat

SEQ ID NO: 81267 - DNA, 406 bp, Zea mays
cccacgcgtccgcccacgcgtccgcccacgcgtccgagggcatcgagtacctgcacgaggtggccaacccgccggtgatctaccgcgacctcaaggcgtccaacatcctccttgacagggacttcaacgccaagctctccgacttcgggctcgccaagctgggccccatgggcgaccagagccacgtcagcaccagggtcatgggcacgtacggctactgcgcccccgagtacgccatgaccggcaagctcaccaagatgtcggacatctacagcttcggcgtcgtgctgctcgagctcatcaccggccgccgcgccatcgacgtcacgaggccgtccgaggagcaggtcctcgttcagtgggtgagctgagcttttcgtttcgtttcgttacgttttccaccagc

SEQ ID NO: 81268 - DNA, 419 bp, Zea mays
cccacgcgtccgccacgcgtccgctcaagctcgccgagtacttcaacgtcaccgacggggtgttcagctacaaccagatgggcgacgtgccccccgccgttaacgggccactccatgtcatccccaacgtcatcaccgccgagttccggaccttcatcgagatcgtcttcgagaaccccgagaagagcatagactccctccacctcgacggctacgccttcttcggcgtcgggatggggcctgggacgtggtcgccggagatgaggaagacgtacaacctactggacacggtgagccggcacacgatccaggtgtacccgcggtcatggacggcgatcatgctgacattcgacaacgcgggcatgtggagcgtccggtccaacgtctgggagcggtactacctcggggagcagttctac

SEQ ID NO: 81269 - DNA, 409 bp, Zea mays
ctctacagtgctgctcaccaccggcgtggtgggctctagggccggcccgctgctggccgggtgcgggttcttcgaggcggtgatcaccggggtcggcggccacgccgcctccccccacaacaccatagaccccgtcctggcagcctccagcgtcgtgctcagcctgcagagcctcgtgtcgcgcgaggcggacccgctggactcgcaggtggtgacggtgacgaggttcctgggcggcggcgcgttcaacgtggtcccgggctccgtgacgatcggcggcacgttccggtgcttctcgaccgagggcttcctgcggctgaagcggcggatcgaggaggtggtcgtggcgcagtccgcggtgcaccggtgcgccgcgtccgtggacttcggcgccggtgggagcccgctg

SEQ ID NO: 81270 - DNA, 411 bp, Zea mays
cggtcacgcgggcggacgcgtgggcggacgcgtgggcgggaagtggtcgccggaggtgaggaagacgtacaacctgctggacacggtgagccggcacacgatccaggtgtacccgcggtcatggacggcaatcatgctgacgttcgacaacgcgggcatgtggagcgtgcattccaacatctgggagcggtactacctcggggagcagttctacatcagcgtcgtctcgccggcgcgatcactgcgcgacgagtacaacatgcccgacaacgccctccgctgcggcaaggtcgtggggctgccgctgccgccgtcctacgcccccgcgcgctaagacgacgaaggcctcgttttctcctcgtggtctgaccatccaatccaaactcaaaagaacatatacgacagaagcgt

SEQ ID NO: 81271 - DNA, 408 bp, Zea mays
gcggccaagggctgctccggctggggcttcgggcggcagcccgtgctgagcccgctcctgtactctccgcgccaggcgcggggctcgcggttccgggcgctggcgccgaccaccatcccgcgcatgtaccacgccaccagcgcggtgctgcccgacgccaccgtgctcgtggccggcagcaacaccaactcggcctacaacttcagcggcgtcgacttccagaccgaggtgcgcgtcgagcgcttcaccccgccgtacctcgccccggagcgcgcggccaaccgccccgcgatcgacgtggccaccgtccccggggacggcatggcgtacggggccaagttcacgttccagttctcgacgcccgtgcaggccgtggccgagcccgacctaaaggtgaccatgtacgcg

SEQ ID NO: 81272 - DNA, 414 bp, Zea mays
cccacgcgtccgaggggcacaggttgtggcccatgctgtcctacgcttgcggcgagctatgtgtgatcatgctgctctacgtggctgcctttgcatcccatgcagccacaaggctggcgcgcatctgcgggctcaggccaccatgcatcctgtgcacgaggctggaccgcgccctccatggaaacttgccatggttctccgcggacctggtctgttccgtgcatcggtccgaggtctcgtctctggctcactgcaagagccatggccggcttgcacggtccggcgatctctgcaaatcatgcctcctttcatgcacggcggtaggtgcccgtgaggaggtggtgaactctcggcctacgacatccagcagcaggttgtgttcttgctgttctgatccgttcaagaataatactg

SEQ ID NO: 81273 - DNA, 400 bp, Zea mays
cggcgcggcacggaacgccgccggccaagaaggaggccgtggaggcaatgcctaccgtggaaatcgccggcggcaacgatgacgacgacgcggccagctgcccggtctgcctggaggactacgcgcccggcgagcgcgcccgcgagatgccctgcaggcacaggttccacggcaattgcatcgtgccgtggctcgagatgcacagctcctgccctgtctgccggttccagctgccggccaccgacgacaagagctcatgcagcggcggcgacggtggtttcgtcagtgtcgatgcggatcgtgaaggcagtgacaacggcgggggtgatggtagggcaagctctccgggcaacgccgagctagctgaagctgaagagagtggcaggcggttgccgccatc

SEQ ID NO: 81274 - DNA, 404 bp, Zea mays
gtgaccatcagcagcaccaccatcggcgtcggcgacgactgcatctccatcggccccgggagcaagatgatccgcatccatggcgtcaagtgcggcccaggccacggcatcagcgtcggcagcctggggcgctacaaggacgagaaggacgtggaagacgtgcaggtgacggggtgcacgatcgccggcaccacgaacggcctgcgcatcaagtcgtacgaggactccaagtcgtcgctcaaggccagcaagttcctgtacgagggcatcaccatggacaatgtctcctaccccatcatcatcgaccagaagtactgccccaacaacatctgcgtcaagtccggcgcctccaaggtggccgtcaacgacgtcgtcttcaagaacatccacggcacctccaacac

SEQ ID NO: 81275 - DNA, 405 bp, Zea mays
ggagcttctccaagaacttcacgccaggtggcaagtcatcagacaagggtgaactgacaagggccccaagcaagctgtcgtctgcattttctggtacccaggataagtgcgcagcatgccagaaaacagtgtacccgctggagaagttaactctggaaggcgagtcctaccacaagagctgcttcaagtgctcgcacggcggctgcatcctgaccacctcctcttatgccgcgctcaacggcgtcttgtactgcaagatccacttcgcgcagctgttcatggagaaggggagctacaaccacatgaacaagaagagcccgtcccaggaggttctgccggacgtggctgacgaggagcaaccgccggaaccagcgccaccgcaagatgagaaagaagaggacaact

SEQ ID NO: 81276 - DNA, 397 bp, Zea mays
aaagaagtcgcctaattctttcgatcgaattaggcgccttcttcgtcccacgctccgtctttatttgtaatctgaagcttacaggaacatttgagtggatcatggacggattggtaggcctcttgaaagtccgggtggtgaggggcatcaaccttgcctaccgcgacgcaagaggcagcgatccgtatgtcgtcctacgacttggcaagaagaaacttaagacgagcgtgaagaagagatctgtgaaccccatctggcacgaggagctaactctgaccgtcacagatcccagcctagctctgaagctggaggtgttcgacaaggacacgttcagcagggacgacccgatgggggacgcggagatcgacgtggcgccgctggtggaggcggcgaacgc

SEQ ID NO: 81277 - DNA, 408 bp, Zea mays
  unsure (1)..(408): unsure at all n locations
gcagaacggcgacaccgacgtcttcgacgcgccctacgcccgagtgtaccgcagcatcgccatgctgagcgccgggcaggacgggataccaatgcacagcctctggctctgcaagctcttcttcgcgctggcgctcgcgctcagcgtgttccgggaggtggccatgtggaagcgctggcgtgtggcacactacattccgagcatcatctgtgtggccatcgcctttgtggtgccggcgcgcatacccatcgacatgttcgtcgggagcttggtgctgtacctgtggaggcgtgccgaccctagcaaggcgccgacgttctcgatggcggtggcgtcagggatgatctgtggggacgggctanggatgctcttgtcatccacgatggcactcatgcatgcgcgggcgcc

SEQ ID NO: 81278 - DNA, 427 bp, Zea mays
ctcgcgggtcgacacaagcctctagatgtatgcggatgaggccaatccttctcctatctcgtcccggagtcccgggggaaattttgccccagaaacactagcgcgtcggatcacaagcaagggcgaaaattttctgtggctccagcggctgaaggacgctgcggcacccatgtcggacgacactggtggccgcgctctacccaagttcggcgagtgggacgtgaacaacccggcgtccgcggacgggttcacggtcatcttcagcaaggccagggacgagaagaaagctcccccgacccaaggccacatcaggaacaacaggtcggtgtcggctgacagcaaggactccagggccgagaagatgacctcctacaacgccaggaccaacgcgtcgaagaaatggttctgccgtgtctcgcccaacccc

SEQ ID NO: 81279 - DNA, 410 bp, Zea mays
cacgcctcatcgaatcctcaggtctaagttttttttggttttgtgagttatccaaagttggaccgcaaagatgagtactgctaatcactatcagcacatcaagtcaaccaagcctgttgtaggcaaagcaagaaaattgaaggatctcatgataaaaagtgataataggatatgtgctgactgtggtgcacctgatcccaaatgggcatctactaatattggagtgtttctttgcttaaaatgtggagatgttcatagggcacttggacctgacatttcaaaggttttatctgtaactttggatgattggtctgacagtgatatcgactccatggttgaggttggtggaaactcatatgcaaattcaatttatgaggcttttcttccaaaagatcacccaaaacccaaac

SEQ ID NO: 81280 - DNA, 416 bp, Zea mays
cgctctgtcgcccttcgttcacctctccttcctctcgtccctgcctgccagggagaggggaagtcagaggcacggagtggcgcagagcagacgcccgtgaaccattgtagctgtccctgtcgtcgtcgtcgtcaacgaacccacacaaggaaaggatggagaagaagccgaccatcctcatgaacaggtacgagctcgggcgcacgctcgggcagggcaccttcgccaaggtgtaccacggccggaacctcgcgtccggcgagagcgtggccatcaaggtcatcgacaaggagaaggtgatgcgcgtcggcatgatcgaccagatcaagcgcgagatctccgtcatgcgcctcgtccgccaccccaacgtcgtgcagctgcacgaggtgatggccagcaagagcaagatatacttc

SEQ ID NO: 81281 - DNA, 413 bp, Zea mays
atcgcgcaccgcctccccgtgtcccctccttctcgcccggcaccgtcgagctcggctgtggaaacagaacaaacccatcaaccatggcgaactcggcgtcggggatggccgtgagcgacgagtgcaagctcaagttccaggagctcaagtcgaagcgaagcttccggttcatcacgttcaagatcaacgagcagacgcagcaggtggtggtggacaggctggggcagccgggcgacacctacgacgacttcaccggctccatgcccgagagcgagtgccgctacgccgtcttcgatttcgacttcaccaccgacgagaactgccagaagagcaagatcttgttcatctcctggtccccggacacctcgatggtcaggagcaagatgctgtacgcgagctccaaggaccggttc

SEQ ID NO: 81282 - DNA, 414 bp, Zea mays
ctctagtgacagtccccggagacagccccaacacggatggcatccacatgggcgactcatccgggatcacgatcaccaacaccgtcattggcgtcggtgacgactgcatctccatcggccccgggacctccaaggtgaacatcaccggcgtgacctgcggccctggccacggcatcagcatcggcagcctagggcggtacaaggacgagaaggacgtcacggacatcaacgtcaaggattgcactcttaagaagacgatgttcggcgtccgcatcaaggcgtacgaggacgccgcctccgtgctcaccgtctccaagatccactacgagaatatcaagatggaggactcagccaaccccatcttcatcgacatgaagtactgccccaacaagttgtgtactgccaacggcgcct

SEQ ID NO: 81283 - DNA, 410 bp, Zea mays
cccacgcgtccgcctcgtctcaccctccctccctcacacaaataataaggaaaggtcccgcccttttcctccgacatccacaaggggggaggggaaaacacgtacattcacccggcggcaataatggcctcggttccggctccggcgacgacgaccgccgccgtcatcctatgcctatgcgtcgtcctctcctgtgccgcggctgacgacccgaacctccccgactacgtcatccagggccgcgtgtactgcgacacctgccgcgccgggttcgtgaccaacgtcaccgagtacatcgcgggcgccaaggtgaggctggagtgcaagcacttcggcaccggcaagctcgagcgcgccatcgacggggtcaccgacgcgaccggcacctacacgatcgagctcaaggacag

SEQ ID NO: 81284 - DNA, 393 bp, Zea mays
agtgacggtgcgggattgcgtgcttaggaacaccaccaacggcgtccgcatcaagtcgtacgaggatgccgagtctgtgctcacggcgtcccatctcaccttcgagaacatcaggatggaggaggtggccaaccccatcatcatcgaccagtacttctgcccccagaaggtctgccccggcaagcgaagcaactcctcgcatgtctccatcaagaacgtcaccttccgcaacatctccggcacgtcgtccacgcccgaagccgtcagcctgctctgctccgagacgcagccgtgcagcggcgtctcgctcatcgatgtcaacgtcgagtacgccggcaagaacaacaagaccatggctgtgtgcagcaacgccaagggaaccgccaagggaaa

SEQ ID NO: 81285 - DNA, 415 bp, Zea mays
catcgacggggtgaccgacgggaacggcacgtacacgatcgagctcaaggacagccacgaggaggacatctgcgaggtggtcttggtggagagcccgcgcaaggactgcgaccaggtgcaggcggacagggaccgcgccggcgtcctgctcaccaggaacgtcggcatcagcgacaacctgcgccccgccaacccgctcggctacctcaaggacgtgccgctgcccatctgcgcctcgctgctcaaacagttggactcggacgacgacgacgatcagtaatagcacatcgacgacgacgatcgatatgtaatagcacgtcgtcgacgaccgaccgcagtcgtcgcagactggctggcactaaaccacaaatcctcttcacctggattacaaatatgtaactgagaaaggaaagga

SEQ ID NO: 81286 - DNA, 412 bp, Zea mays
gagctcaccgccgtcctaccttcatatacctagcagtgtctctgcatagaaagataaaaggtaggaggaggcgcagtgcgtggtgggattatttgtgaggagatattggagttattatatatatatatataggtagacgatagatagacagctagatctatataaccatggtggatgggttccgatggatcagaccgggctctttcgtcctgtacttggtcttcttcttcctgtccgcagccctgtcggaggccaatatcggcgacttcgatgaatactggcagcagcgcaagctcatggccgacgccgcggctgatgccacgtacaagcatgacccggtcgaggtcgccaaccaacttaaccgtgcagtccacagatccgtcgagaaggaggacattggcacgaggcggga

SEQ ID NO: 81287 - DNA, 416 bp, Zea mays
  unsure (1)..(416): unsure at all n locations
cccacgcgtccgaataaaggcacatctcttgcctcctctttcgcgctgtccggagaggaggggcaggaggaggccgcaccaaatctatctggggatcggagcgcgggcgacaagatgccacgcggcggcaagcccgcggcttcgtcgaagccgaacccgttcgactcggactcggactcggagtccagcaataagccggcgaacaagtccggggcgtcgtcgtaccaggcccccgccgacgccaagaagcggtacaaggacgggttccgggactcgggcgggctggagaaccagtcggtgcaggagctggagcactacgcggcgtacaaggccgaggagacgacggacgcgctcgccggctgcctgcgcatcgccgaggacatcaggcangacgccagcgacacgctgatcacgct

SEQ ID NO: 81288 - DNA, 411 bp, Zea mays
ctttgcatcatccaatactatgtagagagcgcagagggccgtcacctggtccgctcgccgttgtgtccattcggggcaaacacagagacctcgggagcctgccgcacctccatcgagcggaacggaagaatggtgggagaacagagaaactccaccgccatggcccggcgccgcgcctcctctggtgcactggtaccgctgccatgtgccgtgcagtgcgttggtgggatcctgtcgtcgtggtgggaatccagcggccctgggtaattcgggtgtgcgcccacatttggcctcggtgaccagctacaggattccgccgacatctccagtgcaaatcatgtggtcattccgggtggattgatgccgggggaccctgggattgttcaccggaaaatctacacagcggcaaag

SEQ ID NO: 81289 - DNA, 402 bp, Zea mays
ctttgcacaggggagaaaggaattgccaagtccggcaagcctctgtggtacaaggggtcgacgttccacaggatcatcccggggttcatgatccagggaggcgacttcaccaacggcaacggcacggggggcgagtccatctacggcagcaccatcttctccgacgagaacttcaagcacacccacgctaaagccggtacgctgtccatggctaactacgggcccgactccaatggctcccagttcttcatcaccaccgtagacgaaaaccggttgcccaagaagctggacgggcgccacgtggtgttcggcaaggtggtgaaagggatggacgtcgtgcgcaagatcgaagccgagggccagctcaccggcgtgcccaaggccaaggtcgtcatagccaac

SEQ ID NO: 81290 - DNA, 433 bp, Zea mays
tcgtaggtcgttacaacactctagactgagtcgtactcacctcacacaaataataaggaaaggtcccgcccttttcctccgacatccacaggggggaggggaaaacacgtgcattcacccggcggcaataatggcctcggttccggctccggcgacgacgaccgccgccgtaatcctatgcctatgcgtcgtcctctcctgtgccgcggctgacgaccccaacctccccgactacgtcatccagggccgcgtgtactgcgacacctgccgcgccgggttcgtgaccaacgtcaccgagtacatcgcgggcgccaaggtgaggctggagtgcacgcacttcggcaccggcaagctcgagcgcgccatcgacggggtcaccgacgcgaccggcacctacacgatcgagctcaaggacagccacgaggaggacatc

SEQ ID NO: 81291 - DNA, 409 bp, Zea mays
gttcgacatcaagtccggcacgtccatggccgcgccgcacctgagcgggatcgccgcgctgatcaagcacgcgcacccgacctggtcgcccgcggtcatcaaatcggccctgatgacgacggcggagcctaacgacaacctccggaagccgatccaggacgtcaacggcaggccggcgaacttggtcgccattggcgccggccacgtgaacccgaagaaggccatggaccctggcctcgtgtacaacatgacggccatgggctacgtgccgtacctgtgcgggctcaactacacggacgacaaggtgagcacgatcatctacccggagccgccggtgtcgtgcgccaagctgtcaaggctcgaacaggacgacctcaactacccgtccatcagcgtcatcctcaaccag

SEQ ID NO: 81292 - DNA, 405 bp, Zea mays
aaatctgccatcctctccatcacgaagatggcgttcatcagcaatgtcgcagtgaaggcggcgggcgtggccgcgctgcttgtggtcgcagtggtgtcgcctgccgcgcgcgcggcggcggtggcggtggcgggaggggcgccgtcggttccggcgggtccgctggacatcgcgcagctgggcgccaagggcgacggcaagtcggacagcaccccgatgatcctcaaggcgtggaagaacgcgtgcgaggcgacgggggtacagaagatcgtcatcccgccgggcaactacctgacgggcgggctggagctgaagggcccctgcaagtcctccatcatcatccgtctcgacggcaacctgctcggcaccggcgacctcagcgcgtaccaaaggaactggatcgag

SEQ ID NO: 81293 - DNA, 395 bp, Zea mays
actgctattaggaaacagttgcttgaggaattttcagcagatgacagctgtctgggatctcattttactgaaacaccttcacagtatccagcacaaaatgggaaactgcaccataagtctatggaggttattccattgggatttgtttttgaagatgatactctcgctgaagcatctgacagctcagtagaacctcacttgcaacatccgccatgtaacaacattcttgatgtcaatcggcttcttgattcagttttggaaacatctcagcatgttggaaggtcgtcagtgtcaacaaaccaggatctgcctttcaaggacgtagccaaccaatgtgaagcacttctgattgggaagcagcaaaagctatctgcgtgcatgagtgtctgttaaaa

SEQ ID NO: 81294 - DNA, 414 bp, Zea mays
  unsure (1)..(414): unsure at all n locations
aacaagactgacagcgacgatgatgccacagctgcgtagcctcgtcgcgctggtcctcgtggccacggccatagccgccgctcccggcgttgggtttgtcgtcaccggccgcatctactgcgacaactgccgcgccgggttcgagacaaacgtgtcccacgccatccaaggcgcgacggtggagatggagtgccgccacttcgagtcgcagcaggtccacgacaaggcggaggcgacgacgggccccggcggctggtacaggatggagatcagcggcgaccaccaggacgagatctgcgacgtgcgcctgctcaagagccccgaggcggactgcgcccagatcgaccactcccgcgaccgctgccgcgtcncgctcacccgcaacgacggcatcaagcagaacggcgtccgcta

SEQ ID NO: 81295 - DNA, 408 bp, Zea mays
cggcaaccatgcaggggaacacggtgcgcttcaagcgccaagctcgccgcttcaggaacaccatgtggtggaggaacgtcaagctcacagctgcagtgatattcatcctcaccgtaattgtgtacgtcctgctcgcctacatgtgtcgcggcttcaccataccgtcatgctttccgtaatctccatccgtcccggtgccagtgcggaccaccagccctagctctagctgcgtcacaacttggttttccgggttctgtaacagcagcagcggtgctgcagttctttctctcttgtacgagggaaacaacagctcattctgaagttctgcaacaaccagatctgattttttttaaaaaaaaagatggtagtcaaatgggaaagctttcccacctgattttttatcattaa

SEQ ID NO: 81296 - DNA, 410 bp, Zea mays
ggaagacgtgcaggtgacggggtgcacgatcgccggcaccacgaacggcctgcgcatcaagtcgtacgaggactccaagtcgtcgctcaaggccagcaagttcctgtacgagggcatcaccatggacaatgtctcctaccccatcatcatcgaccagaagtactgccccaacaacatctgcgtcaagtccggcgcctccaaggtggccgtcaacgacgtcgtcttcaagaacatccacggcacctccaacacgccggaggccatcacgctcaactgcgccaacaacctgccatgccagggcgtgcagctcgtcaacgtcgacatcaagtacaatggatccggcaacaagaccatggccgtctgcaagaatgccatcggcaagtccatcggcttggcaaaggagctggcgt

SEQ ID NO: 81297 - DNA, 381 bp, Zea mays
cccacgcgtccgatcacgacaagatggcgtgcacaaacaatgcgatgagagccttgttcctcctggtcctcttctgcatcgtgcatggtgagaaggaagagtcaaagggcatcgatgcgaaagcgtccgggcctggtgggtccttcgacatcaccaagttgggcgcctccggcaatggcaagacagacagcacgaaggctgtgcaggaggcatgggcatcggcgtgcggcggcactgggaagcagacaatcctcatacccaagggtgacttccttgtcggacaactcaacttcacaggcccttgcaagggcgacgtgaccatccaggtggatggcaatctgctggcgaccacggacctaagccagtacaaggaccatggta

SEQ ID NO: 81298 - DNA, 402 bp, Zea mays
cgaattcgaaagcatcaggcaccatgaactaaccagagaatcttgacacagtttgtacgacgacggtgatgctgttgatgccgagatttcagaatctttaattctctacactgttctgagttactttatgcactgtttcatccatatcaaattaaatcctgtgttgttcagataataatagaaatcaatacagttatttgtatccttagaatttgctccaaaatcttttttttcaacattgataattgtatgtatactaaataaactcgttcggggaaggaatgactgccctcccggtattatgctaagaagagaccgaaaaacaatggtcccgggcgagaaacttcccgaaccctgacccctatcattaacgagccgacgtcaaccgttcactctgcaacg

SEQ ID NO: 81299 - DNA, 413 bp, Zea mays
atcctccatcaccaccaccaagctcaacaacagccagctcgcgaaaataatgaagagccgcagcatggcatcatcggccgcgctcttggtgctagccctcgcgctagtggcggccaccgccccacaggtagcggaggcaaagaagaagagagcggcggagagcggcgaggcggcggaggcgaagaagatccaggacgacttctgctcgacgctgtgcgagggcaagaaggggacggacctggtcgtgtgcaaggagtcctgcgcgctctcccagcaatccaacctggtgctgtacggcaggatccagtgcaagggcaagtgcaccgagcagaagggcatcacggcgccggccatgaaggtctgccaggaggagtgcgacaaggcgtacgtggtgaaggcggccgaagtcacca

SEQ ID NO: 81300 - DNA, 414 bp, Zea mays
atcgatgcgctcgtcggggccggcgggcaaagccaccagtggtcagagatctagctatggcgccggcgcttctgctgctgcgacttctggcattgattgcgacggcaagggaggcctgcgcggcgagggcgttcgccgcggcgtccaacgcgacggcgcatggggcgacggtggtggccgggaagctgaacgtgcacctggtgccgcactcgcatgacgacgtcgggtggctcaagaccgtcgaccagtactatgtcggatccaacaacagcatccagggcgcgtgcgtgatgaacaccctcgactccgtggtcgacgcgctcgccagggaccccgcccgcaagttcgtcgtcgtcgagcaggcttttttccaaaggtggtgggcagagaaaatcgcaaacattcaggcagtag

SEQ ID NO: 81301 - DNA, 408 bp, Zea mays
cggaggcgctacggacgctggggtccacctctgccgacgaggtgcagcgcatgatggccgagatcgacaccgacggcgacggctgcatcgacttcaacgagttcatcaccttctgcaacgccaacccggggctcatgaaggacgtcgcaaaggtcttctgatccattacatcttcgtccatacgatacaatcgatgatgaacctgcttatatacacacacatgtaccattcagctccaacatatgatttcgatcagcttgcctgcctcgcctggcttaatgctgtccttcgccttcctataagcactaagctattattaggattttgttttatttaacttttttttgtctccaatctaatatatgtggacgttcttttttattcattttccccctattttggttcgat

SEQ ID NO: 81302 - DNA, 412 bp, Zea mays
agtggttgtggccaatccttctcctatctcgtcccggagtcccgggggaaattttgccccagaaacactagcgcgtcggatcacaagcaagggcgaaaattttctgtggctccagcggctgaaggacgctgcggcacccatgtcggccatcgaccgatcaataaataaacatggacagaatcgaattggcaagcaggacgacactggtggccgcgctctacccaagttcggcgagtgggacgtgaacaacccggcgtccgcggacgggttcacggtcatcttcagcaaggccagggacgagaagaaagctcccccgacccaaggccacatcaggaacaacaggtcggtgtcggctgacagcaaggactccagggccgagaagatgacctcctacaacgccaggaccaacgcg

SEQ ID NO: 81303 - DNA, 417 bp, Zea mays
  unsure (1)..(417): unsure at all n locations
accacgcgtccggtcatccgtggcaagaagggatccgggggcatcactgtgaagaaaacagggcagtcactcatcattggcatctacgacgagcccatgactcccgggcagtgcaacctggtggtggaaaggctgggcgactacctgctcgaacaggggatgtaatgacaaccccttcccctggaatgcatgttgatgatgttgctggttccaacttcgttttcagtaataacaacaaagcgaagaccctcctacctaccctatttgcttgagcggctcttgtccgcgccacaagataccaattgttgcgctgggaatattcagttacgatgacccgctttagttcagtttttttgtttttggggttggttcgatcatttggctgtancgtgaatcgcatggacaacagactccaat

SEQ ID NO: 81304 - DNA, 390 bp, Zea mays
acacgacatcacgatgacgttcgagggcaaggtcgggacggtaatggtgaacggcaaggcgtacagcttcgagaagatgcactggcactcgccgtccgaccacaccatcaacggccagaggttcccgctggagctgcacctggtccacaggagcgccgacggcgcgctggccgtcatcgggatcctctaccagctgggcgccccggactccttctactaccagctgaagcggcagctgggcgacatggccaaggaccggtgcagcttcggcgaggaggagtcgcacgagggcgtcgccctcatccacctgcgctcgctgcagaagcgcaccggcagctacttccggtacacgggctccctcaccgtgccgccctgcaccgagaacgtcgt

SEQ ID NO: 81305 - DNA, 395 bp, Zea mays
ggtcgacgcacgcgactaacatgagatcatcgaagacgttcgagggcaaggtcgggacggtaatggtgaacggcaaggcgtacagcttcgagaagatgcactggcactcgccgtccgaccacaccatcaacggccagaggttcccgctggagctgcacctggtccacaggagcgccgacggcgcgctggccgtcatcgggatcctctaccagctgggcgccccggactccttctactaccagctgaagcggcagctgggcgacatggccaaggaccggtgcagcttcggcgaggaggagtcgcacgagggcgtcgccctcatccacctgcgctcgctgcagaagcgcaccggcagctacttccggtacacgggctccctcaccgtgccgccctgc

SEQ ID NO: 81306 - DNA, 387 bp, Zea mays
ggtcgatacaagcctctagaatggatcatatcagaagcatcagccatgtcgaactcggcgtcgggaatggccgtttgtgacgaatgcaaactcaagttcctggaactcaaggcgaagaggagcttccgtttcatcgtgttcaagatcaacgagaacgtgcagcaggtggtggtggacaggcttgggggaccaggtgaaagctacgatgcgttcagggcctgctttcccgccaacgagtgccgctacgcggtgtttgattttgactttgtcactgatgagaactgccagaagagcaagatcttcttcatctcttgggccccagatgcatcgagggtgagaagcaagatgttgtacgcaagctccaaggaccggttcacagaggagctc

SEQ ID NO: 81307 - DNA, 358 bp, Zea mays
aggagcatagggaggagggcaacgagggcgacgggttctacggcggcataaggaagctccgcggcaaggatgacatctccaagtggaggcagctgtggccaacagacgtcctggagtaagcaggagccgcatcccttctcacaccgagattgatccatcgctcaaatgacacgcctttctttcatcatattgaccaaattcgtcgtctctgtcgcgctgttgtaaacgggttagcagaagaacacacagggtgacaacaaatccttgttcggttatttctaatacatatggattggatgagattggaaaaaattaagaagaagtttaacttgtttgcgattcaaacacatccaatctc

SEQ ID NO: 81308 - DNA, 379 bp, Zea mays
tcgtgggtcgatacaagcctctaaactgagtcctactagcatagattcgttccacgcctacctcctgccctcgcccgtgctctcagatctcgcgcgcgccccgcaaagggtaactttgagccatgggcacagttgtggatgctccagcagttgtggctgaagaggtcactgagaacatgttgggtggtaagaaagttacagctgtatttgttctaggtggtcctggaagtggaaaaggcacacagtgtgccaacattgtggaacactttggattcacccatcttagtgctggagatcttttgcgtgcagagattaaatctggctctgagaatggaaccatgattgaaaacatgataaaggagggaaagattgttccatc

SEQ ID NO: 81309 - DNA, 391 bp, Zea mays
ctctaaactgacgtcctggtaagacgcaggcccgccggcgacgatcgaggagggaggaacgccagagacccggcggcggcgacgatggctccgcgcagctcatcggcggcgacgtgcctgtgcctcgctctcgccgcggccacgctggcgctggcccacggggcgcaaggaggaggaccatcggcatcggcggcggacctggacaaggtcacggccgagaccttcctcgacatcgagatcgacggcaagcctgcaggccggatcgtgctgggactgtttggggacaccgttcctaaaacagcagagaacttccgagcactttgcacaggggagaaaggaatggccaagtccggcaagcctctatggtacaaggggtcgacgttccacagga

SEQ ID NO: 81310 - DNA, 416 bp, Zea mays
agatcaagtcctcctcattgcaaaggtggaagtgtttcagcatgctttgcaaaatactgagggaaatgaccttgcgaaggttctgtggctgaagagtcgaacttcggaagtatggcttgagcgccgcacaaactacgctagaagcctggctgttatgagcatggttgggtatttgcttggtttaggagatcggcatccaagcaaccttatgttagatcgctatagtggaaaaatattacacatcgacttcggagattgctttgaggcttcaatgaatcgagaaaagttccctgaaaaagtaccattccgtttgactcgaatgcttgtgaaagctatggaagttagcggtattgagggtacattccgaacaacttgtgaaaatgtgatgcaagtccttcgcacaaacagagacagcg

SEQ ID NO: 81311 - DNA, 397 bp, Zea mays
acgataagacggcatacacaaacaatgcgatgagagccttgttcctcctggtcctcttctgcatcgtgcatggtgagaaggaagagtcaaagggcatcgatgcgaaagcgtccgggcctggtgggtccttcgacatcaccaagttgggcgcctccggcaatggcaagacagacagcacgaaggctgtgcaggaggcatgggcatcggcgtgcggcggcactgggaagcagacaatcctcatacccaagggcgacttccttgtcggacaactcaacttcacaggcccttgcaagggcgacgtgaccatccaggtggatggcaatctgctggcgaccacggacctaagccagtacaaggaccatggtaattggatcgagattctacgcgtggataacct

SEQ ID NO: 81312 - DNA, 339 bp, Zea mays
agactacctgcttgaacagggcatgtaactactacgtaccagctggaatgcatgtcgacgacgatggtttcgagtttcgacttccaataatagtaacaacaaagcaaaggccttcctcccggcgtatttgctttggctcttctcctccacgccataagatatctagcaattggtgactcgccttaattagttcgctttgcttttgaggttgactcgaccattttgctgtagcgtgaattgcatggacatgcaacgctccaatggcctttggaatgtggaaattttttttcccgtttctgtatttttcctataaaatgaagtaatgaactggttcttata

SEQ ID NO: 81313 - DNA, 386 bp, Zea mays
  unsure (1)..(386): unsure at all n locations
tcgttggtcgatacaaccctctaaaatgagtcatgatacagatacccggcggcggcgatcgatggctccgcgcagctcatcggcggcgacgtgcctgtgcctcgctctcgccgcggccacgctggcgctggcccacggggcgcaaggaggaggaccatcggcatcggcggcggacctggacaaggtcacggccgagaccttcttggacatcgagatcgacggcaagcctgcaggccggatcgtgctgggactgtttggggacaccgttcctaaaacagcagagaacttccgagcactttgcacaggggagaaaggaattgccaagtccggcaagcctctgtggtacaaggggtcgacgttccacaggatcatcncggggttcatga

SEQ ID NO: 81314 - DNA, 368 bp, Zea mays
accagcgccggatcaccaaccggtcggggctgagcgaggacacgtacctcccggaggtcgtgctcaacatcccgcacaacccgtcaatggccagcgcgcgggacgaggccgagatggtcatgttcggcgcgctggacgagctgttcgccaggaccggggtgcggcccaaggagatcggcgtgctggtggtgaactgcagcctcttcaactcgacaccgtcgctgtccgccatggtcgtcaaccactacaggctccggggcaacgtctcgagctacaaccgctgcggcatgggctgcagcgcggggatcatcgccgtggatctcaccagggacctgcgtcagtgccagcggggcaactacaccgtggtg

SEQ ID NO: 81315 - DNA, 349 bp, Zea mays
aagtcatctcctccatcaccaccaccaagctcaacaacagccagctcgcgaaaataatgaagagccgcagcatggcatcatcggccgcgctcttggtgctagccctcgcgctagtggcggccaccgccccacaggtagcggaggcaaagaagaagagagcggcggagagcggcgaggcggcggaggcgaagaagatccaggacgacttctgctcgacgctgtgcgagggcaagaaggggacggacctggtcgtgtgcaaggagtcctgcgcgctctcccagcagtccaacctggtgctgtacggcaggatccagtgcaagggcaagtgcaccgagcagaagggcatcac

SEQ ID NO: 81316 - DNA, 273 bp, Zea mays
aagcctctgaggtgacgtcgtattacctcgtcgtcgtctcactcaccccgccttcacgcctccctcaccaaataaagtcgcgcccttttccgacattcacaggggggacaggaaatcagcgggcatggcctcgattccggcgacgaccttcgccgtcatcttatccgtcctcttctgtgccgcggctggcagcgccgttcacaatgagctccccgactacgtcatccatgggcacgtctatttccaacactggcgctcccggttcgtgaccaa

SEQ ID NO: 81317 - DNA, 397 bp, Zea mays
agtatcaaggctctcctctcggacgtctgataggcaacccaataatggcagaagtcctatcaggatctcatgaacaccgtctaagctctgccttagatggacactacgacgagaagaggaaatccaatgtggaatacacagaggacgagaagaaagccgtgatcgcggctctgaaaaagaaggctttgagcgcctcacagaagtttaggcattccatgaagagggggaggaagagcagcatggtgatgtccatctcgattctggatgagcgtgaacctgaggaggtgcatgctgtggatgccttccgccagcttcttgtacttgaagagctgctaccatcgcagcatgatgactaccacatgatgctaagatttctcaaggcaagaaagtttgatat

SEQ ID NO: 81318 - DNA, 410 bp, Zea mays
cgcactgccatgcgcgcggggtgatgcaccgggacatcaagtgcgccaacctgctggtgaacaacagcggcgagctcaaggtggcggacttcgggctggcgaacctcttcgcgccggcgccggcggcgccgctcaccagccgggtggtcacgctctggtaccgcccgccggagctgctcctgggcgccacggcgtacgagccctccgtcgacctctggagcgccggctgcgtcttcgcggagatgcacgcgcgccggcccgtcctgcatggccgcaccgaggtcgagcagatccacaggatcttcaagctctgtggctcgccgcccgaagacttctggcgccgcttggggctctcccacggcgccgtcttccgcccgcagcaaccttacccgagccgcctccgggacaac

SEQ ID NO: 81319 - DNA, 402 bp, Zea mays
  unsure (1)..(402): unsure at all n locations
ccaggactaggactcgcgggtcgatacacgcctctatgatgagtcatatcacgggcatgtggagcgtccgctccaacatctgggagaggcagtacctcggcgagcagctgtacgtgagcgtcatcccgccggagcggtcgctcagggacgagtacaacatgccggagaccagcctccgctgcggcaaggtcgtcggcctgccgatgccaccgtcctaccgcgccgtctagagcgtcgaccgatcgcgcacggtgctgtacacaactaaaggagagcgagaggggactttttctcgcgtttccttctctagccagccttgtctgtcccctcctcgtttattctctctctctcttttttttcgttcgcttccgaggaataatagccaaaanaaaaataaacaat

SEQ ID NO: 81320 - DNA, 381 bp, Zea mays
ctctagaataagtcgtatgtaccagcgccggatcatcgagcggtcggggctgggcgaggacacgtacctcccggaggcggtgctcaacatcccgcccaacccgtccatggccagcgcgcgggaggaggccgagatggtcatgttcggcgcgctggacgagctgttcgccaagaccggggtgcggcccaaggagatcggcgtgctggtggtgaactgcagcctcttcaacccgacgccgtcgctgtccgccatggtcgtcaaccactacaggctccggggcaacgtcgcgagctacaacctcggcggcatgggctgcagcgcggggatcatcgccgtggacctcgccagggacctgcttcagtgccaccggggcaacctacc

SEQ ID NO: 81321 - DNA, 395 bp, Zea mays
tacacacacgtctgcaattcgttcctttcacaccggagaccggcgagcagagccgcgcacagcagaacgcggaagcaagaggaggcgatcgactactcgaccagccctctccgctcttgtctccgatggcggctcgcgtcctcgcggccctcgcccttgccctcgccctcgccctcgtcgccgtacccgctcccacgcgggcgtccaacgacgagggggacgcgctctacgcgctgcggcagcggctgtcggaccccaacggcgtgctgcagagctgggatcccacgctcgtcaccccctgcacctggttccacatctcctgcgaccaggtcggccgcgtcgtccgcctggacttgggcaactccaacgtctccggctccatcggccctgagctc

SEQ ID NO: 81322 - DNA, 434 bp, Zea mays
ctcgtgggtcgatacaagcctctaaactgagtcgtatcacggcgcggcccaacccgcaggggtcgtaccactacggccagatcaacatcacccgcaccatcaagctcgccatgggccgcggcaaggtcgacggcaaggagaggttcggcttcaacggcgtgtcgcacgtggacccggaaacccccgtgaagctcgccgagtacttcaacgccagcgacggcgtgttcaagtacaacctcatcggggacgtgccgccctccaacacggcccccaccaagatggcacccaacgtcatcagcgccgagttccgcacgttcattgaggtggtcttcgagaaccccgagaagagcatcgacaccatccacatcgacggctacgccttcttcgccgtcggcatggggcccggcaaatggacggcagcgtcgcggagtacg

SEQ ID NO: 81323 - DNA, 339 bp, Zea mays
acggacgcttgggcgacgggcagggagccctggtgtggaacaagaacgagtgccagcgttcctacaactgcaaaatcctccccaacagcctggtgctggacttcgtgacgaacgcccagatccgcggcatcacgctgctgaacagcaagttcttccacatgaacatcttcgggagcaagaacgtggtgatcgacaaggtgacgatcaaggcccccggcaacagccccaacacggacggcatccacatcggcgactcgagcaacgtgaccatcagcggcaccaccatcgccgtcggcgacgactgcgtctccatcggccccgggagcaagaccatccgcg

SEQ ID NO: 81324 - DNA, 417 bp, Zea mays
ctctacactacgccctggtacacttcggctggcgcaccgtctccgacggcgacggcatcaccgtcttcggctccaccaacgtgtggctggaccacctctccctctccaactgccaggacggcctcatcgacgtcatcgccaagtccaccggcgtcaccatctccaactgccacctcaccaaccacaacgatgtcatgctcttcagctccagcgacaagcatcccgaggaccagatcatgcagatcactgtcgccttcaaccacttcggcagaggcctcgtgcagaggatgccaaggtgccgctggggcttcttccacgtggtcaacaacgactacacgcactggctcatgtacgccatcggcggcagcaaggcccccaccatcatcagccagggcaaccgctacatcgcgccgccca

SEQ ID NO: 81325 - DNA, 417 bp, Zea mays
ctctagaataattagtgcaagcctcttctttggcatgggtgcatctggcgtgatacctgttcttcacaagctggtcctcttctggcaccaaccggaggcattgcacacgaccggatacgaaattctgatggggctcttctacgggctgggagcattggtatatgcggcacgggtacctgagcgctggatgcctgggaagtttgacatcgccgggcacagccaccagctgttccacgtcttggttgttgccggagcctacacacactaccacgcagggcttgtgtacctcaagtggagagacctgcaaggctgctgaaaggtgctgcatcgttgaggatgtggatagattgtagattccgtgaattcaggctgaaggtcatggtctgttgtaaattgtaacagtaatcatgaaacaat

SEQ ID NO: 81326 - DNA, 413 bp, Zea mays
taagttcatgcatgccagcgccacagcctctcctgctgtcgctgctggtcgccgttgctaccggtggccgccgatgtcgccaacgccggccacgccaagcccctgacgcctggcgggcgcgtggtacaccacaaccacggcaagttcacggccgggccgtggaaacccgcccacgcgaccttctacggcgggcgggacgggtccggcaccacggcgggcgcgtgcgggtacaaggacacgcgcgcgcaggggtatggcgtgcagacggtggccgtgagcacggtgctgttcggtgacggcgcggcctgcggcgggtgctacgaagtgcgctgcgtggacagccctagcgggtgcaagcccagcgcggcgacactggtggtgacggcgaccgacctgtgcccgcccaacgacca

SEQ ID NO: 81327 - DNA, 352 bp, Zea mays
gatacaagcctctaaaatgagtcgtcttgagcgaactggagacccgatgccgtctacacttccaacgtccaattctactagactttgaattcccttcgattcatccggcacagcgggctatggaccttcagcagcaagctaattaagttggcagcatgcaccgctaaccttatatactactgagacttccaaattctagtatatgtaatccttttgttcgggttcatgatcgaattccaaagagtggaaaacaagcaaaaggttaaatatacatgccatttttggaggcatttttttcatgagggcatgtttcgatatatggaccactaaatatacatatcatttactttcc

SEQ ID NO: 81328 - DNA, 424 bp, Zea mays
gtgggacgacacacgcctctacacagcgtcgcagtatcccggagcccagggagcggaggcgggcgggccggcgggcggccatggacgtggactgcgtctcgctgcccgacgccccggcgggcgacgtggatggcggcgccgcccggccgtggcccaaggccgtgaccaacggcggcgtccacgagctgctggagtgccccgtgtgcaccaactccatgttcccgccgatccaccagtgccccaatggacacacgctgtgttccacatgcaaggccagagtacacaaccgttgccctacctgcaggcaagagctgggcgacatcaggtgcctggcgctggagaaagtcgccgagtcgctggagctcccctgcaggtactactcgctggggtgccccgagatcatgccttactacagcaaagataa

SEQ ID NO: 81329 - DNA, 381 bp, Zea mays
cagagacgaacggcgtggtatcctcctgcctcagctgcttcctagctgggggtgctctctaccgtttcgagtacgcagtcaacccggcgctcttcctcgccaaagcgcgaggagggacgtgcacgctcgctccctctgaccctgacgacacggtggctcgccgcgccagatacctgctgagcaacggtttcaggtgctacaacctgttcaagagcaactgcgaggacttcgcgatatactgcaagactggccttcttgtcgctgagcagggcgttgtcgggcagagcgggcaggctatctccatcatcggtggacctctcgccgcggtggtctcgaccccattccgcttggttaccacgaacatctatgggatggcggtga

SEQ ID NO: 81330 - DNA, 373 bp, Zea mays
ggtcgttacaattctctagagtgagtcatattacggcggcgatcgatggctccgcgcagctcatcggcggcgacgtgcctgtgcctcgctctcgccgcggccacgctggcgctggcccacggggcgcaaggaggaggaccatcggcatcggcggcggacctggacaaggtcacggccgagaccttcttggacatcgagatcgacggcaagcctgcaggccggatcgtgctgggactgtttggggacaccgttcctaaaacagcagagaacttccgagcactttgcacaggggagaaaggaattgccaagtccggcaagcctctgtggtacaaggggtcgacgttccacaggatcatcccggggttcatgattc

SEQ ID NO: 81331 - DNA, 422 bp, Zea mays
tcgcgggtcgacacaagcctctagactaaggcgtctgacttcgggctgtccaaggacgggcccgggatgaaccagctgcacgtgagcaccgccgtgaagggcagcttcgggtacctggacccggagtacttccggtgccagcagctgacggacaagtccgacgtgtactccttcggtgtggtgctgctggaggcgctgtgcgcgcggccccccatcgacccgcagctgccccgggagcaggtcagcctggcggagtggggcatgcagtggaagcgcaagggcctcatcgagaagatcatggaccccaagctcgccggcaccgtcaacccggagtcgctcgccaagttcgccgagaccgccgagaagtgcctcgccgagttcggcagcgaccgcatctccatgggcgacgtgctgtggaacct

SEQ ID NO: 81332 - DNA, 417 bp, Zea mays
tcgtcggtcgatacaacccactacactgcgtcgtctcactcaccccgccttcacgcctccctcaccaaataaggtcccgcccttttccgacattcacaggggggacaggaaatcagcggccatggcctcgattccggcgacgaccttcgccgtcatcttatccgtcctcttctgtgccgcggctggcaccgccgtcgacaacgacctccccgactacgtcatccagggccgcgtctattgcgacacctgccgcgccgggttcgtgaccaatgtcaccgagtacatcgcgggcgccaaggtgaggctggagtgcaagcacttcggcaccggcaagctcgagcgctccatcgacggggtgaccgacgggaacggcacgtacacgatcgagctcaaggacagccacgaggaggacatctg

SEQ ID NO: 81333 - DNA, 402 bp, Zea mays
cacgcgtccaacgacatcctcgtcagaccactcaacttcacaggcccatgcaagggcgacgtgaccatccaggtgaatggcaatctgctggcgaccacggacctaagccagtacaaggatcatggtaattggatcgagattctacgcgtggacaaccttgtcatcaccggcaagggaaagctcgacgggcaggggccagccgtgtggagcaagaactcctgcgtcaagaagtacgactgcaagatccttcccaactcgctggtgatggacttcgtgaacaacggggaggtgtccgggatcacgctgctcaactccaagttcttccacatgaacatgtacaagtgcaaggacatgctgatcaaggacgtcaatgttacggccccggggacagcccaaacacga

SEQ ID NO: 81334 - DNA, 333 bp, Zea mays
agaccactcaacttcacaggcccatgcaagggcgacgtgaccatccaggtgaatggcaatctgctggcgaccacggacctaagccagtacaaggatcatggtaattggatcgagattctacgcgtggacaaccttgtcatcaccggcaagggaaagctcgacgggcaggggccagccgtgtggagcaagaactcctgcgtcaagaagtacgactgcaagatccttcccaactcgctggtgatggacttcgtgaacaacggggaggtgtccgggatcacgctgctcaactccaagttcttccacatgaacatgtacaagtgcaaggacatgctg

SEQ ID NO: 81335 - DNA, 349 bp, Zea mays
ctgagacgcggtcgcggtccctggcgcacagggcgcggggcccctgcacggcgaccaaccccatcgaccagtgctggcggtgccgccgcgactgggcccgcgaccgcaagcgcctggccaggtgcgccatgggcttcggccacaggaccaccggcgggctggccggcaagttctacgtggtgattgaccccagcgacgacgccgccgacctcgtcacccccaggaagggcacgctccggcacgccgtgacccgggcccgggcgctgtggatcaccttcgcgcgcgacatggtgatcgagctctgccaggagctcatcgtgagcagcgacaagaccatcgacgggcgccg

SEQ ID NO: 81336 - DNA, 407 bp, Zea mays
gcgggtcgatccaagcctctaaacagacgcctggtacgcgctttgatagcagatgagagtatcttaatttatggccagcagaaactgaacacctcattgtcaaagccccggcatctcacattgtgtagcatggaaaacagcttggatggtccaatttcgctgaagcagcagatgggtttaaggtcgctgatgctcttcaaaagcccaaatgtcagagcaatagatcttctcatggagtcagcttcatgcttgcgtgtattagatttgagcaagacagcagtggaggccatcccgaaatccattggtaacttggtacatttaaggtacctcaatcttgatggggctcaagtcagagacataccttcttccattggatttctcataaacttgcagacctttgaaccttc

SEQ ID NO: 81337 - DNA, 389 bp, Zea mays
ttcgggatccaaacacccgcttaccgaatggtcgttttcttccgcctctcttcaattttaagccccatgagctgaagaacgtgccggcggatttcatggtgaaattggtccctgagcatgcacggaagcaatgtgccttcgtagggtggtgatctctggataagaggatgacgactcgatgattagctgaggaccaagttaatgtctgttagaaactgccggagatcgacattgccagatgtggtgtggtataagataggcaatatgtgtgattattttttgttcgaggttatcaccccccttgccccagaaaagatgagaagatgtcgatgtaacaagccctctgcgcttctgtaagtagatgagtgttgctgcatgccccctgggta

SEQ ID NO: 81338 - DNA, 393 bp, Zea mays
agatcaagcacgctccacctcacccgccggacagcagctgctggtcgccatgctagcagtggtcgccgatgtcgccaacgccggccacgccaagcccctgacgcctggcgggcgcgtggtacacgacaaccacggcaagttcacggccgggccgtggaaacctgcccacgcgaccttctacggcgggcgggacgggtccggcaccacggcgggcgcgtgcgggtacaaggacacgcgcgagcaggggtacggcgtgcagacggtggctgtgagcacggtgttgtttggcgatggcgcggcctgcggcgggtgctacgaggtgcggtgcgtggacagccccagcgggtgcaagcccgacgcggcggcgctggtggtgacggcgaccgacctgtg

SEQ ID NO: 81339 - DNA, 444 bp, Zea mays
ctcgcgggtcgatacaagcctctaaagtgagtccatactgtcacggggtgggagggggtgctggcgccaacatcagcgcccttcgcgcccacgatggcacccgtcacggccgcctcctcgcagccgccgacctccctcttggcggcctcggcctccccactgacactggcctctattacacggagatcaagctcgggacgccacccaagcactactacgtccaggtcgacaccggcagcgacatcctctgggtcaactgcatcacctgcgagcaatgcccccacaagagcgggctcgggttagacttgacgctttacgaccccaaggcatcctcgaccgggagcatggtgatgtgcgatcaggcattctgtgcagccacctttggcggaaagctgccgaagtgcggcgccaatgtgccctgcgaatatagtgtcaactacggtg

SEQ ID NO: 81340 - DNA, 399 bp, Zea mays
ttacaaccctctaatctgagtcggatgaaaccagaacatgcccagcagggcgctgacgttcagccagctgggcgccgcgaccgacgggttcagcgagcagaacctgctgggagaaggcggcttcgggcgggtgtacaaggggctcctccaggacaccagagaggtcatcgccgtgaagcagctggacaggaacgggttccagggcaaccgcgagttcctcgtggaggtgctgatgctcagcctcctgcaccacccgaacctcgtcaagctgctgggctacagcaccgactccaaccagcggatcctggtgtacgagtacatgcccaggggctcgctggatgaccacctcctggacctgcccccgagctggaagcccctgccgtggcacacgccgatgcg

SEQ ID NO: 81341 - DNA, 395 bp, Zea mays
acaagcctctatcgtgattcgatacatggataacctggtcatcaccggcaagggaaaccttgacgggcagggcccagctgtgtggagcaagaactcctgcaccaagaagtacgactgcaagatccttcccaactcgctggtgatggacttcgtgaacaacggggaggtgtccggggtcacgctgctcaactccaagttcttccacatgaacatgtaccggtgcaaggacatgctgatcaaggacgtgaccgtgacggcgcccggggacagccccaacacggatggcatccacatgggcgactcatccgggatcaccatcaccaacaccgtcattggcgtcggcgacgactgcatctccatcgggcccgggacctccaaagtgaacatcaccgacc

SEQ ID NO: 81342 - DNA, 336 bp, Zea mays
gtccgtccaagcctctagactacgtcctcataccgccttcacgcctccctcaccaaataaggtcccgcccttttccgacattcacaggggggacaggaaatcagcggccatggcctcgattccggcgacgaccttcgccgtcatcttatccgtcctcttctgtgccgcggctggcaccgccgtcgacaacgacctccccgactacgtcatccagggccgcgtctattgcgacacctgccgcgccgggttcgtgaccaatgtcaccgagtacatcgcgggcgccaaagtgaggctggagtgcaagcactttgggaccgggaaacttcaacgctccat

SEQ ID NO: 81343 - DNA, 387 bp, Zea mays
attatcagttctttctctaccaactgatccgtgctctgaaatacatccacacagctaacgtttatcaccgggacctgaagccaaagaatatattagcaaattctaactgcaaactgaaaatttgtgattttggactagcacgagttgcattcaatgataccccaacaacgatcttctggacagattatgttgcaacaagatggtacagagctccagagctctgtggatccttcttttcaaagtatacaccggccattgacatttggagcattggatgcatctttgctgaggtgttaacagggaaacctttgtttcctggtaaaaatgttgtccatcagttagacttaatgactgaccttctaagcacgccatcgatggatacgattt

SEQ ID NO: 81344 - DNA, 341 bp, Zea mays
tcgtcggtcgatacaagcctctagactaactcctattagcgtggccatgccgggacatggggaaaggcacttggtgcagaggtctatgactgcaacaacatggtggagcaagagctgcctggaggcgggctcctcctgtaccaaagcttctgtgctgctgaagacgctgttgctaactcgcccaaatctgttttccactgctttgacgggcaaaacgttgagaatgctcctcctcctatgaagaaggactacaaactggctaatcttctatgctgggaggaggaagcggattccatggaggagaaagcgggagtgcttgatgagtaagacagggttctggg

SEQ ID NO: 81345 - DNA, 202 bp, Zea mays
ctctaaatggcgtcggcgacgactgcatctccatcggccccgggacctccaaggtgaacatcaccggcgtgacctgcggccctggccacggcatcagcatcggaagcctagggcggtacaaggacgagaaggacgtcacggacatcaacgtcaaggattgcactcttaagaagacgatgttcggcgtccgcatcaaggcgta

SEQ ID NO: 81346 - DNA, 374 bp, Zea mays
gggtcggtccaagcctctacagtgactccactaagcacgaccacgttatgctgttcggggccagcgacgccgcgtccaaggacagggagatgcaggtcaccgtcgccttcaaccacttcggcaaggggctggtgcagcggatgccgcgctgccgtcacggcttcttccacgtggtgaacaacgactacacgcactggctcatgtacgccatcggcggcagccggaaccccaccatcatcagccagggcaaccgcttccgcgccgtcgacgacagcaggttcaaggaggtgaccaagcgggagtacacgcagtacagcgagtacaagaactgggtgtggaagtcgcaggacgacctgttcctcaacggcgccttc

SEQ ID NO: 81347 - DNA, 382 bp, Zea mays
ctctacaggttctcgacgaacgtgtccaggagcgtggccggcgcgacggtggaggtggtgtgccggcacttcggcgcgtccaaggagacgctcaaggcggaggcgacgacggacgacagcgggtggtacaagctggagatcgaccaggaccaccaggaggagatctgcgaggtggtgctggcccggagccccgacccggggtgcgcggagatcgaggagttccgcgaccgcgcccgcgtcccgctcacctccaacaacggcatcaagcagcagggcgtccgctacgccaaccccatcgccttcttccgcaaggacccgctcaaggagtgcggcgccctcctcgagaagtacgatctcaaggacgcctccgagacgccatgat

SEQ ID NO: 81348 - DNA, 435 bp, Zea mays
tacaaccatctacactgacgtcctaatataacttacagaaggatccatggcccaaggtctcccagagcgcaaaggatcttgtcacgaggatgcttgacccagatccttgtacacggttgacggcaaagcaagtccttggttagtagccttaagttcaatcttataagtttactgaaaaccaaatagaacgggcaggctgcatccgttcctagaaaaaaaaacaaggtttttcttgaagagcctgttattgccatcattgaagaaaaaaaaccgaaatggtttaatcatgctgcgtatttaaccataagcactttatcgtggaaaaaaacagagcacccttggctcaagaatgctgataaggcttcaaatgtgtcactcggaaaggttgttcggtccaggctgaaacaattgtcctctaagaacaagcttaagaag

SEQ ID NO: 81349 - DNA, 354 bp, Zea mays
aagatcacgacaagatggcatgcacaaacaatgcgatgagagccttgttcctcctggtcctcttctgcatcgtgcatggtgagaaggaagagtcaaagggcatcgatgcgaaagcgtccgggcctggtgggtccttcgacatcaccaagttgggcgcctccggcaatggcaagacagacagcacgaaggctgtgcaggaggcatgggcatcggcgtgcggcggcactgggaagcagacaatcctcatacccaagggcgacttccttgtcggacaactcaacttcacaggcccttgcaagggcgacgtgaccatccaggtggatggcaatctgctggcgaccacggacctaagcc

SEQ ID NO: 81350 - DNA, 397 bp, Zea mays
cacgcctctagatttactcctcatcatctcaccctccctccctcacacaaataataaggaaaggtcccgcccttttcctccgacatccacaaggggggaggggaaaacacgtacattcacccggcggcaataatggcctcggttccggctccggcgacgacgaccgccgccgtcatcctatgcctatgcgtcgtcctctcctgtgccgcggctgacgacccgaacctccccgactacgtcatccagggccgcgtgtactgcgacacctgccgcgccgggttcgtgaccaacgtcaccgagtacatcgcgggcgccaaggtgaggctggagtgcaagcacttccgcacccgcaagctcgagcgcgccatccacggggtcaccgacgcgaccggcacta

SEQ ID NO: 81351 - DNA, 395 bp, Zea mays
tacccacacttctggcacccgccaccggccggatcgacagcaccgatcaccctgaccgtctgcgcgcggcggctctcacacaccggcgacacgcagggcgcgcataggcgagggcctcccccccggcgagggatggtgtggtcggctgggatggcaacaatgcgaggcgcctccgccgccgcgctactggtgctggcgctcgccgccgccgtggcgcgcgcggaggacccctaccacttcttcgagtggaaggtgacgtacgggacgaggaccatcatggggacggcgcagaaggtgatcctcatcaacgacatgttcccgggccctaccatcaactgctcatccaacaacaacatcctcgtcaacgtgttcaacatgctcgaccagccgctcct

SEQ ID NO: 81352 - DNA, 387 bp, Zea mays
gactcgcaggacgacacaagcctctacactgactcctattatgttcttcagcacgggctagctagctccctccctcccagccatggcgacgccggacaacaaggggcacgggcatccgctgcccaagtttggggagtgggacgtgaagaatccggccacgtccgagggcttcaccgtcatattccagaaggcccgcgacgacaagaagaccaccaccggccctggggctgggaacgcgcgcgcaggcattccgccggccttcaggaacggcggcggcgacggcgggtacaggcccgacttcggcgacggcaaccagtacacgccgcccaaacggaagaagtgggccttctgtggctgctgaaaccaagctcgctgtgctgctgtgct

SEQ ID NO: 81353 - DNA, 207 bp, Zea mays
tacaacaccctagagcgagtcgtctcactagtggcggccaccgccccacaggtagcggaggcaaagaagaaaagagcggcggagagcggcgaagcggcggaggcgaagaagatccagaacgacttctgctcgacgctgtgcgagggcaaaaaggggacggacctggtcgtgtgcaaggagtcctgcgcgctctcccagcagtccaac

SEQ ID NO: 81354 - DNA, 353 bp, Zea mays
agcgtcaagtctgacatctactccctcggcgtgctcctgctgcaggtggtcaccgcgcggccacccatggggctcacgcatcacgtcgagaaggccatcgacgcgggcacctttgagcagatgctcgacatcaccgtcaaggactggcccgtcgaggaggcgctcggctacgccaagctcgcgctcaagtgcacggagatgcggcggagggaccggccggacctcgccacagtcatactgccggagctcaaccggttaaggaacctcggccacgcgtacgaggcacgcatgagcgccgccagggccaacggtggaagtggagagagtggtgcccagatcagcggggactcgac

SEQ ID NO: 81355 - DNA, 391 bp, Zea mays
tacccacgcgtccgagagcaccctgtgctgctgaccgaagccccactcaacccaaaggctaacagggagaagatgacccaaatcatgtttgagactttcaatgttcctgccatgtatgtcgccatccaggctgtgctttccctgtacgccagtggacgtacaactggtattgtattggactctggtgatggtgtcagccacacagtgccaatctatgaaggttatgcccttcctcatgccatcctgcgccttgaccttgctgggcgtgacctgactgacagcctgatgaagatcctcactgagagaggttactccttcaccacctctgctgaacgcgaaattgtaagagacatcaaggaaaagcttgcatatgtggctcttgaatacgacc

SEQ ID NO: 81356 - DNA, 279 bp, Zea mays
acaagcctctagagtgattcttaatgctttcgagtagcacctccaggtcctgggttcgatccccctcgggggcgaatttatggcttggttaaaaaaatcccctcgttgtgccccacccgctcccgggttacgtcctgcgcgccaccctccggctgggccgttgcagagtgggcggtgacggcccgctagtgatggggggccaaggtttggggattttctcggccgggaccatgagggcggtctttccctccccggccgagttttatataaacaattttt

SEQ ID NO: 81357 - DNA, 372 bp, Zea mays
ctcgcgggccgacccacgcatctaggcccggtcaattgcccggccggaccttcgcccatgatcacagggagaacatcctttgcttcccatggccatgaagaagaaccaagactcccagttggtcatgggccggtacaggctgggccaactcctcggcagcggcaacttcgctaaggtgtacaaggcccataaggtggccaccggcgaggctgtggccgtcaaggtgctggacaaggatgctgtgcaccgctccggcatggcggagaaggtgaagaccgaggtcgacgtgatgcggcgcgtgcgccacccgaacgtcgtccgcctccacgagatgatggccacgcggtccaagatctacttcgtcatggaata

SEQ ID NO: 81358 - DNA, 371 bp, Zea mays
ctaggatgagtcgtattaagagagagagacgcaggcccgccggcgacgatcgaggagggaggaacgccagagacccggcggcggcgacgatggctccgcgcagctcatcggcggcgacgtgcctgtgcctcgctctcgccgcggccacgctggcgctggcccacggggcgcaaggaggaggaccatcggcatcggcggcggacctggacaaggtcacggccgagaccttcctcgacatcgagatcgacggcaagcctgcaggccggatcgtgctgggactgtttggggacaccgttcctaaaacagcagagaacttccgagcactttgcacaggggagataggaattggcaagtcgggcaagcctctatgg

SEQ ID NO: 81359 - DNA, 202 bp, Zea mays
tacaacactctatagtgatgtcgtattattggggacatgaagggccatgggatgacccctgatgtcaccacctacaacaccctgctgaacgcttgggtgcttgccggtgatctggaaagtgcccccaaggtgtttgatgaaatggctggggaggggaccgaccggaactcggtctcgtacaatgtcatgatcaaggggtacg

SEQ ID NO: 81360 - DNA, 212 bp, Zea mays
tacaagcctctaaacagacgtcctataaaatcaagatgccatattagctgcatgcctatatattgcttgtagacaagaagatcggcctagaactgtgaaagaaatatgttcagttgctaatggggccacaaagaaagaaattggcagagcaaaagaatttatagtgaaacaactggaagttgagatggggcaatctatggagatgggaacca

SEQ ID NO: 81361 - DNA, 393 bp, Zea mays
gttggtcgatacaatactctacagtgagtcgtactactgctttgacggcgagaacgtggagagtgctcctcctcctatgaagaaggactacaagctggctaatcttctctgctgggaggaggaagcggatgccatggaggagaaggcgggagtgcttgatgagtaagacgggcttctggggtcgatttgcttctgagttgtttattttatatcgtcgcaatttcgtggttgtcgtttggttattctgtgaagcagccaagccaggctattgttatgaaaatttgtcgtctgtaagcatgtgaacttccgatgttgccacatgctggatcagtctgaataagtaagtatgcagctctaggtggtcagctgcgtctaacacaatgagcatgaacg

SEQ ID NO: 81362 - DNA, 364 bp, Zea mays
tccaagcctctaaacagagtcctaacaactgcaaaatcctccccaacagcctggtgctggacttcgtgacgaacgcccagatccgcggcatcacgctgctgaacagcaagttcttccacatgaacatcttcgggagcaagaacgtggtgatcgacaaggtgacgatcaaggcccccggcaacagccccaacacggacggcatccacatcggcgactcgagcaacgtgaccatcagcggcaccaccatcgccgtcggcgacgactgcgtctccatcggccccgggagcaagaccatccgcgtgaagggcgtcaagtgcggcccgggccacggcatcagcgtcggcagcctggggcggtacaagga

SEQ ID NO: 81363 - DNA, 390 bp, Zea mays
caagcctctacacagacgtcgtattacgcgtccgcccacgcgtccgcctctcctctgtccctctacggtgcttctgctcgccggcccaaaatcgcctcatcgaccacgcccccttccaggctcccgtctccatgggtctcctctcaaacaggattgggagggagagcctcaaggcgggggatcatatctactcctggagggcggcgtgggtctacgcgcatcacggaatatatgtgggcgatgataaggtgatccatttcacaagaggaagaggacaggaggtcggaacaggaactgtcgtcgatattattcttgtgagttccaccccaaaacgaagcaacacgccttgcccggtgtgcaccgacgaaaccagcgacagcagcacagaga

SEQ ID NO: 81364 - DNA, 350 bp, Zea mays
tacaagcatctacactcattcttgccacgctgctctccccgtcctgctcgtccccgcgctaccgccgcctccgcgcggcgctgttcctggccatgggcctgtcgggcgtcgtcccggcgctgcacgcgctgtggctcaactggggccacgccgcctgctacctggcgctcggcctcgaggtcgccatgggtctcgcctacgccacgggcgcatggttctacgtcagccgcgtgccggagaagtggaggcccggggtgttcgacgtcgtgggccacagccaccagatcttccacgtgctcgtgctcgtcggcgccgtcacgcactacgtcgccgtcgccgtgctcatccac

SEQ ID NO: 81365 - DNA, 183 bp, Zea mays
aacggcggaaagggagctcaaggcggcggaggaaggcgttcgccacagtcgctgatttccctggggaagagatgggtctctcctttgggaagctgttcagccgcctcttcgccaagaaggagatgaggattctcatggtcgggctcgatgccgccggtaagaccaccatcctctacaagctca

SEQ ID NO: 81366 - DNA, 393 bp, Zea mays
tcgcgggtcgatacacgcctctacactaatccgccatcactctccaacacgaagatggcgttcatcagcaatatcgcagtgaaggcggcggccgtggccgcgctgctgctggtcgcagcggtgtcgcctgccgcgcgcgcggcggcggtggcggtggcgggaggggcgccgtcggtgccggcgggtccgctggacatcgcgcagctgggcgccaagggcgacggcaagtcggacagcaccccgatgatcctcaaggcgtggaagaacgcgtgcgaggcgacgggggtacagaagatcgtcatcccgccgggcaactacctgacgggcgggctggagctgaagggcccctgcaagtcctccatcatcatccgtctcgacggcaacctgctcggc

SEQ ID NO: 81367 - DNA, 407 bp, Zea mays
attactctatacagacgtcgtagtatcgtcttcagataatgttgacgtagatgtgatagttgatggcaaatttgaacatggctacataataactgttattatgggatcaaaatccactaaagcaatcctctataactgcactgaagaacctgctctaccaacttcggagctagctgttgcaagtaacaacaatgatttgaagggtggacgtcgccgaagacgacgtaagaagaagctaagtacaacagaccccaggcaccccaaaccaaacaggagtggctataatttcttcttccaggatcaacatagaatgcttaagccacaatgtcctggacaagacagattgatcagtaaaatgattggtgaacgatggaacaatctaagtcctgaagataaagctgtatatc

SEQ ID NO: 81368 - DNA, 367 bp, Zea mays
aggaggggctgtcggacgtgacccgcaagtggctgcagtaccagaaggagtgcgtcaaccaggtgctcaaggcggccatggccattaacgcgcaggtgctcgtggagatggagatcccggagatctacattgagtcgctgccaaagaaagggaagacgagcctgggcgacgccatctaccggagcatcaccgaggaaacgttcgacccgctggagttcttggccgggatggacctttcgacggagcacaaggtgctggacctcaagaaccgcatcgaggcctccaccgtgatctggaagcgcaagatgcagaccaaggactccaagtcctcgtggagctccatcgtcagcttcgagaagcgcgagca

SEQ ID NO: 81369 - DNA, 378 bp, Zea mays
aagcgtccgcgcgcgccttctctttctctcccggacgtcgatcgtgttcttcagcacgggctagctagctccctccctcccagccatggcgacgccggacaacaaggggcacgggcatccgctgcccaagtttggggagtgggacgtgaagaatccggccacgtccgagggcttcaccgtcatattccagaaggcccgcgacgacaagaagaccaccaccggccctggggctgggaacgcgcgcgcaggcattccgccggccttcaggaacggcggcggcgacggcgggtacaggcccgacttcggcgacggcaaccagtacacgccgcccaaacggaagaagtgggccttctgtggctgctgaatcgaagctcgctg

SEQ ID NO: 81370 - DNA, 372 bp, Zea mays
  unsure (1)..(372): unsure at all n locations
tgcagcaacatccagctcgcgaaaataatgaagagccgcagcatggcatcatcggccgcgctcttggtgctagccctcgcgctagtggcggccaccgccccacaggtagcggaggcaaagaagaagagagcggcggagagcggcgaggcggcggaggcgaagaagatccaggacgacttctgctcgacgctgtgcgagggcaagaaggggacggacctggtcgtgtgcaaggagtcctgcgcgctctcccagcagtccaacctggtgctgtacggcaggatccagtgcaagggcaagtgcaccgagcagaagggcatcacggcgccggccatgaaggtctgccangaggagtgcgacaaggcgtacgtggtg

SEQ ID NO: 81371 - DNA, 388 bp, Zea mays
  unsure (1)..(388): unsure at all n locations
tcgatacacgcctctaatcaccatcatcatactcaacaacagccagctcgcgaaaataatgaagagccgcagcatggcatcatcggccgcgctcttggtgctagccctcgcgctagtggcggccaccgccccacaggtagcggaggcaaagaagaagagagcggcggagagcggcgaggcggcggaggcgaagaagatccaggacgacttctgctcgacgctgtgcgagggcaagaaggggacggacctggtcgtgtgcaaggagtcctgcgcgctctcccagcagtccaacctggtgctgtacggcaggatccagtgcaagggcaagtgcaccgagcagaagggcatcacngcgccggccatgaaggtctgccangaggagtgcgac

SEQ ID NO: 81372 - DNA, 280 bp, Zea mays
gtgagtcgtattaatcaagaacagccagctcgcgaaaataatgaagagccgcagcatggcatcatcggccgcgctcttggtgctagccctcgcgctagtggcaggcagcgccccacaggtagcggcggcaaagaagaagagagcggcggagagcggcgaggcggcggaggcgaagaagatctaggacgacttctgctcgacgctgtgcgagggcaataaggggacggacctggtcgtgtgcaaggagtcctgcacgctctctcagcagtcgaagctggtg

SEQ ID NO: 81373 - DNA, 398 bp, Zea mays
  unsure (1)..(398): unsure at all n locations
ggaggcgacagtgcgtgcgtgcagccacaggcaggcgtcggcaccatgtcttctttcaccggcacgcaggacaagtgcgcggagtgcgacaagaccgtccacttcatcgacctcctcacggccgacggcgtcacctaccataagacatgcttcaagtgcagccactgcaaagggatcctctcgatgtgcagctactcttccatggacggtgtgctgtactgcaagacccacttcgagcagctcttcaaggagaccgggagcttctccaagaacttcacgccaggtggcaagtcttcagacaagggtgaactgancaggggccccagcaagctatcatcctgcgtttctggtactcaggataagtgtgcagcttgccaganaacagtgttaccgctgga

SEQ ID NO: 81374 - DNA, 396 bp, Zea mays
  unsure (1)..(396): unsure at all n locations
acggacactcgggcgaacgtcgtacgagaacctttctccctcctccacctttctccttttcttgccacggcaaaacaccttcgccggcgagagcatggcgatggcgtaccgtgtcctggaggtcaccctggtgtcggcaaatgacctcaagaaagtgtcgctcttctcccggactcgcatctacgccgtggcttccatctccggattcgacctccgcatcccttcccacagcacccaagcagaccacagcaacggctgcaacccctgctggaacgccgtggtacacttccccatcccggctgccgctgacacccgcggcctcgcactccacgtgaggctccgcgcccagcgtctatacctgngcgatcgcgacatcggcgaagtgtttgtgcccat

SEQ ID NO: 81375 - DNA, 356 bp, Zea mays
tacacacgcgttctgctaacgcgtccgctcctccatcaccaccaccaagctcaacaacagccagctcgcgaaaataatgaagagccgcagcatggcatcatcggccgcgctcttggtgctagccctcgcgctagtggcggccaccgccccacaggtagcggaggcaaagaagaagagagcggcggagagcggcgaggcggcggaggcgaagaagatccaggacgacttctgctcgacgctgtgcgagggcaagaaggggacggacctggtcgtgtgcaaggagtcctgcgcgctctcccagcagtccaacctggtgctgtacggcaggatccagtgcaagggcaagtgcaccgagc

SEQ ID NO: 81376 - DNA, 366 bp, Zea mays
accctcgccaagccacaggctccccgtgagctccgcgacgcgggcgcctcgcctccctcgtcctactccttcctcaccgcagtccgcaagagcaatggcgatggcatccatagcctcaccgtcgtcgaggaccctgatccctccgcgacaccacggcgccgcgccctccccgtccacctccggcgactcctcgctccgcctcctccgcgcacacccgcgccacggacggcgcggccgggcggtgtccgtctcgacgcccgcggcgcggagccggccgttcgtcttctccccgcgcgcggtgtccgactctaagagctcccagacctgcctcgaccacgatgccagcacgagtgttcttggaatcat

SEQ ID NO: 81377 - DNA, 387 bp, Zea mays
aaatggctctcatcagcagtgcggcgatgaaggcagccgtggccgctctgctggtgttcgccgcggtgtcgcctgccgcgcgcgcggtggcggcggaggcggaggcgaaggcgaaggctgtgggaggcgcgccgtcggtgcccgctggctcgctggacatcgcgcagctgggcgccaagggcgacggcaagtcggacagcaccccgatggtgctcaaggcgtggaagcacgcgtgcgaggcgacggggcagcagaagatcgtcatccccaagggcaactacctgacgggcgcgctggacctggtgggcccctgcaagtcctccatcatcatccgcctcgacggcaacctgctcggcaccggcgacctcaacgcgtacaagaggaact

SEQ ID NO: 81378 - DNA, 405 bp, Zea mays
cggacgcgtgggcggacgcgtgggggaagtttgatacactttgtgatctttatgatacactcaccatcacccaagctgttattttctgcaatactaagagaaaggtggattggctcactgaaaaaatgcgtacaaataacttcaccgtatcagctatgcacggtgacatgccccaacaagaaagggatgccattatgggtgagttcaggtctggcgcaactcgtgtgctaataactacagatgtttgggctcgaggactggacgttcagcaggtttcacttgtcataaattatgatctcccaaataatcgtgagctttacatccatcgcattggtcgttctggtcgttttgggcgcaaaggtgtggcgatcaatttcgtgcgcaaagatgacatccgtatactga

SEQ ID NO: 81379 - DNA, 407 bp, Zea mays
gcgatcttcatccaaccttctgctctgctccctcgaaatggaggcgacgagcaaggcgatggcttcaggcctcctcgttctgctgcttctcatcaacacaggctttgtcctgcccgtccattccgaggactgctgggccgacacccgcgtcatctgcaccaagacgcacaactgccgggacgacacttgcgcggggcgcggcatgccggacggccgctgccactgggagttccccaacctggtgcccttctgccagtgcctgcgccccaactgccactagtccgggcgcctcggattggctcacttcgccggcgatgatggatggtgcccaactgcgactgcccagtctgctccattcgttgttgtttaaagcataatatataaacggccaaatcacatgtattttg

SEQ ID NO: 81380 - DNA, 387 bp, Zea mays
caccacgcgtccgccagcgagcgcgctcgggagatgccctgcaggcacaggttccactccaattgcatcgttccgtggctcgagatgcacagctcctgccctgtctgccggttccagctgccggccaccgacgacaagggctcatgcagcagcggcgacggtggttttgtcagtgtcgatgcggatggtgaaggcaatgacaacggcggcggtgatggtagggcaagtattccaggcaatgcggagccagccgaagccgaagagaacggcagccggttgccgccatccttgcagtggctcaacagcctgttctcgccatcggcgcagtcctccggtagcggcagcggcagttcgcatcattgggaagaatgagcaataatgcaatat

SEQ ID NO: 81381 - DNA, 389 bp, Zea mays
atggatgatgcgcaaattgtggagtcaaaggatggaaccatctcggttgcttctgcatttgctggttatcaggaagctgtgcaagacagggatcacaaattcttgacaaaagcagtggaagaagcatatcgaggagtcgattgcggtgacggaggtccattcggagcagttgtcgtctgtaatgacgaagtagtagtcagctgccataacatggttctgaagcacactgaccctactgcgcatgctgaagtaactgcaattagagaggcttgcaaaaagcttgggaaaattgagctctcagactgcgaaatttacgcgtcctgcgagccatgcccaatgtgctttggtgcagttcatctctcccgaatcaagaggctggtttatggggc

SEQ ID NO: 81382 - DNA, 390 bp, Zea mays
ctcgggctaggctagctagctaggttaccactctggtacaacatggctggtgatggcatggaggtatctgccagcgggggtggcggcggcaacaagcagccgcagatcagccttttggggctgttcctcgcctgcatggtcgccggcggcgtgcagtacggatgggcgctgcagctctcccttctcaccccctacgtccagacactggggattcctcatgctcttacatcagtcatgtggctctgtggacctattgctggcttacttgtacaaccctgcgtcggcctctatagtgacaaatgcacttctaagcttgggagacggaggccattcatctttacaggatgcatcatcatctgtatatctgtgatagtcatcggtttctcctca

SEQ ID NO: 81383 - DNA, 376 bp, Zea mays
cgagagggccggagcagccgcagtcccggcgatcccgccgccggtcgccctcatacttcctcgtcactgccttcgtttctctttccaacaatcaagatgagccgtggcggtagcgcgggtggtggtcaaagttctctgggttacctctttggaagcggtgagccccccaaaccagcagtggcaccagctgtaagtgctccacctgctgctgcaggtgctccacctgctgagaaaccacctgctgcaaagcctgatggcaccagtcagattgctgctggggttaccagccaaaccaataactaccacagggccgacggtcagaacaccggaaacttccttacggaccgtccttctcgacagagtcaacgctgctcct

SEQ ID NO: 81384 - DNA, 389 bp, Zea mays
  unsure (1)..(389): unsure at all n locations
taaactgcatcatcatcaagaccatggctatatgcacgaacgccaagggcagcaccaagggttgcctcaaggagcttgcatgcttcaaaaccctccttcgactgacccatctctctagttataatttttctcccgtccttgcattgccaattacatgctatccattggtaacgcacaacagtaaaatgacatacatccgacagctatattatgttcgacggtgtaacaccctgaatttgacggtataaaattttttctctaaataccaaccaaattcacgtgttaactcttgtctctctctctctcacttttccttttgattanaagtaagtgaattacgcgaaggtttaattatttattttgtcaaaacttaggtgaatcatgaaatg

SEQ ID NO: 81385 - DNA, 372 bp, Zea mays
tggcattttggtgcttagagaaattgatgcgtagattgcgaggaaatttcagatgcacagatcaatctgtgggagttgccaaccaacttcaacaccttgcgtctattattcaggttcttgaccccaagctacatgaccacctagaaactcttggtggaggtgactacctttttgcgttccgtatgttcatggtgctttttaggcgtgaagtatcatttggagactccttatacctctgggagatgatgtgggctctggaatacgaccctgacattttcttcgcagcgtgtgaagaacaaggtgcagtagataaaaacaaagtttctaaatccaaactgaaaggactgcgccattttgggcaagtgggataat

SEQ ID NO: 81386 - DNA, 413 bp, Zea mays
caacaacgaaatcgctatggaccggggcatctcccctggcctcattcgcctcttcttccacgactgcttcatcacgggttgcgacgcttccattctcctggacgagtcgcccgccggcgacgtcccagagaaggagtcgtccgccaacggcttcaccctggtcgggctcagaaccatcgacatcgccaagtccaccgtagagggcatgtgccccggcaaggtctcgtgcgcagacatcctggccttcgcggcgcgcgacgccgccgtggccgcgggcctcccgagatacgaggtcgcggcggggcgccgcgacggcatgcgctcgaacatggacgacctcccggggcaacttccccgtgccgggccaccacgtgccgcgcctcaccgagctcttcagccagcgggggctctcc

SEQ ID NO: 81387 - DNA, 379 bp, Zea mays
aaaaccctgcgtgtacgtgtcaaccgacccctccccctgcgagcctgcgacgagtctcctgccgctcttcccggccgggcgaaatggacggtgtcgttgtcaggagggtcatcccttcggataacagttgcctcttcaacgctgtgggctacgtgatggagcacaaccgaaataaggcttctgagctcagacaggtcatagcagcaacagtcgctggtgatcctgagaaattcaatgaagtgtttcttggcaaaccaaatgaagcgtattgtgcttggattttggatcctgaaaagtggggaggagccattgagctctctattctatccgaatactacgggcgtgaaatcgcagcatatgacattcagaccactcgctg

SEQ ID NO: 81388 - DNA, 407 bp, Zea mays
ggctagttcgtggatggcggcgccacgacctctcctattgccgctgctggtcgccatgctagcggtggtcgccgatgtcgccaacgccggccacgccaagcccctgacgcctggcgggcgcgtggtacacgacaaccacggcaagttcacggccgggccgtggaaacctgcccacgcgaccttctacggcgggcgggacgggtccggcaccacggcgggcgcgtgcgggtacaaggacacgcgcgagcaggggtacggcgtgcagacggtggctgtgagcacggtgttgtttggcgatggcgcggcctgcggcgggtgctacgaagtgcggtgcgtggacagccccagcgggtgcaagcccgacgcggcggcgctggtggtgacggcgaaacgactgtgcccgccca

SEQ ID NO: 81389 - DNA, 404 bp, Zea mays
ggctaattcgtggaaggcggcgccacgacctctcctgttgtcgctgctggtcgccatgctagcggtggccgccgatgtcgccaacgccggccacgccaagcccctgacgcctggcgggcgcgtggtacacgacaaccacggcaagttcacggccgggccgtggaaaccagcccacgcgaccttctacggcgggcgggacgggtccggcaccacggcgggcgcgtgcgggtacaaggacacgcgcgcgcaggggtacggcgtgcagacggtggccgtgagcacggtgttgtttggcgacggcgcggcctgcggcgggtgctacgaagtgcggtgcgtggacagccccagcggggtgcaagcccgacccggcggcgctggtggtgacggcgaaacgactgtgccca

SEQ ID NO: 81390 - DNA, 396 bp, Zea mays
ctcagccatccccatcttcatcgacatgaagtactgccccaacaagttgtgtactgccaacggcgcctccaaggtcaccgtcaaggatgtcaccttcaagaacatcaccggcacctcctccaccccggaggccgttagcctgctctgcactgccaaggtcccatgcaccggcgtcaccatggatgacgtcaacgtcgagtatagcggcaccaacaacaagaccatggctatatgcacgaacgccaagggcagcaccaagggttgcctcaaggagcttgcatgcttctagaccctccatcgactgacccatctctctagttataatttttctctcgtccttgcattgcccattagatgctatccattggtaacgcacaacagtaaaacgacagacat

SEQ ID NO: 81391 - DNA, 363 bp, Zea mays
taaaataaataggcacacaagaacaaatacctcgctaccaacaatggcctccaggtcctccatcctacttgcaacgtcaatgctggctgcgctgtttgcggttggtttgtgcacaaccccgctcaccttcaaggttggcaagggatccaagcctggccacctgatcctcacccccaatgttgcaaccatatccgacgtggaaatcaaagagcacgggggcgatgacttctcctttacgctcaaggagggcccgaccggcacctggacgctcgacaccaaggccccgctcaagtaccccctttgcatccgctttgctgtcaagtccggtggctaccgcatcgctgacgacgtcatccccgctga

SEQ ID NO: 81392 - DNA, 390 bp, Zea mays
ggctggtgcagcggatgccgcgctgccgctacggcttcttccacgtggtgaacaacgactacacgcactggatcatgtacgccatcggcggcaacatgaaccccaccatcatcagccagggcaaccgcttcatcgcccccgacgacgccaacgccaaggaggtgaccaagcgggagtacacgccgtacaaggactacaaggagtgggtgtggaagtcgcagggcgacgtcatgatgaacggcgccttcttcaacgagtccggcggccagaacgagcgcaagtacgacaggttcgacttcatcccggacaagcacggccgctacgtcggtcagctcacgcgcgtcgccggagcactcaagtgcatcgtcggctaccgtgctagtagacagc

SEQ ID NO: 81393 - DNA, 388 bp, Zea mays
gtcgtcgtctcactcaccccgccttcacgcctccctcaccaaataaggtcccgcccttttccgacattcacaggggggacaggaaatcagcggccatggcctcgattccggcgacgaccttcgccgtcatcttatccgtcctcttctgtgccgcggctggcaccgccgtcgacaacgacctccccgactacgtcatccagggccgcgtctattgcgacacctgccgcgccgggttcgtgaccaatgtcaccgagtacatcgcgggcgccaaggtgaggctggagtgcaagcacttcggcaccggcaagctcgagcgctccatcgacggggtgaccgacgggaacggcacgtacacgatcgagctcaaggacagccacgaggaagacat

SEQ ID NO: 81394 - DNA, 401 bp, Zea mays
aagccgaattgcgagcgagcgttcctctccgtccgcttccgccgtttgcccgtcgatcagttgttggctgccggccgggtactaccgcctgcacgagcagcggctagccacagcccacagacagacgacgtcaggtcttggcaggtgtgcaagcagacagagctcgctcggtcgccatgtctttcaccggcacgcaggacaagtgcaaagcctgcgacaagacggtccacttcatcgacctgctcaccgccgacggcatctcgtaccacaagacctgcttcaaatgcagccactgcaagggcgtcctctcgattagcagctactcttccatggacggcgttctgtactgcaagacgcacttcgaacagctcttcaaggagacagggaacttctccaagaaa

SEQ ID NO: 81395 - DNA, 379 bp, Zea mays
aacacgcgtccgcccacgcgtccggacgcgcaccaggggaggaagcagttcctgcaggaggtggaggtgctcagctgcatccgccaccccaacatggtgctcctcctcggcgcatgcccggagtactgctgtctcgtgtacgagtacatggaccacggcagcctcgaggaccggctgttccgtcggggcggcacgccgccgctcgcgtgggcccagcggttccggatcgcggcggagatcgcgacggcgctgctgttcctgcaccaaacgaagccggagccgctggtgcaccgggacctgaagccggccaacatcctgctggaccgcaactacgtgagcaagatcagcgacgtcgggctggcacgcctggtgccgccgt

SEQ ID NO: 81396 - DNA, 382 bp, Zea mays
ggctggttcgtggatggcggcgccacggcctctcctgctatcgctgctggtcgccgtgctagcggtggccgcggatgtcgccaacgccggccacgccaagcccctgacgcctggcgggcgcgtggtacaccacaaccacggcaagttcacggccgggccgtggaaacccgcccacgcgaccttctacggcgggcgggacgggtccggcaccacggcgggcgcgtgcgggtacaaggacacgcgcgcgcaggggtatggcgtgcagacggtggccgtgagcacggtgctgttcggcgacggcgcggcctgcggcgggtgctacgatgtgcgctgcgtggacagccccagcgggtgcaagcccagcgcggcggcgctggtggtg

SEQ ID NO: 81397 - DNA, 410 bp, Zea mays
ccggcctgtgcatcaggtcaaaagtagtgcacactcaatgatgggatttgccaatgatgctttcgtaggatgcgcacgtggaagcaagcaggtgaagggtttcatgtttgaaaaacccgttgatctgaaagtaggtgtgaaccatgttgtattgctgtcgtcaactatgggaatgaaggacagtggtggtgaacttgctgaagtaaagagtggcattcaggagtgcctaatccagggtctgaacactgggacgttggatttacaagtcaatggctggggccataaggctgcactggaaggtgaggacaaggagatctactcagaaaaaggtgtgggcaaagttcagtggaaacctgccgagaacggccgggcagccacttggtataagagatacttcgatgagccagatg

SEQ ID NO: 81398 - DNA, 344 bp, Zea mays
tgcacaactttgaaccagaaagggatgatatcgcaaatgatatcatcaattggttgagcgcaagacttagtgttcttcagagatggtgagctgaatcaagtatgaactacaaggtgcttccccttatgtagttaccggcggttttactggaactgtatacatggcatagagtgcagaatagtgtaaatgtaaactaggatgttatcattatgtcttcacggtcacggtcatttcttgtcttcagctctgctgtataagtttgggaagagcctacatgagatgtaaataatattagagttaagctgaaaataatgtatctcctaatacaaaggtagttcagtgtc

SEQ ID NO: 81399 - DNA, 278 bp, Zea mays
  unsure (1)..(278): unsure at all n locations
cccacgcgtccgcacacgccttcttccgcgtagtgcttggtgatcactttggcggcgatgtttggtggtgctatgtagcggttgccctcaagtactgtgttgtggcattgttacacatcacagtacagtttggtcaaattttttttccacagaggaagtanggattgatttaatcattgatttaatcccacacgcgtgtatctacgtatacagtttgtataacatgaaccacctctgtttgcgattggtctaaaaataaatataatacttatatattg

SEQ ID NO: 81400 - DNA, 377 bp, Zea mays
ccatgctcaacaacagccagctcgcgaaaataatgaagagccgcagcatggcatcatcggccgcgctcttggtgctagccctcgcgctagtggcggccaccgccccacaggtagcggaggcaaagaagaagagagcggcggagagcggcgaggcggcggaggcgaagaagatccaggacgacttctgctcgacgctgtgcgagggcaagaaggggacggacctggtcgtgtgcaaggagtcctgcgcgctctcccagcagtccaacctggtgctgtacggcaggatccagtgcaagggcaagtgcaccgagcagaagggcatcacggcgccggccatgaaggtctgccaggaggagtgcgacaaggcgtacgtggtg

SEQ ID NO: 81401 - DNA, 404 bp, Zea mays
aacacagttgagcacgacgatgggatccctcgctaataacatcatggtcgtgggcgccgtccttgcggcgcttgtcgtcggcgggtcgtgcgggcccccgaaggtgccgcccggccccaacatcaccaccaactacaacggcaagtggctcaccgccagggccacctggtacggtcagcccaacggtgccggcgctcctgacaacggcggtgcgtgcgggatcaagaacgtgaacctgccaccctacagcggcatgacggcgtgcggcaacgtccccatcttcaaggacggcaagggctgtggctcatgctacgaggtgagatgcaaggaaaaacctgagtgctcgggcaatccagtcacggtgttcatcacagacatgaactacgaacctatcgctccctaac

SEQ ID NO: 81402 - DNA, 386 bp, Zea mays
  unsure (1)..(386): unsure at all n locations
gtgggtcgatacaagactctacactgacgtcctgattacgcgtccgcccacgcgtccgctcggcggcggtgttcaaaaactgcctcatcatcacccggcggcccatggacaaccaccagaactcggtgacggcgcacgggcgcaccgaccccaacatgaagtccgggctcgtcatcaagaactgccgcctggtgcccgacaagaagctgttcccggaccgcttcaagatcccctcgtacctgngccgcccctggaaggagttctcgcgcctcgtcatcatggagagcaccatcgccgacttcgtcaagccagaagggtacatgccctggaacggcgacttcgccctcaagacgctctactacgccgagtacaacaaccgcgggccc

SEQ ID NO: 81403 - DNA, 373 bp, Zea mays
agaccgttcaggatcaacatcttcccgagcgagttcttggttgacctcttcctcttcggaccacctccaaggctcttggtgtagcttgccactctcaccaatcaagttttcatgtctgatctcgacattcagatcccaactgccttcgatcccttcgctgaggccaatgctggggactctggtgcggcagcagggtcaaaggactacgtacacgtgcgcatccagcagcgtaatggtcgcaagagcctgactaccgtccagggattgaagaaggagttcagctacagcaagatcctcaaagatctcaagaaagagttctgctgcaatggtacagtggtccaggacccagaacttggacaggtcattcagctcc

SEQ ID NO: 81404 - DNA, 399 bp, Zea mays
accaaacgtctgcccacgcgtccgcgaaaggcaagggacgtaagaagtcgtctaattcttggatcgaattagacgacttcttcgtccctctcttcattagcacgctaacttgtaatctgcaggatctaagcaaagacttgatttagttatggacggattggtaggcctcttgaaagttcgcgtggtccggggtatcaaccttgcctaccgcgacgcaagaggcagcgatccgtatgtcgtcctacggcttggcaagaagaaactgaagacaagcgtgaagaagagatccgtgaaccccatatggcaagaggagctaactctgaccgtcacagatcccagccaaccactgaagctggaggtgttcgacaaggacaccttcagcagagacgaccccatggg

SEQ ID NO: 81405 - DNA, 408 bp, Zea mays
cagacgcttgggtcacaccctccctccctcacacaaataataaggaaaggtcccgcccttttcctccgacatccacaggggggaggggaaaacacgtgcattcacccggcggcaataatggcctcggttccggctccggcgacgacgaccgccgccgtaatcctatgcctatgcgtcgtcctctcctgtgccgcggctgacgaccccaacctccccgactacgtcatccagggccgcgtgtactgcgacacctgccgcgccgggttcgtgaccaacgtcaccgagtacatcgcgggcgccaaggtgaggctggaagtgcaggcacttcggcaccggcaagctcgagcgcgccatcgacggggtcaccgacgcgaccggcacctacacgatcgagctcaaggacagcca

SEQ ID NO: 81406 - DNA, 385 bp, Zea mays
gcacgccctccgccaacggccggatcgacagcaccgatcaccctgaccgtctgcgcgcggcggctctcacacaccggcgacacgcagggcgcgcataggcgagggcctcccccccggcgagggatggtgtggtcggctgggatggcaacaatgcgaggcgcctccgccgccgcgctactggtgctggcgctcgccgccgccgtggcgcgcgcggaggacccctaccacttcttcgagtggaaggtgacgtacgggacgaggaccatcatggggacggcgcagaaggtgatcctcatcaacgacatgttcccgggccctaccatcaactgctcatccaacaacaacatcctcgtcaacgtgttcaacatgctcgagcagccgctcc

SEQ ID NO: 81407 - DNA, 396 bp, Zea mays
tactactccctgaggtgagtcgtattataccctgcttcacacaaacagtaaggatcagtctcggccttttgctcaggcatccacaggggggattgggaaaacacttgcatgcatccggcggcaataatggcatcggttccggctccggcgacgacgactgccgccctaatcatatgactatgcgtcctcctctcctgtgccgcagcctgagtacctaaagctccccgactacgtcatccagggcctcgtgtactgcgacacctgccgcgccgggttcgtgaccaacgtcaccgactagatcgcgggcgccagcgtgatgctggagtgcatgcacttcggcaccggcaagctcgagcgagccatcgacggcgtcaccgacgcgaccggcacctacac

SEQ ID NO: 81408 - DNA, 366 bp, Zea mays
ctccaccaccccggaggccgtcaacctgctctgctctgccaagatcccatgcaccggcgtcaccatggacgacgtcaacatcaagtacagtggcaccaacaacaagaccatggccgtatgcaagaacgctaagggcagcgccaagggttgcctcaaggagctcgcatgcttctagaaccaccatcgacccatctctctagttatacaatgtgtttggttgttggatgctgagagattggttctcagctcagatgcaagctgcgcctagcctgtgtaggtttgtgctggtacattgagagctcttatttatttgctttgattgcaattaaccaggatgaccatagcccttgtttggtttgctgtttt

SEQ ID NO: 81409 - DNA, 397 bp, Zea mays
ctcaagactaggcggctcggtccaagcctccggttcaagaactgccacatcgtcacgcggcggcccatggacaaccagcagaactcggtgaccgcgcacggccgcacggaccccaacatgaagtcggggctcgtcatccagaactgccgcctggtgcccgaccagaagctcgtccccgaccgcttcaagatcccctcatacctgggccgaccctggaaggagttctcgcgcctcgtcatcatggagagcaccatcgccgacttcatcaagcccgaaggctacatgccctggaacggcgacttcggcatcaatacgctctactacgccgagttcaacaaccgcggccccggcgccggcaccagcaagagggtcacctggcctgggttccacgtcatcg

SEQ ID NO: 81410 - DNA, 397 bp, Zea mays
agccaagggcgacacgctgtacaccggctcggacagcaagaacatccgcgtctggcgcaagcagaaggactcgggagggttcaagtcctcgagcggcctcgtgaatgcgatcgtcatgtccggcgagcgcatcttcacgggccaccaggacggcaagatcagggtgtggaaggtgtcggccaagaacggcatgcacaagcgcgtcggcagcctgccccgcctgcgcgacttcctgcgcggctcgctgaacccgtccaactacgtggaggtgcgcaagaaccggtcggcgctgtggatccggcacagcgacgccgtgtcgtgcctgagcccgacggacccggcgcaggggctgctctactccggctcgtgggaccgcaccttcaaagtgtggcgcatc

SEQ ID NO: 81411 - DNA, 371 bp, Zea mays
agctcgcggaccgcgcgcagcccgtggcggtgcgggaggtgatgcgcgcctccttcgaggcgttcctgatggtgctcctggcgggcggcaacgagcggagcttcgtgcgcgccgaccacgccacggtggaggaggacttccggagcctgaggcgcgccttctccacgtgcggggaagggctggtccccgaggacgtggtggcgcgggaggcagagacggccgaggccgtcgtggagctcatggcacgctccacggactacctcatcgacgcgttcagcgtcgccacgtgcgactccatcagcgaggacggccgcgccggcgcagggcggtgcacgccgctgccgcccaagacgcggacgtgggaccccgcc

SEQ ID NO: 81412 - DNA, 197 bp, Zea mays
caagaggaggttcgtgaagctggccgacccgttgctgggcaacaggtacccagtgaaggcgctgtaccaggcgctcgccgtcgcgtccatgtgcctgcaggaggacgctgccagccggccggggatcagcgacgtcgtcgcggcgctctccttcctcgccgacccgcaatactaccctcccggaggcacggaagctg

SEQ ID NO: 81413 - DNA, 197 bp, Zea mays
ccaagggctggctcaagtggaacggcgacttcggcctcgagacgctcttctacgcggaggtggacaaccgcggcgacggcgccgacatgagcaagcgcgccaagtggggaggcatcaagaccgtcacctacgaggaggcgcagaaggagttcaccgtggagaccttcatccaggggcagcagttcatccccaagttc

SEQ ID NO: 81414 - DNA, 197 bp, Zea mays
gctgcgacgcgtccatcttgatcgaccccatgtcgaaccaggcctccgagaaggaggcgggccccaacatctccgtcaagggctacgacgtgatcgaggagatcaagacggagctggagaaggagtgccccaacgtggtgtcgtgcgcggacatcatctcggtgagcgcccgcgactcggtgaagctgtcgggaggg

SEQ ID NO: 81415 - DNA, 406 bp, Zea mays
ctttgtgacgaccctgactggaaaaaccataaccctggaggttgagagctcggacaccatcgacaatgtgaaggcgaagatccaggacaaggagggcatccccccggaccagcagcgtctgatcttcgccggcaaacagctggaggatggccgcaccctagcagactacaacatccaaaaggagagcaccctccaccttgtgctccgtctccgtggtggtcagtaagtcatgggtcgtttaagctgccgatgtgcctgcgtcgtctggtgccctctccatatggaggttgtcgaagtatctgctgttcgtgtcagtgttggtttaataatggaccggttgtgttgtgtgtgcgtactacccagaactatgacaaatcatgaataagtttgttgtttgaaattaaag

SEQ ID NO: 81416 - DNA, 387 bp, Zea mays
cccacgcgtccgacaagactgacagcgacgatgatgccacagctgcgtagcctcgtcgcgctggtcctcgtggccacggccatagccgccgctcccggcgttgggtttgtcgtcaccggccgcatctactgcgacaactgccgcgccgggttcgagacaaacgtgtcccacgccatccaaggcgcgacggtggagatggagtgccgccacttcgagtcgcagcaggtccacgacaaggcggaggcgacgacgggccccggcggctggtacaggatggagatcagcggcgaccaccaggacgagatctgcgacgtgcgcctgctcaagagccccgaggcggactgcgccgagatcgaccactcccgcgaccgctgccgcgtcccgctc

SEQ ID NO: 81417 - DNA, 195 bp, Zea mays
gcgatgagagccttgttcctcctggtcctcttctgcatcgtgcatggtgagaaggaagagtcaaagggcatcgatgcgaaagcgtccgggcctggtgggtccttcgacatcaccaagttgggcgcctccggcaatggcaagacagacagcacgaaggctgtgcaggaggcatgggcatcggcgtgcggcggcact

SEQ ID NO: 81418 - DNA, 196 bp, Zea mays
gccttgttcctcctggtcctcttctgcatcgtgcatggtgagaaggaagagtcaaagggcatcgatgcgaaagcgtccgggcctggtgggtccttcgacatcaccaagttgggcgcctccggcaatggcaagacagacagcacgaaggctgtgcaggaggcatgggcatcggcgtgcggcggcactgggaagcaga

SEQ ID NO: 81419 - DNA, 197 bp, Zea mays
gcaccatcaaggtcatggtctcccgcggccacatcgacggcaagctccgctacggcttcaacggcatctcccacagggacaccgagacccccctcaagctcgccgagtacttcaacgtcaccgacggggtgttcagctacaaccagatgggcgacgtgccccccgccgttaacgggccactccatgtcatccccaac

SEQ ID NO: 81420 - DNA, 406 bp, Zea mays
  unsure (1)..(406): unsure at all n locations
gcggtgccacaacctctcctgctgtcgctgctggtcgccgtgctagcggtggccgccgatgtcgccaacgccggccacgccaagcccctaacgcctggcgggcgcgtggtacacgacaaccacggcaagttcacggccgggccgtggaaacccgcccacgcaaccttctacggcgggcgtgacgggtccggcaccacggcgggcgcgtgcgggtacaaggacacgcgcacgcaggggtacggcgtgcagacggtggccgtgagcactgtgctgttcggtgacggcgcggcctgcggagggtgctacgaggtgcggtgcgtggacagccctagcgggtgcaagcccgacgcggcagcgctggtggtgacngtgaccgacctgtgcccgcccaaggaccaatggtgca

SEQ ID NO: 81421 - DNA, 415 bp, Zea mays
cgccgccccccctctccgcctcaaggctctcctctcggaggtctgataggcaacccaataatggcagaagtcctatcaggatctcatgaacaccgtctaagctctgccttagatggacactacgacgagaagaggaaatccaatgtggaatacacagaggacgagaagaaagccgtgatcgcggctctgaaaaagaaggctttgagcgcctcacagaagtttaggcattccatgaagagggggaggaagagcagcaaggtgatgtccatctcgattctggatgagcgtgaacctgaggaggtgcaggctgtggatgccttccgccagcttcttgtacttgaagagctgctaccatcgcagcatgatgactaccacatgatgctaagatttctcaaggcaagaaagtttgatatcg

SEQ ID NO: 81422 - DNA, 401 bp, Zea mays
actttcttcctcctcatcgtcctctcgaattccgtctcttgtctctgtcctcctcgctcggcttccccggttcttgagaggggaaagaggaggcggaggagagggatggggagggacgagaggttcccagtgtgggaggccgcgctcggcgctggggtcgccgccgccttcgccgctgggctcgtcggggtttacctttccatgccggactccgactacagcttcctcaagctgccacgtaatctccaggaactccaaatcctcactggccatcttgagaactatactagcgactacaccctacaggtgttggtaggctactgcgccgtgtacatcttcatgcagaccttcatgatcccaggaacgatattcatgtcactgctttctggtgctctgtttgg

SEQ ID NO: 81423 - DNA, 375 bp, Zea mays
aaaggacgtgaccgtgacggcgcccggggacagccccaacacggatggcatccacatgggcgactcatccgggatcacgatcaccaacaccgtcattggcgtcggtgacgactgcatctccatcggccccgggacctccaaggtgaacatcaccggcgtgacctgcggccctggccacggcatcagcatcggcagcctagggcggtacaaggacgagaaggacgtcacggacatcaacgtcaaggattgcactcttaagaagacgatgttcggcgtccgcatcaacgcgtacgaggacgccgcctccgtgctcaccgtctccaagatccactacgagaatatcaagatggaggactcaaccaacccccaccttca

SEQ ID NO: 81424 - DNA, 199 bp, Zea mays
caaggacagcagcaccaaggtggaacagccggcggacagctccttgaagccggcgagcctgaacgcgttcgacatcatctcccactccagagggttcgacctgtcaagcctgttcgaggtggaccaagagcagaaggccagcaactcgcggttcatgacccagaaaccggcgtcggcgatagtgtcaaagctggagcag

SEQ ID NO: 81425 - DNA, 414 bp, Zea mays
ctcgcgggtcgatacacgcctctacagtcatctccctctatcaccaccaccaagctcaacaacagccagctcgcgaaaataatgaagagccgcagcatggcatcatcggccgcgctcttggtgctagccctcgcgctagtggcggccaccgccccacaggtagcggaggcaaagaagaagagagcggcggagagcggcgaggcggcggaggcgaagaagatccaggacgacttctgctcgacgctgtgcgagggcaagaaggggacggacctggtcgtgtgcaaggagtcctgcgcgctctcccagcagtccaacctggtgctgtacggcaggatccagtgcaagggcaagtgcaccgagcagaagggcatcacggcgccggccatgaaggtctgccaggaggagtgcgacaag

SEQ ID NO: 81426 - DNA, 211 bp, Zea mays
gtccatacaactcactagaatgagtcgggctaacataccctgcaggacgtgtacgactcgctggacgtgcacgtcggccactgcctctccgtgctggtcgacgccgaccaggcgcccggcgactactacatggtggcctccacgcggttcatccacgacgccaagtccgcctccgccgtcatccgctacgccggctccagcggcgccccgc

SEQ ID NO: 81427 - DNA, 197 bp, Zea mays
gcggctggcaccgccgtcgacaacgacctccccgactacgtcatccagggccgcgtctattgcgacacctgccgcgccgggttcgtgaccaatgtcaccgagtacatcgcgggcgccaaggtgaggctggagtgcaagcacttcggcaccggcaagctcgagcgctccatcgacggggtgaccgacgggaacggcac

SEQ ID NO: 81428 - DNA, 196 bp, Zea mays
cccacgcgtccgcccacgcgtccgccttgttcctcctggtcctcttctgcatcgtgcatggtgagaaggaagagtcaaagggcatcgatgcgaaagcgtccgggcctggtgggtccttcgacatcaccaagttgggcgcctccggcaatggcaagacagacagcacgaaggctgtgcaggaggcatgggcatcggc

SEQ ID NO: 81429 - DNA, 410 bp, Zea mays
cgtgaacaacggggaggtgtccggggtcacgctgctcaactccaagttcttccacatgaacatgtaccggtgcaaggacatgctgatcaaggacgtgaccgtgacggcgcccggggacagccccaacacggatggcatccacatgggcgactcatccgggatcacgatcaccaacaccgtcattggcgtcggtgacgactgcatctccatcggccccgggacctccaaggtgaacatcaccggcgtgacctgcggccctggccacggcatcagcatcggcagcctagggcggtacaaggacgagaaggacgtcacggacatcaacgtcaaggattgcactcttaagaagacgatgttcggcgtccgcatcaaggcgtacgaggacgccgcctccgtgctcaccgtctcca

SEQ ID NO: 81430 - DNA, 418 bp, Zea mays
actgatcgacatagtgacggtcaaggcccccggcgacagccccaacacggacggcatccacatcggcgactccagcaacgtgaccatcagcagcaccaccatcggcgtcggcgacgactgcatctccatcggccccgggagcaagatgatccgcatccatggcgtcaagtgcggcccaggccacggcatcagcgtcggcagcctggggcgctacaaggacgagaaggacgtggaagacgtgcaggtgacggggtgcacgatcgccggcaccacgaacggcctgcgcatcaagtcgtacgaggactccaagtcgtcgctcaaggccagcaagttcctgtacgagggcatcaccatggacaatgtctcctaccccatcatcatcgaccagaagtactgccccaacaacatctgcgtcaag

SEQ ID NO: 81431 - DNA, 401 bp, Zea mays
ggaatgtatgggtttgcgtgaagtaaagtctttgcggcgcatgaatcatcctaacattgtgaagctcaaagaggttatccgagaaaatgatatattatacttcataatggaatacatggagtgtaatctctaccaacttatgaaggataaggtcaagcctttctcggagtctgaagtccgcaactggtgctttcagatatttcaggctcttgcttacatgcatcagaggggctactttcatcgtgacctcaaacctgagaatctgttggttagcaaagatgtcataaagctagcagactttggtcttgcaagggaagtttcatctttgccgccatatacagaatatgtctcaactcgctggtatcgggcaccagaagtattgctccagtcatctgcttatg

SEQ ID NO: 81432 - DNA, 276 bp, Zea mays
ctagtgtaacggttaaggcttccgagtagcacctcaaggtcctaggttcgatcccctcgggggcgaatttctggcttggttaaaaaaaattcctcgttgtgtcctgtccggcatccgctcccgggttacgtcctgcgtgcacccttcgggtgggctgtttgagagttagcggttacggccagggttcggggattttctcgaccgggatcatgtttcggtctcttcttaatataatatcgagagggcggtctttccctcccctgtcgagttttctgt

SEQ ID NO: 81433 - DNA, 325 bp, Zea mays
  unsure (1)..(325): unsure at all n locations
agcgcctcacgggatgcatgcagatcttcgtgaagaccctgaccggcaagactatcaccctcgaggtggagtcctcagacaccatcgacaacgtcaaaggcaagattcaggacaagganggcaatcccccaagaccagcagcgggtcaatccttgccggaaaacaacttgaagaacggcgcaagccttccgactacaacatccaaaaggagaacaacctccacttggtgctgcgcctcaagggaagcatgcagatcttcgctaagaccctgaccggcaaaactatcaccctccaagtggagtcttcaaacaccatcgacaatgtc

SEQ ID NO: 81434 - DNA, 412 bp, Zea mays
  unsure (1)..(412): unsure at all n locations
cccacgcgtccggacacttctaaggacatcaccgtgaaggatgtgaacatcacggcgcccgcggacgtcgagaacacggacggcgtccatgtcggcgggtcctccaatgtacgcatcaccaactcgaccattggcaccggcgacgactgcgtctccatcggccccgggagcgacggtgtcatggtgaacaacatcacctgtggccccgggcagggcatcagtgtgggctgcctaggccgctacaaggatgagaaggacgtgagcgacgtgacggtgcgggattgcgtgcttaggaacaccaccaacggcgtgcgcatcaagtcgtacgaggatgccgagtctgtgctcacggcgtcncatctcaccttcgagaacatcaggatggangaggtggccaancccatcatcatcg

SEQ ID NO: 81435 - DNA, 205 bp, Zea mays
cacgcaaccggctctgtcttatggtgaccttgtcaagagggtcctccggtgctttggcccctcagagttttccgttgccgtgaccatcttcggcgggcgtggccatgccgggacatggggaaaggcacttggtgcagaggtctatgactgcaacaacatggtggagcaggagctgcctggaggcgggctcctcgtgtaccagagc

SEQ ID NO: 81436 - DNA, 182 bp, Zea mays
caggtccttccgctggaacctgacggcgagcgcggcgcggcccaacccgcaggggtcgtaccactacggccagatcaacatcacccgcaccatcaagctcgccatgggccgcggcaaggtggacggcaaggagcggttcggcttcaacggcgtgtcgcacgtcgaccccgagacccccgtca

SEQ ID NO: 81437 - DNA, 307 bp, Zea mays
ccttaacatcaaaaggccaacctacaccaacttgaacaagctgatctcacagatcatatcatctctaaccacctccctgaagtttgatggtgctatcaatgtggatgtcaccgagttccagaccaaccttgttccatacccacgtatacatttcatgctttcctcatatgcccctgtaatctctgctgagaaggcttaccatgagcagctctctgttcctgaaatcaccaatgccgtctttgagccctcaagcatgatggccaagtgtgacccaaggcatgggaagtacatggcttgctgcttgatg

SEQ ID NO: 81438 - DNA, 405 bp, Zea mays
gccgtgtatgcatggattgacaaagatgttggttactgccaaggaatgagtgatttgtgctcaccaatgatagttctactaaacgatgaagcagatgcattttggtgctttgagaaattgatgcgtagattgcgaggaaatttcagatgcacagatcaatctgtgggagttgccaaccaacttcaacaccttgcgtctattattcaggttcttgacccgaagctacatgaccacctagaaactcttggtggaggtgactacctttttgcgttccgtatgttcatggtgctttttaggcgtgaagtatcatttggagactccttatacctctgggagatgatgtgggctctggaatacgaccctgacattttcttcgcagcgtgtgaagaacaaggtgcagtaaat

SEQ ID NO: 81439 - DNA, 196 bp, Zea mays
gaacaacatcacctgtggccccgggcagggcatcagtgtgggctgcctaggccgctacaaggatgagaaggacgtgagcgacgtgacggtgcgggattgcgtgcttaggaacaccaccaacggcgtgcgcatcaagtcgtacgaggatgccgagtctgtgctcacggcgtcccatctcaccttcgagaacatcagg

SEQ ID NO: 81440 - DNA, 210 bp, Zea mays
  unsure (1)..(210): unsure at all n locations
cacgcatccgagacaagatggcatgcacaaacaatgcgatgagagccttgttcctcctggtcctcttctgcatcgtgcatggtgagaaggaagagtcaaagggcatcgatgcgaaagcgtccgggcctggtgggtccttcgacatcaccaagttgggcgcctccggcaatggcaagacagacagcacgaaggctgtgcangaggcatggt

SEQ ID NO: 81441 - DNA, 194 bp, Zea mays
cacgcgtccgcccacgcgtccggacacgggcttcttccggcgcgagggcggctggagcacggagtacggggagttcttcatgagctggtactcgcagatgctcctggagcacggcgagcgcatcctgtcggcggcgacgggcgtgttcacggggtcccccggcgtgaagatctcggtgaaggtggccgggatcc

SEQ ID NO: 81442 - DNA, 306 bp, Zea mays
cgtttgaccttgcaacaccctgacgtgagtcgtattatgttcgcgcacgccgcctccgtggccatggcgttcctgtggctcgagttctcgcagtcgttccaggtgctggcaatcctcgcgtccacgcgcacgcgcgccgtcgcgctcggctacaggttctgggtcggcgcggggctccccgccaggggagccgcccacgtcgcgcgcggctgccagctgggcctcctcgggtgcaagctcgcgtgccatgtcggcgtcctgtggatgcatcttggtcccgtcggcgggggttgcagcggcatgcgg

SEQ ID NO: 81443 - DNA, 418 bp, Zea mays
agacaagatggcatgcacaaacaatgcgatgagagccttgttcctcctggtcctcttctgcatcgtgcatggtgagaaggaagagtcaaagggcatcgatgcgaaagcgtccgggcctggtgggtccttcgacatcaccaagttgggcgcctccggcaatggcaagacatacagcacgaaggctgtgcacgaggcatgggcatcggcgtgcggcggcactgggaagcatacaatcctcatacccaagggcgacttccttgtcggacaactcaacttcacatgcccttgcaatggcgacgtgaccatccaggtggatggcaatctgctggcgaccacggacctaagccagtacaaggaccatggtaattggatcgagattctacgcgtggataacctggtcatcaccggcaagggaaac

SEQ ID NO: 81444 - DNA, 383 bp, Zea mays
accacgcgtccgcattaacgcgcaggtgctcgtggagatggagatcccggagatctacattgagtcgctgccaaagaaagggaagacgagcctgggcgacgccatctaccggagcatcaccgaggaaacgttcgacccgctggagttcttggccgggatggacctttcgacggagcacaaggtgctggacctcaagaaccgcatcgaggcctccaccgtgatctggaagcgcaagatgcagaccaaggactccaagtcctcgtggagctccatcgtcagcttcgagaagcgcgagcagttcgaggagcgcgccgagaccatcctccacctgctcaagctccagttccccggcacgccgcagtcgcagctcgacatctccaaga

SEQ ID NO: 81445 - DNA, 406 bp, Zea mays
  unsure (1)..(406): unsure at all n locations
aattcaagtaacacagttgagcacgacgatgggatccctcgctaataacatcatggtcgtgggcgccgtccttgcagcacttgtcgtccgcgggtcgtgctggcccccgaacgtgccgcccggccccaacatcaccaccaactacaacggcaaatggctcaccgccagcgccacctggtacggtcagcccaacagtgccggcgctcctgacaacagcggtgcgtgcgggatcaagaacgtgaacctgccaccctacagcggcatgacggcgtgcggcaacgtccccatcttcaacgacggcaagggctgtggctcatgctacgatgtgagatgcaaggaaaaacctgaatgctcgggcaatccagtcacngtgttcatcacagacatgaactacgagcctatcgct

SEQ ID NO: 81446 - DNA, 324 bp, Zea mays
cacgcatccggtcgtacgagaacctttctccctcctccacctttctccttttcttgccacggcaaaacaccttcgccggcgagagcatggcgatggcgtaccgtgtcctggaggtcaccctggtgtcggcaaatgacctcaagaaagtgtcgctcttctcccggactcgcatctacgccgtggcttccatctccggattcgacctccgcatcccttcccacagcacccaagcagaccacagcaacggctgcaacccctgctggaacgccgtggtacacttccccatcccggctgccgctgacacccgcggcctcgcactccacg

SEQ ID NO: 81447 - DNA, 387 bp, Zea mays
  unsure (1)..(387): unsure at all n locations
accacgcgtccggcgacagccccaacacggacggcatccacatcggcgactccagcaacgtgaccatcagcagcaccaccatcggcgtcggcgacgactgcatctccatcggccccgggagcaagatgatccgcatccatggcgtcaagtgcggcccaggccacggcatcagcgtcggcagcctggggcgctacaaggacgagaaggacgtggaagacgtgcaggtgacggggtgcacgatcgccggcaccacgaacggcctgcgcatcaagtcgtacgaggactccaagtcgtcgctcaaggccagcaagttcctgtacganggcatcaccatggacaatgtctcctaccccatcatcatcgaccagaagtactgccccaacaaca

SEQ ID NO: 81448 - DNA, 370 bp, Zea mays
gtccaagcaagggaggaaggggcagctcgcgatcgacgccgagatcttcgaggtgacaccggcctttcacgtcgtcgaggtgaagaagtcggcaggcgacacgctggagtatgagatgttctgcagcaagggcctaagaccttcactcagcgacatctgctggagcagccgatctgaggagaacatggctccttcagtggttcagccatcataattgaagccatcctcttagaccgtctccagcactttatccatatggtctccccctcttagtcgattgttatttaagtgcagcctcttcggagatgcaattacaatccatcctctctttctttttccctttctcaaagagctaagaccttgctcgact

SEQ ID NO: 81449 - DNA, 354 bp, Zea mays
aacacgcgtccggagcaagaactcctgcaccaagaagtacgactgcaagatccttcccaactcgctggtgatggacttcgtgaacaacggggaggtgtccggggtcacgctgctcaactccaagttcttccacatgaacatgtaccggtgcaaggacatgctgatcaaggacgtgaccgtgacggcgcccggggacagccccaacacggatggcatccacatgggcgactcatccgggatcacgatcaccaacaccgtcattggcgtcggtgacgactgcatctccatcggccccgggacctccaaggtgaacatcaccggcgtgacctgcggccctggccacggcatcagcat

SEQ ID NO: 81450 - DNA, 375 bp, Zea mays
attcttcatccctctcttcattagcacgctaacttgtaatctgcaggatctaagcaaagacttgatttagttatggacggattggtaggcctcttgaaagttcgcgtggtccggggtatcaaccttgcctaccgcgacgcaagaggcagcgatccgtatgtcgtcctacggcttggcaagaagaaactgaagacaagcgtgaagaagagatccgtgaaccccatatggcaagaggagctaactctgaacgtcacagattccagccaaccactgaagctggaagtgttcgacaaggacaccttcaacaaagacgaccccatgggagacgcggaggtggacgtggcgccactgatggaggcggtgagcatgaacccg

SEQ ID NO: 81451 - DNA, 338 bp, Zea mays
accacgcatccgcagcagatgaggttgttgactgttcccatgggcggtcactgtgggaacttgctgaagtgaagtacgagccgctgtggatcaaaggcggaaaccactgcaacctagaactgtacccggaatacatcaaacatctgaagaagttcgttggagccatagagaaatcgccacccccacctccgatcgacgagtgcatggagagctcaagcccgtcggattgtaccccagcagaacccgagtgtacagcggactcaaggaagagcacggactgcagggacaaagcaaggccaagcatagatcagagacaaagcacggaccggcgggacaag

SEQ ID NO: 81452 - DNA, 381 bp, Zea mays
gtccaccgacccgtccgagacaagatggcatgcacaaacaatgcgatgagagccttgttcctcctggtcctcttctgcatcgtgcatggtgagaaggaagagtcaaagggcatcgatgcgaaagcgtccgggcctggtgggtccttcgacatcaccaagttgggcgcctccggcaatggcaagacagacagcacgaaagctgtgcaggatgcatgggcatcggcgtgccggaggactgtgaagcagacaatcctcaataccaagggcgaattccttttccgacaactcaacttcacacggccttgcaaaggcgacgtgaacatccaagttgattgcaatctgctggcgaccacggacctaagccagtacaacgaccatggt

SEQ ID NO: 81453 - DNA, 432 bp, Zea mays
agaagagcaagatcctggtggtcggcggcacggggtacctgggcaggcacgtcgtggcggcgagcgcgcggctgggccaccccacctcggcgctcgtcagggacacggcgccgtccgacccggccaaagcggcgctgctcaagaccttccaggacgccggtgtgacgctcctcaagggcgacctgtacgaccaggctagcctggtgagcgcggtgaagggcgcggacgtggtcatctccgtgctcggatcgatgcagatcgccgaccagagccggctcgtcgacgccatcaaggaggccggcaacgtcaagaggttcttcccgtcggagttcggcctggacgtggaccgcacgggcatcgtggagccggccaagtccatcctaggcgccaaggtgggcatccgccgcgccaccgaggccgcgggcataccct

SEQ ID NO: 81454 - DNA, 271 bp, Zea mays
tatattatgttcgacggtgtaacaccctgaatttgagggtataaaatttattctccaaataccaaccaaattcaggggttacctcttgtctctctctctctcttttccttttgattaaaagtaagtgaattaggcgagggtttaattatttattttgtcaaaacttatgtgagtcatgaaatgttgcatcatgctgagcctaaattattcttttgtttgatgcacatgtttgaattggtttgaatttgaaatttggtttgagtttgatttg

SEQ ID NO: 81455 - DNA, 403 bp, Zea mays
cagacaatcccatcttcatcgacatgaagtactgccccaacaagttgtgtactgccaacggcgcctctaaggtcaccatcaaggatgtcaccttcaagaacatcaccagcacctcctcaaccccggaggccgttaccctgctctgcactgccaaggtcccatgcaccggcttcaccatggatgacgtcaacgtcgagtatagcggcactaacaacaagaccatggctatatgcacgaacgccaacggcagcaccaacggttgcctcaaggagcttgcatgcttctagaccctccatctactgacccatctctctaattataatttttctctcgtccttgcattgcccattagatgctatccattggtaacgcacaacagtaaaacgacacacatccgtcagct

SEQ ID NO: 81456 - DNA, 342 bp, Zea mays
gatgagcaccaaggaggtggacgagcagatgatcaacgtgcagaacaagaactcctcctacttcgtggagtggatccctaacaacgtcaagtccagcgtgtgcgacatcccacccgtcgggctgtccatgtcctccaccttcgtgggcaactccacctccatccaggagatgttccgccgcgtgagcgagcagttcacggctatgttccggcgcaaggccttcctgcattggtacaccagcgagggcatggacgagatggagttcaccgaagccgagagcaacatgaacgacctcgtcgccgagtaccagcagtaccaagacgccacagccgaggagtacga

SEQ ID NO: 81457 - DNA, 391 bp, Zea mays
  unsure (1)..(391): unsure at all n locations
agtcgtcatctcactcaccccgccttcacgcctccctcaccaaataaggtcccgcccttttccgacattcacaggggggacaggaaatcagcggccatggcctcgattccggcgacgaccttcgccgtcatcttatccgtcctcttctgtgccgcggctggcaccgccgtcgacaacgacctccccgactacgtcatccagggccgcgtctattgcgacacctgccgcgccgggttcgtgaccaatgtcaccgagtacatcgcgggcgccaaggtgaggctggagtgcaagcacttcggcaccggcaagctcgagcgctccatcgacggngtgaccgacgggaacggcacgtacacgatcgagctcaaggacagcacgangaggacatctg

SEQ ID NO: 81458 - DNA, 342 bp, Zea mays
accacgcatccgcccacgcgtccggaggaacggcgccatcatcctgtcggtgcggccgagcgccacgaactgcctcgccgacgagagccacgtgtgctggaggaacggcaagttcgcgcaggacatgatcctccggctcaggaacgtggagagcggggagattcagctgcagctgcagtggctcagcatccctcctgctgcagccagcaggtgaaggaaacgaagcaatcgcattttcaacctctttgtgaatgtcggattgtaacaacttaaaccagcaattaatggggtcagggtcagtcagggtagttcatgtgttgccctattaatggtacattgggg

SEQ ID NO: 81459 - DNA, 364 bp, Zea mays
agcgcctacttcgtcccacgctccgtctttatttgtaatctgaagcttacaggaacatttgagtggatcatggacggattggtaggcctcttgaaagtccgggtggtgaggggcatcaaccttgcctaccgcgacgcaagaggcagcgatccgtatgtcgtcctacgacttggcaagaagaaacttaagacgagcgtgaagaagagatctgtgaaccccatctggcacgaggagctaactctgaccgtcacagatcccagcctagctctgaagctggaggtgttcgacaaggacacgttcagcagggacgacccgatgggggacgcggagatcgacgtggcgccgctggtggaggcggcgaacg

SEQ ID NO: 81460 - DNA, 409 bp, Zea mays
agaataacacaggtgagcgcgacgatgggatccctcgttaataacatcatggtcgtgggcgccgtccttgcggcgctcgtcgccggcgggtcgtgcgggcccccgaaggtgccacccggccccaacatcaccaccaactacaacggcaagtggctcaccgctagggccacctggtacggtcagcccaacggtgccggcgctcctgacaacggcggtgcgtgcgggatcaagaacgtgaacctgccaccctacagcggcatgacggcgtgcggcaacgtccccatcttcaaggacggcaagggctgcggctcatgctacgaggtgagatgcaaggaaaaacctgagtgctcgggcaatcgagtcacggtgtacatcactgacatgaactacgagcctatcgctcccctac

SEQ ID NO: 81461 - DNA, 395 bp, Zea mays
aacgagagtgcgtgcgtgcagccacaggcaggcgtcggcaccatgtcttctttcaccggcacgcatgacaagtgcgcggagtgcgacaagaccgtccacttcatcgacctcctcacggccgacggcgtcacctaccataagacatgcttcaagtgcagccactgcaaagggatcctctcgatgtgcagctactcttccatggacggtgtgctgtactgcaagacccacttcgagcagctcttcaaggagaccgggagcttctccaagaacttcacgccaggtggcaagtcttcagacaagggtgaactgacaagggcccccagcaagctatcatctgcgttttctggtactcaggataagtgtgcagcttgccagaaaacagtgtacccgctgga

SEQ ID NO: 81462 - DNA, 424 bp, Zea mays
gggtcgagcacgcgtccgaacatctgcgtcaagtccggcgcctccaaggtggccgtcaacgacgtcgtcttcaagaacatccacggcacctccaacacgccggaggccatcacgctcaactgcgccaacaacctgccctgccagggcgtgcagctcatcaacgtcgacatcaagtacaacaggtccgacaacaagaccatgtccgtctgcaagaacgccatcggcaagtccattggcatggcgaaggagctcgcctgcgtctgaacctacttgcatccatcactcactcttcgtcacctctctctttctcactctcgccagtctttttttaggcctctggcaatctgcgaactttcttattcattctactagtgtggatctataattccattcaaaataaaaaaaaaaaaaaagggcggccgct

SEQ ID NO: 81463 - DNA, 391 bp, Zea mays
gaacgtcgtacgagaacctttctccctcctccacctttctccttttcttgccacggcaaaacaccttcgccggcgagagcatggcgatggcgtaccgtgtcctggaggtcaccctggtgtcggcaaatgacctcaagaaagtgtcgctcttctcccggactcgcatctacgccgtggcttccatctccggattcgacctccgcatcccttcccacagcacccaagcagaccacagcaacggctgcaacccctgctggaacgccgtggtacacttccccatcccggctgccgctgacacccgcggcctcgcactccacgtgaggctccgcgcccagcgtctatacctgggcgattgcgacatccgcgaagtgtttggtgccaaccaacaact

SEQ ID NO: 81464 - DNA, 374 bp, Zea mays
aaagataatgcagatgactgtcgccttcaaccacttcggcagaagcctcgtgcagacgatgccaaggtgccgctggggcttcttccacgtggtcaacagcgactacacgcactggctcatgtacgccatcagcggcagcaatgcccccaccatcatcagccatggcaatcgctacatcgcgccgcccaaccttgccgcgacgcaggtcatcaagcagcatgacacgccggagtcggtgtggaagaactgggtgtggcactccgagaacgacctcctcatggaatgcgcccaacttaacgtcaacgggcggcaaaatcaacaggaatttcaacactacggacctcatcatgccaaggaacggttccaacttcaca
